United States Patent Application Publication US 2025/0084491 A1 - sequence listing, part 30

SEQ ID NO: 568885 - DNA, 75 bp, synthetic construct
  source 1..75: mol_type = other DNA
gagtgggaagcgaaaatcctggaactggctggcttcctggattcttacatttccggaaccagagcgtgcgattga

SEQ ID NO: 568886 - DNA, 75 bp, synthetic construct
  source 1..75: mol_type = other DNA
ttggatgcgaaagcgcgcgatctgcgcttattcacccgttggatgcgaaagcgcgcgatctgcgccgtggcgaca

SEQ ID NO: 568887 - DNA, 75 bp, synthetic construct
  source 1..75: mol_type = other DNA
caaaaccgcacgttaacgtgggtactatcggccacgttgaccagggtaaaaccaccctgaccgctgcaatcacga

SEQ ID NO: 568888 - DNA, 75 bp, synthetic construct
  source 1..75: mol_type = other DNA
gtcgtatccgcatggaggtggctcatgattaaaacctacgatgtgcatatggatcccctcgaacgcacaagccag

SEQ ID NO: 568889 - DNA, 75 bp, synthetic construct
  source 1..75: mol_type = other DNA
tttcactggctggtatgtcgccaaaatccagcaatatgacggcaaagtcaggcattaatacagcagatacaagca

SEQ ID NO: 568890 - DNA, 75 bp, synthetic construct
  source 1..75: mol_type = other DNA
tatcggccacgttgaccagggtaaaacaactctgaccgctgcaatcactaccgtactggctaaaacctacggcgg

SEQ ID NO: 568891 - DNA, 75 bp, synthetic construct
  source 1..75: mol_type = other DNA
gcgtgatcactgatgtcgcaaacggggatgtttcaagcacaagctctgatgctgtgaacggctcgcaactctata

SEQ ID NO: 568892 - DNA, 75 bp, synthetic construct
  source 1..75: mol_type = other DNA
caaaaccgcacgttaacgtaggtactatcggccacgttgaccaaggtaaaaccactctgaccgctgcaatcacta

SEQ ID NO: 568893 - DNA, 75 bp, synthetic construct
  source 1..75: mol_type = other DNA
tatcggccacgttgaccaaggtaaaaccaccctgaccgctgcaatcaccaccgtactggctaaaacctacggcgg

SEQ ID NO: 568894 - DNA, 75 bp, synthetic construct
  source 1..75: mol_type = other DNA
tatcggccacgttgaccaaggtaaaaccacactgaccgctgcaatcacaaccgtactggctaaaacctacggcgg

SEQ ID NO: 568895 - DNA, 75 bp, synthetic construct
  source 1..75: mol_type = other DNA
tatcggccacgttgaccaaggtaaaacaacactgaccgctgcaatcaccaccgtactggctaaaacctacggcgg

SEQ ID NO: 568896 - DNA, 75 bp, synthetic construct
  source 1..75: mol_type = other DNA
gtcaacaacaacgacgcggtgaactacgcgcagttgaagcaaagcgtgcaggaaacgaagcaatacaccgatcag

SEQ ID NO: 568897 - DNA, 75 bp, synthetic construct
  source 1..75: mol_type = other DNA
tgggtgcgaaaaccatcgtgaatggcgataaaggtattggtatcggttatggtgcctacgtggacgcgaatgcac

SEQ ID NO: 568898 - DNA, 75 bp, synthetic construct
  source 1..75: mol_type = other DNA
gcggtgctggagcctacaatgccagccatgacggtaaagccagcatcatcactaatgtcgctaatggcagtatta

SEQ ID NO: 568899 - DNA, 75 bp, synthetic construct
  source 1..75: mol_type = other DNA
gaagactcgctggcaatgggggcgaaaactgtcgttaatggtaatgcaggtattggtatcggtttgaacactctg

SEQ ID NO: 568900 - DNA, 75 bp, synthetic construct
  source 1..75: mol_type = other DNA
aatggcgtggtgattggttatgacaccactgacggcgaactgctaggtgcattgtcaattggtgatgacggtaaa

SEQ ID NO: 568901 - DNA, 75 bp, synthetic construct
  source 1..75: mol_type = other DNA
atgctgttaacggctctcagctgaaaaccaccaacgatgctgtggcgacgaataccaccaatatcgccaataaca

SEQ ID NO: 568902 - DNA, 75 bp, synthetic construct
  source 1..75: mol_type = other DNA
caaaaccgcacgttaacgtcggtactatcggccacgttgaccagggtaaaaccacgctgaccgctgcaatcacga

SEQ ID NO: 568903 - DNA, 75 bp, synthetic construct
  source 1..75: mol_type = other DNA
acaccgtggcggcatatgaccaaacgccagcgtaaaaaccgcagacgcgttaaccgccttattgaattgtggcct

SEQ ID NO: 568904 - DNA, 75 bp, synthetic construct
  source 1..75: mol_type = other DNA
cgctttcctcctgggatgagcaactggatgtcattgttaccaacccgccgtttggtggcacggaagaagacggta

SEQ ID NO: 568905 - DNA, 75 bp, synthetic construct
  source 1..75: mol_type = other DNA
cctgcataccatcgtgcgtttaccgaatggtgtgtttaacccctataccggcattaaaaccaacctgttgttctt

SEQ ID NO: 568906 - DNA, 75 bp, synthetic construct
  source 1..75: mol_type = other DNA
tgcaattaataaaatttcagttcagccttaattaccaggaagaaagcttgagttatcagcgactggttacgcatc

SEQ ID NO: 568907 - DNA, 75 bp, synthetic construct
  source 1..75: mol_type = other DNA
caggaacagcaggaggcagaaacgcggctgatggcgctgaatgagaagcacaagcgccagcgccgggcagcaaag

SEQ ID NO: 568908 - DNA, 75 bp, synthetic construct
  source 1..75: mol_type = other DNA
aaccgaaaggcatttacggcacgcagccagaaacgacgcaggcggtgcagcagcaggataaaaccacatcggcgc

SEQ ID NO: 568909 - DNA, 75 bp, synthetic construct
  source 1..75: mol_type = other DNA
gcgccggttgcgctgctggatttcgccgcctctgcccgtctggcggtcggtgaagcgttaaccaacatcgccgca

SEQ ID NO: 568910 - DNA, 75 bp, synthetic construct
  source 1..75: mol_type = other DNA
cagcgtcttctatggcgtctggtcagtctgatgccgacctcgactttgcttccgtacagcgcgacaacccggaga

SEQ ID NO: 568911 - DNA, 75 bp, synthetic construct
  source 1..75: mol_type = other DNA
ctcctgctggtgaccccgcgtcctggcaccatctctccctggtcttcgaaagcgaccgatattgcccataactgc

SEQ ID NO: 568912 - DNA, 75 bp, synthetic construct
  source 1..75: mol_type = other DNA
tgaagagcgtcgccgatcatcagacgctgcaacaacagatccacggtgttgagaaaaaacagcttccgcacctgc

SEQ ID NO: 568913 - DNA, 75 bp, synthetic construct
  source 1..75: mol_type = other DNA
gaaaaacggtacgctactgcgtcaggtgatcaacaagctgaacgaaattgactttaccagcgccagcgaacgcca

SEQ ID NO: 568914 - DNA, 75 bp, synthetic construct
  source 1..75: mol_type = other DNA
aaagactctatgtcgatgaaaacccgctggcaggaaggtagcgaagagcgcgaaatgacgtcgccgctgtcgctg

SEQ ID NO: 568915 - DNA, 75 bp, synthetic construct
  source 1..75: mol_type = other DNA
ttgttcagccgcatgcttgatcccttcatgcaatattcctgcgcttactggaaagatgccgataatctggaatct

SEQ ID NO: 568916 - DNA, 75 bp, synthetic construct
  source 1..75: mol_type = other DNA
caaaaccgcacgttaacgtcggtactatcggccacgttgaccaaggtaaaacaactctgaccgctgcaatcacta

SEQ ID NO: 568917 - DNA, 75 bp, synthetic construct
  source 1..75: mol_type = other DNA
ccgcacagctggttaacaaactgacgctggacgcgaccgatccgctctcgaaagagacggacttcaagaagtgcg

SEQ ID NO: 568918 - DNA, 75 bp, synthetic construct
  source 1..75: mol_type = other DNA
ctgaaagcgctggaaggcgacgcagagtgggaagcgaaaatcctggaactggactggcttcctggattcctacat

SEQ ID NO: 568919 - DNA, 75 bp, synthetic construct
  source 1..75: mol_type = other DNA
caaaaccgcacgttaacgtgggtactatcggccacgttgaccaaggtaaaacaacgctgaccgctgcaatcacca

SEQ ID NO: 568920 - DNA, 75 bp, synthetic construct
  source 1..75: mol_type = other DNA
acggggaaaaccaaatccctgatatgtctttctggacggttactggtggcaatggaaattttgtgattcgtcaac

SEQ ID NO: 568921 - DNA, 75 bp, synthetic construct
  source 1..75: mol_type = other DNA
ttcagttcaccagttctgctgtaggggatggtgtgaattttattgccgtcagaccgcgaaatattgcatttaact

SEQ ID NO: 568922 - DNA, 75 bp, synthetic construct
  source 1..75: mol_type = other DNA
ggtttgggagaaggtgctccagctattggcgttccgttcttctggccgtccgctgcaatgccaaatactgtaatc

SEQ ID NO: 568923 - DNA, 75 bp, synthetic construct
  source 1..75: mol_type = other DNA
cgatctcgcgccgttcgacgactatcacaaagcgcgtggtattcgctggccagtggttaacggtaaagaaaccca

SEQ ID NO: 568924 - DNA, 75 bp, synthetic construct
  source 1..75: mol_type = other DNA
agctctcgaaaaccttggtttgggagaagcggcgaaacgaaatgtgggaacaggggaaaatcagataccggacat

SEQ ID NO: 568925 - DNA, 75 bp, synthetic construct
  source 1..75: mol_type = other DNA
aggggagcaacggagctttgccggttaatcaaggtggtaccggcgcaacgaatgccgcagacgctcgcacaaacc

SEQ ID NO: 568926 - DNA, 75 bp, synthetic construct
  source 1..75: mol_type = other DNA
gacaaagacgaaattgtagcttttgattggaatggaactgatgttcgactggaatcaatgggctatactcgtgat

SEQ ID NO: 568927 - DNA, 75 bp, synthetic construct
  source 1..75: mol_type = other DNA
taaaagtattttttaatctgtcattttatgccgctcgtggtatagccaagaatattagaataaaaatgtctctga

SEQ ID NO: 568928 - DNA, 75 bp, synthetic construct
  source 1..75: mol_type = other DNA
gcaaccgaaaggaaactacgtcattacagacgccaccatgaaacagtcgttatctgatgcactttcatgcagata

SEQ ID NO: 568929 - DNA, 75 bp, synthetic construct
  source 1..75: mol_type = other DNA
accctaccctctaggtaaacaatccgttggctggctcgaatccgaacttgacgattgggttttgcagcgcaaaca

SEQ ID NO: 568930 - DNA, 75 bp, synthetic construct
  source 1..75: mol_type = other DNA
cggctttaacaccggaatggaaaaagccaataccgaagagttctgtattagctgccacgaaatgcgcaacacggt

SEQ ID NO: 568931 - DNA, 75 bp, synthetic construct
  source 1..75: mol_type = other DNA
tcccaaatcgttgaaggggtttctaatacgacacagattagaaaactatgtgatgaagaaccaagggaatatagt

SEQ ID NO: 568932 - DNA, 75 bp, synthetic construct
  source 1..75: mol_type = other DNA
tagcgggcgcactcagaccgtgcgcatggtgctgattaccagcagcacggacaatatcaccctgaaaatcgaccc

SEQ ID NO: 568933 - DNA, 75 bp, synthetic construct
  source 1..75: mol_type = other DNA
tgtagctggtcttctcgcataccttggtttgggagagggagcaaaattaggcgcagcggtgtgtgtgaccggctc

SEQ ID NO: 568934 - DNA, 75 bp, synthetic construct
  source 1..75: mol_type = other DNA
gacactgccggatatagcggactcactgacatcccgaattaacgatcactttcaggtgctcacacccgcatcttg

SEQ ID NO: 568935 - DNA, 75 bp, synthetic construct
  source 1..75: mol_type = other DNA
tcgaacaccagttggggaatgtggaataacgacaccggagccgctatcgctctacctgtcacacaaggggggaca

SEQ ID NO: 568936 - DNA, 75 bp, synthetic construct
  source 1..75: mol_type = other DNA
ctgccgaagaatacccggaactggcaaaggcttacccgacaaataaattacctgatttacgcggtgagtttattc

SEQ ID NO: 568937 - DNA, 75 bp, synthetic construct
  source 1..75: mol_type = other DNA
ggtttgggagaagcggcaaaacggaatgtaggtaacgggcaaaaccaaattccggatatggcggcgtttgccagt

SEQ ID NO: 568938 - DNA, 75 bp, synthetic construct
  source 1..75: mol_type = other DNA
ctgggataaattgatgtatacgttgcgcaccatttcagaaattcgtgccgggggggtgctggtgctggataacgg

SEQ ID NO: 568939 - DNA, 75 bp, synthetic construct
  source 1..75: mol_type = other DNA
caggtttaatacctacccttctgattctggcgtttttacaaccagcgtcatcggagatgcttcatctgattcaat

SEQ ID NO: 568940 - DNA, 75 bp, synthetic construct
  source 1..75: mol_type = other DNA
gacacctgacccggcacagacaaaacttattaaccagaaacgcattgctccgctgaatcttctgagtgttgaccc

SEQ ID NO: 568941 - DNA, 75 bp, synthetic construct
  source 1..75: mol_type = other DNA
ggtgtaaccagcagcatgttaaaaattagctgcccgaaagaagtagctggtgtaaaactctcgttgatcaccaat

SEQ ID NO: 568942 - DNA, 75 bp, synthetic construct
  source 1..75: mol_type = other DNA
ataatccgacactcaccggagagccaaaagcgccgacaccgcccgcaggaagtaacaccacacggattgcgacca

SEQ ID NO: 568943 - DNA, 75 bp, synthetic construct
  source 1..75: mol_type = other DNA
accctgaaaatcgaccctgccgtcgtgctggcaacccgcaagtatgtggatgacaaggtactggagctgaaggtg

SEQ ID NO: 568944 - DNA, 75 bp, synthetic construct
  source 1..75: mol_type = other DNA
acgctggacacactgaaagaaatagctgcagccattaacaatgatccgaaattcagtaccaccattaacaatgcg

SEQ ID NO: 568945 - DNA, 75 bp, synthetic construct
  source 1..75: mol_type = other DNA
tgccgatggagcagtttatggctctgaccaaaatcccgattctgatcatttacggcgataacattccggataaac

SEQ ID NO: 568946 - DNA, 75 bp, synthetic construct
  source 1..75: mol_type = other DNA
gcagctttgtcttcccggaaaaagaactccctgcccctatgccaagcgcgtttgacacgctgaagggtgagcctg

SEQ ID NO: 568947 - DNA, 75 bp, synthetic construct
  source 1..75: mol_type = other DNA
acttcaggagctgctgaacgcttccaaaaatctggagccgacttcgcctgagctaattgcggctcttaatgaggc

SEQ ID NO: 568948 - DNA, 75 bp, synthetic construct
  source 1..75: mol_type = other DNA
ccgcggccattaacaatgacccgaaattcagcaccaccattaacaatgcgctgtcaggcaagcagccactggatg

SEQ ID NO: 568949 - DNA, 75 bp, synthetic construct
  source 1..75: mol_type = other DNA
cttggtttaggagaaggctcagcattgcctgttggcgtacctgttccgtggccctcagccactccgccaacaggc

SEQ ID NO: 568950 - DNA, 75 bp, synthetic construct
  source 1..75: mol_type = other DNA
ggatgtagctggtcttctcgcataccttggatttggagaacggttactggaggctgatgggtactttgaattacc

SEQ ID NO: 568951 - DNA, 75 bp, synthetic construct
  source 1..75: mol_type = other DNA
tgccgttgtgctggcaacccgcaagtatgtggatgacaaggcactggagctgaaggtgtacgtggatgaccagat

SEQ ID NO: 568952 - DNA, 75 bp, synthetic construct
  source 1..75: mol_type = other DNA
ggtttgtgactcgaaaggcgttatctatcagggtcgagagccgaacatggcggaaaccaaagccgcttatgcggt

SEQ ID NO: 568953 - DNA, 75 bp, synthetic construct
  source 1..75: mol_type = other DNA
acctcgaagacattaaagcgccagaatgcttctatattgagcagaaactgcgccagcggatgaacattccggtat

SEQ ID NO: 568954 - DNA, 75 bp, synthetic construct
  source 1..75: mol_type = other DNA
ttgcgaatattgaaacgccgcagcgatgccatttatctcacggaaatgggcgcatttatcgcgcggcgcatcagt

SEQ ID NO: 568955 - DNA, 75 bp, synthetic construct
  source 1..75: mol_type = other DNA
attgctgaactggctcatgcggaacagagcgaagtggttgcttctgcctatggcgatcaggatctgagctttggc

SEQ ID NO: 568956 - DNA, 75 bp, synthetic construct
  source 1..75: mol_type = other DNA
atgcaatgatttgcggtacggtgggcgattatcatgaacactttagcgtggtgaaaaatgtctttggttatcgcg

SEQ ID NO: 568957 - DNA, 75 bp, synthetic construct
  source 1..75: mol_type = other DNA
ttttccttggctgctccggcccgaaagtgctcacccaggaaatggtgaagaaaatggctcgcgcgccgatgatcc

SEQ ID NO: 568958 - DNA, 75 bp, synthetic construct
  source 1..75: mol_type = other DNA
tgccacgacaataactaactcccttgcggggaagcagccaaaggatgctactttaacggcgttggcagggctttc

SEQ ID NO: 568959 - DNA, 75 bp, synthetic construct
  source 1..75: mol_type = other DNA
agcactgacgtcaccgctaatctgcgaatataaaaccattaatgaatataatgtatcccgttttttcaatgagat

SEQ ID NO: 568960 - DNA, 75 bp, synthetic construct
  source 1..75: mol_type = other DNA
attcagtaccaccattaacaatgcgctggcacaaaaagcgccgctgtcgagtcctgcactcaccggaacgccaac

SEQ ID NO: 568961 - DNA, 75 bp, synthetic construct
  source 1..75: mol_type = other DNA
tggcgatcaggatctgagctttggaccggaatacatcattccaaaaccgttcgatccacggttgatcgttaagat

SEQ ID NO: 568962 - DNA, 75 bp, synthetic construct
  source 1..75: mol_type = other DNA
tggcgatcaagatctgagtttcggcccggaatacatcattccaaaaccgtttgatccgcgtttgatcgttaagat

SEQ ID NO: 568963 - DNA, 75 bp, synthetic construct
  source 1..75: mol_type = other DNA
taactgcactgacaagtgttgggcgtaccattcttagcaggcccagcgcacagggcgttcttgattatcttggtt

SEQ ID NO: 568964 - DNA, 75 bp, synthetic construct
  source 1..75: mol_type = other DNA
gaagcgcgtggtgctgccggaaggggaagaggcgcgcgttttgcacgcgactcaggaactggtaacgctgggact

SEQ ID NO: 568965 - DNA, 75 bp, synthetic construct
  source 1..75: mol_type = other DNA
ctgaaatgcaatggtgcgcctttttctgccgaagagtatccggaactggcaaaagtttatccgacaaatgaattg

SEQ ID NO: 568966 - DNA, 75 bp, synthetic construct
  source 1..75: mol_type = other DNA
tgaaggtgtacgtggatgacctgatggcaaaacatcttgctgcacaggacccacattcacagtacgcgcaaaaag

SEQ ID NO: 568967 - DNA, 75 bp, synthetic construct
  source 1..75: mol_type = other DNA
aatacacagattgccaccacggcttttgtgaaatcggcaattgcggcaatggtgggctctgctcctgcggcactg

SEQ ID NO: 568968 - DNA, 75 bp, synthetic construct
  source 1..75: mol_type = other DNA
gctataaaccgcaactggctgaaggcagcgggcgcacccagaccgtgcgcatggtgttgataaccagcagcacgg

SEQ ID NO: 568969 - DNA, 75 bp, synthetic construct
  source 1..75: mol_type = other DNA
ccagcccgatatttaccggaacccccaaagcgccgacgccagcggcggggaataataccacgcaacttgcgacca

SEQ ID NO: 568970 - DNA, 75 bp, synthetic construct
  source 1..75: mol_type = other DNA
tagtttttattccacagtaaacaatgcactgggacagaaggccgctctgtcagactttacatattccaaaaccag

SEQ ID NO: 568971 - DNA, 75 bp, synthetic construct
  source 1..75: mol_type = other DNA
gtgctttttacggaggtacctcagtccggaataacatcaacgtatctatgacatacgctaatgaccgaaatatcc

SEQ ID NO: 568972 - DNA, 75 bp, synthetic construct
  source 1..75: mol_type = other DNA
ggtgaacaacgtcctttgcttcccgtttatcttccgtggcgcgctggacgttggcgcaaccgccatcaacgaaga

SEQ ID NO: 568973 - DNA, 75 bp, synthetic construct
  source 1..75: mol_type = other DNA
tggcgctggcgaacccggaaccggaaattctgccgccgttggcgaaagaagtgcgtccggatgccatcatttgca

SEQ ID NO: 568974 - DNA, 75 bp, synthetic construct
  source 1..75: mol_type = other DNA
cagtaccaccattaacaatgcgctggcactgaaagcgccactgtcgagtccggcactcaccggaacaccaacagc

SEQ ID NO: 568975 - DNA, 75 bp, synthetic construct
  source 1..75: mol_type = other DNA
acaatatcaccctgaaaatcgaccctgctgtagtactggcaactcgcaagtatgtggatgataagacactggagc

SEQ ID NO: 568976 - DNA, 75 bp, synthetic construct
  source 1..75: mol_type = other DNA
tcggcgatggcggcggaacattgccaacaccggacgcaaagcagacagcactggtaaatgagaaacgccgggctg

SEQ ID NO: 568977 - DNA, 75 bp, synthetic construct
  source 1..75: mol_type = other DNA
gagcgccagctcaggcggctaaacagtaagcggctccggcagcaggcccctgcatcagcggctggcgtgaaagaa

SEQ ID NO: 568978 - DNA, 75 bp, synthetic construct
  source 1..75: mol_type = other DNA
cggcgcactgattatgattttcgattccgccgacggtgcagcagacgctgcacctgctcaggcagaagagaagaa

SEQ ID NO: 568979 - DNA, 75 bp, synthetic construct
  source 1..75: mol_type = other DNA
gccaaacccgcacaacttcctcgcgaccgttgcgcacatcatcacttacggcaaaccgccgaagctggatgataa

SEQ ID NO: 568980 - DNA, 75 bp, synthetic construct
  source 1..75: mol_type = other DNA
atggaaagtggtcatcgctttgatgctcagacgctgcacagttttattcaggctgtatttcgtcagatgggtagc

SEQ ID NO: 568981 - DNA, 75 bp, synthetic construct
  source 1..75: mol_type = other DNA
cacctgctcaggcagaagagaagaaagaagcagctccggcagcagcacccgcggctgcggcggcaaaagacgtta

SEQ ID NO: 568982 - DNA, 75 bp, synthetic construct
  source 1..75: mol_type = other DNA
gcgcgccagctcaggcggctaaacagtaagcggctccggcagcaggcccatgcatcagcggctggcgtgaaagaa

SEQ ID NO: 568983 - DNA, 75 bp, synthetic construct
  source 1..75: mol_type = other DNA
ttatttttcttgcctatggaatggcttctcccgcgttctcttcacagactgccacattaacgattaatggcagga

SEQ ID NO: 568984 - DNA, 75 bp, synthetic construct
  source 1..75: mol_type = other DNA
taccacatccgatccgtttttggctgtcatcgtcactcataaagtcgcatgtttttactgatgacaacggcatcc

SEQ ID NO: 568985 - DNA, 75 bp, synthetic construct
  source 1..75: mol_type = other DNA
gtcctgatggctgacaacatcatcccggcaccaacgcgccgccataccggtattgcagctgcacggcgtgcagca

SEQ ID NO: 568986 - DNA, 75 bp, synthetic construct
  source 1..75: mol_type = other DNA
atgactggagataacaccctcatccattctcacggcattaatcgccgtgatttcatgaagctttgtgcagcatta

SEQ ID NO: 568987 - DNA, 75 bp, synthetic construct
  source 1..75: mol_type = other DNA
gctaaagagggcggcaacgtctctgcaggcgctattggtttgctcggcggtgtggttgggctcgttgccggtgtc

SEQ ID NO: 568988 - DNA, 75 bp, synthetic construct
  source 1..75: mol_type = other DNA
aacttacggcaactgctcaacgctgcaattctgcgatgttggcggcgtgtggccggtagcgattggtcacccatg

SEQ ID NO: 568989 - DNA, 75 bp, synthetic construct
  source 1..75: mol_type = other DNA
tacaaaccagtcccgatgccattcttaactgcatgaccactatcatcatcaacccggaactgttcggcgcgccgg

SEQ ID NO: 568990 - DNA, 75 bp, synthetic construct
  source 1..75: mol_type = other DNA
gacctgggaacaggcgcaacagtggcgcgatgcaggcattcagcaggtggtttatcaccgcagccgtgacgcgta

SEQ ID NO: 568991 - DNA, 75 bp, synthetic construct
  source 1..75: mol_type = other DNA
ttttagcatttgtatttgcgcccacccatgggcttttggcaaatcgtcggcgtgcgcataaagcgctggaggatc

SEQ ID NO: 568992 - DNA, 75 bp, synthetic construct
  source 1..75: mol_type = other DNA
atccacaaataaaattaatggcttccccgtggagtccaccggcattcatgaagactaattatgatatgaacggag

SEQ ID NO: 568993 - DNA, 75 bp, synthetic construct
  source 1..75: mol_type = other DNA
ggacaggatctacgtcaaaaatgccagcgcgccagcgcgccaaccgcgttgccgctgcggacatggcgacacctt

SEQ ID NO: 568994 - DNA, 75 bp, synthetic construct
  source 1..75: mol_type = other DNA
tgaccgtaatttgctgtgcggatatcaacaccgccaaaggcgcgctggacgtggcaaaagagtttaacggcgacg

SEQ ID NO: 568995 - DNA, 75 bp, synthetic construct
  source 1..75: mol_type = other DNA
gccgaagaagttgacattatcgaagtgggcaccattctttgcgtaggcgaaggcgtgcgtgcggttcgtgacctg

SEQ ID NO: 568996 - DNA, 75 bp, synthetic construct
  source 1..75: mol_type = other DNA
ggctgaaacgcatgactggcctgcagtcacctgaagaaggtttgttccaggcaacgacacaaacagcaggtaaag

SEQ ID NO: 568997 - DNA, 75 bp, synthetic construct
  source 1..75: mol_type = other DNA
tgatgccgaatggttagaagcgatcgatttctctcgttatgatctgattctggccgatgttcgctggcatagcgg

SEQ ID NO: 568998 - DNA, 75 bp, synthetic construct
  source 1..75: mol_type = other DNA
tcgccgcatgatgaagataagccgattttgctgccaggcgaatgggaagtgaatatgcgccgtgaacggcaggag

SEQ ID NO: 568999 - DNA, 75 bp, synthetic construct
  source 1..75: mol_type = other DNA
atccctggaatcagcaatttatggttgagctggaggtttttttttcgcctcgtcaaccagcgtgtagtgaattaa

SEQ ID NO: 569000 - DNA, 75 bp, synthetic construct
  source 1..75: mol_type = other DNA
gcgttgccgggtgctggatggcgataaagagatcgcgttaacgctgccgccgtcaggcgccagtacgttgctatg

SEQ ID NO: 569001 - DNA, 75 bp, synthetic construct
  source 1..75: mol_type = other DNA
cagtatgatggagctaacgaacgttatagtgaagagggtaagttactgtctaaatccgtctataaagacggaaaa

SEQ ID NO: 569002 - DNA, 75 bp, synthetic construct
  source 1..75: mol_type = other DNA
tcaatatctggaaagccagcataagctgacgagaggtcctctgactgacattccgctttacttgttgctggaacc

SEQ ID NO: 569003 - DNA, 75 bp, synthetic construct
  source 1..75: mol_type = other DNA
cggaaacgatgatctggcagcctgagttcacagataaaatactctccaggaaacccggggcggttcaaccagatt

SEQ ID NO: 569004 - DNA, 75 bp, synthetic construct
  source 1..75: mol_type = other DNA
ctttctgttccagcatcatcctgtcgtctggtcggtactgtggggatgctgtttcttttcacccttgccataccc

SEQ ID NO: 569005 - DNA, 75 bp, synthetic construct
  source 1..75: mol_type = other DNA
cgtctacacccacggcgaaatgttgcctgctcacggctacccggagctgcgtaaattcaagcatctggtcggtaa

SEQ ID NO: 569006 - DNA, 75 bp, synthetic construct
  source 1..75: mol_type = other DNA
atctggcagcctgagttcacagataaaacactctccaggaaacccggggcggttcactgtatacactgcgctgtg

SEQ ID NO: 569007 - DNA, 75 bp, synthetic construct
  source 1..75: mol_type = other DNA
aatttggccacctgaacagaggtgatatgctcacctcagaacaacacaggtgctccaatgaaaaaaagaaatttt

SEQ ID NO: 569008 - DNA, 75 bp, synthetic construct
  source 1..75: mol_type = other DNA
gagagcgacttttataaaagcatgaccacctactctgatcatactatctggcaggatgtttacagacccaggctt

SEQ ID NO: 569009 - DNA, 75 bp, synthetic construct
  source 1..75: mol_type = other DNA
ctatccgtactccggcaggaaacggctgctcatacgcgcaggggatgtgtggtaaaacggcggaaacttctgacc

SEQ ID NO: 569010 - DNA, 75 bp, synthetic construct
  source 1..75: mol_type = other DNA
gcggcactgaatatcaacttatcggatgcagacgcaacattgatgagggaaatggcagaggccctggagcgttaa

SEQ ID NO: 569011 - DNA, 75 bp, synthetic construct
  source 1..75: mol_type = other DNA
cctgtttgatgaatcaggtgcattgattgccgtgggcaactgcccggaaagctacaagccgcaactggctgaagg

SEQ ID NO: 569012 - DNA, 75 bp, synthetic construct
  source 1..75: mol_type = other DNA
tgcctgatcctgactctcgcctgtggtaaatatcgctttaacaaactcgagtttggcgatatcgaaggtctgccg

SEQ ID NO: 569013 - DNA, 75 bp, synthetic construct
  source 1..75: mol_type = other DNA
ctacggcagcggctggcagaatcagcaagttgagttcgctcgtttcccgggccctatcgtgatgacctctaactg

SEQ ID NO: 569014 - DNA, 75 bp, synthetic construct
  source 1..75: mol_type = other DNA
ggcgattggcgaaaacattctcggcctgcgtctgctgtgcctgtatggcctgaaaggtgcggcggcctatatgga

SEQ ID NO: 569015 - DNA, 75 bp, synthetic construct
  source 1..75: mol_type = other DNA
gttaatttggttgtcaatggcactagtgagtgtattaatgttgaggttgagccttttaaggaaggctcatttgag

SEQ ID NO: 569016 - DNA, 75 bp, synthetic construct
  source 1..75: mol_type = other DNA
tattgctttcgtcgccatttcccgtatgccgaaaatcagggcaacaagcgtaactggcagactgcacttgagtat

SEQ ID NO: 569017 - DNA, 75 bp, synthetic construct
  source 1..75: mol_type = other DNA
aggcggctgcgcggtaaattgtcgctactgtttccgtcgccacttcccgtatgccgaaaatcagggcaacaagcg

SEQ ID NO: 569018 - DNA, 75 bp, synthetic construct
  source 1..75: mol_type = other DNA
ccccatccagagaagattggttaacgcaacttgccgatgttgtgaccgatcctgatgaacttctgcgtcttttga

SEQ ID NO: 569019 - DNA, 75 bp, synthetic construct
  source 1..75: mol_type = other DNA
caacttattggcaaatgcgcattaattgacaaaaatgcgcagggctcagcattcggtgcatttatgtcagtattc

SEQ ID NO: 569020 - DNA, 75 bp, synthetic construct
  source 1..75: mol_type = other DNA
catatatttctgaaagcgcgactggttcaacggcccaagggattaaacgttcagttttagagaagttatgcatat

SEQ ID NO: 569021 - DNA, 75 bp, synthetic construct
  source 1..75: mol_type = other DNA
attggggaggaactcatccttggatgagttccggcgaattacacctaaaacaggtgtatgctgtagccgattata

SEQ ID NO: 569022 - DNA, 75 bp, synthetic construct
  source 1..75: mol_type = other DNA
cagtatcgcttcgataatataccggcactacctttcctctgatctttccgccccggcatcaccaccctacaccct

SEQ ID NO: 569023 - DNA, 75 bp, synthetic construct
  source 1..75: mol_type = other DNA
acctcctgtgcgatagacattgctcttccggcgcgcaatgcggacggcacgcaggacctcaaatttgccctgtgc

SEQ ID NO: 569024 - DNA, 75 bp, synthetic construct
  source 1..75: mol_type = other DNA
ctggtgtttttagtgatgcttactgcgttgatttgctcgtccgtgagaacttgaattcgctggacaaaacgtaca

SEQ ID NO: 569025 - DNA, 75 bp, synthetic construct
  source 1..75: mol_type = other DNA
ggataatgaagaacttgatgaattggccgacggcggcacagttgccggcctgacgcttgacgacgttgatcgcat

SEQ ID NO: 569026 - DNA, 75 bp, synthetic construct
  source 1..75: mol_type = other DNA
tactcgccgacaaaaatgaaaaaatagattcactctccaccagactggagaaaaaatcccgtattcagccgcctg

SEQ ID NO: 569027 - DNA, 75 bp, synthetic construct
  source 1..75: mol_type = other DNA
ctgatgaagaggtgaagaaactgcgggcagaagtgaccgcgttagcggttgaggcggaatctgccatcgccgttc

SEQ ID NO: 569028 - DNA, 75 bp, synthetic construct
  source 1..75: mol_type = other DNA
gaatgataacaatgagtttgaggtatgggatggggaagcgcgctgccatggttttggcaaagaaatcgccattaa

SEQ ID NO: 569029 - DNA, 75 bp, synthetic construct
  source 1..75: mol_type = other DNA
cagttcattacgcgtaattattcacaagcctttatggcttgaatggcattataaagataatgctggtcaatggca

SEQ ID NO: 569030 - DNA, 75 bp, synthetic construct
  source 1..75: mol_type = other DNA
atgttgaaacggataatactggcgatgacaactatgacggcctgcaccaggtgcgcgcctgtctgcgtggtcgtt

SEQ ID NO: 569031 - DNA, 75 bp, synthetic construct
  source 1..75: mol_type = other DNA
ctctgaatacaacgtcccggaacgctccagcttctgggatgatgagggttctcatctggactttacgaacccaca

SEQ ID NO: 569032 - DNA, 75 bp, synthetic construct
  source 1..75: mol_type = other DNA
ggatatactgaaggtaatgctctatggcttgaatgggagctggactgcacagctactacaattgagttaagaata

SEQ ID NO: 569033 - DNA, 75 bp, synthetic construct
  source 1..75: mol_type = other DNA
tattcgtgactctgaatacaatgtcccggaacgttccagcttctgggatgatgaaggttctcatctggactttac

SEQ ID NO: 569034 - DNA, 75 bp, synthetic construct
  source 1..75: mol_type = other DNA
gatcaatcaacatggcgacatcaatcacacccatgaggtgcttcaggatgacagcaagtgcgagatgattgttgg

SEQ ID NO: 569035 - DNA, 75 bp, synthetic construct
  source 1..75: mol_type = other DNA
ataaaacactctccaggaaacccggggcggttcacggcggcaactcaggtgtacgcgaaggtagctgggatctgg

SEQ ID NO: 569036 - DNA, 75 bp, synthetic construct
  source 1..75: mol_type = other DNA
cactaaaaacaccatccggtaagattgaaatatattccagccaattggcggaaattgcccgtacctgggagctgg

SEQ ID NO: 569037 - DNA, 75 bp, synthetic construct
  source 1..75: mol_type = other DNA
cagcggcgcgcgcgaaggttcatacagcttaccgtttgtccgtatgccgactctcgaaaacccgatccagaccag

SEQ ID NO: 569038 - DNA, 75 bp, synthetic construct
  source 1..75: mol_type = other DNA
gggcgccgaagtgggctacagtcgggcgcgagtgatgaacggtggttttgatgcggaaaaagtgattggaatttc

SEQ ID NO: 569039 - DNA, 75 bp, synthetic construct
  source 1..75: mol_type = other DNA
aaatcgctatgctggcagaaaaagctgggagccgaagtgggctacagtcgggcgcgagtgatgaacggtggcgtt

SEQ ID NO: 569040 - DNA, 75 bp, synthetic construct
  source 1..75: mol_type = other DNA
cacactatattaatgcatcgtccacatccggaaagttatatcaaaggtggtacgctgaaagcaattaaacagaat

SEQ ID NO: 569041 - DNA, 75 bp, synthetic construct
  source 1..75: mol_type = other DNA
ggcggactgccgaaacgagatgtgaatacggtcagtgaacctgacagccaaattccaccaggattcagagggtaa

SEQ ID NO: 569042 - DNA, 75 bp, synthetic construct
  source 1..75: mol_type = other DNA
cttacaggggggataatccgaaatcctgttggtagtgactttaatgtaaataattgggttatatctgaagtaaag

SEQ ID NO: 569043 - DNA, 75 bp, synthetic construct
  source 1..75: mol_type = other DNA
ggagtttttctactggacgggcggcaactcgctggacattcacagctggcatcggctggggatgtggctaattgg

SEQ ID NO: 569044 - DNA, 75 bp, synthetic construct
  source 1..75: mol_type = other DNA
agctgtcagaaaaactatcgcagcgttgccgggggggtacgctgaagctgctgactggctggatgtaacagagaa

SEQ ID NO: 569045 - DNA, 75 bp, synthetic construct
  source 1..75: mol_type = other DNA
tgtttgtatcgcttcctgaaattgaggaagtagagaacgcagatataaaccagcgcctgctggaagtcatcgaac

SEQ ID NO: 569046 - DNA, 75 bp, synthetic construct
  source 1..75: mol_type = other DNA
tacccatggggaaattcgccatgtatccagactggcaacccgatgccgactttatccgcctggcggcgctatggg

SEQ ID NO: 569047 - DNA, 75 bp, synthetic construct
  source 1..75: mol_type = other DNA
ccgacgacacggtgatctccacgatggtgaacggctaccgtagccacaaatttggaaaaatgagcagcgacaagg

SEQ ID NO: 569048 - DNA, 75 bp, synthetic construct
  source 1..75: mol_type = other DNA
ttattttcttctctaggatatgtcaaaaaggacatgcagggatcaagagtgcgatttttcaatgctgaaattaat

SEQ ID NO: 569049 - DNA, 75 bp, synthetic construct
  source 1..75: mol_type = other DNA
atggggaaagcagataagctactggcaaaatttttaaacagtaaaaaaacgtttgaatgggatgaactcgttgtt

SEQ ID NO: 569050 - DNA, 75 bp, synthetic construct
  source 1..75: mol_type = other DNA
gggtgcgcgctgctggtacgaccctgaaccgaataccagcgaaacgctgcgcaacgggcagctcaccatcaaata

SEQ ID NO: 569051 - DNA, 75 bp, synthetic construct
  source 1..75: mol_type = other DNA
taaccgtcacggaaaccaccgaccttagcacgatgatcaccgacattgattcggcggtgatcggcgttgtctgca

SEQ ID NO: 569052 - DNA, 75 bp, synthetic construct
  source 1..75: mol_type = other DNA
atcgcagaggcacagtttgaaaccgttgacgggccacttaccccaaccaacgtgaaagacgtggtgagtgcaatt

SEQ ID NO: 569053 - DNA, 75 bp, synthetic construct
  source 1..75: mol_type = other DNA
gtttgtatgcaatgcaaattcagcgctatcaacaggctgtgcgatcaacaatggtcctttcactgacagagctga

SEQ ID NO: 569054 - DNA, 75 bp, synthetic construct
  source 1..75: mol_type = other DNA
tctttcgcgtaaccaccttcggtgaatcgcacgggcttgcgctcggttgcatcgtcgatggtgttccgccaggca

SEQ ID NO: 569055 - DNA, 75 bp, synthetic construct
  source 1..75: mol_type = other DNA
caaagactggtcgcaggttgaacaaaatccgttcttctgcccggacccggataaaatcgacgcgttagatgaact

SEQ ID NO: 569056 - DNA, 75 bp, synthetic construct
  source 1..75: mol_type = other DNA
gctgctgcagagcaggaactggagcaagcctttgaacgctgggagtatcttgaagcgttaaaaaatggtggctga

SEQ ID NO: 569057 - DNA, 75 bp, synthetic construct
  source 1..75: mol_type = other DNA
tttcacaggcagatgttggcgtggtagatgactggaaagcggtactggaggcgctggtgacaaatattcgcgcag

SEQ ID NO: 569058 - DNA, 75 bp, synthetic construct
  source 1..75: mol_type = other DNA
ggtggacgttcttccgcccgcgaaaccgccatgcgcgtggcggcaggggcgattgccaaaaaatatctcgccgag

SEQ ID NO: 569059 - DNA, 75 bp, synthetic construct
  source 1..75: mol_type = other DNA
gcgcgattatcgcggcggcggacgttcttccgcccgtgaaacctccatgcgcgttgcggctggagcaattgctaa

SEQ ID NO: 569060 - DNA, 75 bp, synthetic construct
  source 1..75: mol_type = other DNA
gcacgccgtacccgtaatgaaggccgcgtacgcgccctgaaagcaatgcgtcgcgagcgtggtgaacgtcgcgaa

SEQ ID NO: 569061 - DNA, 75 bp, synthetic construct
  source 1..75: mol_type = other DNA
gatgctcgatctggtagaaggcggcagcacttttaccgaaacggtacaactggcgcaggccattgaaacggctgg

SEQ ID NO: 569062 - DNA, 75 bp, synthetic construct
  source 1..75: mol_type = other DNA
cgcaccaaccagcgtagcgaccagtggggtggtgattaccctaaccggatgcggtttgccgttgaagtggtacgt

SEQ ID NO: 569063 - DNA, 75 bp, synthetic construct
  source 1..75: mol_type = other DNA
acgccacgtgctgggctatttgcaggacttcctgttccatccgaaacgagcgatgacgccggtgcgtgcgctttc

SEQ ID NO: 569064 - DNA, 75 bp, synthetic construct
  source 1..75: mol_type = other DNA
gcttctcgataacgcagaattgcacatcgaagataacgaacgtgtttgtctggtgggccgtaacggcgcaggcaa

SEQ ID NO: 569065 - DNA, 75 bp, synthetic construct
  source 1..75: mol_type = other DNA
catggctgtcgttcagcgacgcgccgcttctcgataacgcagaattgcacatcgaagataacgaacgtgtttgtc

SEQ ID NO: 569066 - DNA, 75 bp, synthetic construct
  source 1..75: mol_type = other DNA
cgaacaaatcccgagcagaatgcaggatttgcgcgacgatatcgacgtgaaaaaatgggagattaatcaggccgc

SEQ ID NO: 569067 - DNA, 75 bp, synthetic construct
  source 1..75: mol_type = other DNA
tgggcttcactggtaaacgtgctgcccggttcaaagaggcatacatcaacgcctttaacctgatggagaagagtt

SEQ ID NO: 569068 - DNA, 75 bp, synthetic construct
  source 1..75: mol_type = other DNA
tttactgaacacaattttgtgttaagtgaatacaccgacgcatcaggccgcaaactaccttgctatcaaatcacc

SEQ ID NO: 569069 - DNA, 75 bp, synthetic construct
  source 1..75: mol_type = other DNA
agctgacggccattgcccgaaactgtgccatacagcgtgccacagatgtcctgcgtgaagcccttctgtcctggc

SEQ ID NO: 569070 - DNA, 75 bp, synthetic construct
  source 1..75: mol_type = other DNA
gtaattagccgccatgaatacgaagatgcggaattgttgatggcgctgcgggaagagctgaatcacgacggcaac

SEQ ID NO: 569071 - DNA, 75 bp, synthetic construct
  source 1..75: mol_type = other DNA
gagtacgcctttaccgacgacgagatccttggaccctttggtgaactgcactgcgtggggggggttccccccccc

SEQ ID NO: 569072 - DNA, 75 bp, synthetic construct
  source 1..75: mol_type = other DNA
gcaatttttcggtgagtgattacaccgattgcacaggccgcaaactaccttgctatcaaatcacccgtgatggct

SEQ ID NO: 569073 - DNA, 75 bp, synthetic construct
  source 1..75: mol_type = other DNA
aatccgtttttttgcccggaccccgacaaaatcgacgcgttagacgagttgatgcgtgcgctgaaaaaagagggc

SEQ ID NO: 569074 - DNA, 75 bp, synthetic construct
  source 1..75: mol_type = other DNA
acgcgccttcgcgggatgataatcgtgaaaaattcacccctgcacagagcatgatttacacccgtcgacgcgccg

SEQ ID NO: 569075 - DNA, 75 bp, synthetic construct
  source 1..75: mol_type = other DNA
ttaacggccatcggatacaggcctgacgcgccttcgcgggatgataatcgtgaaaaattcacccctgcacagaac

SEQ ID NO: 569076 - DNA, 75 bp, synthetic construct
  source 1..75: mol_type = other DNA
gagctgatgggctacagtgagctgacggccattgcccgaaactgtgccatacagcgtgccacagatgccctgcgt

SEQ ID NO: 569077 - DNA, 75 bp, synthetic construct
  source 1..75: mol_type = other DNA
gcctggcgtttacatggtgcaagcatctgccaggtgacttcgttagatattccaaccgtaagcgtgcgcaaatcc

SEQ ID NO: 569078 - DNA, 75 bp, synthetic construct
  source 1..75: mol_type = other DNA
gcgtggcggcaggggcgattgccaaaaaatatctcgccgagaaatttggcattgagattcgcggttgcctgaccc

SEQ ID NO: 569079 - DNA, 75 bp, synthetic construct
  source 1..75: mol_type = other DNA
gcgctaaccgatgataaagcgttgatgatgattagctgtgaggcgggcgcctataacaccattgatctggcgtgg

SEQ ID NO: 569080 - DNA, 75 bp, synthetic construct
  source 1..75: mol_type = other DNA
cgttttggttctctttacgaatatgttgcatcattcggaatatttaacggtgcggatgtcggtaaaaccatagac

SEQ ID NO: 569081 - DNA, 75 bp, synthetic construct
  source 1..75: mol_type = other DNA
gtggggttagctgcggttgaaatggcgcagataattctcagcggcggcagcagtttaatggaagttatttcgaaa

SEQ ID NO: 569082 - DNA, 75 bp, synthetic construct
  source 1..75: mol_type = other DNA
aaaattagaactattgaaaaaatcaaaagtatgtataatccctagtcgatttgaaagttttagtttagtagcggc

SEQ ID NO: 569083 - DNA, 75 bp, synthetic construct
  source 1..75: mol_type = other DNA
aaactgcgtggatcaagaaaggagacgagccgccacttagcgtaccgcctgctcctgcgctgaaagaggtcgctg

SEQ ID NO: 569084 - DNA, 75 bp, synthetic construct
  source 1..75: mol_type = other DNA
catttgatgaaaaatcgcgtgaactggtgacgttagcgaaaggccgtggattaagcgattgtggtatccagacgc

SEQ ID NO: 569085 - DNA, 75 bp, synthetic construct
  source 1..75: mol_type = other DNA
ccagcctgaacccgctcacccaggcacttaccatagtgctggatctgattcgccagtcggctccttttcgtaaac

SEQ ID NO: 569086 - DNA, 75 bp, synthetic construct
  source 1..75: mol_type = other DNA
attctgtcggattaacgatctggataccgcgttgaatcatattttcccattgcctactggcgacattttctcaaa

SEQ ID NO: 569087 - DNA, 75 bp, synthetic construct
  source 1..75: mol_type = other DNA
gtatgctggataaccggcacgatgccgatcctgaacaaaccgggaaagcagaagcgactgagccggtaacatcaa

SEQ ID NO: 569088 - DNA, 75 bp, synthetic construct
  source 1..75: mol_type = other DNA
gctacctgctgctgccgctgatttacctgctggttaacgtcaaaatcgcccagcttggcgaaagtttccccatca

SEQ ID NO: 569089 - DNA, 75 bp, synthetic construct
  source 1..75: mol_type = other DNA
ggttatgacctttatcctgttttatttgctggagtgggcatttcaatatctgaataaagaggcgattaagaaaaa

SEQ ID NO: 569090 - DNA, 75 bp, synthetic construct
  source 1..75: mol_type = other DNA
ccatcgtcacttttttacctgtcttgttactgctgtttttagaacgcatcagcgttaaaaaattgatgattgcct

SEQ ID NO: 569091 - DNA, 75 bp, synthetic construct
  source 1..75: mol_type = other DNA
atacttgaaaacaataggaaatatatctcaaatataattaatataattaatggcaataattccctatgtataagc

SEQ ID NO: 569092 - DNA, 75 bp, synthetic construct
  source 1..75: mol_type = other DNA
atagctatatcacattattgactatgagctctaaaaagcgtctgttagttgaagggaggcatgaccgttcgcatc

SEQ ID NO: 569093 - DNA, 75 bp, synthetic construct
  source 1..75: mol_type = other DNA
aagccagctaaagatgaacaagtatgcttttgaatactggtacagaaattctgttaaaaataaaaagataattgc

SEQ ID NO: 569094 - DNA, 75 bp, synthetic construct
  source 1..75: mol_type = other DNA
aagatactcggaacgcttataaaaatcgaagttgaacacatacctgactttgatttcagtaagatccagtctctt

SEQ ID NO: 569095 - DNA, 75 bp, synthetic construct
  source 1..75: mol_type = other DNA
ctggttcaaaacggtacgctctattgctccagtatctttggctatcgaaatgtccctgttcatgatatccaggcc

SEQ ID NO: 569096 - DNA, 75 bp, synthetic construct
  source 1..75: mol_type = other DNA
acgtagtcagcaatgtattggcgtagagatattgctgcgctggaataacccacgtcagggttggatctcgccgga

SEQ ID NO: 569097 - DNA, 75 bp, synthetic construct
  source 1..75: mol_type = other DNA
ccaatgccgctgcgtgatttcccaaaatggctggcgggcagccaaccgccgcccgcccggcataatgggcatatc

SEQ ID NO: 569098 - DNA, 75 bp, synthetic construct
  source 1..75: mol_type = other DNA
tccagaacgtgttaaacggcatggcaagccgccgcccacgtctggatgccctgcgtgactcctggtacgatttag

SEQ ID NO: 569099 - DNA, 75 bp, synthetic construct
  source 1..75: mol_type = other DNA
gaagtgatcaacggtgagatagacattgaagagcagaagacagggaagcgtaaatccctcacccttccggctcca

SEQ ID NO: 569100 - DNA, 75 bp, synthetic construct
  source 1..75: mol_type = other DNA
taccctttaattgaagctattatgaatccaccaacacaacgaaaaaagcaacttccttctcaagaacaacaacca

SEQ ID NO: 569101 - DNA, 75 bp, synthetic construct
  source 1..75: mol_type = other DNA
caacgatcatgaccatgacgttaaaaaagttcagtccggcgatagcacgatcataagcgaaaaaacagagagtca

SEQ ID NO: 569102 - DNA, 75 bp, synthetic construct
  source 1..75: mol_type = other DNA
cagcccatcctgcaaatggtgtttgtaggtgcttacattctttttgcgccgtttgtcgggcaggtggcggatagc

SEQ ID NO: 569103 - DNA, 75 bp, synthetic construct
  source 1..75: mol_type = other DNA
gtcttctgacggtatttaccagttactccttaaaatctcccgccgttccaccaaccgtggtacaaatccaggcca

SEQ ID NO: 569104 - DNA, 75 bp, synthetic construct
  source 1..75: mol_type = other DNA
atgaggttaagaacaaaagcaaccgtgagatttcgcatgcgaaatctaaagctcagaataaaaggccatccaagt

SEQ ID NO: 569105 - DNA, 75 bp, synthetic construct
  source 1..75: mol_type = other DNA
ccataaacaccccacacctaaaggatgttaaatttaaaacctattgcaagtcacataaccacgaatgggaatctc

SEQ ID NO: 569106 - DNA, 75 bp, synthetic construct
  source 1..75: mol_type = other DNA
ctccagaaaagagtgacgcccgcgagtgtgcagctccgggcgtcgtggcgttttgtgtctgtggagaaactaacg

SEQ ID NO: 569107 - DNA, 75 bp, synthetic construct
  source 1..75: mol_type = other DNA
cccagactggcagcccgatgccgactttatccgccaggccgcgttatggggcgtggcgctaagagagccggtaac

SEQ ID NO: 569108 - DNA, 75 bp, synthetic construct
  source 1..75: mol_type = other DNA
tttcttccgtaatgtcagtgaattactggatgttttcgagcgtggcgaagtccgcactgagctgttgaaagaact

SEQ ID NO: 569109 - DNA, 75 bp, synthetic construct
  source 1..75: mol_type = other DNA
attgctgaaaatgatagctgcaagtgaattaccacctgataataaatctgatgatgaaaattatgatgatttgct

SEQ ID NO: 569110 - DNA, 75 bp, synthetic construct
  source 1..75: mol_type = other DNA
gtgggtaagtatcactggaaagtagaaaaacagcctgagtggtacgtgaaagctgtcagaaaaactatcgcagcg

SEQ ID NO: 569111 - DNA, 75 bp, synthetic construct
  source 1..75: mol_type = other DNA
ctgtcgttattgtttaatgccgctttctggtggtatctggcgcagacacaggggcgcgaagtcgcggaccctcag

SEQ ID NO: 569112 - DNA, 75 bp, synthetic construct
  source 1..75: mol_type = other DNA
gtttgcgatcctcggcctgcgtgcgatgtatttcctgctggcgggcgtagcagagcgtttctcgatgctcaaata

SEQ ID NO: 569113 - DNA, 75 bp, synthetic construct
  source 1..75: mol_type = other DNA
tctttgtgtctcttcctgacgtcgaggatgtggacaatgccgatattaaccagcgtttactggaagtcattgaac

SEQ ID NO: 569114 - DNA, 75 bp, synthetic construct
  source 1..75: mol_type = other DNA
caacgcctgctggaagtcattgaacagatcggcagttattcaaaacagattcgttcagcaattgaagacggtgta

SEQ ID NO: 569115 - DNA, 75 bp, synthetic construct
  source 1..75: mol_type = other DNA
gctgtggcgcagtctgcaaatggcgtctttgtgtctcttcctgacatcgaggatgtggacaacgccgatatcaac

SEQ ID NO: 569116 - DNA, 75 bp, synthetic construct
  source 1..75: mol_type = other DNA
ctggatgttttcgagcgtggcgaagtccgcactgagctgttgaaagaacttgaccggcagcaacgtaaactccag

SEQ ID NO: 569117 - DNA, 75 bp, synthetic construct
  source 1..75: mol_type = other DNA
ttacggattctgttgctgcgctgaactgttcgatcgtccctgcgcatccgtggatttatgggctgggacagcaga

SEQ ID NO: 569118 - DNA, 75 bp, synthetic construct
  source 1..75: mol_type = other DNA
tggatttatgggctgggacagcagacagcaaacggggcatatctcagcccggttaatgctgttcgctatcttgct

SEQ ID NO: 569119 - DNA, 75 bp, synthetic construct
  source 1..75: mol_type = other DNA
tgagatttcgcatgcgaaatctaaggctcagaaaaaaaagccaactaagactttggatagcaactcagatgtaaa

SEQ ID NO: 569120 - DNA, 75 bp, synthetic construct
  source 1..75: mol_type = other DNA
atggacagataatccgtgtcgatataaatctggtttatgctgaagaacaagtgcgacctgaagaagacttcgagg

SEQ ID NO: 569121 - DNA, 75 bp, synthetic construct
  source 1..75: mol_type = other DNA
gcaggttaagcgcctggcgcagtctgctgcagaactggccattgaacgaatgcagatccctgccaaagtttctgc

SEQ ID NO: 569122 - DNA, 75 bp, synthetic construct
  source 1..75: mol_type = other DNA
atggatggagttgattgttcctggtatggaagggatagcaactgaaaaacaaaagctggatggctcaacgatact

SEQ ID NO: 569123 - DNA, 75 bp, synthetic construct
  source 1..75: mol_type = other DNA
tattacgtttcttttatctggtggtcgggctggtggtggcgctggcggcggtggagatggcgcaaattatcctca

SEQ ID NO: 569124 - DNA, 75 bp, synthetic construct
  source 1..75: mol_type = other DNA
aatgtgctgatagatccggaactaggccacgcatgcattattgatgttgatgggctggtggttccgggaaaattt

SEQ ID NO: 569125 - DNA, 75 bp, synthetic construct
  source 1..75: mol_type = other DNA
cacagtatatggaacatctggggatcgaaacggtgctggtcgatccgaagcgtacctttatgagtatcagcggtg

SEQ ID NO: 569126 - DNA, 75 bp, synthetic construct
  source 1..75: mol_type = other DNA
ccgttctggcaagcgaatataagatgcaactacctgatgagaaacgactcgcggatgaactcgttcgaacacagg

SEQ ID NO: 569127 - DNA, 75 bp, synthetic construct
  source 1..75: mol_type = other DNA
tatctcaactacgccaaagagcactggacgctaccggatgaaaatccgcccatcggtctggttctctgtgcagag

SEQ ID NO: 569128 - DNA, 75 bp, synthetic construct
  source 1..75: mol_type = other DNA
cccggttgcgagccgatgacgatcaacttaaagcgcctgaagcactggctcgcctgaaaggattgagaaaagacg

SEQ ID NO: 569129 - DNA, 75 bp, synthetic construct
  source 1..75: mol_type = other DNA
aaccgggcgagcaagagaggcttgccaccacagagtctgcccgttatttcagcacggaatcacttgcggaacgca

SEQ ID NO: 569130 - DNA, 75 bp, synthetic construct
  source 1..75: mol_type = other DNA
cttttgcctgggatctcttcaccgcctggcaacaagctggtgcccccgcaaaagacaactgggcatttctggcgt

SEQ ID NO: 569131 - DNA, 75 bp, synthetic construct
  source 1..75: mol_type = other DNA
accgttgggcaactgatggggatgcgttacaagggctgggcatcaggggatgaagacgaatttatctatggctta

SEQ ID NO: 569132 - DNA, 75 bp, synthetic construct
  source 1..75: mol_type = other DNA
gaagaaaaaaaacattgtctggcgttatgaaaatttttcactggagtggcagtccgccattacgcaggccatcaa

SEQ ID NO: 569133 - DNA, 75 bp, synthetic construct
  source 1..75: mol_type = other DNA
tatttcagcacggaatctcttgcggaacgcatggaacaaaaaagtggacgagttgtattacaggaactgggtttt

SEQ ID NO: 569134 - DNA, 75 bp, synthetic construct
  source 1..75: mol_type = other DNA
gccagcgcattactggcacaagatagcgttgcgttgatggaggggtggcgaactttccaacgcaaatttaattac

SEQ ID NO: 569135 - DNA, 75 bp, synthetic construct
  source 1..75: mol_type = other DNA
cggtgacgctctggaaattatcggcgaaatgctgcgctttacccaggggggacgtttttatagcgggctggaaca

SEQ ID NO: 569136 - DNA, 75 bp, synthetic construct
  source 1..75: mol_type = other DNA
tccgtcacttttgccgaacttgatgtgtttgatttgagtgaggcgttaagcgcacccgacgtcattttccattaa

SEQ ID NO: 569137 - DNA, 75 bp, synthetic construct
  source 1..75: mol_type = other DNA
tccgcatcttgttactggtggctgataaaaacaaacccagcctgcaacgtgttgctaaatacagtaaaaatttcc

SEQ ID NO: 569138 - DNA, 75 bp, synthetic construct
  source 1..75: mol_type = other DNA
agccgcattacttgccctgcgtttactgtatgagcagggacatggtgaattgctgcaaaccgtggcaaaccgctg

SEQ ID NO: 569139 - DNA, 75 bp, synthetic construct
  source 1..75: mol_type = other DNA
gcaaaagacaactgggcttttttggcgttaagtctctttggtgacgaaagcacggctcggaatctgacgacacag

SEQ ID NO: 569140 - DNA, 75 bp, synthetic construct
  source 1..75: mol_type = other DNA
taaaaacaaacccagcctgcaacgtgtagctaaataccataaaaacttcccccatgcgacgctcgccgcactggc

SEQ ID NO: 569141 - DNA, 75 bp, synthetic construct
  source 1..75: mol_type = other DNA
gggcgcagggcgtggagatgtttgcggagtgtgcatacacgcttgaacatcatgatcacgcagtagccttcgccg

SEQ ID NO: 569142 - DNA, 75 bp, synthetic construct
  source 1..75: mol_type = other DNA
tgattttcccagcacagccactgaccactctaacaccagaacagattactgatattactgatagtgtgcgcaaag

SEQ ID NO: 569143 - DNA, 75 bp, synthetic construct
  source 1..75: mol_type = other DNA
cggagaatgcgagactgaaggcgatatgtgaggatcgccgcacgttcattatgaatggtgtgcagcttggtttta

SEQ ID NO: 569144 - DNA, 75 bp, synthetic construct
  source 1..75: mol_type = other DNA
tttgattgggatgccgggcaagtgatgatttttccagcacagccactgaccacgctaacaccagagcaggttgct

SEQ ID NO: 569145 - DNA, 75 bp, synthetic construct
  source 1..75: mol_type = other DNA
tggtgaatcgtattttgtccaacaaccacagccatcgtcgagatatggatgtaacgatcgttgtttattcgcctg

SEQ ID NO: 569146 - DNA, 75 bp, synthetic construct
  source 1..75: mol_type = other DNA
gcggtggcgtttaacgagcttcgcgcggcgtttgtcaggcacgcaaaagttgcaggactggatgatgccgatacc

SEQ ID NO: 569147 - DNA, 75 bp, synthetic construct
  source 1..75: mol_type = other DNA
gcgggtgaggactattttctcagtatcctcggattggatgcgctaccaggtctgctgttggctttttcacatcgt

SEQ ID NO: 569148 - DNA, 75 bp, synthetic construct
  source 1..75: mol_type = other DNA
cctgaaatcctcgtttcaccaccgtggcgtagtaagaaaaaaatgacagctccacgtcttgatttggcaccgctc

SEQ ID NO: 569149 - DNA, 75 bp, synthetic construct
  source 1..75: mol_type = other DNA
agttagcggacagattagtcccaacactgggccttgatgatccgcaggcgttgatttttgattttggtccacggc

SEQ ID NO: 569150 - DNA, 75 bp, synthetic construct
  source 1..75: mol_type = other DNA
ttacaagaagcataaagccgaaatggctaccgccgcgactgagtattcgaaagtagcaggacaacgtgatgaatt

SEQ ID NO: 569151 - DNA, 75 bp, synthetic construct
  source 1..75: mol_type = other DNA
cccgcaaaagacaactgggcatttctggcgttaagtctctttggcgacgaaagcacggcacgggatctgacgaca

SEQ ID NO: 569152 - DNA, 75 bp, synthetic construct
  source 1..75: mol_type = other DNA
aacaaattgtcgcggctgattttcattacaccggggtggaatatctgttaagtgtgctgggtaccgatgctttgc

SEQ ID NO: 569153 - DNA, 75 bp, synthetic construct
  source 1..75: mol_type = other DNA
attgcacgccagtttattgtacggtgttatgagagtgatcctctggtagtaacattgcagtatcagaacgaggac

SEQ ID NO: 569154 - DNA, 75 bp, synthetic construct
  source 1..75: mol_type = other DNA
atatggacggtacttttcttaacaacgccaaaatgtacaaccagtcacgttttatggcgcagtatcaggaactga

SEQ ID NO: 569155 - DNA, 75 bp, synthetic construct
  source 1..75: mol_type = other DNA
atggcgcgggcgctaaagctggcgcaacgaggacgttttaccacgcatcccaacccgaatgtcgggtgcgtcatt

SEQ ID NO: 569156 - DNA, 75 bp, synthetic construct
  source 1..75: mol_type = other DNA
tgatgatgcaactgggtaaacagcaaattaacagcatctgggtggaagcggggccaacgctcgctggcgcattgc

SEQ ID NO: 569157 - DNA, 75 bp, synthetic construct
  source 1..75: mol_type = other DNA
ccttgccgaaggcgaagaagctctcagcttcagtgagtttaaacaggcgctttccagttcgacaaaatctatcga

SEQ ID NO: 569158 - DNA, 75 bp, synthetic construct
  source 1..75: mol_type = other DNA
aaacgctgggatctgtcgccgcaaaatatcgtcaccattggtgacagcggcaatgacgcagagatgctcaaaatg

SEQ ID NO: 569159 - DNA, 75 bp, synthetic construct
  source 1..75: mol_type = other DNA
cattggggaactgctgaaagataaacaactcaattttgtcgcctgtggtctgcaaagcgcatacatcagtgaaaa

SEQ ID NO: 569160 - DNA, 75 bp, synthetic construct
  source 1..75: mol_type = other DNA
aagccgtgggcatgtgcggattaaatcccgcgacccgcaccagcatccggcgattctgtttaactacatgtcgca

SEQ ID NO: 569161 - DNA, 75 bp, synthetic construct
  source 1..75: mol_type = other DNA
cgctgatggcaacgcactgttccgccagcctgatctgcgtgaaatgcgtgaccagtcgcaggaagatccgcgtga

SEQ ID NO: 569162 - DNA, 75 bp, synthetic construct
  source 1..75: mol_type = other DNA
tcggttgtatggttaacggcgcaggtctggcaatgggtacgatggacatcgttaaactgcacggcggcgaaccgg

SEQ ID NO: 569163 - DNA, 75 bp, synthetic construct
  source 1..75: mol_type = other DNA
aaaggtcatctggatctggttatactgatgatgcaactgggtaaacagcaaattaacagcatctgggtggaagcg

SEQ ID NO: 569164 - DNA, 75 bp, synthetic construct
  source 1..75: mol_type = other DNA
aattaacagcatctgggtggaagcggggccaacgctcgctggcgcattgctacaggcgggtttagtcgatgagct

SEQ ID NO: 569165 - DNA, 75 bp, synthetic construct
  source 1..75: mol_type = other DNA
aaaatagcggacatgattcgtggacaggaagcgctgccgaggagcacggcgggatattttgtggcaaatgggatg

SEQ ID NO: 569166 - DNA, 75 bp, synthetic construct
  source 1..75: mol_type = other DNA
ttgcaatttgactacatcattactggtgccggctcagccggcaacgttctcgctacccgtctgactgaagatccg

SEQ ID NO: 569167 - DNA, 75 bp, synthetic construct
  source 1..75: mol_type = other DNA
cgtgctgatgtgtggccagccctggaaaaaatacttacccagaacccgctggaaatttacccggcgcgcatgcca

SEQ ID NO: 569168 - DNA, 75 bp, synthetic construct
  source 1..75: mol_type = other DNA
cctgaacatacttactcagatgaataatgatatggcactgatacagctgcatcatatatcgcaacgggcgaaatc

SEQ ID NO: 569169 - DNA, 75 bp, synthetic construct
  source 1..75: mol_type = other DNA
cctgggaagctggttttattgatgatactgcgaagaacgccgcggatattgcccggatgattcttacctctactg

SEQ ID NO: 569170 - DNA, 75 bp, synthetic construct
  source 1..75: mol_type = other DNA
atgctgcgctttacccaggggggacgtttttatagcgggctggaacaactgaaaacgttctgccagccacaaacg

SEQ ID NO: 569171 - DNA, 75 bp, synthetic construct
  source 1..75: mol_type = other DNA
gacgtttttatagcgggctggaacaactgaaaacgttctggcagcttttgcctgggatctcttcactgcgtggca

SEQ ID NO: 569172 - DNA, 75 bp, synthetic construct
  source 1..75: mol_type = other DNA
cgaaatcgtccaacaagagggactggaatatgcgactgaggtggtgattgcacgccagtttattgcacggtgtta

SEQ ID NO: 569173 - DNA, 75 bp, synthetic construct
  source 1..75: mol_type = other DNA
tgagtgatgaagagttagagttttttagccatctgacaagattatgtcctgaaggtatgattccgcttgccagag

SEQ ID NO: 569174 - DNA, 75 bp, synthetic construct
  source 1..75: mol_type = other DNA
catatcgctctttttaattttcggacagtaaaagatctttatctgaacgatgattttatgaatgcaatagaacta

SEQ ID NO: 569175 - DNA, 75 bp, synthetic construct
  source 1..75: mol_type = other DNA
caagagtgaacaggaggcgtgcaattacctcgatagcctgccagcctccgaacgcagccgcgcgcaacgcgcggc

SEQ ID NO: 569176 - DNA, 75 bp, synthetic construct
  source 1..75: mol_type = other DNA
cgtgcacagcggatgtggttatcctactggcatgttcgattattactacaaccagtggctggagtcagataacaa

SEQ ID NO: 569177 - DNA, 75 bp, synthetic construct
  source 1..75: mol_type = other DNA
gacgtatctctcgcggaagacttcgggttcaatcatgcaatagaacggatgaggagacagatacctgaaacgcca

SEQ ID NO: 569178 - DNA, 75 bp, synthetic construct
  source 1..75: mol_type = other DNA
gtgacttcgttagatattccaaccgtaagcgtgcgcaaatcccactggggaaatgcgctaacggcgacgctgcaa

SEQ ID NO: 569179 - DNA, 75 bp, synthetic construct
  source 1..75: mol_type = other DNA
tatctgagatagggactgtattaagccagtcatcaaccagtacaacagccagtacgtcaactgttaccagcggtt

SEQ ID NO: 569180 - DNA, 75 bp, synthetic construct
  source 1..75: mol_type = other DNA
ggacaaacatcaacgacttccagtgcgtcaacgtcatctgtaactacgggttttctgatgaacctgttaccatca

SEQ ID NO: 569181 - DNA, 75 bp, synthetic construct
  source 1..75: mol_type = other DNA
gttcgaatgtgggtaccgcgacgaacgcaaatgttatctctgataatcttaacaaagctacaggagatacagctg

SEQ ID NO: 569182 - DNA, 75 bp, synthetic construct
  source 1..75: mol_type = other DNA
atcagcctgaaggggaaaaccattgatttgaccgctgacaccaccacggtgaacggcaaccttgaaatcaacggc

SEQ ID NO: 569183 - DNA, 75 bp, synthetic construct
  source 1..75: mol_type = other DNA
cgattaatagcaatattcaggttaacggcaatatcaatgcgtcaggcactatcatcgacgcaggcggcaatacca

SEQ ID NO: 569184 - DNA, 75 bp, synthetic construct
  source 1..75: mol_type = other DNA
attatttgaagaaattcaaaagaaagatttcagtttaaacattgttcctgaattgctttattttatttcaaaaca

SEQ ID NO: 569185 - DNA, 75 bp, synthetic construct
  source 1..75: mol_type = other DNA
tggctgacgattgaggcaactgaaatggtcacaaaaaccactgcggagatgctgattaactcaattgaacagcat

SEQ ID NO: 569186 - DNA, 75 bp, synthetic construct
  source 1..75: mol_type = other DNA
atggaaaccgtatttgacgcactgaaagcactgaaaagagcctcttcacaggtagtggcatcgcgccttggaatc

SEQ ID NO: 569187 - DNA, 75 bp, synthetic construct
  source 1..75: mol_type = other DNA
cgccgggcaaaaggtcaggttcagaagtgggagcgtgtctgcgccgcgctgcgggagctgaacaagcaccgggat

SEQ ID NO: 569188 - DNA, 75 bp, synthetic construct
  source 1..75: mol_type = other DNA
atggaaactgtatttgacgcactgaaagcactgaaaagagcctcttcacatgtggtggcgtcccgccttggaatc

SEQ ID NO: 569189 - DNA, 75 bp, synthetic construct
  source 1..75: mol_type = other DNA
aagcactgaaaaaagcctcttcacatgtggtggcagctcgccttggaatcagtcgtgaagatgctgtcaacgaac

SEQ ID NO: 569190 - DNA, 75 bp, synthetic construct
  source 1..75: mol_type = other DNA
agtgggagcgagtctgtgccgctctgcgggagcttaacaagtgccgggatattctccgggatattaccgccacca

SEQ ID NO: 569191 - DNA, 75 bp, synthetic construct
  source 1..75: mol_type = other DNA
gaacggcaactttgaaatcaacgggaacgcccatgcgacaggtaacatttttgctgacggccagaactccaatca

SEQ ID NO: 569192 - DNA, 75 bp, synthetic construct
  source 1..75: mol_type = other DNA
cgtttcgttcctcatgaactcacccatgaagagatcctgcaactgatcgacgatttcgcccgctgcgcgcaactg

SEQ ID NO: 569193 - DNA, 75 bp, synthetic construct
  source 1..75: mol_type = other DNA
atcggttgtggcgggattggttttgatacggcgatgtttttaagtcagccgggtgagtccaccagccagaacatt

SEQ ID NO: 569194 - DNA, 75 bp, synthetic construct
  source 1..75: mol_type = other DNA
ccatcgccacgcccgtgccgcgcggcgcatttagctgggtcacgcgcaaactgaaaggccacgtttcgctgccgc

SEQ ID NO: 569195 - DNA, 75 bp, synthetic construct
  source 1..75: mol_type = other DNA
tcaggaaggcggcaaaatcgccctacaaattttgcataccgggcgctacagttaccagccgcatctggtcgcccc

SEQ ID NO: 569196 - DNA, 75 bp, synthetic construct
  source 1..75: mol_type = other DNA
cgcatttagctgggtcacacgcaaactgaaaggccacgtttcgctgccactggtgaccaccaaccggattaacga

SEQ ID NO: 569197 - DNA, 75 bp, synthetic construct
  source 1..75: mol_type = other DNA
tgatgcttcaacgcaaagccagcaaaccagggcaagggttgggcaaaactacgggctggatccatcgcaccaccc

SEQ ID NO: 569198 - DNA, 75 bp, synthetic construct
  source 1..75: mol_type = other DNA
gcttaatctgctgttctgcgtgctggtgattcgtgctcgtgggaacgtttcaaaaatcctttcattacggaggtg

SEQ ID NO: 569199 - DNA, 75 bp, synthetic construct
  source 1..75: mol_type = other DNA
ctttgttatctgtgtggtcgctttccacccggtaactggctggtcgtcctgattaacctggtgttctgcgtgctg

SEQ ID NO: 569200 - DNA, 75 bp, synthetic construct
  source 1..75: mol_type = other DNA
attagtctgaaagggaaaaccattgatttgacagctgacactatcatggtgaacggcaatcttgaaatcaaaggg

SEQ ID NO: 569201 - DNA, 75 bp, synthetic construct
  source 1..75: mol_type = other DNA
atcggttgtggcgggattggttttgatacggcgatgtatttaagtcagccgggcgaatccaccagccagaatatc

SEQ ID NO: 569202 - DNA, 75 bp, synthetic construct
  source 1..75: mol_type = other DNA
gatgctgctttatgcctttgcgccgctttgttatctgtgtggtcgctttccacccggtaactggctggtcgtcct

SEQ ID NO: 569203 - DNA, 75 bp, synthetic construct
  source 1..75: mol_type = other DNA
ctcagttttctgtgcggtcgtcctcttcccggtaactgggcggtggtgctggctaatctgttgttctgtgtgctg

SEQ ID NO: 569204 - DNA, 75 bp, synthetic construct
  source 1..75: mol_type = other DNA
attgaactacatggcccacaaacggcggatgaactggcattgatgttcggaattacctcccgccgggcgaattca

SEQ ID NO: 569205 - DNA, 75 bp, synthetic construct
  source 1..75: mol_type = other DNA
gtaatccagaagcaagtactacttcatggagagaagttcttaatcaaaatggtgtttctggcttcagcgtagatc

SEQ ID NO: 569206 - DNA, 75 bp, synthetic construct
  source 1..75: mol_type = other DNA
ctgacgccggctcaggtaccggacgtgacggatgcgaacggtaacggcaaggcagacacagtcgagcaggcagtg

SEQ ID NO: 569207 - DNA, 75 bp, synthetic construct
  source 1..75: mol_type = other DNA
gcgaagggcaaattcgccagtcggaacagtatcttggcgcggattatttcccggtgaaaaccactctcatcaagg

SEQ ID NO: 569208 - DNA, 75 bp, synthetic construct
  source 1..75: mol_type = other DNA
gcgacagccaaggtagcagaagcggaagcgaaggaaaaagaagcagaagcggcgctgactcaggcgaaggctgac

SEQ ID NO: 569209 - DNA, 75 bp, synthetic construct
  source 1..75: mol_type = other DNA
gggatgacattatgatgattggccttggtaataataaagttggagtacatctaagggatgatttaagtttacgaa

SEQ ID NO: 569210 - DNA, 75 bp, synthetic construct
  source 1..75: mol_type = other DNA
atctcgtaatgacatggttattaatactaatgctggcgatgatatcatttctgttggtatggattatggtaggag

SEQ ID NO: 569211 - DNA, 75 bp, synthetic construct
  source 1..75: mol_type = other DNA
taaatattttattgatggtgtatttcaacctttgagatatgagcgtgactgtgaaaaagcggttgtggccgctgg

SEQ ID NO: 569212 - DNA, 75 bp, synthetic construct
  source 1..75: mol_type = other DNA
atacaagaagcataaagagcagttggaaaaattatcgattgaacttgatgccgcaaaacagcgcatagcagaact

SEQ ID NO: 569213 - DNA, 75 bp, synthetic construct
  source 1..75: mol_type = other DNA
ggaggccagtcgcgtgacgctggcggaggagaactcgtggctgaagatgctcatagaagatcatgctggttgtat

SEQ ID NO: 569214 - DNA, 75 bp, synthetic construct
  source 1..75: mol_type = other DNA
atgaaataccgcatcgctttagctgtttctctttttgctcttagtgccggtagttatgccactaccctgtgtcag

SEQ ID NO: 569215 - DNA, 75 bp, synthetic construct
  source 1..75: mol_type = other DNA
tggctgaaattcgggcgcagggggtggatgctgctatagaagctgcaaaaaatctggtggcccaagaatatgagt

SEQ ID NO: 569216 - DNA, 75 bp, synthetic construct
  source 1..75: mol_type = other DNA
atgggtgggtagtacctggtgcgtcgtggataccatcacactggatgccgctaccagaaccgccgcaggaggtga

SEQ ID NO: 569217 - DNA, 75 bp, synthetic construct
  source 1..75: mol_type = other DNA
aataagatcacccagcaggagcatgatgatcttgcggcgaagaacgatgcggtaacggcggcgaaagcagatgcg

SEQ ID NO: 569218 - DNA, 75 bp, synthetic construct
  source 1..75: mol_type = other DNA
ttccgaagagatcaaaatctacgagaaattgcttaatcacagtgaattgactcacgccccctgcgcccctggcac

SEQ ID NO: 569219 - DNA, 75 bp, synthetic construct
  source 1..75: mol_type = other DNA
atgtcgccatgggcggcaaaacgcctgcatgaatttggtggcgatatcactaagttccgggtagtgaaggtctgg

SEQ ID NO: 569220 - DNA, 75 bp, synthetic construct
  source 1..75: mol_type = other DNA
ttaaaaatgtagcatctcatttcaataaaaaaatgaatggtggttatgataaattaaaggttaaattccaagatc

SEQ ID NO: 569221 - DNA, 75 bp, synthetic construct
  source 1..75: mol_type = other DNA
cagttttatccgcctggcgcaccaatcccgtggccatcagataccgttccgtctggctatgccctgatgcagggg

SEQ ID NO: 569222 - DNA, 75 bp, synthetic construct
  source 1..75: mol_type = other DNA
gttccggtggttgtcgatgctggcatcggcgttcccagccatgccgcgcaggcgctggaaatgggggccgacgcg

SEQ ID NO: 569223 - DNA, 75 bp, synthetic construct
  source 1..75: mol_type = other DNA
tcgtcacacaacatggtcgtctggtgaagactttgcttggcggcgacaacctgattgaagtgaataaccttgctg

SEQ ID NO: 569224 - DNA, 75 bp, synthetic construct
  source 1..75: mol_type = other DNA
gaccacgctcgactacgaaaactatcatatctttctttgttggcacctaccccaacgaccccgatactcagcgtg

SEQ ID NO: 569225 - DNA, 75 bp, synthetic construct
  source 1..75: mol_type = other DNA
cggtgacggatgcgaatgcggagctggcgacagcgaaacaggcggcacagtcagcggtggataaactgcaggcgg

SEQ ID NO: 569226 - DNA, 75 bp, synthetic construct
  source 1..75: mol_type = other DNA
gatgtattatccacaggctcaactgaggcgggaagtggaagctcttccgaccaggtaccggcagtggatgaaaac

SEQ ID NO: 569227 - DNA, 75 bp, synthetic construct
  source 1..75: mol_type = other DNA
ttgtcacacaacatggtcgtctggtgaagactttgcttggcggcgacaacctgattgaagtgaataaccttgccg

SEQ ID NO: 569228 - DNA, 75 bp, synthetic construct
  source 1..75: mol_type = other DNA
gagtaataactcatcatactattacgatcgatacacaataccgtacacagaaaattgatgatagcatcagatcga

SEQ ID NO: 569229 - DNA, 75 bp, synthetic construct
  source 1..75: mol_type = other DNA
agccattgaagacgatgaaccggggtcggtagttgcggagttttgtgcggaggttcagcgacttcatgggctgca

SEQ ID NO: 569230 - DNA, 75 bp, synthetic construct
  source 1..75: mol_type = other DNA
gtgccgtatcggtgccaacatgatttgggatgccgaaaaacgcggcgtgctgaaaccaggcgttgaactggttga

SEQ ID NO: 569231 - DNA, 75 bp, synthetic construct
  source 1..75: mol_type = other DNA
gcgtttggcccggacagtgggaagggaaaatctatattgacagcaaacaggtggatattcgcaactgccagcaag

SEQ ID NO: 569232 - DNA, 75 bp, synthetic construct
  source 1..75: mol_type = other DNA
ttattcgcgatctgcaacaacacggtatcgcctgtatctatatttcgcacaaactcaacgaagttaaagcaattt

SEQ ID NO: 569233 - DNA, 75 bp, synthetic construct
  source 1..75: mol_type = other DNA
cgaaataacccacaatggcattatggattatgacctgatgacgctacgctgtcagaagctgctcgcacaggtcag

SEQ ID NO: 569234 - DNA, 75 bp, synthetic construct
  source 1..75: mol_type = other DNA
caatggcgatgaccggtctgccgcaggcttacacgccgggtgccagcatggcctccattggtggcggtacataca

SEQ ID NO: 569235 - DNA, 75 bp, synthetic construct
  source 1..75: mol_type = other DNA
tcaattgcgctgggaagtaacagcaggtcagcgggtgagaacgccattgcactgggcaacaacagtaatgcgggg

SEQ ID NO: 569236 - DNA, 75 bp, synthetic construct
  source 1..75: mol_type = other DNA
atcgttccggtaatggcagttggtaaaaatattaccctcgccgcactcaataaatttaccggagggatcagccag

SEQ ID NO: 569237 - DNA, 75 bp, synthetic construct
  source 1..75: mol_type = other DNA
tcgatgcgctgggtggtgacgcagaagtcaacgctgacggcaccatcaccgcaccgacttacaccattgcgaacg

SEQ ID NO: 569238 - DNA, 75 bp, synthetic construct
  source 1..75: mol_type = other DNA
cagggtaaagatagcgttgcgattggttctggttccattgctgccgctgacaacagcgtcgcactgggtacaggc

SEQ ID NO: 569239 - DNA, 75 bp, synthetic construct
  source 1..75: mol_type = other DNA
atggcgtagatgccaacgcccagggtaaagatagcgttgcgattggttctggttccattgctgccgctgacaaca

SEQ ID NO: 569240 - DNA, 75 bp, synthetic construct
  source 1..75: mol_type = other DNA
aatggatcacagctttatgctatcagtaagtcagtagcggaccgtcttggtgggggggctaccgtcaatgcgcaa

SEQ ID NO: 569241 - DNA, 75 bp, synthetic construct
  source 1..75: mol_type = other DNA
cgcgctgggtaatggtagtgttacaggtggcgcaaatgctattgctcttggacaaggtagttatgccggtttaga

SEQ ID NO: 569242 - DNA, 75 bp, synthetic construct
  source 1..75: mol_type = other DNA
gcgttgggctctgggggtattgcagatgccgataacacgattgctctgggcaatcaaagcctggcagtagctgct

SEQ ID NO: 569243 - DNA, 75 bp, synthetic construct
  source 1..75: mol_type = other DNA
aaaaaccactaacgataacgtggcaaccaacaccactaatatcaccaacctgactggcgatgttgctaacaacac

SEQ ID NO: 569244 - DNA, 75 bp, synthetic construct
  source 1..75: mol_type = other DNA
caggttcggcggataccgatgcggtcaacgtgggtcagttgaaagtaacggacgcgcaggtttcccagaataccc

SEQ ID NO: 569245 - DNA, 75 bp, synthetic construct
  source 1..75: mol_type = other DNA
acgcaggtgcctacaacgccagccatgatggcaatgccagcaaaattaccaacgttgcggctggtgatctctcca

SEQ ID NO: 569246 - DNA, 75 bp, synthetic construct
  source 1..75: mol_type = other DNA
ctggtaacggaacaataatggggatgtcttataaactgaagaaaaggaatttcaataacgttggtgaagcactcc

SEQ ID NO: 569247 - DNA, 75 bp, synthetic construct
  source 1..75: mol_type = other DNA
gccctgggtggtgacgcagaagttaaagctgacggcaccatgactgcaccgacttactctatcgctaatgaagat

SEQ ID NO: 569248 - DNA, 75 bp, synthetic construct
  source 1..75: mol_type = other DNA
gcgctgggcacgggttccgtagcagacgaagaaaatacgatctctgtgggttcttctaccaaccagcgccgtatc

SEQ ID NO: 569249 - DNA, 75 bp, synthetic construct
  source 1..75: mol_type = other DNA
taaagcaaaagccctgggaacatggtcttctgccatcggcgcactgactagtgcaataggtgattcttcaatggc

SEQ ID NO: 569250 - DNA, 75 bp, synthetic construct
  source 1..75: mol_type = other DNA
tggcagactattttggcggtaacgcctcagttgatgaaaacggtgtatttactggcccgtcgtacactatcggta

SEQ ID NO: 569251 - DNA, 75 bp, synthetic construct
  source 1..75: mol_type = other DNA
aagtgattcactggcagactattttggcggtaacgcctcggttgatgaaaacggtgtatttactggcccgtccta

SEQ ID NO: 569252 - DNA, 75 bp, synthetic construct
  source 1..75: mol_type = other DNA
ctataacaccaacgctgacggctctgtagactacagcaacatcactctcggtggtggcaagggcggtacaactcg

SEQ ID NO: 569253 - DNA, 75 bp, synthetic construct
  source 1..75: mol_type = other DNA
aagcgtgcaggaaacgaagcaatacaccgatcagcgcatggttgagatggataacaaactgtcgaaaaccgaaag

SEQ ID NO: 569254 - DNA, 75 bp, synthetic construct
  source 1..75: mol_type = other DNA
tctgatggttctgttgactacagcaacatcagcctcggtgatggtaaaggcggcacgactcgcatcagcaacgtt

SEQ ID NO: 569255 - DNA, 75 bp, synthetic construct
  source 1..75: mol_type = other DNA
ggaacccggcgacgggcagttacagcgtcgtcagcgaaacaacgaagagccgagggaagaagtctgggcgtagta

SEQ ID NO: 569256 - DNA, 75 bp, synthetic construct
  source 1..75: mol_type = other DNA
ctagcagtactgatgccataaatggatcacagctttatgctatcagtaagtcagtagcggaccgtcttggtgggg

SEQ ID NO: 569257 - DNA, 75 bp, synthetic construct
  source 1..75: mol_type = other DNA
ggatcgttatccggcagtgtatcttcaggctcgtttttatcgggtgaaggggattcactggttttcagggggaca

SEQ ID NO: 569258 - DNA, 75 bp, synthetic construct
  source 1..75: mol_type = other DNA
tctggctggcgaccagaaaaaacagcgtgaggagtatgtgcgctggctcaggcagctgaatattgctgttgagac

SEQ ID NO: 569259 - DNA, 75 bp, synthetic construct
  source 1..75: mol_type = other DNA
ttcgttcagctccggtacgctgaatgcgatgtatgagctgttcagtacggataaccgctttaaggtggtatcagc

SEQ ID NO: 569260 - DNA, 75 bp, synthetic construct
  source 1..75: mol_type = other DNA
ggccgcatgcgcactggcctacggtggcgcggtcgttgccaatatctacattcccaaactggcggcggcgcgtcc

SEQ ID NO: 569261 - DNA, 75 bp, synthetic construct
  source 1..75: mol_type = other DNA
agcgcagttctatccggagtggagtcagcccatcctgcaaatggtgtttgtaggtgcttacattctttttgcgcc

SEQ ID NO: 569262 - DNA, 75 bp, synthetic construct
  source 1..75: mol_type = other DNA
ctcaatgcgttattacaggagcgaggcaaaaaaagcgtcggggcggggaatgccattgcggtacagaacctgggc

SEQ ID NO: 569263 - DNA, 75 bp, synthetic construct
  source 1..75: mol_type = other DNA
atgattgatctggctcgccgttcaggtcaaatcgccagcttgtcagcccgtgttgtccgtgaaggtgacgagttt

SEQ ID NO: 569264 - DNA, 75 bp, synthetic construct
  source 1..75: mol_type = other DNA
aggctgggatcagcaaaacgtttacaacccgcaaccagttgaccagtaatcaaagtattctcatgagtctggttg

SEQ ID NO: 569265 - DNA, 75 bp, synthetic construct
  source 1..75: mol_type = other DNA
gcgtgtttaaagagctggcgtctaatatggtccaggcttttacggttcgtgcgaaagaggtttacagtgccaggt

SEQ ID NO: 569266 - DNA, 75 bp, synthetic construct
  source 1..75: mol_type = other DNA
tttctgccaaagagctggagtcagaagtctgacgagaagagccgcacggatatggtgatcctattacaggtcaaa

SEQ ID NO: 569267 - DNA, 75 bp, synthetic construct
  source 1..75: mol_type = other DNA
tgacatagcaagaagtgaaggttttgagctagataatattgataccaaactggcctgcttagaggtgttttcctt

SEQ ID NO: 569268 - DNA, 75 bp, synthetic construct
  source 1..75: mol_type = other DNA
gtgtgtttaaagagctggcagctaatatggtgcaggcttttactgttcgtgcaaaagaggtctacagtgccaggt

SEQ ID NO: 569269 - DNA, 75 bp, synthetic construct
  source 1..75: mol_type = other DNA
aggccgatcaatccggtgtctatcatgagcgtgggggatggctgaaagggcatcacagcggtatgccttactggg

SEQ ID NO: 569270 - DNA, 75 bp, synthetic construct
  source 1..75: mol_type = other DNA
taagcgggccaacctacactattggtggtactgactacactaacgtcggtgatgctctggcagccattaacacat

SEQ ID NO: 569271 - DNA, 75 bp, synthetic construct
  source 1..75: mol_type = other DNA
ggcgcattcagcgccgcgcacggtaccgaagctaccagcaagatcaccaacttactggctggcaaggtatcttct

SEQ ID NO: 569272 - DNA, 75 bp, synthetic construct
  source 1..75: mol_type = other DNA
ggcatctggcgaatccagtattgcattaggtaacaccagtgaagccagcgaacaaaatgcgattgcgctggggca

SEQ ID NO: 569273 - DNA, 75 bp, synthetic construct
  source 1..75: mol_type = other DNA
cgccaatggtcgttgggtctacaaattacaaggtagtaccaatagccagggtgaatactccgccgcactcggtgc

SEQ ID NO: 569274 - DNA, 75 bp, synthetic construct
  source 1..75: mol_type = other DNA
cagttaaacgcaaccaatattctggttacgcaaaatagccaaatgattaaccagcttgccggtaacaccagtgaa

SEQ ID NO: 569275 - DNA, 75 bp, synthetic construct
  source 1..75: mol_type = other DNA
ggaacccggcgacaggcagttacaccgtcgccagcgaaacggccaaaagccgcgggaagaagtctggatgcagga

SEQ ID NO: 569276 - DNA, 75 bp, synthetic construct
  source 1..75: mol_type = other DNA
gattgcagtaggccgcaacagtgctgctgctggcgtagacagcctcgcattaggtagacaatcacttgccagtgc

SEQ ID NO: 569277 - DNA, 75 bp, synthetic construct
  source 1..75: mol_type = other DNA
tagcagttccgtttccagccgtgtaatagttaaaggttctcgtgacaccagcgtgtcggaagaaggtgttgtgat

SEQ ID NO: 569278 - DNA, 75 bp, synthetic construct
  source 1..75: mol_type = other DNA
cccggtatcctcagcttgcccgtgcttatcccgggtgtaagctgccggatttgcgcggtgtttttatccgtggct

SEQ ID NO: 569279 - DNA, 75 bp, synthetic construct
  source 1..75: mol_type = other DNA
cgccgctcacggtaccgatgccaccagcaaaatcaccaacgtcaaagacggtgacctgacggctggcagcacgga

SEQ ID NO: 569280 - DNA, 75 bp, synthetic construct
  source 1..75: mol_type = other DNA
ccggtctgccgcaggcttacactccaggtgccagcatggcctctattggtggcggtacttacaatggtgaatcgg

SEQ ID NO: 569281 - DNA, 75 bp, synthetic construct
  source 1..75: mol_type = other DNA
ctgtggcaaacgaagaaaatacgatctccgtaggttcttccactaaccaacgccgtatcaccaacgttgccgctg

SEQ ID NO: 569282 - DNA, 75 bp, synthetic construct
  source 1..75: mol_type = other DNA
ggaaatggcgtggtgattggttatgacaccactgacggcgaactgctaggtgcattgtcaattggtgatgacggt

SEQ ID NO: 569283 - DNA, 75 bp, synthetic construct
  source 1..75: mol_type = other DNA
attgagcagaacacccaaatcatcaatcagcttgctggtaacaccgacgcaacctatatcgaagaaaatggcgct

SEQ ID NO: 569284 - DNA, 75 bp, synthetic construct
  source 1..75: mol_type = other DNA
atcggttatggtgcctacgtggacgcgaatgcacttaacggcattgccattggtagcaatgcgcaagtcattcat

SEQ ID NO: 569285 - DNA, 75 bp, synthetic construct
  source 1..75: mol_type = other DNA
acatcgcggggccgatgactggttatcccgactacaaccgcacagcgtttttttcgaaagcaaaagagctgatgg

SEQ ID NO: 569286 - DNA, 75 bp, synthetic construct
  source 1..75: mol_type = other DNA
gttgagatggataacaaactgtctaaaactgaaagcaagttgagcggtggtatcgcttctgcaatggcaatgacc

SEQ ID NO: 569287 - DNA, 75 bp, synthetic construct
  source 1..75: mol_type = other DNA
gctgccgcggataacagcgtcgcactgggtacagggtctgtggcaaccgaagaaaatacgatctctgtaggctca

SEQ ID NO: 569288 - DNA, 75 bp, synthetic construct
  source 1..75: mol_type = other DNA
aaatggcagccaggctctggcagataatgcaatcgccataggccagggcaacaaagctgatggcgtggatgccat

SEQ ID NO: 569289 - DNA, 75 bp, synthetic construct
  source 1..75: mol_type = other DNA
cgcacgcgcaaatcatgccgacagcattgcaatgggtaatggttctcagactacccgtggtgcgcagaccaacta

SEQ ID NO: 569290 - DNA, 75 bp, synthetic construct
  source 1..75: mol_type = other DNA
gcttggcgcattgtcgatcggtgacgatggtaaatatcgtcaaatcatcaacgtagccgatggttccgaagccca

SEQ ID NO: 569291 - DNA, 75 bp, synthetic construct
  source 1..75: mol_type = other DNA
atcggtgatgacggtaaatatcgtcaaatcatcaacgtagccgatggttccgaagcccatgacgccgttacggtt

SEQ ID NO: 569292 - DNA, 75 bp, synthetic construct
  source 1..75: mol_type = other DNA
aaagggatatagtgcggcacatggtacagatgccaccagcaccatcaccaacgttaaagccggcactatttctgc

SEQ ID NO: 569293 - DNA, 75 bp, synthetic construct
  source 1..75: mol_type = other DNA
gcgaacgctattgcgataggtgctgagagcaaagctgctgaaaatgcgacggccgttggtaccaaagcggaggcc

SEQ ID NO: 569294 - DNA, 75 bp, synthetic construct
  source 1..75: mol_type = other DNA
cagttttatgataatgctctgataccgttaacggttgattccggtgaagcctcattatctctggtcatcacggca

SEQ ID NO: 569295 - DNA, 75 bp, synthetic construct
  source 1..75: mol_type = other DNA
cggtgaatcggctgttgctttaggtgtgtcgatggtgagcgccaatggtcgttgggtctacaaattacaaggtag

SEQ ID NO: 569296 - DNA, 75 bp, synthetic construct
  source 1..75: mol_type = other DNA
ctattgcgatgggggcagacagtagcagttcgaacgataacgccatcgcgattgggaacaaaacgcaagccctgg

SEQ ID NO: 569297 - DNA, 75 bp, synthetic construct
  source 1..75: mol_type = other DNA
gtcagatcaccaacgtcgcagcaggttcggcggataccgatgcggttaacgtgggtcagttgaaagtaacggacg

SEQ ID NO: 569298 - DNA, 75 bp, synthetic construct
  source 1..75: mol_type = other DNA
ggcgaccttaaggacgattccctgctgtggaacaaagcggctggcgcattcagcgccgcgcacggcactgatacc

SEQ ID NO: 569299 - DNA, 75 bp, synthetic construct
  source 1..75: mol_type = other DNA
ctgggcgggaatgctgtggtgaacactgacggcagtatcactacaccaacttatgccatcgctggcggcagttac

SEQ ID NO: 569300 - DNA, 75 bp, synthetic construct
  source 1..75: mol_type = other DNA
gagtattgcgctgggtagcgaatcagtctccagccgtgtgattgttaaaggttctcgtaacaccagcgtatcgga

SEQ ID NO: 569301 - DNA, 75 bp, synthetic construct
  source 1..75: mol_type = other DNA
tcaatactatcgcgttgggtaatggcagccagtctctggcagataacgcaattgctattggtcagggcaacaagg

SEQ ID NO: 569302 - DNA, 75 bp, synthetic construct
  source 1..75: mol_type = other DNA
agtggccaatacaataacgtgggagaggctctccagagcatcgacaataacacgttgcactgggacagcaaaagt

SEQ ID NO: 569303 - DNA, 75 bp, synthetic construct
  source 1..75: mol_type = other DNA
gaatattcaatggcgctgggagcaagtagcgttgcatctgcggctaacgccattgccgtaggccgcgacagtgct

SEQ ID NO: 569304 - DNA, 75 bp, synthetic construct
  source 1..75: mol_type = other DNA
acgccaactcaacggctgaagactcactggcagtcggtgaagactcgctggcaatgggcgcgaaaaccatcgtta

SEQ ID NO: 569305 - DNA, 75 bp, synthetic construct
  source 1..75: mol_type = other DNA
cagcgaccgacaattctgtcgctatcggcgcaggatcgaccacagatgcaagcaatacggtttcagttggcaaca

SEQ ID NO: 569306 - DNA, 75 bp, synthetic construct
  source 1..75: mol_type = other DNA
gtgatgacggtaaataccgtcaaatcatcaacgtcgccgatggttccgaagcccatgacgccgttacggttcgcc

SEQ ID NO: 569307 - DNA, 75 bp, synthetic construct
  source 1..75: mol_type = other DNA
cggtgcatttagcgccgctcacgggaaagataaaactgccagtgtaatcactaacgtcgctaacggtgcagtctc

SEQ ID NO: 569308 - DNA, 75 bp, synthetic construct
  source 1..75: mol_type = other DNA
caacatcgccactaacaccaccaacatcaccaacctgactgacgctgttaacggtctcggtgacgactccctgct

SEQ ID NO: 569309 - DNA, 75 bp, synthetic construct
  source 1..75: mol_type = other DNA
aacgtcagatcaccaacgtcgcagcaggttcggcggataccgatgcggttaacgtgggtcagttgaaagtaacgg

SEQ ID NO: 569310 - DNA, 75 bp, synthetic construct
  source 1..75: mol_type = other DNA
caaccaaatactatcacgccaactcaacggctgaagactcactggcagtcggtgaagactcgctggcaatgggcg

SEQ ID NO: 569311 - DNA, 75 bp, synthetic construct
  source 1..75: mol_type = other DNA
atggaatttgttatgcctcaaattagccggaccgcactcgttccctacagcgcggagcaaatgtatcaattagtg

SEQ ID NO: 569312 - DNA, 75 bp, synthetic construct
  source 1..75: mol_type = other DNA
aacagccaatggcggtaacggtgcatttagcgccgctcacgggaaagataaaactgccagtgtaatcactaacgt

SEQ ID NO: 569313 - DNA, 75 bp, synthetic construct
  source 1..75: mol_type = other DNA
gcattcagcgccgcgcacggtaccgaagctaccagcaagatcaccaacttactggctggcaagatatcttctaac

SEQ ID NO: 569314 - DNA, 75 bp, synthetic construct
  source 1..75: mol_type = other DNA
ggtgccgacgcgctggcatgggatgacgcctcaggtgcattcaccgccaaacacggcaccgaagccaccaacaaa

SEQ ID NO: 569315 - DNA, 75 bp, synthetic construct
  source 1..75: mol_type = other DNA
tattggggtaaatgcaatctctgctgctggggctactgcagtgggttataacagtaatgctactggacaaagttc

SEQ ID NO: 569316 - DNA, 75 bp, synthetic construct
  source 1..75: mol_type = other DNA
agttatcggttatgacaccactgacggtgagttgctcggtgcattgtcaattggtgatgacggtaaataccgtca

SEQ ID NO: 569317 - DNA, 75 bp, synthetic construct
  source 1..75: mol_type = other DNA
gccattggtgcagtcgcaaccacaccaaccaaatactatcacgccaactcaacggctgaagactcactggcagtc

SEQ ID NO: 569318 - DNA, 75 bp, synthetic construct
  source 1..75: mol_type = other DNA
tctattggtggcggtacttacaacggtgaatcggctgttgctttaggtgtgtcgatggtgagcgccaatggtcgt

SEQ ID NO: 569319 - DNA, 75 bp, synthetic construct
  source 1..75: mol_type = other DNA
cggttctcagttaaaaaccactaacgacaatgtggcaaccaacaccaccaacatcaccaatctggctgatacggt

SEQ ID NO: 569320 - DNA, 75 bp, synthetic construct
  source 1..75: mol_type = other DNA
tggcgctgatacagaagccgctgaaaatgctaccgccattggcaatagcgcgaaggcaaaagggactaatagcat

SEQ ID NO: 569321 - DNA, 75 bp, synthetic construct
  source 1..75: mol_type = other DNA
tgacacaactgacggtgaactgcttggcgcattgtcgatcggtgacgatggtaaatatcgtcaaatcatcaatgt

SEQ ID NO: 569322 - DNA, 75 bp, synthetic construct
  source 1..75: mol_type = other DNA
accaccagtatcaccaacctgactgatacggtgaataatctcggtgaagacgccctgaaatgggacgacgccgca

SEQ ID NO: 569323 - DNA, 75 bp, synthetic construct
  source 1..75: mol_type = other DNA
accgcctacaacatggatgcaccgcagaactctgtgggtgaattctccgtaggtagcgaagacggtcaacgtcag

SEQ ID NO: 569324 - DNA, 75 bp, synthetic construct
  source 1..75: mol_type = other DNA
cactgacgccgttaacggctcgcagctcaaaaccaccaacgataacgtggcgaccaacaccaccaacatcgccac

SEQ ID NO: 569325 - DNA, 75 bp, synthetic construct
  source 1..75: mol_type = other DNA
cactgacgccgttaacggctcccagctcaaaaccaccaacgacaacgtgtcgaccaacaccaccaacatcgccac

SEQ ID NO: 569326 - DNA, 75 bp, synthetic construct
  source 1..75: mol_type = other DNA
cactgacgccgttaacggctctcagctcaaaaccaccaacgacaacgtgccgaccaacaccaccaacatcgccac

SEQ ID NO: 569327 - DNA, 75 bp, synthetic construct
  source 1..75: mol_type = other DNA
gccatcaatggatcacagctttatgctattagtaagtcagtagcggataatcttggtggaggagcgaccgtcaat

SEQ ID NO: 569328 - DNA, 75 bp, synthetic construct
  source 1..75: mol_type = other DNA
caccatagcgttgggcaaggatacagtagcaagtgctatggatgctcttgcattcgggagactggcaaaggcgtc

SEQ ID NO: 569329 - DNA, 75 bp, synthetic construct
  source 1..75: mol_type = other DNA
cgaagaaaatggtgcaggtattaactatgtgcgtaccaatgacaccggtttaaccttcaccgatgccagcgcagc

SEQ ID NO: 569330 - DNA, 75 bp, synthetic construct
  source 1..75: mol_type = other DNA
acagtctcgcattaggtagaaaagctaaggcagagaatacaggttccatggctatgggagcagaaacagaagcca

SEQ ID NO: 569331 - DNA, 75 bp, synthetic construct
  source 1..75: mol_type = other DNA
tgcaggaaacgaagcaatacaccgatcagcgcatggttgagatggataacaaactgtccaaaaccgaaagcaagc

SEQ ID NO: 569332 - DNA, 75 bp, synthetic construct
  source 1..75: mol_type = other DNA
ggttcttctaccaaccagcgccgtatcaccaacgttgctgccggtgttaatgccaccgatgcggttaacgtttcg

SEQ ID NO: 569333 - DNA, 75 bp, synthetic construct
  source 1..75: mol_type = other DNA
caatgtcaccacgattattatggggagccgtactgcacacactgccagaccgggcgattcagtgaggaggaggta

SEQ ID NO: 569334 - DNA, 75 bp, synthetic construct
  source 1..75: mol_type = other DNA
caatgtcaccacgattattatggggagcagtactgcacacactgccagaccgggcgcttcagtgaggaggaggta

SEQ ID NO: 569335 - DNA, 75 bp, synthetic construct
  source 1..75: mol_type = other DNA
cgcttgattcatcgtctgcagcaattcgttccggatgccttacccgtggttcgtaaagccagctggcactgcaga

SEQ ID NO: 569336 - DNA, 75 bp, synthetic construct
  source 1..75: mol_type = other DNA
ggcattttcctcacagatttcagttattgaaggaccacctggaacaggtaaaacacagactatactcaatattgt

SEQ ID NO: 569337 - DNA, 75 bp, synthetic construct
  source 1..75: mol_type = other DNA
caatgtcaccacgattattatggggagccgtactgcacacactgccagaccgggcggttcagtgaggagggggta

SEQ ID NO: 569338 - DNA, 75 bp, synthetic construct
  source 1..75: mol_type = other DNA
caatgtcaccacgattattatggggagccgtactgcacacactgccagaccgggcgcttcagtgaggaggcggta

SEQ ID NO: 569339 - DNA, 75 bp, synthetic construct
  source 1..75: mol_type = other DNA
gcaatcgctactcacgcgagcttttcatcgtgccggtatggcgcaaaagctggtggctgggcgtgtggtacgaaa

SEQ ID NO: 569340 - DNA, 75 bp, synthetic construct
  source 1..75: mol_type = other DNA
agcatgcaaattcaatatattgcagagttcacgtaggcctgataagcgtagcgcatcaggctattttgcatttgt

SEQ ID NO: 569341 - DNA, 75 bp, synthetic construct
  source 1..75: mol_type = other DNA
gtggcagttcgctcagataccacccgcaatacgacactgaacgtccctggtttgaacacactgacgacgggctga

SEQ ID NO: 569342 - DNA, 75 bp, synthetic construct
  source 1..75: mol_type = other DNA
cgcttgattcatcgtctgcagcaattcgttccggatgccttacccgtggtacgtaaagccagctggcactgcagt

SEQ ID NO: 569343 - DNA, 75 bp, synthetic construct
  source 1..75: mol_type = other DNA
cgcttgattaatcgtctgcagcaattcgttccggatgccttacccgtggtccgtaaagccagctggcactgcagt

SEQ ID NO: 569344 - DNA, 75 bp, synthetic construct
  source 1..75: mol_type = other DNA
cgcttgattaatcgtctgcagcaattcgttccggatgccttacccgtggttcgtaaagccagctggcactgcagc

SEQ ID NO: 569345 - DNA, 75 bp, synthetic construct
  source 1..75: mol_type = other DNA
cgtctgaactcggatgccttacccgtggtgcgtaaagccagctggcactgcagacaatgtcaccacgattattat

SEQ ID NO: 569346 - DNA, 75 bp, synthetic construct
  source 1..75: mol_type = other DNA
cattgacgtaaaaaccaaccagccgatgtttacaccgtatttaattaaagacaccgaagtagtcgataaagacgg

SEQ ID NO: 569347 - DNA, 75 bp, synthetic construct
  source 1..75: mol_type = other DNA
gcgtcaagcccgctggcactgcagacaatgccgccacaattattatggggaacgctattgtacacactgtcatac

SEQ ID NO: 569348 - DNA, 75 bp, synthetic construct
  source 1..75: mol_type = other DNA
ttgatggtaacggacgtctgacgggggcccgtaccgcacagactgcaccttacgatcgctacacctgccaccttt

SEQ ID NO: 569349 - DNA, 75 bp, synthetic construct
  source 1..75: mol_type = other DNA
acgccgttttcccgagtaaagattttgctgatatcaaaggggctgatatcgccaaaggtacgctgaacggtgttc

SEQ ID NO: 569350 - DNA, 75 bp, synthetic construct
  source 1..75: mol_type = other DNA
tgccggaaatgcacgagaaaggtgccgatgttgttgtcgttctggcgcactctggcttgtctgctgatccgtata

SEQ ID NO: 569351 - DNA, 75 bp, synthetic construct
  source 1..75: mol_type = other DNA
ggcaaggaagttaaagagtggctggagtgctccgccgggcagtttaaccagatagatcccaacagcactaaaccg

SEQ ID NO: 569352 - DNA, 75 bp, synthetic construct
  source 1..75: mol_type = other DNA
atgtacgcaaaatcctttatcgctcttgatagcaacggacgtctgacgggcgcccgtactgcacaggccgcacct

SEQ ID NO: 569353 - DNA, 75 bp, synthetic construct
  source 1..75: mol_type = other DNA
gacgacaggctgacagagcacggtcaacagtgcccttatgtcaggccggagcgcagagaaatacagttgattaaa

SEQ ID NO: 569354 - DNA, 75 bp, synthetic construct
  source 1..75: mol_type = other DNA
tcgtaccggatgccttacccgtagtacgtaaagccagctggtactgcagacaatgtcaccacgattattatgggg

SEQ ID NO: 569355 - DNA, 75 bp, synthetic construct
  source 1..75: mol_type = other DNA
atgtacgcaaaatcctttgtcgctcttgatggcaacggacgtctgacgggcgcccgtactggacaggccgcacct

SEQ ID NO: 569356 - DNA, 75 bp, synthetic construct
  source 1..75: mol_type = other DNA
atgtacgcaaaatcctttctcgctcttgatagcaacggacgtctgacgggcgcccgtactgaacaggccgcacct

SEQ ID NO: 569357 - DNA, 75 bp, synthetic construct
  source 1..75: mol_type = other DNA
atgtacgcaaaatcctttatcgctcttgatcgcaacggacgtctgacgggcgcccgtactgaacaggccgcacct

SEQ ID NO: 569358 - DNA, 75 bp, synthetic construct
  source 1..75: mol_type = other DNA
caatgtcatcaagattattatggggagcggtactgcacgcactgccataccgggcacttcagtgaggaggggtgc

SEQ ID NO: 569359 - DNA, 75 bp, synthetic construct
  source 1..75: mol_type = other DNA
ttgttcattacctttcaaagcaagaagttaaggactatttgcgagagtatgcatgaggcaaatgagatctttggt

SEQ ID NO: 569360 - DNA, 75 bp, synthetic construct
  source 1..75: mol_type = other DNA
ttcgaagggcagctggaactggaaaacggctacatcaaagtacagtcgggtattcatggtaatgccacccagacc

SEQ ID NO: 569361 - DNA, 75 bp, synthetic construct
  source 1..75: mol_type = other DNA
ttatcgccaggccattacttccgccggtacaggctgcatggcggcactggatgctgaacgctacctcgacggttt

SEQ ID NO: 569362 - DNA, 75 bp, synthetic construct
  source 1..75: mol_type = other DNA
cgcagatccgcgaaaacccgttccgctactgggaatatattcctacggaagtgaagccgttctttgtgcgtaccg

SEQ ID NO: 569363 - DNA, 75 bp, synthetic construct
  source 1..75: mol_type = other DNA
cgtgattatgtcttttcgcacctcggtggcgatgagatcgcgttgcagtattccgactacgataaaatcgcgctg

SEQ ID NO: 569364 - DNA, 75 bp, synthetic construct
  source 1..75: mol_type = other DNA
gtgttatgcatggcggtgttgatggtcaccggttactttatcggcaagccgctgccttcggtcagcggtgaggcg

SEQ ID NO: 569365 - DNA, 75 bp, synthetic construct
  source 1..75: mol_type = other DNA
caagggtaaaaaagatgatgcggcggtattattttgcttcggtagtgaaaaactatccgaagtcaccgaaggctg

SEQ ID NO: 569366 - DNA, 75 bp, synthetic construct
  source 1..75: mol_type = other DNA
atggcatgtaccgcgatctgtttatgcgcgcggcacgcaaagttagccactctggttggacaaaaaatctggctg

SEQ ID NO: 569367 - DNA, 75 bp, synthetic construct
  source 1..75: mol_type = other DNA
tcaggttgatgtatttattgctggcgttgggactggcggtacgctgaccggcgtcagccgctacattaaaggcac

SEQ ID NO: 569368 - DNA, 75 bp, synthetic construct
  source 1..75: mol_type = other DNA
tcgatctggaatgggggaaacagaatatttgggccgagtactggaggaaggtcacggatatgactaacgttttgc

SEQ ID NO: 569369 - DNA, 75 bp, synthetic construct
  source 1..75: mol_type = other DNA
tgagcagtttatagagggcaaacaggaagtcatcaaaactgacagaaccggctaccagatgaaggttaaagagtt

SEQ ID NO: 569370 - DNA, 75 bp, synthetic construct
  source 1..75: mol_type = other DNA
tactattttgcttcggtggtgaaaaactatccgaagtcgccgaaggctgcggatgcgatgtttaaagttggcgtc

SEQ ID NO: 569371 - DNA, 75 bp, synthetic construct
  source 1..75: mol_type = other DNA
atgaccgttacagacgcagtaattcaggtaacggtacttttgcaaaagtgatagcagccatcgagcgtctgaaat

SEQ ID NO: 569372 - DNA, 75 bp, synthetic construct
  source 1..75: mol_type = other DNA
cattctcgagacagagcgcgggctgaacttctccattcaggctgttccccgtgatggtgcggggcgtaccattca

SEQ ID NO: 569373 - DNA, 75 bp, synthetic construct
  source 1..75: mol_type = other DNA
ttggctgtagccggagttgaacacgacaggcgcaccaatacccggcaaaccaaaagtatggtgatgtacgcaaaa

SEQ ID NO: 569374 - DNA, 75 bp, synthetic construct
  source 1..75: mol_type = other DNA
gaactggcccgcggcaatttaggggcgctgaggggatccgggataacgctggctaaccgtgccggatggatagac

SEQ ID NO: 569375 - DNA, 75 bp, synthetic construct
  source 1..75: mol_type = other DNA
ctgaaggtcatgcaggatctggcagaagaaggtatgacaatggtgatagtgactcatgaaatcggttttgccgaa

SEQ ID NO: 569376 - DNA, 75 bp, synthetic construct
  source 1..75: mol_type = other DNA
acaaagaagaggcggaaaaactggcacgtgagctgctggcgaaagtcggtctggcagaacgtgcacatcactacc

SEQ ID NO: 569377 - DNA, 75 bp, synthetic construct
  source 1..75: mol_type = other DNA
tccgaaagttgacgagcgcctgattcgccaggaagcgggtatggtgttccagcagttttacctcttcccgcatct

SEQ ID NO: 569378 - DNA, 75 bp, synthetic construct
  source 1..75: mol_type = other DNA
atgagaaaaaataatacggcaataatattcggcagcctgtttttttcctgcagcgtgatggccggtacaggtacg

SEQ ID NO: 569379 - DNA, 75 bp, synthetic construct
  source 1..75: mol_type = other DNA
tgattagtcaattaccaaactggaaatttttgctggtctggagcatcccttttttatgggtagtatcccagttaa

SEQ ID NO: 569380 - DNA, 75 bp, synthetic construct
  source 1..75: mol_type = other DNA
ttcaggagtcctgcaaagataatctggtcgtagaaagcaatggtgatatttatgaatgcgaccattttgtctatc

SEQ ID NO: 569381 - DNA, 75 bp, synthetic construct
  source 1..75: mol_type = other DNA
ttgtattctgaaagaatggaaagatcgcagcaaggcgaagactgtatatggcacaattactcacagctcaccagg

SEQ ID NO: 569382 - DNA, 75 bp, synthetic construct
  source 1..75: mol_type = other DNA
tcgccgtgaacagtctggatggtgccctgaccaataatgagcagaccgcctccggcggtgtggtggtggccaccg

SEQ ID NO: 569383 - DNA, 75 bp, synthetic construct
  source 1..75: mol_type = other DNA
tcagcgatttgcgcggaacaggagaaactgccggtgcatgggaaacatccacgccttacgaatccctgctggttt

SEQ ID NO: 569384 - DNA, 75 bp, synthetic construct
  source 1..75: mol_type = other DNA
ctgagcgcggaggtcccggattcacgccatttattaccttcagcagtaacggacagcctttcaccgtaaaggaag

SEQ ID NO: 569385 - DNA, 75 bp, synthetic construct
  source 1..75: mol_type = other DNA
tttgaattacatcttccggcagaagggacccctgctcagtggcaggcaaaattgaatgttacggttactgtgcaa

SEQ ID NO: 569386 - DNA, 75 bp, synthetic construct
  source 1..75: mol_type = other DNA
agtttcatggttttgttactgatgaggcacctaaatggacttggcagataggttcatccggacagacttgggccg

SEQ ID NO: 569387 - DNA, 75 bp, synthetic construct
  source 1..75: mol_type = other DNA
atgcctctgtagtgtcggattttgaactgtggttgccggcagagggcacaccggcccgctggcaggcagggctga

SEQ ID NO: 569388 - DNA, 75 bp, synthetic construct
  source 1..75: mol_type = other DNA
cagataagttctcctgaccagacttgggcagtggatactgctgatgcgcgtacagagaatgggcaactggttttt

SEQ ID NO: 569389 - DNA, 75 bp, synthetic construct
  source 1..75: mol_type = other DNA
tgattttgaattacaccttccggcagaagggacacctgctcagtggcaggcaaaactgaatgttacggttactgt

SEQ ID NO: 569390 - DNA, 75 bp, synthetic construct
  source 1..75: mol_type = other DNA
gtatctgcatgaaatgaaaaacggcatgacgccgctggagcagtacgactataaattcggctgtgacagtcgtcc

SEQ ID NO: 569391 - DNA, 75 bp, synthetic construct
  source 1..75: mol_type = other DNA
ctcgatttacggttgcaggccgatccacaactggcattagggaaatccaccaaagcaatgtttaccgaatacaga

SEQ ID NO: 569392 - DNA, 75 bp, synthetic construct
  source 1..75: mol_type = other DNA
acacgttggcctggtgatgatgggggaatggaaagcgcgggttaatggcgtggaaatgagtggtggcgatgcgct

SEQ ID NO: 569393 - DNA, 75 bp, synthetic construct
  source 1..75: mol_type = other DNA
tttgcttctgctttatcggattttgaactgtatctgtcatctgaaaatactccgacacagtggcatgcaacactg

SEQ ID NO: 569394 - DNA, 75 bp, synthetic construct
  source 1..75: mol_type = other DNA
gctaaccactctgcgcccttcaccactggcgaagggaaacccgcagcatacgaatctggtcgagatcgaaaaaat

SEQ ID NO: 569395 - DNA, 75 bp, synthetic construct
  source 1..75: mol_type = other DNA
tgcatcgatcctcagcgcgatccgcttaggtggcgggcgcgttgtggaggtgggttcaagtaacctggcggctct

SEQ ID NO: 569396 - DNA, 75 bp, synthetic construct
  source 1..75: mol_type = other DNA
atgcctcagcggtatcggattttgaactgcggttgccggcagagggcacaccggctcgctggcaggcagggctga

SEQ ID NO: 569397 - DNA, 75 bp, synthetic construct
  source 1..75: mol_type = other DNA
gtgatagttacacatttcctgatgcgaacggtggtggccgttggaggattacaaatccaaagccagaaatttctg

SEQ ID NO: 569398 - DNA, 75 bp, synthetic construct
  source 1..75: mol_type = other DNA
ctggactacatatcaaagggtccaggaaaatctgattaaaggcggtttgcctggccgaactgaaaaagggaaaag

SEQ ID NO: 569399 - DNA, 75 bp, synthetic construct
  source 1..75: mol_type = other DNA
cgtatcaacctgatcgcattacacaatcccaaccgattcatgtcggcacaggatactggagtaccgaaattatgt

SEQ ID NO: 569400 - DNA, 75 bp, synthetic construct
  source 1..75: mol_type = other DNA
gttcacagctcggacttgagccaggtagcgccctcggtcatgcatatttactgccttttggtaataaaaacgaaa

SEQ ID NO: 569401 - DNA, 75 bp, synthetic construct
  source 1..75: mol_type = other DNA
aaaccgtgcaccagcagcagtaaaaaataacgacgtgatcagctttattaatcagccatcaatgaaagagcaact

SEQ ID NO: 569402 - DNA, 75 bp, synthetic construct
  source 1..75: mol_type = other DNA
aggttctcaaacaggtgatggtgaataccggagggaacaaaaggcaggtccccgcaaaacgtcaaaaccgcggct

SEQ ID NO: 569403 - DNA, 75 bp, synthetic construct
  source 1..75: mol_type = other DNA
aatttattctttcagccattatttcggcggctctgttttattcagcagcgtcacatgcagatattcttgatggtg

SEQ ID NO: 569404 - DNA, 75 bp, synthetic construct
  source 1..75: mol_type = other DNA
tcggggttgctttctttcaccctgaatcaggggatggcagtcagtgccggcagacaggacgacggggcatccgta

SEQ ID NO: 569405 - DNA, 75 bp, synthetic construct
  source 1..75: mol_type = other DNA
gaaattctgtttaatggctttgtcactgacgaagctcccaaatggacttggcagataagttctcccgaccagatt

SEQ ID NO: 569406 - DNA, 75 bp, synthetic construct
  source 1..75: mol_type = other DNA
tgtgaaggtctggcaaaaaccaagccgggtatggtgatgggctttatcggcctgctggtgaacattccggtgaac

SEQ ID NO: 569407 - DNA, 75 bp, synthetic construct
  source 1..75: mol_type = other DNA
cgcgttctattttctatatcacctttatcgcgtattgggtgttgggcctgccgagcggctacattctggcactga

SEQ ID NO: 569408 - DNA, 75 bp, synthetic construct
  source 1..75: mol_type = other DNA
ggccctgttttattcggcagcgccacatgcagatattcttgatggtggagaaattcagtttaatggttttgtcac

SEQ ID NO: 569409 - DNA, 75 bp, synthetic construct
  source 1..75: mol_type = other DNA
tgatgccaaaggaaatttaacgcctgaggtgattgacgcatcgaaaaaatttaatgctgccgcgctgcgcgccca

SEQ ID NO: 569410 - DNA, 75 bp, synthetic construct
  source 1..75: mol_type = other DNA
cggcgcacggtcagcagtgtccttatgtcagaccagaacgcagggaggtacaactgattaagcgtctgcagcaat

SEQ ID NO: 569411 - DNA, 75 bp, synthetic construct
  source 1..75: mol_type = other DNA
tcgatggtaatggccgcctaaccggagtccgaactgcacagacagccccttatgatcgctatacatgccacctct

SEQ ID NO: 569412 - DNA, 75 bp, synthetic construct
  source 1..75: mol_type = other DNA
gcggcagtgcgctcagataccacccgcaatacgacaccgaacggccctggtttgaacacactgacgacgggctga

SEQ ID NO: 569413 - DNA, 75 bp, synthetic construct
  source 1..75: mol_type = other DNA
ttcaaccggggagaaggacgccatgccgtggcacgagccatttactatggacagtgtggtgagattagaaaacgc

SEQ ID NO: 569414 - DNA, 75 bp, synthetic construct
  source 1..75: mol_type = other DNA
gtgcactcagataccatccgcaatacgacactgaacttccctggtttgaacacactgacgacaggctgacagagc

SEQ ID NO: 569415 - DNA, 75 bp, synthetic construct
  source 1..75: mol_type = other DNA
tttgaacacactgacgacgggctgacggagcacggtcaacagtgcccttatgtcagaccggagcgcagagaaata

SEQ ID NO: 569416 - DNA, 75 bp, synthetic construct
  source 1..75: mol_type = other DNA
gtggcagtgcactcagataccatccgcaatacgacactgaacgtccctggtttgaacacactgacgacgggctga

SEQ ID NO: 569417 - DNA, 75 bp, synthetic construct
  source 1..75: mol_type = other DNA
gtccggcaaagtcaccgttaacgatataacagaaactgtgcgcaaatacgtgcctgaaatgcgtgagaaaggtgc

SEQ ID NO: 569418 - DNA, 75 bp, synthetic construct
  source 1..75: mol_type = other DNA
tccgcacctataactttgatgttattgatggcgtgaattaccagattgacgtcacccagcccgcccgctatgacg

SEQ ID NO: 569419 - DNA, 75 bp, synthetic construct
  source 1..75: mol_type = other DNA
tgcccgtaccgggacggctgttgcctgcgtgtcgtctggcggctgaggaatatgactatgtacgcaaaatccttt

SEQ ID NO: 569420 - DNA, 75 bp, synthetic construct
  source 1..75: mol_type = other DNA
caatgtcaccacgattattatggggaacgctattgtacacactgtcatacagggcgtttcagtgaggaggctgtg

SEQ ID NO: 569421 - DNA, 75 bp, synthetic construct
  source 1..75: mol_type = other DNA
ggtacgcaaggccgactggcactgtagcggttgcaacaacgactactacggagaacgttactgcctgacctgtcg

SEQ ID NO: 569422 - DNA, 75 bp, synthetic construct
  source 1..75: mol_type = other DNA
tattttcgcgcataaccacccgtcaggcacaccggaaccaagccgcgcagatatcaacataactgcacggctaaa

SEQ ID NO: 569423 - DNA, 75 bp, synthetic construct
  source 1..75: mol_type = other DNA
taacccgctgggcggctgcttcccgctgctgatccagatgccaatcttcctggcgttatactacatgctgatggg

SEQ ID NO: 569424 - DNA, 75 bp, synthetic construct
  source 1..75: mol_type = other DNA
ttcttcattcagaagatgtcgccgaccactgtgaccgacccgatgcagcaaaagatcatgacctttatgccggtc

SEQ ID NO: 569425 - DNA, 75 bp, synthetic construct
  source 1..75: mol_type = other DNA
actgctgaaatggatccatagctttgtgggtaactggggcttctccattatcatcatcacctttatcgttcgtgg

SEQ ID NO: 569426 - DNA, 75 bp, synthetic construct
  source 1..75: mol_type = other DNA
attcagcagcagctgatttaccgtggtctggaaaaacgtggcctgcatagccgcgagaagaaaaatcctgattcg

SEQ ID NO: 569427 - DNA, 75 bp, synthetic construct
  source 1..75: mol_type = other DNA
gcgaaaaaccgctggagatctccacctttggtcagttgaagcaatccatcaatctgccgccgcatctcgacactg

SEQ ID NO: 569428 - DNA, 75 bp, synthetic construct
  source 1..75: mol_type = other DNA
gtatgctacagcctaagattcaggccatgcgtgagcgtctgggcgatgacaaacagcgtatcagccaggaaatga

SEQ ID NO: 569429 - DNA, 75 bp, synthetic construct
  source 1..75: mol_type = other DNA
atctcgcttggtgtttatccaacgatcacacttgctgaagctcgcgcccgccgtgatgaggccagaaaaatagtg

SEQ ID NO: 569430 - DNA, 75 bp, synthetic construct
  source 1..75: mol_type = other DNA
ggcgtggatacaaccagactggccaggcattgtgctaagtgatgtgtgtatgcctggctgctctggtatcgattt

SEQ ID NO: 569431 - DNA, 75 bp, synthetic construct
  source 1..75: mol_type = other DNA
cattttcgcgcataaccacccgtcaggcacaccggaacctagccgcgcagatatcaacatgactgcacggctaaa

SEQ ID NO: 569432 - DNA, 75 bp, synthetic construct
  source 1..75: mol_type = other DNA
gcgaaaaaccgctggagatctccacctttggtcagttgaagcaatccatcactctgccaccgcatctcgataccg

SEQ ID NO: 569433 - DNA, 75 bp, synthetic construct
  source 1..75: mol_type = other DNA
gaaacttcaccgcagtttatttatcaggcacagagcggtctgaccggtcgtgatggcccggataacccggctaac

SEQ ID NO: 569434 - DNA, 75 bp, synthetic construct
  source 1..75: mol_type = other DNA
gcttgatctgaccatcaacacccgtggtggtgatgttgagcaggccctgctgccggcttacccgaaagagctgaa

SEQ ID NO: 569435 - DNA, 75 bp, synthetic construct
  source 1..75: mol_type = other DNA
ggtgattcattgctgtttgttgccggagcgttggcatcactggaaaccaacgatctcaacgtccatatgatggtg

SEQ ID NO: 569436 - DNA, 75 bp, synthetic construct
  source 1..75: mol_type = other DNA
tggtttgcgtgggtatttggtgcgttgtgctggatgacgacctttacgcgggtgtggtgtgggtatctgacgctg

SEQ ID NO: 569437 - DNA, 75 bp, synthetic construct
  source 1..75: mol_type = other DNA
gccgtacgctggagtcttacggccatttatgcacgtgctccctgatgctgaacaatcaaccgccgtactgggctg

SEQ ID NO: 569438 - DNA, 75 bp, synthetic construct
  source 1..75: mol_type = other DNA
tttacgcgctggtgccgtttggctttattcttgctgcaccggagcaaaatgcgctggcaggcggctggttgttgt

SEQ ID NO: 569439 - DNA, 75 bp, synthetic construct
  source 1..75: mol_type = other DNA
gggcttaccgacgcgggcggctttcttgatatttctctcgattttcttttttacgcgctggtaccttttgggttt

SEQ ID NO: 569440 - DNA, 75 bp, synthetic construct
  source 1..75: mol_type = other DNA
taaatatgcctcttactgtgccagtttaaccaaagcacaaatagttgacatttaccagcagtacttagaccgcta

SEQ ID NO: 569441 - DNA, 75 bp, synthetic construct
  source 1..75: mol_type = other DNA
ataaaaatgatgctgccgttttgcttgttgatcatcaggctggtttactttcccttgtacgggatatcgaacccg

SEQ ID NO: 569442 - DNA, 75 bp, synthetic construct
  source 1..75: mol_type = other DNA
tcttactgtttgtgctgggatgtttattccctgcatggtttgcgtggtttgcgtggtttgtgtggtttgcgtgga

SEQ ID NO: 569443 - DNA, 75 bp, synthetic construct
  source 1..75: mol_type = other DNA
atttcggctctgtccgtcctttttatctctgacactgatgtctgttttattattgccttcatatcttcaggcagt

SEQ ID NO: 569444 - DNA, 75 bp, synthetic construct
  source 1..75: mol_type = other DNA
ttatgcgctggtgccgttcgggtttattctcgctgcaccggaacaaaacgcgctggcgggcggctggctgctgtt

SEQ ID NO: 569445 - DNA, 75 bp, synthetic construct
  source 1..75: mol_type = other DNA
tatctggcggcgctgattgccattttactaaacagattgcttgatggtctggacggcgcgctggcacggcgtcga

SEQ ID NO: 569446 - DNA, 75 bp, synthetic construct
  source 1..75: mol_type = other DNA
ttgcttgttgatcatcaggctggtttactttcccttgtacgggatatcgaacccgataagtttaaaaataacgtg

SEQ ID NO: 569447 - DNA, 75 bp, synthetic construct
  source 1..75: mol_type = other DNA
cggctggctgctgtttgcgtttatcggcacaggcagcagttttctcgccttttgctgcgctggcggcgaaacatc

SEQ ID NO: 569448 - DNA, 75 bp, synthetic construct
  source 1..75: mol_type = other DNA
tggtgggcaaactgatcacgccttccggcacattgccatttttgctgccgatccaccagacggacgacggcgagt

SEQ ID NO: 569449 - DNA, 75 bp, synthetic construct
  source 1..75: mol_type = other DNA
tcccagccagagcgtcgctttcgtaccattccacgcccgctggcgaaagacttttatcccgatcacggctgggaa

SEQ ID NO: 569450 - DNA, 75 bp, synthetic construct
  source 1..75: mol_type = other DNA
aagacgcgcgcgatcagtacgaaatccgtactcacttgcgtctggttgacatcgttgagccaaccgagaaaaccg

SEQ ID NO: 569451 - DNA, 75 bp, synthetic construct
  source 1..75: mol_type = other DNA
ccattccccgcccgctggcgaaagactttcaccccgatcacggctgggaatctctgctgatgcgcgttatcagcg

SEQ ID NO: 569452 - DNA, 75 bp, synthetic construct
  source 1..75: mol_type = other DNA
gccaacatcttccctggggatatgttatttaaaaactttggcgtcacccgtcacgggcgcgtggtgttttatgat

SEQ ID NO: 569453 - DNA, 75 bp, synthetic construct
  source 1..75: mol_type = other DNA
ggctttgcgcgttcttattttatggtttatgcaccgctgcccgcagcgctggtcgagtggctacgggaaattctg

SEQ ID NO: 569454 - DNA, 75 bp, synthetic construct
  source 1..75: mol_type = other DNA
gcattctggccagcccgtgcgttccgccggcctgctgtcgtaaggcgattcagatggtccgtctgttccggcagg

SEQ ID NO: 569455 - DNA, 75 bp, synthetic construct
  source 1..75: mol_type = other DNA
gtaaatggaccgcttgtcgacgagtcagggcgggttatttttgccgattttaacccatcgaaacgaccgtggtcg

SEQ ID NO: 569456 - DNA, 75 bp, synthetic construct
  source 1..75: mol_type = other DNA
accattttctgcacccgactcaatattagttgatactaatgccatcaaatctgcattacaaagtgatcatgttaa

SEQ ID NO: 569457 - DNA, 75 bp, synthetic construct
  source 1..75: mol_type = other DNA
ttaccgtcggaaaagagacgcttcgctgcacgctgagtggcgaaatcccgacatgggaaaatgcgaatgagggca

SEQ ID NO: 569458 - DNA, 75 bp, synthetic construct
  source 1..75: mol_type = other DNA
acaacattatccccatcatggacctgctgtactgggcgcaggatgaagaggtcaggattggtatgccacaactga

SEQ ID NO: 569459 - DNA, 75 bp, synthetic construct
  source 1..75: mol_type = other DNA
atcctccgcgggctgatgcgcgactcgcggattctgatcctcgatgaacctaccgcctcgcttacccctgcggaa

SEQ ID NO: 569460 - DNA, 75 bp, synthetic construct
  source 1..75: mol_type = other DNA
atgacacctcatgaaccgcgtaagttccttgcaaaaattgaggacgaacttgagcttgaggtaacctggaaaaaa

SEQ ID NO: 569461 - DNA, 75 bp, synthetic construct
  source 1..75: mol_type = other DNA
tatccccaatggtttctaccccgctggcatcgatgacgttttaaaactaccagatccggtctgggtgattggtgg

SEQ ID NO: 569462 - DNA, 75 bp, synthetic construct
  source 1..75: mol_type = other DNA
taaaaaggcaacactgcatcatggtgttggttcccggaatctgagacctgaaagcctgatatcgggcggaggtga

SEQ ID NO: 569463 - DNA, 75 bp, synthetic construct
  source 1..75: mol_type = other DNA
tgtggctgcgtatgcctttgatgttctctgccggcagatgcaaaaggcgacaaaagagtatctctcaacccagag

SEQ ID NO: 569464 - DNA, 75 bp, synthetic construct
  source 1..75: mol_type = other DNA
tgaaaaagagtaatcccagcccgtacatgttttttatgcaggataatgatttcaccctgtttggcgcgtcgcccg

SEQ ID NO: 569465 - DNA, 75 bp, synthetic construct
  source 1..75: mol_type = other DNA
caacgctgctgctggaatccgcagatatcgacagcaaagatgatttaaaaagcctgctgctggtagatagtgcgc

SEQ ID NO: 569466 - DNA, 75 bp, synthetic construct
  source 1..75: mol_type = other DNA
ccatacgtagaagagatctggctatcgcatattggcgtggatgtgccgtgcgcggatgcgttcttcccggcgcca

SEQ ID NO: 569467 - DNA, 75 bp, synthetic construct
  source 1..75: mol_type = other DNA
ggtggattcgctaatataacaacattagtaaaacaagaaaaagcaaaaaataaagctaccttttattttgatgcg

SEQ ID NO: 569468 - DNA, 75 bp, synthetic construct
  source 1..75: mol_type = other DNA
tgactgtgaagagttatctaaagctaattcttctactgatgctataagaaatctttatctcgataaaatgaaggt

SEQ ID NO: 569469 - DNA, 75 bp, synthetic construct
  source 1..75: mol_type = other DNA
ctctcgaaagtaatgaccgatacagagtaactgatcgcacattactaataactgaagcttttgacgattttcgta

SEQ ID NO: 569470 - DNA, 75 bp, synthetic construct
  source 1..75: mol_type = other DNA
agcaactgattaaacggataagaaaactgctggcgctgagccggaataacagtaatccccatgaggcaggtcagg

SEQ ID NO: 569471 - DNA, 75 bp, synthetic construct
  source 1..75: mol_type = other DNA
tgccgggatgggggttccgattgactatttgctggcggcgtcgttgatggcgatcccgggggggatcctttttgc

SEQ ID NO: 569472 - DNA, 75 bp, synthetic construct
  source 1..75: mol_type = other DNA
agatatcgtgcgccagccggtcggtgaatcacctgtcacgttaacgcgtgcctatggtgaatcatcacaacttgg

SEQ ID NO: 569473 - DNA, 75 bp, synthetic construct
  source 1..75: mol_type = other DNA
tttgattgaggtcgccgagcgaatcgtaaatgttcaccgtcggggcattgttgattgctgtttggaaagaacacg

SEQ ID NO: 569474 - DNA, 75 bp, synthetic construct
  source 1..75: mol_type = other DNA
atgatatttctccctgccggttcgcgtatctggctggttgccggtatcaccgatatgcgaaatggttttaacggc

SEQ ID NO: 569475 - DNA, 75 bp, synthetic construct
  source 1..75: mol_type = other DNA
tgcgcattacagcattaggtgacaccgtcacaattaacgctctcaccccaaatggcgcgactttgctgacattgc

SEQ ID NO: 569476 - DNA, 75 bp, synthetic construct
  source 1..75: mol_type = other DNA
ttcaccctgtttggcgcgtcgccggaaagttcgctcaagtatgacgccaccagccgccagattgagatctacccg

SEQ ID NO: 569477 - DNA, 75 bp, synthetic construct
  source 1..75: mol_type = other DNA
tccggatgtactgcagcaggcggtgaatgatgcggtcgcaaatattccgcagccggcggacggtaaaagtctcac

SEQ ID NO: 569478 - DNA, 75 bp, synthetic construct
  source 1..75: mol_type = other DNA
gcaggcacaagcgtttgaagagaaactgacttccctgtcggcggtattacagaagcatgtgacggtggatgaggt

SEQ ID NO: 569479 - DNA, 75 bp, synthetic construct
  source 1..75: mol_type = other DNA
cctttccccggggcacgtatgccacacaccagggcggactctggcgggcgtatgaaaaaacgcacgggatgcggg

SEQ ID NO: 569480 - DNA, 75 bp, synthetic construct
  source 1..75: mol_type = other DNA
cttctatctactggaatctgcgggtgcaggagttataattccactgtcgttattaaaaacggcaaactatgagga

SEQ ID NO: 569481 - DNA, 75 bp, synthetic construct
  source 1..75: mol_type = other DNA
tacgttaagcattacaccaacgccagtctgctggtgcgtgatgattttgctttcgaagacggtctgttcagcggc

SEQ ID NO: 569482 - DNA, 75 bp, synthetic construct
  source 1..75: mol_type = other DNA
cttgcggtacatatcatccttggcgatatcgaggagagcgaaatcctcgttccggggatagactttcaaaggcaa

SEQ ID NO: 569483 - DNA, 75 bp, synthetic construct
  source 1..75: mol_type = other DNA
aaataactgtcctgatttctgtttttatctcgctgaaacgctgatggtgattgaccatcagaaaaaaagcacccg

SEQ ID NO: 569484 - DNA, 75 bp, synthetic construct
  source 1..75: mol_type = other DNA
gtccactgctggatgaagacgcccgcttatgctccctttcggtttttgacgctttccgcttattgcagaatctgt

SEQ ID NO: 569485 - DNA, 75 bp, synthetic construct
  source 1..75: mol_type = other DNA
tgtcactattcaggcactttccggcaatggcgaagctctgctggcattactggataacgccctgcctgcgggtgt

SEQ ID NO: 569486 - DNA, 75 bp, synthetic construct
  source 1..75: mol_type = other DNA
tctaacgccacgctgagctggggcgactggttcctcgggatgttgccgctcagtattttactggttctgctggtt

SEQ ID NO: 569487 - DNA, 75 bp, synthetic construct
  source 1..75: mol_type = other DNA
ggtgccgcgctgggcagagacggaactgcaggcaatgggcccgctctgttcgcgtgaaaaacggatgctggggct

SEQ ID NO: 569488 - DNA, 75 bp, synthetic construct
  source 1..75: mol_type = other DNA
ggcagaatttaactataaccttagtcagtatattccttttaaattacaagcgttaaatgactggtttgagtatct

SEQ ID NO: 569489 - DNA, 75 bp, synthetic construct
  source 1..75: mol_type = other DNA
ccaatgaagagttcgcggaacgtttgggaattgctcctgattggatggatgctatagatactagccaacttgctt

SEQ ID NO: 569490 - DNA, 75 bp, synthetic construct
  source 1..75: mol_type = other DNA
tcaaagctgaagatctgcaagatattcgcgtcggcgatgtgatctacctgaccggtacgctggtgacctgccgtg

SEQ ID NO: 569491 - DNA, 75 bp, synthetic construct
  source 1..75: mol_type = other DNA
cccgaacagctcgctcagccaggctttaaattcactgcaaaatccctctcgtgggccgtttccggtttttctaat

SEQ ID NO: 569492 - DNA, 75 bp, synthetic construct
  source 1..75: mol_type = other DNA
aagccctcaacatcagcaaaatcgaatcttttgtcgcagtcaccactattttcctcgggcaaaatgagatcccgg

SEQ ID NO: 569493 - DNA, 75 bp, synthetic construct
  source 1..75: mol_type = other DNA
cgatccccggcggtattttgtttgcgcgtattcttagcccggcgaccgagccttcgcaggtgacatttgaaaacc

SEQ ID NO: 569494 - DNA, 75 bp, synthetic construct
  source 1..75: mol_type = other DNA
ctctctggaaagtatttttggctatgtgctggcaccgctggcgtggatcatgggtgtggactggagtgatgccaa

SEQ ID NO: 569495 - DNA, 75 bp, synthetic construct
  source 1..75: mol_type = other DNA
gacggggaagagaaacccttcactccgttctggtgccgccgtcttaatgatggcgacgtcattgtggtggataaa

SEQ ID NO: 569496 - DNA, 75 bp, synthetic construct
  source 1..75: mol_type = other DNA
gcggctggtttggttttgccaatgcctctctggaaagtattttttggctatgtgctggcaccgctggcgtggatc

SEQ ID NO: 569497 - DNA, 75 bp, synthetic construct
  source 1..75: mol_type = other DNA
gcaaacgggcggcacgctggaagtgaaaaccgtggcgattatctcctttgcgctttgtggttttgctaactttgg

SEQ ID NO: 569498 - DNA, 75 bp, synthetic construct
  source 1..75: mol_type = other DNA
ttttagatatggaaatggcagcaattttcatagccaacaattaaatttatcttttcatgaaaaaataaataaata

SEQ ID NO: 569499 - DNA, 75 bp, synthetic construct
  source 1..75: mol_type = other DNA
cggaagaattaaacgcgggctctatcgagcaggtggtttatgcctggatattgcgtctgccatcgcagccgctgc

SEQ ID NO: 569500 - DNA, 75 bp, synthetic construct
  source 1..75: mol_type = other DNA
gcgtgtgcgtgccgccgttgaagcggaatccctgaaaatgacacgccagcagtggttccgtatccgtaaagcggc

SEQ ID NO: 569501 - DNA, 75 bp, synthetic construct
  source 1..75: mol_type = other DNA
gaactggctgtggtggcggaggagttaaacgcgggctcgattgaacaggtggtttacgcctgggtattacgttta

SEQ ID NO: 569502 - DNA, 75 bp, synthetic construct
  source 1..75: mol_type = other DNA
tttcagaacatctgatgctggtagatctcgcccgaaatgacctggcgcgcatttgcacccccggcagccgctacg

SEQ ID NO: 569503 - DNA, 75 bp, synthetic construct
  source 1..75: mol_type = other DNA
gtggcatcgcgacgactgcgcgtgaagaaaacgtcattgggcattatattactgaccgcgaccacattatcaaaa

SEQ ID NO: 569504 - DNA, 75 bp, synthetic construct
  source 1..75: mol_type = other DNA
gcggaaacattgaaaatgacccgccaacaatggttccgtatccgtaaagcggcactgggttacgacgtaccgtaa

SEQ ID NO: 569505 - DNA, 75 bp, synthetic construct
  source 1..75: mol_type = other DNA
gactatcaccgcctggcagagtcagggggtaccactagtttctggtggagggaaagggactgaatcagtttttga

SEQ ID NO: 569506 - DNA, 75 bp, synthetic construct
  source 1..75: mol_type = other DNA
atgaacgtcaataagaaaaaactggccgatatttttggcgttgatgtcaggactatcaccgcctggcagagtcag

SEQ ID NO: 569507 - DNA, 75 bp, synthetic construct
  source 1..75: mol_type = other DNA
gaaaaggtattgagatcatttttgattctgcgaaggcgatcgaatggtatgcgcagcgtgaagccgatattgaaa

SEQ ID NO: 569508 - DNA, 75 bp, synthetic construct
  source 1..75: mol_type = other DNA
cggaggagttaaacgcgggctcgattgaacaggtggtttacgcctgggtattacgtttaccatcgcagccgctgc

SEQ ID NO: 569509 - DNA, 75 bp, synthetic construct
  source 1..75: mol_type = other DNA
gcgcagcgggaaaaagatatcgaaaatgaaaagctccgcaaagaactggaagattcgcgtgcggctgcagaatca

SEQ ID NO: 569510 - DNA, 75 bp, synthetic construct
  source 1..75: mol_type = other DNA
ccgaaattttcaacgtggatccacgaacgattgaacgttggcagtctcaggggctgagagttttgtcggggggag

SEQ ID NO: 569511 - DNA, 75 bp, synthetic construct
  source 1..75: mol_type = other DNA
tgcgggttttatcttcgcctttcgcgtacttccggcgattatcttcgtcactgcgctcatcagtctgctgtacta

SEQ ID NO: 569512 - DNA, 75 bp, synthetic construct
  source 1..75: mol_type = other DNA
cgcaggatttatctttggtttcagggtattaccggcaattatcttcgttacagcactggtgagtattctctacta

SEQ ID NO: 569513 - DNA, 75 bp, synthetic construct
  source 1..75: mol_type = other DNA
ctctatcggggtggtggttggcgcattttctgcggttgcgccacaccgtgcaccggaaatcgcccagcttgggtt

SEQ ID NO: 569514 - DNA, 75 bp, synthetic construct
  source 1..75: mol_type = other DNA
cacctctattcttttctcctcagaatgttagtcgtttaactgaaaaatttaagagcagcggtactcatgtatggc

SEQ ID NO: 569515 - DNA, 75 bp, synthetic construct
  source 1..75: mol_type = other DNA
ccagcccggaatatattcaggctacgctgcctaagtactattccactgctgagcaatataagaatggtatttcgc

SEQ ID NO: 569516 - DNA, 75 bp, synthetic construct
  source 1..75: mol_type = other DNA
acgcgcgctggcggcggcgacactttctaacctgatgagtgccaccattgcaggattctttattggcttagcgta

SEQ ID NO: 569517 - DNA, 75 bp, synthetic construct
  source 1..75: mol_type = other DNA
caaaacgaaattccggcaatcgtcaaaccctttatcgatcgtctgaatcgcaatgaattatttacagcgatttgt

SEQ ID NO: 569518 - DNA, 75 bp, synthetic construct
  source 1..75: mol_type = other DNA
ctggaactacaagcaaccgcacgagccgcagtctgacgaagtggcaaaagagaacaacggctatgcgctggaaga

SEQ ID NO: 569519 - DNA, 75 bp, synthetic construct
  source 1..75: mol_type = other DNA
ctgaaagtgtgtgaagtgctggcctccaccagcgcaccggatcgcacaaccaccttcctgtacgcgctgggctgg

SEQ ID NO: 569520 - DNA, 75 bp, synthetic construct
  source 1..75: mol_type = other DNA
ctgcggtacgccaaaagccgacttcctgaaagtgtgtgaagtgctggcctccaccagcgcaccggatcgcacaac

SEQ ID NO: 569521 - DNA, 75 bp, synthetic construct
  source 1..75: mol_type = other DNA
catagtgacattgttaatggtgagatatcctcaagactgttgattatgctacaacgttatgagcctcggttgaag

SEQ ID NO: 569522 - DNA, 75 bp, synthetic construct
  source 1..75: mol_type = other DNA
acaactggggctacgactggctgccgaagtgggaccagacctacgacgtcatcaagtatttcaacatgatggacg

SEQ ID NO: 569523 - DNA, 75 bp, synthetic construct
  source 1..75: mol_type = other DNA
gctaacactctgacgccgaatgtcggtgatgcaaactcacaaacgccggaatataaagcgttcttagtcaacatc

SEQ ID NO: 569524 - DNA, 75 bp, synthetic construct
  source 1..75: mol_type = other DNA
gtcgttggttgttctactggcaacactccggggtcatggatcaggtgtggcgtttcaacgtcgactacaccaaag

SEQ ID NO: 569525 - DNA, 75 bp, synthetic construct
  source 1..75: mol_type = other DNA
atgaacatagggcgattgcgtgacaggataacgattcagaccctgaaacagaccagggatataaccggcgaaata

SEQ ID NO: 569526 - DNA, 75 bp, synthetic construct
  source 1..75: mol_type = other DNA
ccgcgcaccggaagcggttatcgcgaaagagcgtgagaagctggaaggttatgcggaagcgaaagcgaaactgat

SEQ ID NO: 569527 - DNA, 75 bp, synthetic construct
  source 1..75: mol_type = other DNA
aactcgagcgttttgctgcacgtaaagcagtcgttgctgcggttgacgcactcggcctgctggaagaaattaaac

SEQ ID NO: 569528 - DNA, 75 bp, synthetic construct
  source 1..75: mol_type = other DNA
tgctggtaaaagcgatggcgaataaatttggcgaagaaaaaggtaacagccgctatttataccgactgtttccga

SEQ ID NO: 569529 - DNA, 75 bp, synthetic construct
  source 1..75: mol_type = other DNA
tggactgggaagaggtctggaaggtcatccgcgactacaatcgcgttgcactgctcagtgcggtcgggctggtgg

SEQ ID NO: 569530 - DNA, 75 bp, synthetic construct
  source 1..75: mol_type = other DNA
gctgctgctggcgctggtttgctatctggtactggaaagccaggcgaagaagctgcgggcgaaaaatgaagcggc

SEQ ID NO: 569531 - DNA, 75 bp, synthetic construct
  source 1..75: mol_type = other DNA
gggcaggcgatacctactggcgcatctccgaacgctggggattgcgtggcggcattcagtacgatactcgtctgg

SEQ ID NO: 569532 - DNA, 75 bp, synthetic construct
  source 1..75: mol_type = other DNA
ctggcaccgggttacacccagacgctggaaccgcgcgcacaatatttgtatgtgccgtatcgcgatcagagcgac

SEQ ID NO: 569533 - DNA, 75 bp, synthetic construct
  source 1..75: mol_type = other DNA
ctccggggtcatggatcaggtgtggcgtttcaacgtcgactacaccaaagtcagcgatcctagctacttcaatga

SEQ ID NO: 569534 - DNA, 75 bp, synthetic construct
  source 1..75: mol_type = other DNA
aactggagcgttttgctgcacgcaaagcgatcgttgctgccgttgatgccctcggcctgctggaagagattaaac

SEQ ID NO: 569535 - DNA, 75 bp, synthetic construct
  source 1..75: mol_type = other DNA
atgaaaaacgcgacgttctaccttctggacaatgacaccaccgtcgatggcttaagcgccgttgagcaactggtg

SEQ ID NO: 569536 - DNA, 75 bp, synthetic construct
  source 1..75: mol_type = other DNA
gcggcctgagctccaactacggtctgggtacgcaagagatgctgcgttcgaacattctgccgtatcaaaactctt

SEQ ID NO: 569537 - DNA, 75 bp, synthetic construct
  source 1..75: mol_type = other DNA
tgcttttgcttctggctatcacgagcattattttcgccgccgccagcggcgcttatcatcttgatctacagcaac

SEQ ID NO: 569538 - DNA, 75 bp, synthetic construct
  source 1..75: mol_type = other DNA
gccgggttacccgccacgatccggtcttaactctggtactggtcggtattgcgctgggtacgctatgcggagccg

SEQ ID NO: 569539 - DNA, 75 bp, synthetic construct
  source 1..75: mol_type = other DNA
tgctgctggcagctatcagtatcacttttgccgccgtaagtggggcttatcatctcgatatacagcaactgctgg

SEQ ID NO: 569540 - DNA, 75 bp, synthetic construct
  source 1..75: mol_type = other DNA
tggcgacaaaccagcggcagggctgtttatcttcagtcagcaggataacgaaccggtagagctggtgagtaaatt

SEQ ID NO: 569541 - DNA, 75 bp, synthetic construct
  source 1..75: mol_type = other DNA
ttaattattgaaggttgtcttgctcatctaaagcaaaaaaggccggacgaacattcgcttcttgttgcccattac

SEQ ID NO: 569542 - DNA, 75 bp, synthetic construct
  source 1..75: mol_type = other DNA
gctttccgacgatgaagccaggtcgctgggcctgaatgtactacgcctgcgcttagcattgattatttgcgccac

SEQ ID NO: 569543 - DNA, 75 bp, synthetic construct
  source 1..75: mol_type = other DNA
acctctggggagcatgggctgcagcagataacagtggtgtggactggcagcctgttgctgcagggtttaaaggtt

SEQ ID NO: 569544 - DNA, 75 bp, synthetic construct
  source 1..75: mol_type = other DNA
agcaaccaaatctttctgagatatctaaatgtcgagcagaaaacgataaagaaactagagtaaactgctacgata

SEQ ID NO: 569545 - DNA, 75 bp, synthetic construct
  source 1..75: mol_type = other DNA
aagaaaaccgaagtatttcttagttgggatgtatatttaggccttgaacaaaccagcatgctttatcgccttgat

SEQ ID NO: 569546 - DNA, 75 bp, synthetic construct
  source 1..75: mol_type = other DNA
aacgctggggcgcgtgggcggcaagtgatagctctggcgttgactattcacatatagcagctggttttaagggac

SEQ ID NO: 569547 - DNA, 75 bp, synthetic construct
  source 1..75: mol_type = other DNA
ttaattattgaaggttgtcttgctcgtctaaggcaaaaaaggccggacgaacattcgcttcttgttgcccattac

SEQ ID NO: 569548 - DNA, 75 bp, synthetic construct
  source 1..75: mol_type = other DNA
agcgctggggtggatgggctgcgagtgatagttccggagtcgattactcatcaatagccgctggtttcaaaggac

SEQ ID NO: 569549 - DNA, 75 bp, synthetic construct
  source 1..75: mol_type = other DNA
agcgttgctgacgctggagcgtgatcgcgttgaacagcggtcgctgttatcgcaaccagcaagctggctaacact

SEQ ID NO: 569550 - DNA, 75 bp, synthetic construct
  source 1..75: mol_type = other DNA
acgcttaccaacgagcaggatgcatctctgcgctacggtcaggtagaagtaccgctgccgccgggagccgatgtt

SEQ ID NO: 569551 - DNA, 75 bp, synthetic construct
  source 1..75: mol_type = other DNA
gaatatcggcaaatttttctatccgctggggcgtaacaatgtgcgtaccagctccagcctgtcatttatcagcta

SEQ ID NO: 569552 - DNA, 75 bp, synthetic construct
  source 1..75: mol_type = other DNA
gtggtttgaccgctgagcaatccactattgagcgcgcgctggccatgaactggctggcgaaatatatggcgacaa

SEQ ID NO: 569553 - DNA, 75 bp, synthetic construct
  source 1..75: mol_type = other DNA
tgtttctgcttcgccagcgaccacgggggcgcgaacgatgaccgcctggacgcaggatctcatctatgcaggcga

SEQ ID NO: 569554 - DNA, 75 bp, synthetic construct
  source 1..75: mol_type = other DNA
ccgccgataaaccgagccgctatttactgaccgtctccgccagcgatggcgcggcatatcgtgttactactacca

SEQ ID NO: 569555 - DNA, 75 bp, synthetic construct
  source 1..75: mol_type = other DNA
ggggcaatactggcaacagcgtcaggcacctgcgtggttagcgtctcttacaacgctgaagccagaaacctcggt

SEQ ID NO: 569556 - DNA, 75 bp, synthetic construct
  source 1..75: mol_type = other DNA
ttcagcaatatgcgtgggataaagcggcaaacagcaatcagccgctggcgcacacggttgtgctgctcaatagcg

SEQ ID NO: 569557 - DNA, 75 bp, synthetic construct
  source 1..75: mol_type = other DNA
aaaccttcccgttatgtacagaacagccagttttcaccgctgaaaaaatatccactggtggaacagttccgttat

SEQ ID NO: 569558 - DNA, 75 bp, synthetic construct
  source 1..75: mol_type = other DNA
gtggcgataacacgctgatgttgccagagctggcgagtaacatccgactacaaagcagcgaaacgccgcaggaga

SEQ ID NO: 569559 - DNA, 75 bp, synthetic construct
  source 1..75: mol_type = other DNA
taaaccgagccgttatttgttaaccgtctccgccagtgacggcgcggcgtatcgtgtcaccaccaccaaagagat

SEQ ID NO: 569560 - DNA, 75 bp, synthetic construct
  source 1..75: mol_type = other DNA
gtaacattccggtgaccgttgaacgccagttgtatcggcttatccctggtgaagaaagagatgagctttattctg

SEQ ID NO: 569561 - DNA, 75 bp, synthetic construct
  source 1..75: mol_type = other DNA
agcctgatcctcgatacaccggaatctccactggcagatgcggtggcaaacgtcttaaccatgacgttgctgaaa

SEQ ID NO: 569562 - DNA, 75 bp, synthetic construct
  source 1..75: mol_type = other DNA
gtgtggatgcgatttacatgctgaaaggctggcagcggtcagcaggtgctaaggcagaactggcgctggcggaga

SEQ ID NO: 569563 - DNA, 75 bp, synthetic construct
  source 1..75: mol_type = other DNA
tactattcatttttccctattttatataaaaaaaatgaatctatgagacttgctaaatattattctcaaagactt

SEQ ID NO: 569564 - DNA, 75 bp, synthetic construct
  source 1..75: mol_type = other DNA
ggttcgctttctgttgcccgccaactggatggtacggcgattgggatgtgtgcattacccaacggcaaacgctgt

SEQ ID NO: 569565 - DNA, 75 bp, synthetic construct
  source 1..75: mol_type = other DNA
gagaaaagtgctgcccgagttgtggtaccggggtatacagcagggagggggggctgcaggaaggcaactggaagg

SEQ ID NO: 569566 - DNA, 75 bp, synthetic construct
  source 1..75: mol_type = other DNA
atatcggggatttgtctgaagaacttacaaataaaatcggcgaaatcggaaacgaaaaaagcctgaatcccatgt

SEQ ID NO: 569567 - DNA, 75 bp, synthetic construct
  source 1..75: mol_type = other DNA
cgggtaaaaaagagatccgcaccatgaaagatggctggacggtaaaaaccaaagatcgcagcttgtctgcacaat

SEQ ID NO: 569568 - DNA, 75 bp, synthetic construct
  source 1..75: mol_type = other DNA
gcggcgattcagaaatttgtcgaagcagaaggcttctccgtcgttcgtgaatattgcggacacggtattggtcgc

SEQ ID NO: 569569 - DNA, 75 bp, synthetic construct
  source 1..75: mol_type = other DNA
gtactgcacacactgccagaccggaggattcagtattccccggacaactcaggaggaaatatgcgaattctgaac

SEQ ID NO: 569570 - DNA, 75 bp, synthetic construct
  source 1..75: mol_type = other DNA
tgcggaagaagcagagaagaaatttaatgatcgtgcggaaattaaaaagcaactggatcctctgaaactggaaat

SEQ ID NO: 569571 - DNA, 75 bp, synthetic construct
  source 1..75: mol_type = other DNA
gagaaaaccggcccttataaccgctgtttctctttagtattggtatcgataaaaccaaagcaatgggattattgc

SEQ ID NO: 569572 - DNA, 75 bp, synthetic construct
  source 1..75: mol_type = other DNA
cggattatacggtgaaggtgagaaagtggttttgtgtgatgtgtgacgaagattatgagggggaaaagtgctgcc

SEQ ID NO: 569573 - DNA, 75 bp, synthetic construct
  source 1..75: mol_type = other DNA
aaccaccgtggtttgaacatgaccagatgactgtcgctgagaaaatcctgctgcgatgcacctggcttgacccgg

SEQ ID NO: 569574 - DNA, 75 bp, synthetic construct
  source 1..75: mol_type = other DNA
taccggggtatacagcagggcgtgggggcggcaggaggtgccgtcggaaaatatcggaactgataatccgttact

SEQ ID NO: 569575 - DNA, 75 bp, synthetic construct
  source 1..75: mol_type = other DNA
taaaagctgggaacagacaatgtctgacgcgcaaaagtcgaatttgttaacaaaagagggtgcggaaggggcggc

SEQ ID NO: 569576 - DNA, 75 bp, synthetic construct
  source 1..75: mol_type = other DNA
gaactgaaacgggaagggcataccgtcttaaacccggcagtacttcctgacgggctgacacagccgcagtacatg

SEQ ID NO: 569577 - DNA, 75 bp, synthetic construct
  source 1..75: mol_type = other DNA
ttcgttgtgtggatgcggtttatatgctgaaaggctggcagcggtcggcaggcgctaaggcagaactggcactgg

SEQ ID NO: 569578 - DNA, 75 bp, synthetic construct
  source 1..75: mol_type = other DNA
gtgattgatggtcagcaacgtctcacatcattatatattggattgtgtggaacgtatgcgtataaacagccccgg

SEQ ID NO: 569579 - DNA, 75 bp, synthetic construct
  source 1..75: mol_type = other DNA
gcgtggatgcgatttacatgctgaaaggctggcagcggtcggcaggcgctaaggcagaactggcactggcagaga

SEQ ID NO: 569580 - DNA, 75 bp, synthetic construct
  source 1..75: mol_type = other DNA
gtccaatgaccgggtataaaaatttcaaccgtgaggcgtttcacaatgcggaagaggtactgaaacgggaagggc

SEQ ID NO: 569581 - DNA, 75 bp, synthetic construct
  source 1..75: mol_type = other DNA
tgggggggacggcggttgggatgtgggcctttcccaacggcaaacgctgtagcgaacacacacttgccgccggga

SEQ ID NO: 569582 - DNA, 75 bp, synthetic construct
  source 1..75: mol_type = other DNA
acccgccgaaagagttgcgtcgctatgcgcatgacaactggcaactggttgatgtggtaacgaagaacggaccat

SEQ ID NO: 569583 - DNA, 75 bp, synthetic construct
  source 1..75: mol_type = other DNA
gaaatcccacttggcattctgaccgcttttgttggcgcaccgtttttcctgtttttgttgttacgcggaggtcgc

SEQ ID NO: 569584 - DNA, 75 bp, synthetic construct
  source 1..75: mol_type = other DNA
tgtcaacacaattactgagtgggtaaagcccgaaagcatgaaaaaaatgtgggaggggatagtcagttttggcga

SEQ ID NO: 569585 - DNA, 75 bp, synthetic construct
  source 1..75: mol_type = other DNA
atgaccgggcgggatgaaatggatatcaagcgcattctaaaaacaaaggaagcacttgataacatcaggaatttt

SEQ ID NO: 569586 - DNA, 75 bp, synthetic construct
  source 1..75: mol_type = other DNA
gcagatgcgctggggctcacactctatgagctgatgcttcgcgctggcgaagccgcattccaggtgtgtcgttcg

SEQ ID NO: 569587 - DNA, 75 bp, synthetic construct
  source 1..75: mol_type = other DNA
actgggacaattacgttaacggcaagcgcctctatttttggcgcggagcaggtaggcaaattgttctatctggaa

SEQ ID NO: 569588 - DNA, 75 bp, synthetic construct
  source 1..75: mol_type = other DNA
cgacactatagatgccatgggtgataaggctgcaacggaagataaaacgtttgaggcctgccgaagtgcaatcac

SEQ ID NO: 569589 - DNA, 75 bp, synthetic construct
  source 1..75: mol_type = other DNA
cagcaagatgatagcgcactcgagaacactttcgccgtactgacgaagcttggcctggatgaggtactttgggaa

SEQ ID NO: 569590 - DNA, 75 bp, synthetic construct
  source 1..75: mol_type = other DNA
ataacatcacgctgaaaatcgatccatctgtagtgctggcaacgcgtagctatgtcgataacctcattgaaaccc

SEQ ID NO: 569591 - DNA, 75 bp, synthetic construct
  source 1..75: mol_type = other DNA
agacgataagtacgctggcaactgtgtcagcagggctggcctgcggtcttaccggaaacagcaccgcatcagcag

SEQ ID NO: 569592 - DNA, 75 bp, synthetic construct
  source 1..75: mol_type = other DNA
cgtacgcgaagttacgctgaagctgattggcgctaacttcaaccgtcgcaatgagtactggttgatactggaaga

SEQ ID NO: 569593 - DNA, 75 bp, synthetic construct
  source 1..75: mol_type = other DNA
gtttgctgaatctgcgcaatcgccacatcgatggtttccactaccaggacagcgccaccttctggaaagcctact

SEQ ID NO: 569594 - DNA, 75 bp, synthetic construct
  source 1..75: mol_type = other DNA
tcgtgtaggtaataccggcggagctgaaacacgaccgcgtaacatcgcatttaattacatcgtgagggcggcata

SEQ ID NO: 569595 - DNA, 75 bp, synthetic construct
  source 1..75: mol_type = other DNA
tgaccaatcagggcgcggcgcggctggcgaacgcggcgacactcggtaccaagctcaacctgacgcagatggcgg

SEQ ID NO: 569596 - DNA, 75 bp, synthetic construct
  source 1..75: mol_type = other DNA
gatgttcgaaaagacggaatcaccaattatattggtgttcgcccgcgcaacattgcatttaactacatcgtgagg

SEQ ID NO: 569597 - DNA, 75 bp, synthetic construct
  source 1..75: mol_type = other DNA
ttgacggagatatttcacctgaggttaaaaatgatttatttcaaataaaagatcctgaccaatcatggggggagt

SEQ ID NO: 569598 - DNA, 75 bp, synthetic construct
  source 1..75: mol_type = other DNA
tgagcgaatctagtttatatgccctcagtaatactggttcatggggagcaatgatgtgggattctggaagtaaag

SEQ ID NO: 569599 - DNA, 75 bp, synthetic construct
  source 1..75: mol_type = other DNA
atttacgcggtgagtttattcgctgctgggatgatgggcgcggtattgattcaggccgcatgttactgagcgcgc

SEQ ID NO: 569600 - DNA, 75 bp, synthetic construct
  source 1..75: mol_type = other DNA
gccgcgaaggaagcaaccggcgaaacacttcctgctaatgcaacagagaaacaacgtcaggaatatcttgcgaaa

SEQ ID NO: 569601 - DNA, 75 bp, synthetic construct
  source 1..75: mol_type = other DNA
cgggattgaattatgtggctgatttttgcgcagctatggggattcgtcgctgggaagtccatatgccaggagtaa

SEQ ID NO: 569602 - DNA, 75 bp, synthetic construct
  source 1..75: mol_type = other DNA
tggctgcgatgcagcgacacgttgaggcgcataaggtacttccgctggtgataccggtgctgttctaccacggtg

SEQ ID NO: 569603 - DNA, 75 bp, synthetic construct
  source 1..75: mol_type = other DNA
ttgacgcgaagcttggtcaaaacaaagcagaaattgagttaatatctgctaacatgcgcgctgaaatttcagctt

SEQ ID NO: 569604 - DNA, 75 bp, synthetic construct
  source 1..75: mol_type = other DNA
atgatttactgcgtcagttacgtcgcgcggtcaaattattaaatggttccgtcaatcttatctctttggcagacg

SEQ ID NO: 569605 - DNA, 75 bp, synthetic construct
  source 1..75: mol_type = other DNA
aagccacgctgcgcaaatggcacgaggaattgcaggaaaaacgcggcaatcgtgccagtctgcggcgtagtacga

SEQ ID NO: 569606 - DNA, 75 bp, synthetic construct
  source 1..75: mol_type = other DNA
aaaggtatcgccatgacgctctggccatgtccggtgggcgaaccgtgcatcaccgacgtgtgtgcagccgtggcg

SEQ ID NO: 569607 - DNA, 75 bp, synthetic construct
  source 1..75: mol_type = other DNA
cagaaagagaacaactggggctacgactggctgccgaagtgggaccagacctacgacgtcatcaagtatttcaac

SEQ ID NO: 569608 - DNA, 75 bp, synthetic construct
  source 1..75: mol_type = other DNA
attgctcagccggaacagtttgtggaaatcagcgaaacgctggcggcggcgaaaggcattgccaatggcgatcgt

SEQ ID NO: 569609 - DNA, 75 bp, synthetic construct
  source 1..75: mol_type = other DNA
gcagtaaacgccattgctcacgccattctgggcggcgcagtggcggcaatgcagggtaataatgccgctgccggt

SEQ ID NO: 569610 - DNA, 75 bp, synthetic construct
  source 1..75: mol_type = other DNA
gccttacagggcggggcaacgctgaccgcgcatggtggggcgctgcaccgtacccagaacatgggcggcacgcgc

SEQ ID NO: 569611 - DNA, 75 bp, synthetic construct
  source 1..75: mol_type = other DNA
gtacctcagcatgagcattccgtggagcgacagcagcaccgtgacctacaacggttcctacggcagcggatcgga

SEQ ID NO: 569612 - DNA, 75 bp, synthetic construct
  source 1..75: mol_type = other DNA
cgcccggaacagacaaactataacctgatgttttcccactattttaatatggggagtattcgcaacatgagcatc

SEQ ID NO: 569613 - DNA, 75 bp, synthetic construct
  source 1..75: mol_type = other DNA
aaaccagtgctcacgataaaactgcctcgttcctgtatgccctcggctggacgcaacactccgttggtgcgcaaa

SEQ ID NO: 569614 - DNA, 75 bp, synthetic construct
  source 1..75: mol_type = other DNA
ctttcagctgggcatctcaccgagcacgcgagcaaaatcgatgcgattataagtcgcaatggcacaaatacggca

SEQ ID NO: 569615 - DNA, 75 bp, synthetic construct
  source 1..75: mol_type = other DNA
atgggtatttgtccacaccaaacctgcctaccgaagcgacggaacaaaaacagcagcggtaaggaagatgagaac

SEQ ID NO: 569616 - DNA, 75 bp, synthetic construct
  source 1..75: mol_type = other DNA
ttggatgcgcccgatctggatgagttaaagctcaacctgggtaacagccagcgcattatgctagttgcggcgaac

SEQ ID NO: 569617 - DNA, 75 bp, synthetic construct
  source 1..75: mol_type = other DNA
tcgccagccagagcacaggaagaaatttcccgcctgcaacagcaaataaaacagtgggacgatgactactggaag

SEQ ID NO: 569618 - DNA, 75 bp, synthetic construct
  source 1..75: mol_type = other DNA
ccattaaagtctgttgttgaatttgcactggcaacaggcttaagacgctcgaacatcatcaaccttgaatggcaa

SEQ ID NO: 569619 - DNA, 75 bp, synthetic construct
  source 1..75: mol_type = other DNA
caccttgcacctaatcaccttaccgaacacgcacggcaaatagactcgatcctgaacccatcgagtcccaaattc

SEQ ID NO: 569620 - DNA, 75 bp, synthetic construct
  source 1..75: mol_type = other DNA
tcattcaacagatgttgcaaatgatgccgtttattctgacaaaaagaaaacatccaggttcttttatctgctgac

SEQ ID NO: 569621 - DNA, 75 bp, synthetic construct
  source 1..75: mol_type = other DNA
accgcgcaggcgaccgtgttgatgtcaaagtgatggggcgcgagtttcacggcccgctgcattcatcccctatcg

SEQ ID NO: 569622 - DNA, 75 bp, synthetic construct
  source 1..75: mol_type = other DNA
caacgttatcagatggaagagtacggcggcgtggatgttcgcctgtatcgtattcctgatccgatggcatttctg

SEQ ID NO: 569623 - DNA, 75 bp, synthetic construct
  source 1..75: mol_type = other DNA
atgttcgtgaatatgacgttgatttaggctcttactatgggatcgccgatcttgaccagattatggctgattacg

SEQ ID NO: 569624 - DNA, 75 bp, synthetic construct
  source 1..75: mol_type = other DNA
gaacaagacgaagatgacgacgactacgcaccaatctgtttctcttctcagaatggcttctacggttacgatgaa

SEQ ID NO: 569625 - DNA, 75 bp, synthetic construct
  source 1..75: mol_type = other DNA
ctccttttatccttctgggtctggattctgatagcttccacaatgacaagttaatgaagatgttccgtgaacgtg

SEQ ID NO: 569626 - DNA, 75 bp, synthetic construct
  source 1..75: mol_type = other DNA
ttgcgcctggtgatcagatcctcgtcagccttgccggtcagggtattcctcgcattgatgatgtggtctggcgcg

SEQ ID NO: 569627 - DNA, 75 bp, synthetic construct
  source 1..75: mol_type = other DNA
cgtgcaggaattgaagatttccgtttccatgacctcagacacacctgggcaagctggctgattcagtcaggcgtc

SEQ ID NO: 569628 - DNA, 75 bp, synthetic construct
  source 1..75: mol_type = other DNA
aacaagcgagtcagatggctggaaaaggaggaagcaaaacgccttattgatgagtgccccgaaccactgaaatct

SEQ ID NO: 569629 - DNA, 75 bp, synthetic construct
  source 1..75: mol_type = other DNA
tcgaggaagcgtgtgtcaggtggcttgaagagaaagcacataaaaaatcactggacgatgacaaaagccggatcg

SEQ ID NO: 569630 - DNA, 75 bp, synthetic construct
  source 1..75: mol_type = other DNA
tcaggtcattacagacctacccccgaggaagccagaaaaatcccagagttattacaaaatgctggtgtgaatgct

SEQ ID NO: 569631 - DNA, 75 bp, synthetic construct
  source 1..75: mol_type = other DNA
atgaccaccccaacttttgacaccatcgaagcgcaagcaagctacggtataggtttgcaggtagggcaacaactg

SEQ ID NO: 569632 - DNA, 75 bp, synthetic construct
  source 1..75: mol_type = other DNA
gcctgagttcacagataaaacactctccaggaaacccggggcggttcatattgatgagtgccccgaaccactgaa

SEQ ID NO: 569633 - DNA, 75 bp, synthetic construct
  source 1..75: mol_type = other DNA
agcacgcttcagggcgaaatctttctccagcgtgagagtcatatccaacagcaaatgggcgggatgaatgctcgt

SEQ ID NO: 569634 - DNA, 75 bp, synthetic construct
  source 1..75: mol_type = other DNA
tggggattttgtgctggcaatcatcggcgcaggcggtctgcccagcctggtcgcccgccagagcgcatgaagaaa

SEQ ID NO: 569635 - DNA, 75 bp, synthetic construct
  source 1..75: mol_type = other DNA
atggcatcagtttaatctggctcgtaagcagccttttactcgctgggtgatggcaatgggaataccgctaacccg

SEQ ID NO: 569636 - DNA, 75 bp, synthetic construct
  source 1..75: mol_type = other DNA
tcaaaaatttattcagcgatgcagaaaatgacgaaccggcgtcatgaggaaaactggaaactcagggcagaagca

SEQ ID NO: 569637 - DNA, 75 bp, synthetic construct
  source 1..75: mol_type = other DNA
gtgtttacgatcagttaagcgcccgtctcacgcagtggcaacgctgttttgggaacgagactcgcgacgctatga

SEQ ID NO: 569638 - DNA, 75 bp, synthetic construct
  source 1..75: mol_type = other DNA
atgaggttgaatgcgcacgcaatgagtggtggaaagcaaagttaccctttgtcaccgatggcgtggttgtgcgag

SEQ ID NO: 569639 - DNA, 75 bp, synthetic construct
  source 1..75: mol_type = other DNA
gtcgtgccgatggctcgctggacagagacctcgacagccgcatcgaactggaaatgcgtaccgatcataaagagc

SEQ ID NO: 569640 - DNA, 75 bp, synthetic construct
  source 1..75: mol_type = other DNA
gatcaaacgaatctgccggttattttgctgggctttgatggttcgccggtttatgacgataccgccgtacttaac

SEQ ID NO: 569641 - DNA, 75 bp, synthetic construct
  source 1..75: mol_type = other DNA
atgactatcctgctggggatagtcggtgccgtagtcggcggatggatcagtacgctgtttggctttggtaaagtc

SEQ ID NO: 569642 - DNA, 75 bp, synthetic construct
  source 1..75: mol_type = other DNA
cggcggatggatcagcacactgtttggctttggtaaagtcgatggcttcaattttggcagcttcgtggttgccgt

SEQ ID NO: 569643 - DNA, 75 bp, synthetic construct
  source 1..75: mol_type = other DNA
ggttgaacgcagcacatgtagctgataaagtttttatgagatgtaaatttgtccttttgttttttttctctgatt

SEQ ID NO: 569644 - DNA, 75 bp, synthetic construct
  source 1..75: mol_type = other DNA
ccgacagcgttaacgtgcaggcgctgaacatggggcgcattgtcgttgacgtcgatggtgttaatctcgctgaac

SEQ ID NO: 569645 - DNA, 75 bp, synthetic construct
  source 1..75: mol_type = other DNA
gttttttgaaagaagttcgcgaaaatggcggcatgcagactgaattgatggatcaaacaaatctgccggttattt

SEQ ID NO: 569646 - DNA, 75 bp, synthetic construct
  source 1..75: mol_type = other DNA
cactggagcacctcaaaaacaccatcatacactaaatcagtaagttggcagcatcaccgcattggtagaccgaat

SEQ ID NO: 569647 - DNA, 75 bp, synthetic construct
  source 1..75: mol_type = other DNA
aggattgcggctttaacggcggcgaaatgaccctgtcactggcagaccgctggatcctggcggagttcaaccaga

SEQ ID NO: 569648 - DNA, 75 bp, synthetic construct
  source 1..75: mol_type = other DNA
ccgcgcaccggaagcggttatcgcgaaagagcgtgagaagctggaaggttatgcagaagcgaaagcgaagctgat

SEQ ID NO: 569649 - DNA, 75 bp, synthetic construct
  source 1..75: mol_type = other DNA
atgtctgtggtaattagtgatgcatggcgtcagcgttttggcggcactgcgcgtctgtatggtgaaaaagcgctg

SEQ ID NO: 569650 - DNA, 75 bp, synthetic construct
  source 1..75: mol_type = other DNA
gcggaagggccgaagcggatggattgtgcatctggatttggcgcggcgacgatggtgaccgccacctttggtttt

SEQ ID NO: 569651 - DNA, 75 bp, synthetic construct
  source 1..75: mol_type = other DNA
tcgccagccactgtaggcgcgcggacgatgaccgcctggacgcaggatctcatctatgcgggcgatccggttcat

SEQ ID NO: 569652 - DNA, 75 bp, synthetic construct
  source 1..75: mol_type = other DNA
caagagcggtttattagctctatttataaatcgcataagcttaacgatttcccctggacgatgacctttcaggtc

SEQ ID NO: 569653 - DNA, 75 bp, synthetic construct
  source 1..75: mol_type = other DNA
acggctcacagctgctgctggggttagtgtgggcggtcggtatggcgtggctggatctgcgtttcctgttctggc

SEQ ID NO: 569654 - DNA, 75 bp, synthetic construct
  source 1..75: mol_type = other DNA
tctgcgtttcctgttctggctggcaccgattgtcttctcgctgattctgtcaccgtttgtttcggtgatctccag

SEQ ID NO: 569655 - DNA, 75 bp, synthetic construct
  source 1..75: mol_type = other DNA
aaacattttgatgtttatatcctgagtgacagctacaacccggacatctgcgtggcagaacaaaaagcctggatg

SEQ ID NO: 569656 - DNA, 75 bp, synthetic construct
  source 1..75: mol_type = other DNA
tgaatcaggccctgaaagacgggaaaatcctgcaggcagattacaacacgctgatggcgtcggcgaaaaaggatt

SEQ ID NO: 569657 - DNA, 75 bp, synthetic construct
  source 1..75: mol_type = other DNA
cggtttgcacttctggcaactcggtgagtcgcactactgggggcataacgcgattatccgcgtgaaaccgtttat

SEQ ID NO: 569658 - DNA, 75 bp, synthetic construct
  source 1..75: mol_type = other DNA
ttcaccggagagatattcttcatgggtgagttactacgaagggataaagttgaatccactggcattgcgtaaacc

SEQ ID NO: 569659 - DNA, 75 bp, synthetic construct
  source 1..75: mol_type = other DNA
tcatgggtgagttattacgaagggataaagctcaatccactggcattgcgtaaaccggatgcggcttcgcaataa

SEQ ID NO: 569660 - DNA, 75 bp, synthetic construct
  source 1..75: mol_type = other DNA
agttataacccggatatctgcgtcgcagagcaaaaagcctggatggagcttatcgctgaagtcggtggcgaaggt

SEQ ID NO: 569661 - DNA, 75 bp, synthetic construct
  source 1..75: mol_type = other DNA
tgaccaaagaagagcaggagagcgagcaaaagtggcgtaccgtcggtaccatccgccgttacattctgttgatcc

SEQ ID NO: 569662 - DNA, 75 bp, synthetic construct
  source 1..75: mol_type = other DNA
gagcgatccagtgaccatggcgcgcctgcatttccgggtgtggaactccccagagaagtattcgtcgtgggtgag

SEQ ID NO: 569663 - DNA, 75 bp, synthetic construct
  source 1..75: mol_type = other DNA
gagtcacactactgggggcataacgcgattatccgcgtgaaaccgtttatcgagcactgtgcactggcgccgctg

SEQ ID NO: 569664 - DNA, 75 bp, synthetic construct
  source 1..75: mol_type = other DNA
tgcgtttcctgttctggctggcaccgattgtcttctcgttgatcctgtcaccgtttgtttcggtgatttccagcc

SEQ ID NO: 569665 - DNA, 75 bp, synthetic construct
  source 1..75: mol_type = other DNA
agcgatcgttgctgccgttgatgccctcggcctgctggaagagattaaaccgcacgacctgactgttccttacgg

SEQ ID NO: 569666 - DNA, 75 bp, synthetic construct
  source 1..75: mol_type = other DNA
tgtttccgctggttgtacaagccgccggggaggggatgtggcagacaagtagtgtgggcgttacgctaaatcatc

SEQ ID NO: 569667 - DNA, 75 bp, synthetic construct
  source 1..75: mol_type = other DNA
ggattgatgacgctggtggcgtggcgttatcagcttatcggcccgacacctgcaggactgcgggttcgcttgtgt

SEQ ID NO: 569668 - DNA, 75 bp, synthetic construct
  source 1..75: mol_type = other DNA
aattaccgaacagttcgtgcatatgaagcagcaactgccgctgagtacacgcattcttttaggtctgagcgacac

SEQ ID NO: 569669 - DNA, 75 bp, synthetic construct
  source 1..75: mol_type = other DNA
cttaaaagcggtggatttcgtcgtgagtcaattctcgccgacaccgtcgaagcattaattggtggcgtattcctc

SEQ ID NO: 569670 - DNA, 75 bp, synthetic construct
  source 1..75: mol_type = other DNA
cggactggagcgtgaccggccgggtacggagaaaacgacgctaccggatgatcctcagttccggcgccaggagga

SEQ ID NO: 569671 - DNA, 75 bp, synthetic construct
  source 1..75: mol_type = other DNA
aatggaaaccgggggcgggaaggtttcgatggcggacatcgacacgaccatccaggcacaaatcaggtcggggca

SEQ ID NO: 569672 - DNA, 75 bp, synthetic construct
  source 1..75: mol_type = other DNA
ctaatctctacaaaacgctggagaaaaacggtcagttggataacacgcttattgtctttacctccgataacggtc

SEQ ID NO: 569673 - DNA, 75 bp, synthetic construct
  source 1..75: mol_type = other DNA
atggcgtgatgttcatgtcaacccggaagtcgccctgagcccggatcgttctgaatacatccaaaaactgccgtt

SEQ ID NO: 569674 - DNA, 75 bp, synthetic construct
  source 1..75: mol_type = other DNA
ccaacccgcgccacgattctcaccggacaatactccatccaccacggcattctgatgccgccaatgtacgggcaa

SEQ ID NO: 569675 - DNA, 75 bp, synthetic construct
  source 1..75: mol_type = other DNA
ggatcgccttaacgctctccatcttcgagccagcactcattattacgatggcactgatcgtcctgtttattgtcg

SEQ ID NO: 569676 - DNA, 75 bp, synthetic construct
  source 1..75: mol_type = other DNA
ataatcgcgttgctgggcgtgattaccacgaaaagaatattcagatagagcggtatgatggtcgtcatacagtta

SEQ ID NO: 569677 - DNA, 75 bp, synthetic construct
  source 1..75: mol_type = other DNA
ccatcaaagggggaagttcttggtgcagcacaaaaccttaatgagatcacctcaatacttgctggcaacagtaag

SEQ ID NO: 569678 - DNA, 75 bp, synthetic construct
  source 1..75: mol_type = other DNA
agtcgattcttgctgacaccgttgaagcattaattggcggcgtattcctcgacagcgatattcagaccgtcgaga

SEQ ID NO: 569679 - DNA, 75 bp, synthetic construct
  source 1..75: mol_type = other DNA
gaagacgaagtgcgtaaagaaaataacctcggtgccgacgttgccctgcgtcaggacgaagacgttctcgacacc

SEQ ID NO: 569680 - DNA, 75 bp, synthetic construct
  source 1..75: mol_type = other DNA
ggcattggcggctccatcagtggttttaatctgcacagcttcctggtggcggtggtgggagctattctcgttctg

SEQ ID NO: 569681 - DNA, 75 bp, synthetic construct
  source 1..75: mol_type = other DNA
tcgctgcgtcagcggcgggaagatattcctctgctggcaaaccattttcttcagcgctttgccgaacgtaatcgc

SEQ ID NO: 569682 - DNA, 75 bp, synthetic construct
  source 1..75: mol_type = other DNA
tctcgtcagctgtggtggggtcaccgtatcccggcatggtacgacgaagcgggtaacgtttatgttggccgcaac

SEQ ID NO: 569683 - DNA, 75 bp, synthetic construct
  source 1..75: mol_type = other DNA
cgcactggccgacaccgagtggctgaaacaggcgatcgttgctgtacgtaacatccgtgcagaaatgaatatcgc

SEQ ID NO: 569684 - DNA, 75 bp, synthetic construct
  source 1..75: mol_type = other DNA
ccgatgctgaccgaccagtggtacgtacgtgccgacgtgctggcgaaaccggcggttgaagcggttaagaacggc

SEQ ID NO: 569685 - DNA, 75 bp, synthetic construct
  source 1..75: mol_type = other DNA
gatgttccgaagaatatgactcagcagaattgtcagtctaagtacgaaaattgctactacgacaacgttgaacag

SEQ ID NO: 569686 - DNA, 75 bp, synthetic construct
  source 1..75: mol_type = other DNA
gatgttccgaagaatatgactcagcagaattgtcagtctaagtatgaaaattgttactacgacaacgttgaacag

SEQ ID NO: 569687 - DNA, 75 bp, synthetic construct
  source 1..75: mol_type = other DNA
gatcagtcgcattggtagaccgaataatccttttgaaccgcgtcgcaatcgttacgcacaaaaatacttaacgtt

SEQ ID NO: 569688 - DNA, 75 bp, synthetic construct
  source 1..75: mol_type = other DNA
ggtcgccagggcgattcacgccagtagcgcacgtagcgaaaaaccgctggtaacgctcaactgcgcggcgctcaa

SEQ ID NO: 569689 - DNA, 75 bp, synthetic construct
  source 1..75: mol_type = other DNA
tgcgtatgagtcaggatttagcggtcagagagctgttactacatggtctgggaggatgaaaaaactaaaagaact

SEQ ID NO: 569690 - DNA, 75 bp, synthetic construct
  source 1..75: mol_type = other DNA
gctgaatacggagaattcagcgcaacctcgcggattgctggtgggaatggtagcgcgtgcatgggctgtggcgct

SEQ ID NO: 569691 - DNA, 75 bp, synthetic construct
  source 1..75: mol_type = other DNA
cgttcacggacatcaacggctccccgtggcctcagtcggatccgccttataacgcggcacccggtcactttgatg

SEQ ID NO: 569692 - DNA, 75 bp, synthetic construct
  source 1..75: mol_type = other DNA
aaaaatgcacgaagcccgcagaccggcggaaagaccgcacaggcaaccgggaacaccccggcaggcggtcccccg

SEQ ID NO: 569693 - DNA, 75 bp, synthetic construct
  source 1..75: mol_type = other DNA
tccatcagcaaaaggggatgataagtttatcaccaccgactatttgcaacagtgccccatcagggacaaagatct

SEQ ID NO: 569694 - DNA, 75 bp, synthetic construct
  source 1..75: mol_type = other DNA
tctacctgaaaggtctgtcggtaccggtcatcctgaacgtaaccagtggcgaaacagatacgccgtcatccagtc

SEQ ID NO: 569695 - DNA, 75 bp, synthetic construct
  source 1..75: mol_type = other DNA
tatgagtgccggttattcgtacgtgattgatgccattgatagtgtacgacccaaagcggcgctgattgcttattg

SEQ ID NO: 569696 - DNA, 75 bp, synthetic construct
  source 1..75: mol_type = other DNA
gtgcatctggatttggtgcggcgacgatggtgaccgccacctttggttttgttgcggtttctcatgcgctgaaga

SEQ ID NO: 569697 - DNA, 75 bp, synthetic construct
  source 1..75: mol_type = other DNA
gaaagctggtactcagcaatatcgcttcgttaaaaatgatttttataactatctggctgatgcttttaaagcgta

SEQ ID NO: 569698 - DNA, 75 bp, synthetic construct
  source 1..75: mol_type = other DNA
tctgatttggctaaatgctttatttatgcctatttggtccgcctcatgggtgctacccgctggatttaaaggtgc

SEQ ID NO: 569699 - DNA, 75 bp, synthetic construct
  source 1..75: mol_type = other DNA
cgagccggattttgcctttgtggctgaagagggcgtgcgcgcggtagttatcaaacccacgctcacgggcagcct

SEQ ID NO: 569700 - DNA, 75 bp, synthetic construct
  source 1..75: mol_type = other DNA
aatccatcattgaagctgcatccattgtatccgacgagctgcgcgaaaaagcagatctggcaactcaaacatata

SEQ ID NO: 569701 - DNA, 75 bp, synthetic construct
  source 1..75: mol_type = other DNA
ccgcgaagctatgacaaatagttattctctggaaaaactggtttatctggttaaatcaattaaatctggtaaatg

SEQ ID NO: 569702 - DNA, 75 bp, synthetic construct
  source 1..75: mol_type = other DNA
agcgaaaaacggatcacagcaatatcgcttcgttaaaaatgatttttataactatctggctgatgctttcaaagc

SEQ ID NO: 569703 - DNA, 69 bp, synthetic construct
  source 1..69: mol_type = other DNA
atggctgagcttcgtacactccagagcagaatcaaaacactgaatacccgacgggtgaatattctgaag

SEQ ID NO: 569704 - DNA, 75 bp, synthetic construct
  source 1..75: mol_type = other DNA
cgcaggtgttcagtgaggacgagacgcggcaggtgttgcagagtctggatgtgagcactcccgttggcctgcgta

SEQ ID NO: 569705 - DNA, 75 bp, synthetic construct
  source 1..75: mol_type = other DNA
cagtgggcggcgtcggaaaggggaaacacggaaactggattatgcgttgctaggttgggcggtctcggcaaacct

SEQ ID NO: 569706 - DNA, 75 bp, synthetic construct
  source 1..75: mol_type = other DNA
gcgctccggaaattgcccgtagcggcgttttattctcattacagatgtacctgagtctgggagctaataccagtt

SEQ ID NO: 569707 - DNA, 75 bp, synthetic construct
  source 1..75: mol_type = other DNA
tgcctgaactccgcccggcggtgtacagccttattgaccgggatatacacagtgcactttccaccattgaaagag

SEQ ID NO: 569708 - DNA, 75 bp, synthetic construct
  source 1..75: mol_type = other DNA
ttcgctgaatctggatgcgtacaactggaaagaggatggcatcagcgataaaggcgtgatgctgaacttcaagaa

SEQ ID NO: 569709 - DNA, 75 bp, synthetic construct
  source 1..75: mol_type = other DNA
tgactgcgcaaattaccatgaatgctggtgctgatagttcgttagtgaacaacaccggaaccatcaataaaatcg

SEQ ID NO: 569710 - DNA, 75 bp, synthetic construct
  source 1..75: mol_type = other DNA
cttagcaatgccccggctctacaaacgacgaatattttcagccatcttcttttaccctccacgtcatcgttgtta

SEQ ID NO: 569711 - DNA, 75 bp, synthetic construct
  source 1..75: mol_type = other DNA
ttctcattacagacgcacctgagttgcggggcctataccagtttgttggggcggagctattccggtggtggtgct

SEQ ID NO: 569712 - DNA, 75 bp, synthetic construct
  source 1..75: mol_type = other DNA
ctaggcacattatcgcaagcacaatcccggaatgccaggccgtcgttgttgatggttttgacgcatactacgaac

SEQ ID NO: 569713 - DNA, 75 bp, synthetic construct
  source 1..75: mol_type = other DNA
tgggcgttacgcatcgccccttcgctttcttcggcgatttgcgctccagagattgcccgtaacggcgttttattc

SEQ ID NO: 569714 - DNA, 75 bp, synthetic construct
  source 1..75: mol_type = other DNA
cagtgggcggcggaggaaaggggaaacacggaaactggattacgctttgttaggttgggcggtctcggcaaacct

SEQ ID NO: 569715 - DNA, 75 bp, synthetic construct
  source 1..75: mol_type = other DNA
gctgatttgttcaggcgtggccttttactctctatatcaatgtcggagatgtattcttttactggtatatgccag

SEQ ID NO: 569716 - DNA, 75 bp, synthetic construct
  source 1..75: mol_type = other DNA
atgtttgcctgcgtgagggcgagcgcgaagggtggggggaggtatgtttgcctgcgtgagggcgagcgcgaaggg

SEQ ID NO: 569717 - DNA, 75 bp, synthetic construct
  source 1..75: mol_type = other DNA
ctgggagacaaagttgaacaccagaaacggctgaatgagctggcacagcaggctgcgcggtttgaacagcagcag

SEQ ID NO: 569718 - DNA, 75 bp, synthetic construct
  source 1..75: mol_type = other DNA
ctgagaaagcgacggcgcacgatattcttgaaccccgtaacgaccgggcggtgaaaacagccgatctgctgttcg

SEQ ID NO: 569719 - DNA, 75 bp, synthetic construct
  source 1..75: mol_type = other DNA
gtccatagcgtgtctgggctgaaacttatcgactgggagtatgccggcgatggggatattgcgctggaactggcg

SEQ ID NO: 569720 - DNA, 75 bp, synthetic construct
  source 1..75: mol_type = other DNA
gatcaccctgccgatggtcggggtcacctcgctggcggtggcgacaggtgcgctggcgtatgcctggtaccaggg

SEQ ID NO: 569721 - DNA, 75 bp, synthetic construct
  source 1..75: mol_type = other DNA
ggatacatgttctcgatgaattatccgtcagagccctgagccaggaagtattacgccagaaccacgtcagtatgg

SEQ ID NO: 569722 - DNA, 75 bp, synthetic construct
  source 1..75: mol_type = other DNA
ttgcaggctatcggtggggaagggcgggttatggggaatgaagaggcccgttttgtcgccctgcagggaagcagg

SEQ ID NO: 569723 - DNA, 75 bp, synthetic construct
  source 1..75: mol_type = other DNA
gcgcaattatggcgtcaggtcaggcgctggtttccctggttgctgatgctcaaagcagggtggtttgagtaccgc

SEQ ID NO: 569724 - DNA, 75 bp, synthetic construct
  source 1..75: mol_type = other DNA
caaagcagggtggtttgagtaccgctggcgacaaaccggcggtcaacaatttatcaggctggccgatgacacctg

SEQ ID NO: 569725 - DNA, 75 bp, synthetic construct
  source 1..75: mol_type = other DNA
gcagtgtgggtggaaaatactgaccagcaccgacggttggttaatgactatgccgcgcaggcgaagattgacccg

SEQ ID NO: 569726 - DNA, 75 bp, synthetic construct
  source 1..75: mol_type = other DNA
ttacgcgcgacaaattactgtcgcgttatttcccgcagtttcaccccgtcgcgacgtttaatcgtggacttagcg

SEQ ID NO: 569727 - DNA, 75 bp, synthetic construct
  source 1..75: mol_type = other DNA
ggtggtttgagtaccgctggcgacaaaccggcgatcaacaatttatcaggctggccgatgacacctggcggcagc

SEQ ID NO: 569728 - DNA, 75 bp, synthetic construct
  source 1..75: mol_type = other DNA
tgggagtatgccggagatggtgatatcgcgctggaactggcggcggtgtgggtggaaaatactgaacagcaccgg

SEQ ID NO: 569729 - DNA, 75 bp, synthetic construct
  source 1..75: mol_type = other DNA
ggagtgggtggaaagtgccatggacagtttttcgcaggttaaaagcgcggccacgcagaccgttgacggtattgc

SEQ ID NO: 569730 - DNA, 75 bp, synthetic construct
  source 1..75: mol_type = other DNA
cttcttctacctgccggtcgggatttgctggtcagcggtgaaaaaatgggcggcacgccgatccttggtatcgta

SEQ ID NO: 569731 - DNA, 75 bp, synthetic construct
  source 1..75: mol_type = other DNA
gaaggcctggagcagtgagccagcttcgcttgacggtggcggggagatctccgtgaagttcgccagcgccaccag

SEQ ID NO: 569732 - DNA, 75 bp, synthetic construct
  source 1..75: mol_type = other DNA
ttatggctggaaaggtaaaccacgtgccgcaaaagtggaatgcaaaattccgggcggtggtcccatcgggctgga

SEQ ID NO: 569733 - DNA, 75 bp, synthetic construct
  source 1..75: mol_type = other DNA
gcgcagcaggttcgtcgctggccgggtagcccgctgccgttagtggaagttgatgcactggagcggttgttatga

SEQ ID NO: 569734 - DNA, 75 bp, synthetic construct
  source 1..75: mol_type = other DNA
cgcagaaggcgtatgagcgcctgcagacgccgctggataaatataccgcccgtcagaaagagctgaataaggccc

SEQ ID NO: 569735 - DNA, 75 bp, synthetic construct
  source 1..75: mol_type = other DNA
ggattacaacacgctgatggcggcggcgaaaaaggattatgaatcgacgctgaaaaagccgaagtcgtcaggagt

SEQ ID NO: 569736 - DNA, 75 bp, synthetic construct
  source 1..75: mol_type = other DNA
gaacagaagaggatatgaatatttaaagaatgagttgcgtttgttaaattttcagaaagaaataggactccttag

SEQ ID NO: 569737 - DNA, 75 bp, synthetic construct
  source 1..75: mol_type = other DNA
tgcggtacggcggcggaatctggagaaacgtatcaacaggcatgcaccactgtttgcggatgaactgatagcccg

SEQ ID NO: 569738 - DNA, 75 bp, synthetic construct
  source 1..75: mol_type = other DNA
gcagaccagctgattacgcttcgtagtgacgaaggtaccgaacgcctgatttcaccgcgagaggcttctgcagaa

SEQ ID NO: 569739 - DNA, 75 bp, synthetic construct
  source 1..75: mol_type = other DNA
atgagcggaaaacagtatcagggcacggccactatccgtgtgaacggtcaggaatacgagacgcttgagggggct

SEQ ID NO: 569740 - DNA, 75 bp, synthetic construct
  source 1..75: mol_type = other DNA
ttcgacgcgaaacaccgcgaaatgtttctcttccgtaccattgatgagctggagcagactaccgcccgcagcagt

SEQ ID NO: 569741 - DNA, 75 bp, synthetic construct
  source 1..75: mol_type = other DNA
ggaaattaccctcgctgtgtcctggcaaagaggtgctggctacggctgacgttgaagccgggcagcctgcgccgg

SEQ ID NO: 569742 - DNA, 75 bp, synthetic construct
  source 1..75: mol_type = other DNA
tacaaaacgggatatctggacggaaaaattaccgatgacggcgaatttattcctgccccacgcaatgaggccaca

SEQ ID NO: 569743 - DNA, 75 bp, synthetic construct
  source 1..75: mol_type = other DNA
tgtatgtgttttccgatccgatgtgcccgcactgccgcgcgctggaaccccgactgcaggaactgagcaaacgct

SEQ ID NO: 569744 - DNA, 75 bp, synthetic construct
  source 1..75: mol_type = other DNA
gatcaaagggcggatactgtttccggcgctgaccgcgctcagcgtcacgggcggcattttcctggggtgctgggg

SEQ ID NO: 569745 - DNA, 75 bp, synthetic construct
  source 1..75: mol_type = other DNA
ttttatcttgatgagttcagtaatataagcgaactgaaggatgctgttacggaatatattgaatactacaacagc

SEQ ID NO: 569746 - DNA, 75 bp, synthetic construct
  source 1..75: mol_type = other DNA
ttgaccttccgtaatgccgccgatctttatctctaccccaatacgctgattgtagtgaaagccagcggtaaagag

SEQ ID NO: 569747 - DNA, 75 bp, synthetic construct
  source 1..75: mol_type = other DNA
tctgaaattcgcttcaccgcacgggaaaaaatgaccgggcttgaaagttatgatgtcaaaatcaaaataatgtga

SEQ ID NO: 569748 - DNA, 75 bp, synthetic construct
  source 1..75: mol_type = other DNA
gatagatgtgatgattcgaccactgttgatggtaatggggttcatttttgcatcattggccattgtggctcttgg

SEQ ID NO: 569749 - DNA, 75 bp, synthetic construct
  source 1..75: mol_type = other DNA
acgtctggcggtgcttgggaagataccggacacacgcctgaaaggcggggaaagcatcacggtgatgaaagtgga

SEQ ID NO: 569750 - DNA, 75 bp, synthetic construct
  source 1..75: mol_type = other DNA
ctcctgctcgttatgtgcgttcctatgcacctgcgcagcaaagtgttgcggcagggagtgaatggaccgggatgc

SEQ ID NO: 569751 - DNA, 75 bp, synthetic construct
  source 1..75: mol_type = other DNA
gcatgacgcatggaagacacaggagacagggcacaaagccaaagggacagggcgcacagaacgcaccaccgcgaa

SEQ ID NO: 569752 - DNA, 75 bp, synthetic construct
  source 1..75: mol_type = other DNA
accgccttatccgtggacttataaggcagcgtgacgcatggaagacacaggaaacagggcataaagataaagcgt

SEQ ID NO: 569753 - DNA, 75 bp, synthetic construct
  source 1..75: mol_type = other DNA
atattcgatatctgtaaacaacggctcagctgtatgtgggaccgtttcgctgccacaacgtccagcaggatggac

SEQ ID NO: 569754 - DNA, 75 bp, synthetic construct
  source 1..75: mol_type = other DNA
ctgtggtggagtgtttctttggaaccttaaagtcggagtgtttttatcttgatgagttcagtaatataagcgagc

SEQ ID NO: 569755 - DNA, 75 bp, synthetic construct
  source 1..75: mol_type = other DNA
ttactggcaggcgtcagcgccggattaagctgcgccgaagcgattgtcgccagtgcgaatcacttttgcgaagag

SEQ ID NO: 569756 - DNA, 75 bp, synthetic construct
  source 1..75: mol_type = other DNA
gaagaatacgcgtcgttgtttaccacacaactacggtcgatcctgcgcgcctctgctcacggcagtgatcagaca

SEQ ID NO: 569757 - DNA, 75 bp, synthetic construct
  source 1..75: mol_type = other DNA
ggaagtgccgtcggtgatgttcatcatcgatcaatgctgcgaagagattgatttctttagtatcggtagtaatga

SEQ ID NO: 569758 - DNA, 75 bp, synthetic construct
  source 1..75: mol_type = other DNA
aacgtttaggcgatatctgcaatttgaaattctctgatatctgggacgacatgttgcacattactcagaaaaaaa

SEQ ID NO: 569759 - DNA, 75 bp, synthetic construct
  source 1..75: mol_type = other DNA
tgttaggccataaatccagaaaaatgaccgaccgatacaatgatgatcgtggtaaagactgggttatcgtagata

SEQ ID NO: 569760 - DNA, 75 bp, synthetic construct
  source 1..75: mol_type = other DNA
ctctggcgggctactggaacgccttgaaaatatcaggaagcggaacagtgaccgaactccggctgctgaacgcgg

SEQ ID NO: 569761 - DNA, 75 bp, synthetic construct
  source 1..75: mol_type = other DNA
tatcagcaagaagcccgcgtacaggacgccctgcgtgagcaacagcgtgtctggctgacccaacaagcccgtacc

SEQ ID NO: 569762 - DNA, 75 bp, synthetic construct
  source 1..75: mol_type = other DNA
ctactggcgggcgtcagcgagggattaagctgcgccgaagcgattgttgccagtgcgaatcacttttgcgaagag

SEQ ID NO: 569763 - DNA, 75 bp, synthetic construct
  source 1..75: mol_type = other DNA
acatggtattaaacaaagcatgtccagaaaaggcaattgtctggataatgctgtggtggagtgtttctttggaac

SEQ ID NO: 569764 - DNA, 75 bp, synthetic construct
  source 1..75: mol_type = other DNA
cgttgacgccgaacaatccgcactggaaaacggcctgacgctggtactgaaaaacattgagtttcgtctgctgga

SEQ ID NO: 569765 - DNA, 75 bp, synthetic construct
  source 1..75: mol_type = other DNA
cactgaccaatctgaatccgcaaattatccgtgcccgcaccgtgtgcagcggtagcgcaggcggcattctgacgc

SEQ ID NO: 569766 - DNA, 75 bp, synthetic construct
  source 1..75: mol_type = other DNA
aattccgtaacgcgctggttaacgccgcctctgccgacgctatcgccagcctgctgcaacatgaactggaactgt

SEQ ID NO: 569767 - DNA, 75 bp, synthetic construct
  source 1..75: mol_type = other DNA
cgcactgattttcgcaaaaatgtcagaattgaattgctggatatcagcaaagagcatctgcgtcaggattttgat

SEQ ID NO: 569768 - DNA, 75 bp, synthetic construct
  source 1..75: mol_type = other DNA
gctttcctgtctggcgaaatcagacgaggacgtggtcaagctcgacaagagcctgctggattttcatatcgacga

SEQ ID NO: 569769 - DNA, 75 bp, synthetic construct
  source 1..75: mol_type = other DNA
ataatgtggcgggaaatgtggtttctgaaacgcattccggcgacagcgtatatgcttccctgtttgaaaaaatta

SEQ ID NO: 569770 - DNA, 75 bp, synthetic construct
  source 1..75: mol_type = other DNA
gctctgttcgttgttacgttttgcgtatcagtcgggatttatatcaaccaaaccatttgaaggagtaaaaaaatt

SEQ ID NO: 569771 - DNA, 75 bp, synthetic construct
  source 1..75: mol_type = other DNA
caggccatgtccgaagcgtctgcagatgaacgtctgacggcagggatgcaggtgtttatggagtgtctggcaaaa

SEQ ID NO: 569772 - DNA, 75 bp, synthetic construct
  source 1..75: mol_type = other DNA
ccggtacgcagctttaactatgtggaagaagtcaaaggcccggatcacgaaaagtatctctggacaaacgcctcg

SEQ ID NO: 569773 - DNA, 75 bp, synthetic construct
  source 1..75: mol_type = other DNA
agaacgttgcagagagcgtggtatctgaagcgcatgccggtgacagcgtatatgcttcctgttttgaaaaaatta

SEQ ID NO: 569774 - DNA, 75 bp, synthetic construct
  source 1..75: mol_type = other DNA
gagaaattttccaggtggtgccatctcgccgtttctctctgccctgcccgtcaccgctggcagcctattatgttt

SEQ ID NO: 569775 - DNA, 75 bp, synthetic construct
  source 1..75: mol_type = other DNA
cagccgccagattgaaatctacccgattgccggaacacgcccacgcggtcgtcgcgccgatggttcactggacag

SEQ ID NO: 569776 - DNA, 75 bp, synthetic construct
  source 1..75: mol_type = other DNA
atttgcactcccggcagccgctacgttgccgacctcaccaaagttgaccgttactcttacgtgatgcatctcgtc

SEQ ID NO: 569777 - DNA, 75 bp, synthetic construct
  source 1..75: mol_type = other DNA
tcatcgggagtacggcagaaccgaaaagcaaaaactgcattttgttttcatgcccagggtgtgtaacggaaaaca

SEQ ID NO: 569778 - DNA, 75 bp, synthetic construct
  source 1..75: mol_type = other DNA
gtgcgcacagttgataactatatcgccctgctctgttcgttgttacgttttgcgtatcagtcgggatttatatca

SEQ ID NO: 569779 - DNA, 75 bp, synthetic construct
  source 1..75: mol_type = other DNA
tctgggaagactggcgcaggagatctctgccattcttgactccattccattgtccatgcagagacagtttccggc

SEQ ID NO: 569780 - DNA, 75 bp, synthetic construct
  source 1..75: mol_type = other DNA
agttcccggatggttcccgactatatggcgtgagcaacggcagtggcgtccttctgcgacccttgtttcgctcac

SEQ ID NO: 569781 - DNA, 75 bp, synthetic construct
  source 1..75: mol_type = other DNA
gctgcggcgaaacactttatcgctcagggcaacggcggcaagattatcaatattgcgtcaatgctttcatttcag

SEQ ID NO: 569782 - DNA, 75 bp, synthetic construct
  source 1..75: mol_type = other DNA
gggccggtggtgtttctggcatccagtgcttctgactatgttaatggctacaccattgccgtggatggcggctgg

SEQ ID NO: 569783 - DNA, 75 bp, synthetic construct
  source 1..75: mol_type = other DNA
tacaggatcctggattcgggaccagacggtactcagacgacgcttacgttctggttcaatatcggtctggtcttt

SEQ ID NO: 569784 - DNA, 75 bp, synthetic construct
  source 1..75: mol_type = other DNA
tccgctctcttattataagaatcgcgattacgcctgcttcttctcggcgaactctgcccagaaaccggcgttgta

SEQ ID NO: 569785 - DNA, 75 bp, synthetic construct
  source 1..75: mol_type = other DNA
aattccagaaagtcgagtcgctctggcgtggtacatggttcgtcgtacagcgcactgattttcgcaaaaatgtca

SEQ ID NO: 569786 - DNA, 75 bp, synthetic construct
  source 1..75: mol_type = other DNA
gattcaccggaaatcattcagagtggtttatatcgccatacatacattcaggagtacgatacgccgggtggcgaa

SEQ ID NO: 569787 - DNA, 75 bp, synthetic construct
  source 1..75: mol_type = other DNA
gaagtcgccgcgattaaagatatcggcaactactttgaccgcgccgaatatattaaatggaagtcgttccgcgat

SEQ ID NO: 569788 - DNA, 75 bp, synthetic construct
  source 1..75: mol_type = other DNA
agagctttgtgaataatggctggtgcgtgcagatccgtggtccacaagcaggtggcgcagtggccgatctgccca

SEQ ID NO: 569789 - DNA, 75 bp, synthetic construct
  source 1..75: mol_type = other DNA
gtaccacatttccaggtggaaggtatggacgtcagcctgtcactggtttcgcagatgccgaaggcaaaagcgtaa

SEQ ID NO: 569790 - DNA, 75 bp, synthetic construct
  source 1..75: mol_type = other DNA
cttatgaaactttgccttatgcttgatgattataataaaaatggaaaatatacatcacgcaaaaaattaagagat

SEQ ID NO: 569791 - DNA, 75 bp, synthetic construct
  source 1..75: mol_type = other DNA
gaaatctctgagaccatgcgggagtttaacaacatgttcgaccgcctggaggggtccttccggaaactgtctgat

SEQ ID NO: 569792 - DNA, 75 bp, synthetic construct
  source 1..75: mol_type = other DNA
agagcatctgcgtcaggatttcgacgactccccggaaatcattcagagcggtttatatcgtcatacatacattca

SEQ ID NO: 569793 - DNA, 75 bp, synthetic construct
  source 1..75: mol_type = other DNA
ggagtgcagaaaaaatatatggcgacaatgatgatgttcttggtattagaatgaataaaataagcggggagtcgc

SEQ ID NO: 569794 - DNA, 75 bp, synthetic construct
  source 1..75: mol_type = other DNA
ggggaacgctgtagtgtatgaagatgcggaggatgcaacaaaagttctgaagatgtttacaacatctcaaagcca

SEQ ID NO: 569795 - DNA, 75 bp, synthetic construct
  source 1..75: mol_type = other DNA
actggttgtcagtgagaatgtcagaggcatcatcccggcctgttccagtgaagggggcagaaaacatgcccgggc

SEQ ID NO: 569796 - DNA, 75 bp, synthetic construct
  source 1..75: mol_type = other DNA
aaaagtgttgaagatgtttactatatctcaaagccatgaagaggtgacaagcgaagttcgttgtttcaatcagta

SEQ ID NO: 569797 - DNA, 75 bp, synthetic construct
  source 1..75: mol_type = other DNA
gtggattatgcgcagccggagttaccgccagcggattatactcagtcagcgttgctgaggcttagcaacaacaaa

SEQ ID NO: 569798 - DNA, 75 bp, synthetic construct
  source 1..75: mol_type = other DNA
gatatttcatggagtgaacatcaagtcatgcaatcttatcacggaggaaagctggatcttattagtgtagtatta

SEQ ID NO: 569799 - DNA, 75 bp, synthetic construct
  source 1..75: mol_type = other DNA
tagatgcccggcaacttcaacaggaaatcactgccctttttgatacctcatgggaagctgcgatggaccagttgc

SEQ ID NO: 569800 - DNA, 75 bp, synthetic construct
  source 1..75: mol_type = other DNA
ccaagacagagccgacaaattgtgtggaagccatgcctattatgtctctaacgacaatgatttaaccaaagtcat

SEQ ID NO: 569801 - DNA, 75 bp, synthetic construct
  source 1..75: mol_type = other DNA
tgctgggtaatgttattggcaagggggggaacgctgtagtgtatgaagatgcggaggatgcaacaaaagttctga

SEQ ID NO: 569802 - DNA, 75 bp, synthetic construct
  source 1..75: mol_type = other DNA
ctcgctggaggcgatagcccttcatggtatcgaaaagaacttcccagtggttgagaaaatgtcacctgttcaatt

SEQ ID NO: 569803 - DNA, 75 bp, synthetic construct
  source 1..75: mol_type = other DNA
cgcagaaataaaaacggaaatagatgctctgcaagcagagagtaaagagatgttggaccggcgtgacgctctgga

SEQ ID NO: 569804 - DNA, 75 bp, synthetic construct
  source 1..75: mol_type = other DNA
acggcccagcttgatacgctgaacgcaattattcgcggtaaatccagcctgatcgtcaatacgcaggaaacgatt

SEQ ID NO: 569805 - DNA, 75 bp, synthetic construct
  source 1..75: mol_type = other DNA
aaaactctagtttcaaccctgagtacataatccccaaccttcttatgcaatggctcagcagcaatgaaaataagg

SEQ ID NO: 569806 - DNA, 75 bp, synthetic construct
  source 1..75: mol_type = other DNA
cttaatcaaaaatggcctgcaaaaagtgataagcggtgacacctcctgggatgaggttatgcgcgtcgccagtgc

SEQ ID NO: 569807 - DNA, 75 bp, synthetic construct
  source 1..75: mol_type = other DNA
gtggatcactattgcaccgttcgtgacagtgagtcgcaacagattgcgcaggatatcgatcaatccgtcgatctt

SEQ ID NO: 569808 - DNA, 75 bp, synthetic construct
  source 1..75: mol_type = other DNA
agatgtccgcgtatccacactgccgtccatctatggtgaacgcgccgtactccgcctgctggataaaaacagcct

SEQ ID NO: 569809 - DNA, 75 bp, synthetic construct
  source 1..75: mol_type = other DNA
taccgaatggcgtgatgttcacgtcaacccggaagtcgccctgagcccggatcgttctgaatacatccaaaaact

SEQ ID NO: 569810 - DNA, 75 bp, synthetic construct
  source 1..75: mol_type = other DNA
accagcttgtcacaggctgattttgaagcccggctggaagcggtattccatcagaataccggtgagtcgcaacag

SEQ ID NO: 569811 - DNA, 75 bp, synthetic construct
  source 1..75: mol_type = other DNA
ccacattgaaacctatgaaaaaacaatgtcgatccgttttcgcatcgacggcgttttgcggacaattttacagcc

SEQ ID NO: 569812 - DNA, 75 bp, synthetic construct
  source 1..75: mol_type = other DNA
ataaactggatgtgcccattaagttcatctggaacttcaaggacttgaagcgagaccgcattacacctgaggtcc

SEQ ID NO: 569813 - DNA, 75 bp, synthetic construct
  source 1..75: mol_type = other DNA
gggcacttagtattatactttgttgctgcaattttgttcctgttctttattgcttttgcgaggttgattccccga

SEQ ID NO: 569814 - DNA, 75 bp, synthetic construct
  source 1..75: mol_type = other DNA
ttaagaaaggattttctttttgggttgagaacatcatttatggctgggtttcattgcaatttttattacttgctg

SEQ ID NO: 569815 - DNA, 75 bp, synthetic construct
  source 1..75: mol_type = other DNA
tgcttatctcccgaattaaggtcatggctcgtcttgatatcgccgaaaaacgtattccacaggatggaagaatca

SEQ ID NO: 569816 - DNA, 75 bp, synthetic construct
  source 1..75: mol_type = other DNA
atccgcgacggcgtccgcggcaaagataaactggatgtgcccattaagttcatctggaactacaagaggtcggaa

SEQ ID NO: 569817 - DNA, 75 bp, synthetic construct
  source 1..75: mol_type = other DNA
gtcggcatcagcggcggaaatagtggcgcgcgtgaatcgacctataccattaccatagaacgcctgccggtgctg

SEQ ID NO: 569818 - DNA, 75 bp, synthetic construct
  source 1..75: mol_type = other DNA
atgagcagtttattgaagcgccgggcattcgtggaatggtgatgctggtgttcacgctgccgggctttgaccggg

SEQ ID NO: 569819 - DNA, 75 bp, synthetic construct
  source 1..75: mol_type = other DNA
gcggaatttgaaaaggttgcatcgcaatatgaaaaaataggtgatatttcaaccagtaatgaaatgtcgaccgca

SEQ ID NO: 569820 - DNA, 75 bp, synthetic construct
  source 1..75: mol_type = other DNA
cagcgccgcattatgacgccagaacaggcgttggcggctggtgttgattatatggtgattggtcgcccggtaacg

SEQ ID NO: 569821 - DNA, 75 bp, synthetic construct
  source 1..75: mol_type = other DNA
atgacgttaactgcttcatcttcttcccgcgctgttacgaattctcctgtagttgttgcccttgattatcataat

SEQ ID NO: 569822 - DNA, 75 bp, synthetic construct
  source 1..75: mol_type = other DNA
aaaatattcaggctggggatggtaaaaaattcacgctatccagctccaacaactccacgaagaacgtagggttta

SEQ ID NO: 569823 - DNA, 75 bp, synthetic construct
  source 1..75: mol_type = other DNA
accaaagcggaatttgaaaaagttgaatcgcaatatgaaaaaataggtgatatttcaaccagtaatgaaatgtcg

SEQ ID NO: 569824 - DNA, 75 bp, synthetic construct
  source 1..75: mol_type = other DNA
aatgggcattatccggagtgaaaaagatctgctgaataatgtctgcctgaatattcagaccggtgcatggatcct

SEQ ID NO: 569825 - DNA, 75 bp, synthetic construct
  source 1..75: mol_type = other DNA
gaagccagtgacgaagtggaacgtattggtatcgagcgcgcgtggcaggaaattgaacaggccgaccgcgtgctg

SEQ ID NO: 569826 - DNA, 75 bp, synthetic construct
  source 1..75: mol_type = other DNA
gaactacactggtccgcaacgctggcagaaattgaacgggtaaagcggctttatcagacgaaaattaagaaatcc

SEQ ID NO: 569827 - DNA, 75 bp, synthetic construct
  source 1..75: mol_type = other DNA
gtgatttactggcaggactggatatccccatcatggataccatctgattctcgccaatgtacgatagatttctat

SEQ ID NO: 569828 - DNA, 75 bp, synthetic construct
  source 1..75: mol_type = other DNA
aaacgttaatacgtctgaaggttgttttgaaattggtgtcactatcagtaaccctgtatttactgaagatgccat

SEQ ID NO: 569829 - DNA, 75 bp, synthetic construct
  source 1..75: mol_type = other DNA
ggctgaaaatctgtccgctctggaaaaagatataaccaagctggaaaaagcagcggcattaagcattgccagaat

SEQ ID NO: 569830 - DNA, 75 bp, synthetic construct
  source 1..75: mol_type = other DNA
gtgcagcgccataatcatgtctcagtcacgcctgatgcgtctgtggtgcgccaggtccctttcagcgatgccgtc

SEQ ID NO: 569831 - DNA, 75 bp, synthetic construct
  source 1..75: mol_type = other DNA
acgggtaaaggccagcagtggttgacgcgtaaactgctcgatgctggcttgttaaaaccggtggcagctgaataa

SEQ ID NO: 569832 - DNA, 75 bp, synthetic construct
  source 1..75: mol_type = other DNA
gcggatggtgccgctcaatatctggcttgagcaagttgaagggcagcaactgcgcgacgctattgaagagtatgg

SEQ ID NO: 569833 - DNA, 75 bp, synthetic construct
  source 1..75: mol_type = other DNA
cgactactggcgcgcgttacaaaaccgtatccgtgaagggcatgttgaagatgtctatgcgtatcggcgcaggca

SEQ ID NO: 569834 - DNA, 75 bp, synthetic construct
  source 1..75: mol_type = other DNA
tcccgagcggctttttatctttagctcccagccagagcgccgctttcgtaccattccccgcccgctggcgaaaga

SEQ ID NO: 569835 - DNA, 75 bp, synthetic construct
  source 1..75: mol_type = other DNA
ctttcaccccgatcacggctgggaatctctgctgatgcgcgttatcagcgatctgccgttgcgtctgcgctggca

SEQ ID NO: 569836 - DNA, 75 bp, synthetic construct
  source 1..75: mol_type = other DNA
cgattattggcgcgccttacaaaaacgtatccgtgaggggcatgtagaagatgtctatgcttatcggcgcaggca

SEQ ID NO: 569837 - DNA, 75 bp, synthetic construct
  source 1..75: mol_type = other DNA
gtatggtcgattcctcgaagtgacttccggggcgcagcagcgtttcgaacaggccgactggcatgctgtccagca

SEQ ID NO: 569838 - DNA, 75 bp, synthetic construct
  source 1..75: mol_type = other DNA
atacctgcctgacgacgaccgccgaagcgagcattgtttttggctttgcgcgttcttattttatggtttatgcac

SEQ ID NO: 569839 - DNA, 75 bp, synthetic construct
  source 1..75: mol_type = other DNA
atatggctatcggctgccagaagcacgccaaaaccgaaagctaccgcgaatatctcgtttatctacagggctgta

SEQ ID NO: 569840 - DNA, 75 bp, synthetic construct
  source 1..75: mol_type = other DNA
atatgtttgatagactggagcaaaaaggaattctttttgtcgatacaacagagacaaatgtcttatatgaccgcg

SEQ ID NO: 569841 - DNA, 75 bp, synthetic construct
  source 1..75: mol_type = other DNA
gtttcgccactggctatgcgccgacccccgcattgggccactctttgaagagatgcacgccgacctgttccgcgc

SEQ ID NO: 569842 - DNA, 75 bp, synthetic construct
  source 1..75: mol_type = other DNA
tgattactggcgcgcactacaaaaccgcatacgtgaagggcatgtggaagatgtttatgcgtatcggcgcaggca

SEQ ID NO: 569843 - DNA, 75 bp, synthetic construct
  source 1..75: mol_type = other DNA
gctcacgtccgcgcctgctatcaactggtaaaagagcacgatcgcgtaggaaggatggcggatacccaggagttt

SEQ ID NO: 569844 - DNA, 75 bp, synthetic construct
  source 1..75: mol_type = other DNA
tctgacaggtcaggttatgtcgttacaggttcagttaacggaaaccgtgatgaattaattgatacaacacaggca

SEQ ID NO: 569845 - DNA, 75 bp, synthetic construct
  source 1..75: mol_type = other DNA
gattaccttggtttgggagaaggctcagcattacctgttggggtgcctgttccgtggccttcagccacaccgcca

SEQ ID NO: 569846 - DNA, 75 bp, synthetic construct
  source 1..75: mol_type = other DNA
accgactgctgctgaggttggggcgttgtcattatctggcggtcaattgaatggtgcattgggtatcggaacatc

SEQ ID NO: 569847 - DNA, 75 bp, synthetic construct
  source 1..75: mol_type = other DNA
aggccgatttctggctgcaatgtttgtcgcaccgaaggccgtcagacgcggtattggtaaggcgctaatgcagta

SEQ ID NO: 569848 - DNA, 75 bp, synthetic construct
  source 1..75: mol_type = other DNA
ctgaactactacaaagaaaacgaagcttacctgcagggtcagttgggtaacccgaaaggcgaagatcagccgaac

SEQ ID NO: 569849 - DNA, 75 bp, synthetic construct
  source 1..75: mol_type = other DNA
gaaaatataccgctcaggacgccacgacggcacgaaaagggatagtccagctcagcagtgcaaccaacagcacgt

SEQ ID NO: 569850 - DNA, 75 bp, synthetic construct
  source 1..75: mol_type = other DNA
tgggcatcggaacatccagtgctcttggcggtaactcgattgttttgggtgataatgacaccggattcaaacaga

SEQ ID NO: 569851 - DNA, 75 bp, synthetic construct
  source 1..75: mol_type = other DNA
gatattgaagagctgaagagcgatctcaaggatgtgagaggcgatattgataagatacgcacaacagatttcagg

SEQ ID NO: 569852 - DNA, 75 bp, synthetic construct
  source 1..75: mol_type = other DNA
gtttttccattccgtatccaggaggaattcaggtgagcaatcgcagaagtcaggcaagtcgtgatgagttcgctc

SEQ ID NO: 569853 - DNA, 75 bp, synthetic construct
  source 1..75: mol_type = other DNA
gcagaaaaaccagaatggcgcagatattcctgataaaagattattcctgcgcaatattggagcaacaaattcaac

SEQ ID NO: 569854 - DNA, 75 bp, synthetic construct
  source 1..75: mol_type = other DNA
ctgctgctgatgttggggcgttgtcattatctggaggtcaattgaatggtgcactgggcatcggaacatccagtg

SEQ ID NO: 569855 - DNA, 75 bp, synthetic construct
  source 1..75: mol_type = other DNA
ccaacagtgattcggaaacgctggccgcaacaccaaaagcggtgaagtctgcctatgacaatgctgaaaaacgtc

SEQ ID NO: 569856 - DNA, 75 bp, synthetic construct
  source 1..75: mol_type = other DNA
atgctggaggtttatcaaaaaaatcaaccggcgataaatttttaccaggcacagggttttcacattgtcgattgc

SEQ ID NO: 569857 - DNA, 75 bp, synthetic construct
  source 1..75: mol_type = other DNA
caaaaacattcatgttcttaatggcggcacactgagtgggctggggaccgtttcgggtcaggttaataaccaggg

SEQ ID NO: 569858 - DNA, 75 bp, synthetic construct
  source 1..75: mol_type = other DNA
agggggcgactgctgtcttggtagagggcggggcacagggctcaattgacagtaatgccactatcaatatggata

SEQ ID NO: 569859 - DNA, 75 bp, synthetic construct
  source 1..75: mol_type = other DNA
tatcgggtttaccggtaatgccagccttacccagggggcgctggttgaaatgaacggcgcacaggggctgggaag

SEQ ID NO: 569860 - DNA, 75 bp, synthetic construct
  source 1..75: mol_type = other DNA
tactggaaagaatacagtgggcgtccgggttgaggagggggctgttggtaccaacagcggaaatattacagttca

SEQ ID NO: 569861 - DNA, 75 bp, synthetic construct
  source 1..75: mol_type = other DNA
tctaaaggtgcgatcaatggatacagcaccggtttatacggaacgtggcagcagaatgacggtaatgacaacggg

SEQ ID NO: 569862 - DNA, 75 bp, synthetic construct
  source 1..75: mol_type = other DNA
caataccggcgtcattcgtctggccggtggtaagacaggaaataccctgaccgtaaatggcgattacactggtgg

SEQ ID NO: 569863 - DNA, 75 bp, synthetic construct
  source 1..75: mol_type = other DNA
tggtatcaatgatggtattattgatgcaattggtacagccatgcgtgcttatgataacagttccattgtgaataa

SEQ ID NO: 569864 - DNA, 75 bp, synthetic construct
  source 1..75: mol_type = other DNA
ggaggcaagaaaagtcgacttcctgacggtggacagtcatgttaactctgcggatgacacacagtacgaactgac

SEQ ID NO: 569865 - DNA, 75 bp, synthetic construct
  source 1..75: mol_type = other DNA
atgcctatcttgccaacgcgcaaaaactgggtctgggaagaggacggtaagcttctcggttttgtcagcattatg

SEQ ID NO: 569866 - DNA, 75 bp, synthetic construct
  source 1..75: mol_type = other DNA
acggtaacagcaccattgttaatgatggcactatctattcagggatcaacaattctaaacacggacgacatggtg

SEQ ID NO: 569867 - DNA, 75 bp, synthetic construct
  source 1..75: mol_type = other DNA
agcgcacattcagcttgatagcggtagtgtgctaacggtcagcggcacgcagcgtcagccgggcgatgataatgg

SEQ ID NO: 569868 - DNA, 75 bp, synthetic construct
  source 1..75: mol_type = other DNA
taaagatggtgctgtcgtgaagagtggtgcaagtgtcaatgttacacaggccgatggcggttccgctctggtggt

SEQ ID NO: 569869 - DNA, 75 bp, synthetic construct
  source 1..75: mol_type = other DNA
taagatacgcacaacagatttcaggctcatgtttggtgcgttgattactacagccttggggttagctggcttaat

SEQ ID NO: 569870 - DNA, 75 bp, synthetic construct
  source 1..75: mol_type = other DNA
ggttatgctgcgctggtcagaaatccgggagatgtaccgtagtggtcttgttgagtttcattcgcatacgcacac

SEQ ID NO: 569871 - DNA, 75 bp, synthetic construct
  source 1..75: mol_type = other DNA
gtggtgaaacattaccccgtaaaagtgtcatgctgacctttgatgacggctggctggataactggcttcaggttt

SEQ ID NO: 569872 - DNA, 75 bp, synthetic construct
  source 1..75: mol_type = other DNA
ttgagtgcgggatatataactgataccaagaacttacctgtattaatgtatcaccacgtcagtaataaacccgga

SEQ ID NO: 569873 - DNA, 75 bp, synthetic construct
  source 1..75: mol_type = other DNA
ggctgaaacgtcgtctgttttattacaccacgcccggattttcttcactactggccctgcataagggaccgcgac

SEQ ID NO: 569874 - DNA, 75 bp, synthetic construct
  source 1..75: mol_type = other DNA
cactgcgtattggtcgtatcagcacaaaggagcgggaaaatgtgggatggctgaaacgtcgtctgttttattaca

SEQ ID NO: 569875 - DNA, 75 bp, synthetic construct
  source 1..75: mol_type = other DNA
gaatttacttcgtgctgatgttcttctcagtcgtgaacgaatgaaggagatgctggggtactgcagccggcatct

SEQ ID NO: 569876 - DNA, 75 bp, synthetic construct
  source 1..75: mol_type = other DNA
tatgttggtgaatccgtaaaacattttaatcctgaatttgttcgtggttgtcttggcgtaaaaatacatgactga

SEQ ID NO: 569877 - DNA, 75 bp, synthetic construct
  source 1..75: mol_type = other DNA
gggaggaaagggaagccctggaggcccgtcaggccgccattctcgctgcagaaaaggagagcagacatgactctt

SEQ ID NO: 569878 - DNA, 75 bp, synthetic construct
  source 1..75: mol_type = other DNA
tcagccaaatatcgacattctggcgtaaacctgatcacatattccatccttatcacttcactgcatattgcaagg

SEQ ID NO: 569879 - DNA, 75 bp, synthetic construct
  source 1..75: mol_type = other DNA
tgtccgtacatgattgaaaatccggtcagcaaaatatcgacattctggcgtaagccagatcacatctttcaccct

SEQ ID NO: 569880 - DNA, 75 bp, synthetic construct
  source 1..75: mol_type = other DNA
cccggcttgatattacgggaatgtgggtattttccctggggctctggtttcatattgttgcccgtctggtttaca

SEQ ID NO: 569881 - DNA, 75 bp, synthetic construct
  source 1..75: mol_type = other DNA
agcccgggaaaaacgctggaaggtttggtggggggcgtaatcaccaccatgatagcgtcgatgataattggaccc

SEQ ID NO: 569882 - DNA, 75 bp, synthetic construct
  source 1..75: mol_type = other DNA
aaacaaaattatgacaatgagtatgaattactcattcacttacttcataagctcaaaaaagaagaatgtgtatta

SEQ ID NO: 569883 - DNA, 75 bp, synthetic construct
  source 1..75: mol_type = other DNA
tgaatacatctacaatcagccaggatgcggtagaaagcatcattgatgccttgccattacgtcccgtactaaaaa

SEQ ID NO: 569884 - DNA, 75 bp, synthetic construct
  source 1..75: mol_type = other DNA
ggttttatccgggaactcgcaaaagttaactggatatggtcaccgcgccaggctaaccagtggatagagcactga

SEQ ID NO: 569885 - DNA, 75 bp, synthetic construct
  source 1..75: mol_type = other DNA
cctggaagaggcaaatcagtggatagccagatacaccacctgcttcaaagacatcacccctgaccacggggagaa

SEQ ID NO: 569886 - DNA, 75 bp, synthetic construct
  source 1..75: mol_type = other DNA
cgttagtggcaactctgttgctccccgggcggctgattgccgccgccttaccgcaggatgaaaagttaattaccg

SEQ ID NO: 569887 - DNA, 75 bp, synthetic construct
  source 1..75: mol_type = other DNA
tggtgctgttcatcaccggactgttgccatacaaaaaaggtctgcttccggtgtaaaagccgctcctgcccgcac

SEQ ID NO: 569888 - DNA, 75 bp, synthetic construct
  source 1..75: mol_type = other DNA
tacctgtattaatgtatcaccatatcagtaataatccagggctggtgacgctttcactccggactttccgcgagc

SEQ ID NO: 569889 - DNA, 75 bp, synthetic construct
  source 1..75: mol_type = other DNA
tgccaaccacaaatatccagggcggggcgttactggtgttatttcttttggcattaaccgagtcaaacgatattg

SEQ ID NO: 569890 - DNA, 75 bp, synthetic construct
  source 1..75: mol_type = other DNA
gatattcacggtgctccacacatgggggcgtgaccagcagtggcatccgcatatccatttatcgacaactgccgg

SEQ ID NO: 569891 - DNA, 75 bp, synthetic construct
  source 1..75: mol_type = other DNA
ttcagcagggaaaccgctggcttaactggctggagaaaccaccagaaggttcagtccgtccggtggtaattgaat

SEQ ID NO: 569892 - DNA, 75 bp, synthetic construct
  source 1..75: mol_type = other DNA
tggctggttccctcgatattacactaagccacaatacgctaaagcagcattgacacggtttcttggggaacctgt

SEQ ID NO: 569893 - DNA, 75 bp, synthetic construct
  source 1..75: mol_type = other DNA
atgaaaagtacaacctatgcgcttattgctgtcgccgcgattgcggcatttgctctcctgcgcgaacactggtca

SEQ ID NO: 569894 - DNA, 75 bp, synthetic construct
  source 1..75: mol_type = other DNA
tcatgtggcgttaaatctccccgccgccgataaaccgagccgttatttgttaaccgtctccgccagtgacggcgc

SEQ ID NO: 569895 - DNA, 75 bp, synthetic construct
  source 1..75: mol_type = other DNA
cgggttgaggaaggcgctgttggaaccaacagcggaaatattaccgtacaggatggcggtgtgggattaattgcc

SEQ ID NO: 569896 - DNA, 75 bp, synthetic construct
  source 1..75: mol_type = other DNA
tgttggatctgcaataccgcaatttgcagctaacggttccggtattaccgatcagattgcttttcgtattatcgg

SEQ ID NO: 569897 - DNA, 75 bp, synthetic construct
  source 1..75: mol_type = other DNA
gcataaaggtaatgcgggtggtactgacggtaactggtatctgcgttctgaattgccgccagaaccacaaccgca

SEQ ID NO: 569898 - DNA, 75 bp, synthetic construct
  source 1..75: mol_type = other DNA
cttctctgggttactcccgccatccggtgctacacgacgtttccttcaacctgtctcagggatcaatttgttgcc

SEQ ID NO: 569899 - DNA, 75 bp, synthetic construct
  source 1..75: mol_type = other DNA
gaaatcaacagcgaccaaaggcgtcaacctaaacgtacaacgaaaacatagtttctgcgaattctgtggaaacct

SEQ ID NO: 569900 - DNA, 75 bp, synthetic construct
  source 1..75: mol_type = other DNA
atggttgacatgaaaattactatctgggaaggctgtgacctcacagttgctgctgcaattaaattatttgtagag

SEQ ID NO: 569901 - DNA, 75 bp, synthetic construct
  source 1..75: mol_type = other DNA
ctccactggcagatgcggtggcaaacgtcttaaccatgacgttgctgaaaaaagcgcagttgaagtccactgtga

SEQ ID NO: 569902 - DNA, 75 bp, synthetic construct
  source 1..75: mol_type = other DNA
gaagcccgcataccggtgagcaattcctttgcgcctaacatcactttttcggtgctgtatacccgtaacggtcag

SEQ ID NO: 569903 - DNA, 75 bp, synthetic construct
  source 1..75: mol_type = other DNA
gcaatgagattgacagcgatgcgctgtatctcgatgaaattacgcttaccagcgagcaggatgccgttctgcgct

SEQ ID NO: 569904 - DNA, 75 bp, synthetic construct
  source 1..75: mol_type = other DNA
cattgatttcactaccggtacagataatatcggcgtctgggttgataatggtcgttttgaaaatacaggaagccg

SEQ ID NO: 569905 - DNA, 75 bp, synthetic construct
  source 1..75: mol_type = other DNA
gttgagttccacccaggataaagtgaccgggtatatcgcccgtaatggcgccacacttgataataccggtaatat

SEQ ID NO: 569906 - DNA, 75 bp, synthetic construct
  source 1..75: mol_type = other DNA
tgaacggcgcacaggggctgggaagccagggttccatcagctttgaaagccttagtgatcgcctggcgattgata

SEQ ID NO: 569907 - DNA, 75 bp, synthetic construct
  source 1..75: mol_type = other DNA
tacggtcaactggaactctgcaaatgaattttattttcaggcagctgcaacagcggcaaatggacttacgtatac

SEQ ID NO: 569908 - DNA, 75 bp, synthetic construct
  source 1..75: mol_type = other DNA
aaatagatattcagcgcgacgagcgtgatttagagacggtccgacaaatccaagctttccacatgcgcgaattac

SEQ ID NO: 569909 - DNA, 75 bp, synthetic construct
  source 1..75: mol_type = other DNA
gcaactgatcgcgcaatgaaagctctgggcgttcagcattctctgcaagacgttaaagcattaggtattgccgga

SEQ ID NO: 569910 - DNA, 75 bp, synthetic construct
  source 1..75: mol_type = other DNA
ccacttatctcgtgaccagatgcccgcattatacgaaggcagcgaaattactggtgctttgctacctgaagttgc

SEQ ID NO: 569911 - DNA, 75 bp, synthetic construct
  source 1..75: mol_type = other DNA
caccccacgccggataaacctgtacagaaggtctatcgtccggaagcgggctcttatattgcgaacatagcggca

SEQ ID NO: 569912 - DNA, 75 bp, synthetic construct
  source 1..75: mol_type = other DNA
ccgctgacggcattgagattgtgcatgtcggtgggcattctgacggtaacttcagactgcagaaccgtgcggtgg

SEQ ID NO: 569913 - DNA, 75 bp, synthetic construct
  source 1..75: mol_type = other DNA
ggcaggggatctggccatcgaagctgcggggcaggttgtcacactgtctaacggcggtaataactataccgggga

SEQ ID NO: 569914 - DNA, 75 bp, synthetic construct
  source 1..75: mol_type = other DNA
agccgggggatgataatggtggcatcattgaaaacaacgtgctgtccggtgagggaacgctggctgtcacggcag

SEQ ID NO: 569915 - DNA, 75 bp, synthetic construct
  source 1..75: mol_type = other DNA
actggctgcggagtcctggaaatcccgtggatttaccggttcagtggaagcgggttatacctttaaagccggcga

SEQ ID NO: 569916 - DNA, 75 bp, synthetic construct
  source 1..75: mol_type = other DNA
aactgggtggcagcattgcgcaatggactgacggtcaggaccgtctgcaactggggattatggccggttatggaa

SEQ ID NO: 569917 - DNA, 75 bp, synthetic construct
  source 1..75: mol_type = other DNA
ttaccgcagcacagtttgtttatgaccccgctggcgatcgccagtagtgggcgagagaaagcggaggggctatat

SEQ ID NO: 569918 - DNA, 75 bp, synthetic construct
  source 1..75: mol_type = other DNA
gtgaactggcgttgcgagcgcccgccagcgcccgccagagtggtttttccggatgcgttagaccaacgtgtgctg

SEQ ID NO: 569919 - DNA, 75 bp, synthetic construct
  source 1..75: mol_type = other DNA
ggctggcccgcgcgggcgaaaaaacgccgccggatgcgctggaaaaactcaccgatccgctgatgttcgctgccg

SEQ ID NO: 569920 - DNA, 75 bp, synthetic construct
  source 1..75: mol_type = other DNA
ctggcgctggtggcagctgtgccgcgtcagacagaagtgaaccgcgaaagcagtttacaaacactggttgaatga

SEQ ID NO: 569921 - DNA, 75 bp, synthetic construct
  source 1..75: mol_type = other DNA
atgctgccggtttgacttcaatacgttttcgctcgttttttatcgccaccgggcttggtcaattaccggcgacta

SEQ ID NO: 569922 - DNA, 75 bp, synthetic construct
  source 1..75: mol_type = other DNA
agtggtggaaaaattaaccggcaaaaccgtacttgacagtatggacggctttttcactcgctacggcaaacacac

SEQ ID NO: 569923 - DNA, 75 bp, synthetic construct
  source 1..75: mol_type = other DNA
atgcgagaagaatttgcccatcgctggctcgcccgtgcaggcgataaaacgccgccggacgcgctggataaactc

SEQ ID NO: 569924 - DNA, 75 bp, synthetic construct
  source 1..75: mol_type = other DNA
acgtcaatgccgacaccgacagtaccagcaacaggggtgcggacggtagccaattctcggcaagcggtaacgtcg

SEQ ID NO: 569925 - DNA, 75 bp, synthetic construct
  source 1..75: mol_type = other DNA
agcgctgggggcgggtaatattatcaatggcggaaccctgacgctgcgcggtgcagaggactggacgctgaacag

SEQ ID NO: 569926 - DNA, 75 bp, synthetic construct
  source 1..75: mol_type = other DNA
aggctccggaaatattcatgttctcaatggcggcacactcagtgggcagggtaccgttgcaggtcatgtaaataa

SEQ ID NO: 569927 - DNA, 75 bp, synthetic construct
  source 1..75: mol_type = other DNA
gatatcgcgcttgccagtgccgaaacctggcgcgccatcaccggagaagagccgcgcgtggcgatgctgtcgttt

SEQ ID NO: 569928 - DNA, 75 bp, synthetic construct
  source 1..75: mol_type = other DNA
ggtcggtggcagcgatggtgctcctggcgttaagcccgctcagtgcgcaggcggaatccacatctgaggtgacga

SEQ ID NO: 569929 - DNA, 75 bp, synthetic construct
  source 1..75: mol_type = other DNA
tcatttgatgacgctgagacgaaacagggtatcccgtctaaccgggtgcaggcgaaagtagggatacaggtgaac

SEQ ID NO: 569930 - DNA, 75 bp, synthetic construct
  source 1..75: mol_type = other DNA
cggtctgacttcaatacgttttcgctcgtttttatcgccaccgggcttggtcaattaccggcgactattgtttat

SEQ ID NO: 569931 - DNA, 75 bp, synthetic construct
  source 1..75: mol_type = other DNA
taatggaaagctatgccattcatcagtttatcaatggcgtaatcaacgtcccacaggtgctggaaacactgggcg

SEQ ID NO: 569932 - DNA, 75 bp, synthetic construct
  source 1..75: mol_type = other DNA
gcacccgtttcgcatcatcaagcggcggttcggcttcgtgaaagccagatacagggggatgctgaaaaacgataa

SEQ ID NO: 569933 - DNA, 75 bp, synthetic construct
  source 1..75: mol_type = other DNA
gcacccgtttcgcatcatcaagcggctgttcggcttcgtgaaagccagatacagggggttgctgaaaaacgataa

SEQ ID NO: 569934 - DNA, 75 bp, synthetic construct
  source 1..75: mol_type = other DNA
gttcctgatcgccactgtcggcgcactgactatttcccttgttgtcaccgcagcaacctttactcgtgggctttc

SEQ ID NO: 569935 - DNA, 75 bp, synthetic construct
  source 1..75: mol_type = other DNA
tttccgcgctgaccggtttacccgataacttcaccgtgcaggcatttgtgatcctgctttccggcggcatttttt

SEQ ID NO: 569936 - DNA, 75 bp, synthetic construct
  source 1..75: mol_type = other DNA
attatctcccgcaaacaccggtcatcacgtcagaaaagacaccggctatcccggcagaaaccgtattcaaaggcg

SEQ ID NO: 569937 - DNA, 75 bp, synthetic construct
  source 1..75: mol_type = other DNA
gcgcggatggggctggcggtactggtggaccaggaaaactgtctcaactttcaggggctgcgctgcgatgtttgt

SEQ ID NO: 569938 - DNA, 75 bp, synthetic construct
  source 1..75: mol_type = other DNA
gttcccttacgagaacatggaagggaagattgatcgcccggaagagtacgccgacatcgcgactaaatgtgtgac

SEQ ID NO: 569939 - DNA, 75 bp, synthetic construct
  source 1..75: mol_type = other DNA
gccaggtgatcttcaaccctaatttgttcccttatgagaacatggaagggaagattgatcgcccggaagagtacg

SEQ ID NO: 569940 - DNA, 75 bp, synthetic construct
  source 1..75: mol_type = other DNA
agcgtcccggcaaggtaaaaaccttgaagcagcatccgcgaaagaacaaaacggtcatcaacatcgaatacatga

SEQ ID NO: 569941 - DNA, 75 bp, synthetic construct
  source 1..75: mol_type = other DNA
cgttttctgccaacggttcacagcgacgcctgtaccggctgcggtaagtgcgaaaaagtgtgcgtgctggaacaa

SEQ ID NO: 569942 - DNA, 75 bp, synthetic construct
  source 1..75: mol_type = other DNA
ttccgatggaagcataataagctttttctgcttctgccggaggagtatggcccagcctttccagcaatcgtcgat

SEQ ID NO: 569943 - DNA, 75 bp, synthetic construct
  source 1..75: mol_type = other DNA
gcgtgctgctgcgtgacgtcgcgaagattgagctgggtggtgagaactacgacatcatcgcagagtttaacggcc

SEQ ID NO: 569944 - DNA, 75 bp, synthetic construct
  source 1..75: mol_type = other DNA
tttgtggtggttcgccgccgctttagccgcaagaatgaagatatcgagcacagccatactgtcgatcatcattga

SEQ ID NO: 569945 - DNA, 75 bp, synthetic construct
  source 1..75: mol_type = other DNA
ttgcagaatggcgtaagcatgacaacctgacaaaagcgcaggttgctgaacgcatgggggttacacctccggtta

SEQ ID NO: 569946 - DNA, 75 bp, synthetic construct
  source 1..75: mol_type = other DNA
ccatacgacactacgccgttcgtgaaaatctccattcacgaagtggttaaaacgctggttgaagcgatcatcctc

SEQ ID NO: 569947 - DNA, 75 bp, synthetic construct
  source 1..75: mol_type = other DNA
tccgactattgctgtaccggtggtattgctggggacatttgccgtccttgccgcctttggcttctcgataaacac

SEQ ID NO: 569948 - DNA, 75 bp, synthetic construct
  source 1..75: mol_type = other DNA
ccggggtttatcagactgcttgatcgcatggaaaatggtgatgtactgattgtcaccaaacttgaccgtcttggc

SEQ ID NO: 569949 - DNA, 75 bp, synthetic construct
  source 1..75: mol_type = other DNA
tataagtatcagcgccattgcgcgggaatttaatactactcggcaaaccatactccgggtaaaggctgggcagca

SEQ ID NO: 569950 - DNA, 75 bp, synthetic construct
  source 1..75: mol_type = other DNA
atgtcacgagtttttgcttattgccgggtctccactctggaacagactacagaaaatcagcggcgtgaaattgaa

SEQ ID NO: 569951 - DNA, 75 bp, synthetic construct
  source 1..75: mol_type = other DNA
tcgtcagttctccattaccattgtttccgcaatggcattgtcagtactggtggcgttgattctgactccggcgct

SEQ ID NO: 569952 - DNA, 75 bp, synthetic construct
  source 1..75: mol_type = other DNA
tctctccggcaaccaggcaccttcactgtacgcgatttcgttgattgtcgtattcctgtgtctggcggcgctgta

SEQ ID NO: 569953 - DNA, 75 bp, synthetic construct
  source 1..75: mol_type = other DNA
cagggatattaaaagcacggggcgcaggaaagcgatttggtcgcccacctgtgttaaatgatgaacaaatacaga

SEQ ID NO: 569954 - DNA, 75 bp, synthetic construct
  source 1..75: mol_type = other DNA
gtcggcaaaccccagccgggcaccgacagcgccgacgaaaacgagccgtccttcggttacaccctgcgccgtaaa

SEQ ID NO: 569955 - DNA, 75 bp, synthetic construct
  source 1..75: mol_type = other DNA
tatatacattatctattgtttttgttggtggtaatgtcccgttctttgataattggattgtatccccgtgggttt

SEQ ID NO: 569956 - DNA, 75 bp, synthetic construct
  source 1..75: mol_type = other DNA
aattgactgaaaatgatctaatcaaagtatcttttggagatgccataaaagacaagctatttaataaagtgtttg

SEQ ID NO: 569957 - DNA, 75 bp, synthetic construct
  source 1..75: mol_type = other DNA
catcaatagtaagcagtggcccggcaaagccgctttaggtcgcctgaaagacgtggaaaaagggcaatataatct

SEQ ID NO: 569958 - DNA, 75 bp, synthetic construct
  source 1..75: mol_type = other DNA
tgacaagcattttaataaattggtgtctgatatttccagtttatttgataatactggaattgatctttcaaaaaa

SEQ ID NO: 569959 - DNA, 75 bp, synthetic construct
  source 1..75: mol_type = other DNA
aaactattgcatactgatgttggcagtattattgaactatataaaaataagggtgttagcattgaatctccgcaa

SEQ ID NO: 569960 - DNA, 75 bp, synthetic construct
  source 1..75: mol_type = other DNA
agctaacaagtaaattatacactgaaataagatatttagatgaagttgctgattatgataaaagaatagaattgc

SEQ ID NO: 569961 - DNA, 75 bp, synthetic construct
  source 1..75: mol_type = other DNA
tagagacctatggctgttttgcttttcattcaggtttgctggctaatggctgcccatctgcggaagatactcatc

SEQ ID NO: 569962 - DNA, 75 bp, synthetic construct
  source 1..75: mol_type = other DNA
ccaatgcgaaaaaggctttcactgcggcggactgctgggctaacggtcacggcgacccgctgcgcgacgttgaga

SEQ ID NO: 569963 - DNA, 75 bp, synthetic construct
  source 1..75: mol_type = other DNA
gcccaggacaagaacgtctatcgcgcggctaacgtcaaagcgctggctgcggctgaccgctggggcggtggcaag

SEQ ID NO: 569964 - DNA, 75 bp, synthetic construct
  source 1..75: mol_type = other DNA
ttagacggagatatgttacgccttaacgggcgttacgagtatgtaatgggtttcggtcatcattatctggctcag

SEQ ID NO: 569965 - DNA, 75 bp, synthetic construct
  source 1..75: mol_type = other DNA
cacggggctgcgtcctaacctgatgaccatgggggccggcgtgatggcgctgctgaagttccacccggcgattca

SEQ ID NO: 569966 - DNA, 75 bp, synthetic construct
  source 1..75: mol_type = other DNA
atgagtacgcgtattaatttgtggcgggggggtttttgggggaaacctcgtatcttgctggaaaatagtgatttt

SEQ ID NO: 569967 - DNA, 75 bp, synthetic construct
  source 1..75: mol_type = other DNA
caggtcatctctgctgtggcagaatttgaaagggatttgcttcttgagcgtacgcactctggtattgcgagagcg

SEQ ID NO: 569968 - DNA, 75 bp, synthetic construct
  source 1..75: mol_type = other DNA
tcgaacgtgaaccgcaagatcccggcgttgtacgtttaaaacgtgcggttgatgtacataatcttgcagagcttc

SEQ ID NO: 569969 - DNA, 75 bp, synthetic construct
  source 1..75: mol_type = other DNA
atgaccgtaactcgcccacgcgccgaacgcggcgcatttccgcccggaacagaacattacggacgttcattattg

SEQ ID NO: 569970 - DNA, 75 bp, synthetic construct
  source 1..75: mol_type = other DNA
ggtgctgtgggtcattaaggccgatgatcgggcactgaccttggacgagcagttctggctcggtgtgatgcaacc

SEQ ID NO: 569971 - DNA, 75 bp, synthetic construct
  source 1..75: mol_type = other DNA
gatttccggggcggttcagggcgtcatcaggatgaattacgggcgatgacagagtcattacctgaaaatgcatct

SEQ ID NO: 569972 - DNA, 75 bp, synthetic construct
  source 1..75: mol_type = other DNA
tccgatgaagaacttgcggatctcttttacagccacctggagagtgaaaattatccgggcgcgctaactgtcacc

SEQ ID NO: 569973 - DNA, 75 bp, synthetic construct
  source 1..75: mol_type = other DNA
aatcttcagcgcaggtgttggtgcctcctggcaaaaacattatggcacggaagtcgtcacccacccaactcggct

SEQ ID NO: 569974 - DNA, 75 bp, synthetic construct
  source 1..75: mol_type = other DNA
gtgacacaactgcaagggagattctgcacagagccggtaaagtcgcaggcccgtgacagtttcggtgaagctgtg

SEQ ID NO: 569975 - DNA, 75 bp, synthetic construct
  source 1..75: mol_type = other DNA
tcacccggtctgcgtggtatccgcatgtaccggatggggcgtggaggatatggtagcaaccatgatgcgctgtct

SEQ ID NO: 569976 - DNA, 75 bp, synthetic construct
  source 1..75: mol_type = other DNA
attaaccaggccgacaaaatagaacccagccatgaatgggatacccgttctggtactccctcagcacagcaacag

SEQ ID NO: 569977 - DNA, 75 bp, synthetic construct
  source 1..75: mol_type = other DNA
gaacgcctgtactcgcgacgtactgcgcttccggttgcgcagcggtcgtcacagtctggtgattgtcgatttacc

SEQ ID NO: 569978 - DNA, 75 bp, synthetic construct
  source 1..75: mol_type = other DNA
ttaccagcagcaggtgctgttcgtgctgaatcaggccgacaaaatcgaacccagccacgaatgggatactcgtac

SEQ ID NO: 569979 - DNA, 75 bp, synthetic construct
  source 1..75: mol_type = other DNA
cttgaacgtatccagaacctgacccattacgagccggtaattggcatcatgggcaaaagtggtacaggtaaatcc

SEQ ID NO: 569980 - DNA, 75 bp, synthetic construct
  source 1..75: mol_type = other DNA
ctgaggctgacctgtgcgaaaaactgcatgaggatgcggaacagctctttcgtacccttgttactcgtctggatg

SEQ ID NO: 569981 - DNA, 75 bp, synthetic construct
  source 1..75: mol_type = other DNA
cgtctggctgaacaggcgatgcaggcagttgttacccgtcgcgatgcatttggcgaagcgcaactggcgcaccgc

SEQ ID NO: 569982 - DNA, 75 bp, synthetic construct
  source 1..75: mol_type = other DNA
ttaattgccaatattgccgactggctggaactgcatccggcagaaaaacgccagccctggtgcgttgaaatcccg

SEQ ID NO: 569983 - DNA, 75 bp, synthetic construct
  source 1..75: mol_type = other DNA
tggtattcgaacgaattaagtcaggtgtaagtataagtgccatgtccttgacccacgatattcagacagtcgttg

SEQ ID NO: 569984 - DNA, 75 bp, synthetic construct
  source 1..75: mol_type = other DNA
gacgtgctgtcgcaaaccggacagccgctgccgtgtgccgatctttggttaagcaacgccaaagcggtgagtgag

SEQ ID NO: 569985 - DNA, 75 bp, synthetic construct
  source 1..75: mol_type = other DNA
ctgtccgtttgccgaaccgctgtatggcgaaatggacgacaccgggcttagctggcaacagcggctgggcgactg

SEQ ID NO: 569986 - DNA, 75 bp, synthetic construct
  source 1..75: mol_type = other DNA
ggtggtgcgtttgatcgacgcactctcgcaacttccggcaggttacccggtttacagcaaccgtggagccagcgg

SEQ ID NO: 569987 - DNA, 75 bp, synthetic construct
  source 1..75: mol_type = other DNA
atttgttgtgagtgccttaatgcactgaataacacaggggctatatcttcagcattaaaaaaatatataaaggag

SEQ ID NO: 569988 - DNA, 75 bp, synthetic construct
  source 1..75: mol_type = other DNA
atgacgaaacaacagaaaacagcgctgaacatggctaaattcatccagaatcagtctctgctcctgctggagaag

SEQ ID NO: 569989 - DNA, 75 bp, synthetic construct
  source 1..75: mol_type = other DNA
gtgatgacgaaacaacagaaaactgcgcttaatatggcgaagtttatccaagggcagaccctgcttctgctggaa

SEQ ID NO: 569990 - DNA, 75 bp, synthetic construct
  source 1..75: mol_type = other DNA
atgaaactggtaagccataaagaactgcataacgagtggatgaaggacgaggaatatcatgctgcatggcaggaa

SEQ ID NO: 569991 - DNA, 75 bp, synthetic construct
  source 1..75: mol_type = other DNA
taaaaaaaagaataatgaaaccccataaatcatcaatctcccctgaactgtgtgcgcgaaacgtgttgacgtcaa

SEQ ID NO: 569992 - DNA, 75 bp, synthetic construct
  source 1..75: mol_type = other DNA
acaatagcctgtttttcactgcgattttatccaaggattttcggttcgacacagttttcgacattctaccgccag

SEQ ID NO: 569993 - DNA, 75 bp, synthetic construct
  source 1..75: mol_type = other DNA
cggtaattgttatcgagccatacatcattgccatggaagacaacgatgtgaaagggaaaaccctgaaggcagcag

SEQ ID NO: 569994 - DNA, 75 bp, synthetic construct
  source 1..75: mol_type = other DNA
tgcacagggcgctgtcacaccccgtacagcgggtactaccgataaaaccaacctcagtgaggaagagaacatgtt

SEQ ID NO: 569995 - DNA, 75 bp, synthetic construct
  source 1..75: mol_type = other DNA
aagaggcccgcatcccgcaggcggcggtggcaagagccgtcgccgtttccgaggccacgctggcccagattgtga

SEQ ID NO: 569996 - DNA, 75 bp, synthetic construct
  source 1..75: mol_type = other DNA
gtcagcgccatcgtctttctcgtcacgccggacacccgcgtggcaaccgcctacattcttaaccgcgttgaagac

SEQ ID NO: 569997 - DNA, 75 bp, synthetic construct
  source 1..75: mol_type = other DNA
ccgctggcaaacctttaacggcgtgtttgtgccgttgctaaagcccgcgctcgccaatgcctttttaatcgtcgt

SEQ ID NO: 569998 - DNA, 75 bp, synthetic construct
  source 1..75: mol_type = other DNA
ttttctaccgacaggcgatatgagggcaccagttacgttgcagttgatcactccactacaccgcaaaactatgca

SEQ ID NO: 569999 - DNA, 75 bp, synthetic construct
  source 1..75: mol_type = other DNA
tttggcctgctcatcgcctgggtggtggtgcgccaacaattcaaaggcaaaaagaccatcgagttcaccaccatg

SEQ ID NO: 570000 - DNA, 75 bp, synthetic construct
  source 1..75: mol_type = other DNA
cgcgagtggcagcagcaggacatcgcagacatcagagccacaggaagaaaggaaagaatcaaaagaaaatgtgcc

SEQ ID NO: 570001 - DNA, 75 bp, synthetic construct
  source 1..75: mol_type = other DNA
cggtcagtcccgcagtttccggcgattttcggccggtgtccggtggagtccggcgcggtcgccttccatgccctg

SEQ ID NO: 570002 - DNA, 75 bp, synthetic construct
  source 1..75: mol_type = other DNA
ccccattaccggcacgctgaacacgctctttctcagctcggccacagtcggggagtgcccgctgttccgcttccg

SEQ ID NO: 570003 - DNA, 75 bp, synthetic construct
  source 1..75: mol_type = other DNA
agcaaatcagcagtaaagtttatgtcgatgaccaggatctcgcggacttacgttttattaaacaacgtggcgtga

SEQ ID NO: 570004 - DNA, 75 bp, synthetic construct
  source 1..75: mol_type = other DNA
tgttgtcgctaacgatgatattcaacagaaattaatgggtattaccgcggaaacctacggctttggcattcgttt

SEQ ID NO: 570005 - DNA, 75 bp, synthetic construct
  source 1..75: mol_type = other DNA
ctacatccttaaccgcgtagaagacggcgaatatggcgtagccatcgcctatggttcgattctgatcgtggtgat

SEQ ID NO: 570006 - DNA, 75 bp, synthetic construct
  source 1..75: mol_type = other DNA
tcaacgaagatgctgcgggtaactacatccactacggtgttcgcgagttcggtatgaccgcgattgctaacggta

SEQ ID NO: 570007 - DNA, 75 bp, synthetic construct
  source 1..75: mol_type = other DNA
aggcggggttcagccacgttctggtgattgaggacgcccacagtctgcccattccgacactgaaacacctcaaac

SEQ ID NO: 570008 - DNA, 75 bp, synthetic construct
  source 1..75: mol_type = other DNA
aggcggggttcagccacgttctggtgattgaggaagcccacagtctgccccttccgacactgaaacacctcaaac

SEQ ID NO: 570009 - DNA, 75 bp, synthetic construct
  source 1..75: mol_type = other DNA
ttcagtttccgatctctgcaaggaactcggcatcgagcgcgtcactctctaccgatatgtcggtcccaaaggcga

SEQ ID NO: 570010 - DNA, 75 bp, synthetic construct
  source 1..75: mol_type = other DNA
tggtaaccatgctgacctggatttgttgttataacgacgcgttaccgcggggggcaccaacttcgccagccattt

SEQ ID NO: 570011 - DNA, 75 bp, synthetic construct
  source 1..75: mol_type = other DNA
ctgaagttgaactggctgtcgctgcatatgaaaaactgactgccgaaggcgtgaaagcgcgcgtggtttctatgc

SEQ ID NO: 570012 - DNA, 75 bp, synthetic construct
  source 1..75: mol_type = other DNA
gcaaccaaaaaagcgtttggtcttttccgtgacccattcgccgacgaagccatgcagggttctgatgatgtgttc

SEQ ID NO: 570013 - DNA, 75 bp, synthetic construct
  source 1..75: mol_type = other DNA
ttgattgcgtttcatctgtatcaggatttaccgaaagccgacatggcctacccgacgctggtcaataacgttctg

SEQ ID NO: 570014 - DNA, 75 bp, synthetic construct
  source 1..75: mol_type = other DNA
gctggcgattattttcatctttgactggctgatcggtgaatcacgtacctcccgttcaaaagccaaaaaccaggc

SEQ ID NO: 570015 - DNA, 75 bp, synthetic construct
  source 1..75: mol_type = other DNA
tcaggacgcccgctttcgccagatgcatcgcgtcctgaaagacagcagccaggcggggttcagccacgttctggt

SEQ ID NO: 570016 - DNA, 75 bp, synthetic construct
  source 1..75: mol_type = other DNA
accactccggacattcgctacgtgcgtgaggcgctgtaccagacagcccgtcatggcgggtttatggccgtcatc

SEQ ID NO: 570017 - DNA, 75 bp, synthetic construct
  source 1..75: mol_type = other DNA
aggaggcccgcatcccgcaggcggtggtggcgagagctgtcgccgtttccgaggccacgctggcccagattgtga

SEQ ID NO: 570018 - DNA, 75 bp, synthetic construct
  source 1..75: mol_type = other DNA
ttataaccgtcatgcaacatgcagcggtgaagccaccgcgaagtttgtccgctcaccagagaatggtcaccttac

SEQ ID NO: 570019 - DNA, 75 bp, synthetic construct
  source 1..75: mol_type = other DNA
cttacgatctcaacctgcggatcaaaaatatgctgcccgatctctatgctgaagatcccgatttctaccgcaata

SEQ ID NO: 570020 - DNA, 75 bp, synthetic construct
  source 1..75: mol_type = other DNA
gacctgaatgatattgaaaaaataacgtatataaaagcaggcaggaagtttctcgcgcaaatggagggaagacaa

SEQ ID NO: 570021 - DNA, 75 bp, synthetic construct
  source 1..75: mol_type = other DNA
tgcgctgtttttccgtggcgcgttgctgtctggtgatctgccttctaaatctggcacagccgaattgcgcgagct

SEQ ID NO: 570022 - DNA, 75 bp, synthetic construct
  source 1..75: mol_type = other DNA
gttgcagccgtggcaactcgatttctcttcaatgaaaagtgccatgctggcaatcctctccggcgtcagttgggg

SEQ ID NO: 570023 - DNA, 75 bp, synthetic construct
  source 1..75: mol_type = other DNA
ctgggcgctggcctacagtgcgattctggcgacagcgctggcgtggagcttatggttgtttgtattgaaaaactt

SEQ ID NO: 570024 - DNA, 75 bp, synthetic construct
  source 1..75: mol_type = other DNA
atcctgagttataccatgccattctgggtggtgattctcgcggcattgtttctcggtgaacgactgcggcgcggg

SEQ ID NO: 570025 - DNA, 75 bp, synthetic construct
  source 1..75: mol_type = other DNA
tgtacagaatcagcaagcttcttcaggaaactggatggagccaggctgagctggcccgtagaattggtgtgacac

SEQ ID NO: 570026 - DNA, 75 bp, synthetic construct
  source 1..75: mol_type = other DNA
ccaggcttttagtgcgtttccagaggaagaccaagaaaaaatgcttcaagaaatcaaagacaagaaaaaatcaat

SEQ ID NO: 570027 - DNA, 75 bp, synthetic construct
  source 1..75: mol_type = other DNA
cagccggattgtcgagccggttctgcctggcgaagaagatttcagctatataccaactcaggtcatcgctgaata

SEQ ID NO: 570028 - DNA, 75 bp, synthetic construct
  source 1..75: mol_type = other DNA
gcgctggatgtcgcaaagcaagtggcagcagacaagaaagcgatggatgaactggcttcctatgtccgcacggcc

SEQ ID NO: 570029 - DNA, 75 bp, synthetic construct
  source 1..75: mol_type = other DNA
aaagaaacaccaaacgcaacctggccggtacatgctgtaattaccaactctacctatgatggtctgctgtacaac

SEQ ID NO: 570030 - DNA, 75 bp, synthetic construct
  source 1..75: mol_type = other DNA
ccgcgaatgtccggtcgatccgcgcgacgtcccaggcgggcgttcccttggcggacatccacgccgcagcgtcgt

SEQ ID NO: 570031 - DNA, 75 bp, synthetic construct
  source 1..75: mol_type = other DNA
gccgtggcaactcgatttctcttcgatgaaaagtgccatgctggcaatcctctccggtgttagttggggggcgag

SEQ ID NO: 570032 - DNA, 75 bp, synthetic construct
  source 1..75: mol_type = other DNA
ggcgctcatatcattaccattactgaagcagaactaaagcaatcagaaaaaggagccaaatttattgagttttct

SEQ ID NO: 570033 - DNA, 75 bp, synthetic construct
  source 1..75: mol_type = other DNA
ccaaaagcaccgcggtgtttaatatgttcaaacacctggcccatgtgctttcagaaaaatatcatctggttgatt

SEQ ID NO: 570034 - DNA, 75 bp, synthetic construct
  source 1..75: mol_type = other DNA
atgaacaaagagacacaacccatcgaccgcgaaacgctgttgaaagaggccaacaaaatcattcgtgagcatgag

SEQ ID NO: 570035 - DNA, 75 bp, synthetic construct
  source 1..75: mol_type = other DNA
ctgggaatccgaggaactacttgaagttggcttgatacgcgagatgatagaacaggctgttcccctccacttaca

SEQ ID NO: 570036 - DNA, 75 bp, synthetic construct
  source 1..75: mol_type = other DNA
tggatttggatttacagtatatgctgctgttcagactatcggactattcagttcattatatatagcagatcgttt

SEQ ID NO: 570037 - DNA, 75 bp, synthetic construct
  source 1..75: mol_type = other DNA
tcttgtttattacacattaatcaccattattgttggaattatcacctactttattgtggatgcagacgacaggac

SEQ ID NO: 570038 - DNA, 75 bp, synthetic construct
  source 1..75: mol_type = other DNA
acatacgcacgatatcgaacggtataaagtaaatggacaaatctacattgaaagagttctcaagaagttcaggcc

SEQ ID NO: 570039 - DNA, 75 bp, synthetic construct
  source 1..75: mol_type = other DNA
cctatctaactggcaatgtttttcagaatgatagaaacaggccggaaattaagaaaacacttgagcagaaaattg

SEQ ID NO: 570040 - DNA, 75 bp, synthetic construct
  source 1..75: mol_type = other DNA
gcccgtcatccgcgcgtggatttattgtcgttaacatcctggcagatgctgtatgcggcgctggtgatgagtgtg

SEQ ID NO: 570041 - DNA, 75 bp, synthetic construct
  source 1..75: mol_type = other DNA
cgcgccaacctgatggaaaaactgggtgtcagtaacgacgttgaactggcgcgccgcatgtttgatggctggtga

SEQ ID NO: 570042 - DNA, 75 bp, synthetic construct
  source 1..75: mol_type = other DNA
atatctccggtctggagcttctaagccagctgccgaaaggcatggcgacaattatgctctccgttcacgacagtc

SEQ ID NO: 570043 - DNA, 75 bp, synthetic construct
  source 1..75: mol_type = other DNA
atatttccggtctggagctgctaagccaactaccgaaaggcatggcgacaattatgctctccgttcacgacagtc

SEQ ID NO: 570044 - DNA, 75 bp, synthetic construct
  source 1..75: mol_type = other DNA
ttgcacttaaagagcttgaaagaaagttggcgcaagcaatatctgatcgcaagaaacttattgcgcgttacgagg

SEQ ID NO: 570045 - DNA, 75 bp, synthetic construct
  source 1..75: mol_type = other DNA
tcagcttgcgctcggcccgcttgctctggcttttgttggcgcaaccgatcctgactccatcacaacaattaaaga

SEQ ID NO: 570046 - DNA, 75 bp, synthetic construct
  source 1..75: mol_type = other DNA
tatggcaactcagcagcttagtgatgcggccaactctggcattctggatgtcattattgagtcaaccgcctgccg

SEQ ID NO: 570047 - DNA, 75 bp, synthetic construct
  source 1..75: mol_type = other DNA
tgtatgacgatctgaatgcgaatggtctgcctagtgaaagcaattctatgaaattttctgatattcctgggattc

SEQ ID NO: 570048 - DNA, 75 bp, synthetic construct
  source 1..75: mol_type = other DNA
gattgccggtgatgataaccagctggcgtttgcacctttatcacgactggatactcctacacgccgcacatgggc

SEQ ID NO: 570049 - DNA, 75 bp, synthetic construct
  source 1..75: mol_type = other DNA
ttattttcctcgattctcacgaagccatttcaaagctgacggcattccgcaggaagtggaaacagaaagtacgcg

SEQ ID NO: 570050 - DNA, 75 bp, synthetic construct
  source 1..75: mol_type = other DNA
cgcgaagcagcaagcaacctcgcaaccacgcgtaatctgcttgaaaagtttaaacatgaaattggggttattcag

SEQ ID NO: 570051 - DNA, 75 bp, synthetic construct
  source 1..75: mol_type = other DNA
tgctggttgccctccccctgcacgccgtcgaactggtgaagtgggaacgcatcccgctgccggtggcgctgaaca

SEQ ID NO: 570052 - DNA, 75 bp, synthetic construct
  source 1..75: mol_type = other DNA
tcattgactgtccagggcatgacagcaaggaatttcgcagtgccttaactgtagctgacattctgcttactctcg

SEQ ID NO: 570053 - DNA, 75 bp, synthetic construct
  source 1..75: mol_type = other DNA
gttaccgccaccccgctggcgtcatggcaggtcaacgccaccaccgtcaccgccatccgcctgcaaaatcacagc

SEQ ID NO: 570054 - DNA, 75 bp, synthetic construct
  source 1..75: mol_type = other DNA
aaccggtgtataccggcgtatatgacgacctgaatgcgaatgggctgccgggtgaaagcacagccatgaagactt

SEQ ID NO: 570055 - DNA, 75 bp, synthetic construct
  source 1..75: mol_type = other DNA
taacccgtgggtatggaaagtcgggcagggaaatgaaggcctggaggttaaacagagccgcggtgttcgtgatgg

SEQ ID NO: 570056 - DNA, 75 bp, synthetic construct
  source 1..75: mol_type = other DNA
tctatatactatggaatgatttttttatacgcgcttgatctgatcgattttaacgaaccttatgtggttttaaaa

SEQ ID NO: 570057 - DNA, 75 bp, synthetic construct
  source 1..75: mol_type = other DNA
gcagttcttcgatgagcatcaggcgacgtacccgacccgtagctgcgtgcaggtcgcgcgtttgccgaaagatgt

SEQ ID NO: 570058 - DNA, 75 bp, synthetic construct
  source 1..75: mol_type = other DNA
gttaaaggaatgaatgaacctgctgatggtgccatgaatctctttaagaccagcaatggctggaaagccaattaa

SEQ ID NO: 570059 - DNA, 75 bp, synthetic construct
  source 1..75: mol_type = other DNA
caaaccggatcagtatctctgtcgtattgaaggtgcgtcttttgtcctcgtgagcctggaaaacgatgtcagtaa

SEQ ID NO: 570060 - DNA, 75 bp, synthetic construct
  source 1..75: mol_type = other DNA
accgttctaccgcatacagtgccagtgatgaaatccttaaaggacttgctgaacaagggctgctcacagtttcac

SEQ ID NO: 570061 - DNA, 75 bp, synthetic construct
  source 1..75: mol_type = other DNA
tgcatagtctggcaggatcgctggatgtcgccgatcgccaaatggtggaaatcctccgcgggctgatgcgcgact

SEQ ID NO: 570062 - DNA, 75 bp, synthetic construct
  source 1..75: mol_type = other DNA
attgtggatgaaccgacacgcggtgtggacgtatcggcacgtaacgacatctatcaattactccgcagtattgca

SEQ ID NO: 570063 - DNA, 75 bp, synthetic construct
  source 1..75: mol_type = other DNA
ctggcacagcgacgaattcagtgatcctcgatggctttgttgagcagggcctgatggtttttgaacagggttatg

SEQ ID NO: 570064 - DNA, 75 bp, synthetic construct
  source 1..75: mol_type = other DNA
gcgtagcaatggcgctggcgggatgtggtgagaaaggtgattttgaaaaggcgattaacgcgaagatatcaaaat

SEQ ID NO: 570065 - DNA, 75 bp, synthetic construct
  source 1..75: mol_type = other DNA
atgaagtaaaagccgcgaccagcacgcagattttcagcatcaaccagacggataaaggccaggggcacattatta

SEQ ID NO: 570066 - DNA, 75 bp, synthetic construct
  source 1..75: mol_type = other DNA
cgtttaagcctgcaaaacgtcaaagagattgttgtcgctgccggtttgtccgtgggcgatatcgtcaagatgacg

SEQ ID NO: 570067 - DNA, 75 bp, synthetic construct
  source 1..75: mol_type = other DNA
agaaagttgttcgagtgtcctatgcatggaaactggatggcgttccgggctgggttgataaaaatgctttctcca

SEQ ID NO: 570068 - DNA, 75 bp, synthetic construct
  source 1..75: mol_type = other DNA
tttccagtaaaggttaatcatggctaccgttctgctggatacaatgccagtgatgaaatcctgaaaggtcttgtt

SEQ ID NO: 570069 - DNA, 75 bp, synthetic construct
  source 1..75: mol_type = other DNA
cgatgttctggaagtaacagacaaaggccaagcggttgagttttgggatcgtaaagatggtgcctgtattggtca

SEQ ID NO: 570070 - DNA, 75 bp, synthetic construct
  source 1..75: mol_type = other DNA
gccacgctggaaggtaaggtgcgtctgcaaagcgcaggcggcaaggtatttctgctggcgaatacggcgttcccg

SEQ ID NO: 570071 - DNA, 75 bp, synthetic construct
  source 1..75: mol_type = other DNA
acaatacgcagcagctgggaatgcggctggtgctggacggcgtgtttaaccacagtggcgattcccatgcctggt

SEQ ID NO: 570072 - DNA, 75 bp, synthetic construct
  source 1..75: mol_type = other DNA
atgcataagcagcgcagtcagccgcagcctggcgtcaccgcatggcgggcggcgatcgatctctccagcggacaa

SEQ ID NO: 570073 - DNA, 75 bp, synthetic construct
  source 1..75: mol_type = other DNA
atggaaaagataaaaattattctggattgtgagccgggtcatgatgatgctattgcaatgatgatggcagcgaaa

SEQ ID NO: 570074 - DNA, 75 bp, synthetic construct
  source 1..75: mol_type = other DNA
ccacgttgacccgcagtttggcggcgacggggcattgctgcgcttacgccacaatacacagcaacagggaatgcg

SEQ ID NO: 570075 - DNA, 75 bp, synthetic construct
  source 1..75: mol_type = other DNA
gccacaatacacagcaacagggaatgcggctggtactggacggcgtgtttaaccacagtggcgattcccatgcct

SEQ ID NO: 570076 - DNA, 75 bp, synthetic construct
  source 1..75: mol_type = other DNA
atggctacatacggcggtcagtttacgcttacgccggtgcccccatttgttaaacaaagcaaagatcaactgctc

SEQ ID NO: 570077 - DNA, 75 bp, synthetic construct
  source 1..75: mol_type = other DNA
cagactgcgctgctctacctgatgacccgtgggcagcgggcggtcaggcagcagggcgagagcgatatggcagga

SEQ ID NO: 570078 - DNA, 75 bp, synthetic construct
  source 1..75: mol_type = other DNA
tacgttatggaaaatgtgctgttcaaaatctccttcccggcggagttccactcccagacggcagttgaagcggcg

SEQ ID NO: 570079 - DNA, 75 bp, synthetic construct
  source 1..75: mol_type = other DNA
gcgtgggtagacggtcagtcgctgcgcacctatcgccatgcgccgaacaccggcacgcgcaaatcctgggcggcg

SEQ ID NO: 570080 - DNA, 75 bp, synthetic construct
  source 1..75: mol_type = other DNA
aagtgatgctcgcgctggcgatttttgcgctggctgccacggcggtactacagattgccagcggtgcgctgagta

SEQ ID NO: 570081 - DNA, 75 bp, synthetic construct
  source 1..75: mol_type = other DNA
cagaccgcattgctctacctgatgacccccgagcagcgggcggtcaggcaccagggcgagagcgatatggctgga

SEQ ID NO: 570082 - DNA, 75 bp, synthetic construct
  source 1..75: mol_type = other DNA
atgaagcgcggatttaccttgctggaagtgatgcttgcgctggcgatttttgcgctggctgccacggcggtatta

SEQ ID NO: 570083 - DNA, 75 bp, synthetic construct
  source 1..75: mol_type = other DNA
ctcatcaacagcaattacgtatgtttaatcagctcgatagccacgatactgcgcgatttaaaacgctgctcggtc

SEQ ID NO: 570084 - DNA, 75 bp, synthetic construct
  source 1..75: mol_type = other DNA
cgtaaatttgatgagtttgttgatgctatggcggatatggggaaagcggtacagaaactgaaacagattgtgctg

SEQ ID NO: 570085 - DNA, 75 bp, synthetic construct
  source 1..75: mol_type = other DNA
acgtttcaccaaaacgtaaagtcttcaaaggtgatatcgaagataaattctggaacaaccaacatgacctgattg

SEQ ID NO: 570086 - DNA, 75 bp, synthetic construct
  source 1..75: mol_type = other DNA
tcgcgctcgtcacaagggtaacaaagcaatggaagaacgcatcggtcaaatgcgtgccactcctcgctacctggt

SEQ ID NO: 570087 - DNA, 75 bp, synthetic construct
  source 1..75: mol_type = other DNA
tttccggcatgatgcgtaaactgggtatgaaaccaggcgaagccatcgagcacccgtgggtgaccaaagcgattg

SEQ ID NO: 570088 - DNA, 75 bp, synthetic construct
  source 1..75: mol_type = other DNA
gggtatgaagccaggcgaagccattgaacacccgtgggtgactaaagcgattgccaacgcccagcgtaaagttga

SEQ ID NO: 570089 - DNA, 75 bp, synthetic construct
  source 1..75: mol_type = other DNA
aaaaaagcgacggatatgacgattccggttgatattgataccgccgcatcccgcctgcgacgctattatggtttt

SEQ ID NO: 570090 - DNA, 75 bp, synthetic construct
  source 1..75: mol_type = other DNA
gtgaaagcccctgggattgttactggccgctctggtgtattaggtaatgttttcctaatccttgaagacttctgg

SEQ ID NO: 570091 - DNA, 75 bp, synthetic construct
  source 1..75: mol_type = other DNA
cgataacgaagaaacgtcagtaccgatgcataagcagcgcagtcagccccagcctggtgtcacggcatggcgggc

SEQ ID NO: 570092 - DNA, 75 bp, synthetic construct
  source 1..75: mol_type = other DNA
gtttacgccgcaaggttttagccaaataccgccagcacggttggagcagtttgccgtcgatgtgccggatatcgg

SEQ ID NO: 570093 - DNA, 75 bp, synthetic construct
  source 1..75: mol_type = other DNA
cgccaaattgcgtcaaaaagtacgtaatagtgcagatttcaaaccacttccgacggaaatccgctcgcttttccc

SEQ ID NO: 570094 - DNA, 75 bp, synthetic construct
  source 1..75: mol_type = other DNA
aactccgcgacaccctgctcccgaaactcatctccggcgagctatccctggaagatcttccggatctcaacaccg

SEQ ID NO: 570095 - DNA, 75 bp, synthetic construct
  source 1..75: mol_type = other DNA
ttagagctaagtcgcgaactaaaaaaactccgcgacaccctgctcccgaaactcatctccggcgagctatccctg

SEQ ID NO: 570096 - DNA, 75 bp, synthetic construct
  source 1..75: mol_type = other DNA
cgcctgcgttaaacaaccgttcgtgttattcgcccgcaaaacgcaggccattgactggcaggccagcgatggcga

SEQ ID NO: 570097 - DNA, 75 bp, synthetic construct
  source 1..75: mol_type = other DNA
gcaaaccctgctgctgcgcgaaaaaatgcactccaccggttttggttctggtgtcgccgtgccgcacggtaaaag

SEQ ID NO: 570098 - DNA, 75 bp, synthetic construct
  source 1..75: mol_type = other DNA
caaacgtcagatgtttgcaaagctgtgcaccacaaaatacctgaaaacttccgccagcgccgactctgccagcgt

SEQ ID NO: 570099 - DNA, 75 bp, synthetic construct
  source 1..75: mol_type = other DNA
agcaaaaatccggaagccgcagctgcccgacataatctggctgctgttctgaagcggaacgccgatcggggaatg

SEQ ID NO: 570100 - DNA, 75 bp, synthetic construct
  source 1..75: mol_type = other DNA
cccagaggtacgttacgctgagcgaaatttattaggagtaaatagtaacatcaaaacatcgataaaggatgtttt

SEQ ID NO: 570101 - DNA, 75 bp, synthetic construct
  source 1..75: mol_type = other DNA
attgactggaaagccagcgatggcgaagacgtcaattgctggatctgcctcggcgtgccgcaaagcggcgaagag

SEQ ID NO: 570102 - DNA, 75 bp, synthetic construct
  source 1..75: mol_type = other DNA
tgccgcccattcgccttttggcggggtaagcattacagtagagttaccgctggaacgggatttacagagagaagt

SEQ ID NO: 570103 - DNA, 75 bp, synthetic construct
  source 1..75: mol_type = other DNA
gaactgcgtacgccattagcggtgctgcgcggtgaactggaagccattcaggatggcgtgcgcaaattcacgccg

SEQ ID NO: 570104 - DNA, 75 bp, synthetic construct
  source 1..75: mol_type = other DNA
ggtaaaacgacttgtcgatggcacgcacaaactggcggcgggcgatttcactacccgcgtaacgcccaccagtga

SEQ ID NO: 570105 - DNA, 75 bp, synthetic construct
  source 1..75: mol_type = other DNA
ggacagcattaccgtatttggcgatcgcgatcgtttaatgcagttgtttaataacttactggaaaacagcctgcg

SEQ ID NO: 570106 - DNA, 75 bp, synthetic construct
  source 1..75: mol_type = other DNA
ctgcaaatgctcggcgatgcgctgggtgagcagtacgcccagcacgggaactggcgcttcctgcgtaataacgat

SEQ ID NO: 570107 - DNA, 75 bp, synthetic construct
  source 1..75: mol_type = other DNA
ttactggcggcgctggcgacattcccactggcgcgcggtttgctcgctccagtgaaacggctggtggatggcacg

SEQ ID NO: 570108 - DNA, 75 bp, synthetic construct
  source 1..75: mol_type = other DNA
ggcccgcccggctcccacacagcaggaaccttcttctgcccccgccccgacggcagtgacggaagaacaacacgt

SEQ ID NO: 570109 - DNA, 75 bp, synthetic construct
  source 1..75: mol_type = other DNA
attgcccgtgttcaccactacggcctgcgtgaccgcgtcagccgtaaaggcccggaggtccgctatgctgagcgc

SEQ ID NO: 570110 - DNA, 75 bp, synthetic construct
  source 1..75: mol_type = other DNA
tctggagccagccgccagaagtcgcatgatgcgccagctggcgcaggaactgcgccggacacagcagcagaacat

SEQ ID NO: 570111 - DNA, 75 bp, synthetic construct
  source 1..75: mol_type = other DNA
tacgccggacacagcagcaaaatatcagaatgcagcgcaatccagatggcagcaattatgaaccgcgacgggtaa

SEQ ID NO: 570112 - DNA, 75 bp, synthetic construct
  source 1..75: mol_type = other DNA
gcggtgattaccaactccacctatgatggcttgctctacaacaccgactggatcaaacagacgctggatgtcccg

SEQ ID NO: 570113 - DNA, 75 bp, synthetic construct
  source 1..75: mol_type = other DNA
cgtttgttaggcattgctgaaaaagaacaaagttttatattttacacattaatcagttggttacaggaaaaggga

SEQ ID NO: 570114 - DNA, 75 bp, synthetic construct
  source 1..75: mol_type = other DNA
cgcaccaccaaatacctgaaaaccgccgccagcgccgactctgccagcgtacagtttgaaagtaaggtgcagcgc

SEQ ID NO: 570115 - DNA, 75 bp, synthetic construct
  source 1..75: mol_type = other DNA
tctagaaccagccgcaagaagccgcatgatgcgccagctgtcgcaggaactgcgccggacacagcagcataatat

SEQ ID NO: 570116 - DNA, 75 bp, synthetic construct
  source 1..75: mol_type = other DNA
gaaccttcttctgcccccgctccgacggcagtgacggaagaacaacacgttcaggccgctgaggcccgccgtaat

SEQ ID NO: 570117 - DNA, 75 bp, synthetic construct
  source 1..75: mol_type = other DNA
gcatcaactgccgtctgctggaacccgcgcttaagcaactggcccgggaattcagcgtggtgatttatccggtct

SEQ ID NO: 570118 - DNA, 75 bp, synthetic construct
  source 1..75: mol_type = other DNA
gtggctgaactgcagaaagtggacgactggctgagtgctttgttggcgaatctggaaccagccgccagaagccgc

SEQ ID NO: 570119 - DNA, 75 bp, synthetic construct
  source 1..75: mol_type = other DNA
caaacggcagatgtttacaaaacttcgcaccaaaaaatacctgaaaaccgccgccagcacggattctgccagcgt

SEQ ID NO: 570120 - DNA, 75 bp, synthetic construct
  source 1..75: mol_type = other DNA
agcagttatgaaccgcgcagggtaacagcgcgcagtaaaaaaggccgtatcaaacggcagatgtttgcaaagctg

SEQ ID NO: 570121 - DNA, 75 bp, synthetic construct
  source 1..75: mol_type = other DNA
agcacgtgtttgtaagccatatcgtgcgcaaacaaaaggtaaagtagaacgctttaatagttatttgaaatcaag

SEQ ID NO: 570122 - DNA, 75 bp, synthetic construct
  source 1..75: mol_type = other DNA
tgttttattgataacgagcagaggagtaatacattattaatgattggtaaagtgatagattataaggaggatgtt

SEQ ID NO: 570123 - DNA, 75 bp, synthetic construct
  source 1..75: mol_type = other DNA
aagggggaaattgttgcgctaatatcttctttattacaatctaaatttgttaagattgaattaaaaaagaaatac

SEQ ID NO: 570124 - DNA, 75 bp, synthetic construct
  source 1..75: mol_type = other DNA
ctagttatcctctcagaaaatgtttttttcggttacaagaatgattatataaaggaaagaactaaacatctctta

SEQ ID NO: 570125 - DNA, 75 bp, synthetic construct
  source 1..75: mol_type = other DNA
ttctaaatcgatatctttattggggagggggggtacatgcttttttattgactgccatgtcaactcttggtttaa

SEQ ID NO: 570126 - DNA, 75 bp, synthetic construct
  source 1..75: mol_type = other DNA
ctgttatttgtatcctatggtttgtttggagtttttgttcatacagtagttgtcactcttattccattctttggc

SEQ ID NO: 570127 - DNA, 75 bp, synthetic construct
  source 1..75: mol_type = other DNA
aaaggggaaattgtcgcgctcatatcttctctattgcaatcaaagtttgttaagattgaattaaaaaagaaatat

SEQ ID NO: 570128 - DNA, 75 bp, synthetic construct
  source 1..75: mol_type = other DNA
ataccgtcggcacgcttggcaaccatgagtttaactacggtctggattacctgaaaaatgcgctggcaggagcga

SEQ ID NO: 570129 - DNA, 75 bp, synthetic construct
  source 1..75: mol_type = other DNA
ctgaaaaatgcgctggcaggagcgaaattcccttatgtaaatgccaacgtcattgacgccagggtaatgactcca

SEQ ID NO: 570130 - DNA, 75 bp, synthetic construct
  source 1..75: mol_type = other DNA
gctggaaggatgtaccggtgatggtagcgcgtgaagaagacgacgtgtccatcacacttctttcagggtttacag

SEQ ID NO: 570131 - DNA, 75 bp, synthetic construct
  source 1..75: mol_type = other DNA
gacaagaattggaaaattgatatggacttatttaataggtcaaaaacggagccttttttatttacacagatatga

SEQ ID NO: 570132 - DNA, 75 bp, synthetic construct
  source 1..75: mol_type = other DNA
ataacggggttttttacggccacagtgatcttttatatgttttatgtcttgatttattccttttgtcggatgggg

SEQ ID NO: 570133 - DNA, 75 bp, synthetic construct
  source 1..75: mol_type = other DNA
gtctgaaatatattacagccgcatgaacggtctgaatgaatcatcggaaatatcagagggaacttataatgagag

SEQ ID NO: 570134 - DNA, 75 bp, synthetic construct
  source 1..75: mol_type = other DNA
gaagatccggatctcgaaccgctgggcacgccgagtggcctgattgagatctactcgaaaaccatcgccgatatg

SEQ ID NO: 570135 - DNA, 75 bp, synthetic construct
  source 1..75: mol_type = other DNA
aaaacaagctcttagttgtaacccagaagcctgggctgaacaacctggagcgtgtccatcaacgtacgagttgta

SEQ ID NO: 570136 - DNA, 75 bp, synthetic construct
  source 1..75: mol_type = other DNA
gaaagacagcggcggtaagccagatattattctgattgccaccggttcagagatggaaatcaccctgcaagcggc

SEQ ID NO: 570137 - DNA, 75 bp, synthetic construct
  source 1..75: mol_type = other DNA
acgccggatcaggttaaagagattgctcgtggcggttatgtgctgaaagacagcggcggtaagccagatattatt

SEQ ID NO: 570138 - DNA, 75 bp, synthetic construct
  source 1..75: mol_type = other DNA
ggtgttcctaaagatgtattatttgataatgctaaggccattatcattgaacgtgatgcttatcaagatggtcaa

SEQ ID NO: 570139 - DNA, 75 bp, synthetic construct
  source 1..75: mol_type = other DNA
ccacgaagctaatgaccctcgtatgccagaaccagaggacgcattgaatgtggatgaggcgcgtggtcagttgga

SEQ ID NO: 570140 - DNA, 75 bp, synthetic construct
  source 1..75: mol_type = other DNA
aagtctggcttgagtctacagcctgcaaaagcgatgcctgtggttgggaatacatcacaacgctttataacccgc

SEQ ID NO: 570141 - DNA, 75 bp, synthetic construct
  source 1..75: mol_type = other DNA
tcggactagacgggttattcggtaaagatggcgtgatgaatggtcctggcggcgatgttattcccgtgcaaatca

SEQ ID NO: 570142 - DNA, 75 bp, synthetic construct
  source 1..75: mol_type = other DNA
gggcaattgtgggatggattttggtgtctgaaatatattacagccgcatgaccagtctgaataaattatcagaaa

SEQ ID NO: 570143 - DNA, 75 bp, synthetic construct
  source 1..75: mol_type = other DNA
tcatcagaaatatcagaggaaacttataatgaaagaaaacaaaaagaatcaggaattcaaaatcagaaaaattaa

SEQ ID NO: 570144 - DNA, 75 bp, synthetic construct
  source 1..75: mol_type = other DNA
cggtggaagcgggtattgccgattactggtacaaatatgttggtctgaaaggggcgattgttgggataaccggct

SEQ ID NO: 570145 - DNA, 75 bp, synthetic construct
  source 1..75: mol_type = other DNA
tgaggagtatcgcgagtcggtactgccttcaaatgtttctgcccgcgtggcagtagaagcgggtattgccgatta

SEQ ID NO: 570146 - DNA, 75 bp, synthetic construct
  source 1..75: mol_type = other DNA
atggggaatctgctccggcggataagctgttcccgttctttggctttaccgccgagaatattgtggcaaaagcgc

SEQ ID NO: 570147 - DNA, 75 bp, synthetic construct
  source 1..75: mol_type = other DNA
gtgaataacatgtttgctaatgcttggttgaaagttgccacggtttcggctctcctcattgcctcatttgttgca

SEQ ID NO: 570148 - DNA, 75 bp, synthetic construct
  source 1..75: mol_type = other DNA
attgaacaggggcgtattgttgcccgtgatgaggctgtcaaagatgcacaagagaaagctgtcaaagccaatgct

SEQ ID NO: 570149 - DNA, 75 bp, synthetic construct
  source 1..75: mol_type = other DNA
ttcaggacgccctgaactcttgtggcttaccggcgggtgccgtgcaggcgattgataatcctgaccgtgcgctgg

SEQ ID NO: 570150 - DNA, 75 bp, synthetic construct
  source 1..75: mol_type = other DNA
atggcgggtgaaagctttattttgatgggcgtttcagggagtggtaaaacattaattggtagcaaggttgccgcg

SEQ ID NO: 570151 - DNA, 75 bp, synthetic construct
  source 1..75: mol_type = other DNA
cacgcagcaatcttaccgaagtgctcaacaatgttgaagccggagaagaggttgaaatcacccgtagaggtcgtg

SEQ ID NO: 570152 - DNA, 75 bp, synthetic construct
  source 1..75: mol_type = other DNA
aacgactgggtcatatcccgccggcagaagcggaaaaggcatattacgcttccatcggaaatggtggtctggcag

SEQ ID NO: 570153 - DNA, 75 bp, synthetic construct
  source 1..75: mol_type = other DNA
ggtgctgcttttaatatacccgtaagaatttcaattcaccctgctgtacccggtccgagatcgtctgacgcaagt

SEQ ID NO: 570154 - DNA, 75 bp, synthetic construct
  source 1..75: mol_type = other DNA
aatttaaatgttcacttattgtgagcacacaacgaccatcagagctttcatcaacagtattagcaatgtgtgcaa

SEQ ID NO: 570155 - DNA, 75 bp, synthetic construct
  source 1..75: mol_type = other DNA
gccgtggttttttctattgagcatgtcggcgtggcttggcttttgtacctgggcctgtgcgcacttcacgaataa

SEQ ID NO: 570156 - DNA, 75 bp, synthetic construct
  source 1..75: mol_type = other DNA
gatcacaggcggtataggcgtatgccatatttacgttgatgaaagtgcagagatcgctgaagccctgaaagtaat

SEQ ID NO: 570157 - DNA, 75 bp, synthetic construct
  source 1..75: mol_type = other DNA
agcacgtgtaatacggtagaaacgttgctggtaaataaaaacatcgcagatagcttcctgcccgcattaagcaag

SEQ ID NO: 570158 - DNA, 75 bp, synthetic construct
  source 1..75: mol_type = other DNA
aaaggagaggaaaatgattggaatgtgcatattattaatcttaaaaatctttcgcaagaccatgcaccaatgctg

SEQ ID NO: 570159 - DNA, 75 bp, synthetic construct
  source 1..75: mol_type = other DNA
ttcatacagtctttataaaaagaatgaaacaggatttattgtctgttcatcattaaaaaaacagtatcgtgatat

SEQ ID NO: 570160 - DNA, 75 bp, synthetic construct
  source 1..75: mol_type = other DNA
aaggcgcgaaggaagcaggcaaaatgcgtgcagaaggcaaagattacatcgttaaagatggcgatgtgatgaact

SEQ ID NO: 570161 - DNA, 75 bp, synthetic construct
  source 1..75: mol_type = other DNA
aaggcgcgaaagaagcaggcaaaatgcgtgcagaaggcaaagattacatcgttaaagatggcgatgtaatgaact

SEQ ID NO: 570162 - DNA, 75 bp, synthetic construct
  source 1..75: mol_type = other DNA
agcctttgatgacgtaatggcaggcaaagccgttactccggcaagttgcgatatcgatattgccgaccattacgc

SEQ ID NO: 570163 - DNA, 75 bp, synthetic construct
  source 1..75: mol_type = other DNA
tgggaatcatattgaaaactggagctcagtaatatattgctcacgtcttaaagacagagttagaataaattctaa

SEQ ID NO: 570164 - DNA, 75 bp, synthetic construct
  source 1..75: mol_type = other DNA
gctggtgtgccgctgcgttctcttggtacggggtcgtcccgtcttctggtggcaggaatgcagcgtgctgccgcg

SEQ ID NO: 570165 - DNA, 75 bp, synthetic construct
  source 1..75: mol_type = other DNA
gggctgattcaggaagagcctcagctcgggctggaaacggttttgtgcctgcggcttagtgtcgacagtgaactg

SEQ ID NO: 570166 - DNA, 75 bp, synthetic construct
  source 1..75: mol_type = other DNA
aatgcccagcgttttgtcaatgaagtggactcctctgctgtttacgttaacgcgtctacacgtttcaccgacggc

SEQ ID NO: 570167 - DNA, 75 bp, synthetic construct
  source 1..75: mol_type = other DNA
tgagtgaaatgctgcgcatggataaatacatcgacatgttgatcccgcgtggtggtgctggtttgcataagctgt

SEQ ID NO: 570168 - DNA, 75 bp, synthetic construct
  source 1..75: mol_type = other DNA
aaagcggcgctggatgctgaattcgcatccctgtttgacactctggacaccaccaataagaaactggttaaccga

SEQ ID NO: 570169 - DNA, 75 bp, synthetic construct
  source 1..75: mol_type = other DNA
gcggcgctggatgccgaatttgcatccctgtttgacaccctggactccaccaacaaggaactggttaaccgataa

SEQ ID NO: 570170 - DNA, 75 bp, synthetic construct
  source 1..75: mol_type = other DNA
cgcgcggcaacctttctgaagtgctcaacaatgttgaagccggggaagaggttgaaatcactcgcagaggccgtg

SEQ ID NO: 570171 - DNA, 75 bp, synthetic construct
  source 1..75: mol_type = other DNA
gcggtggctgttaaagccgaagagtacgacgatgagtttctgtcattagatttgaacgtcaaaatcgtcagcgat

SEQ ID NO: 570172 - DNA, 75 bp, synthetic construct
  source 1..75: mol_type = other DNA
gcgggaatatcggaaatgacatggaagtccgctacacacaaagcgggaaagcgattggtagttttccgttagctg

SEQ ID NO: 570173 - DNA, 75 bp, synthetic construct
  source 1..75: mol_type = other DNA
ttataccctgcgggttgtccgtaatggtcagccgttaaaggcggggggttattatgccgcattacgttttaaggt

SEQ ID NO: 570174 - DNA, 75 bp, synthetic construct
  source 1..75: mol_type = other DNA
ccgtgttaatcatcgccatcctggttgtaggctccatttggatcatgtggaacctcaactacaacatgatgatgc

SEQ ID NO: 570175 - DNA, 75 bp, synthetic construct
  source 1..75: mol_type = other DNA
atgttacgacgcatgatcctttcggtactgtttctctggtgtgcagtggctcaagccctgccatcagcttctatt

SEQ ID NO: 570176 - DNA, 75 bp, synthetic construct
  source 1..75: mol_type = other DNA
taacatttttctggtgctcggccgctcaggctactcaggctccttccttcccgccgccggggatgtccctgccgg

SEQ ID NO: 570177 - DNA, 75 bp, synthetic construct
  source 1..75: mol_type = other DNA
ggacaggtgattgctccggcctgtacgctgaccatggaagacacctggcaggtgattgatatgggggatactccg

SEQ ID NO: 570178 - DNA, 75 bp, synthetic construct
  source 1..75: mol_type = other DNA
taacatttttcttgtgtgcagcgtctcaggctgcgttatcaccctcttatccgccgtcgggaatgaccttgccgg

SEQ ID NO: 570179 - DNA, 75 bp, synthetic construct
  source 1..75: mol_type = other DNA
tgccgattgttctctactccggcgcgttggcgctcaacagcctgtttcacgtcggggaatcgttacaaatttccc

SEQ ID NO: 570180 - DNA, 75 bp, synthetic construct
  source 1..75: mol_type = other DNA
aactatctggtgaagttcgacttccatttcctctatgtgctggcctgtacgttctgcatcaacgtggtcgtgatg

SEQ ID NO: 570181 - DNA, 75 bp, synthetic construct
  source 1..75: mol_type = other DNA
tgcagttcgggtggcgaaaacaatgaacaccccgcatggcgacgcaatcaccgtgttcgatctgcgcttctgcgt

SEQ ID NO: 570182 - DNA, 75 bp, synthetic construct
  source 1..75: mol_type = other DNA
acggtgcggctatctggctgctggtgatcttgcttggcctggcgggaattttgtatgcggtgatcggcggactgc

SEQ ID NO: 570183 - DNA, 75 bp, synthetic construct
  source 1..75: mol_type = other DNA
cagtcggtggcccgaccgatcccttgccgattggcgcggcatttaccggtttgattctggtgaacaccttttact

SEQ ID NO: 570184 - DNA, 75 bp, synthetic construct
  source 1..75: mol_type = other DNA
atttaccgaaagccgacatggcctacccgacgctggtcaataacgttctgccggtaccattggtgggtttttttg

SEQ ID NO: 570185 - DNA, 75 bp, synthetic construct
  source 1..75: mol_type = other DNA
ccggacctgaaagaaaattcagcctccggctcaggaactgtgaatttaacagtcagggtggaaaccttttctctg

SEQ ID NO: 570186 - DNA, 75 bp, synthetic construct
  source 1..75: mol_type = other DNA
ttgccgccaaaggtattactggcccggaggcgatcaaggaaattattgcttcactggagctgggaaaaggtgcag

SEQ ID NO: 570187 - DNA, 75 bp, synthetic construct
  source 1..75: mol_type = other DNA
ttggtgacaacattgcgcagggggccgctatcggcctgcagcgcaccacaccacttgctgcactggccgggcagc

SEQ ID NO: 570188 - DNA, 75 bp, synthetic construct
  source 1..75: mol_type = other DNA
gaatgggtgacagcatcagtgactggttcagcgaaaagctgggcatccattcaccgagtcgcgtgtttataggct

SEQ ID NO: 570189 - DNA, 75 bp, synthetic construct
  source 1..75: mol_type = other DNA
tcggctcactggtgtgcctggcgctgtttaatctcttttcgctgcacagcctgtggggctggttgttcctgctgg

SEQ ID NO: 570190 - DNA, 75 bp, synthetic construct
  source 1..75: mol_type = other DNA
atgactgaacaacaaattagccgaactcaggcgtggctggaaagtttacgacctaaaaccctccccctcgccttt

SEQ ID NO: 570191 - DNA, 75 bp, synthetic construct
  source 1..75: mol_type = other DNA
tacttcggtattgatatgccgaaaaactttaccgattttggcggcaatctgattaacggtctggtgaacggtatc

SEQ ID NO: 570192 - DNA, 75 bp, synthetic construct
  source 1..75: mol_type = other DNA
tcaatcatctactttcgatgcggcagaactgggataaatatcagtctaataaggcccagatgagtgatcctggat

SEQ ID NO: 570193 - DNA, 75 bp, synthetic construct
  source 1..75: mol_type = other DNA
tgcgctgaagattggtgatggtaaggagatggaagaagcctttgcaatggcagccgtcggtgcaaagaccggttc

SEQ ID NO: 570194 - DNA, 75 bp, synthetic construct
  source 1..75: mol_type = other DNA
ccgactctggttccagacccggactgtttcgctatacaatttgattcgcgccggatcaatcgtattgagccgatt

SEQ ID NO: 570195 - DNA, 75 bp, synthetic construct
  source 1..75: mol_type = other DNA
cagtgatgcgctgaagtccaaccgtatggcgctctatggtcagggagcagagacttacggcatcgcccgaacgct

SEQ ID NO: 570196 - DNA, 75 bp, synthetic construct
  source 1..75: mol_type = other DNA
tgccgttcctgaactaccaaaaagtaatgctcctgccgccaaagggcgcaatgccagtgtgcatgtaccggggca

SEQ ID NO: 570197 - DNA, 75 bp, synthetic construct
  source 1..75: mol_type = other DNA
gtatcaaagccgttgaactactaaggacccgctggttgttccttaaagtcgcattttcgacagggggcagattcc

SEQ ID NO: 570198 - DNA, 75 bp, synthetic construct
  source 1..75: mol_type = other DNA
acctgttactgccggattcgtgctacagacatgcaaacaggcgcttaagtactgccggaggcggcgctatgcaat

SEQ ID NO: 570199 - DNA, 75 bp, synthetic construct
  source 1..75: mol_type = other DNA
tctgccggaggcggcgctatgcaatcagcaacgttcttgatgatatgagtgtggcggacgttgggaaaaaccgga

SEQ ID NO: 570200 - DNA, 75 bp, synthetic construct
  source 1..75: mol_type = other DNA
ggcgctatgcaatcagcaacgttctggacgatctgaacgttgcggacgttgggaaaaaaccggatataagcgaac

SEQ ID NO: 570201 - DNA, 75 bp, synthetic construct
  source 1..75: mol_type = other DNA
gccactggcgctcgaactggttgataaccaggacagcatgaatgttgatgaactgtgtgaacacctgacgcaaat

SEQ ID NO: 570202 - DNA, 75 bp, synthetic construct
  source 1..75: mol_type = other DNA
atactgattttgaaaaaggctttatacgtgcacaaactatttcgttcgaagatttcatcacttacaaaggtgaac

SEQ ID NO: 570203 - DNA, 75 bp, synthetic construct
  source 1..75: mol_type = other DNA
atataagcgaacgtgtcttaagcaataaagagctgggcgaattattgcaggcactggacaaaaaaatattttccc

SEQ ID NO: 570204 - DNA, 75 bp, synthetic construct
  source 1..75: mol_type = other DNA
tccggtatcagccggctttttgttgcaggtatgcaaacaggcgcttaagtactgccgtaaacgtcgctacgccgt

SEQ ID NO: 570205 - DNA, 75 bp, synthetic construct
  source 1..75: mol_type = other DNA
cctggctggcggaggggaaaaatccacgccatgagcttaatcacacagtgcaggaagcgttagcccctgtgacgg

SEQ ID NO: 570206 - DNA, 75 bp, synthetic construct
  source 1..75: mol_type = other DNA
gccggaacaggcaggaaggtagcccctgaacgtctgaggctgggaaattatccagatttgagcctgaaagcagcc

SEQ ID NO: 570207 - DNA, 75 bp, synthetic construct
  source 1..75: mol_type = other DNA
catcccgggagacgctggaaaaagtgatttcccacacacgttataaacttacccctgcggagctggaaaccttca

SEQ ID NO: 570208 - DNA, 75 bp, synthetic construct
  source 1..75: mol_type = other DNA
ctcgatgcgaaacgtgatgcgctggatatgtggacggagcggttagggatactggcgggagcacatgaaaacgta

SEQ ID NO: 570209 - DNA, 75 bp, synthetic construct
  source 1..75: mol_type = other DNA
atgctctgcgatgctggcggcgcgataaaaatgatcgccgaagtgaagagtgacttcgccgtgaaagtgggggat

SEQ ID NO: 570210 - DNA, 75 bp, synthetic construct
  source 1..75: mol_type = other DNA
atggtcaacgccattttttgtgcgcatggcaaattagcttgcgccatgctggaatcggttcagatggtgtacggc

SEQ ID NO: 570211 - DNA, 75 bp, synthetic construct
  source 1..75: mol_type = other DNA
gtctgtgatatcagtctgaacctgcaactgacggagcgtgtgctggtcagcactgacggtagtgtgtcgagcgtt

SEQ ID NO: 570212 - DNA, 75 bp, synthetic construct
  source 1..75: mol_type = other DNA
tggttgccacgggggccagttccatgtcgtgggagtaccgttacaccctgaacgcggtgattgaggatttcagcg

SEQ ID NO: 570213 - DNA, 75 bp, synthetic construct
  source 1..75: mol_type = other DNA
aactgacggagagtgtgctggtcagcactgacggcagcgtgtcgagcgttgaagctgtagcggaacctgatgaac

SEQ ID NO: 570214 - DNA, 75 bp, synthetic construct
  source 1..75: mol_type = other DNA
cccttgagttcaccgacggtacgcgatttgaagaagtggtggtggagtacccaattggtcatgctcgccgccgtc

SEQ ID NO: 570215 - DNA, 75 bp, synthetic construct
  source 1..75: mol_type = other DNA
ctcccagacggcagttgaagcggcgatgacgctctatgaacagatgcaggcagcaggcaagacggcggcggatat

SEQ ID NO: 570216 - DNA, 75 bp, synthetic construct
  source 1..75: mol_type = other DNA
cgctgactaccacgacccggaaaaacgcgctatcgccaatgccataacccttgagttcaccgacggcacgcgatt

SEQ ID NO: 570217 - DNA, 75 bp, synthetic construct
  source 1..75: mol_type = other DNA
cagcccgatgccatcaataatccggcgttacgggaaaagttattcacctttgaggtggatattctgcgcaatgat

SEQ ID NO: 570218 - DNA, 75 bp, synthetic construct
  source 1..75: mol_type = other DNA
tatcaggctgttgaaatgtggctgcgcagacgtgcagcgggaaagaagaacgggagcgtgacaaatgaccctgag

SEQ ID NO: 570219 - DNA, 75 bp, synthetic construct
  source 1..75: mol_type = other DNA
aactgtgtgaacacctgacgcaaatcgcaaagcaaacctgcgtcgtctggagacaggtggcaacagcagaggagg

SEQ ID NO: 570220 - DNA, 75 bp, synthetic construct
  source 1..75: mol_type = other DNA
gcgaatcggcagcctggacgtccgagacaatattgagcgtcgggcttatgaaattgctctggcatcgctggaagc

SEQ ID NO: 570221 - DNA, 75 bp, synthetic construct
  source 1..75: mol_type = other DNA
ggcagtgtgtcgagcgttgaagctatagcggaacctgatgcacctgaagaaatgtggacggtgaaatgtggctga

SEQ ID NO: 570222 - DNA, 75 bp, synthetic construct
  source 1..75: mol_type = other DNA
acgccctcaataaagcagtgccttatgtccgcaataacccggacaagctgcatctgtttgtggataacggttcgc

SEQ ID NO: 570223 - DNA, 75 bp, synthetic construct
  source 1..75: mol_type = other DNA
cggattcgccacaatggcgtcagcatcagcaagacgtgcgtaatcttaatcagtatcagactcgcggcgcgttcg

SEQ ID NO: 570224 - DNA, 75 bp, synthetic construct
  source 1..75: mol_type = other DNA
tgatactttttatcagcttcgcataaaaccaaacgctctcgaactgattaaagaatatgtgaataacggtggtgg

SEQ ID NO: 570225 - DNA, 75 bp, synthetic construct
  source 1..75: mol_type = other DNA
cctgaccgagagtaatgtctatattggtgatatttttcgctggggagaggcgctgattcaggtcacccagccgcg

SEQ ID NO: 570226 - DNA, 75 bp, synthetic construct
  source 1..75: mol_type = other DNA
ctctccgtgctacaaactcaattatcattttgacatcagcgatatggcacagttgatgcaaaacgccggtaaagt

SEQ ID NO: 570227 - DNA, 75 bp, synthetic construct
  source 1..75: mol_type = other DNA
acgataaatcgcgttatctaaatacgccaaagcgaaccgatgtaggccaccgttccgggttagctaaccttaaga

SEQ ID NO: 570228 - DNA, 75 bp, synthetic construct
  source 1..75: mol_type = other DNA
agcaagaggtgttgatactgagggcgttgcagttaagcggaacggagtgtatctgctaatagaaggtagccgcag

SEQ ID NO: 570229 - DNA, 75 bp, synthetic construct
  source 1..75: mol_type = other DNA
aagatgccggaggacaaaaaacccaatggaacaacgggatatctgtcaaaaaaagacgttccattaaagacaaac

SEQ ID NO: 570230 - DNA, 75 bp, synthetic construct
  source 1..75: mol_type = other DNA
aaacaacaaattgaaacaaaaagaagaaaaatagaatttatcgaaacacaaatttcagctgttaatgaaagcgta

SEQ ID NO: 570231 - DNA, 75 bp, synthetic construct
  source 1..75: mol_type = other DNA
gtttcacataaacctatagtaatcgagccttattgctggattgctcaaagagctgcaattttaaaaaatgtacgt

SEQ ID NO: 570232 - DNA, 75 bp, synthetic construct
  source 1..75: mol_type = other DNA
aaacttgatgatgaacttggtataaaaatatctttacatttacactcggcaaaaaacatcaatatttatagacgt

SEQ ID NO: 570233 - DNA, 75 bp, synthetic construct
  source 1..75: mol_type = other DNA
cgtgttatcgagaaaaataaatacgaattatcagataatgaactggcggtattttactcagccgcagatcaccgc

SEQ ID NO: 570234 - DNA, 75 bp, synthetic construct
  source 1..75: mol_type = other DNA
gctccgcaggctgctggcaaaatccacaccgattttgaaaaaggctttatccgtgcacaaaccatctcgtttgaa

SEQ ID NO: 570235 - DNA, 75 bp, synthetic construct
  source 1..75: mol_type = other DNA
aatgcatcgggccgtaaagttcgctttgaatttaaccgaatgagtaccgagctcatggcagaaattgaagcattt

SEQ ID NO: 570236 - DNA, 75 bp, synthetic construct
  source 1..75: mol_type = other DNA
atgagccaggcctggctcagcccggaggcagaggcgcgttatcttacgcagccggcaattctcatgcctcagtcg

SEQ ID NO: 570237 - DNA, 75 bp, synthetic construct
  source 1..75: mol_type = other DNA
ggtgtgcaggtcagtcatgaagaagcgcgccagtggcgtgtgcagcacccgcttgccgttgatgtgccggagaga

SEQ ID NO: 570238 - DNA, 75 bp, synthetic construct
  source 1..75: mol_type = other DNA
cagtatcagactcgcggtgcattcgcttatatttccgaccaacaaaaagtgtacgctcgcttcttctggcaacaa

SEQ ID NO: 570239 - DNA, 75 bp, synthetic construct
  source 1..75: mol_type = other DNA
accggaatgccaattccgctcaacagtttgcgccagtggattttaggtttaccgggtgatgcaaccgactacaaa

SEQ ID NO: 570240 - DNA, 75 bp, synthetic construct
  source 1..75: mol_type = other DNA
cttgtccggcaggatatttttccccgtctgtgctggcgttcgctgtaccaccgtgggcagcagaccgggttacgg

SEQ ID NO: 570241 - DNA, 75 bp, synthetic construct
  source 1..75: mol_type = other DNA
atgattcattcaaaaggatatgacagttttacctcaagtaaatatgaagaaggtgcgacctggttactccaatgt

SEQ ID NO: 570242 - DNA, 75 bp, synthetic construct
  source 1..75: mol_type = other DNA
gtgatcttattacttttgataacaaagataagtatgcaagaatcagtaaaaacaatactggaagaaaaattcgca

SEQ ID NO: 570243 - DNA, 75 bp, synthetic construct
  source 1..75: mol_type = other DNA
ggttttacatcagaagaacttgacgactcctgtaacaatcaggaaacaaccaagtatgtcgaagatgataccgag

SEQ ID NO: 570244 - DNA, 75 bp, synthetic construct
  source 1..75: mol_type = other DNA
ctcacgcaacgtctggcgccaatgcagcaggcatctggcagatcattccgagcacggggcgcaattatggtttga

SEQ ID NO: 570245 - DNA, 75 bp, synthetic construct
  source 1..75: mol_type = other DNA
taatgccgggctgaacctgcaggaaagtaacaaatgggggaacagcagccagtttaatttctggagcagcggtcc

SEQ ID NO: 570246 - DNA, 75 bp, synthetic construct
  source 1..75: mol_type = other DNA
ctgactgtgggcagccgctatgaacatcatgagcaattcgggggacacttcagtccgcgtgcatatctggtctgg

SEQ ID NO: 570247 - DNA, 75 bp, synthetic construct
  source 1..75: mol_type = other DNA
ctggccgcgattgagcgtattgaggttatcagagggcctatgtccacactgtatggctctgatgcaatgggcggt

SEQ ID NO: 570248 - DNA, 75 bp, synthetic construct
  source 1..75: mol_type = other DNA
agcaatttttggttaaaaagggaatgcttcgccaaagtgatattgccgggttcgatagcatgatggcttatgagc

SEQ ID NO: 570249 - DNA, 75 bp, synthetic construct
  source 1..75: mol_type = other DNA
aaagggattagtggtgtgtccgggcagggaaaaacaaatctacttggtaaccccgacctgaagccggaagagagc

SEQ ID NO: 570250 - DNA, 75 bp, synthetic construct
  source 1..75: mol_type = other DNA
tggattgatatggatatcgcccggcagcgttatgataaccgagatggccagctgggcagtctgacgggcggttat

SEQ ID NO: 570251 - DNA, 75 bp, synthetic construct
  source 1..75: mol_type = other DNA
tacccacgcacggtgacggtcattatctgggaacggaagaagggtctcgcccggttgatcatgggtatctgcaac

SEQ ID NO: 570252 - DNA, 75 bp, synthetic construct
  source 1..75: mol_type = other DNA
cgcaagtacgggcaaaagctgccgcatatggacgcaaaattcgtttcggtattcgcctgcatgtgattgtccgcg

SEQ ID NO: 570253 - DNA, 75 bp, synthetic construct
  source 1..75: mol_type = other DNA
tttggcggatcgtcagacgtcgcccaggagctggcggcagaacaggttgatctctacctcacctggggcgaaccg

SEQ ID NO: 570254 - DNA, 75 bp, synthetic construct
  source 1..75: mol_type = other DNA
caaagtgaacaacgtgatggtgataacaaaggtgcaccgctgagttatacccctgaacacatggtgaatgcgaaa

SEQ ID NO: 570255 - DNA, 75 bp, synthetic construct
  source 1..75: mol_type = other DNA
aattattcgtcgctgagtgctgtacagaagaaagtgtatgatgagaaaggagaatacctgaaagcctggactgtg

SEQ ID NO: 570256 - DNA, 75 bp, synthetic construct
  source 1..75: mol_type = other DNA
agccgccagtgtttctgtgattagccaagaggaattgcagtccagccaataccacgatctggcggaggctctgag

SEQ ID NO: 570257 - DNA, 75 bp, synthetic construct
  source 1..75: mol_type = other DNA
aattaatcgccaacacagacataacagccaaaagtgccttttgtgcaaaggtcagctcttatgccaataaaattg

SEQ ID NO: 570258 - DNA, 75 bp, synthetic construct
  source 1..75: mol_type = other DNA
tgacgctcaggcgctcaccgagcttacggctttgatcggcttacaaaacctgtcggctcgttttaattctgccat

SEQ ID NO: 570259 - DNA, 75 bp, synthetic construct
  source 1..75: mol_type = other DNA
gcgttaagtccaatgcgcagaaactagcagaggcaaaggaatctcgcgatgcgatcagcgaggatattgaaaggg

SEQ ID NO: 570260 - DNA, 75 bp, synthetic construct
  source 1..75: mol_type = other DNA
tggcagaaaggtttttgaaaacgatgaaggaagactatatcgtttgcatgcacaaaccaaatgtaagaccagctt

SEQ ID NO: 570261 - DNA, 75 bp, synthetic construct
  source 1..75: mol_type = other DNA
atgggtttaccgccgcttagcaaaattcctttaattttacgtccgcaggcgtggctgcatcgtcgccattacggc

SEQ ID NO: 570262 - DNA, 75 bp, synthetic construct
  source 1..75: mol_type = other DNA
ctgtcggctcgttttaattctgccatggacattcccgctcaggggctgtgccgtattcctgaaaaacgttcttaa

SEQ ID NO: 570263 - DNA, 75 bp, synthetic construct
  source 1..75: mol_type = other DNA
atccggtggtgcgatcgcttgtcagcgcgcgcattgcgcaaatgtgcctgtgtgagttttgcgtagacatcacca

SEQ ID NO: 570264 - DNA, 75 bp, synthetic construct
  source 1..75: mol_type = other DNA
aacgacgaaattaacgcctttgccttctttggcggtaacgtggtgctgcactctgccttgttccgttactccgat

SEQ ID NO: 570265 - DNA, 75 bp, synthetic construct
  source 1..75: mol_type = other DNA
acaagaagcggccaatattctgaatcgctacacttttaataataaagatgacagcaacggctgggatttactggc

SEQ ID NO: 570266 - DNA, 75 bp, synthetic construct
  source 1..75: mol_type = other DNA
ccgatcatgaaattatcgcgctacgcgaaaaaatggccgcgcttgtgaagacgcatgatttacctgtttttgatt

SEQ ID NO: 570267 - DNA, 75 bp, synthetic construct
  source 1..75: mol_type = other DNA
atggcagaacggttcgtgaaaacgatgaaggaagactacatcgcgttcatgccgaaaccgaatgtaagaacggca

SEQ ID NO: 570268 - DNA, 75 bp, synthetic construct
  source 1..75: mol_type = other DNA
atggagcaacagttaccgttgtttgtccgtgaattagcccctgccgaccagcagacagtcaggaaagccttatct

SEQ ID NO: 570269 - DNA, 75 bp, synthetic construct
  source 1..75: mol_type = other DNA
aaatgcccgcgatttgcgcaccaatccggtgttgcagctcaacctggcgaacgcttatctgcaaggggggcaacc

SEQ ID NO: 570270 - DNA, 75 bp, synthetic construct
  source 1..75: mol_type = other DNA
cagccgcagccgctgaatccgcaaggcgaagcggtggcgaatgattttatcccccgtaaagtcgcgcaaagctaa

SEQ ID NO: 570271 - DNA, 75 bp, synthetic construct
  source 1..75: mol_type = other DNA
atgaatgaatgcattgattcaagtatggccgaacgtagaaggatggggatcgaaatgcttgaaactgctctcggc

SEQ ID NO: 570272 - DNA, 75 bp, synthetic construct
  source 1..75: mol_type = other DNA
taatccgtatcgcagaccaggaaagcgcgagcaataattatgattcggctcgaaataagataaagaggtttttcc

SEQ ID NO: 570273 - DNA, 75 bp, synthetic construct
  source 1..75: mol_type = other DNA
gtgctctctgggtatcccaaaatccagttattcaaagctgttacgaagttgatggaacgtcacattgttcagaaa

SEQ ID NO: 570274 - DNA, 75 bp, synthetic construct
  source 1..75: mol_type = other DNA
gcggtgctgaataacgtttccctgaccctgaaaagcggcgaaaccgtcgccctgctgggacgcagcggctgcgga

SEQ ID NO: 570275 - DNA, 75 bp, synthetic construct
  source 1..75: mol_type = other DNA
catccttggcaggagtttactgaaatcgatctggatcgttgcatgtcgcttctggatgactctgacatacagccc

SEQ ID NO: 570276 - DNA, 75 bp, synthetic construct
  source 1..75: mol_type = other DNA
taggcgcgatttttgggctctagatgctgattatgagcaccaaggaactaataaattcagtgaaatcaggaaaat

SEQ ID NO: 570277 - DNA, 75 bp, synthetic construct
  source 1..75: mol_type = other DNA
cgcagggaaagaagtaagtctcatcacgatcgagtacgacattagggatgacaaaccacagacaactgaggtcat

SEQ ID NO: 570278 - DNA, 75 bp, synthetic construct
  source 1..75: mol_type = other DNA
cttgcaggatgatgctctgagatttctagaagcctcacccgagccacgagccgtccttgagatctttgccgaaca

SEQ ID NO: 570279 - DNA, 75 bp, synthetic construct
  source 1..75: mol_type = other DNA
attgcgaaaatcgatgtagatattttgattgaatggtgcaggaccactaaagaccctcaggtttgggcttcagtc

SEQ ID NO: 570280 - DNA, 75 bp, synthetic construct
  source 1..75: mol_type = other DNA
aatcatggcttatgtactcagtaataggcgcgatttttgggctctagatgctgattatgagcaccaaggaactaa

SEQ ID NO: 570281 - DNA, 75 bp, synthetic construct
  source 1..75: mol_type = other DNA
tctttagaacaacgtgttgcgatcatgaatgaatgcattgattcaagtatggccgaacgtagaaggatggggatc

SEQ ID NO: 570282 - DNA, 75 bp, synthetic construct
  source 1..75: mol_type = other DNA
actggaaatattgggtgtgctctctgggtatcccaaaatccagttattcaaagctgttacgaagttgatggaacg

SEQ ID NO: 570283 - DNA, 75 bp, synthetic construct
  source 1..75: mol_type = other DNA
tcgtgttacaggcgggcgtcattcgcctgctgaaaaagctacaacaacagtttggcaccgcctgcctgttcatca

SEQ ID NO: 570284 - DNA, 75 bp, synthetic construct
  source 1..75: mol_type = other DNA
gaattcattactgcttacccctctgggagaatctcatctggttacggtggggggcgagtatcagagttcgtccat

SEQ ID NO: 570285 - DNA, 75 bp, synthetic construct
  source 1..75: mol_type = other DNA
atgcgaataaccattttggcttccgtcgcattccctgtctctgattccgtctcggcatccggctatgagaaaaaa

SEQ ID NO: 570286 - DNA, 75 bp, synthetic construct
  source 1..75: mol_type = other DNA
aataaagcctacggcttgttcaacgaagagagtgaactggcgcaggcgttacgtttgcagcgccagggcgaagaa

SEQ ID NO: 570287 - DNA, 75 bp, synthetic construct
  source 1..75: mol_type = other DNA
aggccgcattcgcccggacggattccgtaggacaacagcgaatggcggcgttacataacggcaagcgcgacaatc

SEQ ID NO: 570288 - DNA, 75 bp, synthetic construct
  source 1..75: mol_type = other DNA
ggacgcgcgttgtttaacctggtcacaggcagcgatccgcaagagctggcaggcgacggcgtgttccttgatcat

SEQ ID NO: 570289 - DNA, 75 bp, synthetic construct
  source 1..75: mol_type = other DNA
acgggccgttcctgcgaagatgcgtggctggtggcggcgtcgatgatcccggttacgcaaaggctgaagtttctt

SEQ ID NO: 570290 - DNA, 75 bp, synthetic construct
  source 1..75: mol_type = other DNA
ttggcgaaactcaatcgcgcgcaacgtaaagcgttccgccgtgatattcaaatggtgtttcaggactccatcagc

SEQ ID NO: 570291 - DNA, 75 bp, synthetic construct
  source 1..75: mol_type = other DNA
atgactttacttaacatctccggcctttcccatcactatgcgcacggtggatttaacggaaaacatcaacatcag

SEQ ID NO: 570292 - DNA, 75 bp, synthetic construct
  source 1..75: mol_type = other DNA
gaacaactggcgcgcgccagcgaaatgctgaaggcggtcgatctcgacgacagcgtgctcgacaagcgcccaccg

SEQ ID NO: 570293 - DNA, 75 bp, synthetic construct
  source 1..75: mol_type = other DNA
aagaaccgatcaaggcccggaatttacctgccgcgcgctcgatcaatgggcctttgagcatggtgtggaactacg

SEQ ID NO: 570294 - DNA, 75 bp, synthetic construct
  source 1..75: mol_type = other DNA
attgtgctggctgcaaccgacagtccagccacattgaagcgatttctcaactcgccaagttattcgataacgaaa

SEQ ID NO: 570295 - DNA, 75 bp, synthetic construct
  source 1..75: mol_type = other DNA
tttcccatcactatgcgcacggtggatttagcggaaaacatcaacaccaggcggtgctgaataacgtttccctga

SEQ ID NO: 570296 - DNA, 75 bp, synthetic construct
  source 1..75: mol_type = other DNA
cgttaccccctataacagacaaaattttctcatgataaatcagcgggatacagaaaaactgaagcagcagtatga

SEQ ID NO: 570297 - DNA, 75 bp, synthetic construct
  source 1..75: mol_type = other DNA
actgagtccctggatgaatgacgatgatctgcgcctgacactgcttaaacgttgtctggtagctagggatgctgg

SEQ ID NO: 570298 - DNA, 75 bp, synthetic construct
  source 1..75: mol_type = other DNA
aagctcagtattaaaaacatggtgcaaagctcacaatacgacactgcgggtgttaaccgtttctcttgctgattt

SEQ ID NO: 570299 - DNA, 75 bp, synthetic construct
  source 1..75: mol_type = other DNA
gacgcaagacaagaatgaagaaagaatgtcattctctctttatccgtttcattgtctcgagtccctggctatttc

SEQ ID NO: 570300 - DNA, 75 bp, synthetic construct
  source 1..75: mol_type = other DNA
cacctgttatgcctgactgaaaaatcaaatatctggcaatcggttgagattaataaacgtatcggtgaacttata

SEQ ID NO: 570301 - DNA, 75 bp, synthetic construct
  source 1..75: mol_type = other DNA
ggtgtcctgacgattcagtcggaacatgaacagattgactttatattttttctgttatcaagtggttatttatca

SEQ ID NO: 570302 - DNA, 75 bp, synthetic construct
  source 1..75: mol_type = other DNA
agttgaaaccaaccactaataccaccgtggctaaccagtactggggtcggtacgtgaataacaactttgcggtga

SEQ ID NO: 570303 - DNA, 75 bp, synthetic construct
  source 1..75: mol_type = other DNA
tcatcggtccttttatcaacgcaagtgcagtattactgggtggcgtgctcggtgcactacttagccaacgcttac

SEQ ID NO: 570304 - DNA, 75 bp, synthetic construct
  source 1..75: mol_type = other DNA
ggcgtcagcgaagtgagcttcacggaatttgcggctgaaaaaggctatgaactggaagagagcttcccggcagac

SEQ ID NO: 570305 - DNA, 75 bp, synthetic construct
  source 1..75: mol_type = other DNA
tcgggaaaatctggccaaactacttgccatgatagcatataaaaatctctgtgcggaagattatcatggtataga

SEQ ID NO: 570306 - DNA, 75 bp, synthetic construct
  source 1..75: mol_type = other DNA
taccgatcgttgccgaaagtgatcatactgaggcaaatgctgtgcgttatgaagctcttacgccgacagaactcg

SEQ ID NO: 570307 - DNA, 75 bp, synthetic construct
  source 1..75: mol_type = other DNA
cacaacctgagcttcacgtctccgctgtatggcgtgtaccgaaacccggactttggtcgtcagctgccggacacg

SEQ ID NO: 570308 - DNA, 75 bp, synthetic construct
  source 1..75: mol_type = other DNA
tgaatgtcagaaggtgatttgtgaaccgctgggccgtaattaccgcgtcagtatgccgcttatagcctttcgctc

SEQ ID NO: 570309 - DNA, 75 bp, synthetic construct
  source 1..75: mol_type = other DNA
acagaagttttctctagaaccaatgatgcaaatgtagaaattaaactgttaactaatgattattatatatttgag

SEQ ID NO: 570310 - DNA, 75 bp, synthetic construct
  source 1..75: mol_type = other DNA
gcaaacatgaaattaaagtgaagttgctatttgcgaatgatgattttctctcaatggaaggacactatggacgat

SEQ ID NO: 570311 - DNA, 75 bp, synthetic construct
  source 1..75: mol_type = other DNA
ccattttacagacgatgacgggataccgtattcagaaacccgctacattgccttctttgaggatggcacgcagac

SEQ ID NO: 570312 - DNA, 75 bp, synthetic construct
  source 1..75: mol_type = other DNA
tttgctggtaggtggattaagctgcctgacaattccctgttttgcctggcttgccgatcgttttggtcgccgcag

SEQ ID NO: 570313 - DNA, 75 bp, synthetic construct
  source 1..75: mol_type = other DNA
agactaacgcaacggtcgtgcgttacggtttacccggtcattgtgctgttatgcgcgatactggcggcgctgata

SEQ ID NO: 570314 - DNA, 75 bp, synthetic construct
  source 1..75: mol_type = other DNA
aacgaccggacggtgagcgtgagtcatgatgacggcctgtacgtcagaaatgaccgtagggtgacggtgaaaggg

SEQ ID NO: 570315 - DNA, 75 bp, synthetic construct
  source 1..75: mol_type = other DNA
atgataggtaatgacatacctattgtttgtgagtatagttctttcattattcacttaaaaggactcaatatggga

SEQ ID NO: 570316 - DNA, 75 bp, synthetic construct
  source 1..75: mol_type = other DNA
gcggacgtctgacacagggcagtcattcggtaaattacccggtggattttgccgctaagggacagttccgttttc

SEQ ID NO: 570317 - DNA, 75 bp, synthetic construct
  source 1..75: mol_type = other DNA
gaaaaaggtgttaataccgcagtcgctaaagcgcaaaatttgtttcgtcactcgcgtaaaaagccagcgcatgaa

SEQ ID NO: 570318 - DNA, 75 bp, synthetic construct
  source 1..75: mol_type = other DNA
atgatgacggcctgtacgtcagaaatgaccgtaaagtgacggtggaagggaagcaggagcataagacgacgggga

SEQ ID NO: 570319 - DNA, 75 bp, synthetic construct
  source 1..75: mol_type = other DNA
cggggaaccatgtcagcctggtggagggaaagcacagcctggtggtgaagggggacctggcgaggaaggtgagtg

SEQ ID NO: 570320 - DNA, 75 bp, synthetic construct
  source 1..75: mol_type = other DNA
atgggaaacaaacgtaaacaggcgcgtcgcgcagctcgtcaggcagtgaagccaaagccacgcatccacggctac

SEQ ID NO: 570321 - DNA, 75 bp, synthetic construct
  source 1..75: mol_type = other DNA
ctcatcacgacttattgtgaattttgagcctgttacgttgttaaccgggcagttgactttctcttttattcttgc

SEQ ID NO: 570322 - DNA, 75 bp, synthetic construct
  source 1..75: mol_type = other DNA
gcgtatcaaacttagcaaaccgggcgcagtggcgcgtgcggcgaatgttggcgtcattattgagcgtggcaataa

SEQ ID NO: 570323 - DNA, 75 bp, synthetic construct
  source 1..75: mol_type = other DNA
agccttgcatcgcttaatcagcgcattcgggagttgctggaaagactgaataacaaaataatgcagaagttgggt

SEQ ID NO: 570324 - DNA, 75 bp, synthetic construct
  source 1..75: mol_type = other DNA
agaactggtaagactcttcaatcaggggcaggaggttgctgtgcacccgcgcaagcgtacttatggctacagtac

SEQ ID NO: 570325 - DNA, 75 bp, synthetic construct
  source 1..75: mol_type = other DNA
acgcagaaaccattcgataacccaaaagtacgtgaggcgctgaattacgccatcaaccgtcaggcactggtgaaa

SEQ ID NO: 570326 - DNA, 75 bp, synthetic construct
  source 1..75: mol_type = other DNA
tggcgtgggataaccgtaaagcggcgaaaagtgatgatgtggcggattgcctcagttacgctgacattgcagaaa

SEQ ID NO: 570327 - DNA, 75 bp, synthetic construct
  source 1..75: mol_type = other DNA
ctcagctacgctgacatcgcagaaacggtggttagccacgtcgagggggcgcgttttgcgttagtggaacgcgtg

SEQ ID NO: 570328 - DNA, 75 bp, synthetic construct
  source 1..75: mol_type = other DNA
tatctgaactggaacgagacagaaaataaaggtcgtgagcttgtacgcagtgtactgaagcgcgacaaatggggg

SEQ ID NO: 570329 - DNA, 75 bp, synthetic construct
  source 1..75: mol_type = other DNA
cactgtggtcagaggatgtcactctatcgttgaattacacttggactcaaagtgaacaacgtgatggtgataaca

SEQ ID NO: 570330 - DNA, 75 bp, synthetic construct
  source 1..75: mol_type = other DNA
gactgcggctggaagctgacctctctgttcgccaaatcagtatctgtaccaaggtcagtgtcggctccatccaga

SEQ ID NO: 570331 - DNA, 75 bp, synthetic construct
  source 1..75: mol_type = other DNA
atgtccatccgttttgcccgcaaagccgattgtgctgccattgcggaaatttataaccacgccgtgttgtatacg

SEQ ID NO: 570332 - DNA, 75 bp, synthetic construct
  source 1..75: mol_type = other DNA
tacagtgacgtgagcctgtacagtgccggtaagagtacgctgtatgccggtgattacttccagacgggatcatca

SEQ ID NO: 570333 - DNA, 75 bp, synthetic construct
  source 1..75: mol_type = other DNA
cacggtgtggaatttgccggcacattgccgctgtggtcagaggatgtcacgctgtcactgaattacacctggacc

SEQ ID NO: 570334 - DNA, 75 bp, synthetic construct
  source 1..75: mol_type = other DNA
ccttcgcgggctatgcaacgccagctactggtgtggtaccgccgagtatcgcctacgcgcaaagttataaaccgt

SEQ ID NO: 570335 - DNA, 75 bp, synthetic construct
  source 1..75: mol_type = other DNA
ctgcttgccactgacaaactccacatcgccgcttcagtgataactaaaacactccatttaatcgtagaagaatca

SEQ ID NO: 570336 - DNA, 75 bp, synthetic construct
  source 1..75: mol_type = other DNA
aaaacaacaatatttcggttggtatgatacatgaccttctggatcctgagactctgagtgggtttcttcataccc

SEQ ID NO: 570337 - DNA, 75 bp, synthetic construct
  source 1..75: mol_type = other DNA
gatcctgacgttaaccctacctaccagcagatgcttgagcattataatgtcgcggttttgcctgcgcggccacgt

SEQ ID NO: 570338 - DNA, 75 bp, synthetic construct
  source 1..75: mol_type = other DNA
ccacgcggacacccaaaacgcaggcgtttacatcaagaatatccccgagcatgtgaaaaagcttgatgaggcggt

SEQ ID NO: 570339 - DNA, 75 bp, synthetic construct
  source 1..75: mol_type = other DNA
tccgacatccggtcggaacgtaccggtgagctattacatatcaatgctcgtcgttttcgttataccacaggcaca

SEQ ID NO: 570340 - DNA, 75 bp, synthetic construct
  source 1..75: mol_type = other DNA
gtgagactgacgcgagagaaattactgatacggtattgattaattatcggtcgatgctgtcgcctgcaacagaat

SEQ ID NO: 570341 - DNA, 75 bp, synthetic construct
  source 1..75: mol_type = other DNA
gaaccgggccgtatgaactggatacctggaatcagaccgattttgtgaaggtcaaaaaattcactggttactggc

SEQ ID NO: 570342 - DNA, 75 bp, synthetic construct
  source 1..75: mol_type = other DNA
ggttagtggcgctgggcattgcgacagcgttgatggcatcttgtgcattcgctgccaaagatgtggtggtggcgg

SEQ ID NO: 570343 - DNA, 75 bp, synthetic construct
  source 1..75: mol_type = other DNA
cacagtaaaaacctgaccggtttttggatcatgccagacaccggcttcagctttgaagacgcggatttgcaataa

SEQ ID NO: 570344 - DNA, 75 bp, synthetic construct
  source 1..75: mol_type = other DNA
aagagctgcagttggtatacaacaaagctcgtcaggccagcattactcaggaactcaccgagatcgtctcggggg

SEQ ID NO: 570345 - DNA, 75 bp, synthetic construct
  source 1..75: mol_type = other DNA
aaggcgttcaatgcgacctcgcaatgatcggctcgaaaggcgtgtcgttcttcaactccgtgggcggcaatgttg

SEQ ID NO: 570346 - DNA, 75 bp, synthetic construct
  source 1..75: mol_type = other DNA
gttgcctttgcgggctatgcaacgccagctactggtgtggtaccgccaagtatcgcctacgcgcaagttataaac

SEQ ID NO: 570347 - DNA, 75 bp, synthetic construct
  source 1..75: mol_type = other DNA
ggtgctgaatgaaggtgaaacattgagcgaagaggaattttttccgcttctgcgaacaaaatatggcgaaattta

SEQ ID NO: 570348 - DNA, 75 bp, synthetic construct
  source 1..75: mol_type = other DNA
gttgtgggtattaaagattcgattcgcgatgaagccatcaaagcatttgtggtgctgaatgaaggtgaaacattg

SEQ ID NO: 570349 - DNA, 75 bp, synthetic construct
  source 1..75: mol_type = other DNA
cgagcggtttatgagctatggcaaagcttatggcttatgcgaatggttcgaggttgagcagtttcagaatccctg

SEQ ID NO: 570350 - DNA, 75 bp, synthetic construct
  source 1..75: mol_type = other DNA
acatcctcgagtatgccagacagcagaggcatattggccagcattgtaaaattccaccagaagatatggttgaaa

SEQ ID NO: 570351 - DNA, 75 bp, synthetic construct
  source 1..75: mol_type = other DNA
agtatcccagcgagcaatatcttaatgagcttatcaccaacatagagtttgctgcaagggcaccagttgaagtcg

SEQ ID NO: 570352 - DNA, 75 bp, synthetic construct
  source 1..75: mol_type = other DNA
agtgatgttttatctcaacctgtcggagcaggaaaaagacgcgttttgtgaacgcttcggcgttcgcttgctgac

SEQ ID NO: 570353 - DNA, 75 bp, synthetic construct
  source 1..75: mol_type = other DNA
gggcgttggcttagtccgcggcggtgccgggacggcgctggtgggcgatggtccgacggtcgccgcgcgaatcaa

SEQ ID NO: 570354 - DNA, 75 bp, synthetic construct
  source 1..75: mol_type = other DNA
gattgcttatttgttgatggggacgttaatggctggtgaatggctggtgcgccgtcaggtgatgaaaagagatcg

SEQ ID NO: 570355 - DNA, 75 bp, synthetic construct
  source 1..75: mol_type = other DNA
tttgcaggagccagacctcccggaaaagggcgtgcgctatacccgccacgtcacgcaaatctggtgcggcttttt

SEQ ID NO: 570356 - DNA, 75 bp, synthetic construct
  source 1..75: mol_type = other DNA
cgtttctttggtcacggtgaattgcgtctggtgattctggatattctctcgcgcgatgacagccacggttacgaa

SEQ ID NO: 570357 - DNA, 75 bp, synthetic construct
  source 1..75: mol_type = other DNA
ttgggggtagtcaaccgcgtggttagccaggcggaactgatggataacgcccgcgaactggcgcagcagctggtt

SEQ ID NO: 570358 - DNA, 75 bp, synthetic construct
  source 1..75: mol_type = other DNA
cagccacaaccgctgaatccgcaaggcgaagcggtggcgaatgattttatcccccgtaaagtcgcgcaaagctaa

SEQ ID NO: 570359 - DNA, 75 bp, synthetic construct
  source 1..75: mol_type = other DNA
cattaggcgatcaggtgagtgaattaactatgttggttaagcgattagccagttcattaaaaagcgtcaataaat

SEQ ID NO: 570360 - DNA, 75 bp, synthetic construct
  source 1..75: mol_type = other DNA
tgtcttcgtaaatattggtatggtaagcggtattctgccggttgtaggggttccgctcccactggtcagttatgg

SEQ ID NO: 570361 - DNA, 75 bp, synthetic construct
  source 1..75: mol_type = other DNA
gcgagatcctgcgtgaaccgatgcgccacctgctatcgctgaaaaaagccgaacaactggcgcgcgccagtgaaa

SEQ ID NO: 570362 - DNA, 75 bp, synthetic construct
  source 1..75: mol_type = other DNA
atttagcggcaaacatcaacaccaggcggtgctgaataacgtttccctggccctgaaaagcggtgaaaccgtcgc

SEQ ID NO: 570363 - DNA, 75 bp, synthetic construct
  source 1..75: mol_type = other DNA
ctctccggtctaagctggcgtttgattggcgttgcggtggtgctggtagcagcatttatccccattctgtggttc

SEQ ID NO: 570364 - DNA, 75 bp, synthetic construct
  source 1..75: mol_type = other DNA
tctacattctgctgatcatgcgcgggctgtggatagccgccagagcgcaaaccacctttggtcgcgtcatggctg

SEQ ID NO: 570365 - DNA, 75 bp, synthetic construct
  source 1..75: mol_type = other DNA
cgctggctggacctcggtattgttcgttttcaaccgtcggaaattgccaagatagccgtaccgttgatggttgca

SEQ ID NO: 570366 - DNA, 75 bp, synthetic construct
  source 1..75: mol_type = other DNA
ctgttctctaaagacgaaacacagcaggtaaacctgcgtacccagggagacagaacgattgtcgatggcctgttt

SEQ ID NO: 570367 - DNA, 75 bp, synthetic construct
  source 1..75: mol_type = other DNA
cgctgttttactggttggtggtattttagctgcctacacgctgattgccggaaccatgtcaacggcacatgacgg

SEQ ID NO: 570368 - DNA, 75 bp, synthetic construct
  source 1..75: mol_type = other DNA
agtacgccaatagcttaagcagcttgcctgataaggcgatggagtatctgaatcagaatgggctgataagtgtgg

SEQ ID NO: 570369 - DNA, 75 bp, synthetic construct
  source 1..75: mol_type = other DNA
ggctatcgcatcaggtggaatgtatatgagctacatgccgcaggaaatcaaaaccaatatatcagccgttgttga

SEQ ID NO: 570370 - DNA, 75 bp, synthetic construct
  source 1..75: mol_type = other DNA
cggtgctggctatggtctggtgctgtcgttaactatgcgcccggcactgatggtaacgggactaatagccgctta

SEQ ID NO: 570371 - DNA, 75 bp, synthetic construct
  source 1..75: mol_type = other DNA
caaaggtgtctcacgacatggcgagatcgacgacggcctcaagatacgcgaatggtattgatgcgcaaaaccgaa

SEQ ID NO: 570372 - DNA, 75 bp, synthetic construct
  source 1..75: mol_type = other DNA
gttgctgcttttgttgcgcctgcgccagacccgtcgccaggcggggccgctccaggtcgtcacacaaatcgtcgc

SEQ ID NO: 570373 - DNA, 75 bp, synthetic construct
  source 1..75: mol_type = other DNA
ttcgccatggggtttgatttttccgtttggtcttaatgaaagtcagttgctggctgtcaaacgggcattttcctc

SEQ ID NO: 570374 - DNA, 75 bp, synthetic construct
  source 1..75: mol_type = other DNA
tctaatggcgggggtaatgttgtggattatcctggcaataactcgctgattgtttctgcgcctgacgagctgctg

SEQ ID NO: 570375 - DNA, 75 bp, synthetic construct
  source 1..75: mol_type = other DNA
cttatgactctttcccgtctgagccatcttatcagccagcgccagtggagtttactgtcagaaattttaagctga

SEQ ID NO: 570376 - DNA, 75 bp, synthetic construct
  source 1..75: mol_type = other DNA
ggtaacgcctgttgtcatggggaacgggcaattagttttgaccatcgatacccgcgccgattcaatcagcaatga

SEQ ID NO: 570377 - DNA, 75 bp, synthetic construct
  source 1..75: mol_type = other DNA
tgaccaggcatctgatattattacgaaccagcgtcagatacagacaacagttcagattaaggatggccagacgct

SEQ ID NO: 570378 - DNA, 75 bp, synthetic construct
  source 1..75: mol_type = other DNA
gccgctggctaagattttcgttgattcaaatggcggcggtaatgtcgtcgattacccaggcaataacagtcttgt

SEQ ID NO: 570379 - DNA, 75 bp, synthetic construct
  source 1..75: mol_type = other DNA
tgcgccgctggcgcacatggcctgcccgctcaatccactgggactgggctatatgcagcagtggtatctgcgtgc

SEQ ID NO: 570380 - DNA, 75 bp, synthetic construct
  source 1..75: mol_type = other DNA
accgggcgggtattctgctgcggatgaagaccggggaaatggtgccgcagatgatgtggaccgacacgttactca

SEQ ID NO: 570381 - DNA, 75 bp, synthetic construct
  source 1..75: mol_type = other DNA
atgattgccacaacattacgcgtcacctttaccggcgcagcgccgttactggatacgattcgttccgcttactcg

SEQ ID NO: 570382 - DNA, 75 bp, synthetic construct
  source 1..75: mol_type = other DNA
cgcatgtagttcgattccgcaaaatattaaaggcaataatcaacctgatattcaaaaaagttttgttgctgttca

SEQ ID NO: 570383 - DNA, 75 bp, synthetic construct
  source 1..75: mol_type = other DNA
ttatcaacgttatcaatggcaaaacggatacgttgttagaaatcgctgtattaccgttggatagctatgcgaagc

SEQ ID NO: 570384 - DNA, 75 bp, synthetic construct
  source 1..75: mol_type = other DNA
atgaaactgggatttattggcttaggcattatgggtactccgatggccattaatctggcgcgtgccggtcatcaa

SEQ ID NO: 570385 - DNA, 75 bp, synthetic construct
  source 1..75: mol_type = other DNA
gctggaaggaaaaccgcttccgtcacagatgccgacactgaaatgggcctgtctgaaactggcgaaactggggcg

SEQ ID NO: 570386 - DNA, 75 bp, synthetic construct
  source 1..75: mol_type = other DNA
gaatttcgacgggcgaccggcttgcccgtcgcgactaacatgatcgccaccaactggcgcgaaatgggccatgcg

SEQ ID NO: 570387 - DNA, 75 bp, synthetic construct
  source 1..75: mol_type = other DNA
ccgtcctcggttatctgttttatatcggtgatcggaccaaaaccgatcttccttatctggaaaatacgccgggca

SEQ ID NO: 570388 - DNA, 75 bp, synthetic construct
  source 1..75: mol_type = other DNA
cctggggctgccattctaataaccatttcgatatctctctggcgatgtttacccatgtgggcgcggcggcaccgg

SEQ ID NO: 570389 - DNA, 75 bp, synthetic construct
  source 1..75: mol_type = other DNA
gattgcttattttttgatgggaacgttaatggcaggtgaatggctggtgcgccgtcaggtgataaaaagagatcg

SEQ ID NO: 570390 - DNA, 75 bp, synthetic construct
  source 1..75: mol_type = other DNA
gttgctgctattgttgcgcctgcgccagacccgtcgccgggcggggccgctacaagccgtcacacaaatcgtcgc

SEQ ID NO: 570391 - DNA, 75 bp, synthetic construct
  source 1..75: mol_type = other DNA
atggacgtcgccaacaaagcagatgactctccggtgacggcggcagatatcgccgcgcataccgtaatcatggaa

SEQ ID NO: 570392 - DNA, 75 bp, synthetic construct
  source 1..75: mol_type = other DNA
cttgaagaaatgctcgaaaaattcagggttgtcactaaagaaagacgtgaagaagaacaacaacagcagcgtgaa

SEQ ID NO: 570393 - DNA, 75 bp, synthetic construct
  source 1..75: mol_type = other DNA
tttttggtttatccggcgatctgactgaaaaggacatcaaggcggcctacagaaaagcggctttaaaatatcatc

SEQ ID NO: 570394 - DNA, 75 bp, synthetic construct
  source 1..75: mol_type = other DNA
agcgacgctggctgatagaggaataccacaaggcgtggaaaagtggtggtacatgtgtggaatcgctgcgaatgc

SEQ ID NO: 570395 - DNA, 75 bp, synthetic construct
  source 1..75: mol_type = other DNA
ttaatgccgtggcggcgctggaagccgccttgcttgacctgctaggtaaggcgctgaatgttccggtctgcgaac

SEQ ID NO: 570396 - DNA, 75 bp, synthetic construct
  source 1..75: mol_type = other DNA
ctggctgagcgtcaggaaaaaattagcacctggctggagctgatgaaggctgacggaattaacccggaagagtta

SEQ ID NO: 570397 - DNA, 75 bp, synthetic construct
  source 1..75: mol_type = other DNA
ccggccagggtcgtacaccgaaaccgatcgctcaggcactggctgaaggtaaatctctcgacgatttcctgatct

SEQ ID NO: 570398 - DNA, 75 bp, synthetic construct
  source 1..75: mol_type = other DNA
gcgggtgactttaacctgagcatgaacagcggcagcgaaacggcggtggacagcatcgttgggctgaaactggac

SEQ ID NO: 570399 - DNA, 75 bp, synthetic construct
  source 1..75: mol_type = other DNA
gcggcggtcacggcattgatatcactggtgatagcgccactgtaatcaacaaaggcaatataactgtcacggata

SEQ ID NO: 570400 - DNA, 75 bp, synthetic construct
  source 1..75: mol_type = other DNA
tgaatatctgctgctgacggtgccgttgccgtttgagtgcgaaacctatgccacgtcagaggtgccgctggcagg

SEQ ID NO: 570401 - DNA, 75 bp, synthetic construct
  source 1..75: mol_type = other DNA
aatgggacctgaaagaaatgttgtggacagtgccaaaagagcacagcaaaacgaaggtaacaatattccgaccta

SEQ ID NO: 570402 - DNA, 75 bp, synthetic construct
  source 1..75: mol_type = other DNA
gtcagtacccacagtacctgcggactccagtgcacagcaaaaactgactaactacactattggtaccaatagcga

SEQ ID NO: 570403 - DNA, 75 bp, synthetic construct
  source 1..75: mol_type = other DNA
cagggttcgaccggaactgaaatcgcgggtaacaacgcggtggtgaaccaggacggcgagctggatgtgagcggc

SEQ ID NO: 570404 - DNA, 75 bp, synthetic construct
  source 1..75: mol_type = other DNA
gttggagtcattacctcaatgtcgatattttgcagttacaggaactgttgatggacattggcgaagatgagcatt

SEQ ID NO: 570405 - DNA, 75 bp, synthetic construct
  source 1..75: mol_type = other DNA
cacgactctgaacaacatgggaattgctccgcatgttgtcgagcagcttctgggccatgcgctgggcggtgtcat

SEQ ID NO: 570406 - DNA, 75 bp, synthetic construct
  source 1..75: mol_type = other DNA
ggtgtgaaactgcgtcatacgctggaaaacggttatcaggagcgtaatgcgggcgactttaacctgagcatgaac

SEQ ID NO: 570407 - DNA, 75 bp, synthetic construct
  source 1..75: mol_type = other DNA
ctgctgctgacggtgccgttgccgtttgagtgcgaaacctatgccacgtcagaggtgccgctggcagggttgcgt

SEQ ID NO: 570408 - DNA, 75 bp, synthetic construct
  source 1..75: mol_type = other DNA
atcataattctcttttccgggcataaaatcggttatatcaatgaacgcgtgtttcgttatgatgccaatgaatac

SEQ ID NO: 570409 - DNA, 75 bp, synthetic construct
  source 1..75: mol_type = other DNA
ataaactgaaaaataaagaaaatggtttgtcagagctgttgcccgatgtgcgtttgttgtatggcgagacgcctt

SEQ ID NO: 570410 - DNA, 75 bp, synthetic construct
  source 1..75: mol_type = other DNA
cctgagaaattggatgcgttgaataaatggtatgacagacttgatattttatcaggtggattcactaacattgtt

SEQ ID NO: 570411 - DNA, 75 bp, synthetic construct
  source 1..75: mol_type = other DNA
ccccgcaagtctgaagacggtttatccttacgacaccacgccgtttatcgaaatttctattcaggaagttttcaa

SEQ ID NO: 570412 - DNA, 75 bp, synthetic construct
  source 1..75: mol_type = other DNA
gcgatagggttgttggtggatgacgccatcgtggtggtagaaaacgtcgagcgcgtgatagcggaggataaactg

SEQ ID NO: 570413 - DNA, 75 bp, synthetic construct
  source 1..75: mol_type = other DNA
tcctccatgctgctttcagtatttgtggcaatgagcctgacccctgccctgtgcgccaccattctgaaagccgcg

SEQ ID NO: 570414 - DNA, 75 bp, synthetic construct
  source 1..75: mol_type = other DNA
aaccgattactatctgacaaaagagaaaaataatgtccagtcggtgtttaccgttggcggcttcggctttagcgg

SEQ ID NO: 570415 - DNA, 75 bp, synthetic construct
  source 1..75: mol_type = other DNA
acgcgtgatagcggaagataaactgccaccgaaagaagcgacgcataaatcgatggggcaaatccagcgtgcgct

SEQ ID NO: 570416 - DNA, 75 bp, synthetic construct
  source 1..75: mol_type = other DNA
gccatttcactggtcgtggtgttcctcgccctcgccgcactttatgaaagctggtcaattccgttctcggtgatg

SEQ ID NO: 570417 - DNA, 75 bp, synthetic construct
  source 1..75: mol_type = other DNA
tgacggttcccggccgtttgtccggctgaagacgcttaaacagcgtcagcgtggccgcggcaggccgggcaagga

SEQ ID NO: 570418 - DNA, 75 bp, synthetic construct
  source 1..75: mol_type = other DNA
cactgttatcccgttggtgctgtttgctgttgcactgaatcatacatcacttatcgtaaccggccttgctcaata

SEQ ID NO: 570419 - DNA, 75 bp, synthetic construct
  source 1..75: mol_type = other DNA
atgataaaatatttgcaaagcggtccattagttgtagttatggcattcatattatggggactcacacctttgttt

SEQ ID NO: 570420 - DNA, 75 bp, synthetic construct
  source 1..75: mol_type = other DNA
gtttgaaaaatcgactcatcactataccgacagcacccgctcgctgttgcgttgtaccggtcgctacatggtggt

SEQ ID NO: 570421 - DNA, 75 bp, synthetic construct
  source 1..75: mol_type = other DNA
tattcatccgattgtggcgaaagtagagatacgcaaagagggcaaaacaggacgcgtttactaccctgccccgtt

SEQ ID NO: 570422 - DNA, 75 bp, synthetic construct
  source 1..75: mol_type = other DNA
tggttaatgggggagttgcagatctgcaactcgaccatgaaactacggaaactacccgtagtttgggtagtaaga

SEQ ID NO: 570423 - DNA, 75 bp, synthetic construct
  source 1..75: mol_type = other DNA
ctggattcgggttacaccaataacgacctgtacactagtctgaacgtaggaacgactgctgaactgaacagtgcg

SEQ ID NO: 570424 - DNA, 75 bp, synthetic construct
  source 1..75: mol_type = other DNA
ttatcgatggggacaccattaccgcgctcgacggtcagaatacaagcatcaaaatccgtatgtacggtattgatg

SEQ ID NO: 570425 - DNA, 75 bp, synthetic construct
  source 1..75: mol_type = other DNA
ggatacctgacgacctgatacaggatatcgccatccgagaactggcgtttggcgctggtacattacatgcagcag

SEQ ID NO: 570426 - DNA, 75 bp, synthetic construct
  source 1..75: mol_type = other DNA
atctggatcactgcctggaggatgcccttcatgctgaccacacggagtctgataagacgcttagcgaatttaaag

SEQ ID NO: 570427 - DNA, 75 bp, synthetic construct
  source 1..75: mol_type = other DNA
tcttattttattcgtaactttaaagagttctttggcattacgccgaaacaattttctttgaaagtcaaaaaacag

SEQ ID NO: 570428 - DNA, 75 bp, synthetic construct
  source 1..75: mol_type = other DNA
atcgactgtggagtgcaatgcagtcacgtctgctcaagtggatgctgtctaaatacagactttcgaaccggaagg

SEQ ID NO: 570429 - DNA, 75 bp, synthetic construct
  source 1..75: mol_type = other DNA
cccccgaaagtaagcaggcctttggacaaaaggctaaacaagcgttgagctccgcgattgctgcacagaatatta

SEQ ID NO: 570430 - DNA, 75 bp, synthetic construct
  source 1..75: mol_type = other DNA
aaccatcgaccgcatgggcgatgcctatagctgggtaggttacgcggtgttgttagcgctggcgctgaacatctg

SEQ ID NO: 570431 - DNA, 75 bp, synthetic construct
  source 1..75: mol_type = other DNA
aaagtgcgcagaaaaaatctgcgcagactgcgcaaaagcggaacggaaaatctcagaaaaaaagccagtatccga

SEQ ID NO: 570432 - DNA, 75 bp, synthetic construct
  source 1..75: mol_type = other DNA
tccaccagaacaaatcttgtgctctcttaatgatattgaacgagagattctgtacctctactttattaaaaggag

SEQ ID NO: 570433 - DNA, 75 bp, synthetic construct
  source 1..75: mol_type = other DNA
atgtgggggttctgctggaaatggaatcacttttaaatactcatggtggtgtgtccaggtgcattatggagtgcc

SEQ ID NO: 570434 - DNA, 75 bp, synthetic construct
  source 1..75: mol_type = other DNA
actctgccaataacacatcaggaataaccgtgtcgattacagccagtaaaatatgccaggtcagaaagagtttga

SEQ ID NO: 570435 - DNA, 75 bp, synthetic construct
  source 1..75: mol_type = other DNA
ataatgtacaagccgactcaggaagtgacggacggctgcggtttctccatcggtcaccagcaacagtttgcatca

SEQ ID NO: 570436 - DNA, 75 bp, synthetic construct
  source 1..75: mol_type = other DNA
atatgaggcttgctgttagaggagagatatcctgtcactctacattggttcttaaaaagattagattctacaatt

SEQ ID NO: 570437 - DNA, 75 bp, synthetic construct
  source 1..75: mol_type = other DNA
aaatcaggtgtaaaggtgaataccctggctttacgactggttgcgaatacctgggccacattggatacggtcctt

SEQ ID NO: 570438 - DNA, 75 bp, synthetic construct
  source 1..75: mol_type = other DNA
gaatacatcccgccagtaacttaccgcgtggttgatgagttcctggctgaacatgaagacgatgaggatgattaa

SEQ ID NO: 570439 - DNA, 75 bp, synthetic construct
  source 1..75: mol_type = other DNA
ctcagtggctggtagatcaggggataattaaggcgggagggcttgcggaacgatattttaggtacttcgagcaga

SEQ ID NO: 570440 - DNA, 75 bp, synthetic construct
  source 1..75: mol_type = other DNA
cttccacggtaatgtggaatgctcagggcagcactgatgccagcggcaacgtagacgtcacgatgaccaaaaacg

SEQ ID NO: 570441 - DNA, 75 bp, synthetic construct
  source 1..75: mol_type = other DNA
gcaacgagcacacctacgcagggttcagtccccacagtacctgcggactccagtgcacagcaaaaactgactaac

SEQ ID NO: 570442 - DNA, 75 bp, synthetic construct
  source 1..75: mol_type = other DNA
attatttgcctagcagtactagagttgcttcgaaaatgttccatgaactggcttgttcatttgtgaatagtggtc

SEQ ID NO: 570443 - DNA, 75 bp, synthetic construct
  source 1..75: mol_type = other DNA
acctgatggcccgcatggaaggtcctattgctaccgccatggggattatttattcctgcgactgggagattgaaa

SEQ ID NO: 570444 - DNA, 75 bp, synthetic construct
  source 1..75: mol_type = other DNA
tactcgatgcgcggttgtgggtaaaacgaccactctggcagcgcgttgccgaacgactgttttacttcttcagcc

SEQ ID NO: 570445 - DNA, 75 bp, synthetic construct
  source 1..75: mol_type = other DNA
tgcttgatgcgcggctgtgggcaaaacgaccgctctggcagcgcgttgccgagcgactgttttacttcttcagtc

SEQ ID NO: 570446 - DNA, 75 bp, synthetic construct
  source 1..75: mol_type = other DNA
caaaactctccgatgtgattgagcagcaactggagtttttgatcctcgagggcacccttcgccctggtgaaaaac

SEQ ID NO: 570447 - DNA, 75 bp, synthetic construct
  source 1..75: mol_type = other DNA
tttacttcttgcacaacgtctgatcgttcaggacaaagcgtccgccatgtttcgtctcggtattaatgaagaaat

SEQ ID NO: 570448 - DNA, 75 bp, synthetic construct
  source 1..75: mol_type = other DNA
agcagaacggagactacgcggatatcgcttgtatgacgggaagccaggatgattactattactcaacgcaggcca

SEQ ID NO: 570449 - DNA, 75 bp, synthetic construct
  source 1..75: mol_type = other DNA
tagcgtcgccatttatttgctggctggatgcctgatttctgcaatgaccgctttattgatgaaagacaatcaacg

SEQ ID NO: 570450 - DNA, 75 bp, synthetic construct
  source 1..75: mol_type = other DNA
tcagtgggcacaaaacagaaaatcaggtgttgatttatgatcgcaaaacaaaaatcactccaacactggatctac

SEQ ID NO: 570451 - DNA, 75 bp, synthetic construct
  source 1..75: mol_type = other DNA
aagataatgcactgccaccacgtgttagatcgaatggttacagttacgtatggaaacccgaaggaagcacaagaa

SEQ ID NO: 570452 - DNA, 75 bp, synthetic construct
  source 1..75: mol_type = other DNA
ctggtggaatcaggctaaacgcgcagccgagcaaaaagttggcgttctgaaccgccccgggaatcctggagacta

SEQ ID NO: 570453 - DNA, 75 bp, synthetic construct
  source 1..75: mol_type = other DNA
acactcacagattcgtgatgaacgttttttcaaaaccaataactctcaatatgatttagttaacggtatgtatct

SEQ ID NO: 570454 - DNA, 75 bp, synthetic construct
  source 1..75: mol_type = other DNA
taaaacatgcactggataccagcgtgagcacccgtaccagttcgtattttgccgaccgtctgatccaggcgcgaa

SEQ ID NO: 570455 - DNA, 75 bp, synthetic construct
  source 1..75: mol_type = other DNA
ttcaggcttgaagaagccgcgccttatggtgctcttggtcttaatttccacagatttcacatggagagaaaataa

SEQ ID NO: 570456 - DNA, 75 bp, synthetic construct
  source 1..75: mol_type = other DNA
tcctgcgccgggcttatcaacggggaagtggtgaccatcttcggcgtggccccggcatcaatgatcggcggcaac

SEQ ID NO: 570457 - DNA, 75 bp, synthetic construct
  source 1..75: mol_type = other DNA
gacgaagtaggcctgagcgtcgcccaggtcgaagagatgtatcgctatctcgccattgccaactatgaagatcgt

SEQ ID NO: 570458 - DNA, 75 bp, synthetic construct
  source 1..75: mol_type = other DNA
aggtattccacaaaacgtgattgacgctgcccagcgttcgcctgtctacaaaatggcgatggactggaaactggc

SEQ ID NO: 570459 - DNA, 75 bp, synthetic construct
  source 1..75: mol_type = other DNA
agccaaagggatttcagattacgaaggcagcagtcgcgacaaacaaattttcagtggacacaaaacagaaaatca

SEQ ID NO: 570460 - DNA, 75 bp, synthetic construct
  source 1..75: mol_type = other DNA
actgtttacatcaccgatgaacagtatgcggcgatatatgcggaagcaattccacagttacgcattgcaatggag

SEQ ID NO: 570461 - DNA, 75 bp, synthetic construct
  source 1..75: mol_type = other DNA
cttccttcgccgctgtgggaaagtggtcaatgcaatgcttactgtttacccgtatcttgaaaattatgttgatgc

SEQ ID NO: 570462 - DNA, 75 bp, synthetic construct
  source 1..75: mol_type = other DNA
aaaaagaatggtgagtttaagccagccagtgaaattattcagtcgcgtgtcaatgagattttttctgtgatgggt

SEQ ID NO: 570463 - DNA, 75 bp, synthetic construct
  source 1..75: mol_type = other DNA
cagttgcggcattacattttgctgccatcgtgcctggcgcttattgctggcatcatgctgatgataatgaatttg

SEQ ID NO: 570464 - DNA, 75 bp, synthetic construct
  source 1..75: mol_type = other DNA
ccgttgtgaagagatctggggccacctggcggcagatggtcatcgtgtcggtttgttgacaggcgatgtcgcgca

SEQ ID NO: 570465 - DNA, 75 bp, synthetic construct
  source 1..75: mol_type = other DNA
acacacgtctttaactacgatttacctgatgactgtgaagattacgttcaccgtatcggtcgtaccgggcgcgca

SEQ ID NO: 570466 - DNA, 75 bp, synthetic construct
  source 1..75: mol_type = other DNA
aaattcacgaaagaatattaataattctcaagcacctccacgatgatgaactggatgaggcactactcgtcgcta

SEQ ID NO: 570467 - DNA, 75 bp, synthetic construct
  source 1..75: mol_type = other DNA
ttgtcattctgatgggattagtattgacgccggtgatgctgtatcacaaacagttacggcattacgttttgctac

SEQ ID NO: 570468 - DNA, 75 bp, synthetic construct
  source 1..75: mol_type = other DNA
atgaaagagatgaaaccatgttgcaacgtacgctgggcagtggctgggcagtggctgggcagtggctggggagtg

SEQ ID NO: 570469 - DNA, 75 bp, synthetic construct
  source 1..75: mol_type = other DNA
gtcaaagctaataatgtcaaagtcaattatgaaactattatgattgcccccttagtattatctgagtcagtatta

SEQ ID NO: 570470 - DNA, 75 bp, synthetic construct
  source 1..75: mol_type = other DNA
atggtgcagttgatgaaccagggaaaccgttcttcgctgctgcaggcgtggattgatgatggcgatacgtcgtta

SEQ ID NO: 570471 - DNA, 75 bp, synthetic construct
  source 1..75: mol_type = other DNA
ccaccagaaaaaattcaggttcctttcatgttaacgccaccagtggcaaaaataggggcaaattccgggcagcaa

SEQ ID NO: 570472 - DNA, 75 bp, synthetic construct
  source 1..75: mol_type = other DNA
ttgacaggcgatgtcgcgcagaaaaaacgtctgcgtattcttgatgaatttacccgtggcgatctggatattctg

SEQ ID NO: 570473 - DNA, 75 bp, synthetic construct
  source 1..75: mol_type = other DNA
gtaaaagctaacagcgtcaaagtgaattatgaaacaattatgattgcaccacaggaaagtcagagagtcgatgta

SEQ ID NO: 570474 - DNA, 75 bp, synthetic construct
  source 1..75: mol_type = other DNA
atggccgctatcccatggcggccttttaatttaaaaggcattaacatgaaaggattattatctttactcattttt

SEQ ID NO: 570475 - DNA, 75 bp, synthetic construct
  source 1..75: mol_type = other DNA
ctcggcgcaagcgctacagcaatcttcccggctggcggcgcaaccggagaacatctggtctcgctgctgaccgac

SEQ ID NO: 570476 - DNA, 75 bp, synthetic construct
  source 1..75: mol_type = other DNA
ctgcaactcgttaccacagcggtgagcgtcagttatttacgttatgccgcgcaaggatatttcgcctcgccactc

SEQ ID NO: 570477 - DNA, 75 bp, synthetic construct
  source 1..75: mol_type = other DNA
cggaaagcggcgaactgttaacgctgcatcgtcagggaagtggtttcggccccggaggatgggtgcttcgccgcg

SEQ ID NO: 570478 - DNA, 75 bp, synthetic construct
  source 1..75: mol_type = other DNA
ccgcctgcgcatcctcaaccgcttgccgttgcatggatgcaacgcgcggaggaaaccgggcttttcgggccactg

SEQ ID NO: 570479 - DNA, 75 bp, synthetic construct
  source 1..75: mol_type = other DNA
atgacagagaaaactctctccagtccaaaacgttctgaaattcccatcgcaaatagctttaaaaaagtcttcagg

SEQ ID NO: 570480 - DNA, 75 bp, synthetic construct
  source 1..75: mol_type = other DNA
ccgccttcgcatcctcaaccgcttgcagctgcatggatgcaacgcgcggaggaaaccggacttttcggaccactg

SEQ ID NO: 570481 - DNA, 75 bp, synthetic construct
  source 1..75: mol_type = other DNA
gcgattgattcgctgctggcgctggggcacacgtcaggggcagatacgctgctggggttctggcttggtcaataa

SEQ ID NO: 570482 - DNA, 75 bp, synthetic construct
  source 1..75: mol_type = other DNA
tgaccagcgactttcagatcttgagcttaaagatctagatgcgcaaatatcagaagcagaagccaagctctccag

SEQ ID NO: 570483 - DNA, 75 bp, synthetic construct
  source 1..75: mol_type = other DNA
ccagttggtgaggtctggggagtaggacgcagactgacggaaaagctgaatgcgctgggtattaacacagcactg

SEQ ID NO: 570484 - DNA, 75 bp, synthetic construct
  source 1..75: mol_type = other DNA
cgcaggctaacacggcattcatccggaaaaacttcagcgtcattcttgagcgtacggtacgcgaactcaacggcg

SEQ ID NO: 570485 - DNA, 75 bp, synthetic construct
  source 1..75: mol_type = other DNA
cccattaccatcagtagcgaagatacgctggatgtctttggtgtggtgatccacgtcgttaaggcgatgcgctga

SEQ ID NO: 570486 - DNA, 75 bp, synthetic construct
  source 1..75: mol_type = other DNA
gatattcagcaactcggtgaatgcagtcatttaatgtttgattttgtctgcaaccatatgtcggcaaaaagtgaa

SEQ ID NO: 570487 - DNA, 75 bp, synthetic construct
  source 1..75: mol_type = other DNA
atgaccatagaagaacgtctgaacaacattgagttaaaccaaaccctgcttgaccagcgactttcagagcttgaa

SEQ ID NO: 570488 - DNA, 75 bp, synthetic construct
  source 1..75: mol_type = other DNA
ccgaattccgcgttgagctacgaactggatgctattgccgcggctgtactgggaggcaccagcctgaacggcggc

SEQ ID NO: 570489 - DNA, 75 bp, synthetic construct
  source 1..75: mol_type = other DNA
accggatgccgccaggcagccgggagccgaaggtgtccccgcccccgggagtcagaacaacagaaacgacaaaac

SEQ ID NO: 570490 - DNA, 75 bp, synthetic construct
  source 1..75: mol_type = other DNA
gcgccgaaaaagacatacaggctatgaaggaaagaattacggagtcacaggccaggatgggtgagctaacgtcgg

SEQ ID NO: 570491 - DNA, 75 bp, synthetic construct
  source 1..75: mol_type = other DNA
atgggaagaccaagaaaaaacaaaaaagataatgcactaccaccgcgtgttagatcaaatggttacagttacgtg

SEQ ID NO: 570492 - DNA, 75 bp, synthetic construct
  source 1..75: mol_type = other DNA
tggtcataagcggaagcctgcccccaggtgtgaagctggaaaaattaactcagcttatttcagctgcgcaaagac

SEQ ID NO: 570493 - DNA, 75 bp, synthetic construct
  source 1..75: mol_type = other DNA
cggaacggtcgctgcaagcccgggttttcacgcatcggaccgtagcggcagcccgaaaccgcgccagcgggttcg

SEQ ID NO: 570494 - DNA, 75 bp, synthetic construct
  source 1..75: mol_type = other DNA
gggcggacgcaaaattttttgccgggttcatggctaaaaattttgtggccggtgcatctcaccctggacagatgg

SEQ ID NO: 570495 - DNA, 75 bp, synthetic construct
  source 1..75: mol_type = other DNA
gcgctgggtaatcaggttcgcgacatgtttgttaaagatgttccgcagggtgctgatctgctgaaagccgggctg

SEQ ID NO: 570496 - DNA, 75 bp, synthetic construct
  source 1..75: mol_type = other DNA
aaaaaggaccctcgttatgacgatctcgtcgggatttatgccgggaaagaagcgtttcgctacaaacaaataaaa

SEQ ID NO: 570497 - DNA, 75 bp, synthetic construct
  source 1..75: mol_type = other DNA
atgaaagaattgaaattgttgtctttactgccagtcatattgttccccttacttatcgcaggtaatgctcacgca

SEQ ID NO: 570498 - DNA, 75 bp, synthetic construct
  source 1..75: mol_type = other DNA
tcagtgggcataaaacagaaaatcaggtgttgatttatgatcgaaaaacaaaagtcacaccgacactggacttgc

SEQ ID NO: 570499 - DNA, 75 bp, synthetic construct
  source 1..75: mol_type = other DNA
ctatagggctaggaagagtgcggaaaaccagcgtagctaaagtctggcaaaattatgaactggaaaaagcaaaac

SEQ ID NO: 570500 - DNA, 75 bp, synthetic construct
  source 1..75: mol_type = other DNA
aaaatttttcgaagtacagaagtacctttctctgacgcaccacgcctattcgccacttttggtggtgatcaacaa

SEQ ID NO: 570501 - DNA, 75 bp, synthetic construct
  source 1..75: mol_type = other DNA
ctggtctgaaattgatattgacaatgccatgtggactattccagccgaacgcgaacccctgccaggcgtaaaatt

SEQ ID NO: 570502 - DNA, 75 bp, synthetic construct
  source 1..75: mol_type = other DNA
atggcactgactgacgcaaaaatccgggcagcaaagcctactgacaaggcttataaactcactgacggggctagc

SEQ ID NO: 570503 - DNA, 75 bp, synthetic construct
  source 1..75: mol_type = other DNA
gaccaggtgttacatgacgtggcgattcaaaaattgccggtcctgttcgccatcgatcgtgcgggcattgtcggc

SEQ ID NO: 570504 - DNA, 75 bp, synthetic construct
  source 1..75: mol_type = other DNA
aagcagataaaacagttttgtgggtctcatgacttgatatttattggtgatcacgattcgcacaagcctatgagt

SEQ ID NO: 570505 - DNA, 75 bp, synthetic construct
  source 1..75: mol_type = other DNA
gatggttcaatggtgggctgattatttagatagtaataaagaaaaatatgtaacaccctatgattatgctaaatg

SEQ ID NO: 570506 - DNA, 75 bp, synthetic construct
  source 1..75: mol_type = other DNA
acagtggtgggcggattttctggatgcaaacaaagaaataaatatctccccttttgattacgccaaaggtaataa

SEQ ID NO: 570507 - DNA, 75 bp, synthetic construct
  source 1..75: mol_type = other DNA
acagtggtgggccgattttcttgatgcgaaccgggagaaggggatcagtccgtttgaatacgcaaatgttaacaa

SEQ ID NO: 570508 - DNA, 75 bp, synthetic construct
  source 1..75: mol_type = other DNA
gctgcgtatatccataaagcagaacatctggaagaacgtcgactgatgctacagtggtgggccgattttcttgat

SEQ ID NO: 570509 - DNA, 75 bp, synthetic construct
  source 1..75: mol_type = other DNA
tctgtggtcatgggttccgggcgatggcatgtagtgcgttaatagaatcaggtttgtggtcccgcgatgctgttg

SEQ ID NO: 570510 - DNA, 75 bp, synthetic construct
  source 1..75: mol_type = other DNA
tcagcaaacaggctgtagccatactgacagaactacagacatgggctggtgaaaatggtctgatctttacgggag

SEQ ID NO: 570511 - DNA, 75 bp, synthetic construct
  source 1..75: mol_type = other DNA
tggctggtgcattgaccacggtaaaacgccagcatcgccccgctcttgatctttctcgcctgcctgaacttttgt

SEQ ID NO: 570512 - DNA, 75 bp, synthetic construct
  source 1..75: mol_type = other DNA
gctgcttacattcataaagcagaacatctggaagaacgccgactgatgttacagtggtgggccgattttctggat

SEQ ID NO: 570513 - DNA, 75 bp, synthetic construct
  source 1..75: mol_type = other DNA
actgacgcaaaaatccgggctgcaaagcccactgacaaggcttataaactcactgacggggctggcatgttcctg

SEQ ID NO: 570514 - DNA, 75 bp, synthetic construct
  source 1..75: mol_type = other DNA
aaattttcataccggggctccaagatgcgaacaccacatcttgtgccactcagccaacaggctgtagccatactg

SEQ ID NO: 570515 - DNA, 75 bp, synthetic construct
  source 1..75: mol_type = other DNA
ccgattttctggatgcaaacagagaaagatttatcagtccatttgaatatgcaaagattaataatccattaaaac

SEQ ID NO: 570516 - DNA, 75 bp, synthetic construct
  source 1..75: mol_type = other DNA
taatgcgttatgccgtacagtctggcatcatcagatataatcctgctctggatatggctggcgcattgactacgg

SEQ ID NO: 570517 - DNA, 75 bp, synthetic construct
  source 1..75: mol_type = other DNA
gcagttatgctgaatttactggtttttattcgttccagtgaactcagatacgcccgctggtctgaaattgatatt

SEQ ID NO: 570518 - DNA, 75 bp, synthetic construct
  source 1..75: mol_type = other DNA
ggattccgggcgatggcatgtagtgcgttaatagaatcaggtttgtggtcccgcgatgcagttgaacgtcagatg

SEQ ID NO: 570519 - DNA, 75 bp, synthetic construct
  source 1..75: mol_type = other DNA
tgcagcaaagaatatctgctgtaatgcgttatgccgtacagtctggcatcatcagatataacccggctctggata

SEQ ID NO: 570520 - DNA, 75 bp, synthetic construct
  source 1..75: mol_type = other DNA
tcagcaaacaggttgtagccatactggcagaacttcagacatgggctggtgaaaatggtctgatctttacgggag

SEQ ID NO: 570521 - DNA, 75 bp, synthetic construct
  source 1..75: mol_type = other DNA
aatggtctgatctttacgggagcacatgacccgcgtaaaccaatcagtgaaaatactgtaaataaagccctgagg

SEQ ID NO: 570522 - DNA, 75 bp, synthetic construct
  source 1..75: mol_type = other DNA
ccatcaggaacgtaacggtgtacgcgctgcgtatatccataaagccgaacatctggaagaacgccggctgatgct

SEQ ID NO: 570523 - DNA, 75 bp, synthetic construct
  source 1..75: mol_type = other DNA
cagcctgtcacccggcttgccgttatgctgaatttactggtttttattcgttccagtgaactcagatacgcccgc

SEQ ID NO: 570524 - DNA, 75 bp, synthetic construct
  source 1..75: mol_type = other DNA
caggaagaaatgcgcgccgaacttggcctcgatgccgccggtatggaagccaaaatcaaggcctggctggcataa

SEQ ID NO: 570525 - DNA, 75 bp, synthetic construct
  source 1..75: mol_type = other DNA
acaatgccatgtggactattccagccgaacgcgaacctctgcctggcgtaaaattctcacaccggggctccaaga

SEQ ID NO: 570526 - DNA, 75 bp, synthetic construct
  source 1..75: mol_type = other DNA
ctggctgttatgctgaatttactggtttttattcgttccagtgaactcagatatgcccgttggtctgaaattgat

SEQ ID NO: 570527 - DNA, 75 bp, synthetic construct
  source 1..75: mol_type = other DNA
gctgaagccgcctctcagagcgcagcggcggcaaagaaatccgaaacagcagcggcatcatcgaagaacgcggcg

SEQ ID NO: 570528 - DNA, 75 bp, synthetic construct
  source 1..75: mol_type = other DNA
actgcatctgccaacagtcaaaaagctgcaaaaaccagtgaaaccaacgcaaagacaagcgagactgcggcggct

SEQ ID NO: 570529 - DNA, 75 bp, synthetic construct
  source 1..75: mol_type = other DNA
cctctattaaatttaatagaaaggatgtcggagaaaaaattcaaatttcaatttattagtcgttttttagcatca

SEQ ID NO: 570530 - DNA, 75 bp, synthetic construct
  source 1..75: mol_type = other DNA
cggggacgctgaatgattttctcggtgccatgacggaagatgatgtcatgccggaggcattgcgtcgttttgagg

SEQ ID NO: 570531 - DNA, 75 bp, synthetic construct
  source 1..75: mol_type = other DNA
cgatgttattgcattgccgtctgaaaaggttgtttcatttaccagggcgtcaactgcaacgtatatagataagtc

SEQ ID NO: 570532 - DNA, 75 bp, synthetic construct
  source 1..75: mol_type = other DNA
agccaggctgcggagccgtataaatatgtcttacagccgttacctgaggtgtggataccgtttaacgattcactg

SEQ ID NO: 570533 - DNA, 75 bp, synthetic construct
  source 1..75: mol_type = other DNA
gcagtgtttacgaagatttacgtgatatttctgttaaaggtctggtagatatcggttttgatggctacgctgtcg

SEQ ID NO: 570534 - DNA, 75 bp, synthetic construct
  source 1..75: mol_type = other DNA
atgaaatttgaactggacaccaccgacggtcgcgcacgccgtggccgcctggtctttgatcgtggcgtagtggaa

SEQ ID NO: 570535 - DNA, 75 bp, synthetic construct
  source 1..75: mol_type = other DNA
tgggatttgatattgagatgttttattcttctggtcatcatactgatgatatttgttcattatattattttatac

SEQ ID NO: 570536 - DNA, 75 bp, synthetic construct
  source 1..75: mol_type = other DNA
gccatatttgcatctccggccccagtctgatgagcggttactttagcgaccaggcttcgcaagacgagattgccg

SEQ ID NO: 570537 - DNA, 75 bp, synthetic construct
  source 1..75: mol_type = other DNA
gcttgaagatgaactggaatatcacaatttaaaagcacatgccgaagcaggcgcaaagcggttgttatcgctgaa

SEQ ID NO: 570538 - DNA, 75 bp, synthetic construct
  source 1..75: mol_type = other DNA
gcgcaaattatcctcggcaacaccttccacctgtggttgcgcccgggccaggaaatcatgaaactgcacggcgat

SEQ ID NO: 570539 - DNA, 75 bp, synthetic construct
  source 1..75: mol_type = other DNA
ggcagtgaactcaaatactacacgtttagtccgttgttaataaagcaaaaccatctcattttcctgctgtcaccc

SEQ ID NO: 570540 - DNA, 75 bp, synthetic construct
  source 1..75: mol_type = other DNA
gcattgaccacggtaaaacgccagcatcgccccgctcttgatctttcccgcctgcctgaacttctgtcgcgtatt

SEQ ID NO: 570541 - DNA, 75 bp, synthetic construct
  source 1..75: mol_type = other DNA
gcattgaccacggtaaaacgccagcatcgcccagctcttgatctttcgcgcctgcctgaacttatgtcgcgtatt

SEQ ID NO: 570542 - DNA, 75 bp, synthetic construct
  source 1..75: mol_type = other DNA
gcattgaccacggtaaaacgccagcatcgcccagctcttgatctttctcgcctgcctgaacttttgtcgcgtatt

SEQ ID NO: 570543 - DNA, 75 bp, synthetic construct
  source 1..75: mol_type = other DNA
ctggcagttatgctgaatttactggtttttattcgttccagtgaactcagataggcccgttggtctgaaattgat

SEQ ID NO: 570544 - DNA, 75 bp, synthetic construct
  source 1..75: mol_type = other DNA
ctagcggttatgctgaatttactggtttttattcgttccagtgaactcagataggcccgttggtctgaaattgat

SEQ ID NO: 570545 - DNA, 75 bp, synthetic construct
  source 1..75: mol_type = other DNA
gcattgaccacggtaaaacgccagcatcgcccggctcttgatctttcacgcctgcctgaacttatgtcgcgtatt

SEQ ID NO: 570546 - DNA, 75 bp, synthetic construct
  source 1..75: mol_type = other DNA
tgccactcagcaagcaggctgtagccatactgacagaacttcagacatgggctggtgaaaatggtctggtcttta

SEQ ID NO: 570547 - DNA, 75 bp, synthetic construct
  source 1..75: mol_type = other DNA
tcatcaggagcgtaatggtgtacgtgctgcgtatatccataaagcagaacatctggaagaacggcgactgatgtt

SEQ ID NO: 570548 - DNA, 75 bp, synthetic construct
  source 1..75: mol_type = other DNA
tcaccgtcatatttaaagaaaagcgcgtacgaaagtacgagcttttttcgcattttatctgcctgttcgacagtg

SEQ ID NO: 570549 - DNA, 75 bp, synthetic construct
  source 1..75: mol_type = other DNA
gcattgaccacggtaaaacgccagcatcgcccagctcttgatctttcacgcctgcctgaacttgtgtcgcgtatt

SEQ ID NO: 570550 - DNA, 75 bp, synthetic construct
  source 1..75: mol_type = other DNA
gccccaccttatccaacctggacggcggtgggcgttacatggctggcaggctttgattttgaaattaaagtgata

SEQ ID NO: 570551 - DNA, 75 bp, synthetic construct
  source 1..75: mol_type = other DNA
cgttccggcgatttgctgtttgtttccgggcaagtaggaagtcgagaggacggaacaccagaacccgattttcag

SEQ ID NO: 570552 - DNA, 75 bp, synthetic construct
  source 1..75: mol_type = other DNA
agagccagctaaacctcggtcatctggtggacgccgggaaacagcagcgcggggaaggctttgaactgcgtactg

SEQ ID NO: 570553 - DNA, 75 bp, synthetic construct
  source 1..75: mol_type = other DNA
gcgatcgccagcggagagcacctgcaactggcggcatcgaaaaacctgatcgcgaacgcaggaaatcacgctgac

SEQ ID NO: 570554 - DNA, 75 bp, synthetic construct
  source 1..75: mol_type = other DNA
atggtgttttaccttacatttaacaatgttatgaaacaccctttagaaaccttgaccaccgcagcaggcattttg

SEQ ID NO: 570555 - DNA, 75 bp, synthetic construct
  source 1..75: mol_type = other DNA
cggtacaggcacagaacgacctgatggaactgttggcacagaaatcgatagtgatcaccagtacggaagatgaga

SEQ ID NO: 570556 - DNA, 75 bp, synthetic construct
  source 1..75: mol_type = other DNA
aaggacgggcgctaccgggtcaacctcgactttgaccgcgatacgtggaaaccgggttatgaaagcctgtgggta

SEQ ID NO: 570557 - DNA, 75 bp, synthetic construct
  source 1..75: mol_type = other DNA
ccggctggatgcctgcgggatagaagcgggaacgccgggagaatataacgttaaggccggatattacgggcgtaa

SEQ ID NO: 570558 - DNA, 75 bp, synthetic construct
  source 1..75: mol_type = other DNA
ataacgtcaaagcggtgcattatgggcgtcagccgggagcgaagctgaaacaggaaatgatggcgtttccgatga

SEQ ID NO: 570559 - DNA, 75 bp, synthetic construct
  source 1..75: mol_type = other DNA
ggctttgaactgcgtaccgatatgtggggtgcggtgcgggcaaagaaaggcatctttatcagcgccgatgcgcag

SEQ ID NO: 570560 - DNA, 75 bp, synthetic construct
  source 1..75: mol_type = other DNA
ccggagctgatggcatttccggtgattaagtctgaggattttaatcagagctttattttgctggatgaaaatact

SEQ ID NO: 570561 - DNA, 75 bp, synthetic construct
  source 1..75: mol_type = other DNA
ctttacactttattgttttgtctgtggtttttggtgctgggcgtcattgaatattttgtgttgcgctttatctgg

SEQ ID NO: 570562 - DNA, 75 bp, synthetic construct
  source 1..75: mol_type = other DNA
acgattaatggtggtgggagttatatccggatagagggtagcggcattgagccgggaacgccgggggattataac

SEQ ID NO: 570563 - DNA, 75 bp, synthetic construct
  source 1..75: mol_type = other DNA
gcaggcgtaaaacacgactcggcacacactgaccatgtgaccatccagaactacaagcgcaacgttctgcgcacc

SEQ ID NO: 570564 - DNA, 75 bp, synthetic construct
  source 1..75: mol_type = other DNA
atccggctggatgcctgcggaatagaagcgggaacgccgggagaatataacgttaaggcgggatattatgggcgt

SEQ ID NO: 570565 - DNA, 75 bp, synthetic construct
  source 1..75: mol_type = other DNA
ccggtgttgcagctcaacctggcgaacgcttatctgcaaggggggcaaccacaggaagcggccaatattctgaat

SEQ ID NO: 570566 - DNA, 75 bp, synthetic construct
  source 1..75: mol_type = other DNA
cggatatgggaacctccgcaggaagcacgctttccattggtcaggaaatgcagatgggcgactattatgtccgcc

SEQ ID NO: 570567 - DNA, 75 bp, synthetic construct
  source 1..75: mol_type = other DNA
tccatgaacagcctcatggtcaacggcacaggcatatccatgcaacttcaggggattgatattgtcgaaagacca

SEQ ID NO: 570568 - DNA, 75 bp, synthetic construct
  source 1..75: mol_type = other DNA
aaaaataaccacgcatcagaatatgaactaacggtagttgatgattacgggaataacatccatagtaaaatcgcc

SEQ ID NO: 570569 - DNA, 75 bp, synthetic construct
  source 1..75: mol_type = other DNA
tgctcaggactgttttgaactggctggtagagattacaaaatcgatcccgatttactgagagcgatttcatggca

SEQ ID NO: 570570 - DNA, 75 bp, synthetic construct
  source 1..75: mol_type = other DNA
tggcgcacgaaatctcccacgtcacccaacgtcacctggcgcgagcgatggaagatcaacagcgcagcgcgccgc

SEQ ID NO: 570571 - DNA, 75 bp, synthetic construct
  source 1..75: mol_type = other DNA
aggtgtgaaggcagagaatacttcgccggataagcagaaagacagaaatgcggttgcgtcagagaacacaaaagg

SEQ ID NO: 570572 - DNA, 75 bp, synthetic construct
  source 1..75: mol_type = other DNA
gtcaatgaatcaaatgggcgttattacgaacctgcgccggggcgaaattatggtatcgacatgaatctcgcctgg

SEQ ID NO: 570573 - DNA, 75 bp, synthetic construct
  source 1..75: mol_type = other DNA
gccgaatgtacccgcaacgcgtgaggcggttcacgctatcaatgaagcggatctcatcattattgggcctggcag

SEQ ID NO: 570574 - DNA, 75 bp, synthetic construct
  source 1..75: mol_type = other DNA
ggctttcctctcttgcctgctgctgcccgcccccgcactggggcttacgctggcacaaaaactggtgaccacgtt

SEQ ID NO: 570575 - DNA, 75 bp, synthetic construct
  source 1..75: mol_type = other DNA
actgacatacgctgcaggtgtgatgctggggcgggatatactgaatattcaggcggctcagcaacaactggggct

SEQ ID NO: 570576 - DNA, 75 bp, synthetic construct
  source 1..75: mol_type = other DNA
caggctgcgttgtcacaggcagagcagagtattcatgaagcccgccagaaaacagccctgaaatggaagaaagca

SEQ ID NO: 570577 - DNA, 75 bp, synthetic construct
  source 1..75: mol_type = other DNA
atgcgacaatttataaaaacgtgtgacctaagaaatatagtagatgatattgcatgtgatgaaattagcaaaaaa

SEQ ID NO: 570578 - DNA, 75 bp, synthetic construct
  source 1..75: mol_type = other DNA
gaaaacgccgacaagctgtacatcgtacaggttgatgtgggggaaaaaacgctgcaaaccgtgaccagcctggtg

SEQ ID NO: 570579 - DNA, 75 bp, synthetic construct
  source 1..75: mol_type = other DNA
atggcgctgacaccggcagaacggcaaagaagacgcagggaacggttgaagaaggaaggaacatcaagacgtgac

SEQ ID NO: 570580 - DNA, 75 bp, synthetic construct
  source 1..75: mol_type = other DNA
ttattatatcttgatgctgatattgtctgtaagggttcattaaatgagttactggaattagaatttaaagatgaa

SEQ ID NO: 570581 - DNA, 75 bp, synthetic construct
  source 1..75: mol_type = other DNA
tggtataagcctcagtttaagaatgaatatcagatgctacactatgagagtgtctggtattatgttcttgctcgc

SEQ ID NO: 570582 - DNA, 75 bp, synthetic construct
  source 1..75: mol_type = other DNA
ttttctggcgatattgctgcttttggtttctcctgctctggagttttctgtaattcatcggcatgttgtgctaga

SEQ ID NO: 570583 - DNA, 75 bp, synthetic construct
  source 1..75: mol_type = other DNA
gccagaagccttttttatgctgttacagtcattgttatattcctgattggatggggtactggtgttgtttttttc

SEQ ID NO: 570584 - DNA, 75 bp, synthetic construct
  source 1..75: mol_type = other DNA
atgaataaatctgtcataaagctgttgaataaaaaattcattatttcagtaataacctcatctacatttattact

SEQ ID NO: 570585 - DNA, 75 bp, synthetic construct
  source 1..75: mol_type = other DNA
ctatatttactatctttatggatggaatggttattccataagtatcaccggttttgtattgatgcttgcttttag

SEQ ID NO: 570586 - DNA, 75 bp, synthetic construct
  source 1..75: mol_type = other DNA
attctaatcctcatttacacattacatgaagataatttcaaaaattatccaagcataccacatcgaatttccact

SEQ ID NO: 570587 - DNA, 75 bp, synthetic construct
  source 1..75: mol_type = other DNA
tgtatattaatttacgggaatggttacaacaaagactaacggagaaattctttgatctattatcagatgagtcaa

SEQ ID NO: 570588 - DNA, 75 bp, synthetic construct
  source 1..75: mol_type = other DNA
aaacacttgctttaccagaaaaaatttctcgatggtgtttttacagcaattaaatataatgttatgaaaggttaa

SEQ ID NO: 570589 - DNA, 75 bp, synthetic construct
  source 1..75: mol_type = other DNA
aaagtcagaatttgaagaaaaaatagtgaatattacacccggtttattaatgatgacactgtcttcatacattat

SEQ ID NO: 570590 - DNA, 75 bp, synthetic construct
  source 1..75: mol_type = other DNA
actcttcactttttgttgcttatatgggctgtcttgggtggggaagtgcttacttctatggctggggaacttcct

SEQ ID NO: 570591 - DNA, 75 bp, synthetic construct
  source 1..75: mol_type = other DNA
gggcgatttgctcggctggttcccttatgccgaacgtttccagactctgcataagtgccaactggagtgcacgct

SEQ ID NO: 570592 - DNA, 75 bp, synthetic construct
  source 1..75: mol_type = other DNA
atatgtcaatgctgaggaatgcattttttatccttccgcctgacacgccaacgcaggccggacctgaaaatatct

SEQ ID NO: 570593 - DNA, 75 bp, synthetic construct
  source 1..75: mol_type = other DNA
tgatttcgaccatacagattttctttggtgtccagaatataaaggtactgaaaggcagtttgaatgtacccgact

SEQ ID NO: 570594 - DNA, 75 bp, synthetic construct
  source 1..75: mol_type = other DNA
aaggtccagttcggcgacgggtacgcacaggtgagcggctccggcctgaatgatgagattcgtacctatgaatat

SEQ ID NO: 570595 - DNA, 75 bp, synthetic construct
  source 1..75: mol_type = other DNA
tgtgtgagctcttaggcatcagtaagtccactttgtatcgttggtgcggggtgtctgaggatttttctggcttgg

SEQ ID NO: 570596 - DNA, 75 bp, synthetic construct
  source 1..75: mol_type = other DNA
atttaatccccatggctgcaatggatgctgggacgacacgtcgctgaattttgaccataaagattttttgtggtg

SEQ ID NO: 570597 - DNA, 75 bp, synthetic construct
  source 1..75: mol_type = other DNA
atgaaaaaattattatttgctatttttatcatacttccgcttggtagctgtaccgttcatggtaataaatcccta

SEQ ID NO: 570598 - DNA, 75 bp, synthetic construct
  source 1..75: mol_type = other DNA
aacccaacaagaaattcttgctgcctttggagagcctcagacacgcgctacgaatgatggagagagatgtggaac

SEQ ID NO: 570599 - DNA, 75 bp, synthetic construct
  source 1..75: mol_type = other DNA
tttttgcagttatcgtcattgctatatttcttatcggttggggtattggtgttgtattctttttcgcagtgaaaa

SEQ ID NO: 570600 - DNA, 75 bp, synthetic construct
  source 1..75: mol_type = other DNA
ctgggacgatacatcactgaattttgaccacaaggattttctgtggtgcccgagacataaaaacacggaccggca

SEQ ID NO: 570601 - DNA, 75 bp, synthetic construct
  source 1..75: mol_type = other DNA
ctctgatagaaaactggactccacctgatggttggtgcaatgggaatgatcgagattggcacgaaaaaatgaagg

SEQ ID NO: 570602 - DNA, 75 bp, synthetic construct
  source 1..75: mol_type = other DNA
actgatgaaaatcatcagacggttaaagttaaaatcgtcaagggaaaaactacccaacaagaaattcttgctgcc

SEQ ID NO: 570603 - DNA, 75 bp, synthetic construct
  source 1..75: mol_type = other DNA
tgatggaacacggcgcaagtttaagtaatggcgttttacaggtatcgaaaggcctggaaatgaagtacgacagca

SEQ ID NO: 570604 - DNA, 75 bp, synthetic construct
  source 1..75: mol_type = other DNA
atcggcttccctcgggaacctggcggctgatgctttactggtagcggcgggggaaaaaaacccaattggcgttaa

SEQ ID NO: 570605 - DNA, 75 bp, synthetic construct
  source 1..75: mol_type = other DNA
ccgttcgatgcggtcactataggtaatcatgaatttgatcacggctgggacaatacgttattacagttgagtcag

SEQ ID NO: 570606 - DNA, 75 bp, synthetic construct
  source 1..75: mol_type = other DNA
atcatcgaaaaagacggcgtgaaaattggcgttataggtttgcacggagtatttgccttcaatgatacggtatct

SEQ ID NO: 570607 - DNA, 75 bp, synthetic construct
  source 1..75: mol_type = other DNA
atgtagagccttataaagtgccgtggattgctgacggtaaacgggatattggcggctgggcaaatatcactacgc

SEQ ID NO: 570608 - DNA, 75 bp, synthetic construct
  source 1..75: mol_type = other DNA
atgaaaattaaaatacttgctgcgggtatcgcattaacactgccattctgggcttgcgccaaagatgtcaccatc

SEQ ID NO: 570609 - DNA, 75 bp, synthetic construct
  source 1..75: mol_type = other DNA
atttcattttcttcaataataaaaccagccctgatggcgcagtagagcaccagggcgacaaccgtaccggtgaag

SEQ ID NO: 570610 - DNA, 75 bp, synthetic construct
  source 1..75: mol_type = other DNA
gcaaagtagagatcaacgcgcaattgcgacagcttaaaaacgaacttgaagaattgacagggagagagaatgcat

SEQ ID NO: 570611 - DNA, 75 bp, synthetic construct
  source 1..75: mol_type = other DNA
atgaatggcttgaaagttctgaagagataaagattaaatacatatcagtcccagaggttaaaactatactaagta

SEQ ID NO: 570612 - DNA, 75 bp, synthetic construct
  source 1..75: mol_type = other DNA
agcgctattaccgccagccatggtgatattatcatcgctgctgttgacggcgagtttacggtgaaaaaattgcaa

SEQ ID NO: 570613 - DNA, 75 bp, synthetic construct
  source 1..75: mol_type = other DNA
ctatgaacagtgcgtactcgcccattaccatcagtagcgaagatacgctggatgtctttggtgtggtgatccacg

SEQ ID NO: 570614 - DNA, 75 bp, synthetic construct
  source 1..75: mol_type = other DNA
gaagtttaaggctgtaggacagggctttgctggtggcctggctgcgctggcaacccagcacggcatcaacatctg

SEQ ID NO: 570615 - DNA, 75 bp, synthetic construct
  source 1..75: mol_type = other DNA
ggcaaactggttctcgactacaaagagaagccgcataattttacggtgaaaaacttcgagcttaaaccatttacg

SEQ ID NO: 570616 - DNA, 75 bp, synthetic construct
  source 1..75: mol_type = other DNA
gcgtgtctcagttgaatctgtttgatgaagatcagccccgtgcccatagcgacgaactgatgaaggttctggata

SEQ ID NO: 570617 - DNA, 75 bp, synthetic construct
  source 1..75: mol_type = other DNA
gcccctgaatggcaaatgaaacgggaaatgctctcgccttcgtatacaacacaatggactgagatccccattgct

SEQ ID NO: 570618 - DNA, 75 bp, synthetic construct
  source 1..75: mol_type = other DNA
ctctgcaccagcttatcaagcgtgatgagcagaaccttgagctggtgctgcgcgattcattgctggaaccgacgg

SEQ ID NO: 570619 - DNA, 75 bp, synthetic construct
  source 1..75: mol_type = other DNA
gtgaacgaatcacagacaaagatgccatgcaccaggctgttgttcagtatgcagagcgggccgcagagaaactac

SEQ ID NO: 570620 - DNA, 75 bp, synthetic construct
  source 1..75: mol_type = other DNA
ctcgatgaactgaaccagtcgggaaaagggaaagtgtggtttgcggggcgaggaaccgcccctgaatggcaaatg

SEQ ID NO: 570621 - DNA, 75 bp, synthetic construct
  source 1..75: mol_type = other DNA
tggaaaagctttcattgcccacacaggacagccgggacattattgccgccgcatgcagagccttaaaccatgtct

SEQ ID NO: 570622 - DNA, 75 bp, synthetic construct
  source 1..75: mol_type = other DNA
ctgcggtggtcatggccacgatcacggtcatgaacacggtggcgaaggctgctgcggcggtaaaggtaacggcgg

SEQ ID NO: 570623 - DNA, 75 bp, synthetic construct
  source 1..75: mol_type = other DNA
taaggataagtacacgtcggcagttccgtcagcactgcgacagcgttgtcctcgttgcttttacccggtcatgca

SEQ ID NO: 570624 - DNA, 75 bp, synthetic construct
  source 1..75: mol_type = other DNA
atttgcctttaatgacacggtatctgcggcaacgcgagtgggtattgaggcgcgtgatgaaattaaatggctaca

SEQ ID NO: 570625 - DNA, 75 bp, synthetic construct
  source 1..75: mol_type = other DNA
cacgatcacggtcatgagcacggtggcgaaggctgctgtggcggtaaaggtaacggcggttgcggttgccactaa

SEQ ID NO: 570626 - DNA, 75 bp, synthetic construct
  source 1..75: mol_type = other DNA
ctgcggtggtcatggccacgatcacggtcatgaacacggtggcgaaggctgctgtggcggtaaaggcaacggcgg

SEQ ID NO: 570627 - DNA, 75 bp, synthetic construct
  source 1..75: mol_type = other DNA
acctgcatggtcacggttccctgatctctggcctggaaacagcgctggaaggtcatgaagttggcgacaaatttg

SEQ ID NO: 570628 - DNA, 75 bp, synthetic construct
  source 1..75: mol_type = other DNA
acgagttaatacattacttatactttaatctaagtgaagatgtatttctgaagaaattgatggatgggttttaca

SEQ ID NO: 570629 - DNA, 75 bp, synthetic construct
  source 1..75: mol_type = other DNA
tcccttactggcaaatatatacctcgacaaactggaccgttttgtagaacagaatttaattcctgcatatacaag

SEQ ID NO: 570630 - DNA, 75 bp, synthetic construct
  source 1..75: mol_type = other DNA
atgccttatgagcgagcggaagcgttttccgtatccataaatacaaaagtattttgtatgcgtggctttaaattt

SEQ ID NO: 570631 - DNA, 75 bp, synthetic construct
  source 1..75: mol_type = other DNA
ctcttgtccggtgctggagccgactggcccgctgcatacccagttcggatatcacattattaaggtgctgtaccg

SEQ ID NO: 570632 - DNA, 75 bp, synthetic construct
  source 1..75: mol_type = other DNA
gaaaatactccccgtttacccgcgagttatgggggcgtaactggacttatgcccataacgggcaactgacgggct

SEQ ID NO: 570633 - DNA, 75 bp, synthetic construct
  source 1..75: mol_type = other DNA
gcgaggtggcgctggaaaacactcacccgtttacccgtgaactgtggggacgcaactggacgtatgcgcataatg

SEQ ID NO: 570634 - DNA, 75 bp, synthetic construct
  source 1..75: mol_type = other DNA
ccaacgtccctaccgatatctgctttagtttcaccggtctggtgcagcgtggtggtggaaccgggccacataaag

SEQ ID NO: 570635 - DNA, 75 bp, synthetic construct
  source 1..75: mol_type = other DNA
tgtcgatggcctgctaatggcggaaaaatccgtaaaggcgttgaactgcaaccgttcacctggcaacaaaaaacg

SEQ ID NO: 570636 - DNA, 75 bp, synthetic construct
  source 1..75: mol_type = other DNA
cggtgcggtggaagtcgtactggtggcaaattcggtgattgatatctcggtcggttcgccgttctcagtgaatac

SEQ ID NO: 570637 - DNA, 75 bp, synthetic construct
  source 1..75: mol_type = other DNA
ttattctgaatgaaacaggcgagctcaccgaattatatctgctggggtcgctttctgacattctcaccgccgctg

SEQ ID NO: 570638 - DNA, 75 bp, synthetic construct
  source 1..75: mol_type = other DNA
gctgaaattattcatgaatggaagaacgcagatatatcagaacaagtgacacttgtcagattatatctgaaggtg

SEQ ID NO: 570639 - DNA, 75 bp, synthetic construct
  source 1..75: mol_type = other DNA
ggcgttgctcagtgacttctttcgcatgcgccgccaggaaattaaagcgcagaaaaaagcgcaatcctcgacgga

SEQ ID NO: 570640 - DNA, 75 bp, synthetic construct
  source 1..75: mol_type = other DNA
aactggaagcgcgggaagttcaattaccgactcgctacgaccttcgatatggacacccgataaatgcagatgagc

SEQ ID NO: 570641 - DNA, 75 bp, synthetic construct
  source 1..75: mol_type = other DNA
catacaaacatggaatgaaagagcatcaacttaatgctccgttgacaaagattgaccgtgaacgttctgacggcg

SEQ ID NO: 570642 - DNA, 75 bp, synthetic construct
  source 1..75: mol_type = other DNA
aatacatatcagtcccagaggttaaaactatactaagtagctatcatgagtttttgattaaatgctttaatggtg

SEQ ID NO: 570643 - DNA, 75 bp, synthetic construct
  source 1..75: mol_type = other DNA
tgattggcgctctgctgggaacttgtggttatttgctgttcttctgggtttcagtctggtcgctgccggtggcac

SEQ ID NO: 570644 - DNA, 75 bp, synthetic construct
  source 1..75: mol_type = other DNA
gtttccgtctggtcgctgccagtggcgttggtcgcgttagccatcgcttcaattggtcagggcgttaccatgacc

SEQ ID NO: 570645 - DNA, 75 bp, synthetic construct
  source 1..75: mol_type = other DNA
tcgacttggtagcccgtatcttccagtgtgggattcattgccgcagcacgagccagttcatcacagcgttcgttt

SEQ ID NO: 570646 - DNA, 75 bp, synthetic construct
  source 1..75: mol_type = other DNA
ttcctttaacgctcaacccgatgaaacagagcaaaaacaaaccgcgaattcgccaggcggtcggcgccacccggc

SEQ ID NO: 570647 - DNA, 75 bp, synthetic construct
  source 1..75: mol_type = other DNA
ttccttttgccgataaatccgttgatgtttgtctactggcacatacattgccgtggtgcaccgatccgcatcgtt

SEQ ID NO: 570648 - DNA, 75 bp, synthetic construct
  source 1..75: mol_type = other DNA
gcgtcctgcgtttatctcacattcataacaacctctggccagaaggctctgaagttgagtatgacggcgaaccag

SEQ ID NO: 570649 - DNA, 75 bp, synthetic construct
  source 1..75: mol_type = other DNA
gatcttttacgttctgcgggtgcagaggccgctgagtctatcgtcattacctgtaacgagccggaagacactatg

SEQ ID NO: 570650 - DNA, 75 bp, synthetic construct
  source 1..75: mol_type = other DNA
taccggcatcctgccgcaggctgttgaagtgacgctggttatggatgattttgctgaactgccccgtctgtttct

SEQ ID NO: 570651 - DNA, 75 bp, synthetic construct
  source 1..75: mol_type = other DNA
aaaacctggtcggtacagtggcgtcggcaccgctggtgccaggaatggtcgccaggatcggtaaaaagaatactt

SEQ ID NO: 570652 - DNA, 75 bp, synthetic construct
  source 1..75: mol_type = other DNA
tcgttgttctacgtgcgctatgtgttaaatgataccgggctgttcactgtgctggtactggtgcaaaacctggtt

SEQ ID NO: 570653 - DNA, 75 bp, synthetic construct
  source 1..75: mol_type = other DNA
gggactgcctgaaaaggtgttcccggcggatatcgtccggggtgtgccagtccgtttgcaggtgggagatgagac

SEQ ID NO: 570654 - DNA, 75 bp, synthetic construct
  source 1..75: mol_type = other DNA
cgggaaccggcggcaaatatgaacctgcggggattgttcatcgcggggagtttgtcttcacgaaggaggcgacca

SEQ ID NO: 570655 - DNA, 75 bp, synthetic construct
  source 1..75: mol_type = other DNA
tactcatctcacgctgccacacctggaacctctgtatgtggatgtgactgagtatggtggtgtaagcggctcgct

SEQ ID NO: 570656 - DNA, 75 bp, synthetic construct
  source 1..75: mol_type = other DNA
gcggtgtatgacatggcccgcaagggggcacaggatgaactccggctgcagttgcgtgatggcggtctgttatca

SEQ ID NO: 570657 - DNA, 75 bp, synthetic construct
  source 1..75: mol_type = other DNA
cgagagagtcactggcagccctgatgaatgccggtgtgcgtggtggtgaacagtttgatgccatcaaccagagtg

SEQ ID NO: 570658 - DNA, 75 bp, synthetic construct
  source 1..75: mol_type = other DNA
agattccacgctttcagcgtttaataaaactctggttctttccggtaatcagtccggactgactgccgatcgtat

SEQ ID NO: 570659 - DNA, 75 bp, synthetic construct
  source 1..75: mol_type = other DNA
acctcgctggcggtggcgacaggtgcgctggcgtatgcctggtaccagggggattccacgctttcagcgtttaat

SEQ ID NO: 570660 - DNA, 75 bp, synthetic construct
  source 1..75: mol_type = other DNA
tgctgttgaacagggcctgagccgtcaggcgctggctgcacaaaaagccgggatttccgtcgggcagtataaagc

SEQ ID NO: 570661 - DNA, 75 bp, synthetic construct
  source 1..75: mol_type = other DNA
agcgtcaggcggtacagccattcaggcagctgcggcgaaattccattttgcgaccgggggatttacgggaaccgg

SEQ ID NO: 570662 - DNA, 75 bp, synthetic construct
  source 1..75: mol_type = other DNA
gaaaaagccgaagtcgtcaggcgtgaaagtgtcagccggtgagcgtcaggaagaccagccgcatgccgccctgct

SEQ ID NO: 570663 - DNA, 75 bp, synthetic construct
  source 1..75: mol_type = other DNA
atcgcggggagtttgtcttcacgaaggaagcaaccagccggattggcgtcggcaacctgtaccgcctgatgcggg

SEQ ID NO: 570664 - DNA, 75 bp, synthetic construct
  source 1..75: mol_type = other DNA
cggctggggcgagtgggcagaaagtgcgacggacagtttttcgcaggttaaaagcgtggccacgcagacctttga

SEQ ID NO: 570665 - DNA, 75 bp, synthetic construct
  source 1..75: mol_type = other DNA
tggtctgcggaggagcagcttcgtggaagctggatggccggtctgaagtccggctggggcgagtgggcagaaagt

SEQ ID NO: 570666 - DNA, 75 bp, synthetic construct
  source 1..75: mol_type = other DNA
ccgggcgcatgcagccatgctggcgcttgaaaccgagctcaggacgctggaaaagcatgccggtgcgaatgagaa

SEQ ID NO: 570667 - DNA, 75 bp, synthetic construct
  source 1..75: mol_type = other DNA
catccctgataaaagagcaggttggaacgctggcagataatgttcagcagaatgcagaaactgtagcagccagca

SEQ ID NO: 570668 - DNA, 75 bp, synthetic construct
  source 1..75: mol_type = other DNA
gaaaaagccgaagtcgtcaggcgtcaaagtgtcagccggtgagcgtcaggaagaccagacgcatgccgcactgct

SEQ ID NO: 570669 - DNA, 75 bp, synthetic construct
  source 1..75: mol_type = other DNA
gaaaaagccgaagtcgtcaggcgttaaagtgtcagccggtgagcgtcaggaagaccagtcgcatgccgcgctgct

SEQ ID NO: 570670 - DNA, 75 bp, synthetic construct
  source 1..75: mol_type = other DNA
gaaaaagccgaagtcgtcaggcgtaaaagtgtcagccggtgagcgtcaggaagaccagtcgcatgccgctctgct

SEQ ID NO: 570671 - DNA, 75 bp, synthetic construct
  source 1..75: mol_type = other DNA
acgctactgcgcactacgctgattgtcgggcctggcgcggtgatccttggtttattgatcctcgttttccacctg

SEQ ID NO: 570672 - DNA, 75 bp, synthetic construct
  source 1..75: mol_type = other DNA
acccgacgtcggggctgatggcgatggcgcgccagttccgtaacgtgacggcagagcagattgcgtatgttgcgc

SEQ ID NO: 570673 - DNA, 75 bp, synthetic construct
  source 1..75: mol_type = other DNA
gtcaccattaacatggtaccgaaccaccttgataaacgtgcgcacaaatatctcggtatggtccgccaggcgtca

SEQ ID NO: 570674 - DNA, 75 bp, synthetic construct
  source 1..75: mol_type = other DNA
gcagccaattcgttgggaaggtcgcgcgagcaatttcgcggattatctgctgaaaaaccgcctcaaaagccgcag

SEQ ID NO: 570675 - DNA, 75 bp, synthetic construct
  source 1..75: mol_type = other DNA
agccacatcaactttgatgacggtacgatcactatcgaaaccatcgccgggacagaacctgccgcacatctgcgt

SEQ ID NO: 570676 - DNA, 75 bp, synthetic construct
  source 1..75: mol_type = other DNA
aggcggataaaaaatggcagtggtaccagagccggagccagcgtcggggaaagaccgcctctttccgtgccaacc

SEQ ID NO: 570677 - DNA, 75 bp, synthetic construct
  source 1..75: mol_type = other DNA
ggtggcaccggaagtccggcgcaaatgcggcgttcagagggtatcaggtttgagcagaacaacaacgtggtgatt

SEQ ID NO: 570678 - DNA, 75 bp, synthetic construct
  source 1..75: mol_type = other DNA
cggcgatgctgaccggtgcagaggcagactggcggggattcacccgttcggtgctgtccatgatgacagaaatcc

SEQ ID NO: 570679 - DNA, 75 bp, synthetic construct
  source 1..75: mol_type = other DNA
acgacggcaccaacggacaggcggggccgcagctgatgaaggcggtgtatgacatggcccgcaagggggcgcagg

SEQ ID NO: 570680 - DNA, 75 bp, synthetic construct
  source 1..75: mol_type = other DNA
cgcattccacggaagcgcactttgttcaccgtatggaaatccccgtggtatggggtgaaatcttcctgctggtgg

SEQ ID NO: 570681 - DNA, 75 bp, synthetic construct
  source 1..75: mol_type = other DNA
aaaaccctggttctttccggtaatcagtcaggactgacggcagagcgcatgctgacgctctccagagccgggcag

SEQ ID NO: 570682 - DNA, 75 bp, synthetic construct
  source 1..75: mol_type = other DNA
ggggggtaaatatgaacctgcgggaattgttcatcgcggggagtttgtcttcacgaaggaagcaaccagccggat

SEQ ID NO: 570683 - DNA, 75 bp, synthetic construct
  source 1..75: mol_type = other DNA
acgcgaacgtgaacctattttacgtctggcgaaatcggcactggtgacggtctatccattacctgacacccgcct

SEQ ID NO: 570684 - DNA, 75 bp, synthetic construct
  source 1..75: mol_type = other DNA
ctggcgaaatcagcgctggtgacggtctacccattacctgatacccgcctgttgatggtcgtcaatattcatgcc

SEQ ID NO: 570685 - DNA, 75 bp, synthetic construct
  source 1..75: mol_type = other DNA
gttcatcgcggggagtttgtcttcacgaaggaagcaaccagccggattggcgtcggcaacctgtacagcctgatg

SEQ ID NO: 570686 - DNA, 75 bp, synthetic construct
  source 1..75: mol_type = other DNA
ggaaatctttaccggctgatgcgcggctatgccaccggtggttatgtcggtggcaccggaagtccggcgcaaatg

SEQ ID NO: 570687 - DNA, 75 bp, synthetic construct
  source 1..75: mol_type = other DNA
agcggtgtatgagatggcccgtaaaggtgcgcaggatgagctccggctgcagttgcgtgatggcggtctgttatc

SEQ ID NO: 570688 - DNA, 75 bp, synthetic construct
  source 1..75: mol_type = other DNA
gcgtggccacgcagacctttgacggtattgcacagaatatggcagcgatgctgaccggcagcgaacagagctggc

SEQ ID NO: 570689 - DNA, 75 bp, synthetic construct
  source 1..75: mol_type = other DNA
cagtttgatgccatcaaccagagtgtcgcgcgttttgcttctgcatccggtgtggaggtggacaaggttgcagag

SEQ ID NO: 570690 - DNA, 75 bp, synthetic construct
  source 1..75: mol_type = other DNA
tttttatccgcctcatcaaatgccttctgtgcactggcgagcatatccgctgaggactcaggacgaccgatatcc

SEQ ID NO: 570691 - DNA, 75 bp, synthetic construct
  source 1..75: mol_type = other DNA
ctgccgatggtcggggtcacctcgctggcggtggcgacaggtgcgctggcgtacgcctggtaccagggggattcc

SEQ ID NO: 570692 - DNA, 75 bp, synthetic construct
  source 1..75: mol_type = other DNA
atacggcaaatgcactggctgaaaatgcccggaatgccggtggagctgggacgatttatgtcggtggcccgtgtg

SEQ ID NO: 570693 - DNA, 75 bp, synthetic construct
  source 1..75: mol_type = other DNA
catgctgcagcaggggggcagatcagcgattcattcggtggaccggctcagcctgcttaccctgctgaaggagga

SEQ ID NO: 570694 - DNA, 75 bp, synthetic construct
  source 1..75: mol_type = other DNA
agtccggactgactgccgatcgtatgctgactctctcaagagccgggcaggcagcagggctgacgtttaaccagg

SEQ ID NO: 570695 - DNA, 75 bp, synthetic construct
  source 1..75: mol_type = other DNA
tgatgttgatcgtcatctgtgtgacgattctgtgttttgtctggatggtgagggattcgctttgcggactccggc

SEQ ID NO: 570696 - DNA, 75 bp, synthetic construct
  source 1..75: mol_type = other DNA
ggttcatgagaaagaaacgctggagtacaaacgccagctggctgagctgggtgacaaggtggagcaccagaaacg

SEQ ID NO: 570697 - DNA, 75 bp, synthetic construct
  source 1..75: mol_type = other DNA
ggagtacaaacgccagctggctgagctgggagacaaggttgaataccagaaacgcctgaatgagctggcacagca

SEQ ID NO: 570698 - DNA, 75 bp, synthetic construct
  source 1..75: mol_type = other DNA
gcgaacattcggaccggaggattacggggaggcttgagctgcgggtagtaggggagtgttcgcgaaggcgaagcg

SEQ ID NO: 570699 - DNA, 75 bp, synthetic construct
  source 1..75: mol_type = other DNA
cagtttgaggcaatcagccagagtgtggcgcgtttctcctctgcatccggtgtggaggtggacaaggtcgctgaa

SEQ ID NO: 570700 - DNA, 75 bp, synthetic construct
  source 1..75: mol_type = other DNA
ccggcggtcagaatccctggctcatcctgctgcaacagggcggtcaggtgaaggactcattcggcgggatgatcc

SEQ ID NO: 570701 - DNA, 75 bp, synthetic construct
  source 1..75: mol_type = other DNA
tgctgttgagcaggggctgagccgccaggcgctggctgcacaaaaagccgggatgtccgtagggcagtataaagc

SEQ ID NO: 570702 - DNA, 75 bp, synthetic construct
  source 1..75: mol_type = other DNA
gggcctgccccccgccacggacattgcgcggcatcgattgccgattgtcgcgacattttgcagatgcagcaactt

SEQ ID NO: 570703 - DNA, 75 bp, synthetic construct
  source 1..75: mol_type = other DNA
gctgactctctcaagagccgggcaggcagcagggctgacgtttaaccaggcgagagagtcactggcagccctggt

SEQ ID NO: 570704 - DNA, 75 bp, synthetic construct
  source 1..75: mol_type = other DNA
aagcggataaaaaatggcagtggtaccagagccggagccagcgccgcggtaaaacctcctctttccgggccaacc

SEQ ID NO: 570705 - DNA, 75 bp, synthetic construct
  source 1..75: mol_type = other DNA
agatgccgccgttgttgcttcgcttaaacctgttggattcatcgcttccgccattgctgatggggtaacagagac

SEQ ID NO: 570706 - DNA, 75 bp, synthetic construct
  source 1..75: mol_type = other DNA
tcgttgagagcgtcgcacgagggacatccgttcgtatgggaacgttggatcccctggggacgaatatcaaactgg

SEQ ID NO: 570707 - DNA, 75 bp, synthetic construct
  source 1..75: mol_type = other DNA
tttcacgaaagaggcaaccagccggataggtgtggggaatctttaccgtctgatgcgcggctatgcggaaggtgg

SEQ ID NO: 570708 - DNA, 75 bp, synthetic construct
  source 1..75: mol_type = other DNA
cagctgatgaaagcggtgtatgagatggcccgtaaaggtgcgcaggatgagattcaggcgcagatgcgtgatggc

SEQ ID NO: 570709 - DNA, 75 bp, synthetic construct
  source 1..75: mol_type = other DNA
tgccggaagtccggcgcagatgcggcgggctgaaggcattaattttaatcagaacaatcacgtggtgattcagaa

SEQ ID NO: 570710 - DNA, 75 bp, synthetic construct
  source 1..75: mol_type = other DNA
tcgcgcgttttgcgtctgcatccggtgtggaggtggacaaggttgcagaggctttcggaaaactgaccactgacc

SEQ ID NO: 570711 - DNA, 75 bp, synthetic construct
  source 1..75: mol_type = other DNA
agaaattggcgtgccgttacaggcggatatgttcagtaacggcggcacggacggtggagcggtgcacttaaccgg

SEQ ID NO: 570712 - DNA, 75 bp, synthetic construct
  source 1..75: mol_type = other DNA
tgctactcatgagccgtcataacttacgtgcgccgctggcaaataatggcagcgtgcttgagcagtccacgccga

SEQ ID NO: 570713 - DNA, 75 bp, synthetic construct
  source 1..75: mol_type = other DNA
ggttgcccgatagatgccaacggtttctgcccgatggataagtttgatagcgtgttgaatgaagcggtgaaataa

SEQ ID NO: 570714 - DNA, 75 bp, synthetic construct
  source 1..75: mol_type = other DNA
cgttttccagcgttggcatgacagtaaagccaatcgcgacctgatgaaaattgaatatgtttatcagagtgcgga

SEQ ID NO: 570715 - DNA, 75 bp, synthetic construct
  source 1..75: mol_type = other DNA
gtgattcagaacgacggtatcaacggacaggccgggccgcagctgatgaaggcggtgtatgacatggcccgtaag

SEQ ID NO: 570716 - DNA, 75 bp, synthetic construct
  source 1..75: mol_type = other DNA
aacaccactgacggtaacgggcgctacatttttgccggttataaaacagagactgcgccgtttagtgaggttaac

SEQ ID NO: 570717 - DNA, 75 bp, synthetic construct
  source 1..75: mol_type = other DNA
gcagcaaacagcgttgcaggcgtcgtacaaagcgtttactgatatgcaggggttatcgcttttccagctcaacaa

SEQ ID NO: 570718 - DNA, 75 bp, synthetic construct
  source 1..75: mol_type = other DNA
acggtggggcggtgcacttaaccggcactggcgtacccacagtggtgatggggcctgccacccgccacggacatt

SEQ ID NO: 570719 - DNA, 75 bp, synthetic construct
  source 1..75: mol_type = other DNA
accgcctgctgggcgaaaaactttgattatggcgcggctaaccatcgccagattggtaacgggccgatgctggtg

SEQ ID NO: 570720 - DNA, 75 bp, synthetic construct
  source 1..75: mol_type = other DNA
atgaacaaaacgctaatcgccgcagctgtggcagggatggttttactctcttcgaatgtgcaggcacagaccaca

SEQ ID NO: 570721 - DNA, 75 bp, synthetic construct
  source 1..75: mol_type = other DNA
tgacgctggaattaagcggttgcccgatagacgctgatggtttctgcccgatggataagtttgatagcgtgttga

SEQ ID NO: 570722 - DNA, 75 bp, synthetic construct
  source 1..75: mol_type = other DNA
accggcgcattcccggggtgtgatattcctgtgcatcaccaggaaaaaatgggcactatggacccaacctttaac

SEQ ID NO: 570723 - DNA, 75 bp, synthetic construct
  source 1..75: mol_type = other DNA
tctttatcgcctgtgccatttttgtcccaaattttgccaccttcattaatatgaaagggttgggcctggcaattt

SEQ ID NO: 570724 - DNA, 75 bp, synthetic construct
  source 1..75: mol_type = other DNA
gcatcagcaggatatgttcggcagttttttgcgttatttactgcgtcgccaaccgctgaatgcgttacttgtcct

SEQ ID NO: 570725 - DNA, 75 bp, synthetic construct
  source 1..75: mol_type = other DNA
gcgacgctgcaggcagacctggaaaaagccagcgagatggcggcacaggagcgggctgaatcggaggcgtcacgg

SEQ ID NO: 570726 - DNA, 75 bp, synthetic construct
  source 1..75: mol_type = other DNA
gcccgtaacgctacagtgttctggtcagccgtgtggatacggcaaatcctgaatggccacaaaaaccagagtaaa

SEQ ID NO: 570727 - DNA, 75 bp, synthetic construct
  source 1..75: mol_type = other DNA
ggtggcggttgccactggagaacgacattatcaaagatgggcggattgttgatgcgcagcggctggctaaaacgt

SEQ ID NO: 570728 - DNA, 75 bp, synthetic construct
  source 1..75: mol_type = other DNA
gcgatcaccccggatgccagtgcattacagcgattcctgccttttttaccttctcatcagcaatgtctggcctgg

SEQ ID NO: 570729 - DNA, 75 bp, synthetic construct
  source 1..75: mol_type = other DNA
ggtggcggttgccgctggagaacgacataatcaaagatgggcggattgtcgatgcacagcggctggctaacacgt

SEQ ID NO: 570730 - DNA, 75 bp, synthetic construct
  source 1..75: mol_type = other DNA
atggggctgtacctttggtcatagcgaagcacgtttacaggcgttacaagccgatttcgtgcattggtttcgcga

SEQ ID NO: 570731 - DNA, 75 bp, synthetic construct
  source 1..75: mol_type = other DNA
ctgcgactttacagtggctatagtgatagtaaccaggacaacccgctactctatttctgtcagcatcgctggcgg

SEQ ID NO: 570732 - DNA, 75 bp, synthetic construct
  source 1..75: mol_type = other DNA
gcctgatgaacttaagcggattattgaaatttgcctggccaatgacatctgggtgatatctgacgaaattcactg

SEQ ID NO: 570733 - DNA, 75 bp, synthetic construct
  source 1..75: mol_type = other DNA
gctggataaatataccgcccgccagaaggaactgaataaggcactgaaagacggaaaaatcctgcaggcggacta

SEQ ID NO: 570734 - DNA, 75 bp, synthetic construct
  source 1..75: mol_type = other DNA
cgaaacggcagttatccgggcaggaaaaatccctgctggctcatgagaaagagacgctggagtacaaacgccagc

SEQ ID NO: 570735 - DNA, 75 bp, synthetic construct
  source 1..75: mol_type = other DNA
gaacaccagaaacggctgaatgagctggcacagcaggcggcgcggtttgaacagcagcagagcgcgaagcaggcg

SEQ ID NO: 570736 - DNA, 75 bp, synthetic construct
  source 1..75: mol_type = other DNA
gaagcagttccataacgtgacggcagagcagattgcgtatgttgcacagttacagcgttccggtgatgaggccgg

SEQ ID NO: 570737 - DNA, 75 bp, synthetic construct
  source 1..75: mol_type = other DNA
ataaaaaaatcctcaccgtttttactgctatctgtacttgtgtattactcaaatacatttttactgcaagatatg

SEQ ID NO: 570738 - DNA, 75 bp, synthetic construct
  source 1..75: mol_type = other DNA
ggtgataatccggatgcgctggcgaaggccacatctgcactgaagaacacctggtctgctgaggaccagctgagt

SEQ ID NO: 570739 - DNA, 75 bp, synthetic construct
  source 1..75: mol_type = other DNA
tgaccagacccgccgcctgaaagagaacatggggacgctggaaacctgggcggataaaacagggaaggcgttcaa

SEQ ID NO: 570740 - DNA, 75 bp, synthetic construct
  source 1..75: mol_type = other DNA
aatacccgtacagcgctgctggcgctgcagactgagctgcggacacttcaggcccacgccggggcgaatgaaaaa

SEQ ID NO: 570741 - DNA, 75 bp, synthetic construct
  source 1..75: mol_type = other DNA
ggcaaccagccggataggcgtggggaatctttaccgtctgatgcgcggctatgcggaagggggttatgtgggtgg

SEQ ID NO: 570742 - DNA, 75 bp, synthetic construct
  source 1..75: mol_type = other DNA
gcggtttgaacagcagcagagcgcgaagcaggcggcaatcagcgcaaaagcccgcggcctcaccgaccgtcaggc

SEQ ID NO: 570743 - DNA, 75 bp, synthetic construct
  source 1..75: mol_type = other DNA
ccagcggggattgttcatcgtggtgaatttgtcttcacgaaggaggcaaccagccggattggtgtcggcaacctg

SEQ ID NO: 570744 - DNA, 75 bp, synthetic construct
  source 1..75: mol_type = other DNA
taattgaaatgtttcgggagaaaggaatggatatgtacggtcctgtcccaggggacaccatctttattcatgcat

SEQ ID NO: 570745 - DNA, 75 bp, synthetic construct
  source 1..75: mol_type = other DNA
atttacccggaaattaaacatgattactttaatgaatcacccaatatatatgataagaagtatatatccggtata

SEQ ID NO: 570746 - DNA, 75 bp, synthetic construct
  source 1..75: mol_type = other DNA
cagctggctgagctgggagacaaagttgaacaccagaaacggctgaatgagctggcacagcaggctgcgcggttt

SEQ ID NO: 570747 - DNA, 75 bp, synthetic construct
  source 1..75: mol_type = other DNA
atgaaagccgtgctctggcgcgtgtacacctgagtagcccggttgaaatggcgaaggttgcagatatggcgggaa

SEQ ID NO: 570748 - DNA, 75 bp, synthetic construct
  source 1..75: mol_type = other DNA
tctcggcctgcgtgttaggtggcgtttctctgaaaggcggcattggaaaaatctcatatgtagtggcggggattt

SEQ ID NO: 570749 - DNA, 75 bp, synthetic construct
  source 1..75: mol_type = other DNA
tcgattggctatgagctgattgttatctccgcctgcgttttaggtggcgtttctctgaaaggtggcatcggaaaa

SEQ ID NO: 570750 - DNA, 75 bp, synthetic construct
  source 1..75: mol_type = other DNA
gtttgctgctgggcgtcctctgcggtctggtgaatggctttgttatcgctaaacttaaaattaacgccttgatta

SEQ ID NO: 570751 - DNA, 75 bp, synthetic construct
  source 1..75: mol_type = other DNA
caaagaggctaccagccggatcggcgtcggcaatctttaccggatgatgaaaggctatgcaacgggagggtatgt

SEQ ID NO: 570752 - DNA, 75 bp, synthetic construct
  source 1..75: mol_type = other DNA
aaagaagaactggatcggatgcagagcaagctatttgctgatgaacccgatgcagatacggagaaaaaagagtaa

SEQ ID NO: 570753 - DNA, 75 bp, synthetic construct
  source 1..75: mol_type = other DNA
atgaactggcccgcaaatttggtgtttcgcttcagtgggtctacagcgtggttaagcgggtcagaaaagaagaac

SEQ ID NO: 570754 - DNA, 75 bp, synthetic construct
  source 1..75: mol_type = other DNA
tagcgcacagcggttggcaaacaacagcgatagcattacgtatcgtgtgcgcaaaggtgattcgctttcaagcat

SEQ ID NO: 570755 - DNA, 75 bp, synthetic construct
  source 1..75: mol_type = other DNA
gacaaggttgaacaccagaaacggctgaatgagctggcacagcaggcggcgcggtttgaacagcagcagagcgcg

SEQ ID NO: 570756 - DNA, 75 bp, synthetic construct
  source 1..75: mol_type = other DNA
tgagtggacggaaagtgcgacggacagtttttcgcaggttaaaagtgctgccacgcagacctttgacggtattgc

SEQ ID NO: 570757 - DNA, 75 bp, synthetic construct
  source 1..75: mol_type = other DNA
actgcacaggtattcaaatccatgtgggatgcggtgctggatattggtcgcccggactcctctgcagatatgctc

SEQ ID NO: 570758 - DNA, 75 bp, synthetic construct
  source 1..75: mol_type = other DNA
cacgccggatggcgtaaatccggtattggcggcgcagatggtaaacatggcctgcatgaatatctgcagacccag

SEQ ID NO: 570759 - DNA, 75 bp, synthetic construct
  source 1..75: mol_type = other DNA
gaataaggaagacttaacacgctgtgccgaggacattttgctggcgcgagaacatcatttcccagcaacaattgc

SEQ ID NO: 570760 - DNA, 75 bp, synthetic construct
  source 1..75: mol_type = other DNA
actcaaggtgcttaacccactattcctcgacgaactgcgggcgaaactggatgaagccggtgacaatccgcgcat

SEQ ID NO: 570761 - DNA, 75 bp, synthetic construct
  source 1..75: mol_type = other DNA
gaagtcggggaagctcgtcaggtcgatatggccgctcgccttggggtttcgcaacctacagtggccaaaatgctc

SEQ ID NO: 570762 - DNA, 75 bp, synthetic construct
  source 1..75: mol_type = other DNA
tgagctaatttctgatttgataagagaagtcggggaagctcgtcaggtcgatatggccgctcgccttggggtttc

SEQ ID NO: 570763 - DNA, 75 bp, synthetic construct
  source 1..75: mol_type = other DNA
tataaaaaccaagtcgagaattatatttgattcaatgtgcgaatctctaagtcattcatatgtagcgcccaaatt

SEQ ID NO: 570764 - DNA, 75 bp, synthetic construct
  source 1..75: mol_type = other DNA
gtttgctgctgggcgtcctctgcggtttggtgaatggttttgttatcgccaaacttaaaattaacgctttgatta

SEQ ID NO: 570765 - DNA, 75 bp, synthetic construct
  source 1..75: mol_type = other DNA
tgggtggtgttcttcagacaaacaacatccacattctggccagtgaagggggccaagtcacacagatgctggctg

SEQ ID NO: 570766 - DNA, 75 bp, synthetic construct
  source 1..75: mol_type = other DNA
aggcatctctgagctggttctgcgtgccggaaatgggaatccaaaaggtattactggtgcattatggcgacggac

SEQ ID NO: 570767 - DNA, 75 bp, synthetic construct
  source 1..75: mol_type = other DNA
caaaaggctttgatgagcagacccgtcgcctgaaagaaaacatggggacgctggaaacctgggcggataaaaccg

SEQ ID NO: 570768 - DNA, 75 bp, synthetic construct
  source 1..75: mol_type = other DNA
acgatatcggtctgggtctttcctgatactgatatttcagatgtatcgcgtgagttaattgctgcaattaaacag

SEQ ID NO: 570769 - DNA, 75 bp, synthetic construct
  source 1..75: mol_type = other DNA
ggtgaattaacagtgaaggcagcaggcgtcagggttaaaagccttgatgttatcgatcctgcacacccaatgttc

SEQ ID NO: 570770 - DNA, 75 bp, synthetic construct
  source 1..75: mol_type = other DNA
gtacagctcgataccctcggtctgtggattgggcgtagtcgtatagtcagccagccaattagcggcgtttatttc

SEQ ID NO: 570771 - DNA, 75 bp, synthetic construct
  source 1..75: mol_type = other DNA
acgcatcacagctgaagtataccggagaggcgcagaaggcgtatgagcgtctgctgacgccgctggagaaatata

SEQ ID NO: 570772 - DNA, 75 bp, synthetic construct
  source 1..75: mol_type = other DNA
cttcgtgacgtgtacggtgataatccggatgcgctggcgaaggccacatctgcactgaagaacacctggtctgcg

SEQ ID NO: 570773 - DNA, 75 bp, synthetic construct
  source 1..75: mol_type = other DNA
ccagtagcgcccgtcgcgaaaagcctctggtggcacttaactgcgcggcgctcaacgaatccttactggaatccg

SEQ ID NO: 570774 - DNA, 75 bp, synthetic construct
  source 1..75: mol_type = other DNA
ggtagaagcgctgaaaaccggggcactggattatctcatcaagccgctggatttcgataacttgcaggcaacgct

SEQ ID NO: 570775 - DNA, 75 bp, synthetic construct
  source 1..75: mol_type = other DNA
ccgcgtactccagcgtcgagacggcggtagaggcactgaaaaccggggcgctggattatctcatcaagccgctgg

SEQ ID NO: 570776 - DNA, 75 bp, synthetic construct
  source 1..75: mol_type = other DNA
tcgccaccttcaaccttgccgatactgccatttgtgtcggtgcggcactgattgtgctggaaggttttttacctt

SEQ ID NO: 570777 - DNA, 75 bp, synthetic construct
  source 1..75: mol_type = other DNA
tttttttcgcgtttttccgagcggaatcgcaaggcgggaaaaagcgttttgcctgtctcttttaaacatctccga

SEQ ID NO: 570778 - DNA, 75 bp, synthetic construct
  source 1..75: mol_type = other DNA
gttcgtctactgcgtgcgattcaggagcgcgaagtccagcgtgtcggtagcaatcagactatctcggttgatgtc

SEQ ID NO: 570779 - DNA, 75 bp, synthetic construct
  source 1..75: mol_type = other DNA
aaaagtcagccagtccttaaaaaaaccgacagaggcgattgaacagagtctgagccgtcaggctgttgccgcgca

SEQ ID NO: 570780 - DNA, 75 bp, synthetic construct
  source 1..75: mol_type = other DNA
atgcctcagaattgcagaaaaccctggaggcagacatgcaaaaaacaagggagcgacatgccgggcgcaagtatg

SEQ ID NO: 570781 - DNA, 75 bp, synthetic construct
  source 1..75: mol_type = other DNA
gccttcgtgacgtgtacggtgataatccggatgcgctggcgaaggccacatctgcactgaagaacacctggtctg

SEQ ID NO: 570782 - DNA, 75 bp, synthetic construct
  source 1..75: mol_type = other DNA
ggattggtgtcggcaacctgtaccgtctgatgcgggggtatgcggatggcggttatgtcggcggtgccggaagtc

SEQ ID NO: 570783 - DNA, 75 bp, synthetic construct
  source 1..75: mol_type = other DNA
cggcgaaaaaggactatgagtcgacgctgaaaaaaccgaagtcgtcaggtgtaaaagtgtcagccggtgaacgtc

SEQ ID NO: 570784 - DNA, 75 bp, synthetic construct
  source 1..75: mol_type = other DNA
aaatgcccgtctggggctggcggcggcaacactgcagtcggatatggaaaaagccggtgaactggcggcaaggga

SEQ ID NO: 570785 - DNA, 75 bp, synthetic construct
  source 1..75: mol_type = other DNA
gtatcggcagcgccattggcggtgctttcggtggtggtgcatctgcttcctcggggacggctattgaggctgcgg

SEQ ID NO: 570786 - DNA, 75 bp, synthetic construct
  source 1..75: mol_type = other DNA
cgcatgcagccctgctggcgcttgaaaccgagctccggacgctggaaaaacacagcggtgcgaatgagaaaatca

SEQ ID NO: 570787 - DNA, 75 bp, synthetic construct
  source 1..75: mol_type = other DNA
tattgcacagaatatggcagcgatgctgaccggcagcgaacagaactggcgtggtttcacccgttctgtgctctc

SEQ ID NO: 570788 - DNA, 75 bp, synthetic construct
  source 1..75: mol_type = other DNA
gagggtatcagatttgagcagaacaacaacgtggtgattcagaacgacggtacgaatggtctgccaggtccacag

SEQ ID NO: 570789 - DNA, 75 bp, synthetic construct
  source 1..75: mol_type = other DNA
ttatcgtgtcatccttaaagcgaagattgcgattaataactgggacggacggaatgattcgcttccagcaattct

SEQ ID NO: 570790 - DNA, 75 bp, synthetic construct
  source 1..75: mol_type = other DNA
gatttatggaaagcggaaagtcagtatgcggtcctgaaagaggccgccacgaaacggcagttatccgggcaggaa

SEQ ID NO: 570791 - DNA, 75 bp, synthetic construct
  source 1..75: mol_type = other DNA
ggggccgcagctgatgaaggcggtgtatgacatggcccgcaagggggcgcaggatgagattcaggcgcagatgcg

SEQ ID NO: 570792 - DNA, 75 bp, synthetic construct
  source 1..75: mol_type = other DNA
atagtggcgcaggagcggcttaaccgcctgcaggatacgtcccaaaaatacgtcacgcagatcggcgagaaaacc

SEQ ID NO: 570793 - DNA, 75 bp, synthetic construct
  source 1..75: mol_type = other DNA
gctttcggaaaactgaccaccgacccgacgtcggggctgactgcgatggcacgccagttccgtaacgtgacggcg

SEQ ID NO: 570794 - DNA, 75 bp, synthetic construct
  source 1..75: mol_type = other DNA
ggattacaacacgctgatggtgtcggcgaaaaaggattatgagtcaacgcagaaaaaaccgaagtcgtcaggtgt

SEQ ID NO: 570795 - DNA, 75 bp, synthetic construct
  source 1..75: mol_type = other DNA
ttgttcctgtcaatattttttctgtaatgcaaatattgcatttatttatagttggattatcttttgttttttcac

SEQ ID NO: 570796 - DNA, 75 bp, synthetic construct
  source 1..75: mol_type = other DNA
ggctatgcggaaggtggttatgtgggcggtgccggaagtccggcgcagatgcggcggacggaaggcattaatttt

SEQ ID NO: 570797 - DNA, 75 bp, synthetic construct
  source 1..75: mol_type = other DNA
atcaggctgtgcggtttgaacagcagcagagtgcgaagcaggctgcaatcagcgcaaaagcccgggggctgacgg

SEQ ID NO: 570798 - DNA, 75 bp, synthetic construct
  source 1..75: mol_type = other DNA
tggcgcgccagttccgtaacgtgacggcagagcagattgcgtatgttgcacagctgcagcgttccggagacgagg

SEQ ID NO: 570799 - DNA, 75 bp, synthetic construct
  source 1..75: mol_type = other DNA
ttctgaagcaggccatggtggggattgtcgggagtattggcagcgccatgggtggtgctttcggtggtggggcgt

SEQ ID NO: 570800 - DNA, 75 bp, synthetic construct
  source 1..75: mol_type = other DNA
gccctcggtagaaacaccgtccgagggaacaaaattctttgggtttgatatggataacgaatacatcgccgggtt

SEQ ID NO: 570801 - DNA, 75 bp, synthetic construct
  source 1..75: mol_type = other DNA
caacagcaggatccggactgcgaatgcagatagtcgataaccaggacatgacgatatcggtctgggtctttcctg

SEQ ID NO: 570802 - DNA, 75 bp, synthetic construct
  source 1..75: mol_type = other DNA
accgaccgtcaggcgcagcgggagtcggaagagcagcgccttcgtgaggtgtacggtgataatccggctgcgctg

SEQ ID NO: 570803 - DNA, 75 bp, synthetic construct
  source 1..75: mol_type = other DNA
gcgcgaacgatgaccgcctggacgcaggatctcatctatgcaggcgatccggttcattatcatggcagtcgcgct

SEQ ID NO: 570804 - DNA, 75 bp, synthetic construct
  source 1..75: mol_type = other DNA
gtggagctgtttgcccgctatccgctgaagaaaatcacagcggaaaagagtacgacggcagtaaaacccggcgta

SEQ ID NO: 570805 - DNA, 75 bp, synthetic construct
  source 1..75: mol_type = other DNA
gggtacgggtgaaaacctggagctggtttgccgatgataaacaggaaatccgtcagggtggttttgccggctggt

SEQ ID NO: 570806 - DNA, 75 bp, synthetic construct
  source 1..75: mol_type = other DNA
ggactcaaccctgtccagtttcaataaaacgctggtcctttccggtaatcaggcaggactgacggcagatcgtat

SEQ ID NO: 570807 - DNA, 75 bp, synthetic construct
  source 1..75: mol_type = other DNA
cgacgtcgggactgatggcgatggcgcgccagttccgtaacgtgacggcagagcagattgcgtatgttgcacaac

SEQ ID NO: 570808 - DNA, 75 bp, synthetic construct
  source 1..75: mol_type = other DNA
gcgcgggtatgcggaaggtggttatgtgggcggtgccggaagtccggcgcagatgcggcgggcggaaggcattag

SEQ ID NO: 570809 - DNA, 75 bp, synthetic construct
  source 1..75: mol_type = other DNA
acgggaaaatcctgcaggcagattacaacacgctgatggcggtggcgaaaaaggactatgaagcgacgctgaaaa

SEQ ID NO: 570810 - DNA, 75 bp, synthetic construct
  source 1..75: mol_type = other DNA
aggccagtgagatggcagcaaaggatcgggctgagtctgaggcgtcacggctgaaatataccgaagaggcgcaga

SEQ ID NO: 570811 - DNA, 75 bp, synthetic construct
  source 1..75: mol_type = other DNA
tatgctcgccagtgcacagaaggcatttgatgaggcggataaaaaatggcagtggtaccagagccggagccagcg

SEQ ID NO: 570812 - DNA, 75 bp, synthetic construct
  source 1..75: mol_type = other DNA
cgcagcaacgcgaggaacgaacatcattgtcgaggaagcggataaaaatacaaccgatagtatgagagtcaatta

SEQ ID NO: 570813 - DNA, 75 bp, synthetic construct
  source 1..75: mol_type = other DNA
ccgatgacacgcaccaaagaactggcagaagtggtggcggcggcaacgccggtgaaggacaaattcaaacatccc

SEQ ID NO: 570814 - DNA, 75 bp, synthetic construct
  source 1..75: mol_type = other DNA
ggcgaagaagaggtggctgagaaccctcgtgcccgtagttcagttctgcgtattgcagagaggacgaacgcatga

SEQ ID NO: 570815 - DNA, 75 bp, synthetic construct
  source 1..75: mol_type = other DNA
ggtgttcccactgacggggcgttatgcgcgccagtttgccgcgcaccgtctggcgctggtgggcgacgccgcgca

SEQ ID NO: 570816 - DNA, 75 bp, synthetic construct
  source 1..75: mol_type = other DNA
agacgaatttaatcgcgcgttaaatatcgcttttgataatcgcctgggcttatgcaaggttgagagtgagcgcct

SEQ ID NO: 570817 - DNA, 75 bp, synthetic construct
  source 1..75: mol_type = other DNA
aattacagcaggtcgcctggggagagaacgaaaccttcctgacgctgaaagacggcagcatgttaacggcgcgtc

SEQ ID NO: 570818 - DNA, 75 bp, synthetic construct
  source 1..75: mol_type = other DNA
atggcaataacccgaaaacgtcgtagtacaggtaaagtcactattgctgatgtcgcgcaactcgcgggagttggc

SEQ ID NO: 570819 - DNA, 75 bp, synthetic construct
  source 1..75: mol_type = other DNA
gaagaagcggtatcgatagaagagtcgtgggttccagtgcatttaattcatgatgttgatgccatcggtatttct

SEQ ID NO: 570820 - DNA, 75 bp, synthetic construct
  source 1..75: mol_type = other DNA
gcttaagcgtattcgctatgtcgatgaagaagcggtatcgattgaggaatcgtgggttccggcgcatttaattca

SEQ ID NO: 570821 - DNA, 75 bp, synthetic construct
  source 1..75: mol_type = other DNA
ggagatagagcaggcgctaaaaagctcactcaacgtgctggccccgggtgggcggctttcgatcatcagcttcca

SEQ ID NO: 570822 - DNA, 75 bp, synthetic construct
  source 1..75: mol_type = other DNA
ccggacattaataaaaaagtacaaaccggtgatggcatcaataatgatgtcgataccaaaaccgacggtactacg

SEQ ID NO: 570823 - DNA, 75 bp, synthetic construct
  source 1..75: mol_type = other DNA
ggttcttcaatgaacaatgacggaatgaccaaagatgaagagcacaagaacaccatgtgcaaagatggtcgctgt

SEQ ID NO: 570824 - DNA, 75 bp, synthetic construct
  source 1..75: mol_type = other DNA
gggataaagacagttttggtcacatctcttttgacgatcaaagcatgggctatagccatcttgggcatattgttg

SEQ ID NO: 570825 - DNA, 75 bp, synthetic construct
  source 1..75: mol_type = other DNA
attacgagcgattaagtcaggaatgcatacttctggcggaattttttcatggcatagtgccgaaaccgccgggat

SEQ ID NO: 570826 - DNA, 75 bp, synthetic construct
  source 1..75: mol_type = other DNA
cgtaccagtactagatgcgttcggtatcgtcgtgatccaagtaccactaggccaacttatgcaagtcttgcttat

SEQ ID NO: 570827 - DNA, 75 bp, synthetic construct
  source 1..75: mol_type = other DNA
ctgcgagatgctcaatgacatgggctatatctcggcaacatggaaagggcgcgaagaaaacacgctgtttattca

SEQ ID NO: 570828 - DNA, 75 bp, synthetic construct
  source 1..75: mol_type = other DNA
gtttttatgaactccctgaagcgggtcaggaagcgatcgttttcacccactttgtggtgcgtgaagacgcgcaac

SEQ ID NO: 570829 - DNA, 75 bp, synthetic construct
  source 1..75: mol_type = other DNA
tctggcaacgctggcaaacaccagcgcgttgttatacgaacgtctggcagacgtaaactgggccggtttttattt

SEQ ID NO: 570830 - DNA, 75 bp, synthetic construct
  source 1..75: mol_type = other DNA
catctttctggcgggattttttcatggcacaaagctgaagccgcagggattgctcggaaacaagaagtaacgagt

SEQ ID NO: 570831 - DNA, 75 bp, synthetic construct
  source 1..75: mol_type = other DNA
atgcatccgtttacctcattaacattgtgggcgctggctgcctgcaccacgcttatcctgcccgcgcagagcatt

SEQ ID NO: 570832 - DNA, 75 bp, synthetic construct
  source 1..75: mol_type = other DNA
gcctggctgatgttttcgctgggggtcgggctgtggctagtgcacggtggctggctgacagaatggataagcgga

SEQ ID NO: 570833 - DNA, 75 bp, synthetic construct
  source 1..75: mol_type = other DNA
tgcttctcgcctgccgccaggcgtcgcttatctgtttgccgggccgttattggtcgttgagcagttaaaacggca

SEQ ID NO: 570834 - DNA, 75 bp, synthetic construct
  source 1..75: mol_type = other DNA
caccagcgaacaggaagcccgccaacaatccccaactggctgcgtgatgatattcgccgcccgtattcgtcagga

SEQ ID NO: 570835 - DNA, 75 bp, synthetic construct
  source 1..75: mol_type = other DNA
cagttgtggatgcaattcgtcccagtgcaacgttttatccgcgctttgtttgcttctcgcctgccgccgggcgtc

SEQ ID NO: 570836 - DNA, 75 bp, synthetic construct
  source 1..75: mol_type = other DNA
cgcatgctattacgctctggttgcggattctggcgattgtttcaacctcgcagttgtggatgcaattcgtcccag

SEQ ID NO: 570837 - DNA, 75 bp, synthetic construct
  source 1..75: mol_type = other DNA
atggccaataataccactggattcactcgaattatcaaagctgctggctattcctggaaggggttacgcgcggca

SEQ ID NO: 570838 - DNA, 75 bp, synthetic construct
  source 1..75: mol_type = other DNA
gcaggtgctggaacaccgggggatggggaccagataatgaagaaaaagcccgtcatcaggaggtttagcaacaac

SEQ ID NO: 570839 - DNA, 75 bp, synthetic construct
  source 1..75: mol_type = other DNA
accattgcctcagggattgcgggcgggcttgccggcaacagtacgacgtctgccggtacgggtgcacaggcaggc

SEQ ID NO: 570840 - DNA, 75 bp, synthetic construct
  source 1..75: mol_type = other DNA
ggccggggcatgtgctgaatggcgacaatacagacgaaaacaaacagccgaatctgggcaaagacgtagcgagcg

SEQ ID NO: 570841 - DNA, 75 bp, synthetic construct
  source 1..75: mol_type = other DNA
gcgcaattggcgcgggtactggcgaagtgatcgcgtcagccattgcgaaaagcctctacccggacgtagatccgt

SEQ ID NO: 570842 - DNA, 75 bp, synthetic construct
  source 1..75: mol_type = other DNA
ggctggaaaatctgcctgccgctgacgctgatcaacttgctggtaacggcggctgccattctctggcaggcgcaa

SEQ ID NO: 570843 - DNA, 75 bp, synthetic construct
  source 1..75: mol_type = other DNA
tatcgaaaggttacagtagatgggcgacaatatgcacaaataggtcatcgtttgtattcacaacatgctgttgat

SEQ ID NO: 570844 - DNA, 75 bp, synthetic construct
  source 1..75: mol_type = other DNA
tctgttattatattcataatgaggataaaccttccttaggttttggtccaacatccaataattggttaagccaat

SEQ ID NO: 570845 - DNA, 75 bp, synthetic construct
  source 1..75: mol_type = other DNA
gaccttatattacacaatcatcccaggatgaaaacaatcactttaaacgacaaccatattgcacatttaaacacc

SEQ ID NO: 570846 - DNA, 75 bp, synthetic construct
  source 1..75: mol_type = other DNA
tattcataatgaggataaaccttccttaggttatggttcaacacccaataattggttaagccaatccttttctac

SEQ ID NO: 570847 - DNA, 75 bp, synthetic construct
  source 1..75: mol_type = other DNA
atgctgaacgtgatagccactgaaacagcagctaatacggcagcagcaatagctggtgctacaggtaatgccagt

SEQ ID NO: 570848 - DNA, 75 bp, synthetic construct
  source 1..75: mol_type = other DNA
ggtatctacgttttctggtcgaaaggcaatgaggcgacggtctataagcgtgaccgcattgtcttgaataactgt

SEQ ID NO: 570849 - DNA, 75 bp, synthetic construct
  source 1..75: mol_type = other DNA
gtcagttttgtttacgataatcaattgctgcatctcaagcagggcatctccgcttctggcgcgcgttataccgat

SEQ ID NO: 570850 - DNA, 75 bp, synthetic construct
  source 1..75: mol_type = other DNA
gcttgcccaaccattcgtaccaccaacgatatgccgattgtcgatccgcaaggtttcgatgcgctaaatctgttc

SEQ ID NO: 570851 - DNA, 75 bp, synthetic construct
  source 1..75: mol_type = other DNA
acacccttgttcgagtataaaataaattataaatgtaatgagattgaacaagagcttattgaagagtacaataat

SEQ ID NO: 570852 - DNA, 75 bp, synthetic construct
  source 1..75: mol_type = other DNA
tggacaccggtcgatcaatctaaaacccagaccactcaactggcgaccggcggccaacaactgaacgttcccggc

SEQ ID NO: 570853 - DNA, 75 bp, synthetic construct
  source 1..75: mol_type = other DNA
caaaaatgctgtcgcgaagggggatgttgataaggcattaaagctgcttgatgaagccgaacgtctgggatcgac

SEQ ID NO: 570854 - DNA, 75 bp, synthetic construct
  source 1..75: mol_type = other DNA
tccgcagcggtgctgatcgcgattatcgtcgctgtggcaacctgggtcattctgttatggtcacattttggataa

SEQ ID NO: 570855 - DNA, 75 bp, synthetic construct
  source 1..75: mol_type = other DNA
aagcaatattggtgaacttgcacaggttgctacaggtaaaacgcctaaaagaacagatgatagatattgggaaaa

SEQ ID NO: 570856 - DNA, 75 bp, synthetic construct
  source 1..75: mol_type = other DNA
ttgatgattccggagagaaggctggcgctatttacttctcttcagctttcttattatgaaaaaaatatccgggaa

SEQ ID NO: 570857 - DNA, 75 bp, synthetic construct
  source 1..75: mol_type = other DNA
ctactccagcgatttaccgctattactgctgcctccgcatcaacaaacccgactgtgggaagcctttttggcctg

SEQ ID NO: 570858 - DNA, 75 bp, synthetic construct
  source 1..75: mol_type = other DNA
ggaacatgcgctgccgctgattgctgaacagttgcagggtcgccgttcagcggtatttattcctttcgctggcgt

SEQ ID NO: 570859 - DNA, 75 bp, synthetic construct
  source 1..75: mol_type = other DNA
aggtgaaacccgtgagcagcgtattcgcgaactgctggtcgtcgcgccagaactgacgattattggtctgccgga

SEQ ID NO: 570860 - DNA, 75 bp, synthetic construct
  source 1..75: mol_type = other DNA
cgggcaacaactgaacgtccctggcatcagcggttcagtcgccgcatacagcgtcccggcaaacattggcgagct

SEQ ID NO: 570861 - DNA, 75 bp, synthetic construct
  source 1..75: mol_type = other DNA
agcagttatttcacctaccaggaacccggcgtgatgagtgcagatcgtctggaaggcgttatgcgcctgacaccg

SEQ ID NO: 570862 - DNA, 75 bp, synthetic construct
  source 1..75: mol_type = other DNA
gttggtggggccgttgtttggttcttctgctccagctccggttacggtaggcaacactgcggcaccggcgaccta

SEQ ID NO: 570863 - DNA, 75 bp, synthetic construct
  source 1..75: mol_type = other DNA
cttcaacgtgaaggcagcaaagaaaatattagctggcaatatgagcaatgttcagcagagtggcatgaagacatt

SEQ ID NO: 570864 - DNA, 75 bp, synthetic construct
  source 1..75: mol_type = other DNA
gacgaaaacggcgaaactaaaacctggactggccaaggccgtactccagctgtaatcaaaaaagcaatggatgag

SEQ ID NO: 570865 - DNA, 75 bp, synthetic construct
  source 1..75: mol_type = other DNA
tcttgataagtacaattataactttaagactgaaagggaggttaagaagatttatagtgataatgcaataaaaaa

SEQ ID NO: 570866 - DNA, 75 bp, synthetic construct
  source 1..75: mol_type = other DNA
ggtggtcgctggcagattttcattctttgttcgttaatcatccctttacccggctggttgctcagcgactgatat

SEQ ID NO: 570867 - DNA, 75 bp, synthetic construct
  source 1..75: mol_type = other DNA
cgtagcaaatcgctgggaaatacccgcgctgtggcctgctctggaacagcctctgacacaaaaccctctggataa

SEQ ID NO: 570868 - DNA, 75 bp, synthetic construct
  source 1..75: mol_type = other DNA
ggcatccaaaagagatatttcccctgctaatgaattatggcgcaaccgaactggcgctgcccgtcgcccgcgtct

SEQ ID NO: 570869 - DNA, 75 bp, synthetic construct
  source 1..75: mol_type = other DNA
gcgctaacgcagatctggcggcggccatttccagtgaagcggagagctacgcatacagccgggcttatgacgacg

SEQ ID NO: 570870 - DNA, 75 bp, synthetic construct
  source 1..75: mol_type = other DNA
acgtggcgctggcgctggttccgttcgctggagaagcaaaggcggcttctgtgcttggccgatttggcgagcgat

SEQ ID NO: 570871 - DNA, 75 bp, synthetic construct
  source 1..75: mol_type = other DNA
cccgcggcgagatccccgacgacctgaaagtcaccatttccgagcgtgcgcagcagatcctggacggcatgcaga

SEQ ID NO: 570872 - DNA, 75 bp, synthetic construct
  source 1..75: mol_type = other DNA
caagatccggtggtgctatttaccaaacagttcctcctgaatcgcgttcggtgtgactatgatcattttcggtga

SEQ ID NO: 570873 - DNA, 75 bp, synthetic construct
  source 1..75: mol_type = other DNA
gatgctacaggtaaagtgacatttaaaaatgtcggcagcaattgggaaaggattacggcgacgccaaaatcagga

SEQ ID NO: 570874 - DNA, 75 bp, synthetic construct
  source 1..75: mol_type = other DNA
tcttaccattaagtcgtgctgaaaattattgtaataacgagatcggcaacggttacgcgattcctggcgtgaatc

SEQ ID NO: 570875 - DNA, 75 bp, synthetic construct
  source 1..75: mol_type = other DNA
cgaatgacagcaaaggccattttgttacggcgaaagaagcagcgaagcacaaccgccatgtgtgtcctgtggatg

SEQ ID NO: 570876 - DNA, 75 bp, synthetic construct
  source 1..75: mol_type = other DNA
ggcacttacgggcagtattttaactctgatgagccgtccctgcgggatgacgcaaaaatggtggtgctggagctg

SEQ ID NO: 570877 - DNA, 75 bp, synthetic construct
  source 1..75: mol_type = other DNA
tcctggctggccaaagagaacagagcacgtattgatgacgtggtggatttcctgaaaaacgccagtgacagcgag

SEQ ID NO: 570878 - DNA, 75 bp, synthetic construct
  source 1..75: mol_type = other DNA
tgacggcccggattttgagtttgtgcagcagaagcgtaaagaggggctgagtattcatgaggcagtgtggcagct

SEQ ID NO: 570879 - DNA, 75 bp, synthetic construct
  source 1..75: mol_type = other DNA
attaaacgcgattttccccattccgtcgccagacttaccggcgcatattccctgacgatgggcgctgcagcggct

SEQ ID NO: 570880 - DNA, 75 bp, synthetic construct
  source 1..75: mol_type = other DNA
agttctgcgcatcaggcggcggcactctcggggatggcacaatccgtcgggtatttgctggcagcctgtgggccg

SEQ ID NO: 570881 - DNA, 75 bp, synthetic construct
  source 1..75: mol_type = other DNA
attttaactctgatgaaccgtccctgcgggatgatgcgaaaatggtggtgctggagctgggtggactggaagacc

SEQ ID NO: 570882 - DNA, 75 bp, synthetic construct
  source 1..75: mol_type = other DNA
ccgctcaggacgccagcacggggcgaaaaggtcttgttcagctaagtagtgccatcaacagcgaatctgagacgc

SEQ ID NO: 570883 - DNA, 75 bp, synthetic construct
  source 1..75: mol_type = other DNA
gcctgggcactcgtgttgttcagaccatgcagaaaggggttatgtatgagaaagcagggcacgtaattacagggc

SEQ ID NO: 570884 - DNA, 75 bp, synthetic construct
  source 1..75: mol_type = other DNA
tcagcgaaatacagataactcggtgacatttgctgtaaacggtcagatacaaccaagcaactggggtaacattga

SEQ ID NO: 570885 - DNA, 75 bp, synthetic construct
  source 1..75: mol_type = other DNA
tcctcctacaaaattatcctcaaacagagtgcgaaggagttcgcaaaatacaaccagctgtatccggaccagttc

SEQ ID NO: 570886 - DNA, 75 bp, synthetic construct
  source 1..75: mol_type = other DNA
gccggcctgaacgcgttaacggcaaatgggagactaactcagccagccgcgcaaacttccagagtgttgattact

SEQ ID NO: 570887 - DNA, 75 bp, synthetic construct
  source 1..75: mol_type = other DNA
tcgcagcaacgccgaaggcagttaagacagcatatgaccttgctaatggcaaatacaccgcgcaggacgccacca

SEQ ID NO: 570888 - DNA, 75 bp, synthetic construct
  source 1..75: mol_type = other DNA
tgcgcactgagctgacgaccaataaccggcaaagtgaagcgcttgacgctacgctggcgcagcgcacgacggagt

SEQ ID NO: 570889 - DNA, 75 bp, synthetic construct
  source 1..75: mol_type = other DNA
gtgaactgcgtgaccgtagccgtactgtcgatgagctgaaccgtactatcgatcagctgtgccgtgaaaacgaca

SEQ ID NO: 570890 - DNA, 75 bp, synthetic construct
  source 1..75: mol_type = other DNA
agtgcatctgcacaacgagaagggcgatgaagtgacggaagtgaaacgcgactacaaaggcgacgatccgacacc

SEQ ID NO: 570891 - DNA, 75 bp, synthetic construct
  source 1..75: mol_type = other DNA
tgaccgccacgggttatttctacaccacgctgcgcctctccgggcgttggattgaaaccgtttatttggtgatca

SEQ ID NO: 570892 - DNA, 75 bp, synthetic construct
  source 1..75: mol_type = other DNA
tggccgatgtgccgcgaaagctggcgcgataaagagtcgcacaccatgcgactggtcaccattaccgtgctgtcg

SEQ ID NO: 570893 - DNA, 75 bp, synthetic construct
  source 1..75: mol_type = other DNA
agtcaaaaactggctggagcgtgcgctgcaatcggaacgcaatattaaagagcagattgccgttctgaagggcag

SEQ ID NO: 570894 - DNA, 75 bp, synthetic construct
  source 1..75: mol_type = other DNA
agcaacgtgattacgtgacggcgaacagcgcgcgtctggagcaccagttgcaattgttgcaagaagcggtaaata

SEQ ID NO: 570895 - DNA, 75 bp, synthetic construct
  source 1..75: mol_type = other DNA
gccaccctcgataaaatcgatcgcataaaagaagagacagttcagctacggcaaaaagtcgctgaagcgccggaa

SEQ ID NO: 570896 - DNA, 75 bp, synthetic construct
  source 1..75: mol_type = other DNA
ccggcaagcccggcaaccgacgatgccgaacaggaagctgttgctgcgctggtggcgctgggctataaaccacaa

SEQ ID NO: 570897 - DNA, 75 bp, synthetic construct
  source 1..75: mol_type = other DNA
tactgtatggttttaacaacaaacaagagcgcacgttatttaaagagttgatcaaaactaacggcgtgggaccga

SEQ ID NO: 570898 - DNA, 75 bp, synthetic construct
  source 1..75: mol_type = other DNA
cagtgctcgtctggaacaccagttgcaactgttgcaagaagcggtaaacagtaagcgcctgaccttaaccgaaaa

SEQ ID NO: 570899 - DNA, 75 bp, synthetic construct
  source 1..75: mol_type = other DNA
ttttgctgaatgctgagattgaccagcaacgaaaaagcctggaagggaacaccgtcttacaggataccttgcaaa

SEQ ID NO: 570900 - DNA, 75 bp, synthetic construct
  source 1..75: mol_type = other DNA
gcgctgttcggtgtcatgttctgggcaatttggtccgatttgatcaccgtgttcagctatctcgacagcatcacg

SEQ ID NO: 570901 - DNA, 75 bp, synthetic construct
  source 1..75: mol_type = other DNA
gggctgcactacaatctgcacaggtactatgatccggatgtcgggcggttcatggtaacggacccgatagggctg

SEQ ID NO: 570902 - DNA, 75 bp, synthetic construct
  source 1..75: mol_type = other DNA
cgggttttgcgtcagacaggtatcaacgtgattacgcgtattatggggttgttgttgatggcgttgggtattgaa

SEQ ID NO: 570903 - DNA, 75 bp, synthetic construct
  source 1..75: mol_type = other DNA
tcagctcaaccatcgtttgggggactcgttatcacagcattagctatctgtttggtttctttgtggcaatagcgc

SEQ ID NO: 570904 - DNA, 75 bp, synthetic construct
  source 1..75: mol_type = other DNA
atgctgtcaaaaggcgtattgtcagcgcgtcttttcaaccttatttatggctaccattatccggcttttgcttcg

SEQ ID NO: 570905 - DNA, 75 bp, synthetic construct
  source 1..75: mol_type = other DNA
ggtgtggcatttgagagaagtggttaataccacctataacttgtgggattacggctatggtgcattctggccgga

SEQ ID NO: 570906 - DNA, 75 bp, synthetic construct
  source 1..75: mol_type = other DNA
caacaagcgcgctttggcgggaaggttatcaacgttatcaatggcaaaacggatacgttgttagaaatcgctgta

SEQ ID NO: 570907 - DNA, 75 bp, synthetic construct
  source 1..75: mol_type = other DNA
actcaaagcacagtccgctgtaacaggttgctcaatgattcaggtgctaagcgctaaggttcatcaattagcgga

SEQ ID NO: 570908 - DNA, 75 bp, synthetic construct
  source 1..75: mol_type = other DNA
ccatcgtcggctacagcctcggaccacaattccgcgcccgtctgggcgcggctcgtgggattgccgcttcattga

SEQ ID NO: 570909 - DNA, 75 bp, synthetic construct
  source 1..75: mol_type = other DNA
gaggcgggttaaacttatatcagtatgggccgaatccgctgtcatggatagatccccttggattaagtggtagcg

SEQ ID NO: 570910 - DNA, 75 bp, synthetic construct
  source 1..75: mol_type = other DNA
acgacctcaaccacctaaaaatccgccactaaatgcaactccagaacagttgaaaaagtggagagaaaaatggag

SEQ ID NO: 570911 - DNA, 75 bp, synthetic construct
  source 1..75: mol_type = other DNA
gcgaaacaaaaccaatttgacggccaacctgtcggtagcgattattttgtggatatcgctttttcttggcgacac

SEQ ID NO: 570912 - DNA, 75 bp, synthetic construct
  source 1..75: mol_type = other DNA
gttgcagagggttctaaggccatcagaatcacaacgggccaactggaactactcaaagcacagtccgcagtagca

SEQ ID NO: 570913 - DNA, 75 bp, synthetic construct
  source 1..75: mol_type = other DNA
tggttttatccgctcacggataaaaaattcaaagaaatcgtggttgaaattgataatcgtaaaaaagtgcagcag

SEQ ID NO: 570914 - DNA, 75 bp, synthetic construct
  source 1..75: mol_type = other DNA
tatttgtacgcaatgaactaataccattgcaaaaaagatttgaagagttaaatgtttggttaaaagaaaaagtga

SEQ ID NO: 570915 - DNA, 75 bp, synthetic construct
  source 1..75: mol_type = other DNA
gaaccgattcggtgaagttatcgcccttgagcctactctggcaaaatacacccgacgcggattagacctggatac

SEQ ID NO: 570916 - DNA, 75 bp, synthetic construct
  source 1..75: mol_type = other DNA
tcatcatgtatatgaccgatgccgcgcagaatcaggaggatgtgaacaatctccgcaacgcgatgaaaagtgcca

SEQ ID NO: 570917 - DNA, 75 bp, synthetic construct
  source 1..75: mol_type = other DNA
tacattaacggcagccacgcaggcttcatcatgtacatgaccgacgccgcgcagaatcaggaggatgtgaacaac

SEQ ID NO: 570918 - DNA, 75 bp, synthetic construct
  source 1..75: mol_type = other DNA
actgcaaaagcatatacaagaagtaaataaatggcttggtaaagttattataaaattcgaatcatatagctttcc

SEQ ID NO: 570919 - DNA, 75 bp, synthetic construct
  source 1..75: mol_type = other DNA
gtttatgtactcgcccaacggcaaaaaggacggacttcagatcattcctctgtcagaagtcgcggcgaaggatga

SEQ ID NO: 570920 - DNA, 75 bp, synthetic construct
  source 1..75: mol_type = other DNA
gctgcaaaagcggctgcaggagctgaattactggctaggtaaagaggtgatccgcttcgagccctacacgctggg

SEQ ID NO: 570921 - DNA, 75 bp, synthetic construct
  source 1..75: mol_type = other DNA
ctactggtttgtgcaatacagcctgacgacacagccgtatcagttcacaaaaggtaacgtcttccacctgatgga

SEQ ID NO: 570922 - DNA, 75 bp, synthetic construct
  source 1..75: mol_type = other DNA
ttcagctttggtgatcccattcctgtactggaccgccgcgaactgctggactatgtggaatgcgtacagacggat

SEQ ID NO: 570923 - DNA, 75 bp, synthetic construct
  source 1..75: mol_type = other DNA
gagtgccgccgcaaatgatggggataatgccgaataatgttgggggatttggggatgtggagaaggctagtaagg

SEQ ID NO: 570924 - DNA, 75 bp, synthetic construct
  source 1..75: mol_type = other DNA
cctacctggagaaacgcacgaaccgcttcggtgaagttatcgcccttgaaccggccctggcaaaatacacccgac

SEQ ID NO: 570925 - DNA, 75 bp, synthetic construct
  source 1..75: mol_type = other DNA
ttttaacgattattgctcttgctgctgtttttttcttgtctgaagataaaggtccggcatgctatcaggtcagcg

SEQ ID NO: 570926 - DNA, 75 bp, synthetic construct
  source 1..75: mol_type = other DNA
atgcaaaaaattctacggatcatggccgttagcgcggtcttttgggttggttcggtatcggctgaccctgggtgc

SEQ ID NO: 570927 - DNA, 75 bp, synthetic construct
  source 1..75: mol_type = other DNA
acggttcggtagttatgaaccgccccgggtttcctggagagtgttttatctgtgaactcaggctgccagatcatc

SEQ ID NO: 570928 - DNA, 75 bp, synthetic construct
  source 1..75: mol_type = other DNA
caccattttgcgcaataacagaaaacatgctctatacatgggcgaataagcagggtattccaacgcaaagtagta

SEQ ID NO: 570929 - DNA, 75 bp, synthetic construct
  source 1..75: mol_type = other DNA
atgaatttagaagatcatcactatggcgaagaagtatcagaaattacacttgatggcgttaccccatttgggaac

SEQ ID NO: 570930 - DNA, 75 bp, synthetic construct
  source 1..75: mol_type = other DNA
atgcggaaaattcaatttatccttggaatactggcggctgcgtcatcttctgctacacttgcttatgacggtaca

SEQ ID NO: 570931 - DNA, 75 bp, synthetic construct
  source 1..75: mol_type = other DNA
atgctctatacatgggcgaataagcagggtattccaacgcaaagtagtagcgtcacactttataccctcctgcgc

SEQ ID NO: 570932 - DNA, 75 bp, synthetic construct
  source 1..75: mol_type = other DNA
tcatcatgtacatgaccgatgccgcgcagaaccaggaggacgtgaacaacctccgcaatgcgatgaaaagcgcca

SEQ ID NO: 570933 - DNA, 75 bp, synthetic construct
  source 1..75: mol_type = other DNA
aaggacgggcttcagatcatcccgttgtcagaagtcgcggcgaaggatgagtttctgaatatcaaaaatgtcagt

SEQ ID NO: 570934 - DNA, 75 bp, synthetic construct
  source 1..75: mol_type = other DNA
ccagtacctatatccctcatcctctgctcagccagcaggctttttcgcgttttgtgcaggactatctggtatttg

SEQ ID NO: 570935 - DNA, 75 bp, synthetic construct
  source 1..75: mol_type = other DNA
aaagcgactgcaggagctgaacgactggctgggtgcagaagtaatacgttttgatgactatgttttaggtgctca

SEQ ID NO: 570936 - DNA, 75 bp, synthetic construct
  source 1..75: mol_type = other DNA
cctgtttatgtactctcctaacggcaaaaaggacgggcttcagattatcccgttgtcagaagtcgcggcgaagga

SEQ ID NO: 570937 - DNA, 75 bp, synthetic construct
  source 1..75: mol_type = other DNA
gtccgccacactgttccgccgtaagtattacatcaacggcagccatgcaggtttcatcatgtacatgaccgatgc

SEQ ID NO: 570938 - DNA, 75 bp, synthetic construct
  source 1..75: mol_type = other DNA
gcgccagttccgtaacgtgacggcagagcagattgcgtatgttgcgcagctgcagcgttccggagatgaggccgg

SEQ ID NO: 570939 - DNA, 75 bp, synthetic construct
  source 1..75: mol_type = other DNA
gcgtttgagcagctaggcgttcccgtgcgggaaggcaaagaggtggctgtagatgccattttcgactctgtttcg

SEQ ID NO: 570940 - DNA, 75 bp, synthetic construct
  source 1..75: mol_type = other DNA
tagtgaaaatcatgccgacggcaaccaatgcgcgcaatttcactcagtgcgactcaatgctgattggcgctaatt

SEQ ID NO: 570941 - DNA, 75 bp, synthetic construct
  source 1..75: mol_type = other DNA
gtcagcgattacgtggaaatatcccagctgcattttgcgcggcgataactccattggtgagttttactcagtggc

SEQ ID NO: 570942 - DNA, 75 bp, synthetic construct
  source 1..75: mol_type = other DNA
aacttcacccagtgcgactcaatgctgattggcgctaactgtggggcgcataccttcccgtatgtcgagtgtcgt

SEQ ID NO: 570943 - DNA, 75 bp, synthetic construct
  source 1..75: mol_type = other DNA
cgcgccttcatgtggtaactgcgatgacacctgtgtttctgaaccgggcgcggtgcaacaaaccggcgcaaacgc

SEQ ID NO: 570944 - DNA, 75 bp, synthetic construct
  source 1..75: mol_type = other DNA
aacgccgaggtgaaatattccacggtacaaaactggttccctggcgataacaacaccggcggtattctcaacttc

SEQ ID NO: 570945 - DNA, 75 bp, synthetic construct
  source 1..75: mol_type = other DNA
gtactgtcacccgaattgagtttatccgttcagagccgcaccatttgtttgatgagcaggttgtaaaggcgatgg

SEQ ID NO: 570946 - DNA, 75 bp, synthetic construct
  source 1..75: mol_type = other DNA
taacctgcataaaattggtgcaggtacgctgaatgttaatgtttctcaaggtaataatctgaaaactggcaatgg

SEQ ID NO: 570947 - DNA, 75 bp, synthetic construct
  source 1..75: mol_type = other DNA
attacacagtcactggtaataataaaaccttcaaaggtgccgggctggatattggtgaaaatactacagttgact

SEQ ID NO: 570948 - DNA, 75 bp, synthetic construct
  source 1..75: mol_type = other DNA
ccgttcagagccgcaccatctgtttgatgagcaggttgtaaaggcgatggcaaaatggcgatttgagaaggacag

SEQ ID NO: 570949 - DNA, 75 bp, synthetic construct
  source 1..75: mol_type = other DNA
aatgcctaataatgtcggggggtttggggatgtggagaaagccagtcgcgtatttgtacgtaatgaattaacgcc

SEQ ID NO: 570950 - DNA, 75 bp, synthetic construct
  source 1..75: mol_type = other DNA
ttctggaccgccgcgaactgctggactatgtggaatgcgtacagatggatcgttggtatgagccgcctgtgagtt

SEQ ID NO: 570951 - DNA, 75 bp, synthetic construct
  source 1..75: mol_type = other DNA
gcgtttgagcagttgggcgttcccgtgcgggaaggcaaagaggtggcggtggatgccattttcgactctgtttcg

SEQ ID NO: 570952 - DNA, 75 bp, synthetic construct
  source 1..75: mol_type = other DNA
tgtgggggcagttccggcactcgccgcgttgatatggtcaatcatcatattccgccgctggcctgtggcacttga

SEQ ID NO: 570953 - DNA, 75 bp, synthetic construct
  source 1..75: mol_type = other DNA
ttattggcagcgtgattttcggtaaactgggcaatcagtatgcgtctacgttggtgagtacggcgattgcgctgt

SEQ ID NO: 570954 - DNA, 75 bp, synthetic construct
  source 1..75: mol_type = other DNA
agcgagcacaggcattgagtttaattgccaccggtacagcactggcgatggtcttaggtttacctctcgggcgca

SEQ ID NO: 570955 - DNA, 75 bp, synthetic construct
  source 1..75: mol_type = other DNA
cgcagcagatgaagcacctacgataaccagaaaaaaaaactccccggctgccgtgatcgcaaaagccagtgctga

SEQ ID NO: 570956 - DNA, 75 bp, synthetic construct
  source 1..75: mol_type = other DNA
atggataacttagctctttatgtggaaaacatgtttaagataatgggtgatcaatttgaacgtcatctttatgat

SEQ ID NO: 570957 - DNA, 75 bp, synthetic construct
  source 1..75: mol_type = other DNA
tggtatgaaccgccggtcagttttgccgggctggcacgtacctaccgcgctgccgtgcatcacagttcaccaatt

SEQ ID NO: 570958 - DNA, 75 bp, synthetic construct
  source 1..75: mol_type = other DNA
aaccaccaggccagaaatatggatgatgtacagagcttaggcgtgatttatatcaatcataacttcgccactgaa

SEQ ID NO: 570959 - DNA, 75 bp, synthetic construct
  source 1..75: mol_type = other DNA
gatccacgatcacccggaactggtgcgtaaatatctcggcaccgtggtgccggggaatgacaacttctttgccgc

SEQ ID NO: 570960 - DNA, 75 bp, synthetic construct
  source 1..75: mol_type = other DNA
ccgtgtttcatctgctggagccggatattaatcaggagctgtacggcctgccggaatatctcagcgcccttaact

SEQ ID NO: 570961 - DNA, 75 bp, synthetic construct
  source 1..75: mol_type = other DNA
gccgctgcagaagcgactgcaggagcttaacgactggctgggcgaagaagtgatccgctttgagccctacacctt

SEQ ID NO: 570962 - DNA, 75 bp, synthetic construct
  source 1..75: mol_type = other DNA
ccgcctgctcagccagcaggcttttgcccgtttcgtccaggactatctggtgttcggtaacgcctatctggaaaa

SEQ ID NO: 570963 - DNA, 75 bp, synthetic construct
  source 1..75: mol_type = other DNA
ttctcgattgcagtggaggcgatctcggaaatcatgacctggcgcaggcatttttacaggttctgcgcggtgaag

SEQ ID NO: 570964 - DNA, 75 bp, synthetic construct
  source 1..75: mol_type = other DNA
gccgttctgccaatgaacgaatataaaaaaatagatgatttcaacacgccgtggctggaagtacaggatttttta

SEQ ID NO: 570965 - DNA, 75 bp, synthetic construct
  source 1..75: mol_type = other DNA
gaagctcaacgcgaagaagagcgcggtagcgcttccggagacgcgtaagttcctgggttacagcttcaggagggg

SEQ ID NO: 570966 - DNA, 75 bp, synthetic construct
  source 1..75: mol_type = other DNA
aaatccatttgcagatggtgtgcggcatatgccaatttggaacatggaaattcatcagaaccgatagattttatg

SEQ ID NO: 570967 - DNA, 75 bp, synthetic construct
  source 1..75: mol_type = other DNA
agaatacgaatttaacgatgagcaactatggaatgaggtgaataacttgatgattgattataaaaataataaaaa

SEQ ID NO: 570968 - DNA, 75 bp, synthetic construct
  source 1..75: mol_type = other DNA
cgcatccagaccgaactcaataagagaggctttcagatttttgatctgaatgaaggttctgacacctataacgtg

SEQ ID NO: 570969 - DNA, 75 bp, synthetic construct
  source 1..75: mol_type = other DNA
cgggttccttgccaaccgggtgtgtggagagaagctgccacaggtgtaccgggctctgggggtggataaaccgga

SEQ ID NO: 570970 - DNA, 75 bp, synthetic construct
  source 1..75: mol_type = other DNA
gacagccggagggcggaatacggcacgctacctgggacgttatctgaaaaagccaccgatagcggcctcccggct

SEQ ID NO: 570971 - DNA, 75 bp, synthetic construct
  source 1..75: mol_type = other DNA
ctggcactgtggatgtcggcggtgatgttggtaccaaatttcgctggggtcaacatgatgattttcttgcatcct

SEQ ID NO: 570972 - DNA, 75 bp, synthetic construct
  source 1..75: mol_type = other DNA
actggccggaactgaaagcgcaactgctgtccggcagctaccgcccatcccctgtaagaagagtgactatcccga

SEQ ID NO: 570973 - DNA, 75 bp, synthetic construct
  source 1..75: mol_type = other DNA
cagtgatacaagcccgggaacatatcggggccgggtatcactgggtggtcgacctcgatctggagaagttcttcg

SEQ ID NO: 570974 - DNA, 75 bp, synthetic construct
  source 1..75: mol_type = other DNA
cgttctgaaaatgaccgatgaagccggtgaagatgcgaaactgattgccgttccgcatagcaagctgagcaaaga

SEQ ID NO: 570975 - DNA, 75 bp, synthetic construct
  source 1..75: mol_type = other DNA
tttgccccgctgaatctactggcgaaacagtacaccgtgccggggccgtttgatgcgatcttctgtcgtaacgtc

SEQ ID NO: 570976 - DNA, 75 bp, synthetic construct
  source 1..75: mol_type = other DNA
gattttatattgtctgccgaaatcgtcgccatcacgctggggattgtggcagaagcgccgttgcttaatcaggtg

SEQ ID NO: 570977 - DNA, 75 bp, synthetic construct
  source 1..75: mol_type = other DNA
ggtgaagatcccacaaattggtcgcgtaattattggcgatcgcgtggagatcggcgcatgtaccactatcgatcg

SEQ ID NO: 570978 - DNA, 75 bp, synthetic construct
  source 1..75: mol_type = other DNA
ggtggcgtcattatggcgggcagcctgaaaattggtcgttactgcatgatcggcggagccagcgtaatcaacggg

SEQ ID NO: 570979 - DNA, 75 bp, synthetic construct
  source 1..75: mol_type = other DNA
atgctctcagaaatattgatatagataggctttcatcagttacttattttagtgcggcacataatcaactaaata

SEQ ID NO: 570980 - DNA, 75 bp, synthetic construct
  source 1..75: mol_type = other DNA
ttggtagagagtggttttcttatacggatgaattacgtgaatttatcaataccctgaacacctctgcaatcagaa

SEQ ID NO: 570981 - DNA, 75 bp, synthetic construct
  source 1..75: mol_type = other DNA
cgccagccagacgcttctcttataaagaagcggcgattctgcaagggtttagtaaagaatataccaatcatggtg

SEQ ID NO: 570982 - DNA, 75 bp, synthetic construct
  source 1..75: mol_type = other DNA
tatctggtgaaagcggggtggtcacgttcgcggatggaagcgaagccgtatttgcctgtaacgcacaggtagcgg

SEQ ID NO: 570983 - DNA, 75 bp, synthetic construct
  source 1..75: mol_type = other DNA
aggcgcgttgctcatgctgatgtgttttcctctgctggctctttttttatggctgccacagtggcgaagtcaaca

SEQ ID NO: 570984 - DNA, 75 bp, synthetic construct
  source 1..75: mol_type = other DNA
agtcgcaccttatgctgatgatacagagccatacgtgtacacaagttacgacgagtctatagagaaatatcgaat

SEQ ID NO: 570985 - DNA, 75 bp, synthetic construct
  source 1..75: mol_type = other DNA
agactgaaccggaatcaatgccggtacgccattcggtacacagcgcacaacaaggcaagggtggttgtgggaaat

SEQ ID NO: 570986 - DNA, 75 bp, synthetic construct
  source 1..75: mol_type = other DNA
tgccgacatgctggaaaactacaagaccttcgatgaggccattgaagataaatcattatctattatggttcgcca

SEQ ID NO: 570987 - DNA, 75 bp, synthetic construct
  source 1..75: mol_type = other DNA
cacgcgaggaaaatagacgacatttttggttataatgtcccactctggaattatagaagaaataaagaaggcgta

SEQ ID NO: 570988 - DNA, 75 bp, synthetic construct
  source 1..75: mol_type = other DNA
ctgcttctgaaagcgtggtcagaggggatggcgatgccggagtcgttgtcacatatcacgacggaatcacagtgg

SEQ ID NO: 570989 - DNA, 75 bp, synthetic construct
  source 1..75: mol_type = other DNA
cattttcctgatgcgctaattataaatattagtcaccgaataaatcttctggagtgttccgattgtgtttatgta

SEQ ID NO: 570990 - DNA, 75 bp, synthetic construct
  source 1..75: mol_type = other DNA
agcggcaaaagcggatacttacctgaaaccgaaatcgttcaccattgacgtctctaagtgccaggctgctaatgg

SEQ ID NO: 570991 - DNA, 75 bp, synthetic construct
  source 1..75: mol_type = other DNA
agcctcgcttgaagcggcgcaggctatggttacggcctatggtatgaataatctgaatgtcgcgcctgcactgag

SEQ ID NO: 570992 - DNA, 75 bp, synthetic construct
  source 1..75: mol_type = other DNA
tcacgagctggcgggaacggtggcaataaagatgccccgccaacaccgcaggagcgaaagctacagggcaaaggc

SEQ ID NO: 570993 - DNA, 75 bp, synthetic construct
  source 1..75: mol_type = other DNA
taacggaagcgcaaacaataacgcttcacgagctggcgggaacggtggcaataaagatgccccgccaacaccgca

SEQ ID NO: 570994 - DNA, 75 bp, synthetic construct
  source 1..75: mol_type = other DNA
cgtattgatgctcttggtgttgatggtcttggggcggcgggtattccggcatgggttgatttgcacttctggcag

SEQ ID NO: 570995 - DNA, 75 bp, synthetic construct
  source 1..75: mol_type = other DNA
cttctaccacaggcgctatatgtcattcacattgttattttagctgcaaggaaatctggttctgggaactgaatt

SEQ ID NO: 570996 - DNA, 75 bp, synthetic construct
  source 1..75: mol_type = other DNA
atgaaaccttcattttccacacttaaaaagaaccattactcatcagctcaggttgatggtgatgttctgtacagt

SEQ ID NO: 570997 - DNA, 75 bp, synthetic construct
  source 1..75: mol_type = other DNA
atgaatttagaagatcatcactatggcgaagaagtatcagaaattacacttgatggagttaccccttttggtaac

SEQ ID NO: 570998 - DNA, 75 bp, synthetic construct
  source 1..75: mol_type = other DNA
cttatttttgatgaagcaacaagtgctcttgattatgagtcggaaaatataataatgaaaaatatgtcaagaata

SEQ ID NO: 570999 - DNA, 75 bp, synthetic construct
  source 1..75: mol_type = other DNA
aacactggttatattattgtcactaccttgttatgttatatggtcattgtttatatcacccttattacgtcgacg

SEQ ID NO: 571000 - DNA, 75 bp, synthetic construct
  source 1..75: mol_type = other DNA
atggaaaaagggaaaattgttgaacagggtaaacataaggagctgctttctgaaccagaaagtttatacagttac

SEQ ID NO: 571001 - DNA, 75 bp, synthetic construct
  source 1..75: mol_type = other DNA
agaaactttgattatctggaaggaaaagcttttgcagataaagtcgtctcagtccgggctgcagctttgcgaaag

SEQ ID NO: 571002 - DNA, 75 bp, synthetic construct
  source 1..75: mol_type = other DNA
atgcggtgctggcagcaataggtgaacgctttcaacgtgccggacatccgcaaaacatcacctccatccacccta

SEQ ID NO: 571003 - DNA, 75 bp, synthetic construct
  source 1..75: mol_type = other DNA
ggtatcgaaaaaatgaccttctccaacagggaggttgttttaacctttctgctactttcatattatattcatata

SEQ ID NO: 571004 - DNA, 75 bp, synthetic construct
  source 1..75: mol_type = other DNA
actcagaccacgcagacacctgatgcctttttaaccagctatcaacgacaaatgtgcgctgacccgacggtgaaa

SEQ ID NO: 571005 - DNA, 75 bp, synthetic construct
  source 1..75: mol_type = other DNA
agaggtctggtgctgaaagccggcgggaaatactggcatgtgtacatgtcgaagaagacagccggagggcggaat

SEQ ID NO: 571006 - DNA, 75 bp, synthetic construct
  source 1..75: mol_type = other DNA
atgacccgaagtggtggtgattttcagccccgtcctctgaaacgcctgttcacagccaaccagtgccggacatcc

SEQ ID NO: 571007 - DNA, 75 bp, synthetic construct
  source 1..75: mol_type = other DNA
tgtactggtggattacatcgtgattgcgccggaacaaacacaaacgacacaaacgcaatatgaacctgccatttc

SEQ ID NO: 571008 - DNA, 75 bp, synthetic construct
  source 1..75: mol_type = other DNA
gtgtactggccggggaagaagaggccgagtctattgtggcactggcgcaacgcttccccgcaggcgcgtattacg

SEQ ID NO: 571009 - DNA, 75 bp, synthetic construct
  source 1..75: mol_type = other DNA
gtacattaacaaaactgcttcagcgcttttatataccagagaccggacagattttaattgatgggcatgatttat

SEQ ID NO: 571010 - DNA, 75 bp, synthetic construct
  source 1..75: mol_type = other DNA
atcaaagggggatgttatcggtatagttggccgttctggttcaggaaaaagtacattaacaaaactgcttcagcg

SEQ ID NO: 571011 - DNA, 75 bp, synthetic construct
  source 1..75: mol_type = other DNA
cgcaaagtagcggcacgacggtaaaaatgaccattatcagcgaagcgggtgctcagaccacgcagacgccagacg

SEQ ID NO: 571012 - DNA, 75 bp, synthetic construct
  source 1..75: mol_type = other DNA
gtatgatcgttatatattggtaagagcattaaaacaaagaagtctcaactatattggcaactataacaaaaacgc

SEQ ID NO: 571013 - DNA, 75 bp, synthetic construct
  source 1..75: mol_type = other DNA
atagaagagcagccggggtgtttcggtggcggaaaggcgcagttttttcaatactatgtgattacttttagaaaa

SEQ ID NO: 571014 - DNA, 75 bp, synthetic construct
  source 1..75: mol_type = other DNA
gaaaattattaaagagtgatggtgaagcactgattgtcaatcaatacaaaagttcttatttcaagaggtacgaga

SEQ ID NO: 571015 - DNA, 75 bp, synthetic construct
  source 1..75: mol_type = other DNA
gcgctgcaaaaaatacaaaaaggaataatgaaaaaaaccggagcaacgtttgccagtgaagtggttcagcgccgg

SEQ ID NO: 571016 - DNA, 75 bp, synthetic construct
  source 1..75: mol_type = other DNA
ggcgaaggaatggttaaggaataatgattatgattccttaaaattaccgctagctatctatacagaattagaaga

SEQ ID NO: 571017 - DNA, 75 bp, synthetic construct
  source 1..75: mol_type = other DNA
gctgattttacttacgtcagcacatggcagggcttcgtctatgtggcgtttatcattgatgtgtttgccggatac

SEQ ID NO: 571018 - DNA, 75 bp, synthetic construct
  source 1..75: mol_type = other DNA
caggcgttgtgggcccgtcgtccgtctggcaccatccatcacagcgataaaggctctcagtatgtgtcactggcc

SEQ ID NO: 571019 - DNA, 75 bp, synthetic construct
  source 1..75: mol_type = other DNA
ttcttagcatcaagagattactaaaatcaggaggtgaggctcttattgtaaatcaatataaaagctcatacttca

SEQ ID NO: 571020 - DNA, 75 bp, synthetic construct
  source 1..75: mol_type = other DNA
cgtgaaaaagaatctccacgatatcgagctggaaggccaccatttgattcgctcggcggtgccgctggagatgaa

SEQ ID NO: 571021 - DNA, 75 bp, synthetic construct
  source 1..75: mol_type = other DNA
acacctgtaattacacatgacaattttgaaaaacaaatgccagaatatgaagcaattattcctaataaaactgga

SEQ ID NO: 571022 - DNA, 75 bp, synthetic construct
  source 1..75: mol_type = other DNA
gtcgattggcttttttctttgtagtaatgatttggctcattatcatctttctgcaaataatcaaaggttttcaaa

SEQ ID NO: 571023 - DNA, 75 bp, synthetic construct
  source 1..75: mol_type = other DNA
ccgggcgctcaacacgtcctaaaaataacttattacgtaagggggttacgacttttagttcccgattaaatttat

SEQ ID NO: 571024 - DNA, 75 bp, synthetic construct
  source 1..75: mol_type = other DNA
gcagagacttaactccagagagaaagcatacagcaaattcctatactataaaaatttctatggaaatgagcaaat

SEQ ID NO: 571025 - DNA, 75 bp, synthetic construct
  source 1..75: mol_type = other DNA
aagtctggaggagagcgggagatctttgctcctgatgaaaaactgaaagatattcaacaacgactttctgaactt

SEQ ID NO: 571026 - DNA, 75 bp, synthetic construct
  source 1..75: mol_type = other DNA
atgtcgttgctcaggctgacagatatctcaatggatatatatgacatgactgaaaaagaggttcgaatggacgaa

SEQ ID NO: 571027 - DNA, 75 bp, synthetic construct
  source 1..75: mol_type = other DNA
gaataaaggtgaaaccaagaatatttatttgcctggccgtgattttaaaaatgtagaggttttttacttccagga

SEQ ID NO: 571028 - DNA, 75 bp, synthetic construct
  source 1..75: mol_type = other DNA
taatgttccttactgggatgatagaaacaattatcagaaaatgaaagaaaggctttcgaagttaaaatcagtata

SEQ ID NO: 571029 - DNA, 75 bp, synthetic construct
  source 1..75: mol_type = other DNA
aaaattgttttttctattcttattggacttttagttgtgttttttgtggtttataatacgccaatttattctgtg

SEQ ID NO: 571030 - DNA, 75 bp, synthetic construct
  source 1..75: mol_type = other DNA
ccagaaaactgctgcagatgaccggagaatggctgaatacaacaggggctgatcagcagtccccggaacatcgta

SEQ ID NO: 571031 - DNA, 75 bp, synthetic construct
  source 1..75: mol_type = other DNA
ctccttgcatggagctgttgttctcgatcccttcatcggtggcgggacaagtctggtggagtctatgcgttgcaa

SEQ ID NO: 571032 - DNA, 75 bp, synthetic construct
  source 1..75: mol_type = other DNA
tgggccagatggtcttacaggaacttatattgcgagttatgacagaacagattttgctatgacaccagaaaatat

SEQ ID NO: 571033 - DNA, 75 bp, synthetic construct
  source 1..75: mol_type = other DNA
ttctccgcttaccaaagttacagttaccttcgatagcgctgcgaaaacgatagtcggtacgccaatgctggctaa

SEQ ID NO: 571034 - DNA, 75 bp, synthetic construct
  source 1..75: mol_type = other DNA
ggcatcaacagggagtacaggcgactcatatgacaactcgatggcggagagcatcaatggtctttacaaagcgga

SEQ ID NO: 571035 - DNA, 75 bp, synthetic construct
  source 1..75: mol_type = other DNA
gacattcgtgctggatgcactggagcaggcgttgtgggcccgtcggccgtctggcaccatccatcacagcgataa

SEQ ID NO: 571036 - DNA, 75 bp, synthetic construct
  source 1..75: mol_type = other DNA
atgagcgttcatttaaaaaatatatcttttttttgttgagtgttttttttcacatgtctgcagttgttaatgttt

SEQ ID NO: 571037 - DNA, 75 bp, synthetic construct
  source 1..75: mol_type = other DNA
agatgttgataaaaaatataaactttttttattatcgcttttcttttttaacttaggatttatagaagttacatc

SEQ ID NO: 571038 - DNA, 75 bp, synthetic construct
  source 1..75: mol_type = other DNA
tattacctttcccagcactttcgaatagattgggtatgattatttttggtttttatccctactttattttacctt

SEQ ID NO: 571039 - DNA, 75 bp, synthetic construct
  source 1..75: mol_type = other DNA
acaaagcggaggtaatacaccgtaagagctgggaaaaccggacagaagtggagctggccacactcacgtgggtgg

SEQ ID NO: 571040 - DNA, 75 bp, synthetic construct
  source 1..75: mol_type = other DNA
agtaactacatcagtaatggttacagtatggttttccattcaggatattataagattttatcttacaagaacagt

SEQ ID NO: 571041 - DNA, 75 bp, synthetic construct
  source 1..75: mol_type = other DNA
agattggttagtataggggataataccttaacgaaggccatagaaaagctgaacgaagctgaggaacaattaagg

SEQ ID NO: 571042 - DNA, 75 bp, synthetic construct
  source 1..75: mol_type = other DNA
tgatctcgacaagttgaaaatctatcttttacaaaataataaggaaccatttggacttgataagttgtcatctgg

SEQ ID NO: 571043 - DNA, 75 bp, synthetic construct
  source 1..75: mol_type = other DNA
gttgttgaccagaactacacggtggcagatgccgccaaagctatggatgttggcctttccacaatgacaagatgg

SEQ ID NO: 571044 - DNA, 75 bp, synthetic construct
  source 1..75: mol_type = other DNA
gctatcctaagtactaccaaacggccgattatgcgttgaggctttcagtgatggctgatatggcaacaatgagaa

SEQ ID NO: 571045 - DNA, 75 bp, synthetic construct
  source 1..75: mol_type = other DNA
aacatagcgattgatacgtgtaaaaagaaaagaggtcaatgtgacattactgatattgctggcagtcctcctaaa

SEQ ID NO: 571046 - DNA, 75 bp, synthetic construct
  source 1..75: mol_type = other DNA
ccggtctggctaaaaaggttatgctgtcccataccgctgtgcgtaagtgggcaacaggagaaaccattgccagcg

SEQ ID NO: 571047 - DNA, 75 bp, synthetic construct
  source 1..75: mol_type = other DNA
taccagagggtctacctaacttccaagctcctatcaccagtgattttgacgtggatgattggtctaacgaggact

SEQ ID NO: 571048 - DNA, 75 bp, synthetic construct
  source 1..75: mol_type = other DNA
ctgccgggcgagacggaccttgcgctgccctgcccgctgccgtttattcttttccgcgcctacagcagctaccgg

SEQ ID NO: 571049 - DNA, 75 bp, synthetic construct
  source 1..75: mol_type = other DNA
actgaaagaaaaattaaaagaatttgagagctttgatattacttttaatgatgtggttgatttcagggttgctgc

SEQ ID NO: 571050 - DNA, 75 bp, synthetic construct
  source 1..75: mol_type = other DNA
caaaaatgagtcatttttggatactctctttgaacaaataacaggcgtacaacctataaaacaaaactcatctgt

SEQ ID NO: 571051 - DNA, 75 bp, synthetic construct
  source 1..75: mol_type = other DNA
aatggcattccgagaaggcgatgtatggcgcttggggtcagtatattgttaattctatatcagaagcgcttatca

SEQ ID NO: 571052 - DNA, 75 bp, synthetic construct
  source 1..75: mol_type = other DNA
gacagaacagctaaacccggcaggcttaagttacacgtatcagtatgaaaaagaccgcatcaccatcaccgacag

SEQ ID NO: 571053 - DNA, 75 bp, synthetic construct
  source 1..75: mol_type = other DNA
ttaaatgatgcttttataatatgtgttattggagcaatgattttcaatttaactcttggcgcatactatccaata

SEQ ID NO: 571054 - DNA, 75 bp, synthetic construct
  source 1..75: mol_type = other DNA
aaccctggaaagggtaatagaaaaaaataaatattctctgtcagatgatgagcttgagcatttcaatgccgcggt

SEQ ID NO: 571055 - DNA, 75 bp, synthetic construct
  source 1..75: mol_type = other DNA
tattggttgccatcctgacttctcccatcttgaaaatactcagaaccaaagcgatggttatgccattactatgtt

SEQ ID NO: 571056 - DNA, 75 bp, synthetic construct
  source 1..75: mol_type = other DNA
tactggcatcaacagggagtacaggcgactcgtatgacaacgcgatggctgagagcatcaatggtctttacaaag

SEQ ID NO: 571057 - DNA, 75 bp, synthetic construct
  source 1..75: mol_type = other DNA
cttgcctatctgctggcaacgctggagaaagccagacggggcgagttcaatcagcttcggcgcaggcacagatag

SEQ ID NO: 571058 - DNA, 75 bp, synthetic construct
  source 1..75: mol_type = other DNA
tgtcaatgttcgtaactattattatagggaataataaaaatgaattggcaaaagaaaaagatagaacgttcaatc

SEQ ID NO: 571059 - DNA, 75 bp, synthetic construct
  source 1..75: mol_type = other DNA
catgggcagcatttgaaccatacatcagtctgaacaccgcggcgaccatcctgagagaatgccgtcgtcgtcatc

SEQ ID NO: 571060 - DNA, 75 bp, synthetic construct
  source 1..75: mol_type = other DNA
agcaaactgcagcaacagatgacctcgtctgaacgtgcgacagcgttgtcctcgcggcttttacccggtcaaaac

SEQ ID NO: 571061 - DNA, 75 bp, synthetic construct
  source 1..75: mol_type = other DNA
cacctgatcccgctgactgaatcggcattaagtgaattagcctcagtgaaagaactgactaaggaaagtaacagc

SEQ ID NO: 571062 - DNA, 75 bp, synthetic construct
  source 1..75: mol_type = other DNA
ttggcaaagctatattggatgtcaatcgcgaactgaagaaaaacgaattacggaaatcgtcagtatatgccgaca

SEQ ID NO: 571063 - DNA, 75 bp, synthetic construct
  source 1..75: mol_type = other DNA
ataggtgaaaatatgaaggaacttctgggcttaggtgatgaatatctgtccgttcccttccgttatattaaagat

SEQ ID NO: 571064 - DNA, 75 bp, synthetic construct
  source 1..75: mol_type = other DNA
agtagtcattacggtcaggtgattgaaacacgccgccaagatattcaagcggcaggaggaatcatcaatgctatt

SEQ ID NO: 571065 - DNA, 75 bp, synthetic construct
  source 1..75: mol_type = other DNA
acaagggtttgatagtgcatggattgagttgcaacttgctcatgttgataagaatagtattcgaggaacatataa

SEQ ID NO: 571066 - DNA, 75 bp, synthetic construct
  source 1..75: mol_type = other DNA
atgtcatttggcagctacaaccttgtgagcctcgcagaagcacgtgagaaacgcgataccgctcgtaagcaggta

SEQ ID NO: 571067 - DNA, 75 bp, synthetic construct
  source 1..75: mol_type = other DNA
ccggtttgcagggaaagcgcggttaatgtcatttggcagctacgatttagtaagcctcgcagaagcacgtgagaa

SEQ ID NO: 571068 - DNA, 75 bp, synthetic construct
  source 1..75: mol_type = other DNA
ctgaatacaatcctgctcctgatttagccatcgctctggccgttcctaagcaaaaacatcatccatttctatctg

SEQ ID NO: 571069 - DNA, 75 bp, synthetic construct
  source 1..75: mol_type = other DNA
aaaattccattagagggatatataaccacgcacaataccttgaaaatcgtagggttatgatgcagtggtacagtg

SEQ ID NO: 571070 - DNA, 75 bp, synthetic construct
  source 1..75: mol_type = other DNA
acaagggtttgatagtgcatggattgagatgcagctagcacatgtagataagaatagtattcgcggtacttataa

SEQ ID NO: 571071 - DNA, 75 bp, synthetic construct
  source 1..75: mol_type = other DNA
gaatcaaaaataaaatatgcatgcgaaatggttaataaaattgattgtggtcgtgagcagcctaaaatagctggg

SEQ ID NO: 571072 - DNA, 75 bp, synthetic construct
  source 1..75: mol_type = other DNA
taaaagtctgaaatacatgaatgatgaatcaaaaataaaatatgcatgcgaaatggttaataaaattgattgtgg

SEQ ID NO: 571073 - DNA, 75 bp, synthetic construct
  source 1..75: mol_type = other DNA
aatgtcagacaatggtatgcaggctactattctgacctctatcagaagcgggtatgcgaagggtatcactgtcag

SEQ ID NO: 571074 - DNA, 75 bp, synthetic construct
  source 1..75: mol_type = other DNA
tgggcaccagttcctgcgattgcagccagtacagttatagcaccggcaacagcgacatatggttttttgtttggc

SEQ ID NO: 571075 - DNA, 75 bp, synthetic construct
  source 1..75: mol_type = other DNA
agaaagatgaagacaagcgtgacccgttgttatctgccgatgatgagcgccgcctgagtgacggtacagaacggg

SEQ ID NO: 571076 - DNA, 75 bp, synthetic construct
  source 1..75: mol_type = other DNA
cgcgagggcatactgctattatacatcaacaacctgacggttcgagtattcgttatgagggaaactcgttcgaaa

SEQ ID NO: 571077 - DNA, 75 bp, synthetic construct
  source 1..75: mol_type = other DNA
ggcctatcgagaagaaatcattaagacattcgagcaagatgtgttcccgttcattggtaaacgccctatcagtga

SEQ ID NO: 571078 - DNA, 75 bp, synthetic construct
  source 1..75: mol_type = other DNA
aaaataatatccgcggcacttataatcatgcactatatctagataaaagaagagatatgctacagtggtatgcag

SEQ ID NO: 571079 - DNA, 75 bp, synthetic construct
  source 1..75: mol_type = other DNA
atggccctaaccgatatacagatcaaacgtgcaaaaccacaagacaaaccatacacattaaacgatgggcaaggt

SEQ ID NO: 571080 - DNA, 75 bp, synthetic construct
  source 1..75: mol_type = other DNA
cgatttggaagggtacaccgggagccttattaccagaaacgcaacaaaactggtcatgcttacaggtgtcagaac

SEQ ID NO: 571081 - DNA, 75 bp, synthetic construct
  source 1..75: mol_type = other DNA
gcagggttttaattcagcgtggatagaaacacagttagcccatgtagataaaaatgctatcaggggaacttataa

SEQ ID NO: 571082 - DNA, 75 bp, synthetic construct
  source 1..75: mol_type = other DNA
aataaaacccctagaactgcttgaagtacttaaacgcatagaaaaacgtggagcgttggagaaaaccagaaaagt

SEQ ID NO: 571083 - DNA, 75 bp, synthetic construct
  source 1..75: mol_type = other DNA
aaaacagcataagaggcacttacaaccatgcacagtacctcttacaacggaaagaaatgcttcagtggtatgctg

SEQ ID NO: 571084 - DNA, 75 bp, synthetic construct
  source 1..75: mol_type = other DNA
ttgacagttcttccaggacaacagcagtcgaagcaggaatggagcgaattactgatgccttcggcaagctgacac

SEQ ID NO: 571085 - DNA, 75 bp, synthetic construct
  source 1..75: mol_type = other DNA
acaaggatttgaaagtgcgtggattgagatgcagcttgcacatgtagataagaacagcattcgtggaacatacaa

SEQ ID NO: 571086 - DNA, 75 bp, synthetic construct
  source 1..75: mol_type = other DNA
gtattgcgacgaatagagaagcgtggagcactagagaagactagaaaagtgcgccaaagatgcggtgaggtctat

SEQ ID NO: 571087 - DNA, 75 bp, synthetic construct
  source 1..75: mol_type = other DNA
atgtcctttggctcttatccactagtctccctctccgaagccagagaaatgcgcgacaaatcgcgcaaacttgtc

SEQ ID NO: 571088 - DNA, 75 bp, synthetic construct
  source 1..75: mol_type = other DNA
atgagttttgattcatttcgtcagcaggttgggaatgctatgcgaagcggtgatgtgcatgctaatcctgttgtt

SEQ ID NO: 571089 - DNA, 75 bp, synthetic construct
  source 1..75: mol_type = other DNA
ctgatgagatacctgattttctacgtgccttagagggttactccgggagtaagcttgtccagatagccacgaaat

SEQ ID NO: 571090 - DNA, 75 bp, synthetic construct
  source 1..75: mol_type = other DNA
accggatttacggggtgagtttattcgtggctgggatgacgggcgcgggattgatcctggtcgccagttgcttgg

SEQ ID NO: 571091 - DNA, 75 bp, synthetic construct
  source 1..75: mol_type = other DNA
tctgggtgacgagcctgcagaagcaagttttaacgcgttgttagcggcgcttgatgagtacccggagtatcaggt

SEQ ID NO: 571092 - DNA, 75 bp, synthetic construct
  source 1..75: mol_type = other DNA
gtaatagttctagaaaaataatagatgttttgaaaaaaatagatctaaaggctttgagaacaaagaggttttatg

SEQ ID NO: 571093 - DNA, 75 bp, synthetic construct
  source 1..75: mol_type = other DNA
agctttacagcattgctggacgcgcttgataaatttcccgagcttcaggttatcctgacctacccgaatgcggat

SEQ ID NO: 571094 - DNA, 75 bp, synthetic construct
  source 1..75: mol_type = other DNA
tatccgaagagcagttaattgcgctgaaaggaataaaaaaaggtacgttaaaaaaggcccgagaaaaatcgttta

SEQ ID NO: 571095 - DNA, 75 bp, synthetic construct
  source 1..75: mol_type = other DNA
cagccaaagtctttcatgccgataaaacctattttgtgctgaacggcacatcggcagcgaataaagtggtgacga

SEQ ID NO: 571096 - DNA, 75 bp, synthetic construct
  source 1..75: mol_type = other DNA
tcgcaaaaaacactcttattcagaataaaactctgtttatcatctttcggcaagcattaaattactatattaccg

SEQ ID NO: 571097 - DNA, 75 bp, synthetic construct
  source 1..75: mol_type = other DNA
gccatgattaactatttcatggtcaccaaaggggtggatcgtcagaccgcagaaagctacaccgaaacaacgcag

SEQ ID NO: 571098 - DNA, 75 bp, synthetic construct
  source 1..75: mol_type = other DNA
gaattataaagctgcattggctcttttgaaagtacaccttgacccaacacaaaagccatatttactcgaaaatat

SEQ ID NO: 571099 - DNA, 75 bp, synthetic construct
  source 1..75: mol_type = other DNA
tggggtgatattgccactgacctgcttgaatcggcagcggaaaaagcagtgccactggcgaaggcctgggggaac

SEQ ID NO: 571100 - DNA, 75 bp, synthetic construct
  source 1..75: mol_type = other DNA
cagtgtcaatggtggcccgatctcgggttcggcgcagaatctctctgaaggtcaggcgagtatagaaatgcgtac

SEQ ID NO: 571101 - DNA, 75 bp, synthetic construct
  source 1..75: mol_type = other DNA
ggaagtcttgatcctgtttatgacgagctcggaacacgattcaagctgttctatgccacagcagatgagatggaa

SEQ ID NO: 571102 - DNA, 75 bp, synthetic construct
  source 1..75: mol_type = other DNA
aaacgctgatgcaaaaacgcgttgatggcttgctgttactagactggccccctgaatctccagacaaccagtatc

SEQ ID NO: 571103 - DNA, 75 bp, synthetic construct
  source 1..75: mol_type = other DNA
ttaatcatggtagtttgacaagccgtgaagttacagtactgcgtgaaattgagatgctcgaaaatatggatttgc

SEQ ID NO: 571104 - DNA, 75 bp, synthetic construct
  source 1..75: mol_type = other DNA
caacttcctgtcatgggcggcaggccgcttaatcgtgttcagagcttggaaaaaattaaacaattgcgtgctaaa

SEQ ID NO: 571105 - DNA, 75 bp, synthetic construct
  source 1..75: mol_type = other DNA
agcgacagcttgagttatctggccttcagggtttggataaggctcgaaagcaggcagaattcgatgcatctgatc

SEQ ID NO: 571106 - DNA, 75 bp, synthetic construct
  source 1..75: mol_type = other DNA
agcagaaagttgctgaattatccaatcaactttataacgcaaaattagcagccaattctgcttcagaggggacat

SEQ ID NO: 571107 - DNA, 75 bp, synthetic construct
  source 1..75: mol_type = other DNA
gatttgcgcggtgagtttatccgtggatgggacggtggtcgcaaggttgataccgggcgtacggtactttcattt

SEQ ID NO: 571108 - DNA, 75 bp, synthetic construct
  source 1..75: mol_type = other DNA
ccggggtggaaaatcagagacggaaaaagcggaagacagtttttcccggctgctgaagcagcagaaagagcaatt

SEQ ID NO: 571109 - DNA, 75 bp, synthetic construct
  source 1..75: mol_type = other DNA
gagtgaacgtcttaaagaccaggagactttttatgccgaatcggatgcgcagcgtgcggactggcagaaagggct

SEQ ID NO: 571110 - DNA, 75 bp, synthetic construct
  source 1..75: mol_type = other DNA
aacatcagcaacgaatgttgtcgtccggtcaccccaaagaggcagagcttgtcttccgtaaaggtctctggttct

SEQ ID NO: 571111 - DNA, 75 bp, synthetic construct
  source 1..75: mol_type = other DNA
aaatggggatggtttcttgatcgtaaaagacatgcgtataataagcaagccatatatgaaattcccaaaaaaata

SEQ ID NO: 571112 - DNA, 75 bp, synthetic construct
  source 1..75: mol_type = other DNA
ttgatggctattttttaatatgtaatcctgatatcagttttgataagcagtctctagataaattagtatcgtttg

SEQ ID NO: 571113 - DNA, 75 bp, synthetic construct
  source 1..75: mol_type = other DNA
atttttggggcggacaatatctattcactccccttttagacgttacttcttggttagaaatagtttttacatgat

SEQ ID NO: 571114 - DNA, 75 bp, synthetic construct
  source 1..75: mol_type = other DNA
ctacgcgaaaatgtatcccctgtgtttctggatgataatattggcctcgcggctgctcaaaatttagctatttca

SEQ ID NO: 571115 - DNA, 75 bp, synthetic construct
  source 1..75: mol_type = other DNA
cgacaaaccgttgccggaagaggccgcgctggcacgcgaagcatggttaaacgcgggtggcgagatccatgcttc

SEQ ID NO: 571116 - DNA, 75 bp, synthetic construct
  source 1..75: mol_type = other DNA
aacacgcaaattaaagatctctcgctgggggtttcctggaactacagtaagtcccgtggtcaacctgatgctgat

SEQ ID NO: 571117 - DNA, 75 bp, synthetic construct
  source 1..75: mol_type = other DNA
ttgaatttaaacagtggcgtgaatttaggtccgtggcgattgcgcaataattccacgtggagtcgtagtagcggc

SEQ ID NO: 571118 - DNA, 75 bp, synthetic construct
  source 1..75: mol_type = other DNA
gcttattaagctctggtggaatgccatcgtttattggcggactggtggtgtttgcgtcggcggctttcaatgcac

SEQ ID NO: 571119 - DNA, 75 bp, synthetic construct
  source 1..75: mol_type = other DNA
ttgtcgtatcagttatcagctcaccgaacaacaaattaactcaacgattacgcgaatggatgccatatgccgata

SEQ ID NO: 571120 - DNA, 75 bp, synthetic construct
  source 1..75: mol_type = other DNA
aaaatgcagtggtaaatgttgttcccaccaaaggggcgctggtgctggcagaattcactgcccatgcgggggcaa

SEQ ID NO: 571121 - DNA, 75 bp, synthetic construct
  source 1..75: mol_type = other DNA
gttggcagcatcacccaactggacaaacaagcgtgtgtgccattggcggagattattccggatgccagcgtaacg

SEQ ID NO: 571122 - DNA, 75 bp, synthetic construct
  source 1..75: mol_type = other DNA
gttttggcgcgatagcgacgctggacggcgtacagactaatagcggcataattgatgatgatggctcgctctata

SEQ ID NO: 571123 - DNA, 75 bp, synthetic construct
  source 1..75: mol_type = other DNA
tgagattagtgatctctactctacgtcgtcgagtggtgatttgttggttgaaatcaaagaagctgacggtagtgt

SEQ ID NO: 571124 - DNA, 75 bp, synthetic construct
  source 1..75: mol_type = other DNA
agcgtaccgttttccagcgtgccattactccagcgtcaggggcgaatcaaatacgcggtgacactggcgaaatac

SEQ ID NO: 571125 - DNA, 75 bp, synthetic construct
  source 1..75: mol_type = other DNA
agctacagcgtgcaacagggatataacagcgaggggaaaacggctaatggtagcgccagcatggactacaaaggg

SEQ ID NO: 571126 - DNA, 75 bp, synthetic construct
  source 1..75: mol_type = other DNA
tccagcgtgccattactccagcgtcaggggcgaatcaaatacgcggtgacactggcgaaatacagaaccaatagt

SEQ ID NO: 571127 - DNA, 75 bp, synthetic construct
  source 1..75: mol_type = other DNA
tgtcatatcagttacgagcttaccgaacaacaaattaactctgcgattacgcgaatggatgccatatgcagataa

SEQ ID NO: 571128 - DNA, 75 bp, synthetic construct
  source 1..75: mol_type = other DNA
tagtacatggtgtcattacagattttcgccgtatatcgggctccgccgaccaggcaaaataccaggtgatactgg

SEQ ID NO: 571129 - DNA, 75 bp, synthetic construct
  source 1..75: mol_type = other DNA
ctccccaagattttagggccaataaccagattcaatgctaatggcaaatcagtacctgacaaaacagcacctaaa

SEQ ID NO: 571130 - DNA, 75 bp, synthetic construct
  source 1..75: mol_type = other DNA
tagaaccaaatggtgatcagccaatgaataaatctggtttaccaagtcagtgtagagtacatgcaaatggagaaa

SEQ ID NO: 571131 - DNA, 75 bp, synthetic construct
  source 1..75: mol_type = other DNA
agtcattgagaaattttctactaaaaaaatcgtatctcaatgggaagatatctacctgcgcatacagaaaaacag

SEQ ID NO: 571132 - DNA, 75 bp, synthetic construct
  source 1..75: mol_type = other DNA
gaacaacatttcaaatggagtaattatattatttggtttgaaaattacggggcttatgataagacggggtctatc

SEQ ID NO: 571133 - DNA, 75 bp, synthetic construct
  source 1..75: mol_type = other DNA
cttacagaatttccaaaggtacccaatggaataaccctgatttccgtaaataataaccagatatcgcgtattgat

SEQ ID NO: 571134 - DNA, 75 bp, synthetic construct
  source 1..75: mol_type = other DNA
tgaggttgttcctgcgatacctggcaatttaaaaatactttttatggaatgtaatcctattaaagaggcattttt

SEQ ID NO: 571135 - DNA, 75 bp, synthetic construct
  source 1..75: mol_type = other DNA
caggatgatgcgctggaagtggcagcgaaaaaagatgtgaccgtgaccagtacagagggacgggttgaaatcacc

SEQ ID NO: 571136 - DNA, 75 bp, synthetic construct
  source 1..75: mol_type = other DNA
atgttttatccggggtgggaaccctgaaccgctacagactggatataccttcctgcccgtcatcgctggatgttg

SEQ ID NO: 571137 - DNA, 75 bp, synthetic construct
  source 1..75: mol_type = other DNA
cctgctcaggttctgactatcaccgacagtcttccgccgacgttgcctgcgctgctgcgcaatccggtgttgctt

SEQ ID NO: 571138 - DNA, 75 bp, synthetic construct
  source 1..75: mol_type = other DNA
ccatttgctgcatttaaattagccaggttgatgagacagaattctccagatattgtgcattcgcatatgtttcat

SEQ ID NO: 571139 - DNA, 75 bp, synthetic construct
  source 1..75: mol_type = other DNA
ggctctatcgtttgactaataaattaagtgacttgaatacagttgttagcgatgctgcacggcagcgatttatta

SEQ ID NO: 571140 - DNA, 75 bp, synthetic construct
  source 1..75: mol_type = other DNA
tattgtgcattcgcatatgtttcatgccaatatcttggtacgtttcgtaagagcactcttgggaaggcgttcatc

SEQ ID NO: 571141 - DNA, 75 bp, synthetic construct
  source 1..75: mol_type = other DNA
tgcactggctcagagtgccggagcttcgggggcactggacgcggatattaactctcagcagcaacttgcccgggt

SEQ ID NO: 571142 - DNA, 75 bp, synthetic construct
  source 1..75: mol_type = other DNA
cgaagggaagctcaatggttacatcgttcagggatttaacccactggcggcgtttcccgataaaaacaaatcaat

SEQ ID NO: 571143 - DNA, 75 bp, synthetic construct
  source 1..75: mol_type = other DNA
tgaaaaaggttctatcgttaccccggcgagccttttacgctggaattaccgtatgaaccctgaccgcattttatt

SEQ ID NO: 571144 - DNA, 75 bp, synthetic construct
  source 1..75: mol_type = other DNA
tatcaaatattgttttcttttatgaccatcaacaagaattatataaatttgtttcttcagatattgtatcaaact

SEQ ID NO: 571145 - DNA, 75 bp, synthetic construct
  source 1..75: mol_type = other DNA
agttgttaggcaaagagtgttgtctaggtattcattaaatgagaatacatttgacccaatctcacaacaaagtct

SEQ ID NO: 571146 - DNA, 75 bp, synthetic construct
  source 1..75: mol_type = other DNA
tacgaacccattgagtcgcctattggtactaacccgctgcacccggatgttgtatccagcccagttgcacgtatc

SEQ ID NO: 571147 - DNA, 75 bp, synthetic construct
  source 1..75: mol_type = other DNA
tggtcagcagctcagcaattttgcacagttacgcgatgacggctctaccagttgtttctgctgggtctactgtgg

SEQ ID NO: 571148 - DNA, 75 bp, synthetic construct
  source 1..75: mol_type = other DNA
tctgaggattttgcaccaggaaaatatgagtttaccttggtggttacggataaagctggtaacacttcatccagt

SEQ ID NO: 571149 - DNA, 75 bp, synthetic construct
  source 1..75: mol_type = other DNA
cttataattatactgtgacagccagtgatgctgcaggtaataaaattagcgttaatggtgtgtttcgcgtggata

SEQ ID NO: 571150 - DNA, 75 bp, synthetic construct
  source 1..75: mol_type = other DNA
agggaaaaccgaagctttagctttagttaccattgctgttggtggcattacttatcaaacaaaggctgatacgca

SEQ ID NO: 571151 - DNA, 75 bp, synthetic construct
  source 1..75: mol_type = other DNA
cgcgtcctctgctcggctttaccggtgaggatgtgcagatgattgaagagattatcctggctcacctcgaccgtt

SEQ ID NO: 571152 - DNA, 75 bp, synthetic construct
  source 1..75: mol_type = other DNA
ttcagggggttgaatatgaaacaaaagccgacagttctggacaatggaatgtacaggtttccgtaccgctctctg

SEQ ID NO: 571153 - DNA, 75 bp, synthetic construct
  source 1..75: mol_type = other DNA
gccacttactgaaatccagattgatgctgcctcggattccggtgttaaaggcgataacatcacaaatgttaacca

SEQ ID NO: 571154 - DNA, 75 bp, synthetic construct
  source 1..75: mol_type = other DNA
atccgcaaaaacgcccacggttggtggctacttggcgtaaatcgttactggcacggaggtattcatgtcgggagg

SEQ ID NO: 571155 - DNA, 75 bp, synthetic construct
  source 1..75: mol_type = other DNA
tgtggctgcgccagttcgagcctggctcgaactcttcgtcggccaaccggctgctcgaccggctcgaatatctgc

SEQ ID NO: 571156 - DNA, 75 bp, synthetic construct
  source 1..75: mol_type = other DNA
acgaagcggtgatgccgccccctgttaatcctcagcttgaggcgttcgcaaaagaaattaaaaggcaggtgccta

SEQ ID NO: 571157 - DNA, 75 bp, synthetic construct
  source 1..75: mol_type = other DNA
ggagatgcgtgaaacctttgcggacttgtcgattgatacggtagatattcgctatacgttgagcggtgggcctaa

SEQ ID NO: 571158 - DNA, 75 bp, synthetic construct
  source 1..75: mol_type = other DNA
tattgatgaagagatgttatatattcctcatccacgtgaagatttaagccgtataaatgttccattcgtttcgga

SEQ ID NO: 571159 - DNA, 75 bp, synthetic construct
  source 1..75: mol_type = other DNA
cgggaaaacactagtgatgtggaaaaccggaaggtattaaaaattatgctaggttcaatatatagtgaattggtt

SEQ ID NO: 571160 - DNA, 75 bp, synthetic construct
  source 1..75: mol_type = other DNA
ttcacgagtttcggcccgcgaagctcgccgtctggggactgctattattagttatacgtgtaatcgaactcgaca

SEQ ID NO: 571161 - DNA, 75 bp, synthetic construct
  source 1..75: mol_type = other DNA
atgctaaatgtactgaagttggcgagttatttaaggggggaacttatcctaatggttcaagtgatggcattacag

SEQ ID NO: 571162 - DNA, 75 bp, synthetic construct
  source 1..75: mol_type = other DNA
agtctcgatgagcatgtgccagatgtggtggcaaatatgaaggggattaaaacaggcaaacagttcattaagctg

SEQ ID NO: 571163 - DNA, 75 bp, synthetic construct
  source 1..75: mol_type = other DNA
gcacggaggtattcatgtcgggacgtcatcgtccccggcctcggtgctaaatcaggaaacacctgaaaaatcggt

SEQ ID NO: 571164 - DNA, 75 bp, synthetic construct
  source 1..75: mol_type = other DNA
aaattcccgaccctgaaagaatgggtgggtaagcgaaccattcagcaaatggaagcgcatggctactccatcgcc

SEQ ID NO: 571165 - DNA, 75 bp, synthetic construct
  source 1..75: mol_type = other DNA
tagctttattgctacaaatccggctctggcagcgggtgttggtgggcttgataaaggcacaaacttcatcggtga

SEQ ID NO: 571166 - DNA, 75 bp, synthetic construct
  source 1..75: mol_type = other DNA
aaccatgaacaaactttacgatcgcgttccggcttctgtctggaaatatgtcacctgaatattgaatcagcgcta

SEQ ID NO: 571167 - DNA, 75 bp, synthetic construct
  source 1..75: mol_type = other DNA
ggtttcgaaaagctacggagtaaaacgcgcgaaaaatatgacagcaagacggctggcatcacatacgcccagctg

SEQ ID NO: 571168 - DNA, 75 bp, synthetic construct
  source 1..75: mol_type = other DNA
atgaaaaaattattacttgctatttttatcatattaccacttggtggctgtacggttcatggtaataaatcccta

SEQ ID NO: 571169 - DNA, 75 bp, synthetic construct
  source 1..75: mol_type = other DNA
ttggcgttaaggttcaaccttcaggcagcaaagttttttatttccgttattacgttgagaaagggaagaaagaga

SEQ ID NO: 571170 - DNA, 75 bp, synthetic construct
  source 1..75: mol_type = other DNA
gtcatttggcgaaaggtttcgcgtttttgtgattttatgatgtattgctggtgtgaaggtctggcggtattactg

SEQ ID NO: 571171 - DNA, 75 bp, synthetic construct
  source 1..75: mol_type = other DNA
ttcgaaagggagtgtcagaggctattgcgcagggctgtatgccacctggtttgccgatgacatcagtaaaaaagg

SEQ ID NO: 571172 - DNA, 75 bp, synthetic construct
  source 1..75: mol_type = other DNA
atgaataccagtgtgggtattacgttcggccttgaggttaacccggtctcggccataccgaagcagtcttcggca

SEQ ID NO: 571173 - DNA, 75 bp, synthetic construct
  source 1..75: mol_type = other DNA
gtgtgtctgagtgggaagaggagcttgctgcttcccgggagggcattatgcctggtgatgagagcgggcctgagc

SEQ ID NO: 571174 - DNA, 75 bp, synthetic construct
  source 1..75: mol_type = other DNA
tctcttatggccattaagcattattgcaactgatgcacatatggaggagaacgatgaaaagtctgctcagaaacc

SEQ ID NO: 571175 - DNA, 75 bp, synthetic construct
  source 1..75: mol_type = other DNA
tacacgtatcagtatgagaaagaccgcatcaccatcaccgacagcctgaaccgccgtgaagtgctgcacacgcag

SEQ ID NO: 571176 - DNA, 75 bp, synthetic construct
  source 1..75: mol_type = other DNA
gctattattaaaaaccttaccatctacaaatcagatggtacgactttgacagagaaaccactcatcaaatcaggt

SEQ ID NO: 571177 - DNA, 75 bp, synthetic construct
  source 1..75: mol_type = other DNA
aatagtgataacgacgattttgagaagatgttcgagtacgtaaccactgaaaccccatctgacgaggatgagtgg

SEQ ID NO: 571178 - DNA, 75 bp, synthetic construct
  source 1..75: mol_type = other DNA
cgttttctggttatgcggggcgactatagcgaagcagatattatccaagcgtctgtatcccaagatgtgattgat

SEQ ID NO: 571179 - DNA, 75 bp, synthetic construct
  source 1..75: mol_type = other DNA
gtaaagattttgctgtctcaatgaacggtgtgaaagtcgaacaagatggggcgagtaatttgggggaaattaaac

SEQ ID NO: 571180 - DNA, 75 bp, synthetic construct
  source 1..75: mol_type = other DNA
cccggtgcccggcgaaggagaacatcgtgaaggagacacctgataatcaggcaacaccagtcgcaacgaatgctg

SEQ ID NO: 571181 - DNA, 75 bp, synthetic construct
  source 1..75: mol_type = other DNA
atttgtcccacatttcacccgtgaagagcgggagcaggggctgaccgatttcaacgatctgcatcaggccagagg

SEQ ID NO: 571182 - DNA, 75 bp, synthetic construct
  source 1..75: mol_type = other DNA
ggatggtaaaaagcaccggatccgtctgcagggagataccggtggcaaaaaatccggctcatacgttggccacct

SEQ ID NO: 571183 - DNA, 75 bp, synthetic construct
  source 1..75: mol_type = other DNA
tggtggatactcagctggccggagcgggtgccgggggcggacgaggtgctgccgccggagccgcccgcataccgg

SEQ ID NO: 571184 - DNA, 75 bp, synthetic construct
  source 1..75: mol_type = other DNA
agttacctgttctgtgcttctcaggatgcggtcagttacggagatgaactggccggagagcggcttgacccggta

SEQ ID NO: 571185 - DNA, 75 bp, synthetic construct
  source 1..75: mol_type = other DNA
gcctgcacagccggaagtcctgtgggtacaacacaacggacagggcgtgacgacaccccgacagacaccggcatc

SEQ ID NO: 571186 - DNA, 75 bp, synthetic construct
  source 1..75: mol_type = other DNA
gtggaaaacatccagaaagctgccgaacggctggcagaactggtgccagaagcgcggatcgccatcggtcacggg

SEQ ID NO: 571187 - DNA, 75 bp, synthetic construct
  source 1..75: mol_type = other DNA
gggcaggtttattatctctacaatgatgtggaaaacatccagaaagctgccgaacggctggcagaactggtgcct

SEQ ID NO: 571188 - DNA, 75 bp, synthetic construct
  source 1..75: mol_type = other DNA
tcgaaagggagtgtcagaggctatagcgcagggctgtatgccacctggtttgccgatgacatcagtaaaaaaggc

SEQ ID NO: 571189 - DNA, 75 bp, synthetic construct
  source 1..75: mol_type = other DNA
tgagcgtaaaactaaatgatactcaagtaaagctacttgaaaaactaatacaagaaggaaaagcgaaaactaaag

SEQ ID NO: 571190 - DNA, 75 bp, synthetic construct
  source 1..75: mol_type = other DNA
aaatgctcgaaggcttgggcgtcgactcgaaaaaagccaaaatgattggctctattctgggggcaatcgcaggcg

SEQ ID NO: 571191 - DNA, 75 bp, synthetic construct
  source 1..75: mol_type = other DNA
tcatgttgaatttaacattacagcctgcagacgtagcggatcttcgcaatctggctcgaaagatggtcgactcta

SEQ ID NO: 571192 - DNA, 75 bp, synthetic construct
  source 1..75: mol_type = other DNA
acttcagctacgatgcgctggaccggttgtacagcagggcggctttgacgggcggacgcaacgttatcattatga

SEQ ID NO: 571193 - DNA, 75 bp, synthetic construct
  source 1..75: mol_type = other DNA
ggtctggcggcgggagcgtgacctgacggggtggatgtcgctgtcgcgtaaaccggaggagacatggtacgggtg

SEQ ID NO: 571194 - DNA, 75 bp, synthetic construct
  source 1..75: mol_type = other DNA
tgacaaaagtgtggcgagagaaaggcgatatcctgcgtaaccagctggcttttgaccctacaacaactactgcac

SEQ ID NO: 571195 - DNA, 75 bp, synthetic construct
  source 1..75: mol_type = other DNA
tggggagactgtttttggcatcacggtaatacagtagcttttcttacggtcactcagagtcgggaatggaaagaa

SEQ ID NO: 571196 - DNA, 75 bp, synthetic construct
  source 1..75: mol_type = other DNA
aaaaatactttaaatttccgactgatgtctcttatgactcggtattaaatcaaccgcgaccaagttctttatttg

SEQ ID NO: 571197 - DNA, 75 bp, synthetic construct
  source 1..75: mol_type = other DNA
agcttcgcgcggctcatccgcatcgaaacagacaacggtgaacgggagaaagcgcagcgccgcagcctggcggag

SEQ ID NO: 571198 - DNA, 75 bp, synthetic construct
  source 1..75: mol_type = other DNA
cggtataccagccggggagcttcgcgccgctcatccgcatcgagacagagaacggcgaactggataaagcgcagc

SEQ ID NO: 571199 - DNA, 75 bp, synthetic construct
  source 1..75: mol_type = other DNA
tttatattcggcacaataagctatcgcaaataccagaaataccagatactacagcggtttttgattgtggctgta

SEQ ID NO: 571200 - DNA, 75 bp, synthetic construct
  source 1..75: mol_type = other DNA
taggtcaagtggtaaatgatttctctgtcatttgtactgcaaagaaatatctttcaactatagatttttatattg

SEQ ID NO: 571201 - DNA, 75 bp, synthetic construct
  source 1..75: mol_type = other DNA
taataaccagatatcgcgtattgattcatttccgccgaaggctaagaaaatttttattagtaacaataagctaac

SEQ ID NO: 571202 - DNA, 75 bp, synthetic construct
  source 1..75: mol_type = other DNA
aacctttcgttggtggcggagctgtcttcatgaatgccggataccaggaaaatctgctaaatgatgtgaatgctg

SEQ ID NO: 571203 - DNA, 75 bp, synthetic construct
  source 1..75: mol_type = other DNA
tttagagaatttaattaagcaatctgattacatagtgactttatgttctcagtctgcaatagaagcagcattttt

SEQ ID NO: 571204 - DNA, 75 bp, synthetic construct
  source 1..75: mol_type = other DNA
tcccatccatgggaaaggcaaaaaaataatgtgcgttctgctttaacatttgaaaaaataaatgaatatgttaaa

SEQ ID NO: 571205 - DNA, 75 bp, synthetic construct
  source 1..75: mol_type = other DNA
actcattccagcgtgtcggattatcgttcgaaagggagtgtggatttgcccctatatttccagacatctgttatc

SEQ ID NO: 571206 - DNA, 75 bp, synthetic construct
  source 1..75: mol_type = other DNA
tttcgctgctgaagttaaacggtaataaaagcaagcatcaggccaccgttaaaagcattgttaaccatccgggac

SEQ ID NO: 571207 - DNA, 75 bp, synthetic construct
  source 1..75: mol_type = other DNA
atcactacgacgacacatatgtttatgccaacatctcactggcccgtggttttctgtcgtgatcccgccatgctt

SEQ ID NO: 571208 - DNA, 75 bp, synthetic construct
  source 1..75: mol_type = other DNA
tggttggtgtccgccttgagtttttcagggcgcttgaagaagttggcgtgaaggtcgccgcagccggtaaaggag

SEQ ID NO: 571209 - DNA, 75 bp, synthetic construct
  source 1..75: mol_type = other DNA
atcctctcccgcacctacagcagttaccggacaaaaacgcccgcgccggtggggagcctcggccccggctggaaa

SEQ ID NO: 571210 - DNA, 75 bp, synthetic construct
  source 1..75: mol_type = other DNA
ggaactcagtgggcgcggacgtcgccgtatgtaaccagtatccatccccgatcatcccgaaagagcgatggcgat

SEQ ID NO: 571211 - DNA, 75 bp, synthetic construct
  source 1..75: mol_type = other DNA
cgcaggtagtcagggttctatctacccgctaacaggctttaccagcggtgagttttctccgctcgaggcctctct

SEQ ID NO: 571212 - DNA, 75 bp, synthetic construct
  source 1..75: mol_type = other DNA
ttgcgcagggctgtatgccacttggtttgccgatgacatcagtaaaaaagcgcatacattgacgcctgggcgcaa

SEQ ID NO: 571213 - DNA, 75 bp, synthetic construct
  source 1..75: mol_type = other DNA
tggttatgcccgcgactacaactcaactcattccagcgtgtcggattatcgttcgaaagggagtgtcagaggcta

SEQ ID NO: 571214 - DNA, 75 bp, synthetic construct
  source 1..75: mol_type = other DNA
acagttggcgtttgggagtgatggctggttatgcccgcgactacaactcaactcattccagcgtgtcggattatc

SEQ ID NO: 571215 - DNA, 75 bp, synthetic construct
  source 1..75: mol_type = other DNA
aagcttcctatcgccttactttctttgtccataccatttgttgctgtcgtagcaaacatacaccgcacagttcaa

SEQ ID NO: 571216 - DNA, 75 bp, synthetic construct
  source 1..75: mol_type = other DNA
ttgatgaaattgtaacaaacaaagggaaggctcaaccttcgttgacctacaatggcgacagattggcgacagagc

SEQ ID NO: 571217 - DNA, 75 bp, synthetic construct
  source 1..75: mol_type = other DNA
ctttccattggttcttgatatctgtttttatatatttcacccccatcatcatggcaaatattcattatgtagatg

SEQ ID NO: 571218 - DNA, 75 bp, synthetic construct
  source 1..75: mol_type = other DNA
acaaggttttgatagcgcatggattgaaatgcagttagcacatgtagataaaaattctatacggggcacatacaa

SEQ ID NO: 571219 - DNA, 75 bp, synthetic construct
  source 1..75: mol_type = other DNA
tttttagctttcagcaaggtaacctttggcctttgattatattgtttttatttggcgataatgttagcaagatca

SEQ ID NO: 571220 - DNA, 75 bp, synthetic construct
  source 1..75: mol_type = other DNA
tttttattaccggcggcggatcgggattagggctggcgctggtcgagcgatttatcgaagaaggcgcgcaggttg

SEQ ID NO: 571221 - DNA, 75 bp, synthetic construct
  source 1..75: mol_type = other DNA
attcttacgagcaggtagcaagatgtgacggtgaggctcagcgtttcaggctgtgttttacctacttagcagaaa

SEQ ID NO: 571222 - DNA, 75 bp, synthetic construct
  source 1..75: mol_type = other DNA
agctatgccaaagactttgacgaactggacagccgcgtcaccttcgccggataccgcttctctgaaaaaactaca

SEQ ID NO: 571223 - DNA, 75 bp, synthetic construct
  source 1..75: mol_type = other DNA
cggtgaaacttgcagaattccttaacaacccggtaaacacggggaatatcgtagacagtggtgaaccgccccgga

SEQ ID NO: 571224 - DNA, 75 bp, synthetic construct
  source 1..75: mol_type = other DNA
attggtcaataagcgtttatgtcctgttggtgttggtttttctgagcatatgacatattttatttcagatgatgg

SEQ ID NO: 571225 - DNA, 75 bp, synthetic construct
  source 1..75: mol_type = other DNA
ttatttttctgataattcagcgaaagatggcgaccagagctatgcgcgtctgggttttaaaggcgaaacccaaat

SEQ ID NO: 571226 - DNA, 75 bp, synthetic construct
  source 1..75: mol_type = other DNA
caagatttcgccgatgaagttaatcctgattttaacgcgataaatgctattcgtgagctagaactggaaaattat

SEQ ID NO: 571227 - DNA, 75 bp, synthetic construct
  source 1..75: mol_type = other DNA
tttagtgacgtactctcccccttgccgaatgtgcgccgacgtttgcctgcttcggcaaccacgatcgccctgttg

SEQ ID NO: 571228 - DNA, 75 bp, synthetic construct
  source 1..75: mol_type = other DNA
tgctggggacctcaatttttctgaactatttttttatagaaaatgccggttttgaaagaatcgaacaaagaatag

SEQ ID NO: 571229 - DNA, 75 bp, synthetic construct
  source 1..75: mol_type = other DNA
tggggttaacctcggcgcatggcgtctgcgagccgactggcagaccgactaccagcacagcaaaagcaatgatga

SEQ ID NO: 571230 - DNA, 75 bp, synthetic construct
  source 1..75: mol_type = other DNA
tggcaaactccagacaaccattcgcccgccagagatgaatccccgcaggctctatgtcttcaacagcgaggtgcc

SEQ ID NO: 571231 - DNA, 75 bp, synthetic construct
  source 1..75: mol_type = other DNA
tttatggcaaggttaccgctctacgttattttactgatgataagcgtgacgatggtgataaaacttatgcccgtc

SEQ ID NO: 571232 - DNA, 75 bp, synthetic construct
  source 1..75: mol_type = other DNA
gtttcaaaatgatttaggtgcaatgtattatattggcgagattatcaaaaaagactttgtgcaggcaaaatattg

SEQ ID NO: 571233 - DNA, 75 bp, synthetic construct
  source 1..75: mol_type = other DNA
cgctggaattaaaagagcgcaaagaatgctttctattatgtatatggaaggggatggcacagataaaaattacat

SEQ ID NO: 571234 - DNA, 75 bp, synthetic construct
  source 1..75: mol_type = other DNA
cctcttttgataatggtgctggcggtcttgtctttaatgataaaaagacctatcgagtaaacggggatgatttca

SEQ ID NO: 571235 - DNA, 75 bp, synthetic construct
  source 1..75: mol_type = other DNA
ggactggagaaattatttgagctacgtaggcgaaaattgccgatggatgttcgaagagcgcccaaaccatcaacg

SEQ ID NO: 571236 - DNA, 75 bp, synthetic construct
  source 1..75: mol_type = other DNA
cgccgatgttttcagtggtaaaacgaagtctgtgggggctggcctgtatgcttccgccatgtttgattccggtgc

SEQ ID NO: 571237 - DNA, 75 bp, synthetic construct
  source 1..75: mol_type = other DNA
acggttctctggctggcattccaggcaatttttcatgggatggaaccaatgccacattcacccgtgatgcatctg

SEQ ID NO: 571238 - DNA, 75 bp, synthetic construct
  source 1..75: mol_type = other DNA
tataacacaggcgtcagagttctttcctcctgatgaatataaagattctggggtggaagaggctatactagatga

SEQ ID NO: 571239 - DNA, 75 bp, synthetic construct
  source 1..75: mol_type = other DNA
accgatgccgccaccggctcacaggttgagatcgtgaacgtgacagccaaggctggggacatcttcacgattgaa

SEQ ID NO: 571240 - DNA, 75 bp, synthetic construct
  source 1..75: mol_type = other DNA
acttcagctatgtcgggaaaggtgtaaaagaggtaaaagacaaagaaacacgccctcttgatataaaaaaaatta

SEQ ID NO: 571241 - DNA, 75 bp, synthetic construct
  source 1..75: mol_type = other DNA
tgctggcaggaaatggataaacctgactttgataaattatacctatcatcatttatatcttgggatgaggaatct

SEQ ID NO: 571242 - DNA, 75 bp, synthetic construct
  source 1..75: mol_type = other DNA
cctccaaaagtaaactatgaagatacaatcacaaaaccttattgtcagaaactattgtcaatgtttgagtttact

SEQ ID NO: 571243 - DNA, 75 bp, synthetic construct
  source 1..75: mol_type = other DNA
tttagtgacgtactctccccccttgccgaatgtgcgccgacgtttgcctgcttcggcaaccacgatcgccctgtt

SEQ ID NO: 571244 - DNA, 75 bp, synthetic construct
  source 1..75: mol_type = other DNA
gactcggtccatagctttattcgggagggcgaaggcaaagggcaactgctgctggatggccgcaacgccgaactg

SEQ ID NO: 571245 - DNA, 75 bp, synthetic construct
  source 1..75: mol_type = other DNA
gtcggaaaaatcaccgcttagcgcgattcgtctcgccgggctggcgaaagaggccggtctgccggatggtgtgct

SEQ ID NO: 571246 - DNA, 75 bp, synthetic construct
  source 1..75: mol_type = other DNA
atgaattttcatcatctggcttactggcaggataaagcgttaagtctcgccattgaaaaccgcttatttattaac

SEQ ID NO: 571247 - DNA, 75 bp, synthetic construct
  source 1..75: mol_type = other DNA
attgcccgcggcaagagcgtcgatattgaccgtgcggtgagcgcagcacgcggcgtatttgaacgcggcgactgg

SEQ ID NO: 571248 - DNA, 75 bp, synthetic construct
  source 1..75: mol_type = other DNA
cagctgctgaaggacgcgggcgacagcaacatgaaacgcgtctggctggaagcgggcggcaaaagcgccaacatc

SEQ ID NO: 571249 - DNA, 75 bp, synthetic construct
  source 1..75: mol_type = other DNA
gtctgaaaaatcaccgctcagtgcgattcgtctcgccgggctggcgaaagaagcaggcttgccggatggtgtgtt

SEQ ID NO: 571250 - DNA, 75 bp, synthetic construct
  source 1..75: mol_type = other DNA
taatcagctgcctaatcaggtgtctgatgcaatgcacgcctggggtattgacggccaccagctgacggtagaaat

SEQ ID NO: 571251 - DNA, 75 bp, synthetic construct
  source 1..75: mol_type = other DNA
tcaggatttcgacggtattttcaatcaaaccatgcgtaacaccaggaatttgaataacagaagtctgcgggtgaa

SEQ ID NO: 571252 - DNA, 75 bp, synthetic construct
  source 1..75: mol_type = other DNA
tacccggcctgcgattgtcgacaaactggcacagcttactggctggcaggctattgacggatttaaagaaggtga

SEQ ID NO: 571253 - DNA, 75 bp, synthetic construct
  source 1..75: mol_type = other DNA
tatattttttcttggtggcgaaacttcagatttcagaacgtggttcaacgactggatcaagacatttcctgaaaa

SEQ ID NO: 571254 - DNA, 75 bp, synthetic construct
  source 1..75: mol_type = other DNA
ccactgtcgcgttattcagggatatttcttttcccgccccctacccgccgaagaaattccaggctggatgagcag

SEQ ID NO: 571255 - DNA, 75 bp, synthetic construct
  source 1..75: mol_type = other DNA
tgtctgaccgaaaaacgcatccttgccttacttgaagccattaccagcattgggcaaagcctcaatttaaccgtc

SEQ ID NO: 571256 - DNA, 75 bp, synthetic construct
  source 1..75: mol_type = other DNA
aagccggtctgccggatggtgtgttgaacgtggtaactggttttggtcatgaagccgggcaggcgctgtcgcgtc

SEQ ID NO: 571257 - DNA, 75 bp, synthetic construct
  source 1..75: mol_type = other DNA
gaagtcaggggtttgcttcattctcacgagctggccgcatggcaagccatatgggaagcatcatggccaacggag

SEQ ID NO: 571258 - DNA, 75 bp, synthetic construct
  source 1..75: mol_type = other DNA
cattggttttttttattatcttttaatcaacggcccatccatatcgcaatccataattaattcaatgaggcaact

SEQ ID NO: 571259 - DNA, 75 bp, synthetic construct
  source 1..75: mol_type = other DNA
tggtattcagttatttacgatgacattaatcattgggattgggcaatcatttatagatcagtatttttctattat

SEQ ID NO: 571260 - DNA, 75 bp, synthetic construct
  source 1..75: mol_type = other DNA
ccccctaaatcccccaaaccggcttcgttcgatccggctggtgttgaccttcctgaatggctgtcagtttcagtc

SEQ ID NO: 571261 - DNA, 75 bp, synthetic construct
  source 1..75: mol_type = other DNA
tgcagaaatctggtcgtcatgggtggcataccgtcgtgacctgaaaaagccgatcaagtctcagcagaccgtgac

SEQ ID NO: 571262 - DNA, 75 bp, synthetic construct
  source 1..75: mol_type = other DNA
gacgatggttatacgcgtatcgccaatgagctccttgaggctgtcatgcatgcaggtttgtcgcagcatcagctt

SEQ ID NO: 571263 - DNA, 75 bp, synthetic construct
  source 1..75: mol_type = other DNA
ggctgcggcctactttctgcttttgaagcctgatgggcatgttgtccttgcaggtgacgaccggcagcttgggcc

SEQ ID NO: 571264 - DNA, 75 bp, synthetic construct
  source 1..75: mol_type = other DNA
tgctggaagagagcatcgccgatgaattcttagccctgttaaaacagcaggcgcaaaactggcagccggggcatc

SEQ ID NO: 571265 - DNA, 75 bp, synthetic construct
  source 1..75: mol_type = other DNA
tggaaactcggcccggcgctggcggcaggtaacagcgttgtcctgaaaccgtctgaaaaatcaccgctcagtgcg

SEQ ID NO: 571266 - DNA, 75 bp, synthetic construct
  source 1..75: mol_type = other DNA
ttgatatggcttttgtgatattaacaaaggtcagttcagcagcatcaatttggtctccaatgatttcgaccatta

SEQ ID NO: 571267 - DNA, 75 bp, synthetic construct
  source 1..75: mol_type = other DNA
tttatgtggcttaattatactggctttttttgctaaagttgattattcgagtttaattgtgctttcacttctttc

SEQ ID NO: 571268 - DNA, 75 bp, synthetic construct
  source 1..75: mol_type = other DNA
tgagctcgtttgtagcgaggatattagtatcattaatttctcttcttctcagcgtgataattgtacggttatata

SEQ ID NO: 571269 - DNA, 75 bp, synthetic construct
  source 1..75: mol_type = other DNA
gtgatcccgggtagcccggtgatggttcgggtggatatcggggatgtgctttcgcctccgttgccctggattcag

SEQ ID NO: 571270 - DNA, 75 bp, synthetic construct
  source 1..75: mol_type = other DNA
atgagtctggcggatgaagtggcagagttacgccgcagggtggcggacatggtccgtcgcggcgtggtggacgag

SEQ ID NO: 571271 - DNA, 75 bp, synthetic construct
  source 1..75: mol_type = other DNA
taaatccactacaacaaattgaccctatgggattattgcagacttgggatgatgccagatctggagcatgtacgg

SEQ ID NO: 571272 - DNA, 75 bp, synthetic construct
  source 1..75: mol_type = other DNA
gtaagtgaaatggttgtttctggtctttcatcaagaacatctattcctgaattagaatcccctgctgatgtaact

SEQ ID NO: 571273 - DNA, 75 bp, synthetic construct
  source 1..75: mol_type = other DNA
tttaattctactcctgaggtgacaatatcagcaattactaatggaattgaatggcgcttttttacggatctcaat

SEQ ID NO: 571274 - DNA, 75 bp, synthetic construct
  source 1..75: mol_type = other DNA
tgcggtaacggtgatatcggaggcgggtgatctgcgtaatggtcgggtgtatccgggagccaacattgacgcgat

SEQ ID NO: 571275 - DNA, 75 bp, synthetic construct
  source 1..75: mol_type = other DNA
gcaaccttcgctcgtgcacttaacagccacaccagggaggcgttcttttctaacgtatctgcatctattgattat

SEQ ID NO: 571276 - DNA, 75 bp, synthetic construct
  source 1..75: mol_type = other DNA
gcggaacggtttcactgtttgccagaatgtcaaactggtaaccgaggccggcacgggcagtgactttccagtcct

SEQ ID NO: 571277 - DNA, 75 bp, synthetic construct
  source 1..75: mol_type = other DNA
tggctgtcgggtatcagaccaacctccctttcgatctcaacagcagggcttacgactatacgccagcagcagaaa

SEQ ID NO: 571278 - DNA, 75 bp, synthetic construct
  source 1..75: mol_type = other DNA
gcagcatgatgaggaatcagggctgtactataaccgtcaccggtactacgatccgttgcaggggcggtatattac

SEQ ID NO: 571279 - DNA, 75 bp, synthetic construct
  source 1..75: mol_type = other DNA
tcgcagccggactacatgtaccagcggttgtaatgattatgccgatgcattttgccacgacgctagcgcgcggtt

SEQ ID NO: 571280 - DNA, 75 bp, synthetic construct
  source 1..75: mol_type = other DNA
atatagcgtggatgtggcctttaagagaaggacgcagaaaagcaataagaacatttgccaccgccctgacaaaca

SEQ ID NO: 571281 - DNA, 75 bp, synthetic construct
  source 1..75: mol_type = other DNA
gatcttaaaaataacactgtcggtattgcttgtggcgatttttctgccaaatgtagcgatgcatgtattgaaaaa

SEQ ID NO: 571282 - DNA, 75 bp, synthetic construct
  source 1..75: mol_type = other DNA
cgaatctaaattcgttgcggatgataaaaacgcggtactcgaggcctcaactgattcaccttctctggtggcgga

SEQ ID NO: 571283 - DNA, 75 bp, synthetic construct
  source 1..75: mol_type = other DNA
tgttgcggacaataaggctccgaccgtcaaaatgacgacggaactcaccttcaccgtgaaggatgcgtacgggaa

SEQ ID NO: 571284 - DNA, 75 bp, synthetic construct
  source 1..75: mol_type = other DNA
cccggcttcgttaaacctggaaccgaatggcactgcgacaacgaatgagcaagggcaggctattttcaccgccac

SEQ ID NO: 571285 - DNA, 75 bp, synthetic construct
  source 1..75: mol_type = other DNA
ctcggaaaatttagttctggatcctaaagggacggcgaaaactaatgagcaaggacaggctgttttcaccggctc

SEQ ID NO: 571286 - DNA, 75 bp, synthetic construct
  source 1..75: mol_type = other DNA
accaggggtttacagcgccacggtttcttcgacccgtgccggaaacgttgttgtgcgtgctttcagcgagcagta

SEQ ID NO: 571287 - DNA, 75 bp, synthetic construct
  source 1..75: mol_type = other DNA
cgctttttctggtttaacaacatcaaggattaccggggaaatatattgcccacaaacatcagcatcagaaggcta

SEQ ID NO: 571288 - DNA, 75 bp, synthetic construct
  source 1..75: mol_type = other DNA
atattgctataaaaattggcatggggccgtttggttcaaatattaaagcatcacaatttgttagtagcggtatcc

SEQ ID NO: 571289 - DNA, 75 bp, synthetic construct
  source 1..75: mol_type = other DNA
gctctggatgtaggaaacccaattccggaagccctgcaatctcgcgccgaattgcgtcaaaaagtacgtaattgt

SEQ ID NO: 571290 - DNA, 75 bp, synthetic construct
  source 1..75: mol_type = other DNA
tcaaatcactaagcgcagagtataataggttatccacactgccttcattacccttgaatttaaaaaagcttgagg

SEQ ID NO: 571291 - DNA, 75 bp, synthetic construct
  source 1..75: mol_type = other DNA
tgtgaccagcaagacggggaatacagtaacaaccaatgcggcagggaaagtggacattgagcttatgtcaacggt

SEQ ID NO: 571292 - DNA, 75 bp, synthetic construct
  source 1..75: mol_type = other DNA
cgtgatggttacaacgaaaccacgttggaggcgttcgggtgcacgtcacgcgggcaagcgtaccgcgcgggcaaa

SEQ ID NO: 571293 - DNA, 75 bp, synthetic construct
  source 1..75: mol_type = other DNA
ggagtctcactaacagccctccgcaacaccctgctcccgaaacttatctccggtgagctatccctggaagatctt

SEQ ID NO: 571294 - DNA, 75 bp, synthetic construct
  source 1..75: mol_type = other DNA
taaagaagctcaaatctgggataaattcaaagcatataataagagcctgacaggaaaggctgatttcaaattatt

SEQ ID NO: 571295 - DNA, 75 bp, synthetic construct
  source 1..75: mol_type = other DNA
agttatctaaggtgaataaagctaaattatcaacaattgttctcaataagccagcatatttggctgcattgattc

SEQ ID NO: 571296 - DNA, 75 bp, synthetic construct
  source 1..75: mol_type = other DNA
ccgatgtcgtttctgaacgttttgatgcaggcgtcctgaggtgtactggcaatagcggatactaccatttgttct

SEQ ID NO: 571297 - DNA, 75 bp, synthetic construct
  source 1..75: mol_type = other DNA
tgaaacaggcactgaatgacgcagtgggcgatgctattcgcaacgcactgaagccaggcggtctgctgtacaaac

SEQ ID NO: 571298 - DNA, 75 bp, synthetic construct
  source 1..75: mol_type = other DNA
tgaacaccctaattaactctttccacgacaactggcatttaccaaccttacagcttgttaatgcagcgtggcgtg

SEQ ID NO: 571299 - DNA, 75 bp, synthetic construct
  source 1..75: mol_type = other DNA
ttagcataccgatgtactctgctctgacaaacgaagctcaggattatgttatccaatgtattcaggagttttttt

SEQ ID NO: 571300 - DNA, 75 bp, synthetic construct
  source 1..75: mol_type = other DNA
atggcacttgaacaggaaatcgcaaatcttgtaaatgattttgttgcgggtggtcgtccatcctgtcgtgatcag

SEQ ID NO: 571301 - DNA, 75 bp, synthetic construct
  source 1..75: mol_type = other DNA
atgaacactatgatctctcaaatatctttaatagcaccaataaccagccagggcagattgttgttttaccggaaa

SEQ ID NO: 571302 - DNA, 75 bp, synthetic construct
  source 1..75: mol_type = other DNA
ataagaagcattggcatattataatatatgtatcaacggctttttttgctatatatggagggttgtcattaattt

SEQ ID NO: 571303 - DNA, 75 bp, synthetic construct
  source 1..75: mol_type = other DNA
gggtatgccttgctgcaccgtaaaattatggatgtgccgttttacaaggacgcagaagctgcgcatctgtgggtt

SEQ ID NO: 571304 - DNA, 75 bp, synthetic construct
  source 1..75: mol_type = other DNA
cagcaccaccgctgaatgacattgttgttgagttaagcgtaccaatatctttcggcgtcagtgttatatccgctg

SEQ ID NO: 571305 - DNA, 75 bp, synthetic construct
  source 1..75: mol_type = other DNA
ccgcaatgccctggaggcagttaccgctttttgtggcgaccagtgtgtataccgatgaccttataatgttacccg

SEQ ID NO: 571306 - DNA, 75 bp, synthetic construct
  source 1..75: mol_type = other DNA
gcccgtgacgcgcactatctttaccggtatgaccgttacggcaggctgacggagaaaaccgacctcatcccggaa

SEQ ID NO: 571307 - DNA, 75 bp, synthetic construct
  source 1..75: mol_type = other DNA
aagaaggggcagccaatatgcctgatatctctctggtggatgccagaattcagcagcagaatgttgccattcaga

SEQ ID NO: 571308 - DNA, 75 bp, synthetic construct
  source 1..75: mol_type = other DNA
cacgcccgcataaagcgattttctttcatctttcttgcctcacccttatctgtagtgcgcaagtttatgcgaagc

SEQ ID NO: 571309 - DNA, 75 bp, synthetic construct
  source 1..75: mol_type = other DNA
tctgaaacacatgagataaacggtaatccagttgtgattattttagaaggtcctaatgcggctaagaatcctgca

SEQ ID NO: 571310 - DNA, 75 bp, synthetic construct
  source 1..75: mol_type = other DNA
gaaaggcgcatccccattttcgccatctgccggggtttacaggaactggtggtggcaaccggtggttcgttgcat

SEQ ID NO: 571311 - DNA, 75 bp, synthetic construct
  source 1..75: mol_type = other DNA
actggagaacttgttcgaagttgctcaaaggccgccagaggataagtacacaaagctcttacaggaatataaaaa

SEQ ID NO: 571312 - DNA, 75 bp, synthetic construct
  source 1..75: mol_type = other DNA
gctggacttgtcgattcccttaccccagggggcgcgttatcaggcctggacgcgtaaagagccggttggcgtagt

SEQ ID NO: 571313 - DNA, 75 bp, synthetic construct
  source 1..75: mol_type = other DNA
accgtttggtgggatgaagcagtcaggaacaggccgtgattttggcccggactggctggacggttggtgtgaaac

SEQ ID NO: 571314 - DNA, 75 bp, synthetic construct
  source 1..75: mol_type = other DNA
tgggttaagctggaaggaaagccgcttcccgcacagacaccgcccctgaaatgggcctgtctgaaactggctaaa

SEQ ID NO: 571315 - DNA, 75 bp, synthetic construct
  source 1..75: mol_type = other DNA
ggcaacattaaagcaagacgggaatattgctatcgaacccggcgaatttaaagccaccagtactttccaggtaac

SEQ ID NO: 571316 - DNA, 75 bp, synthetic construct
  source 1..75: mol_type = other DNA
ggcgacgtgcttatcgacgtgcctaaaccgtggaatgatcccatggcgaataaccctctgacgacgctcaatttg

SEQ ID NO: 571317 - DNA, 75 bp, synthetic construct
  source 1..75: mol_type = other DNA
taagctggaagctaattttgacaaagagcggctttccaaaatggaaacccacttaaccgtaatgggcggcaacca

SEQ ID NO: 571318 - DNA, 75 bp, synthetic construct
  source 1..75: mol_type = other DNA
gagataataaccacatcatagaaactttttcgtacaaggtttttagtaactcgatccctaatcaatggataataa

SEQ ID NO: 571319 - DNA, 75 bp, synthetic construct
  source 1..75: mol_type = other DNA
gccactacgaacgacgctggctgatagaggaatatcataaggcgtggaaaagtggtggtacatgtgtggaatcgc

SEQ ID NO: 571320 - DNA, 75 bp, synthetic construct
  source 1..75: mol_type = other DNA
gtgtattatggcactcaaaaagatattgatattatcaaaagtatattgccaactattgatacggttcctgatgag

SEQ ID NO: 571321 - DNA, 75 bp, synthetic construct
  source 1..75: mol_type = other DNA
agagtacggtccgtttaaaacggtggaggatctaaagcaggtgccggggatgggcaattcgctggtggaacgtaa

SEQ ID NO: 571322 - DNA, 75 bp, synthetic construct
  source 1..75: mol_type = other DNA
cgtgcgtacgctgctgccgggtaataatcttttctggatagcgccgctgataaatcaggttgaccccggcatgcg

SEQ ID NO: 571323 - DNA, 75 bp, synthetic construct
  source 1..75: mol_type = other DNA
gtcgctgtcacggaaaccgcaagtgacctggtacggctgggacggcgaccggctgaccacaatacagaacgacag

SEQ ID NO: 571324 - DNA, 75 bp, synthetic construct
  source 1..75: mol_type = other DNA
atcgttagcgagcgagataaattccgcaatatgctggttgactggtggtcacgcggtgagaaaaccatgtcccgc

SEQ ID NO: 571325 - DNA, 75 bp, synthetic construct
  source 1..75: mol_type = other DNA
gaagaggccgaggcgctgtttaccggcatctatcgggatggtctcaaggcgctgaaggacaactttgttgcctga

SEQ ID NO: 571326 - DNA, 75 bp, synthetic construct
  source 1..75: mol_type = other DNA
tattctgttattctaacaaaattgtcgaatatattaaaacgcattctccgtttgaaatggagtatgtcgatgttg

SEQ ID NO: 571327 - DNA, 75 bp, synthetic construct
  source 1..75: mol_type = other DNA
ctgaatccggttggcgtgtgcctttaattccaagtttgattatcagcaatagttttcgagttgttgctgagctta

SEQ ID NO: 571328 - DNA, 75 bp, synthetic construct
  source 1..75: mol_type = other DNA
aattgaggcttcactaccagcatcaaaacaagaaacaatcggcgattacttggtattaccctatgccgaacaaat

SEQ ID NO: 571329 - DNA, 75 bp, synthetic construct
  source 1..75: mol_type = other DNA
ccgagatttgcgccgtactgcgcgtagttacttcccagcattaggcataagccaggaggtatcacgcaaaatcat

SEQ ID NO: 571330 - DNA, 75 bp, synthetic construct
  source 1..75: mol_type = other DNA
attaaacaaagattacaacataaacgaagcattgatttctgtaaagccagatcttgctgataaaagtaagttatc

SEQ ID NO: 571331 - DNA, 75 bp, synthetic construct
  source 1..75: mol_type = other DNA
aaaaaaaattatgtgattggttgtaacttaaacgccataaaaaataaaaaactcaacatgttattaaaattatta

SEQ ID NO: 571332 - DNA, 75 bp, synthetic construct
  source 1..75: mol_type = other DNA
ggtgccggtaaagagggtttcaccggcaatcagttgattctggttattcagatagccatgagaatgttcctccgg

SEQ ID NO: 571333 - DNA, 75 bp, synthetic construct
  source 1..75: mol_type = other DNA
ctcactggctgccggtcataaaacgctgatcccggaactggtcgaagcgctgaaaaaatggggacgcgaagatat

SEQ ID NO: 571334 - DNA, 75 bp, synthetic construct
  source 1..75: mol_type = other DNA
caattagtcaaaatcataccggaacaggccataatgttgctggtaacttaattgtatacaatagtgataatgttg

SEQ ID NO: 571335 - DNA, 75 bp, synthetic construct
  source 1..75: mol_type = other DNA
agtcttgtgtggaggatggaaaggaacctgataccccgtttaaaggcgtgtttaacgtcaggcttgatccagaac

SEQ ID NO: 571336 - DNA, 75 bp, synthetic construct
  source 1..75: mol_type = other DNA
gtgcgtgttatcagtggttcataatggagtttggtgaagttccggatactgatatggaggtgttacttgaaaaaa

SEQ ID NO: 571337 - DNA, 75 bp, synthetic construct
  source 1..75: mol_type = other DNA
gaacatcatccgctcgcgacacaatcggcagtgacgattgaggatctggtagcgatgcccatggttctgctggat

SEQ ID NO: 571338 - DNA, 75 bp, synthetic construct
  source 1..75: mol_type = other DNA
acgctgccgtatgtttatctcagaccagtatattcctggcatggcggcgccgagctatttcgatccgcaggtggt

SEQ ID NO: 571339 - DNA, 75 bp, synthetic construct
  source 1..75: mol_type = other DNA
caattatttagcacatgattgtgatctcaacgatactctggttctttgccagcttacccatcatcacaatggata

SEQ ID NO: 571340 - DNA, 75 bp, synthetic construct
  source 1..75: mol_type = other DNA
aatcgcaacacaagctaactgaagaatttgcaggtaaacagctcgcgatatggcaacgcaatttcaatctttcgg

SEQ ID NO: 571341 - DNA, 75 bp, synthetic construct
  source 1..75: mol_type = other DNA
tacagggcgcgtttaatcacttcccggggatggacttccgtgcggttgatggtgccggtgaagagggtttcaccg

SEQ ID NO: 571342 - DNA, 75 bp, synthetic construct
  source 1..75: mol_type = other DNA
gctctcccgcgcggtattacaaacgctgattgaatacggttactttaatgatgaatcttcactgctttcaatact

SEQ ID NO: 571343 - DNA, 75 bp, synthetic construct
  source 1..75: mol_type = other DNA
tccgctcacgttcgaggaaatacgtcagttgctggaaaacgcaccgtcagttaaacatgcttgcgcatattgtcg

SEQ ID NO: 571344 - DNA, 75 bp, synthetic construct
  source 1..75: mol_type = other DNA
ctatagaagaattattacttgcagctaatgactgggtaaaagaggttcgccttgctgcaaccatagcattacgtc

SEQ ID NO: 571345 - DNA, 75 bp, synthetic construct
  source 1..75: mol_type = other DNA
taactctgctcggctaaagctttctaccgagttcagaagtaccatgatgtcaggtgatgccgaaatgactggcac

SEQ ID NO: 571346 - DNA, 75 bp, synthetic construct
  source 1..75: mol_type = other DNA
ggcaggaacgatcctcgcaagccgattagtaaggagagcattaaccaagtcattgaattactggggtataaggga

SEQ ID NO: 571347 - DNA, 75 bp, synthetic construct
  source 1..75: mol_type = other DNA
gtaattgaattacttggatataagggaagactcacagggcacggtttcagacacaccatgagtacaattctgcat

SEQ ID NO: 571348 - DNA, 75 bp, synthetic construct
  source 1..75: mol_type = other DNA
attatcacgaagacagcgactcagatcattatgttaaccggtgtacgcacgcaagaactgcgttttgctcgctgg

SEQ ID NO: 571349 - DNA, 75 bp, synthetic construct
  source 1..75: mol_type = other DNA
ttacggggaaatgctggttggctcccgccgtatatcccaggacatcagcacccgtgatgaaggcgggggcggaac

SEQ ID NO: 571350 - DNA, 75 bp, synthetic construct
  source 1..75: mol_type = other DNA
atgaagccagaggaaatatttatctgtatgaaggaatatggtaatgcctggattagtatcatatatatcatcgac

SEQ ID NO: 571351 - DNA, 75 bp, synthetic construct
  source 1..75: mol_type = other DNA
atcgtttgttctatggcgctgacttcggttttgctaatgacccgtcaacactggttcgctgcttcatcattggca

SEQ ID NO: 571352 - DNA, 75 bp, synthetic construct
  source 1..75: mol_type = other DNA
aaatttctcctgcgctatctctggcagggccgtaaacgcgccatcagtattggtcactggccggagattgacgtc

SEQ ID NO: 571353 - DNA, 75 bp, synthetic construct
  source 1..75: mol_type = other DNA
agaatagcattcgtggtatttataaccatgctcagtatcttgatggcagggctcgcatgcttcaattttatgccg

SEQ ID NO: 571354 - DNA, 75 bp, synthetic construct
  source 1..75: mol_type = other DNA
gacctgaaacatcagcttagtattggcgcattaaaacctggcgcacgcctgattactaaaaatctggcggagtaa

SEQ ID NO: 571355 - DNA, 75 bp, synthetic construct
  source 1..75: mol_type = other DNA
attgccgcaccagctgccgagcaagggccgacgccgatccagctgctgctggccaagtacaaccgcaacaagtcg

SEQ ID NO: 571356 - DNA, 75 bp, synthetic construct
  source 1..75: mol_type = other DNA
cccggcagaggtaatgaagatgaaacggcctcatattgtaccactctcagagcaggtcattgcgctatttaagca

SEQ ID NO: 571357 - DNA, 75 bp, synthetic construct
  source 1..75: mol_type = other DNA
ttagctacaccgaaaaaagaacattttcccttccttactgccaatgaacttccccatttcctcaaagatctggcg

SEQ ID NO: 571358 - DNA, 75 bp, synthetic construct
  source 1..75: mol_type = other DNA
gcgaatctcccaggacatcagcacccgtgatgaaggcgggggcgggaaggtggtggttatcgggcggcaggggta

SEQ ID NO: 571359 - DNA, 75 bp, synthetic construct
  source 1..75: mol_type = other DNA
ttgaagcattcccgtcaccagcatactgggcctaccaagtattggctcgtcgactggaaattaatacagttaatt

SEQ ID NO: 571360 - DNA, 75 bp, synthetic construct
  source 1..75: mol_type = other DNA
agaaataaaaaaatagcactgcatgagttttctgcgtcattgttagcgagtttttcagggcgaagaccattgcaa

SEQ ID NO: 571361 - DNA, 75 bp, synthetic construct
  source 1..75: mol_type = other DNA
attgatggatatctgaatacgcttgctttttatgcctgccgatatagccccagctatgtatcgaaaataaataat

SEQ ID NO: 571362 - DNA, 75 bp, synthetic construct
  source 1..75: mol_type = other DNA
cgcagtattactacgaatttcgtactgtaaccaatgacgacttaaaacgcgaaaaaaaggtaatagaacatgtcg

SEQ ID NO: 571363 - DNA, 75 bp, synthetic construct
  source 1..75: mol_type = other DNA
acaacggcgctgggaatgggctttgacaaaccggatttggggtttgttattcattaccagatgccaggttcgata

SEQ ID NO: 571364 - DNA, 75 bp, synthetic construct
  source 1..75: mol_type = other DNA
gaggcaggcgatttgctggacatgtgggagaagcgcgtcaccgagggtaagcctgtgccgccggtacgccgggca

SEQ ID NO: 571365 - DNA, 75 bp, synthetic construct
  source 1..75: mol_type = other DNA
gtatatgctgatcaactggctgccgatgctgctggtggagcagggctttcggccatcgcaggcggcaggcgtaat

SEQ ID NO: 571366 - DNA, 75 bp, synthetic construct
  source 1..75: mol_type = other DNA
gatgaatcggggctggtacacagcgtggtggtggccgccgcaccgttgcgcgccctgtttgcgccagcgacggcg

SEQ ID NO: 571367 - DNA, 75 bp, synthetic construct
  source 1..75: mol_type = other DNA
ttgaggacttgagtttggtccagcgcgagaggttggcctacatcgattttcggctctatttcttcggtgagatcg

SEQ ID NO: 571368 - DNA, 75 bp, synthetic construct
  source 1..75: mol_type = other DNA
gtataccttaggaacaaaacttgctcgtgaagggtatagggacgagataattgcagagttattagatcattcgtc

SEQ ID NO: 571369 - DNA, 75 bp, synthetic construct
  source 1..75: mol_type = other DNA
cattcgtcatcggagccatcacgacagggggtatttcctgtaatatgtactcaacttcatcccggtactgtaacg

SEQ ID NO: 571370 - DNA, 75 bp, synthetic construct
  source 1..75: mol_type = other DNA
gcacctgaacctcccgcagcttgaccgggactacgactggaacgacaacggacagctaatccgcatcagcggccc

SEQ ID NO: 571371 - DNA, 75 bp, synthetic construct
  source 1..75: mol_type = other DNA
tatttagtgtgagcttaactgttcctgaaaatgtatcccaggtaacggtctaccctgtttatgatgaagattatg

SEQ ID NO: 571372 - DNA, 75 bp, synthetic construct
  source 1..75: mol_type = other DNA
atcccgcagcgtgagttcctcggcctgtcctccgggaacagtcaggaactgctgcacgtcatcggggatttctgg

SEQ ID NO: 571373 - DNA, 75 bp, synthetic construct
  source 1..75: mol_type = other DNA
acttattggcggtacagatggtagtaaatatatcggtttcggcgcttcaacggtttacgatgcaatcaggaaaac

SEQ ID NO: 571374 - DNA, 75 bp, synthetic construct
  source 1..75: mol_type = other DNA
agcacttgaattggaaaaccccttcccggattcggcatgttgtctgacatggcagcaaaatgatatgtcgcctgc

SEQ ID NO: 571375 - DNA, 75 bp, synthetic construct
  source 1..75: mol_type = other DNA
attgctcaggagatgctggatagaggtttagacagagagttagttatgatggtgacccgactatcgccagacgat

SEQ ID NO: 571376 - DNA, 75 bp, synthetic construct
  source 1..75: mol_type = other DNA
agacgcgtagcggcgcatctggcaccggtgcacaaccgccggatgcggcgtgaacgccttatccggcctacgggt

SEQ ID NO: 571377 - DNA, 75 bp, synthetic construct
  source 1..75: mol_type = other DNA
gtcgttgaattttagtgcgcgatatattcagacagaaagtaatgtaacgccagggaaagcggatgcggatgcgac

SEQ ID NO: 571378 - DNA, 75 bp, synthetic construct
  source 1..75: mol_type = other DNA
gcacaggtggcgtatggagtgctgaagtcaggcgtgccgttcgatgcgtcacggcataatccggtagcggcgtaa

SEQ ID NO: 571379 - DNA, 75 bp, synthetic construct
  source 1..75: mol_type = other DNA
agagaataaggaacttgttgaagttatacaatgtgctaaaagtgaacatattccggtaacaattgtttcggcttc

SEQ ID NO: 571380 - DNA, 75 bp, synthetic construct
  source 1..75: mol_type = other DNA
ctatccttttccatggagataataaatatgaagtttatgcaacctccgagtacgctgacgtagatagaatcattc

SEQ ID NO: 571381 - DNA, 75 bp, synthetic construct
  source 1..75: mol_type = other DNA
taacattgtggattatgttcttccctgcctgtatgtccggaggacgttgctgttctgtgtgtgtcagcgagtggg

SEQ ID NO: 571382 - DNA, 75 bp, synthetic construct
  source 1..75: mol_type = other DNA
tacgttttgaaggcgatacggtaagtggaagtaataattcaatcctgaagctaactcaacagaataattctgcct

SEQ ID NO: 571383 - DNA, 75 bp, synthetic construct
  source 1..75: mol_type = other DNA
gtacgatagttctcagagcaagcgctttacttcaggccatgagccaggatattgaggagcagaaaaagaatttaa

SEQ ID NO: 571384 - DNA, 75 bp, synthetic construct
  source 1..75: mol_type = other DNA
atgcgctacaacatcaatgcccgttttatctacgacgccaccgacggaaccctgacgctgccgcaaagcgatgaa

SEQ ID NO: 571385 - DNA, 75 bp, synthetic construct
  source 1..75: mol_type = other DNA
ggtgtttcctcaacacaaattagcaagtggaaaaaaggggaacacatgtccgctgatatggaaaaaagttcagaa

SEQ ID NO: 571386 - DNA, 75 bp, synthetic construct
  source 1..75: mol_type = other DNA
ggtgatcatcatgcgcgatcgtaaacaggtggcggagatccctctggcagagctttccgttccggcgatcatgaa

SEQ ID NO: 571387 - DNA, 75 bp, synthetic construct
  source 1..75: mol_type = other DNA
gctgcgcgactcgctggcccggcttgataccagcggttgcactggtgaactgcctatcagcgccggtaacagcgt

SEQ ID NO: 571388 - DNA, 75 bp, synthetic construct
  source 1..75: mol_type = other DNA
gataccagcggctgcaccggtgagctgccaatcagcgccggtaacagtgtcgggctgtttatggtggtcggaggc

SEQ ID NO: 571389 - DNA, 75 bp, synthetic construct
  source 1..75: mol_type = other DNA
ggatacctccggttgcacgtcagagctgcccatcgatgtcgggcagaaggttgggatgttcctcgttgttggggg

SEQ ID NO: 571390 - DNA, 75 bp, synthetic construct
  source 1..75: mol_type = other DNA
tcgcgttgcgaatggctatggtctgaacggagctgctgcgcaatttagcttgtctgacatggacccaattactgc

SEQ ID NO: 571391 - DNA, 75 bp, synthetic construct
  source 1..75: mol_type = other DNA
aacttcaggaaaatttaggcggtgcctccagggagcaggctctggaaattgcaacccaaacagcgtacttatgcc

SEQ ID NO: 571392 - DNA, 75 bp, synthetic construct
  source 1..75: mol_type = other DNA
ttcagcttatctgatgtagacccaattactgctcaagttaaacaaatgcctactttagaacagttaaaatcctag

SEQ ID NO: 571393 - DNA, 75 bp, synthetic construct
  source 1..75: mol_type = other DNA
cgatggcatcatcgccgccgcctcggttcgggaaaatatcatcctcgctctccaggcccagcgcggctggttacg

SEQ ID NO: 571394 - DNA, 75 bp, synthetic construct
  source 1..75: mol_type = other DNA
atgccccgggaagtcacctttcagacgggcggagggctggtgaattatccgcgattactgagcagtatggataat

SEQ ID NO: 571395 - DNA, 75 bp, synthetic construct
  source 1..75: mol_type = other DNA
tttttagtgaagatggcctctatactgtgcgcgttgagaatggcgctattgtcagccactgccttccagactaca

SEQ ID NO: 571396 - DNA, 75 bp, synthetic construct
  source 1..75: mol_type = other DNA
cagtggacgccgcgcttttatgagagccacccggcacgggagttctgcgtccagtacggtgaaagcgacctggcg

SEQ ID NO: 571397 - DNA, 75 bp, synthetic construct
  source 1..75: mol_type = other DNA
tccaccgataccacgaacaagatactggggcaggagtttgccaaaattcacatcattgccgggtatgacggcata

SEQ ID NO: 571398 - DNA, 75 bp, synthetic construct
  source 1..75: mol_type = other DNA
tgcgacagatggcgtttatatcgtcaaagctatcgactatactggcgacaccagaggtcaggcgtggtacatgga

SEQ ID NO: 571399 - DNA, 75 bp, synthetic construct
  source 1..75: mol_type = other DNA
cgatgcaggattttaacgcgttcggcgtgacgcagggcattaccggcgactttcctgataccgtgtttcctcgtg

SEQ ID NO: 571400 - DNA, 75 bp, synthetic construct
  source 1..75: mol_type = other DNA
accaggcgtttaacgaggccgtttcatccggcagcctgtctgccgggtataagctgtcagatgttcactcggtgc

SEQ ID NO: 571401 - DNA, 75 bp, synthetic construct
  source 1..75: mol_type = other DNA
aaccgcgacaccatgagccgtataacgggctcagagttctctcggatcactattattgccgggtatgacgggctg

SEQ ID NO: 571402 - DNA, 75 bp, synthetic construct
  source 1..75: mol_type = other DNA
atagcgcagcccgccagtgtggccactgatggcgtctacattgtccagtcaataagctacaccggtgatacgagg

SEQ ID NO: 571403 - DNA, 75 bp, synthetic construct
  source 1..75: mol_type = other DNA
gcttgagagtagttctggtgctgacattgtaatgactggatcagctccattcattgttagaagtgttggcgacat

SEQ ID NO: 571404 - DNA, 75 bp, synthetic construct
  source 1..75: mol_type = other DNA
catgggtttgaaataatttgtatctgggggatgttgatcaattccatcctttacttgcaaacaacagagactgtc

SEQ ID NO: 571405 - DNA, 75 bp, synthetic construct
  source 1..75: mol_type = other DNA
atcgtagttatcgtttcagatatgagcattatcctatcttcggtgaagaagaggggtgttatcactgtgtgttac

SEQ ID NO: 571406 - DNA, 75 bp, synthetic construct
  source 1..75: mol_type = other DNA
ttgagttgcagctgttggaccagaacgggcagggtatttccctgtctgattttaaggtcacgttccagatcgagt

SEQ ID NO: 571407 - DNA, 75 bp, synthetic construct
  source 1..75: mol_type = other DNA
ttactgtcactggtaaagataatgccacagacagttggatcatgttgcagtgtattgacagctgggaaggccacc

SEQ ID NO: 571408 - DNA, 75 bp, synthetic construct
  source 1..75: mol_type = other DNA
cgggtatgctttgccttatctggtcatggctggtttcccgcacgctttcgctggccgggaaaacattgcgaggag

SEQ ID NO: 571409 - DNA, 75 bp, synthetic construct
  source 1..75: mol_type = other DNA
acggcttaattcagcttgaccaggcatctgtctatcgcacccaactgccgaacgatgagatccaaagatcacagg

SEQ ID NO: 571410 - DNA, 75 bp, synthetic construct
  source 1..75: mol_type = other DNA
ggcatttgtattaccggtgtcggtgtcagcaacgaagatgctcatatcctacaaaatgataaagctaatatggct

SEQ ID NO: 571411 - DNA, 75 bp, synthetic construct
  source 1..75: mol_type = other DNA
tccggcctacaaattctcaagcattcaatcagttgcaatgcctgctgtagatactgttatggcctgcaagttttt

SEQ ID NO: 571412 - DNA, 75 bp, synthetic construct
  source 1..75: mol_type = other DNA
gcgcaatataccttgatactcagggatattacgctggagtgcgtcagggcgttcaggatgcggcaaaagattctt

SEQ ID NO: 571413 - DNA, 75 bp, synthetic construct
  source 1..75: mol_type = other DNA
aacgattcgctcaaaaacatataaagggaacgggtttaatgaactgcggtttgaagatatgaccgggcaggaaga

SEQ ID NO: 571414 - DNA, 75 bp, synthetic construct
  source 1..75: mol_type = other DNA
ctctttgacattaagaaacaatggtcatatagagatcaaaggaataaaagttacgatagaaggcagtgatgatgt

SEQ ID NO: 571415 - DNA, 75 bp, synthetic construct
  source 1..75: mol_type = other DNA
gaatacgtttcaggccataccagcggataaaacctggcgtcccacgccgcagcctaagccgaaagtggatggccc

SEQ ID NO: 571416 - DNA, 75 bp, synthetic construct
  source 1..75: mol_type = other DNA
tatcggcaacggcgtaaacgtccgcgcgctgattaacccgaacatccgggttaacgggctcattcagctggatca

SEQ ID NO: 571417 - DNA, 75 bp, synthetic construct
  source 1..75: mol_type = other DNA
ctgaccgggcattcgctacctcgatcactgcgcagacgctggcggcaggctatacggtctctgacgtcaatgcag

SEQ ID NO: 571418 - DNA, 75 bp, synthetic construct
  source 1..75: mol_type = other DNA
ctttcagctgataccgtaaaccggatcgtcggtgaggaattctcccggattagggttatcgctggttacgatggc

SEQ ID NO: 571419 - DNA, 75 bp, synthetic construct
  source 1..75: mol_type = other DNA
acgacaccttggaaaaaaagtgcaactgtgatcactaataattggggttacagtaacacaattattggtggtgac

SEQ ID NO: 571420 - DNA, 75 bp, synthetic construct
  source 1..75: mol_type = other DNA
atgggcttattcagttggatcaggcgtcggtgtaccgcaatccattgtcgaatcaggatatatttagtgggcgat

SEQ ID NO: 571421 - DNA, 75 bp, synthetic construct
  source 1..75: mol_type = other DNA
aggaaaagacagccccattgattcttacgttctgattcaggcagccgatacggatctggcttttgccaccagcat

SEQ ID NO: 571422 - DNA, 75 bp, synthetic construct
  source 1..75: mol_type = other DNA
cagcgtgttggcggacaacggcgcaacggtcgctccggtggtcaccacgcagccggacggcacggtggaaatcag

SEQ ID NO: 571423 - DNA, 75 bp, synthetic construct
  source 1..75: mol_type = other DNA
ggtggagatcagtgtcaccagtcagacggcggggatcagtacagtcactgcaaccatcaacaacagcacctcgag

SEQ ID NO: 571424 - DNA, 75 bp, synthetic construct
  source 1..75: mol_type = other DNA
caccctgagccagaacgtgacatttatcgctgatgtcaggacggcgcagattgcggatctggtggtcattaagga

SEQ ID NO: 571425 - DNA, 75 bp, synthetic construct
  source 1..75: mol_type = other DNA
tcgccttataccttcaataaatatgctgaatacgccgatttcaccagcgacatgttggtctacgaaaaaacctat

SEQ ID NO: 571426 - DNA, 75 bp, synthetic construct
  source 1..75: mol_type = other DNA
atataagccaaaaggattgccatggtaatgtgtgccatggggatgtgctcaatcatgatggagaaaatagtttta

SEQ ID NO: 571427 - DNA, 75 bp, synthetic construct
  source 1..75: mol_type = other DNA
atcaacaacagcagccagagccggaacgtcacgtttatcgccgatgtcaggacggcgaagatcgctgatctggtg

SEQ ID NO: 571428 - DNA, 75 bp, synthetic construct
  source 1..75: mol_type = other DNA
ttataattggaccagtggtatacagggtattcaggtcgatagcaatggtatggtgactttagaatttatcatcaa

SEQ ID NO: 571429 - DNA, 75 bp, synthetic construct
  source 1..75: mol_type = other DNA
atcgccgatgtcagcacggcgcagatcgctgatctggtggtcattaaggacggctcagtggcagacggttcgacg

SEQ ID NO: 571430 - DNA, 75 bp, synthetic construct
  source 1..75: mol_type = other DNA
ccggacgggacggtggagatctcagtcaccagccagaccgccggaaccagtactgtcactgcaaccatcaacagc

SEQ ID NO: 571431 - DNA, 75 bp, synthetic construct
  source 1..75: mol_type = other DNA
acggtcagcgtgttggcagacaacggtgcaacggtcgctttgacggaaaccacaaagccggacggcacggcggaa

SEQ ID NO: 571432 - DNA, 75 bp, synthetic construct
  source 1..75: mol_type = other DNA
acggtcgcttcgacggtgaccacgcagccggacggcacggtggagatcagtgtcaccagccagacggcggggatc

SEQ ID NO: 571433 - DNA, 75 bp, synthetic construct
  source 1..75: mol_type = other DNA
gaacgtgacgtttatcgccgatgtcagcacggcgaagatagcggatctggtcgttagccaggataacgccgtggc

SEQ ID NO: 571434 - DNA, 75 bp, synthetic construct
  source 1..75: mol_type = other DNA
agaagctatcttcaatgagtcaagtaacggggcatgcaactattgctggaaaatacaaatgtaatacttgtaacg

SEQ ID NO: 571435 - DNA, 75 bp, synthetic construct
  source 1..75: mol_type = other DNA
atgaaaaatagaaatcgtatgatcgtgaactgtgttactgcttacctgatgtgttgttggagcttgcctgcactg

SEQ ID NO: 571436 - DNA, 75 bp, synthetic construct
  source 1..75: mol_type = other DNA
acggagcgaccagcaccggcggcctgggcgatgttaccggcccccgacttactgactccgctgaacgggattatt

SEQ ID NO: 571437 - DNA, 75 bp, synthetic construct
  source 1..75: mol_type = other DNA
gcggcaacgccatcacctacaaagaccagcgcgataaagccattaagaatcttaaccaggcgaacgccaccatca

SEQ ID NO: 571438 - DNA, 75 bp, synthetic construct
  source 1..75: mol_type = other DNA
ggttcagtttctgttgaactgccggatgatgcgaataaaggcgatactgttgaaatcacctttgtaaatgaaaat

SEQ ID NO: 571439 - DNA, 75 bp, synthetic construct
  source 1..75: mol_type = other DNA
taataatatagaaaagtctgtccttttgcgcgaattaaataatatattaactgctatattttttatagcggtatt

SEQ ID NO: 571440 - DNA, 75 bp, synthetic construct
  source 1..75: mol_type = other DNA
cgctgttacgtcatcgatgttgaaacaatttaactatatatgtattatcatgatgttactttctatatcatcttt

SEQ ID NO: 571441 - DNA, 75 bp, synthetic construct
  source 1..75: mol_type = other DNA
caagctgataaagctgctgccagcataccggacgactgaacttactattcaggctgtttatcccagcgcgatccg

SEQ ID NO: 571442 - DNA, 75 bp, synthetic construct
  source 1..75: mol_type = other DNA
cttatcgttaataacacacttgctgatgacggtagcgaagacagcatcaggttgacatttcagagcataaaggat

SEQ ID NO: 571443 - DNA, 75 bp, synthetic construct
  source 1..75: mol_type = other DNA
taataattcggcgaccagtaaaaatgttaatggtgtcgatacggttgttttaccgcaatcaaaatttgatggaaa

SEQ ID NO: 571444 - DNA, 75 bp, synthetic construct
  source 1..75: mol_type = other DNA
tgatcacgatattacagattgtgatatttacatcttagagaagttctgtcccagagggagtgttagctatcataa

SEQ ID NO: 571445 - DNA, 75 bp, synthetic construct
  source 1..75: mol_type = other DNA
tctgcagaaacatctctacaatcagatgcaatctcatatgacaccggaactgagtaagcagttttcggaggtgct

SEQ ID NO: 571446 - DNA, 75 bp, synthetic construct
  source 1..75: mol_type = other DNA
cacagtattgaaggcccatgccgtatgactgccaataacattcagttgcttcttgaatccgtactggccggaaca

SEQ ID NO: 571447 - DNA, 75 bp, synthetic construct
  source 1..75: mol_type = other DNA
cgttagaaacgggaagctgggttgaatcaggtggcgtgtattccacaacccgaatggcgacgattgccggtaacg

SEQ ID NO: 571448 - DNA, 75 bp, synthetic construct
  source 1..75: mol_type = other DNA
gcgcgttgtcgctgatgccacaatttaacggcgacgatgttgctaaaacaccagcgctgattgccattgtggcta

SEQ ID NO: 571449 - DNA, 75 bp, synthetic construct
  source 1..75: mol_type = other DNA
attcagggcgacagatggttttccagaaacagggtttgatggtgcaaaattcacgctgttactaacccataatat

SEQ ID NO: 571450 - DNA, 75 bp, synthetic construct
  source 1..75: mol_type = other DNA
cacatccgatccggttgtcgccgggaatactgcggcagatagcctgcaacaaaacatgaaggatgccaaccggtt

SEQ ID NO: 571451 - DNA, 75 bp, synthetic construct
  source 1..75: mol_type = other DNA
cggtcatcacagggccggacggtacggtggagatctctgtcaccagccagacggcgggaatcagtgcggtcaccg

SEQ ID NO: 571452 - DNA, 75 bp, synthetic construct
  source 1..75: mol_type = other DNA
caacagcagtaccgcgagccggaacgtgacgtttgttgccgatgtcagcacggcgcagatagcgagtctggaggt

SEQ ID NO: 571453 - DNA, 75 bp, synthetic construct
  source 1..75: mol_type = other DNA
acaataccgtcgctgtgacggtcagggacgtgcatcaaaatttactgcagggacaaaatgttaccttcacggtcg

SEQ ID NO: 571454 - DNA, 75 bp, synthetic construct
  source 1..75: mol_type = other DNA
gagcagtcgctgaccacctttgttaaccgttttcagaatgggcaaaagctccctgaaattacggaaaaagtacag

SEQ ID NO: 571455 - DNA, 75 bp, synthetic construct
  source 1..75: mol_type = other DNA
tattgatggggtatttggtgacacagcggtggttaatgaatggctgaaaaccaatccacagctgggcgttgcaac

SEQ ID NO: 571456 - DNA, 75 bp, synthetic construct
  source 1..75: mol_type = other DNA
ttggtggataccaacatggatacctcgcttttggataccacccaaagccagattgtcactatgcttaatctaaag

SEQ ID NO: 571457 - DNA, 75 bp, synthetic construct
  source 1..75: mol_type = other DNA
cttttatccagtttttaaccgtgttgtggctgggaatgttaaaccgggcagctacccgggggagagactcagaat

SEQ ID NO: 571458 - DNA, 75 bp, synthetic construct
  source 1..75: mol_type = other DNA
ggagagtgtttttcttaaaagaaacaatcaaggatgatgagttgcaaggtatctcgatttacgctcacaaaaaat

SEQ ID NO: 571459 - DNA, 75 bp, synthetic construct
  source 1..75: mol_type = other DNA
aatggtcctgaatatatgacaggggctgtaattgctgattatttggatgagtttaatgatgatgtgatttctact

SEQ ID NO: 571460 - DNA, 75 bp, synthetic construct
  source 1..75: mol_type = other DNA
cgacggcgaatacgctgcaggtgaaggtcactgatgctaacggtaatgcgcttgccgggcagacggtcagcgtga

SEQ ID NO: 571461 - DNA, 75 bp, synthetic construct
  source 1..75: mol_type = other DNA
atgtcagcacggcgcagatcgcgatgctggaggtgacgcaggataacgcggtggcagacggcgcaatggcgaaca

SEQ ID NO: 571462 - DNA, 75 bp, synthetic construct
  source 1..75: mol_type = other DNA
agaaagtaacattttttcgcaagtaattagttttatttatcccgatgcaagggacttattaattggcatgggatg

SEQ ID NO: 571463 - DNA, 75 bp, synthetic construct
  source 1..75: mol_type = other DNA
ccagtttactctgtgctgcaaaggaattaggggttgataaaataccacaatacaaagggtctatgtccgaaatga

SEQ ID NO: 571464 - DNA, 75 bp, synthetic construct
  source 1..75: mol_type = other DNA
tcctccatcgttaccgacaaaacgacctacaccgcgggcggcgtgataaaagttacggtaacactcaaggatagc

SEQ ID NO: 571465 - DNA, 75 bp, synthetic construct
  source 1..75: mol_type = other DNA
caaagccggacggcacggtggagatcagtgtcaccagccagacggcgggcaccagtacagtcaccgccagcatca

SEQ ID NO: 571466 - DNA, 75 bp, synthetic construct
  source 1..75: mol_type = other DNA
aacacgctgcgggtgagggtgacggatgcgttcggtaatgcgctggacgggcagacggtcagcgtgttggcggac

SEQ ID NO: 571467 - DNA, 75 bp, synthetic construct
  source 1..75: mol_type = other DNA
aaaacgcctacaccgctggcgacactataaccgtcgccgtgacgctgaaagacgcgcacggtaacctggttgaag

SEQ ID NO: 571468 - DNA, 75 bp, synthetic construct
  source 1..75: mol_type = other DNA
ggaaaaatggagatatgtgggtgatggaatatatgaacgtacatatatggcctaccaagaaggagaaaatttaac

SEQ ID NO: 571469 - DNA, 75 bp, synthetic construct
  source 1..75: mol_type = other DNA
aagcgaatttgaatgcgcaactgaagatggctggttggagcgatgccaattattcaaacaattacactattaaac

SEQ ID NO: 571470 - DNA, 75 bp, synthetic construct
  source 1..75: mol_type = other DNA
ggttcgacggcgaacacgctgcgggcgagggtgaccgatgcgttcgggaatgcacttgccgggcagacggtcagc

SEQ ID NO: 571471 - DNA, 75 bp, synthetic construct
  source 1..75: mol_type = other DNA
gctggaagtgacgcaggattacgccgtggcagatggttcgacggcgaacacgctgcgggcgagggtgaccgatgc

SEQ ID NO: 571472 - DNA, 75 bp, synthetic construct
  source 1..75: mol_type = other DNA
tggttcagaggcagacggtgcgacggcgaatacgctgcaggtgaaggtcaccgatgctaacggtaatgcgctggg

SEQ ID NO: 571473 - DNA, 75 bp, synthetic construct
  source 1..75: mol_type = other DNA
ttagtttgggacttattgctctggcggtgggtaatgcatatgcaacacaattgttggtaatgactccaacttatt

SEQ ID NO: 571474 - DNA, 75 bp, synthetic construct
  source 1..75: mol_type = other DNA
gttacgtttacagtatgccggaacatatgacgaacgatggcgtgcagaagtctccccctttcttccggaggattt

SEQ ID NO: 571475 - DNA, 75 bp, synthetic construct
  source 1..75: mol_type = other DNA
atcagatccccgtaaacaatcgacgccctcgcccactattaccacctcagccattggtggaaagtgatatatatg

SEQ ID NO: 571476 - DNA, 75 bp, synthetic construct
  source 1..75: mol_type = other DNA
aactttcaagtgctttggatagtattgatgttaacaaaactacaacgaatttaagcatccttaatcgaagtatta

SEQ ID NO: 571477 - DNA, 75 bp, synthetic construct
  source 1..75: mol_type = other DNA
aattcagaatcaacagaaacgcctacccccgtcctgcgccccgaagctggaagttacgtcgccaacctggcagcc

SEQ ID NO: 571478 - DNA, 75 bp, synthetic construct
  source 1..75: mol_type = other DNA
ggaaaataacactcgtcttgaaaccacagataaaacgatcattgttacctctggggaaaatgcagtaggtgttct

SEQ ID NO: 571479 - DNA, 75 bp, synthetic construct
  source 1..75: mol_type = other DNA
gaatggtcgtaccaacggtgttgcaacctaccgtaactatgatttctttggcctggttgatggtcttgattttgc

SEQ ID NO: 571480 - DNA, 75 bp, synthetic construct
  source 1..75: mol_type = other DNA
ataaactctgtatttgacaatcaggccctatcagacttaggggtgttaattgtaaactcttgcgaacccgatgct

SEQ ID NO: 571481 - DNA, 75 bp, synthetic construct
  source 1..75: mol_type = other DNA
aatggtcaggcaacgttaaatgcgaaatgtacgcctaatggtctggtggggcgagacagtacaggtagagtgtta

SEQ ID NO: 571482 - DNA, 75 bp, synthetic construct
  source 1..75: mol_type = other DNA
gactttatgttattaatgataaggaagatgctatttctttagttaaacattatttaaagcgagttgataggggta

SEQ ID NO: 571483 - DNA, 75 bp, synthetic construct
  source 1..75: mol_type = other DNA
ccgtaatatctgtggttttgatttcatcgtctgattggttctggagcttgaatgttgcagataggatttctattt

SEQ ID NO: 571484 - DNA, 75 bp, synthetic construct
  source 1..75: mol_type = other DNA
aaaatgtctacgcagctgtaatgtacggcgaaactcgtaatatgactccgggttctattgatacaggtgttgccg

SEQ ID NO: 571485 - DNA, 75 bp, synthetic construct
  source 1..75: mol_type = other DNA
atattaatttagatgatgtggcacttgaaactgtggctgaaggaagttatgcggttgctattcgacaaggtaaca

SEQ ID NO: 571486 - DNA, 75 bp, synthetic construct
  source 1..75: mol_type = other DNA
ttaatgacgttaagtcaatatctgaattgtcattgtcaattgatttaaaatctgggcttatttgttttgttggag

SEQ ID NO: 571487 - DNA, 75 bp, synthetic construct
  source 1..75: mol_type = other DNA
gatgaaatagcagagtcgaacttcaatcgtatgattgcctatatgtctaaggaaggtgcgaacaagtccctgata

SEQ ID NO: 571488 - DNA, 75 bp, synthetic construct
  source 1..75: mol_type = other DNA
acgtgccgcttacgcagccattcaggcgacctctaagccgcgtagtgaaatcggtgctcacctgctcaacgactc

SEQ ID NO: 571489 - DNA, 75 bp, synthetic construct
  source 1..75: mol_type = other DNA
aaaatgattgtcgtgctttagtgttaagaggaacattggaatacttatttgatgaaattattgctggcgagtgtg

SEQ ID NO: 571490 - DNA, 75 bp, synthetic construct
  source 1..75: mol_type = other DNA
aatgagattagtatatcttcttccaatccctctcatgacggcgttgttgctcaaatcagggaactatcccgcagt

SEQ ID NO: 571491 - DNA, 75 bp, synthetic construct
  source 1..75: mol_type = other DNA
ttaatgggctatttcataacacaaagatagttattgttctagatggtgatataaaaagtaatttctataagaaat

SEQ ID NO: 571492 - DNA, 75 bp, synthetic construct
  source 1..75: mol_type = other DNA
agaggcccggcatttccagagttaagcggacggagtggggggggctatccgaggaggatctgcgccgacgttatg

SEQ ID NO: 571493 - DNA, 75 bp, synthetic construct
  source 1..75: mol_type = other DNA
tatgactggttcgggccgtgggaaaaaattatcgggaaatttgaaatcaggaagaacgacaaggggaaagaatat

SEQ ID NO: 571494 - DNA, 75 bp, synthetic construct
  source 1..75: mol_type = other DNA
atggccatcaccatgcaggcgatgcagtggcaaatgaacccttacgcagtagctcagaaaactttcgttgtgaat

SEQ ID NO: 571495 - DNA, 75 bp, synthetic construct
  source 1..75: mol_type = other DNA
cggtcacggcgagggagtcgaaaggctcgccagttttgtttgtttgctggtactgcaaacctcgtcgtgatcgtc

SEQ ID NO: 571496 - DNA, 75 bp, synthetic construct
  source 1..75: mol_type = other DNA
tgtcgggcttttcgccaggatagagacgcactgctggaagcgcgaaacaaatacttaaacagtacgagagaagag

SEQ ID NO: 571497 - DNA, 75 bp, synthetic construct
  source 1..75: mol_type = other DNA
agcgttcaatttgaagcaggcaaatttgccgcgccgtcaggaatgttctttttgcgttcgccttctgatttgcaa

SEQ ID NO: 571498 - DNA, 75 bp, synthetic construct
  source 1..75: mol_type = other DNA
gtggaacctctacccttaatggtcctgtaaatatcaacaacaacctgaaagtaaaatccgatacctatctgaata

SEQ ID NO: 571499 - DNA, 75 bp, synthetic construct
  source 1..75: mol_type = other DNA
atgggttcactgatgcggggacaaaaactcacgcagatctttacgattctggcgctgacacaaagtgcaggcatt

SEQ ID NO: 571500 - DNA, 75 bp, synthetic construct
  source 1..75: mol_type = other DNA
agcgtttctctgacctcatggaagatgcagaaagcgaaggagtcgacggcataaacatcatgatgaattacctta

SEQ ID NO: 571501 - DNA, 75 bp, synthetic construct
  source 1..75: mol_type = other DNA
acgccaccagaaactgaaggaaattagtgaaggtattgtgtcgatgtttcgtgtggacccagatctggctggtcc

SEQ ID NO: 571502 - DNA, 75 bp, synthetic construct
  source 1..75: mol_type = other DNA
aatatcaaatctttctaaaaaaattataaaatatgtcttcaaaaaacttaagtctcaagagaagcaaaaaaatat

SEQ ID NO: 571503 - DNA, 75 bp, synthetic construct
  source 1..75: mol_type = other DNA
caccacagtgaaaccgtcattcaccgttatggtaccggcgcaatggtgttgtgctggcactgcgacaaccagttg

SEQ ID NO: 571504 - DNA, 75 bp, synthetic construct
  source 1..75: mol_type = other DNA
tgaacgtgaaaagcaggtactgtttaccaccccgtactatgacaactctgccttgtttgtaggtcagcaggggaa

SEQ ID NO: 571505 - DNA, 75 bp, synthetic construct
  source 1..75: mol_type = other DNA
gatactatgccgcttttgttctggatccggacggtaacaacatcgaagctgtttaccatggtgagggtgatcgca

SEQ ID NO: 571506 - DNA, 75 bp, synthetic construct
  source 1..75: mol_type = other DNA
tgctcaatacttatcactgttttatatgatttctataaacatttaattcgttttcgagttcgcattacgaaaaaa

SEQ ID NO: 571507 - DNA, 75 bp, synthetic construct
  source 1..75: mol_type = other DNA
ccccagacactgttaaagataacagtgaagtcacagcagttgctaaagatccggctggtaatgaaagtgctccgg

SEQ ID NO: 571508 - DNA, 75 bp, synthetic construct
  source 1..75: mol_type = other DNA
atttttttatccaacttatcgatcaggctctacgatcatcggatgagattatcagagaaaatgcctggtatcttt

SEQ ID NO: 571509 - DNA, 75 bp, synthetic construct
  source 1..75: mol_type = other DNA
acgaaaaaaatcatgcaataaatatgtttcgtgaagtctcaatcagtaatgatattataagcgtaaaattctata

SEQ ID NO: 571510 - DNA, 75 bp, synthetic construct
  source 1..75: mol_type = other DNA
caaatctacaacatgtaacattcgaatgtaaagaaattggggattgcaattttactactgcaatagttgataatg

SEQ ID NO: 571511 - DNA, 75 bp, synthetic construct
  source 1..75: mol_type = other DNA
ggattatccaattacccttccaggatcttcggggggaagtaacgcaggtagaagtgcaatgcgtactcatgttgg

SEQ ID NO: 571512 - DNA, 75 bp, synthetic construct
  source 1..75: mol_type = other DNA
tcaactcgacaatctctcttgaaggggtggttcgctggctggcgcaaaccgggcagacgggagccaatcaaccgc

SEQ ID NO: 571513 - DNA, 75 bp, synthetic construct
  source 1..75: mol_type = other DNA
cgagtcccctatagactacatttataatataataaaaaactatattataagtgatccattttttgcaattatgag

SEQ ID NO: 571514 - DNA, 75 bp, synthetic construct
  source 1..75: mol_type = other DNA
taacagtacgcatagcccctgacttggtgcgcctggttgaaaaagagcaaaacaaactggaacgcagaacgggca

SEQ ID NO: 571515 - DNA, 75 bp, synthetic construct
  source 1..75: mol_type = other DNA
gggtgatctgaatcttggtggtaagagcatcaaaaacatcaaagacattacggcatcaggaacaacaacaacggg

SEQ ID NO: 571516 - DNA, 75 bp, synthetic construct
  source 1..75: mol_type = other DNA
cctgtaggctatacaggaactaacgcgcaaaaagcatcttacaaaattgtgttaaaacgttcaggaacagcgccg

SEQ ID NO: 571517 - DNA, 75 bp, synthetic construct
  source 1..75: mol_type = other DNA
gttggtgtaggaaccgggaaaacagttaaagcttacatgaataatgcgggtaatatttatgcttcaggtaatctt

SEQ ID NO: 571518 - DNA, 75 bp, synthetic construct
  source 1..75: mol_type = other DNA
gcaattgaaggtgaggccttggatgatgtcactgtcgcaggcgtcgtgacgcacatcatttgtgatgtgcgaagc

SEQ ID NO: 571519 - DNA, 75 bp, synthetic construct
  source 1..75: mol_type = other DNA
actataccgaacagcggctgaccgttaactcgatctgtaatgtcgggccaaatactcgcctttacgaaagggatg

SEQ ID NO: 571520 - DNA, 75 bp, synthetic construct
  source 1..75: mol_type = other DNA
ctcgatgcgctggcggcaatcaaagcgctggctgtccgcgtcagcgccttagaggaagtgatcaacgttgcggct

SEQ ID NO: 571521 - DNA, 75 bp, synthetic construct
  source 1..75: mol_type = other DNA
agcccaacagcatcagctgcgtgagcaaaaagagtttctctggaataaaaatgaagatctcacggaaacgatcac

SEQ ID NO: 571522 - DNA, 75 bp, synthetic construct
  source 1..75: mol_type = other DNA
agatccaatatccatggcaggacagccgtattcagcaactttttgacgactctggtttcaaagagacgctctggc

SEQ ID NO: 571523 - DNA, 75 bp, synthetic construct
  source 1..75: mol_type = other DNA
tttagcgaactaccgcgttgtcaattttctcttccgccttccagacgcggtacttcacatctacattgtctggcg

SEQ ID NO: 571524 - DNA, 75 bp, synthetic construct
  source 1..75: mol_type = other DNA
caccgttctggctggctgctctggcgtctgtgcatttatatcctgctgggctgggggatctggcgtatcgcgcat

SEQ ID NO: 571525 - DNA, 75 bp, synthetic construct
  source 1..75: mol_type = other DNA
atgcgctttgaagggaatgcttctacaaggaaatctattcaacaacgtcttaagcaggcttcagatgcacgagct

SEQ ID NO: 571526 - DNA, 75 bp, synthetic construct
  source 1..75: mol_type = other DNA
tatgtttttggggggcttattcgtgatattggtctctatacggctcatcagtttcgttctgatatagacttggtt

SEQ ID NO: 571527 - DNA, 75 bp, synthetic construct
  source 1..75: mol_type = other DNA
ggcggcaatgggttttatcaacattgagcagaaccgcatcatcaaaattttctcggtggtatccgtcgtgttcct

SEQ ID NO: 571528 - DNA, 75 bp, synthetic construct
  source 1..75: mol_type = other DNA
ggaaccattgaatattctttcaaaacaatcattagcgatcataaatatgatcaacatagtgaacaaatacaaaga

SEQ ID NO: 571529 - DNA, 75 bp, synthetic construct
  source 1..75: mol_type = other DNA
atgctaaaaatagcattatagattgtttaaaggaacttgagagtatagagaagatgatagaatcttctggcccca

SEQ ID NO: 571530 - DNA, 75 bp, synthetic construct
  source 1..75: mol_type = other DNA
gttaaaaaatctgcacaacgtcattaatgaatacatgtataagacaaatcgacaggttcttgttctgtcttcatt

SEQ ID NO: 571531 - DNA, 75 bp, synthetic construct
  source 1..75: mol_type = other DNA
agaaaatcaacagataacattgtgttactggagcatgagcttgaaaaaaacaggcagagaaaagcatcatctttt

SEQ ID NO: 571532 - DNA, 75 bp, synthetic construct
  source 1..75: mol_type = other DNA
atggctttccacttatcagcagccaaattcacacttacccggccatccggttcggcaaaaaacgccaggtattga

SEQ ID NO: 571533 - DNA, 75 bp, synthetic construct
  source 1..75: mol_type = other DNA
gcttcgccagttcaaagaaacgcaggaacagcgcttcgcgctggagcaggaacatctgctgccgttaccggatac

SEQ ID NO: 571534 - DNA, 75 bp, synthetic construct
  source 1..75: mol_type = other DNA
caatagacttgcttaagaaatggcttgtggagtataaatttagagagtggacagttcatcaaggtaacacaaaac

SEQ ID NO: 571535 - DNA, 75 bp, synthetic construct
  source 1..75: mol_type = other DNA
aatgaatacatgtataagacaaatcgacaggttcttgttctgtcttcattccccttctcagaacaaagtgagtca

SEQ ID NO: 571536 - DNA, 75 bp, synthetic construct
  source 1..75: mol_type = other DNA
ttctcggccatacacggcaattcttttcgcaacatgacgtacatctgccgccctttgccagtttctcgcctgctc

SEQ ID NO: 571537 - DNA, 75 bp, synthetic construct
  source 1..75: mol_type = other DNA
ctataaccttcatcctgcacacgctaaacgtgtcgaggaaattatcgctgaaaataaaccgcccttttctgtttt

SEQ ID NO: 571538 - DNA, 75 bp, synthetic construct
  source 1..75: mol_type = other DNA
tgaaatcctgcgagatatcgaatccctgctgccgcataacgaatctctattccagaaggtgaacttcctgatgca

SEQ ID NO: 571539 - DNA, 75 bp, synthetic construct
  source 1..75: mol_type = other DNA
aaaatcctgatgccccgattatctcaataggtgcaatatttttcgatccgcaaaccggagatatgggaccggaat

SEQ ID NO: 571540 - DNA, 75 bp, synthetic construct
  source 1..75: mol_type = other DNA
aatatgcttctgccggtttcaggtcagcttctgcctgttagatggctggcacagcacggcagcgaaaaacctgtc

SEQ ID NO: 571541 - DNA, 75 bp, synthetic construct
  source 1..75: mol_type = other DNA
caaattactggcagcatcacgtggtgagttcgttgaagggattagcgacccgaatgatccgaaatggattcccgg

SEQ ID NO: 571542 - DNA, 75 bp, synthetic construct
  source 1..75: mol_type = other DNA
tcgtggttgcatccgtgaaagaagcaccaattggtatcgaggtcatccctgcgcatgtcactgaatatctgaaca

SEQ ID NO: 571543 - DNA, 75 bp, synthetic construct
  source 1..75: mol_type = other DNA
acccgctcgtccccctgcggcggaccgaacgacatctcctgcgacagtgcctcagcgggctgacgcgctatgacg

SEQ ID NO: 571544 - DNA, 75 bp, synthetic construct
  source 1..75: mol_type = other DNA
gcaggctgcacgcccgctacggcgcaggtcagacgcacgaattacagatgcaggagatcgccgccatcttcggct

SEQ ID NO: 571545 - DNA, 75 bp, synthetic construct
  source 1..75: mol_type = other DNA
accgccgagcttacggtgctgacgctggtcgcggaggaactccccgccgaaaccgacgttgctgccgaccctgcc

SEQ ID NO: 571546 - DNA, 75 bp, synthetic construct
  source 1..75: mol_type = other DNA
catcatacactaaatcagtaagttggcagcatcaccctcgtctcgatcgtcctgaactcttccgtcttctgagag

SEQ ID NO: 571547 - DNA, 75 bp, synthetic construct
  source 1..75: mol_type = other DNA
gatggatacccagcgtgcgctcaacttcctggtgcgtaaggcgcgtttaccgggcgggcaactggagcaggcgcg

SEQ ID NO: 571548 - DNA, 75 bp, synthetic construct
  source 1..75: mol_type = other DNA
cgcatcctgcttgaacgctggcatattcgcgccgagatacggatcgacgcatttgacagcttcaacagccagccg

SEQ ID NO: 571549 - DNA, 75 bp, synthetic construct
  source 1..75: mol_type = other DNA
ggcaatgcccgggtggagcctaaaggtaacgccattcttatcaccaaacaggccagcggacggggaaaaattgac

SEQ ID NO: 571550 - DNA, 75 bp, synthetic construct
  source 1..75: mol_type = other DNA
gttctcgtaaatatgtttgtgatacatatcagattaataatggatatttcagcacaactctgggtaggttgaatc

SEQ ID NO: 571551 - DNA, 75 bp, synthetic construct
  source 1..75: mol_type = other DNA
tgaaatcctgcgagatatcgagtccctgctgccgcataacgaatctctgttccagaaggtgaacttcctgatgca

SEQ ID NO: 571552 - DNA, 75 bp, synthetic construct
  source 1..75: mol_type = other DNA
tgctgtttaactggaaaaacctgtacgaaaatggcttgttaaacgacgataatatgcaggaaggactgcccgttc

SEQ ID NO: 571553 - DNA, 75 bp, synthetic construct
  source 1..75: mol_type = other DNA
ctgtattccggagacaggcaaccgcactcccctgaaacagaaatcaccagtctgcaggagcggatgatgacagaa

SEQ ID NO: 571554 - DNA, 75 bp, synthetic construct
  source 1..75: mol_type = other DNA
gcagcacaccgacgaccagtccgaagattaattcctggttcaggatgcaggctggtcaccagagtgacgcggata

SEQ ID NO: 571555 - DNA, 75 bp, synthetic construct
  source 1..75: mol_type = other DNA
attaacggattactggtatgcatatgcagttgaagaactgacaactgacgatataaaaaacctgtcagagctact

SEQ ID NO: 571556 - DNA, 75 bp, synthetic construct
  source 1..75: mol_type = other DNA
ctgctcaagtgtctgggtgcggtgatcgaaccgaccgccggtcgcatgacgctgggcgatgaagtgatctacgcc

SEQ ID NO: 571557 - DNA, 75 bp, synthetic construct
  source 1..75: mol_type = other DNA
cgagcgttccccccctgaattgctgattctggctcccgtctgggacgactctcctggcgacgaatggtttggcag

SEQ ID NO: 571558 - DNA, 75 bp, synthetic construct
  source 1..75: mol_type = other DNA
cggaagggtttgctcgctccgagcaggagcaagtgggcaaatattactgcgatcgtgcaatggctaaaaagtttg

SEQ ID NO: 571559 - DNA, 75 bp, synthetic construct
  source 1..75: mol_type = other DNA
actgccgttaactacgagcatggcatagacacacaacaattatgggccgaagttctttcctggtttgaagcaggt

SEQ ID NO: 571560 - DNA, 75 bp, synthetic construct
  source 1..75: mol_type = other DNA
attttggaataattacaaagtaatatctaatgattgcgtcttttcattacctttatggcgagcatatattccaag

SEQ ID NO: 571561 - DNA, 75 bp, synthetic construct
  source 1..75: mol_type = other DNA
tttcgttttccaggcgccgtacctgattccgtttctcgatgtcaccgacaacgtggcgctgctgccgatgcttgc

SEQ ID NO: 571562 - DNA, 75 bp, synthetic construct
  source 1..75: mol_type = other DNA
aatttatcaccaaccgataaagaattagtaaaacaaagccttgacaggaaaaggcagtatctagaaactctaaaa

SEQ ID NO: 571563 - DNA, 75 bp, synthetic construct
  source 1..75: mol_type = other DNA
gcacggtacaccgctcgaaaaaggctggccctttggctatgtatatgtgaaccagcgacaaaattgcgattgtgg

SEQ ID NO: 571564 - DNA, 75 bp, synthetic construct
  source 1..75: mol_type = other DNA
atccaaaaacgtttctgttccgttagacgaaatagagcaaatacctgatctggatctaaaagataaaaatgataa

SEQ ID NO: 571565 - DNA, 75 bp, synthetic construct
  source 1..75: mol_type = other DNA
ctgcgtcaacaaaatgaatcggtggtcaggctgatgcagcagcaattgcagcagactgtgatgactcacggctgg

SEQ ID NO: 571566 - DNA, 75 bp, synthetic construct
  source 1..75: mol_type = other DNA
tgaaatgctggttggctcacggcgaatctcccaggacatcagtacccgtgatgaaggcggtgacgggaaggtggt

SEQ ID NO: 571567 - DNA, 75 bp, synthetic construct
  source 1..75: mol_type = other DNA
atttttcgtcactggataacatgattgcccaggggaacccgatgccggtgccttatggtgaaatgctggttggtt

SEQ ID NO: 571568 - DNA, 75 bp, synthetic construct
  source 1..75: mol_type = other DNA
gcacggtacaccgctcgacaaaggctggccctttggctatgtgtatgtgaaccagcgacaaaattgtgactgtgg

SEQ ID NO: 571569 - DNA, 75 bp, synthetic construct
  source 1..75: mol_type = other DNA
gcgcaaggttggcggctaaacgccagttcctcaaggctaccgatcaccagttcaagcgtggtccgcacggtacag

SEQ ID NO: 571570 - DNA, 75 bp, synthetic construct
  source 1..75: mol_type = other DNA
tgataataaagcggagatgttcaagaatattaaatctctggccaaagtagaagaacaatggcgatttagtactac

SEQ ID NO: 571571 - DNA, 75 bp, synthetic construct
  source 1..75: mol_type = other DNA
tagtaaaacaaagccttgacaggaaaaggcagtatctagaaactctaaaaacaatcaaaaaaaaccaagagagta

SEQ ID NO: 571572 - DNA, 75 bp, synthetic construct
  source 1..75: mol_type = other DNA
aacaaatggctaaagttctggcagagcaggtcgatgaatctgttacggcaggcatgaataattttttcgctgagt

SEQ ID NO: 571573 - DNA, 75 bp, synthetic construct
  source 1..75: mol_type = other DNA
cagtatccgttgaatccggttcagtatatagattcaatgggactggcatcaaaatatggacacttaaataatggc

SEQ ID NO: 571574 - DNA, 75 bp, synthetic construct
  source 1..75: mol_type = other DNA
tcatgtgattttacttacaataataaaatcattcttaatcaaaaaaacgaaagttatcaatttcgccacagatat

SEQ ID NO: 571575 - DNA, 75 bp, synthetic construct
  source 1..75: mol_type = other DNA
atgttgatgtcgatatcgccgagctcaccgcacatctggataaactgctcccgcaatcccctgaagaagacgaaa

SEQ ID NO: 571576 - DNA, 75 bp, synthetic construct
  source 1..75: mol_type = other DNA
ggtccgtctggccagcaccccggatatcagcaaactgccacaggaccgggaatccctgttctacttcaaccttcg

SEQ ID NO: 571577 - DNA, 75 bp, synthetic construct
  source 1..75: mol_type = other DNA
taatgatggcaaatctctgcccttccacctttttggataaaaatataaatatcgctgctgagcttgatattacaa

SEQ ID NO: 571578 - DNA, 75 bp, synthetic construct
  source 1..75: mol_type = other DNA
tgaggaacgtagcgaaatgggtctaaatggtcgggattatatgataagccgcttcgatgaaagggttattattgc

SEQ ID NO: 571579 - DNA, 75 bp, synthetic construct
  source 1..75: mol_type = other DNA
ttggcgtacgtattctggatagccagagcggcgaagtgactttaggtactccggtagtaattacattcaacaata

SEQ ID NO: 571580 - DNA, 75 bp, synthetic construct
  source 1..75: mol_type = other DNA
tgcaaccaacactgccaatatcgccgataacactgccaatatcgccactaacactacggatattgcgactaatac

SEQ ID NO: 571581 - DNA, 75 bp, synthetic construct
  source 1..75: mol_type = other DNA
acgcgtctgatgctttcatcacgttaggcgatcgcgcactggcggcggtcggcggggcgtctccaagcatcaaga

SEQ ID NO: 571582 - DNA, 75 bp, synthetic construct
  source 1..75: mol_type = other DNA
gccctggcgcgcgtaaatgccgacgtggctactttgctgcgaaatcaggcgctgctcgagtataaccaggccatc

SEQ ID NO: 571583 - DNA, 75 bp, synthetic construct
  source 1..75: mol_type = other DNA
attaacaaatatttatcatggaaaaataagaacgctttacaattctatgcgtaacaagctatattttttttgcaa

SEQ ID NO: 571584 - DNA, 75 bp, synthetic construct
  source 1..75: mol_type = other DNA
gcagcgtcttgctgcccagtggactttgttctcacagcaaagcgcagccaaccagatgcttgcggcgtcgcttga

SEQ ID NO: 571585 - DNA, 75 bp, synthetic construct
  source 1..75: mol_type = other DNA
gcgctgacgttcagaccaggacaaggaatgataatggaaatcaggtggtcgatcttttcattcaggacgtagaga

SEQ ID NO: 571586 - DNA, 75 bp, synthetic construct
  source 1..75: mol_type = other DNA
ccaggaaacttgcgcttattcaggcatacgagcagcagggactgattactcaccagaacgccatggcattgcgtg

SEQ ID NO: 571587 - DNA, 75 bp, synthetic construct
  source 1..75: mol_type = other DNA
gaaggtgtcgatactagtttcttcattcctagggcaaaacctatttcgcataaaaaatcaaaagttacgtttttg

SEQ ID NO: 571588 - DNA, 75 bp, synthetic construct
  source 1..75: mol_type = other DNA
gtgaaagatatccgttttacttcatgcggctccgctgataaagtggctcctaaaaattttaacaatgcccctgct

SEQ ID NO: 571589 - DNA, 75 bp, synthetic construct
  source 1..75: mol_type = other DNA
catcacttttgtgtaaaaatgctgaaaatatagaatggtgcataaatagagcaacgttttgtgaagcatttcttg

SEQ ID NO: 571590 - DNA, 75 bp, synthetic construct
  source 1..75: mol_type = other DNA
tacttggtcataaaacgcaacagcaaaccgatcgttatcatgatgatcgaggtaaaggatggagtaaagtagcgt

SEQ ID NO: 571591 - DNA, 75 bp, synthetic construct
  source 1..75: mol_type = other DNA
atgttgtaaaactctacaaacaagaaaatggcggtccttcaaaagcaagaaataatggtgtaaatttcagtgatg

SEQ ID NO: 571592 - DNA, 75 bp, synthetic construct
  source 1..75: mol_type = other DNA
gggccccgtggttatagcccatctcttgcgcgttcagtgcgggatgtcgatgagtttgtccgttttgctgccagc

SEQ ID NO: 571593 - DNA, 75 bp, synthetic construct
  source 1..75: mol_type = other DNA
agtaagtctttcaacaaagcgtatagcgttgataggttgtggaacaattggagggtatctggccgaattattact

SEQ ID NO: 571594 - DNA, 75 bp, synthetic construct
  source 1..75: mol_type = other DNA
ggcaaacgcttgaaacgggtgtcaaaggagcgctattcaatggcggattaaacctatcaggtgctatttaccaaa

SEQ ID NO: 571595 - DNA, 75 bp, synthetic construct
  source 1..75: mol_type = other DNA
atgttgtagtcgatggtgaaacgggatacctatgcaatgtacgtgattacattgggttagcaaatgtaatgcgta

SEQ ID NO: 571596 - DNA, 75 bp, synthetic construct
  source 1..75: mol_type = other DNA
aacctgattttatttttcattacacaataaagctaaatatttatggatctatagccgctggtattacgaattgta

SEQ ID NO: 571597 - DNA, 75 bp, synthetic construct
  source 1..75: mol_type = other DNA
agcagcggcgacagctaccgcgacaatggggacggccccgatggtcgcaatgtcagctatcagcgccttgatggc

SEQ ID NO: 571598 - DNA, 75 bp, synthetic construct
  source 1..75: mol_type = other DNA
ctatgaagcgcgtggctatgggtgtggttagagagcagagcacacgcccagggggaatgatacaaccccgcagac

SEQ ID NO: 571599 - DNA, 75 bp, synthetic construct
  source 1..75: mol_type = other DNA
ggcgaaatcgaaaaagaatttaacaagctgccgacaacaacagagcaggcattaagccagttaaacaccgagttc

SEQ ID NO: 571600 - DNA, 75 bp, synthetic construct
  source 1..75: mol_type = other DNA
ggcgcatcccgaagttcatcatcacgttggcctccgattattgttcacaatgcagcgacctcgagttctgcgcac

SEQ ID NO: 571601 - DNA, 75 bp, synthetic construct
  source 1..75: mol_type = other DNA
agctataagtcaagacaaaatacctgatttcttaaaaaaggtaagtgctatcaatagcgatgtaatggattttta

SEQ ID NO: 571602 - DNA, 75 bp, synthetic construct
  source 1..75: mol_type = other DNA
ttacaacgttgattaaaaataaaattcctattattaatacaacaatcgatttatcatcattgtctaaggatgttt

SEQ ID NO: 571603 - DNA, 75 bp, synthetic construct
  source 1..75: mol_type = other DNA
gggaggatttactaaaaaactatgaggaaataagatcttccattaaagattacgatgacttattgcgagaaatta

SEQ ID NO: 571604 - DNA, 75 bp, synthetic construct
  source 1..75: mol_type = other DNA
ttgatttttttatttttaaagatatgcaggaaaatgcacaaaatatcattaacaatatgatagaaagtgaccgga

SEQ ID NO: 571605 - DNA, 75 bp, synthetic construct
  source 1..75: mol_type = other DNA
aagaaaggaattaactcttcatttagcaagaacaatacagagaacaataatgttttctttaaaaatagtaatttg

SEQ ID NO: 571606 - DNA, 75 bp, synthetic construct
  source 1..75: mol_type = other DNA
gtttcttcagagagattaacgcttgataattatctcgatgatttacattttgataattctcccttgatgagatta

SEQ ID NO: 571607 - DNA, 75 bp, synthetic construct
  source 1..75: mol_type = other DNA
ctcccgtggtgctgttgcgattgacgatgctggctacgatgaagatgactttaaaaaacctgttcgcgtcaattt

SEQ ID NO: 571608 - DNA, 75 bp, synthetic construct
  source 1..75: mol_type = other DNA
tcgatgcagacaaattgctggctgcctctcgtggggagttcgttgaaggcatcagcgacccaaccgacccgaagt

SEQ ID NO: 571609 - DNA, 75 bp, synthetic construct
  source 1..75: mol_type = other DNA
ggcaactgtcctgactgtggcgcggtgatgggcgacgcaacataccaggagacattcaacgaagaaagccaggat

SEQ ID NO: 571610 - DNA, 75 bp, synthetic construct
  source 1..75: mol_type = other DNA
tatgggatgaactttgagtttatgccggaactgaagtggagtttcggctaccctggcgcgattatctttatgatc

SEQ ID NO: 571611 - DNA, 75 bp, synthetic construct
  source 1..75: mol_type = other DNA
atcgaaaccccagccaccgatgctttcctggctgaagtacgggcgcagggggtagagatgttctcagaaaaattc

SEQ ID NO: 571612 - DNA, 75 bp, synthetic construct
  source 1..75: mol_type = other DNA
tcgcgatctccacaaactggttcgtgacactgacaaagttttccctaatcctggtaattcaagcctgggactgat

SEQ ID NO: 571613 - DNA, 75 bp, synthetic construct
  source 1..75: mol_type = other DNA
caaaaatagaacaacaatggcgatttagtactaagacagacttcaccacaaatgaaaataatgaagttattgtga

SEQ ID NO: 571614 - DNA, 75 bp, synthetic construct
  source 1..75: mol_type = other DNA
ccggatggaacagcagatgcatgagtggttcggacataaaccggacttcattatcacgctggccggtgacttctg

SEQ ID NO: 571615 - DNA, 75 bp, synthetic construct
  source 1..75: mol_type = other DNA
ttccgatctggaattctgcgcgctgatagagcacgagctttatcacatctgccaggcgacagatgaatttggcgc

SEQ ID NO: 571616 - DNA, 75 bp, synthetic construct
  source 1..75: mol_type = other DNA
catgttcacctggtctttgtcaccagataccgacgtcagatttttgaccatgacgcgacagaaaaactacgcact

SEQ ID NO: 571617 - DNA, 75 bp, synthetic construct
  source 1..75: mol_type = other DNA
ttccgcaacgcccacttccaccagttaatttcattggccccgataactggcagccctacaccagattaatccccg

SEQ ID NO: 571618 - DNA, 75 bp, synthetic construct
  source 1..75: mol_type = other DNA
ctgatccctgctgccgaaatcggcgaatgggtaaatcagaacatcctctccgaagatggccgaatccataaccct

SEQ ID NO: 571619 - DNA, 75 bp, synthetic construct
  source 1..75: mol_type = other DNA
atgactggataagccatcaaatcctcagcgatagcggaagcatccataacccagaccacgcccatttaatggaag

SEQ ID NO: 571620 - DNA, 75 bp, synthetic construct
  source 1..75: mol_type = other DNA
actattcgtgaggattttttaaaagactcaacggttactgtcgttcttattggaacggaaaccaaaaatcgtcca

SEQ ID NO: 571621 - DNA, 75 bp, synthetic construct
  source 1..75: mol_type = other DNA
gtggattgtcaaatttaaaacaattatgtgatattgcacctgatagcataaaagttgacaaagagtttatatctg

SEQ ID NO: 571622 - DNA, 75 bp, synthetic construct
  source 1..75: mol_type = other DNA
acgacgcagaacgaggtggttttgatgatgccgttaagtttctacgcagtgaagcgtctggtgtacgtttgttcg

SEQ ID NO: 571623 - DNA, 75 bp, synthetic construct
  source 1..75: mol_type = other DNA
aatctcacatttttcaagttcggcgcacttaacaaccgccacacaccgcctgcagtactggcggcagaaattgat

SEQ ID NO: 571624 - DNA, 75 bp, synthetic construct
  source 1..75: mol_type = other DNA
ctttatcgcatcggaaaaataatccgaaagcagattcagatgcatatgaaaccagcgctgatatgattttgtctg

SEQ ID NO: 571625 - DNA, 75 bp, synthetic construct
  source 1..75: mol_type = other DNA
aaaattcgggaggactatcttggtgactctaccgtaacagtagtactcataggtacagaaactgccagcagacct

SEQ ID NO: 571626 - DNA, 75 bp, synthetic construct
  source 1..75: mol_type = other DNA
tcaccggtttgctgtgtctatatccgcaggtgacggggttggggcctgtaatgctggtgctgcatatggcgcttg

SEQ ID NO: 571627 - DNA, 75 bp, synthetic construct
  source 1..75: mol_type = other DNA
atcagacatggagaacgatgtgatcgctccacaaatacatgcctgtcggaacgtgatggaatcacaataaatgga

SEQ ID NO: 571628 - DNA, 75 bp, synthetic construct
  source 1..75: mol_type = other DNA
aaatttcacaacagaataaagtctctgtgatttttacacataatcattgcctgtcaaaaatcgcaagaaaaatcg

SEQ ID NO: 571629 - DNA, 75 bp, synthetic construct
  source 1..75: mol_type = other DNA
ggcattgaaaaaggcaagcgcgaagccacccttaaaattgcacgaaccatgctccagaacggcattgaccgcaat

SEQ ID NO: 571630 - DNA, 75 bp, synthetic construct
  source 1..75: mol_type = other DNA
aatatcactatcgaagacgaccagggcagtcacttccgcctggtggttcgcgacactgaaggccggatggtctgg

SEQ ID NO: 571631 - DNA, 75 bp, synthetic construct
  source 1..75: mol_type = other DNA
attgttacccggcatttgtcatttagcggtgatgtttgcctggaccatgaccgccgtgatgatcatgatgagctt

SEQ ID NO: 571632 - DNA, 75 bp, synthetic construct
  source 1..75: mol_type = other DNA
tatggatacactggttcttcatcgggagaatcacgatctagttcttgacggatatacaaaaccgaacgattttat

SEQ ID NO: 571633 - DNA, 75 bp, synthetic construct
  source 1..75: mol_type = other DNA
tggcgggccgggtaatttgcagtggctctatcctaatgaactcttcccgacagatatccgcgcctctgccgtggg

SEQ ID NO: 571634 - DNA, 75 bp, synthetic construct
  source 1..75: mol_type = other DNA
gcttactattattgggttgtctgatatctcagtccttcttctgcgttgcagaaacttatggattgcccgaacttc

SEQ ID NO: 571635 - DNA, 75 bp, synthetic construct
  source 1..75: mol_type = other DNA
tattacacaagaccccattgggctggaggggggatggaacctgtataattacccactgaatccgataataaggat

SEQ ID NO: 571636 - DNA, 75 bp, synthetic construct
  source 1..75: mol_type = other DNA
aaaatattggttgcaaaaacaacccattgcaatgatgggtaaaacttcggatttatttgttcttatggataaata

SEQ ID NO: 571637 - DNA, 75 bp, synthetic construct
  source 1..75: mol_type = other DNA
gcaaatctttattatccaagaagcaattaaacttgcaggtatactcctaacaagatgggaaatcctaatctctca

SEQ ID NO: 571638 - DNA, 75 bp, synthetic construct
  source 1..75: mol_type = other DNA
ctcgctgtaatagatcccggaggaacttactcagatcgccctcttaatagtttaagaaccatttttctggcatgg

SEQ ID NO: 571639 - DNA, 75 bp, synthetic construct
  source 1..75: mol_type = other DNA
cccactgggcgatatgtttgaacgccgacgcctgattgtctccatgaccttactggctgcaggcggtatgttgat

SEQ ID NO: 571640 - DNA, 75 bp, synthetic construct
  source 1..75: mol_type = other DNA
aagactctgtagagttagtgacagcatctaaaccacacccaagtaacacgcattacaaagtttctcgtggaactg

SEQ ID NO: 571641 - DNA, 75 bp, synthetic construct
  source 1..75: mol_type = other DNA
tgctgatgatctccggctcagcgctggcgaccatcgatgtgttgcagtttaaagatgaagcacaggaacaacagt

SEQ ID NO: 571642 - DNA, 75 bp, synthetic construct
  source 1..75: mol_type = other DNA
ttttatttaagtatcgtaagtttgataaaaacaatctgaagctgttattgaatcgtgagttatggtttgcaaaac

SEQ ID NO: 571643 - DNA, 75 bp, synthetic construct
  source 1..75: mol_type = other DNA
aatttgacctcaatttactggttatatttgaatgtatttatcaacatctcagcattagtaaagcggcagaatcat

SEQ ID NO: 571644 - DNA, 75 bp, synthetic construct
  source 1..75: mol_type = other DNA
aaaaggggggtatttgctcgtatgcgttacgaaggtggaaaccaagaaaggatattagctgagcagtaccgagaa

SEQ ID NO: 571645 - DNA, 75 bp, synthetic construct
  source 1..75: mol_type = other DNA
catacccaaaatgggagaaaaacaaaggattatctccagatgagttttcagctgattcaattactggctgtacgc

SEQ ID NO: 571646 - DNA, 75 bp, synthetic construct
  source 1..75: mol_type = other DNA
gtaagactaaataaaaaaggcgatttaattaaaggtttttctagtctcaacgaatatgcaaacgttgatttaggc

SEQ ID NO: 571647 - DNA, 75 bp, synthetic construct
  source 1..75: mol_type = other DNA
tactggatacggacgcgctgaagcaggtcatcgccaactttgatcgccacgcaatccatcatccgcagacggcac

SEQ ID NO: 571648 - DNA, 75 bp, synthetic construct
  source 1..75: mol_type = other DNA
ctccggcattcttatgacaagagtcgccgcaagggagcgattcatgtcattagtgcgttctcaacaatgcacagt

SEQ ID NO: 571649 - DNA, 75 bp, synthetic construct
  source 1..75: mol_type = other DNA
gttatttttgtcattaatcaaacatggaataataagatttttttatccgtttctgggaagtctgagtttgtcagt

SEQ ID NO: 571650 - DNA, 75 bp, synthetic construct
  source 1..75: mol_type = other DNA
aaatataattggataaaaagatgggatgcaaaaactgattggacagatatggagaaaaatgcctttcatgggaag

SEQ ID NO: 571651 - DNA, 75 bp, synthetic construct
  source 1..75: mol_type = other DNA
aataacaagtgcaataggtcatgaaaaatacttaatgctgaacgcacatctaaatggaatgaattatatttataa

SEQ ID NO: 571652 - DNA, 75 bp, synthetic construct
  source 1..75: mol_type = other DNA
tggtatcggtgcaggtgttgacgcttcagttatgactctggcttgtagaacgtggcaagaatgctgggtcaatta

SEQ ID NO: 571653 - DNA, 75 bp, synthetic construct
  source 1..75: mol_type = other DNA
tcgttgtaaatcctcccgatgatatttgcctgctgacggtgaactacaccgacaacccgcactttcctgaagttc

SEQ ID NO: 571654 - DNA, 75 bp, synthetic construct
  source 1..75: mol_type = other DNA
gctggctgacaggctgtatctgacatatcgggcggttgtctacggtgagtatgcagaccccgacgacatgctgag

SEQ ID NO: 571655 - DNA, 75 bp, synthetic construct
  source 1..75: mol_type = other DNA
tcgtggccgcgccgctgggaagctatctgggggccacggtcggatggcgaggcgctttcttgtgcctggtgccta

SEQ ID NO: 571656 - DNA, 75 bp, synthetic construct
  source 1..75: mol_type = other DNA
tccgataattcaccattgccgcgctaccaggtgatcgaattaacaatgctggttaaacaattggtcagccaactg

SEQ ID NO: 571657 - DNA, 75 bp, synthetic construct
  source 1..75: mol_type = other DNA
tcagccgatcaggctgatggagattaagcgcgagaattacgatgcggtgctggacgtgagcctgcgcggtacgct

SEQ ID NO: 571658 - DNA, 75 bp, synthetic construct
  source 1..75: mol_type = other DNA
tgtggatattgctcgcgccgcgctgttccttggaagcgacctctcttcttactccaccggcatcaccctggacgt

SEQ ID NO: 571659 - DNA, 75 bp, synthetic construct
  source 1..75: mol_type = other DNA
tgcccgataacgcagactggatctatcaacccgatctcagcgacgaatttaacggtccagacctcgatccacgct

SEQ ID NO: 571660 - DNA, 75 bp, synthetic construct
  source 1..75: mol_type = other DNA
caacaggtgtagcgggtttggtcggcacaatattcgtctcaatattcctgaacaccatattttataagaccttaa

SEQ ID NO: 571661 - DNA, 75 bp, synthetic construct
  source 1..75: mol_type = other DNA
ttttactcagcctgtgggggctacttgcgacagctgcgccaacggggtggtggacatggatagcacgcgcgttac

SEQ ID NO: 571662 - DNA, 75 bp, synthetic construct
  source 1..75: mol_type = other DNA
gcgaataaaagccacacgtcatgtggcgcggtattccgcttatttagccgccgcatggttgtggtcggcatgata

SEQ ID NO: 571663 - DNA, 75 bp, synthetic construct
  source 1..75: mol_type = other DNA
atcgtaagttcctgctgctggggatgacggttctgatggccgtatcggggcttattattgcgctggcttccagtt

SEQ ID NO: 571664 - DNA, 75 bp, synthetic construct
  source 1..75: mol_type = other DNA
taattgcagatataaaaaaaaccaaccgtaaaggttggttttttcttgggattcacgagagtagtttaattgagt

SEQ ID NO: 571665 - DNA, 75 bp, synthetic construct
  source 1..75: mol_type = other DNA
gtctgacaacagagtagataatcttgagtgggttactggctgccagaatatggtccatgcaagcaagtcaggatt

SEQ ID NO: 571666 - DNA, 75 bp, synthetic construct
  source 1..75: mol_type = other DNA
cctataaccatttctgcttatgagttgcgcgatcatattggagagctcaaggcttatataattagagaaatattg

SEQ ID NO: 571667 - DNA, 75 bp, synthetic construct
  source 1..75: mol_type = other DNA
tggttggacatgggcagaacgattttgaagaattagaaatgaattccggcataaaggtttttgctggagcttctg

SEQ ID NO: 571668 - DNA, 75 bp, synthetic construct
  source 1..75: mol_type = other DNA
gtgcttaccgttatgacgcattgaatcgctaccccatgagcgacgttctgcgtccctttgaactggcggcgggca

SEQ ID NO: 571669 - DNA, 75 bp, synthetic construct
  source 1..75: mol_type = other DNA
tgtatttatgctacagcatgcggacatgcaggaattggtggtgggataaatgcggctatcacatattctgagacc

SEQ ID NO: 571670 - DNA, 75 bp, synthetic construct
  source 1..75: mol_type = other DNA
cttcataacgaagccagacaacaaaaacgtgggctctggtcagatgctgatccggttcccccatggatatggcga

SEQ ID NO: 571671 - DNA, 75 bp, synthetic construct
  source 1..75: mol_type = other DNA
atgcgatgtcgacagtttctcatcaaagtgaaccgctgttggacagtgagacgttgcgtcgggcggcaaaggctc

SEQ ID NO: 571672 - DNA, 75 bp, synthetic construct
  source 1..75: mol_type = other DNA
ttggaattgtatgggcagaacgaaatttatgaaatgacccgcgatattcatagtcgtaatcgtttggttgagaga

SEQ ID NO: 571673 - DNA, 75 bp, synthetic construct
  source 1..75: mol_type = other DNA
ttgatgaaaaactcaaaatagtccctttgctggaaaaagaaaagcagctcagtttacgtaatcaggaagaattat

SEQ ID NO: 571674 - DNA, 75 bp, synthetic construct
  source 1..75: mol_type = other DNA
gtcacgcctgggggagagtcgtcttgctatccttaatgctcttgagcaaaaggcggagacagagcttgaagtagc

SEQ ID NO: 571675 - DNA, 75 bp, synthetic construct
  source 1..75: mol_type = other DNA
tgaagattatgaaaatataaaagaaaatgcttatctggtaattccccaaattaattatactatggatttaaacat

SEQ ID NO: 571676 - DNA, 75 bp, synthetic construct
  source 1..75: mol_type = other DNA
tcagctctttaatgagcatggaattgtcgtttttcctggttttgagatctgctcaagcgaaaaaattcatttcgt

SEQ ID NO: 571677 - DNA, 75 bp, synthetic construct
  source 1..75: mol_type = other DNA
gtcacgcttggaagagagtagcattactatcctaaatgctcttgagcaaaaggcagagatagaacttgaagtagc

SEQ ID NO: 571678 - DNA, 75 bp, synthetic construct
  source 1..75: mol_type = other DNA
caccttgggatggctgcgcttggtccgattgactacttcaatgttcaggacaagatggttggtcgccaacttgag

SEQ ID NO: 571679 - DNA, 75 bp, synthetic construct
  source 1..75: mol_type = other DNA
agcatgataataatgaacgtatgctcagacttgttcgtcaacattcaaagcgaattggcgcgtttatgtggatta

SEQ ID NO: 571680 - DNA, 75 bp, synthetic construct
  source 1..75: mol_type = other DNA
ggtatctgaccagcggtaagaacacaccggacccggactctaaacctgaatctgaacctgtgcagggtggttatg

SEQ ID NO: 571681 - DNA, 75 bp, synthetic construct
  source 1..75: mol_type = other DNA
atcacaaagaatatttgactctctaatattgaataatccgggactagcattagatataacaatgatagcttctcg

SEQ ID NO: 571682 - DNA, 75 bp, synthetic construct
  source 1..75: mol_type = other DNA
acgtagagggtggcaatatgttaaaagtgaatggaaattagcactgttaaaaataaagttaagaataaataatcc

SEQ ID NO: 571683 - DNA, 75 bp, synthetic construct
  source 1..75: mol_type = other DNA
agggattaaattctgatattaccaattttggcaaaaattataactctgtcagagcggcggcaaactctctgcaag

SEQ ID NO: 571684 - DNA, 75 bp, synthetic construct
  source 1..75: mol_type = other DNA
aatgcgtcaaatggcagaatcaagttgaccgggaacgggcacggtagcgcctccgggattctgtttgctggcaac

SEQ ID NO: 571685 - DNA, 75 bp, synthetic construct
  source 1..75: mol_type = other DNA
tggaaggggagtcggatgtgaacggtgatgcgccagtgattaactggaactgtggtgccacacaacctgtaccgg

SEQ ID NO: 571686 - DNA, 75 bp, synthetic construct
  source 1..75: mol_type = other DNA
tttgtaggtcaaaaaagcatcgcaaagatgtatgctacacctgacggaggggttgcagccacatacattgacaat

SEQ ID NO: 571687 - DNA, 75 bp, synthetic construct
  source 1..75: mol_type = other DNA
ggtatctgaccagcggcaagaacacgccggacccggaaccaacaccgacgcctgacccggactctaaacctgaag

SEQ ID NO: 571688 - DNA, 75 bp, synthetic construct
  source 1..75: mol_type = other DNA
ggctataaatgaagtcacttcttctctgagatggaatgactcttcaggaaaaggatatggcacgtttgacctgag

SEQ ID NO: 571689 - DNA, 75 bp, synthetic construct
  source 1..75: mol_type = other DNA
atggtgggcagtatggggatctgctggcggtacaggaggaaatggcggagctgccatttctggagattatattga

SEQ ID NO: 571690 - DNA, 75 bp, synthetic construct
  source 1..75: mol_type = other DNA
atgaataaatattgtatcttagtactatttaatccagatataagtgttttcattgataatgtcaaaaagatttta

SEQ ID NO: 571691 - DNA, 75 bp, synthetic construct
  source 1..75: mol_type = other DNA
tgttacaccctcaaagcccgcgataagggctataagggcacgatttcggttggccgcgtccagacgccggtgctg

SEQ ID NO: 571692 - DNA, 75 bp, synthetic construct
  source 1..75: mol_type = other DNA
gaccatcgagcgctttattgatggtctttacgcggaagtttcccgcctggttgagagcgccgatattgccatcag

SEQ ID NO: 571693 - DNA, 75 bp, synthetic construct
  source 1..75: mol_type = other DNA
cgcggggaactcgcagtaccattacatcaaagagtgcagaatcccggtttatccccgctggcgcggggaactcgg

SEQ ID NO: 571694 - DNA, 75 bp, synthetic construct
  source 1..75: mol_type = other DNA
attgaaatggcatcttatgatggtagtgttattacacctagtttcacttcaaatacagcaatggatattgctgta

SEQ ID NO: 571695 - DNA, 75 bp, synthetic construct
  source 1..75: mol_type = other DNA
gagcaaatcgatccggcgtacgctaaatggtcaatcgatactcttccactaaaattgtaccccgttcaacttcag

SEQ ID NO: 571696 - DNA, 75 bp, synthetic construct
  source 1..75: mol_type = other DNA
aaactcacagcacagcaaacactggatatcacccaggtattgcgtgagaaacataaagcaatcacgtataaccgt

SEQ ID NO: 571697 - DNA, 75 bp, synthetic construct
  source 1..75: mol_type = other DNA
acccttggtaacaaaactaaaataacaacaggaacaatcagttcactatctgtatatcctgatctttcaattgaa

SEQ ID NO: 571698 - DNA, 75 bp, synthetic construct
  source 1..75: mol_type = other DNA
tagtttcagaactaccctgcctgactggagcataggattggaaactcaatattatttaatattcccatttattat

SEQ ID NO: 571699 - DNA, 75 bp, synthetic construct
  source 1..75: mol_type = other DNA
aaacaatgtaaaatttgtaattagtagttatgctgtgtatcgcttagacgcatttagaaacatcggcttgtttca

SEQ ID NO: 571700 - DNA, 75 bp, synthetic construct
  source 1..75: mol_type = other DNA
cgctggcgcggggaactcaaacagattgttcgttttccccatattcatgacggtttatccccgctggcgcgggga

SEQ ID NO: 571701 - DNA, 75 bp, synthetic construct
  source 1..75: mol_type = other DNA
atgccaacgtatgatttaccggtttatccccgctggcgcggggaactcgtacggctgacactgcgggcagtgcat

SEQ ID NO: 571702 - DNA, 75 bp, synthetic construct
  source 1..75: mol_type = other DNA
ataagcaggggcaggcacgcgcaccaggttacatagtaggaacttggcgagtttgggaggacttgttaaccatag

SEQ ID NO: 571703 - DNA, 75 bp, synthetic construct
  source 1..75: mol_type = other DNA
tttcgctcaccggcgttctgtcgccatcatacaacggcactttgcgaaagcggcggatcaaataccacaaatatg

SEQ ID NO: 571704 - DNA, 75 bp, synthetic construct
  source 1..75: mol_type = other DNA
tagccatacccgcattggtgttggtgcggaatactggcgcgattatctgaaactgagcgccaacggttatatcag

SEQ ID NO: 571705 - DNA, 75 bp, synthetic construct
  source 1..75: mol_type = other DNA
gtgactgtggtagctgatgctttatcttcaggccagtcgaaagtatccgttgcagcggatcgcgtaaaagcaggg

SEQ ID NO: 571706 - DNA, 75 bp, synthetic construct
  source 1..75: mol_type = other DNA
ggtgggtacgaaatgcagcctgtgacggtgactattaacgctgtgaaagctgctactgaagaaggtgaggaggca

SEQ ID NO: 571707 - DNA, 75 bp, synthetic construct
  source 1..75: mol_type = other DNA
gagaacggcgtcgcgggctggatagacaatcactggctggagcggataggtaataccctcctgctcggcacggta

SEQ ID NO: 571708 - DNA, 75 bp, synthetic construct
  source 1..75: mol_type = other DNA
tttccgggcgttgcgctgctgacggaagagtacatcaactttatggccagcaatttcgaccgcctgaccgtctga

SEQ ID NO: 571709 - DNA, 75 bp, synthetic construct
  source 1..75: mol_type = other DNA
cgctttgcagaacgggtgaagcgttcgcagaacctggtcaacaggtggtgtactggtatcaaaaatatcggacct

SEQ ID NO: 571710 - DNA, 75 bp, synthetic construct
  source 1..75: mol_type = other DNA
accccgatgatatcaatttggttaaaattaatcaactaaactcggaagagttagaaacattgttatctgttctat

SEQ ID NO: 571711 - DNA, 75 bp, synthetic construct
  source 1..75: mol_type = other DNA
gaattttctggaattaggaataacatcataaatgcagtaaaacggctggaatcatttgaaaaatggtatgaaact

SEQ ID NO: 571712 - DNA, 75 bp, synthetic construct
  source 1..75: mol_type = other DNA
ctactgagcgtttaaattatcagagtgaattaaaaaaagcgaaaccatctcagttcttgtcactaaaaggacttg

SEQ ID NO: 571713 - DNA, 75 bp, synthetic construct
  source 1..75: mol_type = other DNA
tcgaagaggaaaaccttcgcctgaagaagctggttgccgacctgagtctcgacaaggccatgctgcaggacgtgc

SEQ ID NO: 571714 - DNA, 75 bp, synthetic construct
  source 1..75: mol_type = other DNA
attttgaagataattactggatgccagaaaagtataacgatattataacgaaaaatttctcaggtaatattacaa

SEQ ID NO: 571715 - DNA, 75 bp, synthetic construct
  source 1..75: mol_type = other DNA
tcaatgacgaaaaaaaatgcttagaacaaaagtatagggatagggattttagtggtcgaaatgtggaagagttta

SEQ ID NO: 571716 - DNA, 75 bp, synthetic construct
  source 1..75: mol_type = other DNA
actcatctgactacaccatcatgggatgttgagaacccttcaaatttttctgatattgaaacaacagaaaaaaat

SEQ ID NO: 571717 - DNA, 75 bp, synthetic construct
  source 1..75: mol_type = other DNA
aacaaaagacgttgctggtcatagccgatgtatcgaaaaacaagcgtgagcatctgatcccgctgactgaatcgg

SEQ ID NO: 571718 - DNA, 75 bp, synthetic construct
  source 1..75: mol_type = other DNA
aatatatttttttggtgatgatgactcttacctcttacccggtgttatatctcggttattggctacaaaatatga

SEQ ID NO: 571719 - DNA, 75 bp, synthetic construct
  source 1..75: mol_type = other DNA
caggcagtaatcttaagtttgaaaacagagagttagaatggacgtttaataacttattgtcccatttagaaactg

SEQ ID NO: 571720 - DNA, 75 bp, synthetic construct
  source 1..75: mol_type = other DNA
gatcaacagcaagctaatgatgtccttgctgttttacaaagacataatattaatgctgagaagaaggatcaaggc

SEQ ID NO: 571721 - DNA, 75 bp, synthetic construct
  source 1..75: mol_type = other DNA
gaaggatccggtgaaattcactttaaggtgaagttattgaagcaccgtgtgaaatacatcaggatgatattgata

SEQ ID NO: 571722 - DNA, 75 bp, synthetic construct
  source 1..75: mol_type = other DNA
agaaagatgttgaaaaactatcaactttagtcagtgaacgtagcccgcgaaatgaagactggaaatgccagcatg

SEQ ID NO: 571723 - DNA, 75 bp, synthetic construct
  source 1..75: mol_type = other DNA
ataccaggcatggttagcgggttataatgggcaagcagaaaacatgaaaaccgatgtgcaggttatcacgactaa

SEQ ID NO: 571724 - DNA, 75 bp, synthetic construct
  source 1..75: mol_type = other DNA
atagaaactaactctggtaacaccaacgttccagccggtagttacaacctgccgctgacggttagctacaacacc

SEQ ID NO: 571725 - DNA, 75 bp, synthetic construct
  source 1..75: mol_type = other DNA
cctgcataactctgtgagaaaaaccctggctaacgttgctcacaacacaaccgggtcaagtgcaatggcaacgac

SEQ ID NO: 571726 - DNA, 75 bp, synthetic construct
  source 1..75: mol_type = other DNA
tcttacacgaaagttatttgctgataaaaaacgttctgcagcttacagaaaatgttaatactattgacggaaaat

SEQ ID NO: 571727 - DNA, 75 bp, synthetic construct
  source 1..75: mol_type = other DNA
atacagtacagccaactccacctacgatacaattatcaaattattatcttcaaccattactgcgttgtttgattc

SEQ ID NO: 571728 - DNA, 75 bp, synthetic construct
  source 1..75: mol_type = other DNA
acctggtggtcacccgggataactcagtggcagacgcttcgacggcgaatacgctgcaggtgaaggtcaccgatg

SEQ ID NO: 571729 - DNA, 75 bp, synthetic construct
  source 1..75: mol_type = other DNA
cgggcaccagtacagtcactgccggtatcaacaacagcagtcagagccggaacgtgacatttgtcgccgatgtca

SEQ ID NO: 571730 - DNA, 75 bp, synthetic construct
  source 1..75: mol_type = other DNA
aggtgaaggtcaccgatgcgttcgggaatgcgctgaatgggcagacggtcagcgtgttggcagacaacggtgcaa

SEQ ID NO: 571731 - DNA, 75 bp, synthetic construct
  source 1..75: mol_type = other DNA
ggcaaaacgggtatggcggcgtgaacgggacctgacgggctggatgtcgctgtcacggaaaccgcaagtgacctg

SEQ ID NO: 571732 - DNA, 75 bp, synthetic construct
  source 1..75: mol_type = other DNA
ccggctttgacggccgcacacagcgttatcaccacgacctgaccggcaaacttatccgcagcgaggatgaggggc

SEQ ID NO: 571733 - DNA, 75 bp, synthetic construct
  source 1..75: mol_type = other DNA
gttatttctcatatttgtcactttttttataaagagaggagtatttagttctgggatttttttattttccctcat

SEQ ID NO: 571734 - DNA, 75 bp, synthetic construct
  source 1..75: mol_type = other DNA
cttgccgggcagacggtcagcgtgttggcggacaacagcgcaacggttgctccgacggtcatcacagggccggac

SEQ ID NO: 571735 - DNA, 75 bp, synthetic construct
  source 1..75: mol_type = other DNA
gtggcagacggtgcgacggcgaacacgctgcgggtgagggtgactgatgcattcggtaatgcgcttggcggacag

SEQ ID NO: 571736 - DNA, 75 bp, synthetic construct
  source 1..75: mol_type = other DNA
ggcacggtggagatcagtgtcaccagccagacggcggggatcagtacagtcactgcaaccatcaacaacagcacc

SEQ ID NO: 571737 - DNA, 75 bp, synthetic construct
  source 1..75: mol_type = other DNA
acgtgacgtttatcgccgatgtcagcacggcgcagatcgcgagtctggaggtgacgcaggataactcagtggctg

SEQ ID NO: 571738 - DNA, 75 bp, synthetic construct
  source 1..75: mol_type = other DNA
tggtcacccgggataactcggtggctgacggttcgacggcgaatacgctgcaggtgagggtgaccgatgcgttcg

SEQ ID NO: 571739 - DNA, 75 bp, synthetic construct
  source 1..75: mol_type = other DNA
tccgacggtcatcacagggccggacggcacggtggaaatcagtgtcaccagccagacggcaggcaccagtgcggt

SEQ ID NO: 571740 - DNA, 75 bp, synthetic construct
  source 1..75: mol_type = other DNA
ctttaggaatgcaacctgaaacaaccgttttaatatttaacgaagagaagaatgaagcttctatttctgttaaga

SEQ ID NO: 571741 - DNA, 75 bp, synthetic construct
  source 1..75: mol_type = other DNA
accattgaaaatggaaaactgacaggcactggcgcagacaccaccgatataaaaaataaggacttaatatttact

SEQ ID NO: 571742 - DNA, 75 bp, synthetic construct
  source 1..75: mol_type = other DNA
gtttctgaacgaggtcaacaacctgaacaaacgtatgggtgacctgcgtgacatcaatggcgaagccggtgcatg

SEQ ID NO: 571743 - DNA, 75 bp, synthetic construct
  source 1..75: mol_type = other DNA
gcgataaaattctgcgcacccgcgcgttgctgggctgcctgacctttgccaacttcagcattctctggacctcaa

SEQ ID NO: 571744 - DNA, 75 bp, synthetic construct
  source 1..75: mol_type = other DNA
tcggagcttattacggacttttgagtcgaaagggatgcttaatatttcctcgatggggaagaaatttagcctgtt

SEQ ID NO: 571745 - DNA, 75 bp, synthetic construct
  source 1..75: mol_type = other DNA
ttttactcgctcgtgagcagattgaagcattacagcgcatccaggacgaagagcgtcaaaaatctgtgcttggtg

SEQ ID NO: 571746 - DNA, 75 bp, synthetic construct
  source 1..75: mol_type = other DNA
ccgttttatccctgaataatactgctgactatatctatcacggcaacataaacgggaatctggacgtacttcagc

SEQ ID NO: 571747 - DNA, 75 bp, synthetic construct
  source 1..75: mol_type = other DNA
ggttacaaaatctatgagtccaccgttccaccgggtgaattcgtgattgacgatctcagtccttcagggtttggt

SEQ ID NO: 571748 - DNA, 75 bp, synthetic construct
  source 1..75: mol_type = other DNA
accgccatcgctgccatcggctttttactggcactgtttatcggcttacgcagccgccggcatcactcgctaaag

SEQ ID NO: 571749 - DNA, 75 bp, synthetic construct
  source 1..75: mol_type = other DNA
ggaaacacttaacgtatagtttcgatggaagaaatattattatttccaacccatctaaatatatcgttagaatgt

SEQ ID NO: 571750 - DNA, 75 bp, synthetic construct
  source 1..75: mol_type = other DNA
gtactggcgttgattatcggcatcctggtgctggatctcaccgtgcagggcgtgcatatcactaaccagacggta

SEQ ID NO: 571751 - DNA, 75 bp, synthetic construct
  source 1..75: mol_type = other DNA
taatggcactgatggcgctggcattatggcgtggtctgccacaaatgaaatcagaaacccacctcaactacccac

SEQ ID NO: 571752 - DNA, 75 bp, synthetic construct
  source 1..75: mol_type = other DNA
tgtccgttggcctgaatgcagaaatcagggataacgtccgctttggactggagtttgagaaatccgcctttggta

SEQ ID NO: 571753 - DNA, 75 bp, synthetic construct
  source 1..75: mol_type = other DNA
gatgtcaggacggcgaagatcgcggacctggtggtcattaaggacgactcagtggcagacggtgcaatggcgaat

SEQ ID NO: 571754 - DNA, 75 bp, synthetic construct
  source 1..75: mol_type = other DNA
tatggctatgtagtagcacaagatcgcctttttcagatggaaatggcacgtcgcagtactcaagggactgtcgcg

SEQ ID NO: 571755 - DNA, 75 bp, synthetic construct
  source 1..75: mol_type = other DNA
catcaatttgcttaatgatgatggtaaaacctggcagcagccaggctctgccatcctgaacgtttggctgaccag

SEQ ID NO: 571756 - DNA, 75 bp, synthetic construct
  source 1..75: mol_type = other DNA
gtgatttcctggggatcaacggcaggtttcggcgatgatgtcgatatttttgctgaacggctgtcggcagagaaa

SEQ ID NO: 571757 - DNA, 75 bp, synthetic construct
  source 1..75: mol_type = other DNA
tttaattgtagatagtgcgatactgagatcaacggttgaaaaacctttacaaataaggagcgctaacccagcaat

SEQ ID NO: 571758 - DNA, 75 bp, synthetic construct
  source 1..75: mol_type = other DNA
atatagccaaaaggtcattgttttcattgcaagttcaaatagccgaaaaaattcggaggatgaccattcctgtag

SEQ ID NO: 571759 - DNA, 75 bp, synthetic construct
  source 1..75: mol_type = other DNA
gttgatgacttcctgttcaaagatgtttcaacactaaaaacagaaaatcttccagaattattcttaacaaaaata

SEQ ID NO: 571760 - DNA, 75 bp, synthetic construct
  source 1..75: mol_type = other DNA
tattcctgatgatgcagacagtatcgcgcgaatgaatgtctatccagtcagcacgacaggcgtaccaccagaaac

SEQ ID NO: 571761 - DNA, 75 bp, synthetic construct
  source 1..75: mol_type = other DNA
ttggcagcatcacccaattttggcgttaaaaccctggaggaagaagaaaatacggctggagtagttaaagacaaa

SEQ ID NO: 571762 - DNA, 75 bp, synthetic construct
  source 1..75: mol_type = other DNA
cagtggcactattgatctctattatcgtattattccacaatgatgttaaatttacgaatgtatatatatatactt

SEQ ID NO: 571763 - DNA, 75 bp, synthetic construct
  source 1..75: mol_type = other DNA
gacaaatagaatgggattttgtcgtcagcccacttcatccactggcagtgaagcggaatccattagaaaacagtg

SEQ ID NO: 571764 - DNA, 75 bp, synthetic construct
  source 1..75: mol_type = other DNA
gggacgtctttgcggctaactttcgtgttgtggggcataagcctcttggggccagaacggcagaactcgcaattc

SEQ ID NO: 571765 - DNA, 75 bp, synthetic construct
  source 1..75: mol_type = other DNA
gctcgaatgaatgtttatccggtcagcacgacaggtgtaccaccggaaaccgggagctttgaagccacagcaacg

SEQ ID NO: 571766 - DNA, 75 bp, synthetic construct
  source 1..75: mol_type = other DNA
ggtgctgttaacggggctaaagcgcaggcgctcactatcaacaaggatgaggttaactcaactgttgatttaact

SEQ ID NO: 571767 - DNA, 75 bp, synthetic construct
  source 1..75: mol_type = other DNA
cgcttgccgggcagacggtcagcgtgttggcggacaacggcgcaacgactgccccgacggtcatcacagagccgg

SEQ ID NO: 571768 - DNA, 75 bp, synthetic construct
  source 1..75: mol_type = other DNA
tggagatcagtgtcaccagtcagacggcgggagccagtactgtcactgccagcatcaacagcagcagcctgagcc

SEQ ID NO: 571769 - DNA, 75 bp, synthetic construct
  source 1..75: mol_type = other DNA
cggacggcacggtggagatcagtgtcaccagccagacggcgggcaccagtacagtcaccgccagcatcaacaaca

SEQ ID NO: 571770 - DNA, 75 bp, synthetic construct
  source 1..75: mol_type = other DNA
cacggtggagatctctgtaaccagccagacggcgggaatcagtgcagtcactgccagcatcaacagcagcagtca

SEQ ID NO: 571771 - DNA, 75 bp, synthetic construct
  source 1..75: mol_type = other DNA
gggagtcagtgcagtcactgcaaccatcaacagcagtagtcagagtcagaacgtgacatttatcgccgatgtcag

SEQ ID NO: 571772 - DNA, 75 bp, synthetic construct
  source 1..75: mol_type = other DNA
agtgagggtcaccgatgcgttcgggaatgcacttgccggacagacggtcagcgtgttggcggataacggcgcaac

SEQ ID NO: 571773 - DNA, 75 bp, synthetic construct
  source 1..75: mol_type = other DNA
gcgcgcaacctgaaagcaatgcagatggagcgcgacggcaaagatccgcaaatgcaggtcgcggaaatggcgcag

SEQ ID NO: 571774 - DNA, 75 bp, synthetic construct
  source 1..75: mol_type = other DNA
tgaattatgaggtggtcagcgagctatcacaaattcagatcccaatgcgtccggacttcgttttgaaaattacga

SEQ ID NO: 571775 - DNA, 75 bp, synthetic construct
  source 1..75: mol_type = other DNA
ccggcacatctgcctgtgaggcggcaacccatgcaaccgatgccgcaggctcagcacgtgccgccagcacgtcag

SEQ ID NO: 571776 - DNA, 75 bp, synthetic construct
  source 1..75: mol_type = other DNA
attggcggataccggcgcaacggtcgctccgactgtcatcacagggctggacggcacggtggaaatcagtgtcac

SEQ ID NO: 571777 - DNA, 75 bp, synthetic construct
  source 1..75: mol_type = other DNA
gcagacggtcagcgtgttggcggacaacggtgcaacggtcgctccgacggtgattacagagccggacggcacggt

SEQ ID NO: 571778 - DNA, 75 bp, synthetic construct
  source 1..75: mol_type = other DNA
aggggaaaaatggagatatgtgggtgatggcatatatgaacgtacatatatggcctaccaagaaggagaaaattt

SEQ ID NO: 571779 - DNA, 75 bp, synthetic construct
  source 1..75: mol_type = other DNA
ataaaacagggtgggtaagctcttactccaatccgggttatgttcctcctgcgccgacgattacagcgccacagc

SEQ ID NO: 571780 - DNA, 75 bp, synthetic construct
  source 1..75: mol_type = other DNA
agcaaaacgcgatgaagctaaaaagctcttagtgcagggtatagaccccaaagccgaacagaaagaagctcaggc

SEQ ID NO: 571781 - DNA, 75 bp, synthetic construct
  source 1..75: mol_type = other DNA
gccacaggtggcaattgtttccctgacgattaccgaaaaaggctattgtattgacccggccaccggtgcactcga

SEQ ID NO: 571782 - DNA, 75 bp, synthetic construct
  source 1..75: mol_type = other DNA
atttcaacctgtttagctggttgggttgggaacttagcgcacttgcaacaggtggttgggcacgagaaaagcggg

SEQ ID NO: 571783 - DNA, 75 bp, synthetic construct
  source 1..75: mol_type = other DNA
aagcaggtgatggaagttgttgaaaacttaccaaagcgtgttgtacagccttatcggtcgatgacggttcagcaa

SEQ ID NO: 571784 - DNA, 75 bp, synthetic construct
  source 1..75: mol_type = other DNA
aaccacgattaccaagcaagacattaaacaggtaatggaggttgttgaaaacttgcctaagcgtgttgtgcagcc

SEQ ID NO: 571785 - DNA, 75 bp, synthetic construct
  source 1..75: mol_type = other DNA
agccaatgcggaagtggaaacccagcgttcggtgatccgtggacgggaagactccctcaccaggctcaactttac

SEQ ID NO: 571786 - DNA, 75 bp, synthetic construct
  source 1..75: mol_type = other DNA
gatgaagtgcggcgcgatgtttattactatcgggtgtacattcgcactttcagcaaccatctggaaaacaaaagc

SEQ ID NO: 571787 - DNA, 75 bp, synthetic construct
  source 1..75: mol_type = other DNA
cgcaggggatcagtctggtcaatcgcgaactggcgatgacccagccgctggtgaaacagggggcggcgagcagcg

SEQ ID NO: 571788 - DNA, 75 bp, synthetic construct
  source 1..75: mol_type = other DNA
ttcaataccttctatcgcagtagcgccgatccgcttgagggggagcttagaacggtgtgggaatttgacatgcag

SEQ ID NO: 571789 - DNA, 75 bp, synthetic construct
  source 1..75: mol_type = other DNA
gcagaaccatgacaactggtatggtgccctgtcagagaccattgaagccctgacctcgtttaatgagagaccgtt

SEQ ID NO: 571790 - DNA, 75 bp, synthetic construct
  source 1..75: mol_type = other DNA
atgtttggaaagctccttaacagcgtgacctggcaggtcagagctgacctccgccgcaaactcaaagccaaccgg

SEQ ID NO: 571791 - DNA, 75 bp, synthetic construct
  source 1..75: mol_type = other DNA
attccttttgttaaatcattagccatcacaatcccgatgtttgatgcctttgtttcaaacctgattatgtcaaaa

SEQ ID NO: 571792 - DNA, 75 bp, synthetic construct
  source 1..75: mol_type = other DNA
gttatggttcacagtagttctgataataggcacattttctgtcatagcaggtgtcttctctctgatatcagcctt

SEQ ID NO: 571793 - DNA, 75 bp, synthetic construct
  source 1..75: mol_type = other DNA
tttttatgtcaccgggcatgcttgtgttgggaactattcttatgcccttcataaccgcttatcagaatcacttta

SEQ ID NO: 571794 - DNA, 75 bp, synthetic construct
  source 1..75: mol_type = other DNA
ttccgggtgcctggaaagtaggtgcctggtataacacagcaaaagccagtgacgtcctgaaggatgcagaaggcg

SEQ ID NO: 571795 - DNA, 75 bp, synthetic construct
  source 1..75: mol_type = other DNA
gagttttgtgtgacatctctgcgtcagaggattggatatctacctcaggagcccctgttattcggatacagtatt

SEQ ID NO: 571796 - DNA, 75 bp, synthetic construct
  source 1..75: mol_type = other DNA
aaaacacgattaccagcattgagtcagcacgggatgaaataccattcggactcgatgaagatcaaagcaacatgc

SEQ ID NO: 571797 - DNA, 75 bp, synthetic construct
  source 1..75: mol_type = other DNA
atctgttttcgtgagtacatgaagtccatcaaggaatcatgctatgcggaaattgttgaagagattaaccgccga

SEQ ID NO: 571798 - DNA, 75 bp, synthetic construct
  source 1..75: mol_type = other DNA
cgaggcaattcataaacatctcaaaatttataaatcgctgttcaagacctttcttactgatagcaaagagattct

SEQ ID NO: 571799 - DNA, 75 bp, synthetic construct
  source 1..75: mol_type = other DNA
cgtaccttgatgattatggacaacggcggctggtgcatagtttccggcacacaatgatctcgacctgtttagctg

SEQ ID NO: 571800 - DNA, 75 bp, synthetic construct
  source 1..75: mol_type = other DNA
cgccgctattggtggcattgaatccgctacaactggcggatctggtggggaaggtaaagacaagccaaacaaacc

SEQ ID NO: 571801 - DNA, 75 bp, synthetic construct
  source 1..75: mol_type = other DNA
gcgacccaatgtgcagttgctgattgatcccggtggggtgagtgaaatcgacgacgcctgggttgtgggaactca

SEQ ID NO: 571802 - DNA, 75 bp, synthetic construct
  source 1..75: mol_type = other DNA
ttctcggtcacgaaggggccggcgttgtggttgaagtcggtgaaggcgtaaccagcgtcaaacctggcgaccatc

SEQ ID NO: 571803 - DNA, 75 bp, synthetic construct
  source 1..75: mol_type = other DNA
atgattggcgttactccgcatattccttttgttaaatcattagctacgccgatctcagtgttcgattcatttttg

SEQ ID NO: 571804 - DNA, 75 bp, synthetic construct
  source 1..75: mol_type = other DNA
gtaaaacagggggcggcgagcagcgtcgaagtgctgcgcctgcaacgccaggccaatgaactggaaaacaaactt

SEQ ID NO: 571805 - DNA, 75 bp, synthetic construct
  source 1..75: mol_type = other DNA
atgggatgcatcctcgtcggcgtattactggtgccagtaactgtaaaatgttttggtaaaaaacaggtttattta

SEQ ID NO: 571806 - DNA, 75 bp, synthetic construct
  source 1..75: mol_type = other DNA
ggattcttttacacactcaatgaaaaacggtttgcattgattattgaggaaatcaaccaacgcaaaaataaagag

SEQ ID NO: 571807 - DNA, 75 bp, synthetic construct
  source 1..75: mol_type = other DNA
aataaacaaagtgatgtaaatttagacatgctaattgaggaattaataaatgaagaactggaagctatcaaagct

SEQ ID NO: 571808 - DNA, 75 bp, synthetic construct
  source 1..75: mol_type = other DNA
atgaagctctggcccacgcttggcgtcgctttccttctgattgccggatggggagcatccatgcgtctgtcgtgg

SEQ ID NO: 571809 - DNA, 75 bp, synthetic construct
  source 1..75: mol_type = other DNA
cctttgccaacttcagcattctctggacctcaatggcctttttgcttgccgctccaccttttaactacagcgatg

SEQ ID NO: 571810 - DNA, 75 bp, synthetic construct
  source 1..75: mol_type = other DNA
aatttcttacaaaaaatggtggatgtcaataattttgtgaaattactatgttatattttcgaaaaaggtaagtta

SEQ ID NO: 571811 - DNA, 75 bp, synthetic construct
  source 1..75: mol_type = other DNA
aggtattacatccgcccaagataaactcgataattttagtaaaaaagctggtggacctcttcggaagtgccgcta

SEQ ID NO: 571812 - DNA, 75 bp, synthetic construct
  source 1..75: mol_type = other DNA
catccgtctttcggcggtgtggctgatgcacgacccggcatacccggaaagcctgcccggtgcgccactggcgcg

SEQ ID NO: 571813 - DNA, 75 bp, synthetic construct
  source 1..75: mol_type = other DNA
aatggagccagtcagtggtgagggtgagaaggtaaactttgaactgtataccgacaataacaacagttcacctgt

SEQ ID NO: 571814 - DNA, 75 bp, synthetic construct
  source 1..75: mol_type = other DNA
tgctacgagaactgacagatgactgcgcccagtttatagaagaacttaaaaagagtccggatactgagatacttg

SEQ ID NO: 571815 - DNA, 75 bp, synthetic construct
  source 1..75: mol_type = other DNA
gatgaagctggtctatcggctagtgctcagaaatatgtatttgaagcagtagcatctgattcatcccgtcttgca

SEQ ID NO: 571816 - DNA, 75 bp, synthetic construct
  source 1..75: mol_type = other DNA
gcattagaagcaattgcatctgatgcatctcgactaagtggtgtttataatgaattgggtagcaaacaatccgtt

SEQ ID NO: 571817 - DNA, 75 bp, synthetic construct
  source 1..75: mol_type = other DNA
aaatccaggaaattgcagcacatgcacttcaccaacgtctgaacgaagttgaattagaatctgcaacgaagaaat

SEQ ID NO: 571818 - DNA, 75 bp, synthetic construct
  source 1..75: mol_type = other DNA
gtttgatctggcctacgagactcgtcatataaccaaccggactcgcgacacattgctccgcgaagcagcaaaact

SEQ ID NO: 571819 - DNA, 75 bp, synthetic construct
  source 1..75: mol_type = other DNA
ttaagcgcagctatttagtagcgttgatgatgatcacttacattccgcaaatatccttgttcattccacagctac

SEQ ID NO: 571820 - DNA, 75 bp, synthetic construct
  source 1..75: mol_type = other DNA
gtgaatctgacagacagccgggctgtattcgcggcaggataaagaaaaaccgggagatgactctcccggtccgtc

SEQ ID NO: 571821 - DNA, 75 bp, synthetic construct
  source 1..75: mol_type = other DNA
tcggctgggcgtggtacttccagcttgatgaagtcaccaccggcagcggcacggtagaaccttccgggcgcgaac

SEQ ID NO: 571822 - DNA, 75 bp, synthetic construct
  source 1..75: mol_type = other DNA
tatcaaacgttgtcaccttccaggttgatcgaccatcattagagaaagcaaaagcagaagtagaaaaactgaacc

SEQ ID NO: 571823 - DNA, 75 bp, synthetic construct
  source 1..75: mol_type = other DNA
aagaagctggcgctcatggaacagttcagagagatgttagctgctgagggtattgaaggtatcagcattacagag

SEQ ID NO: 571824 - DNA, 75 bp, synthetic construct
  source 1..75: mol_type = other DNA
ttatccgcgtttttttgccagtctggcgggctttgttacggcaggtgtgacgctaccatttgttaattatgtcgg

SEQ ID NO: 571825 - DNA, 75 bp, synthetic construct
  source 1..75: mol_type = other DNA
ttaacgacgatgcggcgtttcatctctaccaccgccgcaccgcaactgacgcagtgctctgtgaactgttaccgg

SEQ ID NO: 571826 - DNA, 75 bp, synthetic construct
  source 1..75: mol_type = other DNA
atgcaccggattctttttttacgtaatcgcgggttgattggtcgcaagaaaaaagcaccgctgagtgcagaagcc

SEQ ID NO: 571827 - DNA, 75 bp, synthetic construct
  source 1..75: mol_type = other DNA
atatgttatcggtgatgcggatttgttcccctattatctgtcgtatgcgggagctgctaacctggtgacgttagt

SEQ ID NO: 571828 - DNA, 75 bp, synthetic construct
  source 1..75: mol_type = other DNA
atctattatttctcatatgttattggtgatgcggatttgttcccctattatctgtcgtatgcgggagctgctaac

SEQ ID NO: 571829 - DNA, 75 bp, synthetic construct
  source 1..75: mol_type = other DNA
agccatcgttgcgcttatttataaaaacgatcagctttcatgcctcttgggtatggctcttgcttataatgtagc

SEQ ID NO: 571830 - DNA, 75 bp, synthetic construct
  source 1..75: mol_type = other DNA
atggcaacgctatcagtggtctttcgttgtcggcaagtttgacggggaccgcctctgaaggggcgaccgtttcca

SEQ ID NO: 571831 - DNA, 75 bp, synthetic construct
  source 1..75: mol_type = other DNA
acagtgaacaagataacggtgatgtgtttaatggtcaaagttatcagattgcctggaacaaatatctctctcaaa

SEQ ID NO: 571832 - DNA, 75 bp, synthetic construct
  source 1..75: mol_type = other DNA
ttgtggtttaccagaaagaggttccgccaggtccattcgccattgatgatttgcaacttgctggtggtggtgcag

SEQ ID NO: 571833 - DNA, 75 bp, synthetic construct
  source 1..75: mol_type = other DNA
caggatttcagtggagaacttaaactgggcggcccggtaaccagtacccgtaatccttgggtgtggaagacagga

SEQ ID NO: 571834 - DNA, 75 bp, synthetic construct
  source 1..75: mol_type = other DNA
aatggcagacctggattgaagctcgctttaatacgtttgacacaacgaaacctgcaggaacgactactccacagc

SEQ ID NO: 571835 - DNA, 75 bp, synthetic construct
  source 1..75: mol_type = other DNA
gtaataaacaacattctgatagagagtgcctgtataaagctgaagtgacaatgaccgggaagggaacccgttttc

SEQ ID NO: 571836 - DNA, 75 bp, synthetic construct
  source 1..75: mol_type = other DNA
actagttaatattagtgaaaaaaatgtttatgccagaatgtctaataattgccgtgcaaaaatagttagtaatta

SEQ ID NO: 571837 - DNA, 75 bp, synthetic construct
  source 1..75: mol_type = other DNA
aaaccagcgcggcggttgagcttatctttgcaaccctccaggggagcatggctctggcctgccaggatatgtatg

SEQ ID NO: 571838 - DNA, 75 bp, synthetic construct
  source 1..75: mol_type = other DNA
aaagaccacctggtatcatattaaccatcccataaacaggttgattccaccagcaggatcgttgcccacaccggg

SEQ ID NO: 571839 - DNA, 75 bp, synthetic construct
  source 1..75: mol_type = other DNA
aggaacttgcagaggcaactggttcgccacagaagtctcttcaaaaagaggtattaacccagaatggtatctttt

SEQ ID NO: 571840 - DNA, 75 bp, synthetic construct
  source 1..75: mol_type = other DNA
acagtagctggcagtggtgaattacgtctgaatggtacaataccaggacactggcgagtatcgttacctataagt

SEQ ID NO: 571841 - DNA, 75 bp, synthetic construct
  source 1..75: mol_type = other DNA
ccattatcagtttcctgcctttctgtgttctggcctggaatactccgggagaggatttcagcggagagcttaagc

SEQ ID NO: 571842 - DNA, 75 bp, synthetic construct
  source 1..75: mol_type = other DNA
ttatgtcaaatatcttgcttccgaaatgacgccttcagagctggacgcaaaacacaacatgctgtcaggaaaacc

SEQ ID NO: 571843 - DNA, 75 bp, synthetic construct
  source 1..75: mol_type = other DNA
acaaatgatgatttttatgccgggctggattccggcgctaacctgttcggctggcagtttcgcgacagcagcgcc

SEQ ID NO: 571844 - DNA, 75 bp, synthetic construct
  source 1..75: mol_type = other DNA
gaggctatgatgagttactgctcccacacctggctgaagcactgaacagtaatccggggagcaggaaactgattg

SEQ ID NO: 571845 - DNA, 75 bp, synthetic construct
  source 1..75: mol_type = other DNA
tggcaggggaaatccgtggtttttgatgccagtcataacgtgtttgactacaaagtattacgaaagaactttaat

SEQ ID NO: 571846 - DNA, 75 bp, synthetic construct
  source 1..75: mol_type = other DNA
gggcaagtcgtaaagacgcagcaacaactgggtccgaacatgccggttattgaacttactattctgaaacccttc

SEQ ID NO: 571847 - DNA, 75 bp, synthetic construct
  source 1..75: mol_type = other DNA
tccttgtcccagatggttgttttgtttggttatatctttcaggaatacagtcaggggcgacttgccagaatgctg

SEQ ID NO: 571848 - DNA, 75 bp, synthetic construct
  source 1..75: mol_type = other DNA
ccagggacatcatagccgcagcgatgaaagcactggatcggagctgggtgaatggccatcgatatgcaaaagcag

SEQ ID NO: 571849 - DNA, 75 bp, synthetic construct
  source 1..75: mol_type = other DNA
acgccacctgccccggtaccgtgcgtgaagccaccggcacctccggcgtgggcaatgatgccgccgtcgaactct

SEQ ID NO: 571850 - DNA, 75 bp, synthetic construct
  source 1..75: mol_type = other DNA
atcggcataggtcttgcgggaagtacctacgataacaactacccggaagaccaggcagtgaaaaactttgtcgtg

SEQ ID NO: 571851 - DNA, 75 bp, synthetic construct
  source 1..75: mol_type = other DNA
atgtcgagggtgaattttttctggtgctgaagcttcctgggggatcgctaacggctggtcgttatatggcggcgc

SEQ ID NO: 571852 - DNA, 75 bp, synthetic construct
  source 1..75: mol_type = other DNA
cgaaacgcaggttccggctggaccgtttcgtattcaggatcttggtgattccgtctccggtacgttgcatattcg

SEQ ID NO: 571853 - DNA, 75 bp, synthetic construct
  source 1..75: mol_type = other DNA
cgttttgaagagaaaatcagtctgacgccaagttctacttcttggaccaacactttctggcgtgactcatccaca

SEQ ID NO: 571854 - DNA, 75 bp, synthetic construct
  source 1..75: mol_type = other DNA
atcggcataggccttgcgggaagtacctacgataataattatccggaaaaccaggcagtgaaaaactttgtcgtg

SEQ ID NO: 571855 - DNA, 75 bp, synthetic construct
  source 1..75: mol_type = other DNA
acctttttatgcgcaatatcaaggtgatgcaggaatcctctgttggacccgcattgagcatgaacttcgacatgc

SEQ ID NO: 571856 - DNA, 75 bp, synthetic construct
  source 1..75: mol_type = other DNA
aagcgtctggctcactccttaaagtacgccaatagcttaagcagcttgcctgataaggcgatggagtatctgaat

SEQ ID NO: 571857 - DNA, 75 bp, synthetic construct
  source 1..75: mol_type = other DNA
ttcaacactctggcgcaatatgcagacattatttctgtttataaaattgccagaatgtctccagcaagacgaaca

SEQ ID NO: 571858 - DNA, 75 bp, synthetic construct
  source 1..75: mol_type = other DNA
tcatctctgcattacctactccatttaataatgcgcagcagattgatactgaaagtctgaaaaaacttgtccgct

SEQ ID NO: 571859 - DNA, 75 bp, synthetic construct
  source 1..75: mol_type = other DNA
cgcagcttcggccgttatgaactcaccaccgcttacacctctgccgggcagttacagagccagcacctgaacagc

SEQ ID NO: 571860 - DNA, 75 bp, synthetic construct
  source 1..75: mol_type = other DNA
aatggtgtctatacccacgttatggatgcacctgaacatggtttatgcccgttcggtaacgttggtgatcgcata

SEQ ID NO: 571861 - DNA, 75 bp, synthetic construct
  source 1..75: mol_type = other DNA
atcatgctaaaatattaccgagaaaatataattgtatttatactataaagtcagaatttgaagaaaaaaatagtg

SEQ ID NO: 571862 - DNA, 75 bp, synthetic construct
  source 1..75: mol_type = other DNA
tacttcaaaataaggtattactgcccggagcaaccacactagtacgtctcatcagtgaaattcgtgaaagggcaa

SEQ ID NO: 571863 - DNA, 75 bp, synthetic construct
  source 1..75: mol_type = other DNA
ttggtattgtcattttcactattgccatcgcctggggggcaatcgttctgaacctgccggttctgctattcacct

SEQ ID NO: 571864 - DNA, 75 bp, synthetic construct
  source 1..75: mol_type = other DNA
acagggcctcattgtcaccagaggagtggaaaaaactaacccgatttgacagtacagatgtaggatggattatta

SEQ ID NO: 571865 - DNA, 75 bp, synthetic construct
  source 1..75: mol_type = other DNA
acagcattggaatagttaagaaggatattctcccaccgagatctcaggtggttctgcttaaacatggtactctgc

SEQ ID NO: 571866 - DNA, 75 bp, synthetic construct
  source 1..75: mol_type = other DNA
cgttatgaccatgaccgttttggtcaggtgacggcggtgcaccgcgaggaagggctgagtcagtaccgcgcatac

SEQ ID NO: 571867 - DNA, 75 bp, synthetic construct
  source 1..75: mol_type = other DNA
cccgtatgcgacggacccggcaggaaaccggctgccggacccggaactgcacccggacagcaccttcacggcgtg

SEQ ID NO: 571868 - DNA, 75 bp, synthetic construct
  source 1..75: mol_type = other DNA
ctgggggcaatggccgaccagcttgacgacaccaagagccgtcttgaagacatgatgcgcgagctgatccaccgc

SEQ ID NO: 571869 - DNA, 75 bp, synthetic construct
  source 1..75: mol_type = other DNA
cagggcgagagttcgcggcttatgttggtctggtgcccagacagactggctcaggaggaaaaatccgcctgctgg

SEQ ID NO: 571870 - DNA, 75 bp, synthetic construct
  source 1..75: mol_type = other DNA
cgaattattaccccgccaccagccgcgaagccagacaatacagcagttttgcacactttaaggaagcctaagcgc

SEQ ID NO: 571871 - DNA, 75 bp, synthetic construct
  source 1..75: mol_type = other DNA
atcacctcatcgtccgctccggctttgcgcagctgctggggctggaacctgatttgcaggtagttgccgagtttg

SEQ ID NO: 571872 - DNA, 75 bp, synthetic construct
  source 1..75: mol_type = other DNA
cagaaaacgggcttagccgttatttggcacaaaccattcgaccatggattacatactctatgcaaacccgcaatc

SEQ ID NO: 571873 - DNA, 75 bp, synthetic construct
  source 1..75: mol_type = other DNA
ctataaccttaaagatattaagcatgacataagctctcagtttataatattaaaaaatacagacagagaagtctg

SEQ ID NO: 571874 - DNA, 75 bp, synthetic construct
  source 1..75: mol_type = other DNA
gtaattatggtgatttaaatattaaaagcctggctttcgactcttttaaagaaaggctgcagtctactatgacag

SEQ ID NO: 571875 - DNA, 75 bp, synthetic construct
  source 1..75: mol_type = other DNA
tgtacgccataacggagacagtgagaaaaacggcgaggcaaatcacaaggagagggatgtatcagcagtgtctga

SEQ ID NO: 571876 - DNA, 75 bp, synthetic construct
  source 1..75: mol_type = other DNA
cggaattaatattaccatggataaaaccatcatcgtgatggtggctgtgaacggccgaatgttcagtaaaaaata

SEQ ID NO: 571877 - DNA, 75 bp, synthetic construct
  source 1..75: mol_type = other DNA
ttgaatctaattatcgtgatcttgaagttctatcttatggagaactgacagaaaatgtttctataaatattctaa

SEQ ID NO: 571878 - DNA, 75 bp, synthetic construct
  source 1..75: mol_type = other DNA
gtttttttaggatcattttatgtagatagaatactgagcttttcatcatttccttcaattcttcttataaccact

SEQ ID NO: 571879 - DNA, 75 bp, synthetic construct
  source 1..75: mol_type = other DNA
agcaccttttcttacgcaatatcaacgtgatgcaggaagcagcaatcggacccgcgctgaagctgaacttcgacc

SEQ ID NO: 571880 - DNA, 75 bp, synthetic construct
  source 1..75: mol_type = other DNA
tacaaaaacagggaggtgattacttattcgctgtaaaaggaaatcagcgtcggcttaataaagcttttgaagaaa

SEQ ID NO: 571881 - DNA, 75 bp, synthetic construct
  source 1..75: mol_type = other DNA
aggacataactacaccataataaaaagcaaggctaattctgttatcctgttattaaaaatgctgctgacaaacaa

SEQ ID NO: 571882 - DNA, 75 bp, synthetic construct
  source 1..75: mol_type = other DNA
gagcttggtctagacccggaagatgagacccgccagcaccaatcccgagacgagctaatagcccaactggtcgct

SEQ ID NO: 571883 - DNA, 75 bp, synthetic construct
  source 1..75: mol_type = other DNA
atggctatgattgacccacgcactctcgaaggccgtttgaccctgcgttaccgggggcttcccacttctattcta

SEQ ID NO: 571884 - DNA, 75 bp, synthetic construct
  source 1..75: mol_type = other DNA
atggctatgattgacccacgcactcccgaaggccgtttgaccctgcgttaccgtggtctccgtacttcactactt

SEQ ID NO: 571885 - DNA, 75 bp, synthetic construct
  source 1..75: mol_type = other DNA
tcaatgctggtggaccgtgatttgaataatcagttgcgtcgagcatttgcgaaactggagtctggtgagctggag

SEQ ID NO: 571886 - DNA, 75 bp, synthetic construct
  source 1..75: mol_type = other DNA
tcgagacgagctgatagctatgctggtggaccgtgatttagacaatcagttacgccgagcctttgcgaagtctag

SEQ ID NO: 571887 - DNA, 75 bp, synthetic construct
  source 1..75: mol_type = other DNA
gagcttggtctagacccggaagatgagacccgccagcaccaatcacgagacgagctgatagcgcaactggtcgct

SEQ ID NO: 571888 - DNA, 75 bp, synthetic construct
  source 1..75: mol_type = other DNA
tacatgagagacaatggcagaaatactgttgaaaaagcattcagtaaagatatatggaagcataaatggattcag

SEQ ID NO: 571889 - DNA, 75 bp, synthetic construct
  source 1..75: mol_type = other DNA
ggggtgttgctgggcattttccatgtaggccagcctttacgagcattgaatatgttgctgcgagtgggccattca

SEQ ID NO: 571890 - DNA, 75 bp, synthetic construct
  source 1..75: mol_type = other DNA
tgactgcactggtggttattgctgctgaactggttggtcggatcggtttctacaacctctggaccatccctatgt

SEQ ID NO: 571891 - DNA, 75 bp, synthetic construct
  source 1..75: mol_type = other DNA
aatcattggttgccactagaaatacagcagaatgggctttttggtcaatggtaggaacgtggttttcaggcattg

SEQ ID NO: 571892 - DNA, 75 bp, synthetic construct
  source 1..75: mol_type = other DNA
gtactggcggtttagcgaaaggtttagaactggcaggattcgagcatcaagggtttgttgagctcaacaaacatg

SEQ ID NO: 571893 - DNA, 75 bp, synthetic construct
  source 1..75: mol_type = other DNA
catctccacatttagaagcgggttttggtattgcttttggagctaacgagcgtaaagccgtcgccatggcaatcg

SEQ ID NO: 571894 - DNA, 75 bp, synthetic construct
  source 1..75: mol_type = other DNA
tcgcgaacgtaacgaagttgaacaggatgtagaagttgcggtgcgtgagaaaaaccgtgatgcactttcgcgcaa

SEQ ID NO: 571895 - DNA, 75 bp, synthetic construct
  source 1..75: mol_type = other DNA
atggtagatagttcagttgatcctgaaaatgcaatcattgcaggatgggtcaatgtaatcaccatggggcagggc

SEQ ID NO: 571896 - DNA, 75 bp, synthetic construct
  source 1..75: mol_type = other DNA
ctcggactggatagcggcgcacttgatgcaacgatggttgttggcggtctggttcaggctctacttctggagtac

SEQ ID NO: 571897 - DNA, 75 bp, synthetic construct
  source 1..75: mol_type = other DNA
gccgggggtcggaggggctgtccggcgaggggggctcttgcctcccgcggcccgacatgcaaaaaaatgacgaca

SEQ ID NO: 571898 - DNA, 75 bp, synthetic construct
  source 1..75: mol_type = other DNA
tcgctgtgcaatgcactgttccggagcgaagtctgtactgtcaatgccgtggaagcctgcacccgtcagccacat

SEQ ID NO: 571899 - DNA, 75 bp, synthetic construct
  source 1..75: mol_type = other DNA
actattagtggtagtggctggggggggctttgcgctgcaaatgaagggtaaaagcggtgttgcgctagtagtggc

SEQ ID NO: 571900 - DNA, 75 bp, synthetic construct
  source 1..75: mol_type = other DNA
atttttgggcaataaccattatcagttttattattttcttcgtcttttatattttactaacattgttgccgattt

SEQ ID NO: 571901 - DNA, 75 bp, synthetic construct
  source 1..75: mol_type = other DNA
ttgcctaatctggaactggatattttacaaacgctggcggcaaagtcttaccaggctattgtcactgtgagttgc

SEQ ID NO: 571902 - DNA, 75 bp, synthetic construct
  source 1..75: mol_type = other DNA
gtcagggagtggccttgattctgccaggcatcaatgcggaacgttactatcaactttatcggggattacaccagg

SEQ ID NO: 571903 - DNA, 75 bp, synthetic construct
  source 1..75: mol_type = other DNA
ggcggcgtgatactggtgatccacagcgaaatagaccggccaatacgtggatttagcgttaatggcgtagcaggc

SEQ ID NO: 571904 - DNA, 75 bp, synthetic construct
  source 1..75: mol_type = other DNA
gcgtatactgagcggatatcaggtcacgacaggcagagagctgtttaatgccggaaaagtactatctggttcagc

SEQ ID NO: 571905 - DNA, 75 bp, synthetic construct
  source 1..75: mol_type = other DNA
gtcaatcccctgctcggtgcaaaggtccttcccggtgaaaccgacatcgccctgcccggcccgctgccgttcatc

SEQ ID NO: 571906 - DNA, 75 bp, synthetic construct
  source 1..75: mol_type = other DNA
gcgtttgaatttttccaaggggtcatacccgatctgtttattgttcaggacagtgagaagacgcgcgcactgacg

SEQ ID NO: 571907 - DNA, 75 bp, synthetic construct
  source 1..75: mol_type = other DNA
aaatattagtaaaggcaccctgcgcgccggtatcaacgatacctttagcccgaactccagttatgccgtctccag

SEQ ID NO: 571908 - DNA, 75 bp, synthetic construct
  source 1..75: mol_type = other DNA
ctgactggaaacatccgttgtgctggtggcgtcttgccaaagaagccggggcgaatgaagagaaacatgctgcta

SEQ ID NO: 571909 - DNA, 75 bp, synthetic construct
  source 1..75: mol_type = other DNA
cgatatggacaagctgtttaaagagcaggagaagaagctccgtcagagcgccgagcgtgagcagctgatccggga

SEQ ID NO: 571910 - DNA, 75 bp, synthetic construct
  source 1..75: mol_type = other DNA
gttgcactgcaaataattatttgaaacaagcctggaacaatataaaaaatgagcacgaaaaaaatcaaaaatatt

SEQ ID NO: 571911 - DNA, 75 bp, synthetic construct
  source 1..75: mol_type = other DNA
tacatgcagttcaaaaaataaaattgtacagtaaaccaccgtatggacttattgagtatgcttatggtgaaaaag

SEQ ID NO: 571912 - DNA, 75 bp, synthetic construct
  source 1..75: mol_type = other DNA
atgaagcctacttttgtacagcagaacggctgagggagctggccatacagcagctttatcagctggatcttgcct

SEQ ID NO: 571913 - DNA, 75 bp, synthetic construct
  source 1..75: mol_type = other DNA
gcctataaccgtcttgttcaaaaagatcgcaccactggtgaggtgcgactgcgtatgcacgtatcgcttcatccg

SEQ ID NO: 571914 - DNA, 75 bp, synthetic construct
  source 1..75: mol_type = other DNA
atgaatgccaaggcagctgctgcggatgtggcagagggggcagctattaactttgtagctccggtaacatttgct

SEQ ID NO: 571915 - DNA, 75 bp, synthetic construct
  source 1..75: mol_type = other DNA
gcaaatcgatcaccaaaatttagcaatatgcatggtttcccatttccagggggccgggacagggggtgatgctgc

SEQ ID NO: 571916 - DNA, 75 bp, synthetic construct
  source 1..75: mol_type = other DNA
accgggaacgttatcgtcgctggatcaagcaagccaacgaattgatgtcgggtgaaactcagcttatttttcaac

SEQ ID NO: 571917 - DNA, 75 bp, synthetic construct
  source 1..75: mol_type = other DNA
tcaggaggtattacatatactatacaatatgttcgagatattgatattgttagagtgtccttgccgggcagagct

SEQ ID NO: 571918 - DNA, 75 bp, synthetic construct
  source 1..75: mol_type = other DNA
gttattattggtatggctttatggaatatattgaaaacattaatgcgtgtgatgatgtttttctgagtattgttt

SEQ ID NO: 571919 - DNA, 75 bp, synthetic construct
  source 1..75: mol_type = other DNA
gcaaggttatgcagaggagaatgcaagcaagattcaatgcgacctatgttatattgatcctccatatatgaaaag

SEQ ID NO: 571920 - DNA, 75 bp, synthetic construct
  source 1..75: mol_type = other DNA
taaagctcgcagggaagaacttattgcagagcggcgcagtagtgaaagactgacgcggaagattgcgctaaagat

SEQ ID NO: 571921 - DNA, 75 bp, synthetic construct
  source 1..75: mol_type = other DNA
ttaatggtccttagcggcagtactatcaccgatttaaatgaattcagaattggtgaatttaattaccaggcgcag

SEQ ID NO: 571922 - DNA, 75 bp, synthetic construct
  source 1..75: mol_type = other DNA
gaaaataactcaccagtatgggatcaatttcgttatcttaatgttggaacaacaagtgaaggaacgttgaatata

SEQ ID NO: 571923 - DNA, 75 bp, synthetic construct
  source 1..75: mol_type = other DNA
caaatacctattctggccaaacgaatattagtaaaggcaccctgcgcgccggtatcaacgatacctttagtccaa

SEQ ID NO: 571924 - DNA, 75 bp, synthetic construct
  source 1..75: mol_type = other DNA
gtatggcacctggtacgctaacgaagcagataaaacaggaacttatgttgatagctggttgctctataactggtt

SEQ ID NO: 571925 - DNA, 75 bp, synthetic construct
  source 1..75: mol_type = other DNA
tggacgaaaccagcaccggtattctaaacattggtggagcgcagggagaagccgaacagaaagcgggaacaatca

SEQ ID NO: 571926 - DNA, 75 bp, synthetic construct
  source 1..75: mol_type = other DNA
accgacctgctaaccggcgagcagaaagtgaccagtctgtggttacgtaacattggcggacataaccgctttaag

SEQ ID NO: 571927 - DNA, 75 bp, synthetic construct
  source 1..75: mol_type = other DNA
gtcattaataacgctactgttaacggcgtgatttctacctactatctggacgacggtatttctaccaataccaac

SEQ ID NO: 571928 - DNA, 75 bp, synthetic construct
  source 1..75: mol_type = other DNA
ccaatgctcttggcaacacgcctctcgggagctctgtatcggaagcaataaccggcctattgggtaagttggggg

SEQ ID NO: 571929 - DNA, 75 bp, synthetic construct
  source 1..75: mol_type = other DNA
tttggcgctgggcgatttgttgtatggcgcagtgctcaccgaaaccgttttgcctggcccggaatgggtgcatgg

SEQ ID NO: 571930 - DNA, 75 bp, synthetic construct
  source 1..75: mol_type = other DNA
ttcattggcttattggctatggtaataccatctaagaaatttggtttttatgcatcatattcaatggtgcaaatt

SEQ ID NO: 571931 - DNA, 75 bp, synthetic construct
  source 1..75: mol_type = other DNA
agaagtctattgccctggcgggtgggtttaccgatcgcgcggatcgcaaagatatcaatatccgactctcaggga

SEQ ID NO: 571932 - DNA, 75 bp, synthetic construct
  source 1..75: mol_type = other DNA
ggtgaacccgagatgaccatgaaatttatcatcgataaaagcggcgctattactttcccttatatcggtaaactg

SEQ ID NO: 571933 - DNA, 75 bp, synthetic construct
  source 1..75: mol_type = other DNA
ccaaaatggaagccgcaagtagtaactctgatgactcaccaattgcatatccaggattgaatcaagctttaggcc

SEQ ID NO: 571934 - DNA, 75 bp, synthetic construct
  source 1..75: mol_type = other DNA
atcacggtttaaaattgggaacccgcgtaattatatacggggctggagcgtctggacgccagttacttcctgcgc

SEQ ID NO: 571935 - DNA, 75 bp, synthetic construct
  source 1..75: mol_type = other DNA
ggaaagacacgacaaaacgccactggcagcagccattggtatctggtttacggagcggagaggcgtgtacaagca

SEQ ID NO: 571936 - DNA, 75 bp, synthetic construct
  source 1..75: mol_type = other DNA
atacacctacacgctcaaggaaaacgggatgccttatgctggcgttattgcacaggaagtaatggaggcgatacc

SEQ ID NO: 571937 - DNA, 75 bp, synthetic construct
  source 1..75: mol_type = other DNA
tcaatatctttgtgtcccagatggtaaaggggactatacttgtggtggccaagaccaacggggagaatcaaaagg

SEQ ID NO: 571938 - DNA, 75 bp, synthetic construct
  source 1..75: mol_type = other DNA
tatgtaatgaatataatgatccaaatactgaaaaggcgttaaatatatattggggacagtatctgaatgaatcat

SEQ ID NO: 571939 - DNA, 75 bp, synthetic construct
  source 1..75: mol_type = other DNA
gtcagcttgggaagaaatgacctgcttattcgcaccttccctaattaactggttgccaacaatattcatgaccca

SEQ ID NO: 571940 - DNA, 75 bp, synthetic construct
  source 1..75: mol_type = other DNA
tatgtaaacctaactacattctatacattagtgttgatttgtgataataacactatagaaggacatattgaaaaa

SEQ ID NO: 571941 - DNA, 75 bp, synthetic construct
  source 1..75: mol_type = other DNA
aaaggatttaatacggtagcaaatcagggaacaacccaaaaagcagtacattttatgtcttccggctataaagcc

SEQ ID NO: 571942 - DNA, 75 bp, synthetic construct
  source 1..75: mol_type = other DNA
cttctatcctatgtttttttcagtattgtagttgcattggtttatgaggtatcaaggggagaatttttagtattc

SEQ ID NO: 571943 - DNA, 75 bp, synthetic construct
  source 1..75: mol_type = other DNA
ctttaacttattttatcgcgtattttttaattttattgtagctttatcagtcgttgctttctttatgcgctttgg

SEQ ID NO: 571944 - DNA, 75 bp, synthetic construct
  source 1..75: mol_type = other DNA
tgggctattttttactggtggcggtggcggcctggttcgtactggctatttttgtcaaagaagttaaaccgggcg

SEQ ID NO: 571945 - DNA, 75 bp, synthetic construct
  source 1..75: mol_type = other DNA
ctggccctgcgtttctgggaactacctgacggcatggagagattcagtgccgctaactcatttttttaacatctg

SEQ ID NO: 571946 - DNA, 75 bp, synthetic construct
  source 1..75: mol_type = other DNA
accggcgatggttttggcttccgccagaatattgtaagcgggcactctcagggcgaaaccgggtttactggtggt

SEQ ID NO: 571947 - DNA, 75 bp, synthetic construct
  source 1..75: mol_type = other DNA
attgatgctggcaactactcattaggcattcgtggcagaaatgacacgggcatgaagggtgcggaaagcattgtc

SEQ ID NO: 571948 - DNA, 75 bp, synthetic construct
  source 1..75: mol_type = other DNA
gaaacgctgtttacaggagggatcacagcagaagacagcactatcgttattaaagataaagcaaaagcattattt

SEQ ID NO: 571949 - DNA, 75 bp, synthetic construct
  source 1..75: mol_type = other DNA
atatccccacaccgctgtagctggcgcggttattgatcatgatcagtacactgatacacctacccgcacttatca

SEQ ID NO: 571950 - DNA, 75 bp, synthetic construct
  source 1..75: mol_type = other DNA
tcatctgaaggatacgcatattgtaccgcgttgtattctccaacaatgatagtagcaagaggcaccggatcattt

SEQ ID NO: 571951 - DNA, 75 bp, synthetic construct
  source 1..75: mol_type = other DNA
tctgccagtggtggtttcagtgacaactacacgcacgttcaggtcggggtcgacaaaaaacatgagctggacgga

SEQ ID NO: 571952 - DNA, 75 bp, synthetic construct
  source 1..75: mol_type = other DNA
cgaaatggggttgcagatagtgaaaagctgccaccttgagtacctgcatgaagacctgggcgcggatatgtccaa

SEQ ID NO: 571953 - DNA, 75 bp, synthetic construct
  source 1..75: mol_type = other DNA
aagcgcaacttatctgccaacaaaagggattcagcgcagcctccaatacgccagttgcgggtaatcgtgctctgg

SEQ ID NO: 571954 - DNA, 75 bp, synthetic construct
  source 1..75: mol_type = other DNA
acgctgcgtaatcagcggattatcgctgaaattaacgatccgcaaacggcggttgtgctttttgatcttgttctt

SEQ ID NO: 571955 - DNA, 75 bp, synthetic construct
  source 1..75: mol_type = other DNA
aaaaacacaaacgcatacttgcattatgttttttaggcttattacaatcctcatattcttttgcgtcacagatgg

SEQ ID NO: 571956 - DNA, 75 bp, synthetic construct
  source 1..75: mol_type = other DNA
aataaaaaacaaagacttaatattcacaggtggcggtaacatcctcctgaaatccagttttgacaatggtgctgg

SEQ ID NO: 571957 - DNA, 75 bp, synthetic construct
  source 1..75: mol_type = other DNA
tcgacgaagaaaccaaacgcctggcgatgcaggcggcagagcgccagcagatgagcctgacggagctgatgcgcc

SEQ ID NO: 571958 - DNA, 75 bp, synthetic construct
  source 1..75: mol_type = other DNA
cagttcaatctaaatgtgctcaaactggatggcgctgaattccatttatcacgtaattcaacgatgaagggagat

SEQ ID NO: 571959 - DNA, 75 bp, synthetic construct
  source 1..75: mol_type = other DNA
aactttataagttaagcgctaatcttgagagatacgaaaatataatacttaatatacaccctgatgatattgcga

SEQ ID NO: 571960 - DNA, 75 bp, synthetic construct
  source 1..75: mol_type = other DNA
gatgtagcaagagattatacgccacaaattggtagtcaatataaaaagaaaaaaaataatgtatttgtgattact

SEQ ID NO: 571961 - DNA, 75 bp, synthetic construct
  source 1..75: mol_type = other DNA
tgtgctatatgaatctcttaacgtggaataccaagactgtcagtgtcagtatataacatttgagaatattgatgg

SEQ ID NO: 571962 - DNA, 75 bp, synthetic construct
  source 1..75: mol_type = other DNA
atgaccactattaccaaagaacgtatcgaattattcattaaaaatccgcttgataacggacttacccgtggcgaa

SEQ ID NO: 571963 - DNA, 75 bp, synthetic construct
  source 1..75: mol_type = other DNA
tgataaagccattgcagatgagacaagcgcaagaactgaagctatcagtggagtgaatgcaagtattagcacgct

SEQ ID NO: 571964 - DNA, 75 bp, synthetic construct
  source 1..75: mol_type = other DNA
gcgttgggtaacggacataacctacagtgtgcccggagttcagggcgggcatggatgcttaaatgaaccgcgagt

SEQ ID NO: 571965 - DNA, 75 bp, synthetic construct
  source 1..75: mol_type = other DNA
gagcagctatgaatatggcttgctgcaagtgcctattttcggggcgttaattgcgggtaacttgctgttagcgcg

SEQ ID NO: 571966 - DNA, 75 bp, synthetic construct
  source 1..75: mol_type = other DNA
ttcaggatgaatcattgcagggtgacacgttgctgtccggattagctgatggtgtgccggagctggttgtgtcgt

SEQ ID NO: 571967 - DNA, 75 bp, synthetic construct
  source 1..75: mol_type = other DNA
gcggttgtcgttctgcaaacatcgaaagcggaaatcattgggaatggcgtggatgagacgactctgacagcaaca

SEQ ID NO: 571968 - DNA, 75 bp, synthetic construct
  source 1..75: mol_type = other DNA
taaaaaaaccacaactgaaaccattttagacattgtccgaagcgaagaaactattgctggcaggtcacgatggga

SEQ ID NO: 571969 - DNA, 75 bp, synthetic construct
  source 1..75: mol_type = other DNA
agtttggcaacccggtgacgcatcaacccgcgacattcagtgcagcgccatcctcgcaaatgatcatcagccaga

SEQ ID NO: 571970 - DNA, 75 bp, synthetic construct
  source 1..75: mol_type = other DNA
catcagccaaaatattgtctctactgatacgcatggtatagccgaggtctccatgacgcccgaaagaaacggttc

SEQ ID NO: 571971 - DNA, 75 bp, synthetic construct
  source 1..75: mol_type = other DNA
aacctcaaaactgcaactgataatctgaccaacataactgacgatttaaggactgaaactgacaacctaaccata

SEQ ID NO: 571972 - DNA, 75 bp, synthetic construct
  source 1..75: mol_type = other DNA
gattttcacaacacagcgctggcagcagtcagcgtactggctttgctggtaaccgcggcagtcattgtattgcag

SEQ ID NO: 571973 - DNA, 75 bp, synthetic construct
  source 1..75: mol_type = other DNA
gatcttttttgccgtaggcggcatcggctggttgctggcaatgctgaaaaagctgtcaccggcattgcgtacgct

SEQ ID NO: 571974 - DNA, 75 bp, synthetic construct
  source 1..75: mol_type = other DNA
ttgagaacgcacttttcgctggattaggtaaaagtaaagcgatggggtgcggcttactgatggtaaaaagggctg

SEQ ID NO: 571975 - DNA, 75 bp, synthetic construct
  source 1..75: mol_type = other DNA
tggatggttctgttgatatatccggagattttgagaaagaaacaggcacacttatattccaggggcatccagtac

SEQ ID NO: 571976 - DNA, 75 bp, synthetic construct
  source 1..75: mol_type = other DNA
ttgagtttgaaaaatccgcgtttggtaagtacaacgtggataacgccatcaacgctaacttccgttactccttct

SEQ ID NO: 571977 - DNA, 75 bp, synthetic construct
  source 1..75: mol_type = other DNA
gtatcttgataaagcaccaatgccagattttagtagtgcatcagtcgcagcaacgctattggttccaggagaaca

SEQ ID NO: 571978 - DNA, 75 bp, synthetic construct
  source 1..75: mol_type = other DNA
ttgctacaaagctggtaaaccgtgttcatagcaaaattgttattggtgatgatggtttgctgtgtgtgggatcgt

SEQ ID NO: 571979 - DNA, 75 bp, synthetic construct
  source 1..75: mol_type = other DNA
gagggatgggggagcttttgaaaggctcttcacagcctatagcaagtgattacctgtcattgaaaatagctttag

SEQ ID NO: 571980 - DNA, 75 bp, synthetic construct
  source 1..75: mol_type = other DNA
tttcataaaaaaaagggaacctatgatttgttatccttgctaaaagatcactatgttcttcatacaagtgggtac

SEQ ID NO: 571981 - DNA, 75 bp, synthetic construct
  source 1..75: mol_type = other DNA
ggatattcagattggctcgatctcgtcggtgactgttaaaagaaggtccccggacccgctcgacaagagaaaacc

SEQ ID NO: 571982 - DNA, 75 bp, synthetic construct
  source 1..75: mol_type = other DNA
tctgttttgtatcgatggctggaggacagacaaatcgatctgagagcaaggctgaaaattggcacactattcaca

SEQ ID NO: 571983 - DNA, 75 bp, synthetic construct
  source 1..75: mol_type = other DNA
aagaaggctatataccgggatcggcagaaagggagtgtaacgagtatcagctattgttcaggccgtacaacatga

SEQ ID NO: 571984 - DNA, 75 bp, synthetic construct
  source 1..75: mol_type = other DNA
atcctgagcgtatctatcaagaattcattgaagcgcaccgcggcgatgtgatgcttaacgctggtctgctgggcg

SEQ ID NO: 571985 - DNA, 75 bp, synthetic construct
  source 1..75: mol_type = other DNA
caggcacgtctcgacaaagttagcctttggttttggggcgtcacccgttttgcccttggtggtaaaaaagacgat

SEQ ID NO: 571986 - DNA, 75 bp, synthetic construct
  source 1..75: mol_type = other DNA
aggcacctaaccggcttgatattgcgaaagctgctggcttctagcccttatgctatcactgggacattgcaaacc

SEQ ID NO: 571987 - DNA, 75 bp, synthetic construct
  source 1..75: mol_type = other DNA
ctcaagccgccccacgctgtcactgagtgcactgctgaagcagtatggtatccgcctgacagctaatcaggcata

SEQ ID NO: 571988 - DNA, 75 bp, synthetic construct
  source 1..75: mol_type = other DNA
accacggcaaagcgtatagcgagttcatcgagaagcacattgatgaaccgctgctcaacgctggactacttggtg

SEQ ID NO: 571989 - DNA, 75 bp, synthetic construct
  source 1..75: mol_type = other DNA
agccgttgagcgttcggtaccgcgtcccgaccgacaggcgctggtggaacgtaacgtgaagatccacaacgaacg

SEQ ID NO: 571990 - DNA, 75 bp, synthetic construct
  source 1..75: mol_type = other DNA
tttattttattttttttttttttttttttttttttttttttttttttttttttttgcattggcgatcaaagtatt

SEQ ID NO: 571991 - DNA, 75 bp, synthetic construct
  source 1..75: mol_type = other DNA
tgacctttgccaataagatttccggcaatggtacaataagtatcgacagtgggacagtgggacagtgggacagtg

SEQ ID NO: 571992 - DNA, 75 bp, synthetic construct
  source 1..75: mol_type = other DNA
aatactggcggctatttgaaaacttttgctttgagcgcggggaggatgcagaggaaatatatcaacgcttagggg

SEQ ID NO: 571993 - DNA, 75 bp, synthetic construct
  source 1..75: mol_type = other DNA
aatactacgctcacgagctcacgtgccttcactcggcggacagtgtagatcgactctcacaatccctgttcgacg

SEQ ID NO: 571994 - DNA, 75 bp, synthetic construct
  source 1..75: mol_type = other DNA
gaagacagttacaacgaaggcttatcattgaaacgggcgaatgtcgtggccgatgcatgggctatgggtggacaa

SEQ ID NO: 571995 - DNA, 75 bp, synthetic construct
  source 1..75: mol_type = other DNA
ctgaaaaccgcgtgggcagctacagttcacttacaccgcttctcaacccggtacgcatcagaaaatcattgatat

SEQ ID NO: 571996 - DNA, 75 bp, synthetic construct
  source 1..75: mol_type = other DNA
acacaggcctctgaacatacagaactcttcaaccaccacccctctccgcccggaaggagtgacaaacagtaatga

SEQ ID NO: 571997 - DNA, 75 bp, synthetic construct
  source 1..75: mol_type = other DNA
cctgtcgacgctgacctcccgcgtggacgacgcggagctggctaatttccgcgagcagcttcagcaggccgggct

SEQ ID NO: 571998 - DNA, 75 bp, synthetic construct
  source 1..75: mol_type = other DNA
ggttttcaactggttcacgtcattgaccgagccggtcaagtacagtggcgaggaactggataaggccggtaaaat

SEQ ID NO: 571999 - DNA, 75 bp, synthetic construct
  source 1..75: mol_type = other DNA
tgccaacgatatggcagcaatcggcaccacgctgatttctatgggtgaaagcgcagacactgctgcaacgtcagt

SEQ ID NO: 572000 - DNA, 75 bp, synthetic construct
  source 1..75: mol_type = other DNA
atcttattgtgtactgggcatctttgcttgaggatacaactaccggaaaattaaaggattgcttcatcaaccgtt

SEQ ID NO: 572001 - DNA, 75 bp, synthetic construct
  source 1..75: mol_type = other DNA
ttgaagggaaactaaaagcggtgtttggtgaagctttgcttgtcgagtttttcgacagtgaaagcgctaactgct

SEQ ID NO: 572002 - DNA, 75 bp, synthetic construct
  source 1..75: mol_type = other DNA
agattgaggccgcttataatgatactttacttttggggaatggtgcaagtatcgctgttaatagcgattttgcct

SEQ ID NO: 572003 - DNA, 75 bp, synthetic construct
  source 1..75: mol_type = other DNA
gatattgtcagggaatatatggaatcaccgcaggcaagaaacatggtcaaccataagcaagtcgaagcgatgtta

SEQ ID NO: 572004 - DNA, 75 bp, synthetic construct
  source 1..75: mol_type = other DNA
caacgattgaagatattgttagggagtacatggaatcaccgcaggcaagaaacatggtcaactataagcaagtcg

SEQ ID NO: 572005 - DNA, 75 bp, synthetic construct
  source 1..75: mol_type = other DNA
aatcttcgtgcgtaaaaggatgggcggtaaatcatggtcctgtcacgacctccgcaggacgtgccggacacacct

SEQ ID NO: 572006 - DNA, 75 bp, synthetic construct
  source 1..75: mol_type = other DNA
taaccgctagggagcttcaggttctggagctaatcattgcctgtaacaacaataaaagaatcgcattactcctcg

SEQ ID NO: 572007 - DNA, 75 bp, synthetic construct
  source 1..75: mol_type = other DNA
gcaatgaagcgttatggccaggatagcgcgatattctcccgcatgaaggaccgctatcaaacggttgtcgggcag

SEQ ID NO: 572008 - DNA, 75 bp, synthetic construct
  source 1..75: mol_type = other DNA
tggtgcgtccttgccttcaccggcactggctaaccgcaccggcaacacaacggtgaacacgaacgaccagtacac

SEQ ID NO: 572009 - DNA, 75 bp, synthetic construct
  source 1..75: mol_type = other DNA
gtttacttatactcagaaaacaggtgcgtaattttgtagcccatggcgccttcggtaaggatgggcaagcattgg

SEQ ID NO: 572010 - DNA, 75 bp, synthetic construct
  source 1..75: mol_type = other DNA
tgcccccaggcgagatcaccgtcaccgacacagcgcctcaacagctgacggcaaccttgcaggataaaaatggca

SEQ ID NO: 572011 - DNA, 75 bp, synthetic construct
  source 1..75: mol_type = other DNA
cttagtcagagcacaagcaatactaacgacagtggtgttgctgaagttacccttaagggcacggttttgggtgtt

SEQ ID NO: 572012 - DNA, 75 bp, synthetic construct
  source 1..75: mol_type = other DNA
tgcaattaagccaggctgaaaactactgcagcaaccaggtcggtaatggctacacccttccccgcgcggaccttt

SEQ ID NO: 572013 - DNA, 75 bp, synthetic construct
  source 1..75: mol_type = other DNA
agacaaactggaggtcaaaaaacacctgtctggtgagaacaatattttactcgttgatttccttcagaaaccaac

SEQ ID NO: 572014 - DNA, 75 bp, synthetic construct
  source 1..75: mol_type = other DNA
tgaccaccaccggtagaccctcgctaaaccaggactggattgacctggccggcggcaaaaatatcgctgaaaatt

SEQ ID NO: 572015 - DNA, 75 bp, synthetic construct
  source 1..75: mol_type = other DNA
caagatccggtggcgctatttaccaaacgcaagtacgggtgaaaggctggtggaaagataacaataatattatct

SEQ ID NO: 572016 - DNA, 75 bp, synthetic construct
  source 1..75: mol_type = other DNA
tagttttagcgccgcagcccaggagttgcatcgcgttccttctgcggtcagctataccgtgcgtcagctggaaga

SEQ ID NO: 572017 - DNA, 75 bp, synthetic construct
  source 1..75: mol_type = other DNA
gatttaacaacgcttgaaaataacacaaatgccagtgttagccgtcttgatcaagctatcgctgatgaatcaagc

SEQ ID NO: 572018 - DNA, 75 bp, synthetic construct
  source 1..75: mol_type = other DNA
tttcgttgaagcatcaggtaagccaacagaaaactttgatgaaatcaccgattacgtcaccaaagacgtgatgaa

SEQ ID NO: 572019 - DNA, 75 bp, synthetic construct
  source 1..75: mol_type = other DNA
gaaaataacggtattgccatcactcaggccaatggcgaagcgcatgtcaccctcaaaggtaaaaaagcgggcacg

SEQ ID NO: 572020 - DNA, 75 bp, synthetic construct
  source 1..75: mol_type = other DNA
gggtgttcatacagccgaagccatactgcttaacggcaacagagatacgaagatagtcaatattgcgcccgatgc

SEQ ID NO: 572021 - DNA, 75 bp, synthetic construct
  source 1..75: mol_type = other DNA
tctgaacgaggtcaacaacctgaacaaacgtatgggggacctgcgtgacatcaacggcgaagccggtgcatgggc

SEQ ID NO: 572022 - DNA, 75 bp, synthetic construct
  source 1..75: mol_type = other DNA
gactgaccaactggcgcagcgcacctgaactggacaacgattatgaagcacgcccggccaatggctgggatgtac

SEQ ID NO: 572023 - DNA, 75 bp, synthetic construct
  source 1..75: mol_type = other DNA
gcaacgctaactgcaacggttaaagatcagttcgacaatgaggtgaataatcttccggtaacattcagctcagcc

SEQ ID NO: 572024 - DNA, 75 bp, synthetic construct
  source 1..75: mol_type = other DNA
gcaacgctaactgcaacggtcaaagatcagttcgacaatgaggtgaacaatcttccggtaacattcagcacagct

SEQ ID NO: 572025 - DNA, 75 bp, synthetic construct
  source 1..75: mol_type = other DNA
ttcttgtgacaagcaccgaggtcggactgaaaacagtttcagcctctctggcagataaacctactgaagtcatct

SEQ ID NO: 572026 - DNA, 75 bp, synthetic construct
  source 1..75: mol_type = other DNA
tgatgtttgattcacgcaatattcctgatgatttaatgaccaatggtcagtattacgccttccagaagttgggag

SEQ ID NO: 572027 - DNA, 75 bp, synthetic construct
  source 1..75: mol_type = other DNA
attctgggctcactggcgatggggatgatgtttgactcgcgtaatatcccggatgacttaatgactaacggtcaa

SEQ ID NO: 572028 - DNA, 75 bp, synthetic construct
  source 1..75: mol_type = other DNA
atggccgtagcaatattgctatggtttctgagtacgttaaggcgtaagcccagccaaaagaaaggctgtattgac

SEQ ID NO: 572029 - DNA, 75 bp, synthetic construct
  source 1..75: mol_type = other DNA
tgtctatgcccctacaggcgctactctgacggcaacgctaacctctgcaaatggcactccagggagggtcaggtc

SEQ ID NO: 572030 - DNA, 75 bp, synthetic construct
  source 1..75: mol_type = other DNA
aaactggaatgaagatttgcataccgctggatttatcatcgacgccaacccgcagtcagcgaaaattgcgacatt

SEQ ID NO: 572031 - DNA, 75 bp, synthetic construct
  source 1..75: mol_type = other DNA
gacgcctggaagatacggttcgtatactgtgaaagcatccctggcgaatggctccttttatgagaaggacctggt

SEQ ID NO: 572032 - DNA, 75 bp, synthetic construct
  source 1..75: mol_type = other DNA
aacttagtcagagcacaagcaatactaacgacagtggtgttgctgaagttacccttaagggcacggttttgggtg

SEQ ID NO: 572033 - DNA, 75 bp, synthetic construct
  source 1..75: mol_type = other DNA
acagccgaagccatactgcttaacggcaacagagatacgaagatagtcaatattgcgcccgatgccagcaacgcg

SEQ ID NO: 572034 - DNA, 75 bp, synthetic construct
  source 1..75: mol_type = other DNA
gaaattcttgtgacaagcaccgaggtcggactgaaaacagtttcagcctctctggcagataaacctactgaagtc

SEQ ID NO: 572035 - DNA, 75 bp, synthetic construct
  source 1..75: mol_type = other DNA
tggggcaagctgtttaacgtatcagctatgaaagccactgtgaacgcttccagcactgacaccacgaagattttt

SEQ ID NO: 572036 - DNA, 75 bp, synthetic construct
  source 1..75: mol_type = other DNA
gttttcagccgctgctacgttcagtgccgggatagcaggagccatcgagccggaagccattgacggccggactat

SEQ ID NO: 572037 - DNA, 75 bp, synthetic construct
  source 1..75: mol_type = other DNA
aggtaatgcagaactaccgttttctgtcagggtgtggggttccagtactcgtcaaaacgtttttgaggttggcac

SEQ ID NO: 572038 - DNA, 75 bp, synthetic construct
  source 1..75: mol_type = other DNA
acagcacacgccgttggttttaacgcgttctggttcttctgaaaatgtgtccattgggtttaagttagacaacat

SEQ ID NO: 572039 - DNA, 75 bp, synthetic construct
  source 1..75: mol_type = other DNA
cagacggcacgcacggaattatacattccagacggatttgttaagcaaaccgccgcgccttctggatatgttgaa

SEQ ID NO: 572040 - DNA, 75 bp, synthetic construct
  source 1..75: mol_type = other DNA
gagccggaagccattgaaggcatgactatcgatcttaatgaccttatcattaagttcacggataaaggttcagtt

SEQ ID NO: 572041 - DNA, 75 bp, synthetic construct
  source 1..75: mol_type = other DNA
tacatgttttacgcacaagaaacggcatcgggtggcagaaattttgactttaacggtgatgttacatgtaagaca

SEQ ID NO: 572042 - DNA, 75 bp, synthetic construct
  source 1..75: mol_type = other DNA
aatcaagataaacaacttttctttataataataggcacagagaaaaaggctatttattattttgtaggtgaaaat

SEQ ID NO: 572043 - DNA, 75 bp, synthetic construct
  source 1..75: mol_type = other DNA
gtcgtaagaaaatatcttgtgattcagatcacaaagattcaacaaaccaacaaaacaaaaatgtgacattactca

SEQ ID NO: 572044 - DNA, 75 bp, synthetic construct
  source 1..75: mol_type = other DNA
tgcatggggttcggtttgtctactaccagtacagttgatttgacctttacggacgctcttacaaagactactaat

SEQ ID NO: 572045 - DNA, 75 bp, synthetic construct
  source 1..75: mol_type = other DNA
ttgccatttgggttgagtgtgataactcgaaaacttctgaatgcttgtatactaaaaaaaataacttgttgattg

SEQ ID NO: 572046 - DNA, 75 bp, synthetic construct
  source 1..75: mol_type = other DNA
ccttggtacatggcatacgcatcctgaaaaagatccttatgcttcatacatcgatattagagactggaaaaattg

SEQ ID NO: 572047 - DNA, 75 bp, synthetic construct
  source 1..75: mol_type = other DNA
tcgatactgaacattttagtctccacatttcaaagaaagtgattgggatctggcagggatttcgacagtttaaac

SEQ ID NO: 572048 - DNA, 75 bp, synthetic construct
  source 1..75: mol_type = other DNA
agaccgcagactgaaagaaaatatcgagattatcgataacgcgactgacgcaatccgcaaaattaatggatacac

SEQ ID NO: 572049 - DNA, 75 bp, synthetic construct
  source 1..75: mol_type = other DNA
gcattaattcatcattatattcagaaggacaatacacttgtcagaatgctccctgagcaccagcatgataaaaag

SEQ ID NO: 572050 - DNA, 75 bp, synthetic construct
  source 1..75: mol_type = other DNA
caccgtaccaccctgattatggttatagtggtcacagccgtggcgtgtgggtggaaggaacggcaggggtggcac

SEQ ID NO: 572051 - DNA, 75 bp, synthetic construct
  source 1..75: mol_type = other DNA
tcattctgacagtacaaccggataatttttggttagtggatgcgccagaaatggacgtggggataatccgctact

SEQ ID NO: 572052 - DNA, 75 bp, synthetic construct
  source 1..75: mol_type = other DNA
tccggtgtttatcgcccggatgagggagcggaaattacgcttggtgggaaaaactggtcaaagctgacacccgcc

SEQ ID NO: 572053 - DNA, 75 bp, synthetic construct
  source 1..75: mol_type = other DNA
agctgcgctgggatcatttgataataagactgctgtctattcactcatccatgcagcactatttgctgacataac

SEQ ID NO: 572054 - DNA, 75 bp, synthetic construct
  source 1..75: mol_type = other DNA
atagacctgaaaacttggatccagtaccgggcagacaaggcgccagtagttttacgagaagaggaactgccgttt

SEQ ID NO: 572055 - DNA, 75 bp, synthetic construct
  source 1..75: mol_type = other DNA
actggaaccaattcggcgtggtcggtaggcacatcagaaagcacaggcaaaatgttgttcctgaaaaaccacaga

SEQ ID NO: 572056 - DNA, 75 bp, synthetic construct
  source 1..75: mol_type = other DNA
acaacgaatcacttggcgaaatccacatcagggcgaaaaacacaaaaggtgaatcaagtggtgattttattgttc

SEQ ID NO: 572057 - DNA, 75 bp, synthetic construct
  source 1..75: mol_type = other DNA
tgcccggcttaacaacgggacttttagcgtcaatgagctatacggaaccaaaaacaagccgtcgaaatcggatgt

SEQ ID NO: 572058 - DNA, 75 bp, synthetic construct
  source 1..75: mol_type = other DNA
aaccatcaaaggcgaaaataaaggatcagtcaaatactatcaatgtaggacttccggcggtggcgcgaatattac

SEQ ID NO: 572059 - DNA, 75 bp, synthetic construct
  source 1..75: mol_type = other DNA
ggtcctaacactgattcgcttggcgaagttcgcatcagggctaaaaacgcaaaaggtgtgtcgggtggtgatctt

SEQ ID NO: 572060 - DNA, 75 bp, synthetic construct
  source 1..75: mol_type = other DNA
tgtcaggtgacttgacgatcaataaagacacaccatcactattccttagggcaactggtgaaacaggtgctgccg

SEQ ID NO: 572061 - DNA, 75 bp, synthetic construct
  source 1..75: mol_type = other DNA
aactgatattcagtaattatgtcaacgaacttaagataaaaaatgttaacataagcaaatacattatcgtatata

SEQ ID NO: 572062 - DNA, 75 bp, synthetic construct
  source 1..75: mol_type = other DNA
cagccgccgcccacgcctgttttacgcctggaggcaatgtccgtaattcccatgacgacagaactggttcaagag

SEQ ID NO: 572063 - DNA, 75 bp, synthetic construct
  source 1..75: mol_type = other DNA
cggttatgtaacccgttatgaccatgaccgttttggtcaggtgacggcggtgcaccgcgaggaagggctgagtca

SEQ ID NO: 572064 - DNA, 75 bp, synthetic construct
  source 1..75: mol_type = other DNA
aatctggatatccgcatcccgtatgccacggacccggcaggcaaccgcctgcccgacccggagctgcacccggac

SEQ ID NO: 572065 - DNA, 75 bp, synthetic construct
  source 1..75: mol_type = other DNA
caaacaacttgaaagtattgcccgtagtcgtggtctcctcccaaaaaaactgctgaatgaaatgattgagcaggc

SEQ ID NO: 572066 - DNA, 75 bp, synthetic construct
  source 1..75: mol_type = other DNA
acccgcattcacaatacatttttccccaaaaagcaacaactcccgttcactcccggtggcactcactgcccggaa

SEQ ID NO: 572067 - DNA, 75 bp, synthetic construct
  source 1..75: mol_type = other DNA
ctttctccgtgccatctcagcatatggcggcagtcctctgaccaaatacgccgcgcgcctgctggcgttgacggg

SEQ ID NO: 572068 - DNA, 75 bp, synthetic construct
  source 1..75: mol_type = other DNA
ctccagtctataagtggttttgacgaagtttattatataggaatgaataatgaggggttgtctaaagcttataat

SEQ ID NO: 572069 - DNA, 75 bp, synthetic construct
  source 1..75: mol_type = other DNA
gagtacgctgagtgcggactggatatgttgattgactcagatgttttgaaagaaattccttttattaatactgct

SEQ ID NO: 572070 - DNA, 75 bp, synthetic construct
  source 1..75: mol_type = other DNA
ctcagatggtggtgcgcgaagatggtcgttactgcggttttgtctctggcggctgcgtggaggccgctgccgctt

SEQ ID NO: 572071 - DNA, 75 bp, synthetic construct
  source 1..75: mol_type = other DNA
tctggcactctccgtgctggcagaagtcgcctctgtacgtctccatcaggatgaggattcatgcctgcccccgtc

SEQ ID NO: 572072 - DNA, 75 bp, synthetic construct
  source 1..75: mol_type = other DNA
acgagcactggcataagccagagcaggcgtttctcaccgatgaccaccggaccattctgcgcttcgccgtagagg

SEQ ID NO: 572073 - DNA, 75 bp, synthetic construct
  source 1..75: mol_type = other DNA
caaacatcttgaaagtattgcccgtagtcgtggtctccacccaaaaaaactgctgaatgaaatgattgagcaggc

SEQ ID NO: 572074 - DNA, 75 bp, synthetic construct
  source 1..75: mol_type = other DNA
cccgtcttgctggagctatgcgcatccttggcgctgatagtgaaagtgcaaatgcttctattggtggcatggcga

SEQ ID NO: 572075 - DNA, 75 bp, synthetic construct
  source 1..75: mol_type = other DNA
cggtattgctggtgctgcagggtacgggcttaaacaggtcgcctacggttttcgcgaagcgtccagggaagcgta

SEQ ID NO: 572076 - DNA, 75 bp, synthetic construct
  source 1..75: mol_type = other DNA
aatgcatcaatagaaggtattttcaaagcattcaatgaggctgccagtggtaaaaacgagggggttatggcagcg

SEQ ID NO: 572077 - DNA, 75 bp, synthetic construct
  source 1..75: mol_type = other DNA
tgaatgcccagcctgcaatgtttctggtggccattatgttgcagaagctaaatcgcagtcgaaaggcaatgttgt

SEQ ID NO: 572078 - DNA, 75 bp, synthetic construct
  source 1..75: mol_type = other DNA
taaaaggaaaatggagtttacatatcctggagcaaataaaagccatctacaatcaaataatagcgatgttgttgc

SEQ ID NO: 572079 - DNA, 75 bp, synthetic construct
  source 1..75: mol_type = other DNA
acatcaatggaacgatgaatgaacttagcgcctcctgggatgggctgtggcaacgttcaaaaaataaagcgctaa

SEQ ID NO: 572080 - DNA, 75 bp, synthetic construct
  source 1..75: mol_type = other DNA
agtcgtggtatcctcccaaaaaaactgctgaatgaaatgattgagcaggcgtaccaggactttgtggcaaatgag

SEQ ID NO: 572081 - DNA, 75 bp, synthetic construct
  source 1..75: mol_type = other DNA
caaacagcttgaaagtattgcccgaagtcgtggtctccccccaaaaaaactgctgaatgaaatgattgagcaggc

SEQ ID NO: 572082 - DNA, 75 bp, synthetic construct
  source 1..75: mol_type = other DNA
caaacaccttgaaagtattgcccgaagtcgtggtctccgcccaaaaaaactgctgaatgaaatgattgagcaggc

SEQ ID NO: 572083 - DNA, 75 bp, synthetic construct
  source 1..75: mol_type = other DNA
agagagatatctaaggcatttactgcatgaaagttcagaaatggttttccgtacattccaggggcaacttgcctg

SEQ ID NO: 572084 - DNA, 75 bp, synthetic construct
  source 1..75: mol_type = other DNA
accgtgcatcctgacatccacagcgaaattatatggttctgctccacttacctgctgaaatccggaccacagatt

SEQ ID NO: 572085 - DNA, 75 bp, synthetic construct
  source 1..75: mol_type = other DNA
agtcgtggtttccacccaaaaaaactgctgaatgaaatgattgagcaggcgtaccaggactttgtggcaaatgag

SEQ ID NO: 572086 - DNA, 75 bp, synthetic construct
  source 1..75: mol_type = other DNA
tacgtgctgcgtgaggctggccgtctgactgacgcgctggcgcacctgcagcgtgcgatccagttagagcgaact

SEQ ID NO: 572087 - DNA, 75 bp, synthetic construct
  source 1..75: mol_type = other DNA
aagcagaaaaggatataactaaaagtgagttattacataaagtaaatgacaacctctatgatgaagataaaggat

SEQ ID NO: 572088 - DNA, 75 bp, synthetic construct
  source 1..75: mol_type = other DNA
ggttcagtccggtgtctctcttcttgcacttaaagagatgggaggatgggaaactctcgaaatggttcaaagata

SEQ ID NO: 572089 - DNA, 75 bp, synthetic construct
  source 1..75: mol_type = other DNA
tggttgttttttgcttctatacgctaggttataaacatgtcaatatagcaaaagaattagaaattactgaaatag

SEQ ID NO: 572090 - DNA, 75 bp, synthetic construct
  source 1..75: mol_type = other DNA
ccgacaaactgccggatggactcgataacgtgaaaggcattctgcccggcggcagcctgtttgaagaggcggtca

SEQ ID NO: 572091 - DNA, 75 bp, synthetic construct
  source 1..75: mol_type = other DNA
ccatgcgtgcccacgctgccggtgagtctgtggatacccgcctgctgacggagacccttgaactgactgccgctg

SEQ ID NO: 572092 - DNA, 75 bp, synthetic construct
  source 1..75: mol_type = other DNA
ctgcggccggtttcgggcgcatattgccatcacggcagcctgacgcccgttttcaccttacttccggttacgcca

SEQ ID NO: 572093 - DNA, 75 bp, synthetic construct
  source 1..75: mol_type = other DNA
gcgtacagaagctgctcttgagttccaacgttctgttgaacagagtcttgagcaactttctaacatttcgtcaga

SEQ ID NO: 572094 - DNA, 75 bp, synthetic construct
  source 1..75: mol_type = other DNA
aaatcggctcacactgttctccttagattagaccgaaagaaaaaatcgctgctcgataaatttattgaagaactt

SEQ ID NO: 572095 - DNA, 75 bp, synthetic construct
  source 1..75: mol_type = other DNA
acagaaaagaatgacgaagcatatcatcgtgctatcccttacttaaaagcacgtctgacgactgaatctgttctg

SEQ ID NO: 572096 - DNA, 75 bp, synthetic construct
  source 1..75: mol_type = other DNA
gaagttgctaaattatttggaattcacaattcaaaggttagtagaattgtaaatggcaaggcatggaggcatgtt

SEQ ID NO: 572097 - DNA, 75 bp, synthetic construct
  source 1..75: mol_type = other DNA
acccgctgggccgcagggtggcaaaacgggtatggcggcgtgaacgggacctgacgggctggatgtcgctgtcac

SEQ ID NO: 572098 - DNA, 75 bp, synthetic construct
  source 1..75: mol_type = other DNA
gtgaaggccgcctgattgactgcaaaaatatcgtcttcttcctgacgtccaacctcggctaccaggtaatagtcg

SEQ ID NO: 572099 - DNA, 75 bp, synthetic construct
  source 1..75: mol_type = other DNA
gtggtgggctgattttgtgatggctgcagatcacggtagtatgattgaaggagggataaaggcaatgcggttagt

SEQ ID NO: 572100 - DNA, 75 bp, synthetic construct
  source 1..75: mol_type = other DNA
gaggataaaaacagcatccgcacgttttaccgggatgacatcgaccgttttctggaaatacgcacccggcgcatc

SEQ ID NO: 572101 - DNA, 75 bp, synthetic construct
  source 1..75: mol_type = other DNA
aataacgaagcacgcacgctgaaaaactggcatcacgacacggggaaatacgggcgaaccattaccgggtgggat

SEQ ID NO: 572102 - DNA, 75 bp, synthetic construct
  source 1..75: mol_type = other DNA
tattgccagaatggatgccgacgatatttgtcatttgagtaggattcagcggcaagttgaatgtcttgataagac

SEQ ID NO: 572103 - DNA, 75 bp, synthetic construct
  source 1..75: mol_type = other DNA
ggagatacctcgatagatgaggctgcgtcagcagttgttgatggtgccgatgataatggtatcgatgcaattcat

SEQ ID NO: 572104 - DNA, 75 bp, synthetic construct
  source 1..75: mol_type = other DNA
tcgccgccgtcaggatggtattccgaaactggtcgataaattcaaaatcaatctcgcgcgccagttcccgactcg

SEQ ID NO: 572105 - DNA, 75 bp, synthetic construct
  source 1..75: mol_type = other DNA
ttcccggaaaatgtggaagtatcacagacagatactcgtgttgttcctacaaagggagccgtggttcgggcgaag

SEQ ID NO: 572106 - DNA, 75 bp, synthetic construct
  source 1..75: mol_type = other DNA
ccggcacgctggtgcaccggctgggggggatgcggccattttccggaatgacaggctatgacggcattgtcgcct

SEQ ID NO: 572107 - DNA, 75 bp, synthetic construct
  source 1..75: mol_type = other DNA
aaacgagcccggtagatttaatcctgccgctgcaaaatcagcttccacaactacaacaaattgtcggcgtggaca

SEQ ID NO: 572108 - DNA, 75 bp, synthetic construct
  source 1..75: mol_type = other DNA
cggtattgtctatatctcccaccgcatgaaagaaatcttcgagatttgcgatgacgttaccgtttttctttcgtg

SEQ ID NO: 572109 - DNA, 75 bp, synthetic construct
  source 1..75: mol_type = other DNA
tttaggtagacgtatgggattgctgagagccaaacaagataaggtattacctcagtatttgttatatgcttattt

SEQ ID NO: 572110 - DNA, 75 bp, synthetic construct
  source 1..75: mol_type = other DNA
agagaagggagtgaaaatggaactgggcattatggtgtgcatcgtgttgttactctcagtggcggcggcgtggat

SEQ ID NO: 572111 - DNA, 75 bp, synthetic construct
  source 1..75: mol_type = other DNA
aaccctgtcagtcacgcatcagcccttgcatcaagaaagcttagaaaaagtgcaggagtccattatctaccgaaa

SEQ ID NO: 572112 - DNA, 75 bp, synthetic construct
  source 1..75: mol_type = other DNA
gctatagtgatgaattgcctgattttttttctaagccgaaaaattaccactttaagtcaaaattaaattattatc

SEQ ID NO: 572113 - DNA, 75 bp, synthetic construct
  source 1..75: mol_type = other DNA
aacttgcctgccagtattgccagcttaagcacactggccgttcccgtttgcggcgtactcttttcctggtggctg

SEQ ID NO: 572114 - DNA, 75 bp, synthetic construct
  source 1..75: mol_type = other DNA
tcgccaggaacgccctgtggcaatggcctccgttaccgatccgctttttgttcccggcatctggggacagtacta

SEQ ID NO: 572115 - DNA, 75 bp, synthetic construct
  source 1..75: mol_type = other DNA
gagaacaaacacctattatcagatgcaactttaggcctacaagtaatggcatcagagaagagagttgcccgtcga

SEQ ID NO: 572116 - DNA, 75 bp, synthetic construct
  source 1..75: mol_type = other DNA
tttttataaacgttggtttgggagaagccagattctctggtcgtttgttaaacacgaatatttttaaaagctctg

SEQ ID NO: 572117 - DNA, 75 bp, synthetic construct
  source 1..75: mol_type = other DNA
ttttcgaggttgataatgatttcgaagtcaacgttattatcggtgctgcaggtaaaggtgggggagccggaagaa

SEQ ID NO: 572118 - DNA, 75 bp, synthetic construct
  source 1..75: mol_type = other DNA
acgaactgatggcacgctgtgagtcactgaaaaatgagctgagaaattacgacggtcttgatggggcgatctctg

SEQ ID NO: 572119 - DNA, 75 bp, synthetic construct
  source 1..75: mol_type = other DNA
cttgaaaccacagataaaacgaacattgttacctatggggaaaatgcagtaggtgttcttgcatgttcaagtcct

SEQ ID NO: 572120 - DNA, 75 bp, synthetic construct
  source 1..75: mol_type = other DNA
gagcggaaattacgcttggtgggaaaaactggtcaaagctgacacccgccgcttcggtggcgcaggggattcagg

SEQ ID NO: 572121 - DNA, 75 bp, synthetic construct
  source 1..75: mol_type = other DNA
aaaataagtgactatataaaaaaaagaagattaacacaagccgcattattaataaaactaaccaagaaaagtata

SEQ ID NO: 572122 - DNA, 75 bp, synthetic construct
  source 1..75: mol_type = other DNA
cgatcctctactactggatcaaccggaggatgacctggactgcctgatgctgagcatgagcgtgatccctgccat

SEQ ID NO: 572123 - DNA, 75 bp, synthetic construct
  source 1..75: mol_type = other DNA
acgagctgaaagcgctgcatcacagcatccggctagataattcagaggctggggcggggcttcatggttctttcc

SEQ ID NO: 572124 - DNA, 75 bp, synthetic construct
  source 1..75: mol_type = other DNA
cctgtaccaaacaaaccatacattcatatttttgatgatgtcgcgttagatgttatattaaatgaactagataca

SEQ ID NO: 572125 - DNA, 75 bp, synthetic construct
  source 1..75: mol_type = other DNA
gaagacctgctgcggacaattcatcgaatgatcgataacggccatgctgcacagctggctggtttttatcatcgc

SEQ ID NO: 572126 - DNA, 75 bp, synthetic construct
  source 1..75: mol_type = other DNA
cagcgagtcagcttgggaagaaatgacctgcttattcgcaccttccctaaatgagcaaggtcaggcttatgcgca

SEQ ID NO: 572127 - DNA, 75 bp, synthetic construct
  source 1..75: mol_type = other DNA
atgagtgatattaactttggtatcttttttataatcgcatttggcttcattactgttggttcattttttattgtg

SEQ ID NO: 572128 - DNA, 75 bp, synthetic construct
  source 1..75: mol_type = other DNA
acatcttaaaacgtgatggcagcagatgcggcccgtataaggccaagtttgcaggtgatacaattatcgtaaacg

SEQ ID NO: 572129 - DNA, 75 bp, synthetic construct
  source 1..75: mol_type = other DNA
gagtatggtttcatagatagtcaatttcagcggctaaaatcatggtgtgataataatgaagtgaatgcaggaatt

SEQ ID NO: 572130 - DNA, 75 bp, synthetic construct
  source 1..75: mol_type = other DNA
aaaattaaaatcgcttctgccttcgaaatatgagccgctaaaaatttctaacggagcaattcatttggttcgtaa

SEQ ID NO: 572131 - DNA, 75 bp, synthetic construct
  source 1..75: mol_type = other DNA
tggacccggtgtacacgccggcgcgaaaaatccacctgtaccactgcgaccatcgcggcctgccgctggcgctca

SEQ ID NO: 572132 - DNA, 75 bp, synthetic construct
  source 1..75: mol_type = other DNA
ctttaaaattcaccagaaccatagaaccatatatctctagccttattgggaaaaaaaataaattcacaacgcaat

SEQ ID NO: 572133 - DNA, 75 bp, synthetic construct
  source 1..75: mol_type = other DNA
tgggaaattaatctccgcagctggagaagaagatttacttggtcattatttaatgagtgcaaaaaaagaccgcgc

SEQ ID NO: 572134 - DNA, 75 bp, synthetic construct
  source 1..75: mol_type = other DNA
gtgaattttgggcataaaaaaacccagccgaagctgggtcgttgcgttggttatctgtcagtagttatgtactga

SEQ ID NO: 572135 - DNA, 75 bp, synthetic construct
  source 1..75: mol_type = other DNA
agaacgacaggagccgcatccagacgatttatcagccggggagcttcacgccactcatcagggttgaaaccgcca

SEQ ID NO: 572136 - DNA, 75 bp, synthetic construct
  source 1..75: mol_type = other DNA
aaatcgggggcatgtactaatggtctttgcggcacactatccgctatgataggtccagataaatttgattctata

SEQ ID NO: 572137 - DNA, 75 bp, synthetic construct
  source 1..75: mol_type = other DNA
aaagaggaactgcaacatggtgagtttacgaactttcttcacagatggcgcataaacttgcccgatgcacgtaaa

SEQ ID NO: 572138 - DNA, 75 bp, synthetic construct
  source 1..75: mol_type = other DNA
agataaaaaggcaggaataaaaaaatcaggccaaatcgaaggaaataaaaaacaatattgccgcgagttactcaa

SEQ ID NO: 572139 - DNA, 75 bp, synthetic construct
  source 1..75: mol_type = other DNA
aaagagtctgccaaacagcgtgctactgagaagaaagagcgggctgcctggcgccagcgcaaagctgctgcaaaa

SEQ ID NO: 572140 - DNA, 75 bp, synthetic construct
  source 1..75: mol_type = other DNA
ttatctttgaagaatatgcccttattgacgttgtgtggataactatttgtctacgtgaaaatatcatcagttttg

SEQ ID NO: 572141 - DNA, 75 bp, synthetic construct
  source 1..75: mol_type = other DNA
cagccgttgcgaacgcccggagtgtaaacaacgcgcgacgctgatcaacgacgatacagatgtaccgctggtggc

SEQ ID NO: 572142 - DNA, 75 bp, synthetic construct
  source 1..75: mol_type = other DNA
agcattattgttcctaaagaacgtgccgttgatatagatgatatttttgatttttacatggcggaaattttactt

SEQ ID NO: 572143 - DNA, 75 bp, synthetic construct
  source 1..75: mol_type = other DNA
acatatcgttatccaataagccgtcaggggaataagagtggggttgccgatatgactatagtcaatagtacgtaa

SEQ ID NO: 572144 - DNA, 75 bp, synthetic construct
  source 1..75: mol_type = other DNA
ggcagattacatcgtgccggatacccacaacttcgaaagctggggattcagcgctccgtgggcgggcgtggccag

SEQ ID NO: 572145 - DNA, 75 bp, synthetic construct
  source 1..75: mol_type = other DNA
gttagttttggggattgggctatgggtagctaacatagttattcctgaattgatgaataaatctaaaaataaaaa

SEQ ID NO: 572146 - DNA, 75 bp, synthetic construct
  source 1..75: mol_type = other DNA
caacgtctacaaatccgggaatattgaagcataccgagctgcgctggtggaacgttacggcgaagagcctgtgct

SEQ ID NO: 572147 - DNA, 75 bp, synthetic construct
  source 1..75: mol_type = other DNA
atgcccgtcgaaataaagaatggtattggtgtgagagcgatttttaaatatttttcgctaatggttttatttgca

SEQ ID NO: 572148 - DNA, 75 bp, synthetic construct
  source 1..75: mol_type = other DNA
agagcctatgcaacacgtgaaggtcagaagttgctgaaagagaaagtgacaattcttcactgtacgactgaatat

SEQ ID NO: 572149 - DNA, 75 bp, synthetic construct
  source 1..75: mol_type = other DNA
tcaggacggatgagaaatccaatgaaattacagctatccctgaacttcttaacatgttggatattaaaggaaaaa

SEQ ID NO: 572150 - DNA, 75 bp, synthetic construct
  source 1..75: mol_type = other DNA
aaaacgagattggaaaaggtatagcatacgcgcttactggtattttattaattctgtcattattagttggcgctt

SEQ ID NO: 572151 - DNA, 75 bp, synthetic construct
  source 1..75: mol_type = other DNA
tccagttactccaactccggataacaacgagccatcaacaccagcggatagcagtaacgattactcactgcaggc

SEQ ID NO: 572152 - DNA, 75 bp, synthetic construct
  source 1..75: mol_type = other DNA
gggcttccttgtgtcgtatccaatattcaagggaatcgcaacataattaacggagttgataatggactattgttt

SEQ ID NO: 572153 - DNA, 75 bp, synthetic construct
  source 1..75: mol_type = other DNA
gcagatgctgccgatgacgctggcgtttgcattactggtggcgatttgcgcggcgagcgtgggactggcgattat

SEQ ID NO: 572154 - DNA, 75 bp, synthetic construct
  source 1..75: mol_type = other DNA
gcattgctttattcttcgcactggtggtggttcccatcctcgcgattatcgcgctcagccgcagcacggctgttc

SEQ ID NO: 572155 - DNA, 75 bp, synthetic construct
  source 1..75: mol_type = other DNA
aatgaaaactttcagtcagaatgtacggggaattgtctatctacacgcacatcatggcaccctatatcatcagtt

SEQ ID NO: 572156 - DNA, 75 bp, synthetic construct
  source 1..75: mol_type = other DNA
ttaaaggcgttttatgctagattgtcagatgattttgagccgggagcattagaggcccatggacaaattacgatt

SEQ ID NO: 572157 - DNA, 75 bp, synthetic construct
  source 1..75: mol_type = other DNA
ttttagctacggccattggtggtcttatatttaaatggcttataggtggcatctcagctttttggtcatggttaa

SEQ ID NO: 572158 - DNA, 75 bp, synthetic construct
  source 1..75: mol_type = other DNA
tatcaaaatatcttggtcctgaatatgttacaagctatagtcttatcttaaaaacgtatcaggcttttattatga

SEQ ID NO: 572159 - DNA, 75 bp, synthetic construct
  source 1..75: mol_type = other DNA
cgacaaactggggatgtttcagcaccggatgtttgcccttgaatgttgtgatgccgatccgctcagcggaacgtg

SEQ ID NO: 572160 - DNA, 75 bp, synthetic construct
  source 1..75: mol_type = other DNA
tcgagcaacgcgccgatccctttatactgcgcgatggcaaccactattattttatcgcctcggtgccggagtacg

SEQ ID NO: 572161 - DNA, 75 bp, synthetic construct
  source 1..75: mol_type = other DNA
tgaaccggcgtgaggtgctgcatacagaaggcggggccgggctgaagcgggtggtgaaaaaagaactggcggacg

SEQ ID NO: 572162 - DNA, 75 bp, synthetic construct
  source 1..75: mol_type = other DNA
aattagcgatacacctctagtaaactttgacaaattacgaatggtggaaccaattatagaaccagaggaatttga

SEQ ID NO: 572163 - DNA, 75 bp, synthetic construct
  source 1..75: mol_type = other DNA
gaatacacaccggcgcgaaaagttcatttttaccactgcgaccaccggggcctgccgctggcgctcatcagcgaa

SEQ ID NO: 572164 - DNA, 75 bp, synthetic construct
  source 1..75: mol_type = other DNA
atgggctggatgtttctcgtggcctgtacgacgagatttgtgcgctgcgcgggtaacgagcatccccggcggcgc

SEQ ID NO: 572165 - DNA, 75 bp, synthetic construct
  source 1..75: mol_type = other DNA
gtgaatatttatcgactctcttttgtatcctgcctggtcatggcgatgccttgcgcattggcggtcgaattcaat

SEQ ID NO: 572166 - DNA, 75 bp, synthetic construct
  source 1..75: mol_type = other DNA
attacaacttgtttgccagcagctaccgcccacaggatggcagcagcagcactaatcttaacgcctatggaacag

SEQ ID NO: 572167 - DNA, 75 bp, synthetic construct
  source 1..75: mol_type = other DNA
accagagcggcggaatatcacgtacttatctttttcgcccactaccgcaattaggttcgaaattaaccctgggcg

SEQ ID NO: 572168 - DNA, 75 bp, synthetic construct
  source 1..75: mol_type = other DNA
ggttaatgcgttccagtatgcaagccctgtagacgatgcaaacgtggtgtttaatgtgcgttctctgctgcctgg

SEQ ID NO: 572169 - DNA, 75 bp, synthetic construct
  source 1..75: mol_type = other DNA
atttagctcctctgttctctgcgcatagcactagaaattatctgctttctactctggattttactgatccggtgg

SEQ ID NO: 572170 - DNA, 75 bp, synthetic construct
  source 1..75: mol_type = other DNA
atatttatgctgactatgttgctaaacaccacgtagcgtatcagcgcactaaagaaagcgtattggctgcatctc

SEQ ID NO: 572171 - DNA, 75 bp, synthetic construct
  source 1..75: mol_type = other DNA
atcgactggctttacctgttatcagagaaaaacaccgagcaggagattctgcgggagatagagcgcgtgacgctg

SEQ ID NO: 572172 - DNA, 75 bp, synthetic construct
  source 1..75: mol_type = other DNA
atacgtctcgttatggacccgttaatattggtgcgaacaccacctttaccctgtatgtcaccaagccatttctcg

SEQ ID NO: 572173 - DNA, 75 bp, synthetic construct
  source 1..75: mol_type = other DNA
aagcaataggtgaactcatctgtcgtaatccaggcgaaataacgttggttgctaccggccccctcaccaatgtag

SEQ ID NO: 572174 - DNA, 75 bp, synthetic construct
  source 1..75: mol_type = other DNA
atgaacgtaatagctggggcatgtctgccggagcacaatccgatcgccctgataatggcgcacaggtgagcggca

SEQ ID NO: 572175 - DNA, 75 bp, synthetic construct
  source 1..75: mol_type = other DNA
gctacgggcagttgctggcgttcactgactgctcgggctaccagacccgctatgaatacgaccgcttcggccaga

SEQ ID NO: 572176 - DNA, 75 bp, synthetic construct
  source 1..75: mol_type = other DNA
gcaaaaaattagctggcaaaaaagcggtgataaaaccattccgtgcatcgatgaatcactggtggataaatttgg

SEQ ID NO: 572177 - DNA, 75 bp, synthetic construct
  source 1..75: mol_type = other DNA
ccgcccacaggacggcagcagcagcactaacctgaacgcctacggtaccaccggaattaacgccggggcatggcg

SEQ ID NO: 572178 - DNA, 75 bp, synthetic construct
  source 1..75: mol_type = other DNA
gagcagctacctctacgacccgctgggccgccggacggggaaacgggtgtggcgtcgcgagcgtgacctgacggg

SEQ ID NO: 572179 - DNA, 75 bp, synthetic construct
  source 1..75: mol_type = other DNA
ggctgcaccgcgagacggtgcgcagcttcggcaataacgcatacgaactgaccagcacatacactcccgcaggcc

SEQ ID NO: 572180 - DNA, 75 bp, synthetic construct
  source 1..75: mol_type = other DNA
cgggagcgtgacctgacggggtggatgtcgctgtcgcgtaaaccggaggtgacgtggtatggctgggacggagac

SEQ ID NO: 572181 - DNA, 75 bp, synthetic construct
  source 1..75: mol_type = other DNA
cagacgcctccacgaccgccaacatcacggcgggttttaatgttgatattggtaactggagagatatctcgatct

SEQ ID NO: 572182 - DNA, 75 bp, synthetic construct
  source 1..75: mol_type = other DNA
accggatgttaccgtgggaactgcgcggctacgctccacaaattagcggtatagcacaaaccaatgccacggtga

SEQ ID NO: 572183 - DNA, 75 bp, synthetic construct
  source 1..75: mol_type = other DNA
aatctcgactacaccaaccattttggcattgcggtggtgccgttgatttccagttaccagccttccaccgtggcg

SEQ ID NO: 572184 - DNA, 75 bp, synthetic construct
  source 1..75: mol_type = other DNA
ttaataagaccgatagcgaagataaccatgaccagtcaggcggaatatcgcgcacctatctttttcgtccattac

SEQ ID NO: 572185 - DNA, 75 bp, synthetic construct
  source 1..75: mol_type = other DNA
gcagcagctggagcggttctttcaccgcaacccaatatggtgcagcatttcatcgccgcagctccaccaatgaac

SEQ ID NO: 572186 - DNA, 75 bp, synthetic construct
  source 1..75: mol_type = other DNA
atcacggcgggttttaatgttgatattggtaactggagagatatctcgatctcgacgtcattcaatacaacccat

SEQ ID NO: 572187 - DNA, 75 bp, synthetic construct
  source 1..75: mol_type = other DNA
tgttgcctaagtcaattcagtaaatataaaaacatattaattgttacatatcgaagagctgtttgtgatcagttg

SEQ ID NO: 572188 - DNA, 75 bp, synthetic construct
  source 1..75: mol_type = other DNA
ggtcgcgagttacggggaaaatggttcgcatataacttcccggcgcggaccggttgtgatttaaccccagacctg

SEQ ID NO: 572189 - DNA, 75 bp, synthetic construct
  source 1..75: mol_type = other DNA
ccggaatgcaaacaacgcgcgacgctgatcaacgacgacacagatgaaccgctggtggctaaggagcagctatga

SEQ ID NO: 572190 - DNA, 75 bp, synthetic construct
  source 1..75: mol_type = other DNA
gcagcaaaaaaactcgctgaacaggaattggctaataatgttaaaagaataaacgattattatacaagtattctg

SEQ ID NO: 572191 - DNA, 75 bp, synthetic construct
  source 1..75: mol_type = other DNA
acagcccattaatactctgaacaaccctaaccagccggggtatcagatacccagccagcagcggatgcaaaccta

SEQ ID NO: 572192 - DNA, 75 bp, synthetic construct
  source 1..75: mol_type = other DNA
agacttcaccactggatgagaatttatataatgtaccaagcaatttatctgaaagcccttataaaatactaattc

SEQ ID NO: 572193 - DNA, 75 bp, synthetic construct
  source 1..75: mol_type = other DNA
aagttccttaacaaaataagtgccggaaaagtaacatcgattactgtgtttgaacacttggggcaaacagaaacg

SEQ ID NO: 572194 - DNA, 75 bp, synthetic construct
  source 1..75: mol_type = other DNA
agctaccatcggtgcgttacctgtcgccgttgcccgctcagaaggagtccttgtcggataccccctggactggcc

SEQ ID NO: 572195 - DNA, 75 bp, synthetic construct
  source 1..75: mol_type = other DNA
cattgcgcctgtcgctgacctttaaccccgcacatgcgcagcaaaaaatcgccagcggcgatttgccggcaagca

SEQ ID NO: 572196 - DNA, 75 bp, synthetic construct
  source 1..75: mol_type = other DNA
caagcgagcgtctgcccggagtgcaaacaacgcgcgacgctgctcaacgacgatacagatgtaccgctggtggct

SEQ ID NO: 572197 - DNA, 75 bp, synthetic construct
  source 1..75: mol_type = other DNA
tgggcgcaagcgagcgtctgcccggaatgcaaacaacgcgcgacgctgatcaacgacgatacagatgtactgctg

SEQ ID NO: 572198 - DNA, 75 bp, synthetic construct
  source 1..75: mol_type = other DNA
gaaaaacgtgaagacccgtacttcaaagccagttacgacaacgtggactacagccagatcccggcaggattcagg

SEQ ID NO: 572199 - DNA, 75 bp, synthetic construct
  source 1..75: mol_type = other DNA
gcgatgtaactaactgtacctttagttatataacagaagaaaataaaatatttaatactcaggaaattaactttt

SEQ ID NO: 572200 - DNA, 75 bp, synthetic construct
  source 1..75: mol_type = other DNA
tcagcagctgatctgcaacgctgatcagttcaaacatgccgttatcacagttggcggtcaggctgtgcaatactg

SEQ ID NO: 572201 - DNA, 75 bp, synthetic construct
  source 1..75: mol_type = other DNA
ctatttaggtgattgctatataactgttagtctcggagttgaatttaatgataatcattataaattaattgcttt

SEQ ID NO: 572202 - DNA, 75 bp, synthetic construct
  source 1..75: mol_type = other DNA
ttggacaaaattaaacgctaaccctcctatagttctggatagccttttagacacccctgaaaatttgtggttaaa

SEQ ID NO: 572203 - DNA, 75 bp, synthetic construct
  source 1..75: mol_type = other DNA
agttttttacgaaaaacatcgttagatgagttacctcaatttatcaatgtattagtcggtaatatgtctattgtt

SEQ ID NO: 572204 - DNA, 75 bp, synthetic construct
  source 1..75: mol_type = other DNA
aaacaagatatggtatagatggtaaaccaataaaagtttggaaatttcggtcaatgaatgttatggaaaatgata

SEQ ID NO: 572205 - DNA, 75 bp, synthetic construct
  source 1..75: mol_type = other DNA
gcgttacggcgttccgcgattcgttgcagacgtcgaagccggttaccgatacccagacccagaatgcccagccgg

SEQ ID NO: 572206 - DNA, 75 bp, synthetic construct
  source 1..75: mol_type = other DNA
ggctggatgtcgctgtcacggaaaccgcaagtgacctggtacggctgggacggcgaccggctgaccgcgatacag

SEQ ID NO: 572207 - DNA, 75 bp, synthetic construct
  source 1..75: mol_type = other DNA
agcaaagcgcgatgaagctaaaaagcccttagtacagggcatagacccaaaagccgaaaagaaagaagctcaggc

SEQ ID NO: 572208 - DNA, 75 bp, synthetic construct
  source 1..75: mol_type = other DNA
aaacctatcttgcaaaaatacagagacagtcataccttgctattgggggggcaatatttgtattcttttgtattt

SEQ ID NO: 572209 - DNA, 75 bp, synthetic construct
  source 1..75: mol_type = other DNA
ggtttattactggatacattaccttctgaaccggacaactctttctggaaaaagatcatgatgtttaatcatgag

SEQ ID NO: 572210 - DNA, 75 bp, synthetic construct
  source 1..75: mol_type = other DNA
tggtgctgccactgcccgcattcatactcgacctgttgtttaccttcaatattgccttgtcgatcatggtgttgc

SEQ ID NO: 572211 - DNA, 75 bp, synthetic construct
  source 1..75: mol_type = other DNA
agccactcatccggtattgattgagcgcgatgaatttgaagcagtgatctttgcactggatgaccagtattttca

SEQ ID NO: 572212 - DNA, 75 bp, synthetic construct
  source 1..75: mol_type = other DNA
atggttcttctttcttggaggagtgctttggcggattgattaggcgtggcgtgagtcctgataaggttaaaggga

SEQ ID NO: 572213 - DNA, 75 bp, synthetic construct
  source 1..75: mol_type = other DNA
gtacagtatttctaatttcttcatatgtcagtgaaaaaattcatttcaaagattaccccgacatcatttgcgcat

SEQ ID NO: 572214 - DNA, 75 bp, synthetic construct
  source 1..75: mol_type = other DNA
gatgcgccttcgctgtcgattatggcgctggcgattgtcagcaatcttggctttttacgcctatcgatcctctgc

SEQ ID NO: 572215 - DNA, 75 bp, synthetic construct
  source 1..75: mol_type = other DNA
catacctgcaacgtgcgggggttttctctctccagcaaccaatgccaccagggattaaagccccccgcaacattg

SEQ ID NO: 572216 - DNA, 75 bp, synthetic construct
  source 1..75: mol_type = other DNA
ctcagtaatccaaatggtggaattgccccggggccaatgaaagttccttttgatttcattggccctaatgacagc

SEQ ID NO: 572217 - DNA, 75 bp, synthetic construct
  source 1..75: mol_type = other DNA
aaactaaatggagctcagacgttaacgcctggagtttatcaaacgacattcaacttgaccacttggagtaattaa

SEQ ID NO: 572218 - DNA, 75 bp, synthetic construct
  source 1..75: mol_type = other DNA
gaatggacgataagcttgatgaaaagataatttcaataattaatgagaaagagcttggtaaaaagttttatagaa

SEQ ID NO: 572219 - DNA, 75 bp, synthetic construct
  source 1..75: mol_type = other DNA
gccctgaaaggcaatgccacggccctgattaatgcgccccgtcgcatggctgaatcgctggcaggcatgtttgcc

SEQ ID NO: 572220 - DNA, 75 bp, synthetic construct
  source 1..75: mol_type = other DNA
atcaaatactgatgatatatccagacttaactttttaactaacgttttaaaactttcaccagaagttcaaaatga

SEQ ID NO: 572221 - DNA, 75 bp, synthetic construct
  source 1..75: mol_type = other DNA
aatgttcatcttttgatcccaccagagggccttttatatcgttccctcacgctgcccaacgccaaatacaaactc

SEQ ID NO: 572222 - DNA, 75 bp, synthetic construct
  source 1..75: mol_type = other DNA
aggcaagagtcacaaatcaaaaatttttgcagtttacttcttttgctgatatgccttttatcgttatcgcctgat

SEQ ID NO: 572223 - DNA, 75 bp, synthetic construct
  source 1..75: mol_type = other DNA
tgattaatgcgccccgtcgcatggctgaatcgctggccggaatgtttgccgtgctgaccgggctgcccggcgatc

SEQ ID NO: 572224 - DNA, 75 bp, synthetic construct
  source 1..75: mol_type = other DNA
tgattaattcgccccgtcgcatggctgaatctctggccggaatgtttgcggtgctgacgggactgcccggcgatc

SEQ ID NO: 572225 - DNA, 75 bp, synthetic construct
  source 1..75: mol_type = other DNA
caagcagtgtctttgcaggtataacaatggcgctaacttgccatgctgtgacagtaacagccactcatacagttg

SEQ ID NO: 572226 - DNA, 75 bp, synthetic construct
  source 1..75: mol_type = other DNA
gtagatggcgatgatgaagccatcttcaggccaatacaaaaatacatcaatggcacatggtataacgtcgcacag

SEQ ID NO: 572227 - DNA, 75 bp, synthetic construct
  source 1..75: mol_type = other DNA
actgggcaaagattggatttaaaaatgatgccgacagcgacactgattcatacatgtggtttgaaacaggcgaca

SEQ ID NO: 572228 - DNA, 75 bp, synthetic construct
  source 1..75: mol_type = other DNA
gacaacggcaatgaatatttcaaatggagaagtcgccggagcaccacaacaaaagacctgatgaatcttaaatgg

SEQ ID NO: 572229 - DNA, 75 bp, synthetic construct
  source 1..75: mol_type = other DNA
gccagaagcaaattgatgagatgtttaatgcctatgctcgcggtgaacccaaagacgaactgccgaccggcattg

SEQ ID NO: 572230 - DNA, 75 bp, synthetic construct
  source 1..75: mol_type = other DNA
tgtattacaaccgccaccgctattatgacccgctgcaggggcggtatatcactcaggatccgattgggctggaag

SEQ ID NO: 572231 - DNA, 75 bp, synthetic construct
  source 1..75: mol_type = other DNA
cggtatatcactcaggatccgattgggctggaaggcgggtggaatcagtatgtatatgcttccatacatccaacc

SEQ ID NO: 572232 - DNA, 75 bp, synthetic construct
  source 1..75: mol_type = other DNA
ggtattattttgagaacaagtcaagaagcagtaactgatgacacgttaggtaaaaacattatcattgagaataat

SEQ ID NO: 572233 - DNA, 75 bp, synthetic construct
  source 1..75: mol_type = other DNA
acagatgaaacaattgggaaaaatattgttattgaaaataataaatcagatagcatgaatttattttttcaaaat

SEQ ID NO: 572234 - DNA, 75 bp, synthetic construct
  source 1..75: mol_type = other DNA
gacttacgcctgcctgtcgccagacctggtggcactgcttggtttcaaagaagacattgcgaaaaatttgcaatg

SEQ ID NO: 572235 - DNA, 75 bp, synthetic construct
  source 1..75: mol_type = other DNA
aaagaatgcaacgtttaatttatggggtgcttcaacccgtccagtagttgcagagttaggcgatgaggcaggatg

SEQ ID NO: 572236 - DNA, 75 bp, synthetic construct
  source 1..75: mol_type = other DNA
tggatgttacaggagatataacaactaacgcctgggtttatgcaaacaggtttgctattaacagcagtaatggta

SEQ ID NO: 572237 - DNA, 75 bp, synthetic construct
  source 1..75: mol_type = other DNA
aattttgactcacgttatgtgagagatgtccgacttggtacacgtgttgttcagactatgcaaaaaggcgtgatg

SEQ ID NO: 572238 - DNA, 75 bp, synthetic construct
  source 1..75: mol_type = other DNA
aaattacatcatgcattcgaagaaaaattccctgtaaaaatgttctctaattataaaggcgattcatttgatact

SEQ ID NO: 572239 - DNA, 75 bp, synthetic construct
  source 1..75: mol_type = other DNA
tgctggggtggttggccatgatgccattgcgaaagctaaagcggatggctataccctgggaattgcgacggtaga

SEQ ID NO: 572240 - DNA, 75 bp, synthetic construct
  source 1..75: mol_type = other DNA
acatccccagaaatgagaaaataccttaaaagcatcaacgagtgtatgttccttatgaaaaacatagctcatcaa

SEQ ID NO: 572241 - DNA, 75 bp, synthetic construct
  source 1..75: mol_type = other DNA
gattatcggtagccttgatccctgctactcctgtaccgaccgtgtgacgctggtagatgtgcgcaagcgccagtc

SEQ ID NO: 572242 - DNA, 75 bp, synthetic construct
  source 1..75: mol_type = other DNA
gaatggctaaagaaatatggtgattttgataatggcattccggtcgatgacaccattgcacgcgttgtgagtaac

SEQ ID NO: 572243 - DNA, 75 bp, synthetic construct
  source 1..75: mol_type = other DNA
aggttgcgttaaacacatgttatatagaagaagtgcttgcatcctgctcagagcttgggtttcgaactgacaaaa

SEQ ID NO: 572244 - DNA, 75 bp, synthetic construct
  source 1..75: mol_type = other DNA
aaggtcgtggccgtccgcgtaagttccgcccgggcgaagccgtggagtggcggctgcgtgcgccggataatttgt

SEQ ID NO: 572245 - DNA, 75 bp, synthetic construct
  source 1..75: mol_type = other DNA
cagcagtcagggctttggctacacggcgcgggcgttacttgagcgtcgcgtcacgtccaactggtttgtcggcac

SEQ ID NO: 572246 - DNA, 75 bp, synthetic construct
  source 1..75: mol_type = other DNA
ttctttcgcagtgatttcgtcaatatgaacgtcggcagtttctccactaatgccgatggcaaatgggatgataac

SEQ ID NO: 572247 - DNA, 75 bp, synthetic construct
  source 1..75: mol_type = other DNA
aaaacatccccggaaatgagaaaataccttcagagcatcaacgagtctatgttccttatgaaaaacatagctcat

SEQ ID NO: 572248 - DNA, 75 bp, synthetic construct
  source 1..75: mol_type = other DNA
aggtggcagcaacagccgaacgaattagcgaacggttggttgctatcgcaggtgagcaacatgccgttccgctat

SEQ ID NO: 572249 - DNA, 75 bp, synthetic construct
  source 1..75: mol_type = other DNA
aaaaataactgtaagttgcttatacgacgaagcaccaataagcgtatcgtttagctctaagtattacgggatgta

SEQ ID NO: 572250 - DNA, 75 bp, synthetic construct
  source 1..75: mol_type = other DNA
aaaggtacctgaggttagagggaaaacaatgttgttgggtcattggctagatagaaaagaaatcccagaccctta

SEQ ID NO: 572251 - DNA, 75 bp, synthetic construct
  source 1..75: mol_type = other DNA
taatctagacaatccagcgacaacaggaagcgtggcttggactgcatctatgcctattgttgttacctataaata

SEQ ID NO: 572252 - DNA, 75 bp, synthetic construct
  source 1..75: mol_type = other DNA
cactcttactttggataaccctgctacagcgggagatgtaagctggactgcgtctatgcctgttgttgtttccta

SEQ ID NO: 572253 - DNA, 75 bp, synthetic construct
  source 1..75: mol_type = other DNA
aagaagagtggcaccacggcggtggtgaccgatgtgcgtccggggcggcgtgccggcgggtatgtggggctggac

SEQ ID NO: 572254 - DNA, 75 bp, synthetic construct
  source 1..75: mol_type = other DNA
aatgtcatagcattgtgctggtggcggaaaataaacggcgagctatccagctaatggaagagtctgcgccttacc

SEQ ID NO: 572255 - DNA, 75 bp, synthetic construct
  source 1..75: mol_type = other DNA
actgaacaagagacattttggccttacgatggcacgaaagtgatctacgatggtggctgcattccggaagaacgt

SEQ ID NO: 572256 - DNA, 75 bp, synthetic construct
  source 1..75: mol_type = other DNA
taaagagctaacggagctgcaccgatggttttatgagagccataaacgcgaaaaagccaaacgcacagctaaagc

SEQ ID NO: 572257 - DNA, 75 bp, synthetic construct
  source 1..75: mol_type = other DNA
gtgaaaaaaggcgttacagactttcaggggaagcagtgggttggtgactggaaatatgtcccgacaaaagaggat

SEQ ID NO: 572258 - DNA, 75 bp, synthetic construct
  source 1..75: mol_type = other DNA
cctgtgccactgacaccagaaggattgattaaagcagtgcgtttctatgaacaggttaagcgtgagaatccgcca

SEQ ID NO: 572259 - DNA, 75 bp, synthetic construct
  source 1..75: mol_type = other DNA
gcgcatgggcagaatatacagttttgccaaaagaaatttgtgatatggtttttataaccgtttctacgggggggg

SEQ ID NO: 572260 - DNA, 75 bp, synthetic construct
  source 1..75: mol_type = other DNA
acagccccggttcgtgacgacttcctcaccagcatggtcagtgcggccaccccggaaggtcagccggtgctacgt

SEQ ID NO: 572261 - DNA, 75 bp, synthetic construct
  source 1..75: mol_type = other DNA
tgttaatagcctgctcggcacaggtgatcagctgcgtatcgatggtgctgtgggctacgagcatggcgggctggt

SEQ ID NO: 572262 - DNA, 75 bp, synthetic construct
  source 1..75: mol_type = other DNA
agtgtgacgttgtcggatgcgggaaattatgccgtgacggccacctgggcccgccggacaacgggggcagacccg

SEQ ID NO: 572263 - DNA, 75 bp, synthetic construct
  source 1..75: mol_type = other DNA
gccttacccgtaatgatgagcaggatgactggctgaaacgtggcgtgcgcagcgatgcggcagatctttatcgtc

SEQ ID NO: 572264 - DNA, 75 bp, synthetic construct
  source 1..75: mol_type = other DNA
atgacaatgatattgaatttattgcttcaatgtatgcatcatgtaaattatcaggaagtatcgcccccataatgc

SEQ ID NO: 572265 - DNA, 75 bp, synthetic construct
  source 1..75: mol_type = other DNA
ggttaaatacaatgcgttaattaaattaaacatcccgatttcggtattttttcttgtgtattgttctaaacttta

SEQ ID NO: 572266 - DNA, 75 bp, synthetic construct
  source 1..75: mol_type = other DNA
agacagcattgaaagattgccaaaagatagagagagtttatttgcgataaatgtacttgctattccaccaaaaaa

SEQ ID NO: 572267 - DNA, 75 bp, synthetic construct
  source 1..75: mol_type = other DNA
ctaacggcagtacaacgacaatcgcaacaaatgatatggttcaagagcatgttactaacttcactaaagaactgt

SEQ ID NO: 572268 - DNA, 75 bp, synthetic construct
  source 1..75: mol_type = other DNA
tacgctcgacattctcgcatcaacgaacagtgcaggagattacacgctgaccaatgcgctcaaaggcgatggctt

SEQ ID NO: 572269 - DNA, 75 bp, synthetic construct
  source 1..75: mol_type = other DNA
tgggaacgtaaagtttttatctggagtgagtttttataatagccagaaaaaatacaccatgaactcattatggga

SEQ ID NO: 572270 - DNA, 75 bp, synthetic construct
  source 1..75: mol_type = other DNA
cttttcagctccaaatctcatggtaaatatgcgcttttcccaatttttactgcgagttggcgagctactcgtata

SEQ ID NO: 572271 - DNA, 75 bp, synthetic construct
  source 1..75: mol_type = other DNA
ggcagctcagactatcgggaaaaaatggtatgtatacgataatgcaatactgaatcagcttgaacatcgtctggt

SEQ ID NO: 572272 - DNA, 75 bp, synthetic construct
  source 1..75: mol_type = other DNA
gggcgtaaaacaagatatgatcgcgactcattatccgcacgttcctcccgtctcaaatgccaacaaactgagcga

SEQ ID NO: 572273 - DNA, 75 bp, synthetic construct
  source 1..75: mol_type = other DNA
ccatgactcgctttgatggctacctgtcagacgctctggtttgggctgatgggcagggaagcaatcctgcagcct

SEQ ID NO: 572274 - DNA, 75 bp, synthetic construct
  source 1..75: mol_type = other DNA
aagccctgcacagcagcaagcagatgataatgctgcaaaagcattgacaaaatggtggaacgatacagcatcaca

SEQ ID NO: 572275 - DNA, 75 bp, synthetic construct
  source 1..75: mol_type = other DNA
taacaaacaggccgtagttgatgaaggcgcagtcttcgaaatcaacaacgacacgcttaatcacttccgcgtacc

SEQ ID NO: 572276 - DNA, 75 bp, synthetic construct
  source 1..75: mol_type = other DNA
ctttatcgccttgaattggtggagcccaataatcctgatgtcgttgcggctcggtttcgctatctgcttcgcaag

SEQ ID NO: 572277 - DNA, 75 bp, synthetic construct
  source 1..75: mol_type = other DNA
tcagccatcagaccacccggaccatcacggaagacagcgtcacccgtgagaagggctctctgctgtcggggaatc

SEQ ID NO: 572278 - DNA, 75 bp, synthetic construct
  source 1..75: mol_type = other DNA
tctgcataaccagcatggtgatatcctggccgacaacagtctgtgggtacagaaggacagcagcggtacggcaaa

SEQ ID NO: 572279 - DNA, 75 bp, synthetic construct
  source 1..75: mol_type = other DNA
ggcgcagcagacgtttaacaagctgatcccgcaggcaaaatctcagccgccgtcgatggaaagtgcgatggtact

SEQ ID NO: 572280 - DNA, 75 bp, synthetic construct
  source 1..75: mol_type = other DNA
gcgctggcgcatattaacaatctgccgcgcgcccggtggaacggcaacattcaggaactggtgaatcgcctgcaa

SEQ ID NO: 572281 - DNA, 75 bp, synthetic construct
  source 1..75: mol_type = other DNA
gcgctggcgcatatcaacagcctgccgcgcgcgcaatggaacagcaatattcaggagctggttaatcgactgcaa

SEQ ID NO: 572282 - DNA, 75 bp, synthetic construct
  source 1..75: mol_type = other DNA
atatatggtccagacgaaggagaattgaataatattataaataaggtaaataaattaggattgcaggataaagtt

SEQ ID NO: 572283 - DNA, 75 bp, synthetic construct
  source 1..75: mol_type = other DNA
ttaataatatcaatggtgagattaagtttgtatttattggtaggttgcactctcaaaaaggggttgatagggcat

SEQ ID NO: 572284 - DNA, 75 bp, synthetic construct
  source 1..75: mol_type = other DNA
taccgggatgatgcttcttgccattgtggctgtgccggttcaggccgccgaaaaggatgagctggcaacggccat

SEQ ID NO: 572285 - DNA, 75 bp, synthetic construct
  source 1..75: mol_type = other DNA
acaataatctgacaccggagcaggttcaagaagggatgaatcgtatagctattggtgaagggccttcttggggga

SEQ ID NO: 572286 - DNA, 75 bp, synthetic construct
  source 1..75: mol_type = other DNA
cagtaaacgccattgctcacgccattctgggcggcgcagtggcggcaatgcagggtaataatgtcgctgccggtg

SEQ ID NO: 572287 - DNA, 75 bp, synthetic construct
  source 1..75: mol_type = other DNA
atgtttcattatgcaatcccactcagggcaaaacagacttctaacgattggaatgaagtttgcgttcgactggaa

SEQ ID NO: 572288 - DNA, 75 bp, synthetic construct
  source 1..75: mol_type = other DNA
cgcaacaaattaagagcgactgcgagacgctggcggataacgtacagcagaatgcagaatccgttgccgaagata

SEQ ID NO: 572289 - DNA, 75 bp, synthetic construct
  source 1..75: mol_type = other DNA
tctagatggtgttctgaggtttcaatttctgtttttttatgcgtgatagctatttatattttagataggttgggt

SEQ ID NO: 572290 - DNA, 75 bp, synthetic construct
  source 1..75: mol_type = other DNA
agatctgctggaagtttcgattaatggaggtcccttgcacagatggcaatcatgctcaatgtcaaattgccatac

SEQ ID NO: 572291 - DNA, 75 bp, synthetic construct
  source 1..75: mol_type = other DNA
gaccagttgttgagttttaaagagggtgaggttgagtggaagactttgggggaaattgggaattttacatatgga

SEQ ID NO: 572292 - DNA, 75 bp, synthetic construct
  source 1..75: mol_type = other DNA
aggcggcagccaaaagcgagcagaacgcgaaacagcacagggacgaggcgcaacggatagttgatgacctgaagg

SEQ ID NO: 572293 - DNA, 75 bp, synthetic construct
  source 1..75: mol_type = other DNA
aaatgcataccggcgcagtatctgatggactcggttacagccacagccagtgaaataaaaatagcgctgaaggtt

SEQ ID NO: 572294 - DNA, 75 bp, synthetic construct
  source 1..75: mol_type = other DNA
aaagcatctctggaagttgttgatggtgttagtcagttaattgatattaaatggactaaagatggtatatcacaa

SEQ ID NO: 572295 - DNA, 75 bp, synthetic construct
  source 1..75: mol_type = other DNA
ttcgatggcaatggattatgtacttgtgtataaaaaaacaaaaagaattgtttgtgtcatagagcttaatgatgg

SEQ ID NO: 572296 - DNA, 75 bp, synthetic construct
  source 1..75: mol_type = other DNA
atggtttacaccggagacgggcgcgtggtttgggttggtaaggatgtgacaggcattgaaccccgtaacgccagt

SEQ ID NO: 572297 - DNA, 75 bp, synthetic construct
  source 1..75: mol_type = other DNA
tctcaagaagaatacctgagacaataaaacgtcagataaggcaaaggtgcggctttggctgtgtaatttgtggat

SEQ ID NO: 572298 - DNA, 75 bp, synthetic construct
  source 1..75: mol_type = other DNA
ataatagtaaactcaaatttaataaaaattattcttatgattataaaaaaattaattgtatcgatgagttcttgc

SEQ ID NO: 572299 - DNA, 75 bp, synthetic construct
  source 1..75: mol_type = other DNA
cagtttataatttatttgtgcattcggatatttttgatgatggctcatttttaaaagagtcactgcgtatatcta

SEQ ID NO: 572300 - DNA, 75 bp, synthetic construct
  source 1..75: mol_type = other DNA
ggtaagcattttgttacatacaacggagttatttgtaggcacaaatcgaaggaagttcttcaaaaatacgcctac

SEQ ID NO: 572301 - DNA, 75 bp, synthetic construct
  source 1..75: mol_type = other DNA
tcttcgcctgtgtactggcatttatccctgttaaaaccgtccgttatatcgcgctgacgttgctgtttttcgttt

SEQ ID NO: 572302 - DNA, 75 bp, synthetic construct
  source 1..75: mol_type = other DNA
ggcgcaatcgttgccgtcatcggtctggagctggcgggcgtagctgccggtatggcgggggtttttcccgccgga

SEQ ID NO: 572303 - DNA, 75 bp, synthetic construct
  source 1..75: mol_type = other DNA
tattatttcatgtgtagggcattgtgggcaatgtgaaaattgtcagaaacagctctattctcattgcttgagtga

SEQ ID NO: 572304 - DNA, 75 bp, synthetic construct
  source 1..75: mol_type = other DNA
gatatctatccggatgatgaaacagatacccatcacccagtttctccttctctctatttgcaggataaatcctca

SEQ ID NO: 572305 - DNA, 75 bp, synthetic construct
  source 1..75: mol_type = other DNA
attaccaacacctcagttcggcgggggaatgggatctgaccggaacctatgccgccaatgattacacttccgcca

SEQ ID NO: 572306 - DNA, 75 bp, synthetic construct
  source 1..75: mol_type = other DNA
cggatatcaacttacaatcagttgcacttatgatgatgttgactatgaaaataaattgacgaaagcatttatcgc

SEQ ID NO: 572307 - DNA, 75 bp, synthetic construct
  source 1..75: mol_type = other DNA
aatatcagatacaacagggttgccagtaaaaacctggactattctttttttaaactggttagcgtctcattcttt

SEQ ID NO: 572308 - DNA, 75 bp, synthetic construct
  source 1..75: mol_type = other DNA
tcgccgggcaggttaaagccccgacggcacgactgaaactggcgctggaaagcgggttgctggtaacggcactgg

SEQ ID NO: 572309 - DNA, 75 bp, synthetic construct
  source 1..75: mol_type = other DNA
tggaaaccatcacagccgaaataaatacgatagactcaaacatcaaaggagaaatagcccgcgtagacaaagcaa

SEQ ID NO: 572310 - DNA, 75 bp, synthetic construct
  source 1..75: mol_type = other DNA
tggtggcattggctgaacaccgccattttcggcgtgcagcagattcctgccacgttagccagccgacgcttagcg

SEQ ID NO: 572311 - DNA, 75 bp, synthetic construct
  source 1..75: mol_type = other DNA
ctatttctggtagcacaagggacgtgcgtatccaaagtcggttacagggtgaagtcatcgagagtttgtcgaaga

SEQ ID NO: 572312 - DNA, 75 bp, synthetic construct
  source 1..75: mol_type = other DNA
ttattgtcctgctggtagcctgtggtgcgcttggtctggggctgaatcattaccgcgataacgccattacctaca

SEQ ID NO: 572313 - DNA, 75 bp, synthetic construct
  source 1..75: mol_type = other DNA
tggtcgaatgctgagcttaatactatcgataacaattatggaaacagtaaagggcaattatatagaatatcttat

SEQ ID NO: 572314 - DNA, 75 bp, synthetic construct
  source 1..75: mol_type = other DNA
atctttgtgactcctgaacctcaagagatgcctgatatttgcaagagtgaagcattacttgagcttgaaaagaaa

SEQ ID NO: 572315 - DNA, 75 bp, synthetic construct
  source 1..75: mol_type = other DNA
gctatcgctattcagcgtaaagaacacgatgaaagaattaagcttgagcaatcgctaaagatgtcaccaaagaaa

SEQ ID NO: 572316 - DNA, 75 bp, synthetic construct
  source 1..75: mol_type = other DNA
cccggcgggtgtgatacggacggacgacgagcggacccaccactaccactacgacagccagcaccgcctggtgtt

SEQ ID NO: 572317 - DNA, 75 bp, synthetic construct
  source 1..75: mol_type = other DNA
cggaaaagacaaggtcacgtttgattatgtgctggctgccaaattgcgtgatgccggactggcgatcgaacgtaa

SEQ ID NO: 572318 - DNA, 75 bp, synthetic construct
  source 1..75: mol_type = other DNA
taaagagacatattatgatacaaatgtctatgctggtactccgacacggattggtttcaagtttcttcatggctg

SEQ ID NO: 572319 - DNA, 75 bp, synthetic construct
  source 1..75: mol_type = other DNA
caaagttaccttgatgcaatcagctattgagccatcagaatttgagattcaggatgaattgtcacagaaaccatt

SEQ ID NO: 572320 - DNA, 75 bp, synthetic construct
  source 1..75: mol_type = other DNA
gcgggctgacggcggagcagatggccgcgcagctggaggcggaatacatcccggagaggaaacttcatctttacc

SEQ ID NO: 572321 - DNA, 75 bp, synthetic construct
  source 1..75: mol_type = other DNA
cgcctctgtccggcatcgtctggctggcagacagtgccggagcatcacgccccgctctggcagcaggtcagtcag

SEQ ID NO: 572322 - DNA, 75 bp, synthetic construct
  source 1..75: mol_type = other DNA
tcacatatgatcgtgatgccaaccacctatagcccaatgacggttgctcgttcttttcgcgtggtggaagagatc

SEQ ID NO: 572323 - DNA, 75 bp, synthetic construct
  source 1..75: mol_type = other DNA
gtgttgcaggaggacacgggtgtgacgctaccggcggagctgtcggtgatgctggggaggctggagcgggaactg

SEQ ID NO: 572324 - DNA, 75 bp, synthetic construct
  source 1..75: mol_type = other DNA
catacaccctcacagggcagctacagagcaggcacctgaacctcccgcagcttgaccgggactacgactggaacg

SEQ ID NO: 572325 - DNA, 75 bp, synthetic construct
  source 1..75: mol_type = other DNA
ccgcaaccggtactatgacccgttgcagggaaggtatatcacccaggatccgatagggctgagaggtgaatggaa

SEQ ID NO: 572326 - DNA, 75 bp, synthetic construct
  source 1..75: mol_type = other DNA
tatgtgctggctgccaaattgcgtgatgccggactggcgatcgaacgtaattatctggttgatatgggcaacggt

SEQ ID NO: 572327 - DNA, 75 bp, synthetic construct
  source 1..75: mol_type = other DNA
gaagccgtgggaggcattagggatcagtcgagctacgtactaccgaaaattaaaatgtgatccagatctcgcaaa

SEQ ID NO: 572328 - DNA, 75 bp, synthetic construct
  source 1..75: mol_type = other DNA
aaaaggagttgctgatggcgttgccgacgaacgcttcgggaaatcgtatatggtaaaaattgatggtaaaaagga

SEQ ID NO: 572329 - DNA, 75 bp, synthetic construct
  source 1..75: mol_type = other DNA
aggaatccaggtgtctgaaggtgcatatacagcagcgcaaaaactggggattatcaatagcaacggcggcgtcag

SEQ ID NO: 572330 - DNA, 75 bp, synthetic construct
  source 1..75: mol_type = other DNA
ttcgcgatattattaaacctattgcagcattaattcatttatgttcttcatcatatgctctaagtcaagaagtaa

SEQ ID NO: 572331 - DNA, 75 bp, synthetic construct
  source 1..75: mol_type = other DNA
aaacaagccgagaggcttcagttaacaggtaaacttatccagagcaagttaaaacaatatgttactgtcggtcag

SEQ ID NO: 572332 - DNA, 75 bp, synthetic construct
  source 1..75: mol_type = other DNA
attcagtcgtgagggcggcatctacgcctcaatttggatttacggtatcacattgcgtcacagggatcacggcgc

SEQ ID NO: 572333 - DNA, 75 bp, synthetic construct
  source 1..75: mol_type = other DNA
tgttaatgaaatcgataaattgtttgccgaacaaatttatatgaaggttcttggattaattactgtggatgatgt

SEQ ID NO: 572334 - DNA, 75 bp, synthetic construct
  source 1..75: mol_type = other DNA
tggggagcattcgcaacatgagcatctcggtgaccggctatcgctacgaatatgacgatggggatgtacctcagt

SEQ ID NO: 572335 - DNA, 75 bp, synthetic construct
  source 1..75: mol_type = other DNA
agtttggcgcgctggcgttcgatgtaactcactcgcacgtcaacctggatcatgacagcgcatacggcaaaggaa

SEQ ID NO: 572336 - DNA, 75 bp, synthetic construct
  source 1..75: mol_type = other DNA
cgttgcccgcagcgccacgccgttagtattgctgccgacaattgcagaagcacaactgaatgcgggcatggaaag

SEQ ID NO: 572337 - DNA, 75 bp, synthetic construct
  source 1..75: mol_type = other DNA
ttctgattagctccatcatattggtggcactaatacaatcatccgcttgggctaactgtacaaacacacagatag

SEQ ID NO: 572338 - DNA, 75 bp, synthetic construct
  source 1..75: mol_type = other DNA
acattgttaactgataatgtattttccccctggaaaggagagggccgaaatgaacgtggtttactacatgcagtc

SEQ ID NO: 572339 - DNA, 75 bp, synthetic construct
  source 1..75: mol_type = other DNA
cttgccaaagaaatagaagataaaatattagatggtagagtggaatttaatccacagacaaaacagcttcttttt

SEQ ID NO: 572340 - DNA, 75 bp, synthetic construct
  source 1..75: mol_type = other DNA
ggagcgcacactcataggttcagcggcacagccgcatctgcaggtgctcacgacattactgtcggtattggtgct

SEQ ID NO: 572341 - DNA, 75 bp, synthetic construct
  source 1..75: mol_type = other DNA
gttggatgctcaaaacacaaccatcaaaatacggatgtatggtatagacgctcctgaatctaaacaggcttttgg

SEQ ID NO: 572342 - DNA, 75 bp, synthetic construct
  source 1..75: mol_type = other DNA
ctgccgggatgtacaggggaatgagggggtcagtactgccctgaccgcctctgtacgtcagggaagcgtgacggg

SEQ ID NO: 572343 - DNA, 75 bp, synthetic construct
  source 1..75: mol_type = other DNA
ggataactctggatggttcggctttctgtaaagggaatgggctgaaccgtaacgaatgtaccctgacaccgcaca

SEQ ID NO: 572344 - DNA, 75 bp, synthetic construct
  source 1..75: mol_type = other DNA
cgctggatgcgcaaaaagcaacgccgccgaagctcgaaggcaaatcaccggacagcccggaaatgaaagacttcc

SEQ ID NO: 572345 - DNA, 75 bp, synthetic construct
  source 1..75: mol_type = other DNA
ctcgcttttaaactggaatgcggcactacagcaaaacaaggaccatgtcgcgcaaaccgttaaagaggatccgga

SEQ ID NO: 572346 - DNA, 75 bp, synthetic construct
  source 1..75: mol_type = other DNA
gtggaggcattaaaaaggttgtgtcttttctgagggacaccctgtatccggcagccctgaagtttggcgaaggcg

SEQ ID NO: 572347 - DNA, 75 bp, synthetic construct
  source 1..75: mol_type = other DNA
gtgtggctggtgcacttgccggaaacaaggctgtttctgatttgcagcaggttttttcttctgcggttgcagaaa

SEQ ID NO: 572348 - DNA, 75 bp, synthetic construct
  source 1..75: mol_type = other DNA
tagagagtttaatgatgatactgacctggttatcaacgggacaacgtaccattttaaagaagatgggcatactat

SEQ ID NO: 572349 - DNA, 75 bp, synthetic construct
  source 1..75: mol_type = other DNA
atgggggcggagcaatccgcgccggtttctctgattcccggttacgccaaccctgtacagttcaccaccagcgaa

SEQ ID NO: 572350 - DNA, 75 bp, synthetic construct
  source 1..75: mol_type = other DNA
taaaggtacgcaaaacaccacgggacataaaaaagatatcgaacaattgcttcgaaaaacatatatctacattgc

SEQ ID NO: 572351 - DNA, 75 bp, synthetic construct
  source 1..75: mol_type = other DNA
aattattattaataaaattaccaccaaaaaaattgctactgaagaaattaccactaaacaaagtactgctgaaaa

SEQ ID NO: 572352 - DNA, 75 bp, synthetic construct
  source 1..75: mol_type = other DNA
ggtaacggcgggcacatcttctgcactttccgatggcgcagctgccatgctggtgatgagtgaaagccgcgccca

SEQ ID NO: 572353 - DNA, 75 bp, synthetic construct
  source 1..75: mol_type = other DNA
taaatattacccatatattcgagaaagaaaaataacagagaagacaaaatcgctttctctgttaggaaaagagag

SEQ ID NO: 572354 - DNA, 75 bp, synthetic construct
  source 1..75: mol_type = other DNA
ctaaaagctctattaggctcacaacgtttagatcaaggacaacggcaggtaccccacctcatcggctatgtacct

SEQ ID NO: 572355 - DNA, 75 bp, synthetic construct
  source 1..75: mol_type = other DNA
ggggaccgtgaatatgccaccgcacccgtttgtgcgcccggcatttgatgtgcgcagtgaacaggcagctcaggt

SEQ ID NO: 572356 - DNA, 75 bp, synthetic construct
  source 1..75: mol_type = other DNA
gcggagctgctgtgcctgaagaacagctcgctgaaatcgctggtggcggaacgccagaaggcgttccctgcgtcg

SEQ ID NO: 572357 - DNA, 75 bp, synthetic construct
  source 1..75: mol_type = other DNA
ccggaacagcggtaggggtttcgctcgcttttgataatgatgcttccagaaatgggcagttttatatggaaacag

SEQ ID NO: 572358 - DNA, 75 bp, synthetic construct
  source 1..75: mol_type = other DNA
aaatcaacaaaatgccaaaaggttctgttcctgccctgcaacaagaaatgctgcgacgtgtcagtaaacgttatg

SEQ ID NO: 572359 - DNA, 75 bp, synthetic construct
  source 1..75: mol_type = other DNA
agagacctgggtggaatgctaacctgggcggtgctaccccggacggtgctaccccggacggtgctatcctggacg

SEQ ID NO: 572360 - DNA, 75 bp, synthetic construct
  source 1..75: mol_type = other DNA
gaggtaattattatttataaaatcacccccaaaaaaattgatactgaagaaattgctactaaacaaagtactgct

SEQ ID NO: 572361 - DNA, 75 bp, synthetic construct
  source 1..75: mol_type = other DNA
caatataaataactggttgaatgaagaattaagctaccttgattgtgagtgggacaatcattacgcaaaaacaca

SEQ ID NO: 572362 - DNA, 75 bp, synthetic construct
  source 1..75: mol_type = other DNA
tacaatgacacatctaatgcagcgcacagcagacatatttgcgtcatggcaaacgttaaaggttttggtggttgt

SEQ ID NO: 572363 - DNA, 75 bp, synthetic construct
  source 1..75: mol_type = other DNA
tgtttctgagctgttaaatgcgctaacgcaattcccaaattctgacgtaaataaggaggggtgggtgaaccgccc

SEQ ID NO: 572364 - DNA, 75 bp, synthetic construct
  source 1..75: mol_type = other DNA
ggcgatctgtttgaggagtacctgcacaaggcgggtgaatttaagcagaccggaaagcagggcgcacttgaagac

SEQ ID NO: 572365 - DNA, 75 bp, synthetic construct
  source 1..75: mol_type = other DNA
aaaacgcatctttggcgctgattaataactcgctcgcgcagaccaacacgcgggttacgctcactgcacaataca

SEQ ID NO: 572366 - DNA, 75 bp, synthetic construct
  source 1..75: mol_type = other DNA
gcctctttttagtcatgataaaggtgaaaccgttgcgtttgttatcagttttcccgagatgtataaccatcatga

SEQ ID NO: 572367 - DNA, 75 bp, synthetic construct
  source 1..75: mol_type = other DNA
gattcagtaacagaatcagaggtgaagttcatattagtgcggatatccgtgtcagtgatttcattacagaagggg

SEQ ID NO: 572368 - DNA, 75 bp, synthetic construct
  source 1..75: mol_type = other DNA
tttagattctaacatggttgctgcttatttatttgatggcggttctgtaaatgaaatgcaaaaatcaaatgaagg

SEQ ID NO: 572369 - DNA, 75 bp, synthetic construct
  source 1..75: mol_type = other DNA
ccactttgtctaattcgtcagattctgaccagacggttcaggctgtacgcttacattgaagccgggggaataatg

SEQ ID NO: 572370 - DNA, 75 bp, synthetic construct
  source 1..75: mol_type = other DNA
tgaagcggaagatgtgctggatgtggcggtggccattgcggaggcagacggcgaaattgagccggaagagcgcaa

SEQ ID NO: 572371 - DNA, 75 bp, synthetic construct
  source 1..75: mol_type = other DNA
aatcttttcttaaactaactctttgggaatttatactcgatctctttcccatgtatcatattaaggaggctaaag

SEQ ID NO: 572372 - DNA, 75 bp, synthetic construct
  source 1..75: mol_type = other DNA
caaaaatatactctataaatcaagatccccaaagaggggataagaaagtcggtgcatatctgtttatgcagtcat

SEQ ID NO: 572373 - DNA, 75 bp, synthetic construct
  source 1..75: mol_type = other DNA
gggtagccgattatgggttgcaatttgccgatgtcccactcgaggttcctgcttttacgctctctctactctgga

SEQ ID NO: 572374 - DNA, 75 bp, synthetic construct
  source 1..75: mol_type = other DNA
ttgaatcacgcagcgatcaggatatttatgatgagagatacgagggaaatacactaaggaaggttttggagttac

SEQ ID NO: 572375 - DNA, 75 bp, synthetic construct
  source 1..75: mol_type = other DNA
gattttgccaatctttctgatgcaagaaatgctcaagtcaaaagaaaggatgatttggggaggaagaatcttaat

SEQ ID NO: 572376 - DNA, 75 bp, synthetic construct
  source 1..75: mol_type = other DNA
gagaataagaataagcctacaaaggagaaatttttggaaaagcaaaatcttttttcaacggtgaaaaactttaag

SEQ ID NO: 572377 - DNA, 75 bp, synthetic construct
  source 1..75: mol_type = other DNA
tcctgaagggcagatttatttttcaacgtataagaaaggtaagacacctgcaagtaaaattgaacttcatttatc

SEQ ID NO: 572378 - DNA, 75 bp, synthetic construct
  source 1..75: mol_type = other DNA
aaaattatttcctggccatttgttatcagcaggacagtatcgacgattataagaactgcatttcttacagaagac

SEQ ID NO: 572379 - DNA, 75 bp, synthetic construct
  source 1..75: mol_type = other DNA
tgtagatgataaagtcgatttattctctagcattgaacgatatttactgggggtaattgagaaaaataatagcta

SEQ ID NO: 572380 - DNA, 75 bp, synthetic construct
  source 1..75: mol_type = other DNA
atattgtaactttaaaaaagtgacattcactggtgctatatcttacgaaaatcttaatggttcagtatttggaaa

SEQ ID NO: 572381 - DNA, 75 bp, synthetic construct
  source 1..75: mol_type = other DNA
cagccgcagccaatgctgaaaccgccaggcgggcgaatgtggctaaaagttatggcgtggatattgccacctgga

SEQ ID NO: 572382 - DNA, 75 bp, synthetic construct
  source 1..75: mol_type = other DNA
gtcgcagaaggcgcttgccggacgtttcctgagcggcgggaaaagtatcctgtcaggggggatgcgcgcggggct

SEQ ID NO: 572383 - DNA, 75 bp, synthetic construct
  source 1..75: mol_type = other DNA
aagccgttatcacgtttggcggtaacctggacagttcatggaagcgatcggctgacggtttacaaaagagcctga

SEQ ID NO: 572384 - DNA, 75 bp, synthetic construct
  source 1..75: mol_type = other DNA
gatgctgaaaaaaagacaatgcattctttattttcagaaaaaatcagttttgatatttataagcatgatattcat

SEQ ID NO: 572385 - DNA, 75 bp, synthetic construct
  source 1..75: mol_type = other DNA
tatgacagtgaatttcgcttttccggtcaaccagttccggcactacaggggcttattgacgatgcaccagtggtg

SEQ ID NO: 572386 - DNA, 75 bp, synthetic construct
  source 1..75: mol_type = other DNA
aaggaaagaacggaaataaattacagggattatagaaaagtatcaaaatatgtagatgataaagtcgatttattc

SEQ ID NO: 572387 - DNA, 75 bp, synthetic construct
  source 1..75: mol_type = other DNA
ggaaaaataccaaatataagtaaagagattctacatcttaaggatgaaacagagagattggagaaagagtatcaa

SEQ ID NO: 572388 - DNA, 75 bp, synthetic construct
  source 1..75: mol_type = other DNA
tggatttcatagggacttcgttttatcacaaatatagatgtgaattaaaatatgataatcatttttatatgtgtg

SEQ ID NO: 572389 - DNA, 75 bp, synthetic construct
  source 1..75: mol_type = other DNA
ggtttttctggggggctgcggcatctggaccgcaaacggaaggagcagcatgtaaggcacaccgttccatctggg

SEQ ID NO: 572390 - DNA, 75 bp, synthetic construct
  source 1..75: mol_type = other DNA
atccggcagaccttgtagcattactgaaagagcacgatcagttgccgcaatgccagcctgacgatagtcagctaa

SEQ ID NO: 572391 - DNA, 75 bp, synthetic construct
  source 1..75: mol_type = other DNA
tgcctgatggcgaggcgctggctggcgtcattgcaggcggcatggccgaacggggcagtcagttgctgacccgcc

SEQ ID NO: 572392 - DNA, 75 bp, synthetic construct
  source 1..75: mol_type = other DNA
gcttaccagatgggcggcggaacgtggtcaccattcactcaaagcaaagcggcaccgatcagcgctgccatcggc

SEQ ID NO: 572393 - DNA, 75 bp, synthetic construct
  source 1..75: mol_type = other DNA
gactgctccgcttaatgcgtatggtgcttataggattggtggtggtgaatggaacccgttcacacaaagcacccc

SEQ ID NO: 572394 - DNA, 75 bp, synthetic construct
  source 1..75: mol_type = other DNA
gcttataggattggtggtggtgaatggaacccgttcacacaaagtaccccagcaccgatcagcgctgccatcggc

SEQ ID NO: 572395 - DNA, 75 bp, synthetic construct
  source 1..75: mol_type = other DNA
ggtgcggtggattatttctgccagcatggtcacggtttaatttctaaaacccgtattgaatttgtcattgtttaa

SEQ ID NO: 572396 - DNA, 75 bp, synthetic construct
  source 1..75: mol_type = other DNA
aatgaaccagactattaccgacctgaaggaatcaaccgccgatctggaagaacgtataaaaaacaatgaggacgg

SEQ ID NO: 572397 - DNA, 75 bp, synthetic construct
  source 1..75: mol_type = other DNA
agcgctcgtggtaggcccctttttctcgccggtcgagtcttctcagttgtggctgcacactcaggtgcaactggg

SEQ ID NO: 572398 - DNA, 75 bp, synthetic construct
  source 1..75: mol_type = other DNA
tctggcgttagcactggctaaaaaaaatatacgtttcgcaaaagtctggcgattaatatttatactgccatatgc

SEQ ID NO: 572399 - DNA, 75 bp, synthetic construct
  source 1..75: mol_type = other DNA
cagtattggaattaattcagttgattttctgtcggttccattaaatgcaaaaataacagtaattgccgtttgtgt

SEQ ID NO: 572400 - DNA, 75 bp, synthetic construct
  source 1..75: mol_type = other DNA
tgatgagtaaacggcaagaagatcaagagcaagcctacgaagtacagctggcgctgattgataatggtattattg

SEQ ID NO: 572401 - DNA, 75 bp, synthetic construct
  source 1..75: mol_type = other DNA
cgacccaggccattcatgtttttgccgcggtgcctgctgcgctggccattgaatttggggctttgctgacgaccc

SEQ ID NO: 572402 - DNA, 75 bp, synthetic construct
  source 1..75: mol_type = other DNA
gtggaagagattgagagcagcagccggcgctgggaaacctactcgctggaaacacgctttgagataccgtatcag

SEQ ID NO: 572403 - DNA, 75 bp, synthetic construct
  source 1..75: mol_type = other DNA
aaactgacagcagcagataacggcatcaccggcttcaagccggtcattctgttcaagtcgaacaagattgcgata

SEQ ID NO: 572404 - DNA, 75 bp, synthetic construct
  source 1..75: mol_type = other DNA
tcaggacaattcagactggatgaaaaactgaaagatcccgatgcggcagcaatcgtaaattatctcaatcgttca

SEQ ID NO: 572405 - DNA, 75 bp, synthetic construct
  source 1..75: mol_type = other DNA
gtggaggatattgagagcagcagtcgtacctgggaaacatactcgctggaaactcgttttgatataccgtatcag

SEQ ID NO: 572406 - DNA, 75 bp, synthetic construct
  source 1..75: mol_type = other DNA
cgtgagaatggtatcaccagtgaggatttgaaagagcttcctcttgtgttgcttggtgatgaggcgcatcacttc

SEQ ID NO: 572407 - DNA, 75 bp, synthetic construct
  source 1..75: mol_type = other DNA
gcggcgttgcgttatcttcattacacgcagcgtaatccggaagaggcattactgcattaccgtcatctgttgttc

SEQ ID NO: 572408 - DNA, 75 bp, synthetic construct
  source 1..75: mol_type = other DNA
ttgtaccagattttaattttctgcttaacgttcctgatgaagttttctctaatatacgtcatcagagtactgctg

SEQ ID NO: 572409 - DNA, 75 bp, synthetic construct
  source 1..75: mol_type = other DNA
acgcccggggaggaacgcgccataccggttatcgttcaaagccagcatcatcagacactggttgcaattccggcg

SEQ ID NO: 572410 - DNA, 75 bp, synthetic construct
  source 1..75: mol_type = other DNA
ggcgacaattatcccgaagacgatcttagcggacttcactctgcctgcctgaccagaattcgcctggcggcttcc

SEQ ID NO: 572411 - DNA, 75 bp, synthetic construct
  source 1..75: mol_type = other DNA
cgtatactgatgaaaaacaattcccgggctcatcgtattttcttgaccggctcgggctgaaaccggaaaaagatt

SEQ ID NO: 572412 - DNA, 75 bp, synthetic construct
  source 1..75: mol_type = other DNA
gaacccgaagaagaaaaaaaagaagagcgcagggcgataaagccggatatttttatccgttcagccgccgccgat

SEQ ID NO: 572413 - DNA, 75 bp, synthetic construct
  source 1..75: mol_type = other DNA
ttgtctcagagagaaataaagttcaggatgtaaagaaaatagtcgaacaaattaaaaattcaggtcgtagcgagc

SEQ ID NO: 572414 - DNA, 75 bp, synthetic construct
  source 1..75: mol_type = other DNA
agtgcccggccagaacgaatcggacaatttcccgatcgagacagctacggccaccacggttgtgagtggcactta

SEQ ID NO: 572415 - DNA, 75 bp, synthetic construct
  source 1..75: mol_type = other DNA
ggcgtccacaccacggcggcgaacctggatatcgatatcccgtatgcgacggacccggcaggaaaccggctgccg

SEQ ID NO: 572416 - DNA, 75 bp, synthetic construct
  source 1..75: mol_type = other DNA
cgagtgtcggtccactacggctatgacgataaaggccgcctgacgggcgaacggcagacggtggagaacccggag

SEQ ID NO: 572417 - DNA, 75 bp, synthetic construct
  source 1..75: mol_type = other DNA
taaaaggctgaaaactaagcttgataaaactgatggttcgttagatttaaactatcttaaaattatagacagtga

SEQ ID NO: 572418 - DNA, 75 bp, synthetic construct
  source 1..75: mol_type = other DNA
tctggcactacgatgcgtcggaccgcatcacgcaccggacggtgaacggtgacccggcggagcagtggcagtatg

SEQ ID NO: 572419 - DNA, 75 bp, synthetic construct
  source 1..75: mol_type = other DNA
gacgctgccgggcgcatcaccgtgctgaccaacgagaacggcagccagtccacgttcctgtatgacccggtggac

SEQ ID NO: 572420 - DNA, 75 bp, synthetic construct
  source 1..75: mol_type = other DNA
gtaaaccggaggagacctggtacgggtgggacggtgacaggctgaccactgtacagacccaacagacaagaatcc

SEQ ID NO: 572421 - DNA, 75 bp, synthetic construct
  source 1..75: mol_type = other DNA
cgggtagtggaaaagactttcttgccaattatctgatatccaactatggatttattagattatcatttagcgatc

SEQ ID NO: 572422 - DNA, 75 bp, synthetic construct
  source 1..75: mol_type = other DNA
aaagcgatattgcagaagaaccagctaaacaacaaaaagcggctggcggacgtccggcaaaattcaaagtagaac

SEQ ID NO: 572423 - DNA, 75 bp, synthetic construct
  source 1..75: mol_type = other DNA
ctgccgataaagggcgggaaaagcgcgatggcagtacgctgggcgatcgcctgaattactgggatgtgaaaatga

SEQ ID NO: 572424 - DNA, 75 bp, synthetic construct
  source 1..75: mol_type = other DNA
tacttgttaagtatgaagagttggtacgttgcggagagtttgaaaaaattgatgcggagggggtgagggaattaa

SEQ ID NO: 572425 - DNA, 75 bp, synthetic construct
  source 1..75: mol_type = other DNA
agttcatacttttcattaatagatattaataattatgatcgagaagtcaaatcattaatacatgtttctatagga

SEQ ID NO: 572426 - DNA, 75 bp, synthetic construct
  source 1..75: mol_type = other DNA
aagtttgttgtaaaaaaaactggattacagccgataacagaaagcatagttatttcgctgagaccctataacctt

SEQ ID NO: 572427 - DNA, 75 bp, synthetic construct
  source 1..75: mol_type = other DNA
tgcccgccacgctggttacatcgacgttgatgatggcgcactgtatacgctttctcaatactgcgaccagttggt

SEQ ID NO: 572428 - DNA, 75 bp, synthetic construct
  source 1..75: mol_type = other DNA
gtgcgaacaaacgttgtccatccaaccgatacgctggtgcgcgtgaaggttagggctacagagaacgcgctgggc

SEQ ID NO: 572429 - DNA, 75 bp, synthetic construct
  source 1..75: mol_type = other DNA
taactactgacgccacgttctccggcacgcttgtttcagctgtagagacaaacgacggcgcggtgataaacccag

SEQ ID NO: 572430 - DNA, 75 bp, synthetic construct
  source 1..75: mol_type = other DNA
acatcactcaaccacgctgaatatcaaaggagagagttaccggttaaaagagaaacgtaaagctggagtgctgac

SEQ ID NO: 572431 - DNA, 75 bp, synthetic construct
  source 1..75: mol_type = other DNA
ccccaacattcagctcaatatctggaacggagacactgtgcagctcccgtcccgctacctcatcgcgaccgttga

SEQ ID NO: 572432 - DNA, 75 bp, synthetic construct
  source 1..75: mol_type = other DNA
aagcgcctaatctactcccgggtgaagatgaacgcaaaagtgtttgaggacggtattatccaggttggcagcgtc

SEQ ID NO: 572433 - DNA, 75 bp, synthetic construct
  source 1..75: mol_type = other DNA
tgggagaccgcgtgcaggcgatctgcaatgcggcatctgtggtggcgtactgggacgacggtgtgctcacgttta

SEQ ID NO: 572434 - DNA, 75 bp, synthetic construct
  source 1..75: mol_type = other DNA
caacgcttccgggaaactgctggcgttagatagccagttaaccaatgatttttcagaaaaaaaaacagctatttc

SEQ ID NO: 572435 - DNA, 75 bp, synthetic construct
  source 1..75: mol_type = other DNA
atgaaaccgaaaattgttccggttatccggtatacacgttttcgtttcgggcgcgtagaacatgtgcgtaagcac

SEQ ID NO: 572436 - DNA, 75 bp, synthetic construct
  source 1..75: mol_type = other DNA
atattcgcgttcgtcgcgtaacgccagacagcaaaagcgatctacttcgcaatgacaccaggtggagcagttaca

SEQ ID NO: 572437 - DNA, 75 bp, synthetic construct
  source 1..75: mol_type = other DNA
ttgtggtaagcatgccttcgcaactcttcactatggcgcgttcttttaaagcggttgccaatggcaaaatttata

SEQ ID NO: 572438 - DNA, 75 bp, synthetic construct
  source 1..75: mol_type = other DNA
ggtacaactggtgccccactaactaacagagacatgtcaggcgttagtgttgctgttttcggatcatatatttca

SEQ ID NO: 572439 - DNA, 75 bp, synthetic construct
  source 1..75: mol_type = other DNA
cactaatcactgcagcaacagcaagacgttccatccatttccctgatggcgtctatttatgcagtgacttttttt

SEQ ID NO: 572440 - DNA, 75 bp, synthetic construct
  source 1..75: mol_type = other DNA
acattaccaacaacggcatgcgagaatttggaaatatgtccccgctggcgtggcgtaacgatggggaattacagc

SEQ ID NO: 572441 - DNA, 75 bp, synthetic construct
  source 1..75: mol_type = other DNA
gattaaaatatgggttcctgaggggaggttatattttgcattaatgaatgtgttgcaaatgttccccctgaaaaa

SEQ ID NO: 572442 - DNA, 75 bp, synthetic construct
  source 1..75: mol_type = other DNA
gtgataataatgataaaattggcactgtaaaagtcaatgcaacggctgttggaattgggctacattcagaaaatt

SEQ ID NO: 572443 - DNA, 75 bp, synthetic construct
  source 1..75: mol_type = other DNA
agacccgccagcaccaatcacgagacgagctgatagtgcaactggtcgctatgaaactgccgtcagctagcaagc

SEQ ID NO: 572444 - DNA, 75 bp, synthetic construct
  source 1..75: mol_type = other DNA
acaaactgaattacctgaaaataaaactttagatttcaaacgtcaattgcaatttataatattaggggatgataa

SEQ ID NO: 572445 - DNA, 75 bp, synthetic construct
  source 1..75: mol_type = other DNA
gccagttaaaggtgtaacgacggaagtgattgctgcagatagcgatagcaaacgtcgaatcgtgttaaatcgcta

SEQ ID NO: 572446 - DNA, 75 bp, synthetic construct
  source 1..75: mol_type = other DNA
tcagtcccccaacatgcagtatggctatggttaatagtcaacctcaacagcattgtggtcagttaacgtataatg

SEQ ID NO: 572447 - DNA, 75 bp, synthetic construct
  source 1..75: mol_type = other DNA
tctggccggataaacgaaacagggaaatattctattcaggtataacgacagagtggagaatggcaggaggacggg

SEQ ID NO: 572448 - DNA, 75 bp, synthetic construct
  source 1..75: mol_type = other DNA
ggcggtagctttcatatggatcgctggtcggaaaacgggaaaaagacgcgaccagctaaagagagttggctggca

SEQ ID NO: 572449 - DNA, 75 bp, synthetic construct
  source 1..75: mol_type = other DNA
cacaacaggcaatggaacgtcttgattatgattgctgcaagccaagcgatctgttcattaccttgctcaacggca

SEQ ID NO: 572450 - DNA, 75 bp, synthetic construct
  source 1..75: mol_type = other DNA
gactctccgttaccgtggttatcggactgaagtcctcctaaaagagcttggtctggacccggaagatgagacccg

SEQ ID NO: 572451 - DNA, 75 bp, synthetic construct
  source 1..75: mol_type = other DNA
aaataagttaagttcaggaataaaagacattgaagacggaaaagtcggtctggttcagcaatcctcaaatctttc

SEQ ID NO: 572452 - DNA, 75 bp, synthetic construct
  source 1..75: mol_type = other DNA
accaccaaccagaatgtgaccaccaacactgcagcgatcgccaccaacaccggaaccctcacaacccaggggcag

SEQ ID NO: 572453 - DNA, 75 bp, synthetic construct
  source 1..75: mol_type = other DNA
actatattattttttcttttttttgtgtttattcacgtttcgaatcgtatcaaaaggctataaagaaaattgggt

SEQ ID NO: 572454 - DNA, 75 bp, synthetic construct
  source 1..75: mol_type = other DNA
aatccgcccaccttgccgggcgccggtgctgtgtggaaatccgcccaccttgccgggcgccggtgccgtgtggaa

SEQ ID NO: 572455 - DNA, 75 bp, synthetic construct
  source 1..75: mol_type = other DNA
gggcgccggtgccgtgtgggaatccacccaccttgccgggcgccggtgctgtgtggaaatccgcccaccttgccg

SEQ ID NO: 572456 - DNA, 75 bp, synthetic construct
  source 1..75: mol_type = other DNA
ccggtgccgtgtgggaatccgcccaccttgccgggtgccggtgccgtgtggaaatccgcccaccttgccgggcgc

SEQ ID NO: 572457 - DNA, 75 bp, synthetic construct
  source 1..75: mol_type = other DNA
tgttgttgctctttttgtccccacactcacctttgcttatgattttagcaaaattgactgcaattcccctaaaac

SEQ ID NO: 572458 - DNA, 75 bp, synthetic construct
  source 1..75: mol_type = other DNA
gatttgccgcgcggaaatcgaggcaatagtacaggccaggatgcttttagtggcatggacgaattaaagccagca

SEQ ID NO: 572459 - DNA, 75 bp, synthetic construct
  source 1..75: mol_type = other DNA
caatacttgctactgttgttgctctctctgttcccacatttgcctttgcttatgattttagcaaaattgactgca

SEQ ID NO: 572460 - DNA, 75 bp, synthetic construct
  source 1..75: mol_type = other DNA
tgccaaaccgtaataatctgcacaattttctcgatgatctggtcgataaagcggtttctccagtggtgtttctca

SEQ ID NO: 572461 - DNA, 75 bp, synthetic construct
  source 1..75: mol_type = other DNA
attaccagcattgggcaaagcctcaatttaaccgtcgtggcggaaggggtcgaaaccaaagagcaatttgagatg

SEQ ID NO: 572462 - DNA, 75 bp, synthetic construct
  source 1..75: mol_type = other DNA
ccagaacccgccacgcgcagtaccagctgtgggagcacggtgcgctgtcaggacagacgcacgctgtaacctccc

SEQ ID NO: 572463 - DNA, 75 bp, synthetic construct
  source 1..75: mol_type = other DNA
gtagtggctgaaggtgtagaaacaaaagaacaatttgagatgttacgcaagatccactgccccgttattcagggc

SEQ ID NO: 572464 - DNA, 75 bp, synthetic construct
  source 1..75: mol_type = other DNA
cgcagcatggtcatgttcccccttcccggtttattcccctcgcggaagagattggtgaaattgaaaacattggtc

SEQ ID NO: 572465 - DNA, 75 bp, synthetic construct
  source 1..75: mol_type = other DNA
gctgacggtagaaatcacggaaagcatgatgatggaacacgataccgaaatctttaagcgcattcagatcctgcg

SEQ ID NO: 572466 - DNA, 75 bp, synthetic construct
  source 1..75: mol_type = other DNA
cggtaacgcatccgcaggcagggaatctgggcggtggtggttttatgttaatccgctcgaaaaatggcaatacca

SEQ ID NO: 572467 - DNA, 75 bp, synthetic construct
  source 1..75: mol_type = other DNA
atgattttgtcattttcgactatgatttcatcacttggtgttatttcatcgagatttattgcgaggtactcaggt

SEQ ID NO: 572468 - DNA, 75 bp, synthetic construct
  source 1..75: mol_type = other DNA
cttatctttattgattttattctatttgcttaaggaacatagtgaattttcgcatgtgtatatggttgcagctat

SEQ ID NO: 572469 - DNA, 75 bp, synthetic construct
  source 1..75: mol_type = other DNA
tgatccagctcaccgccacactccgggcaacagctttcttcagactccaaacggtgtatttcacggggaaggtgt

SEQ ID NO: 572470 - DNA, 75 bp, synthetic construct
  source 1..75: mol_type = other DNA
ccatatacatcattggatttatattcttgactttcttctacgcctcgatttcaaaacagattttgccaagttcgg

SEQ ID NO: 572471 - DNA, 75 bp, synthetic construct
  source 1..75: mol_type = other DNA
aatcgtccctggtgcagatggaacagcatctgcaaaacgcgggcgtgctgatcttcttcccggccggagaagttt

SEQ ID NO: 572472 - DNA, 75 bp, synthetic construct
  source 1..75: mol_type = other DNA
acgatctttggcctcaggcgaggcctgcaccctggcaaaaaagtctgttaaaaagactgttttacgaagacgaat

SEQ ID NO: 572473 - DNA, 75 bp, synthetic construct
  source 1..75: mol_type = other DNA
gggagtatgacgagtgggggaaccagcttaatgaggagaacccgcctcacctgtaccagccgtaccgtttgccgg

SEQ ID NO: 572474 - DNA, 75 bp, synthetic construct
  source 1..75: mol_type = other DNA
atgtggcgtccgggaattggtggttttgttgacctgaactgtgggtggtattgtcaggatgcactgattaactgg

SEQ ID NO: 572475 - DNA, 75 bp, synthetic construct
  source 1..75: mol_type = other DNA
cgaactggcctacgctctctggcctggtgatgtggatgccggaaacattgacggcagcatccatcgctgggcaaa

SEQ ID NO: 572476 - DNA, 75 bp, synthetic construct
  source 1..75: mol_type = other DNA
atgcccttcaaagcgttattaacgcaccttatctgcctgggtgatgatgagccgcaggtgacggcatatggcctg

SEQ ID NO: 572477 - DNA, 75 bp, synthetic construct
  source 1..75: mol_type = other DNA
caacatgaattccctaacaagaccacagtgaacgattcctacactcatgatttatcgaaacttctgaagatcgct

SEQ ID NO: 572478 - DNA, 75 bp, synthetic construct
  source 1..75: mol_type = other DNA
cgctggcagagctgcatgatggattcattgctgatctgaatgaaaacggcttgcctgaaatgccagcggcgcact

SEQ ID NO: 572479 - DNA, 75 bp, synthetic construct
  source 1..75: mol_type = other DNA
gttcttcgttaaccggttacgccaaccccgcacagtccaccgccagcgaaattggcgtttcctgcggtgggttta

SEQ ID NO: 572480 - DNA, 75 bp, synthetic construct
  source 1..75: mol_type = other DNA
atgatactttggtctctgaaaaaagaaaccgatatccggcgaggaaggcattgtgttttcctgaggcatgttcac

SEQ ID NO: 572481 - DNA, 75 bp, synthetic construct
  source 1..75: mol_type = other DNA
atgatactttggtctctgaaaaaagaaaccgatatccgacggggaaggcattgtgttttcctgaggcatgttcac

SEQ ID NO: 572482 - DNA, 75 bp, synthetic construct
  source 1..75: mol_type = other DNA
atgatactttggtctatgaaaaaagaaaccgatatccgccgcggaaggcattgtgttttcctgaggcatgttcac

SEQ ID NO: 572483 - DNA, 75 bp, synthetic construct
  source 1..75: mol_type = other DNA
actgacgcaatcagtagtcttaactcatcgcttaccagtacgattaattcgaaggtatcagaggtgtcaacggca

SEQ ID NO: 572484 - DNA, 75 bp, synthetic construct
  source 1..75: mol_type = other DNA
gtctttcgattctgtaaactcaaatattacagaatggtcgcaggcaatggcgacggctgacgaggcattatcaag

SEQ ID NO: 572485 - DNA, 75 bp, synthetic construct
  source 1..75: mol_type = other DNA
aaggcattgtgttttcctgatgcatgttcacctggtctttgtcaccagataccgacgccagatttttgaccatga

SEQ ID NO: 572486 - DNA, 75 bp, synthetic construct
  source 1..75: mol_type = other DNA
taacaattaatcacctcccaattgaatttactaaaatgaacaacgtgctaaatttcggtgtcaatgggaatgcaa

SEQ ID NO: 572487 - DNA, 75 bp, synthetic construct
  source 1..75: mol_type = other DNA
atgttgcagttacttaaccgtaaccagacccggtttacccatcgcgcccgccgatcccagctccacccggaagat

SEQ ID NO: 572488 - DNA, 75 bp, synthetic construct
  source 1..75: mol_type = other DNA
gcctggacagaaatggctgccgccggggccgttgcactgcatgtatccggcagtttcccggatctgaacatgcaa

SEQ ID NO: 572489 - DNA, 75 bp, synthetic construct
  source 1..75: mol_type = other DNA
tttgcagggtaaggagcaggttaatggtgactcactgttgattaactggaactgtgcagcctcgaaatccccacc

SEQ ID NO: 572490 - DNA, 75 bp, synthetic construct
  source 1..75: mol_type = other DNA
aattacggtttcttcggcgacattgatgttgccgtcattgaagcatcggcactggcaccggatggtcgagtctag

SEQ ID NO: 572491 - DNA, 75 bp, synthetic construct
  source 1..75: mol_type = other DNA
cgccgctgacgatgtactttctgacgccgatgctgtttcctggcgtgcgccatatcaaacatcgtccggttggtg

SEQ ID NO: 572492 - DNA, 75 bp, synthetic construct
  source 1..75: mol_type = other DNA
agaactgtatgctgcttttcaggttatgtgccatttatacaatggttttgataacagactcgtcagcctgaaaac

SEQ ID NO: 572493 - DNA, 75 bp, synthetic construct
  source 1..75: mol_type = other DNA
ttgggtaaaaacaagcatggcgtattttaaaccaacagatttcatccagtacacatggaaattcgcaacagttac

SEQ ID NO: 572494 - DNA, 75 bp, synthetic construct
  source 1..75: mol_type = other DNA
ataacgaggtgcgcagcctggagcgtattcagcaggcgcttaatgccagtgaacggctggcagggatcgtcggca

SEQ ID NO: 572495 - DNA, 75 bp, synthetic construct
  source 1..75: mol_type = other DNA
ccgccggcagatggagctggatattctgaaaaaggcggaggaaatcataaaaaaagacccgggcatcagtatcag

SEQ ID NO: 572496 - DNA, 75 bp, synthetic construct
  source 1..75: mol_type = other DNA
ccgtcggcagatggaactggatattctgaaaaaagcggaggaaatcataaaaaagacccgggcatcagtatcagt

SEQ ID NO: 572497 - DNA, 75 bp, synthetic construct
  source 1..75: mol_type = other DNA
aaaccgaaatgggcacctgggccgagttaggtattgatattgaagaaaaagcctttttcgacattcttgctcata

SEQ ID NO: 572498 - DNA, 75 bp, synthetic construct
  source 1..75: mol_type = other DNA
gaaagaaaacgagcggttgcgccgacgcaatcaggacgtttcaggacaggtgaatgaggccgttaatggtctgcg

SEQ ID NO: 572499 - DNA, 75 bp, synthetic construct
  source 1..75: mol_type = other DNA
gcgcgcttttaccgcgtcatttaagaattttcgtctgcgcgaatggtacaccgataccactatcggacaaaattc

SEQ ID NO: 572500 - DNA, 75 bp, synthetic construct
  source 1..75: mol_type = other DNA
aattcatcaggccttgcctctccattcatgaagataaaaaaatacttacatctgagtattgttggcagagcttga

SEQ ID NO: 572501 - DNA, 75 bp, synthetic construct
  source 1..75: mol_type = other DNA
cccggatgattcaggaccggtgctggcagcggctgatactgatggtggatatcggatcgctggtccattttggca

SEQ ID NO: 572502 - DNA, 75 bp, synthetic construct
  source 1..75: mol_type = other DNA
tgatgtgggtgacgccggctgaccagtcaccgcctgacccacgggatgtgacagggggcaaaagtggtccccgtt

SEQ ID NO: 572503 - DNA, 75 bp, synthetic construct
  source 1..75: mol_type = other DNA
ccacctacctgcccaccatctttggcctgtcggctgccggtgcggcgggtgaagcgatgagccaggggcagtaca

SEQ ID NO: 572504 - DNA, 75 bp, synthetic construct
  source 1..75: mol_type = other DNA
gatttaaaaattatgcaatttcaaaatttatatctttgacatgtataaatgtatttaggttatattgtatatacg

SEQ ID NO: 572505 - DNA, 75 bp, synthetic construct
  source 1..75: mol_type = other DNA
ggcaatactgattggttttcggcaggggcacaagcaaacggtgatttatttgattttcttgtggaattaagaaat

SEQ ID NO: 572506 - DNA, 75 bp, synthetic construct
  source 1..75: mol_type = other DNA
cctcggcgcagttcgtaaggtagtaggaattaacatcggagaactattgaaacactatgaaatccaggtgagtca

SEQ ID NO: 572507 - DNA, 75 bp, synthetic construct
  source 1..75: mol_type = other DNA
ctgaggttgacagccttacaaaattcgttgccggtgatgccagtgccagcccgtgggagcgcgagttcgcgcaac

SEQ ID NO: 572508 - DNA, 75 bp, synthetic construct
  source 1..75: mol_type = other DNA
attacactcaaaatttatacggtgagtataaagccactgttacaggcggcggagagggtatcgcaacgctgatcc

SEQ ID NO: 572509 - DNA, 75 bp, synthetic construct
  source 1..75: mol_type = other DNA
ttaagccgcttcggtaccgcaagaatcacgctgggcgtggatgaagattttagcctgaagaattcccagttcgat

SEQ ID NO: 572510 - DNA, 75 bp, synthetic construct
  source 1..75: mol_type = other DNA
atgaacagcgagcaagcggccaatatggcgcgtggatgggcctcttctcaggcatctggcgcaatgacagactgg

SEQ ID NO: 572511 - DNA, 75 bp, synthetic construct
  source 1..75: mol_type = other DNA
gcttttggcgatgtataccacaaagcagcagcactattccatggaattatttccaaccactgtttttataacgga

SEQ ID NO: 572512 - DNA, 75 bp, synthetic construct
  source 1..75: mol_type = other DNA
tccgctactcgcccccctcgcccggtttatctatttagtgaagtatgtgagttcgtcgaaaaagtctcacgcctt

SEQ ID NO: 572513 - DNA, 75 bp, synthetic construct
  source 1..75: mol_type = other DNA
gtgagacggcttactttttgagagccaagctgggtgacgtcagggcatgggatgatctattagcggatatgcgac

SEQ ID NO: 572514 - DNA, 75 bp, synthetic construct
  source 1..75: mol_type = other DNA
gagcgtaaaagaagtggatgaattgcgaacacaaatcagggatgtttctaacatggctgatattcgcattgaatc

SEQ ID NO: 572515 - DNA, 75 bp, synthetic construct
  source 1..75: mol_type = other DNA
aagaaaatcaatattcggtttttgaaactaaatacggtggtttcaaaataacattttcaaacccgaagtggaaga

SEQ ID NO: 572516 - DNA, 75 bp, synthetic construct
  source 1..75: mol_type = other DNA
atgcgatcactggtcagttcgtaaagccgatagaggcacagcgccgtccccacaccacggtaactgaaactgtca

SEQ ID NO: 572517 - DNA, 75 bp, synthetic construct
  source 1..75: mol_type = other DNA
atagccgacagaaaaaagcggcgagcaaaaatgctgtcagcatatccgtacaacaatttcagaagtgaatcgtac

SEQ ID NO: 572518 - DNA, 75 bp, synthetic construct
  source 1..75: mol_type = other DNA
atggctacatacggcggtcagtttacgcttaccaaaaaacgactcgccagaacgtttcgcgtcagcccggaagtg

SEQ ID NO: 572519 - DNA, 75 bp, synthetic construct
  source 1..75: mol_type = other DNA
ttgacggctgggtgatttacaacgtgatttgcgatcctgctgatatgctgatcattcagatgacggaggaaaaag

SEQ ID NO: 572520 - DNA, 75 bp, synthetic construct
  source 1..75: mol_type = other DNA
cttactggacaatatcgcaggcatgttccgtggtatcgcgttatgggatgggcagcgccttacggtgatgattga

SEQ ID NO: 572521 - DNA, 75 bp, synthetic construct
  source 1..75: mol_type = other DNA
cgatggaggctatgacgggatatcgtgacaatcctgatcctgtaaaagccagtgaagcggctcatatattgtgtc

SEQ ID NO: 572522 - DNA, 75 bp, synthetic construct
  source 1..75: mol_type = other DNA
gcaccttatgttactgaaccaatgaactgcctggcgtcacgtgaatatgatgcggttgtttttgttggaccagcc

SEQ ID NO: 572523 - DNA, 75 bp, synthetic construct
  source 1..75: mol_type = other DNA
cgctgaaacaggatacaggccagttaattaaagcgccccgcagaatgcctgttgctgaagcggtgcaacgattta

SEQ ID NO: 572524 - DNA, 75 bp, synthetic construct
  source 1..75: mol_type = other DNA
ttgaaagttgggtaacaaaattaccgtcaatatcaggccctttaaatctctatatacctaccagtttcaaagata

SEQ ID NO: 572525 - DNA, 75 bp, synthetic construct
  source 1..75: mol_type = other DNA
aatcattgtttctcccctgacaaggttaacgaaatctgcgaacaagccagacattatttagttgaaaaatgtttg

SEQ ID NO: 572526 - DNA, 75 bp, synthetic construct
  source 1..75: mol_type = other DNA
cgcaaaaattcagagtattgaggaaaagagagaagaaaaagttattcaaggttattatgatggctatgcgaaagg

SEQ ID NO: 572527 - DNA, 75 bp, synthetic construct
  source 1..75: mol_type = other DNA
tggccagtaacaataaaaatgacatcctcgccaccccgagcatcgtaacgctggataataaactcgcgtccttca

SEQ ID NO: 572528 - DNA, 75 bp, synthetic construct
  source 1..75: mol_type = other DNA
acgattctgatcgatccctcggtacaggggacgatatctgtccgcagcaatgatacgtttagccagcaagagtac

SEQ ID NO: 572529 - DNA, 75 bp, synthetic construct
  source 1..75: mol_type = other DNA
atcacttcattactgaaaagccttgatgtcgaagagagcgaggaaggaaatacccgggtttattacctgaaatat

SEQ ID NO: 572530 - DNA, 75 bp, synthetic construct
  source 1..75: mol_type = other DNA
cttttttgttatgcccatgccgtcgccattctgcgtggctatgaaaaaatccgtgactggagcaaccctccccag

SEQ ID NO: 572531 - DNA, 75 bp, synthetic construct
  source 1..75: mol_type = other DNA
tgatatctggctaaacagcgccaactttaccctgccgctggacttctctgttttcgcacatttatgcgaagtgcc

SEQ ID NO: 572532 - DNA, 75 bp, synthetic construct
  source 1..75: mol_type = other DNA
gcagaacggcggcgctgaccgctacgaaacactgagagttaagcctttccgtgactggtcacacgcagatctcca

SEQ ID NO: 572533 - DNA, 75 bp, synthetic construct
  source 1..75: mol_type = other DNA
gagtatggtttccgcccccactcatcttattgctgtttttcgtcactgatgtgttgactgcaatcccgcgtttta

SEQ ID NO: 572534 - DNA, 75 bp, synthetic construct
  source 1..75: mol_type = other DNA
ttggggggacacttagcccaactgataaaaatactccctgggaagtaaaaacgggtaatgctgtaactggtctgg

SEQ ID NO: 572535 - DNA, 75 bp, synthetic construct
  source 1..75: mol_type = other DNA
atctgatgcgtgaagggttaaatcgtgcgtgggaaattgttgaaggcaatcgccaactgcgagatggcgagttta

SEQ ID NO: 572536 - DNA, 75 bp, synthetic construct
  source 1..75: mol_type = other DNA
gacttttggcggcatgaacacgggccataaatattacgtttatgtgcgcacgcgtaacgctttcggtgtgtcaga

SEQ ID NO: 572537 - DNA, 75 bp, synthetic construct
  source 1..75: mol_type = other DNA
cagataatataaaaatttcagttaaaagatctttttttaatctattattaacgtatattaaatctggtttaacaa

SEQ ID NO: 572538 - DNA, 75 bp, synthetic construct
  source 1..75: mol_type = other DNA
atttttatggcacgatgattacatagactctgatttcttacaaaaagcagacgaaatattaaacagcaaaaataa

SEQ ID NO: 572539 - DNA, 75 bp, synthetic construct
  source 1..75: mol_type = other DNA
gtggatacgggaggggaagccggggtgacagataacgcctatcgtttctggcgtcgttgccggagtgacggactg

SEQ ID NO: 572540 - DNA, 75 bp, synthetic construct
  source 1..75: mol_type = other DNA
aaagtcatatcttattaagcctcattctagtttgataataaatgctcaagaaaaatcattcataaaaaaaagaat

SEQ ID NO: 572541 - DNA, 75 bp, synthetic construct
  source 1..75: mol_type = other DNA
gggtatagaataattttctttccgcatgccaatatgcaaccatatataagtgagtttaacctaccagaacatata

SEQ ID NO: 572542 - DNA, 75 bp, synthetic construct
  source 1..75: mol_type = other DNA
tcaagctgatgataatgcagaacatttatatcgatatataaatcagaacaggcctgatatatctatattttttgt

SEQ ID NO: 572543 - DNA, 75 bp, synthetic construct
  source 1..75: mol_type = other DNA
gttggctggcgggacgtaagcatggtcgcaggctgatggcagaaacagacgttgaggatgaagaaaccggggaga

SEQ ID NO: 572544 - DNA, 75 bp, synthetic construct
  source 1..75: mol_type = other DNA
tccgtaactgttacagaaaactacacaaatacatcatcagcggcaataaggagaccaggcctagtccttgtcaca

SEQ ID NO: 572545 - DNA, 75 bp, synthetic construct
  source 1..75: mol_type = other DNA
ttggcgtttcgtcggcggcggcctttggcgcagcgctggcgattgttctgggcatcggtattcccggcgttcccg

SEQ ID NO: 572546 - DNA, 75 bp, synthetic construct
  source 1..75: mol_type = other DNA
acccgtttgaaatgctgacgaactctgagactcagttggccagtgcctactataacgtgcgcattggtggcgata

SEQ ID NO: 572547 - DNA, 75 bp, synthetic construct
  source 1..75: mol_type = other DNA
ccgttaacggaaacacaacagcgatcgagacaacatcgaaagcgttaaccgattttaaaggtaacgttgatgcgt

SEQ ID NO: 572548 - DNA, 75 bp, synthetic construct
  source 1..75: mol_type = other DNA
gatttgctccaacctgaaggcattgtaactctgcctgatgaaagcatttatgtcgctagtgaacctgatatcctc

SEQ ID NO: 572549 - DNA, 75 bp, synthetic construct
  source 1..75: mol_type = other DNA
gtatatgtgatttttatagagttactggaagaatagaagaaactatggttattaataattataaggtcaagatgt

SEQ ID NO: 572550 - DNA, 75 bp, synthetic construct
  source 1..75: mol_type = other DNA
ctgatgctgccggggaaaggcgtaacgaaaaaacagcctccgttaccggagagcaagtaggctgaatggagttta

SEQ ID NO: 572551 - DNA, 75 bp, synthetic construct
  source 1..75: mol_type = other DNA
ctgatgctgccggggaaaggcgtaacgaaaaaacagcctccgttaccggagagcaagaaggctgaatgtagttta

SEQ ID NO: 572552 - DNA, 75 bp, synthetic construct
  source 1..75: mol_type = other DNA
gaggcccgcacctcttcgctatcttcttctgacagttcccgccctctctcagcctcagcgttccccgacacactg

SEQ ID NO: 572553 - DNA, 75 bp, synthetic construct
  source 1..75: mol_type = other DNA
cgataccattagcctgcttgatagcgatggtaaatttaaaaaacatcagatcaccggagttaacgggaacaaaat

SEQ ID NO: 572554 - DNA, 75 bp, synthetic construct
  source 1..75: mol_type = other DNA
atgacatcgcgtttgagactttctacacggtgacgaaaaacagagacgcattgctcagggaggcaacacgaattg

SEQ ID NO: 572555 - DNA, 75 bp, synthetic construct
  source 1..75: mol_type = other DNA
aacagtaaacaaaaaaatcaagcattatgcaggctgtttctttttatcaccggccacagcaataccacaatgccg

SEQ ID NO: 572556 - DNA, 75 bp, synthetic construct
  source 1..75: mol_type = other DNA
atgaaacgggagggcggtagcatttctgatattacatgcctcaattttgctgaactattggctatcctggacctc

SEQ ID NO: 572557 - DNA, 75 bp, synthetic construct
  source 1..75: mol_type = other DNA
ccagcaggtagcggcgtgactctggcaagagggctgacaaagtcggtcgcagatgcttttcccgaagggctgccg

SEQ ID NO: 572558 - DNA, 75 bp, synthetic construct
  source 1..75: mol_type = other DNA
gcgcaaaccgtggggcaggacctggaaggtcagttgcgtacataccagggcattctccagctcaatatcattgca

SEQ ID NO: 572559 - DNA, 75 bp, synthetic construct
  source 1..75: mol_type = other DNA
gcctcgaacaatcgctgggatgagaatgcggatatcagcctgggtagcgaagatggatatttgcgcctcatgggt

SEQ ID NO: 572560 - DNA, 75 bp, synthetic construct
  source 1..75: mol_type = other DNA
ctggaggcgatccgcttcctcggtctggaaaagaaaacccgtttttatcaggcttccacttctgaactgtacggt

SEQ ID NO: 572561 - DNA, 75 bp, synthetic construct
  source 1..75: mol_type = other DNA
attgttattcctggtatcgcgacagtaatagaaaagttattggcgggtgaacaacaaaaccttacagaagtacag

SEQ ID NO: 572562 - DNA, 75 bp, synthetic construct
  source 1..75: mol_type = other DNA
cattgtgatttgtggtcattccaactgtggcgcgatgaccgccattgccagctgtcagtgcatggaccatatgcc

SEQ ID NO: 572563 - DNA, 75 bp, synthetic construct
  source 1..75: mol_type = other DNA
atcacaactgatgcgatgggttgccagaaagatatagcagagaagatacaaaaacagggaggtgattatttattc

SEQ ID NO: 572564 - DNA, 75 bp, synthetic construct
  source 1..75: mol_type = other DNA
cattttttacccataaaaaatgcccctccggagaggggcattttttatgggtaaaaaatgcccctccggagaggg

SEQ ID NO: 572565 - DNA, 75 bp, synthetic construct
  source 1..75: mol_type = other DNA
tttttgacaaactcttcaataatgtcgataaagatcagtcattgattgtaacgagccattctcccacgctggcaa

SEQ ID NO: 572566 - DNA, 75 bp, synthetic construct
  source 1..75: mol_type = other DNA
cttgaagatgcatttgcttcactgagccgcgacgatcttgaaatggtcgcaacaactctcgaatcagccacgcag

SEQ ID NO: 572567 - DNA, 66 bp, synthetic construct
  source 1..66: mol_type = other DNA
atgacacaatatcttgacaacatccgtcactgtctgtcagaaaatataccgccaggcataagtatc

SEQ ID NO: 572568 - DNA, 75 bp, synthetic construct
  source 1..75: mol_type = other DNA
ctgatgctgccggggaaaggcgtaacgaaaaaacagcctccgttaccggacagcaagtaggctgaatgcagttta

SEQ ID NO: 572569 - DNA, 75 bp, synthetic construct
  source 1..75: mol_type = other DNA
ggaaagttaaaccgcataagaatggtgggttttatatacctagtgttcatgctaaatatatccttgcatttaaga

SEQ ID NO: 572570 - DNA, 75 bp, synthetic construct
  source 1..75: mol_type = other DNA
aagtatttgaaaaggcttgcagtaatttacgccaggtaatggccctgaacgagcaaggcgtaaacgtcctgtcaa

SEQ ID NO: 572571 - DNA, 75 bp, synthetic construct
  source 1..75: mol_type = other DNA
attcaggcacaatcacaatgttcaagaagtttttctctactgcaaaaattaaacactgataaatttagtatgtat

SEQ ID NO: 572572 - DNA, 75 bp, synthetic construct
  source 1..75: mol_type = other DNA
ggcgctggcatggctagaaaaatacaacggtccggaactgacacttacagcgtttgaaccaccggccagctcata

SEQ ID NO: 572573 - DNA, 75 bp, synthetic construct
  source 1..75: mol_type = other DNA
tggcatacaagatggcgatactgttcggctgtggaactcacgcgggcaaattcttgccggagcggtcattagcga

SEQ ID NO: 572574 - DNA, 75 bp, synthetic construct
  source 1..75: mol_type = other DNA
cgggcagacactctatttagatgccggaacctcattatttgaggtcgcaaaagcaatcgttgccagccagtgctt

SEQ ID NO: 572575 - DNA, 75 bp, synthetic construct
  source 1..75: mol_type = other DNA
ggcgaccgccaccacacagggttcacctcttcatctgacgcaaatggccgtgggcgacggaaacggtaacctgcc

SEQ ID NO: 572576 - DNA, 75 bp, synthetic construct
  source 1..75: mol_type = other DNA
cagtaagaacggtgtatgcaccagcacaaatattgctcttgatctatttcactccatcgtcacaacactgatgtc

SEQ ID NO: 572577 - DNA, 75 bp, synthetic construct
  source 1..75: mol_type = other DNA
atttggaaatatgtccccgctggcgtggcgtaacgatggggaattacagcaatcgtgtaatacaagcaacatccc

SEQ ID NO: 572578 - DNA, 75 bp, synthetic construct
  source 1..75: mol_type = other DNA
catgttatcaggttgttcatctaatagatttgcctctagggatgcaaatgctacgtatgttaatacgcagctaaa

SEQ ID NO: 572579 - DNA, 75 bp, synthetic construct
  source 1..75: mol_type = other DNA
attgccgtcggcaactgcccgccaacctacaagccgcagctaatcgaaggttcgggtcgcacgcagattatccgc

SEQ ID NO: 572580 - DNA, 75 bp, synthetic construct
  source 1..75: mol_type = other DNA
ggcgatattcaactggctggcgctgtcattgaggtcatgggtattgagtcggcaaaaacaatccgcattactacc

SEQ ID NO: 572581 - DNA, 75 bp, synthetic construct
  source 1..75: mol_type = other DNA
accgaaggggatatggtgcgggtgtggaactcccgtgggcagatccttgccggagcggtcattagcgagggaatt

SEQ ID NO: 572582 - DNA, 75 bp, synthetic construct
  source 1..75: mol_type = other DNA
ggcgtttcgccttttgcggtggtgaagcgaacagcgatccccatggcagtcggtttcgtggtgaatatgattgcc

SEQ ID NO: 572583 - DNA, 75 bp, synthetic construct
  source 1..75: mol_type = other DNA
gcccgtactggtgatttaaaagggatcaacgtgaaataccgttatgaattcacggaccatctgggcggcatagcc

SEQ ID NO: 572584 - DNA, 75 bp, synthetic construct
  source 1..75: mol_type = other DNA
ggaaaagccggaacagttctctcagcactacagaattttacgggattgctttatcaggcatggctcttgatgaat

SEQ ID NO: 572585 - DNA, 75 bp, synthetic construct
  source 1..75: mol_type = other DNA
ctgatgctgccggggaaaggcgtaacgaaaaaacagcctccgttaccggaaagcaaggaggctgaatgtagttta

SEQ ID NO: 572586 - DNA, 75 bp, synthetic construct
  source 1..75: mol_type = other DNA
ctgatgctgccggggaaaggcgtaacgaaaaaacagcctccgttaccggaaagcaagtaggctgaatgaagttta

SEQ ID NO: 572587 - DNA, 75 bp, synthetic construct
  source 1..75: mol_type = other DNA
acaaagcgctttatctggtgctgtgcctttctgcctggccggtggcggttgcgacgttaattgggttgcttatcg

SEQ ID NO: 572588 - DNA, 75 bp, synthetic construct
  source 1..75: mol_type = other DNA
taatatctggtgtgaatattgttgagggtggggcattaaccacattccaaagtataataggtgcttttagcaaat

SEQ ID NO: 572589 - DNA, 75 bp, synthetic construct
  source 1..75: mol_type = other DNA
atgagtctgatggttttctgtacagcctgttccgtggatggtgtccagactcgcgagcatggtcacacgtcacgc

SEQ ID NO: 572590 - DNA, 75 bp, synthetic construct
  source 1..75: mol_type = other DNA
cacagaaggctgacaagtgatgctcccggtggaaagagaggtcaggcgtggctgagtctgatgcaggaaaaagcc

SEQ ID NO: 572591 - DNA, 75 bp, synthetic construct
  source 1..75: mol_type = other DNA
tataaacggggaaaaagcacctttggttttttattttttagggcttttagtttcatattcatctgtgagggaaat

SEQ ID NO: 572592 - DNA, 75 bp, synthetic construct
  source 1..75: mol_type = other DNA
caggcttaaaagggctaatggttttcggtacctggctgatataagcgattttgaaaaacaggatgtgcttgattg

SEQ ID NO: 572593 - DNA, 75 bp, synthetic construct
  source 1..75: mol_type = other DNA
tcaaatgttaagtactcgaaaccctcaggcttatgctaagttaaatatcatacttacaattgatggcgaagaaaa

SEQ ID NO: 572594 - DNA, 75 bp, synthetic construct
  source 1..75: mol_type = other DNA
gagagccgggtaatcatcacggacagcctgaaccggcgggaggtgctgtacacggagggcgaaggtggcctgaag

SEQ ID NO: 572595 - DNA, 75 bp, synthetic construct
  source 1..75: mol_type = other DNA
gttacctctggagcgccagcgggctatcgccaacattgtctatagcaagcggttgggtaacagcagggcaactga

SEQ ID NO: 572596 - DNA, 75 bp, synthetic construct
  source 1..75: mol_type = other DNA
aagcacaaattgccagtgccgcgcagtccatttgccagcgtgccggttaccgcagcgcaggcacggtagagtttt

SEQ ID NO: 572597 - DNA, 75 bp, synthetic construct
  source 1..75: mol_type = other DNA
attttattaaggttgcatgttcgaatgccgttaaagattattgtacggaaagattttctttaaaaggaatgattg

SEQ ID NO: 572598 - DNA, 75 bp, synthetic construct
  source 1..75: mol_type = other DNA
tacgctattaatacatatttaaaatattatacaggagcaattatgggacagaagtatgatgatgtttataatttg

SEQ ID NO: 572599 - DNA, 75 bp, synthetic construct
  source 1..75: mol_type = other DNA
gtacgaccggtacggtcaacaaaccgccgttcaccgggaagaaggcatcagcacttacagcagttataacccgcg

SEQ ID NO: 572600 - DNA, 75 bp, synthetic construct
  source 1..75: mol_type = other DNA
tgataaaaatacgcttgatttttattcagaactgtttcgtgaaatggaacaaaaggacctattagatagtaactt

SEQ ID NO: 572601 - DNA, 75 bp, synthetic construct
  source 1..75: mol_type = other DNA
agacgacgtcgaaagcgttaaccgacttcaaaggtaatgttgatgcgacgtactctatcaagctggcaaccgaca

SEQ ID NO: 572602 - DNA, 75 bp, synthetic construct
  source 1..75: mol_type = other DNA
gtatttctcctgcagataaagacagaattttcactgcaggatttacaatgcgacctaaagggcagggtttgggtc

SEQ ID NO: 572603 - DNA, 75 bp, synthetic construct
  source 1..75: mol_type = other DNA
caggttgaacacccaataactgaagaaaccagcggtctggatctggtcaaagaacagctacgcgttgcccatggg

SEQ ID NO: 572604 - DNA, 75 bp, synthetic construct
  source 1..75: mol_type = other DNA
ccggtacttgctgcccgcaacggagtgctgtcaatccagattgctgcaggagaaagctgccagcaggatggtgtg

SEQ ID NO: 572605 - DNA, 75 bp, synthetic construct
  source 1..75: mol_type = other DNA
ttaattttaacgacagaaaagtaaatattgaagttgttacgccatttataactaaacaagaggaggcttcttgga

SEQ ID NO: 572606 - DNA, 75 bp, synthetic construct
  source 1..75: mol_type = other DNA
cataaaaatgatgactctgtgaatttttattatttgggtgtaataaataaacggaaaaatgttgaggttattctt

SEQ ID NO: 572607 - DNA, 75 bp, synthetic construct
  source 1..75: mol_type = other DNA
gaaggcggattacaacgaacacggccaggtgatacgggagacggacccggaagggcgcgtcacgcggtacgggta

SEQ ID NO: 572608 - DNA, 75 bp, synthetic construct
  source 1..75: mol_type = other DNA
aaaaccattttccggtagcggtggaactccccggcgaacgcagggtaacgctggaatacgacaccctgagccggg

SEQ ID NO: 572609 - DNA, 75 bp, synthetic construct
  source 1..75: mol_type = other DNA
caccactgggcaaaaaattttgctgccggagacggattttaccctgccaggacgcctgcctgtcacctgttcgcg

SEQ ID NO: 572610 - DNA, 75 bp, synthetic construct
  source 1..75: mol_type = other DNA
cgttggaggaccaagcatgtgggatctctggaagtgtgcaatgtggagtgaatcttctataaacgaggatggtca

SEQ ID NO: 572611 - DNA, 75 bp, synthetic construct
  source 1..75: mol_type = other DNA
tatcagcaagcctttattcaacctcacttagaattactttcaagattgttagatttcttgagaaaaagaaataac

SEQ ID NO: 572612 - DNA, 75 bp, synthetic construct
  source 1..75: mol_type = other DNA
ttctgagtccgctgcatgatgtctttggcgatgagcacgagtaccgtccacgtaacggtactccttttacaatta

SEQ ID NO: 572613 - DNA, 75 bp, synthetic construct
  source 1..75: mol_type = other DNA
atgacgatgagcccggagatcttcctttctatttggttacttttgtaaatgagggggatgaggatgatatgtcgg

SEQ ID NO: 572614 - DNA, 75 bp, synthetic construct
  source 1..75: mol_type = other DNA
cgtcctgtgatgacatttcgcgcacccaacaccttttctggtcatccacttcctgatgtcgctgttaaatcagag

SEQ ID NO: 572615 - DNA, 75 bp, synthetic construct
  source 1..75: mol_type = other DNA
aagctgagggattgccattagctcttattgaatcactttcattaggaaaagcatttatctgctcggacatagaac

SEQ ID NO: 572616 - DNA, 75 bp, synthetic construct
  source 1..75: mol_type = other DNA
aaagggggattatggtaaaatgcctacgttccctggttggcagaaacatcataatattccacaaaatatggctac

SEQ ID NO: 572617 - DNA, 75 bp, synthetic construct
  source 1..75: mol_type = other DNA
attacagctatccctgaacttcttaacatgctggatattaaaggaaaaatcatcacaactgatgcgatgagttgc

SEQ ID NO: 572618 - DNA, 75 bp, synthetic construct
  source 1..75: mol_type = other DNA
atttagacgacgcactggactttgatcttttcgaaggtgatttcggtacgccatgcgatacagaactatcgaaca

SEQ ID NO: 572619 - DNA, 75 bp, synthetic construct
  source 1..75: mol_type = other DNA
ctaaagctttattaacgaagctagattcggaaattaaagcgatcaatacgcgacttcgacagttagatcctttaa

SEQ ID NO: 572620 - DNA, 75 bp, synthetic construct
  source 1..75: mol_type = other DNA
gtggcgaaggatacccagcaagcctacggcacacctgctgttgatgagaacgaggtcagggaagcgggagaactt

SEQ ID NO: 572621 - DNA, 75 bp, synthetic construct
  source 1..75: mol_type = other DNA
ccagagccaaaagaaccgcctaacccggacgataaggtgacaaccgatgatccactggccgatgacaccagaaca

SEQ ID NO: 572622 - DNA, 75 bp, synthetic construct
  source 1..75: mol_type = other DNA
gcagcggttacctggcaggcatgaaactcggcgacacaccgctggtggatttcacccgcgaccgcctgcaccggg

SEQ ID NO: 572623 - DNA, 75 bp, synthetic construct
  source 1..75: mol_type = other DNA
gcctctcgctgatcactcagaacaacatcaacaaaaaccagtcttcaatgtctactgccattgagcgtttgtctt

SEQ ID NO: 572624 - DNA, 75 bp, synthetic construct
  source 1..75: mol_type = other DNA
ggtgacctcggtgcggtgcagaaccgtttcgattctaccatcaccaacctgggtaacaccgttaacaacctgact

SEQ ID NO: 572625 - DNA, 75 bp, synthetic construct
  source 1..75: mol_type = other DNA
acaaaccaaaacctgatcctctggccgaccctcaaccagaagccgaaaagtccggtgataccacggtcgaaagtt

SEQ ID NO: 572626 - DNA, 75 bp, synthetic construct
  source 1..75: mol_type = other DNA
cattaaagcgaattggcttcgctggcaaactagtagcccatggtctacgttctattgcaagcaccgccttaaacg

SEQ ID NO: 572627 - DNA, 75 bp, synthetic construct
  source 1..75: mol_type = other DNA
gtattaacccgctagataccgtgtcattagccggtccgctgtattttctggatgcggatgatgaacgacaggtgg

SEQ ID NO: 572628 - DNA, 75 bp, synthetic construct
  source 1..75: mol_type = other DNA
gtgaagtggatgtggtgcgggctgttgataagcctgccactggcagcgaaggatctgggtgtacagggtgacctc

SEQ ID NO: 572629 - DNA, 75 bp, synthetic construct
  source 1..75: mol_type = other DNA
atatcctattgaccaggccagtagtgcgcctaatgttttcaaaacattcttcagagtattaagcccttacgacta

SEQ ID NO: 572630 - DNA, 75 bp, synthetic construct
  source 1..75: mol_type = other DNA
atgagcgttggatctaccggatacgacacgcaactggattacgtggttaaggggacttattccggcggtatcgct

SEQ ID NO: 572631 - DNA, 75 bp, synthetic construct
  source 1..75: mol_type = other DNA
ttatagtgttttcattattgggattttttttcataaacctgatggttttcatttttctattgctttactatgttt

SEQ ID NO: 572632 - DNA, 75 bp, synthetic construct
  source 1..75: mol_type = other DNA
tacgcatattgtaccgcgttgtattctccaacaatgatagtagcaagaggcaccggatcatttagcacatcaacg

SEQ ID NO: 572633 - DNA, 75 bp, synthetic construct
  source 1..75: mol_type = other DNA
aggccgctcgttgaagcaggaacccaccgaaatgattcaggcgacagcctgaacgtagcagggatcctcgtcatt

SEQ ID NO: 572634 - DNA, 75 bp, synthetic construct
  source 1..75: mol_type = other DNA
ttaaagcgtcaataagcaatcttgaaagcaaaactgacgcaagtgtttcccgtctcgacaaggctatcgctgacg

SEQ ID NO: 572635 - DNA, 75 bp, synthetic construct
  source 1..75: mol_type = other DNA
actgattaccgccacgccagagttagtcactgacgtcattcccagggttaatgctaaagcgcaggcatcttatct

SEQ ID NO: 572636 - DNA, 75 bp, synthetic construct
  source 1..75: mol_type = other DNA
gcgccttttatggctggagaccgccatggtgtaaataacctccatgttgcatgggttcgctcaggagatgacggg

SEQ ID NO: 572637 - DNA, 75 bp, synthetic construct
  source 1..75: mol_type = other DNA
tttttacctcttttttcaacatgttgaaattcgccagacagtgtctggcgaattaacacctgccctggtccactt

SEQ ID NO: 572638 - DNA, 75 bp, synthetic construct
  source 1..75: mol_type = other DNA
cgcaaaaaaatcctccgtgatgctcgtcacaaatcttgccctcccgatgttgtgctatgctttttatcagcgact

SEQ ID NO: 572639 - DNA, 75 bp, synthetic construct
  source 1..75: mol_type = other DNA
gctaatgatggtacagtgacaatggcgactggagcaacggcaaatgcaactgtaactgatgcaaatactactaaa

SEQ ID NO: 572640 - DNA, 75 bp, synthetic construct
  source 1..75: mol_type = other DNA
tagcgtggcgtggcgtaacggcacgttagatcaatcacctattaacggttttaacgccattgaatcaaccgttat

SEQ ID NO: 572641 - DNA, 75 bp, synthetic construct
  source 1..75: mol_type = other DNA
acaataaccgcgcaggcgcgcgtttaggcggtcgtatcgtggcgaacaatgggaaagtgataacggtcgataagg

SEQ ID NO: 572642 - DNA, 75 bp, synthetic construct
  source 1..75: mol_type = other DNA
ggaaaacgaatcacccggatgcgattcaaattctgatcctcggtgtaattggcaagaaaaagcacctggaatatt

SEQ ID NO: 572643 - DNA, 75 bp, synthetic construct
  source 1..75: mol_type = other DNA
gcttatccagaaaactggcagcaggcttttgctgagttacaaatgcgagttcagggtaatcaacagacagggagt

SEQ ID NO: 572644 - DNA, 75 bp, synthetic construct
  source 1..75: mol_type = other DNA
gatcctgcaacaagcgggtacctctgttctggcgcaggctaaccagaccacgcagaacgtactgtctctgctgcg

SEQ ID NO: 572645 - DNA, 75 bp, synthetic construct
  source 1..75: mol_type = other DNA
aaaaggtagcacttcattggaagttgatatcaaggcgatttacgaggagtttgttccctgcctggcgtatatgct

SEQ ID NO: 572646 - DNA, 75 bp, synthetic construct
  source 1..75: mol_type = other DNA
aagcgctggatgacagcgatgttaaagcggaattaagcgtgtttgttggcgctgagagtggtgcaaatgtcgatg

SEQ ID NO: 572647 - DNA, 75 bp, synthetic construct
  source 1..75: mol_type = other DNA
tctgtcctgaatatcatgaaagtatcagggaagcgtgaaaaacgccacgttgttccgtttaagattctggaaatg

SEQ ID NO: 572648 - DNA, 75 bp, synthetic construct
  source 1..75: mol_type = other DNA
ttttgctgcaaccttagcgctgggtggaaagaaggtattggttatcgatgctgaccttcgtaagggttacatgca

SEQ ID NO: 572649 - DNA, 75 bp, synthetic construct
  source 1..75: mol_type = other DNA
gctcttctcgccacaccaatttataaagccaacgcattactgcaagttgaaaaaaaaaccagtggtgcagctctg

SEQ ID NO: 572650 - DNA, 75 bp, synthetic construct
  source 1..75: mol_type = other DNA
gttgtatgagtggctccaggggcagatgagcacgctgtcgcgtcactcggatacggcgaaagcgttcacctatct

SEQ ID NO: 572651 - DNA, 75 bp, synthetic construct
  source 1..75: mol_type = other DNA
ccagaacggtaccgctaatgcagtcgttgtatgagtggctccaggggcagatgagcacgctgtcgcgtcactcgg

SEQ ID NO: 572652 - DNA, 75 bp, synthetic construct
  source 1..75: mol_type = other DNA
cgggtcagggtaaaacccgtaccggacggctgtgggtctatgttcgtgacgatcgcaacgccggttcgaccatgc

SEQ ID NO: 572653 - DNA, 75 bp, synthetic construct
  source 1..75: mol_type = other DNA
aggcaattaacagtagcaatggagacaaactgaaatacgccctgccggaagcccgcggttcggcgattgccgcca

SEQ ID NO: 572654 - DNA, 75 bp, synthetic construct
  source 1..75: mol_type = other DNA
aatcacatgaatcgatagtttctatggacgagatcaatagtatccttcttagtagtagttggtttcgggcgctac

SEQ ID NO: 572655 - DNA, 75 bp, synthetic construct
  source 1..75: mol_type = other DNA
atggctgaggagtgcagggaaattgttttctggacgctgcgaaaaaaatttatcgccagtagcgacgagatgccg

SEQ ID NO: 572656 - DNA, 75 bp, synthetic construct
  source 1..75: mol_type = other DNA
aggcaatccgatcaaagtttctgaagggctggaatttgtacagtcaggtaccaacgtgccctatgtgcaagttag

SEQ ID NO: 572657 - DNA, 75 bp, synthetic construct
  source 1..75: mol_type = other DNA
cggtataaaatcggatatgctggatatttcatcgtcatctggggtgaaaattgttactatcatgggtggggcggg

SEQ ID NO: 572658 - DNA, 75 bp, synthetic construct
  source 1..75: mol_type = other DNA
cttacaggaggggaaggaaacgatactctgaagattaatggttctttcaaattgttaaatatgaaaaatatatct

SEQ ID NO: 572659 - DNA, 75 bp, synthetic construct
  source 1..75: mol_type = other DNA
agcttggcaaaatattgatttgatgatagagacaactaaacggacatataataaaaatatcaaattcaacttttt

SEQ ID NO: 572660 - DNA, 75 bp, synthetic construct
  source 1..75: mol_type = other DNA
gttttaaattaatacatgttacttcatcaatgaaaaagttttatgaagataaataccatatctgtttggacaaaa

SEQ ID NO: 572661 - DNA, 75 bp, synthetic construct
  source 1..75: mol_type = other DNA
ttgttgaatctgttggagaaagagttgagtaaaatttcaaatgcgcaggattctttgatttatatgtatgcagag

SEQ ID NO: 572662 - DNA, 75 bp, synthetic construct
  source 1..75: mol_type = other DNA
gcgatccgaaattttcaaatcaacagttttttcttttcatgccaggggttgaatctggggaatggtgtccgcgat

SEQ ID NO: 572663 - DNA, 75 bp, synthetic construct
  source 1..75: mol_type = other DNA
atgatcgtgaatcaattttttggctaaatatactggatatttcagctaaacctaaatttgaaaataaaaataatt

SEQ ID NO: 572664 - DNA, 75 bp, synthetic construct
  source 1..75: mol_type = other DNA
tagccgaatcagctgtagcattatgtaaaaaatatggaataaagcttattgaagattgtaataactcctatttta

SEQ ID NO: 572665 - DNA, 75 bp, synthetic construct
  source 1..75: mol_type = other DNA
ttcgggcggcgtatatccaccgggctgaacatctcgacgcccgtacagccatgatgcagtggtggtcggattatc

SEQ ID NO: 572666 - DNA, 75 bp, synthetic construct
  source 1..75: mol_type = other DNA
aggtcattggtcttggtggtcgcctgtataaaaactctttagtgttgattggcgcagagactattcgcgaacttg

SEQ ID NO: 572667 - DNA, 75 bp, synthetic construct
  source 1..75: mol_type = other DNA
actggaaaaaaccgccgacgaggtaatcgaactgatcgcctccgcccaatgcgaagacggctatctcaatactta

SEQ ID NO: 572668 - DNA, 75 bp, synthetic construct
  source 1..75: mol_type = other DNA
acgcagatccaccttggacattccgcgacaaagcaaccgatggtcaacgcggtgcaagttttaaatatccggtca

SEQ ID NO: 572669 - DNA, 75 bp, synthetic construct
  source 1..75: mol_type = other DNA
aagcacttcgtaaacttgagcaacgtgtattaaatacgctcaatgaattttctggttatactcatgttatggtta

SEQ ID NO: 572670 - DNA, 75 bp, synthetic construct
  source 1..75: mol_type = other DNA
tctcttctgaaatatttatctttcttgataattgatgataaatacagatacaaatttagcgaaaagttttccccc

SEQ ID NO: 572671 - DNA, 75 bp, synthetic construct
  source 1..75: mol_type = other DNA
agtccgttgctgctatggttgcttatattatcgccctttccttgatggccaacaccaggatgtactagatagcat

SEQ ID NO: 572672 - DNA, 75 bp, synthetic construct
  source 1..75: mol_type = other DNA
agaaaatacaatctggtggaccttcgcaatgccactgttctggggctaagttatgtcacaggtagtcgtccggtt

SEQ ID NO: 572673 - DNA, 75 bp, synthetic construct
  source 1..75: mol_type = other DNA
accaatactgtcacatcattggacacaagcattcagttactgcagaggaaatggcggttttacattacttatatt

SEQ ID NO: 572674 - DNA, 75 bp, synthetic construct
  source 1..75: mol_type = other DNA
catggggaacccctgttctgaccaacaggcaatagaaatggatgcggcagtagagagtcttatgactatgcctgt

SEQ ID NO: 572675 - DNA, 60 bp, synthetic construct
  source 1..60: mol_type = other DNA
atgtggtttatgaagacattactaacatcgcggtgtattaatcaacggggagcaggtcaa

SEQ ID NO: 572676 - DNA, 75 bp, synthetic construct
  source 1..75: mol_type = other DNA
atctaaccgagttcacaataagtgagataagtgatattggcatgtatcgtcgcgtagcgaaagggaatcatgcat

SEQ ID NO: 572677 - DNA, 75 bp, synthetic construct
  source 1..75: mol_type = other DNA
cgctgactgtgggcgtggcgtatcagacgacggtaggtggcattatgaacacctcggtggccctgatgcagtcct

SEQ ID NO: 572678 - DNA, 75 bp, synthetic construct
  source 1..75: mol_type = other DNA
cgcggggcacggaatgctgctgggtgcgactggtgcggggaaaaccacgtttgaaatgatggccgccgcgtttat

SEQ ID NO: 572679 - DNA, 75 bp, synthetic construct
  source 1..75: mol_type = other DNA
atgtcgataaagaaaataaccaataatttcattcctccttatcactcacatattcatgaaaatatcatctggctt

SEQ ID NO: 572680 - DNA, 75 bp, synthetic construct
  source 1..75: mol_type = other DNA
atgactttaaaaacaaatcgtgccagccgatatattcgcgccgttgtcgaagcagctgagggacaatggcccctt

SEQ ID NO: 572681 - DNA, 75 bp, synthetic construct
  source 1..75: mol_type = other DNA
acctggacggttcagcaggcgctaacgtgtatgcacagcttgcgaagattcgccgcatgttggttaaagagtacg

SEQ ID NO: 572682 - DNA, 75 bp, synthetic construct
  source 1..75: mol_type = other DNA
agcgctgttgcagagcttgagcaggtctcccgctacggcaccgaagtaaacagcatcaagatggataaaaccatc

SEQ ID NO: 572683 - DNA, 75 bp, synthetic construct
  source 1..75: mol_type = other DNA
tgttgcgctaatgctgcttaatggcatcgcgcgaaaaattaaattcaaagcattacaggaacatgcccgcgagaa

SEQ ID NO: 572684 - DNA, 75 bp, synthetic construct
  source 1..75: mol_type = other DNA
tactttggtattaccttcagaaattgctgaaagtgatttctccagggatatttatacttatctcgaaaatgtttt

SEQ ID NO: 572685 - DNA, 75 bp, synthetic construct
  source 1..75: mol_type = other DNA
gggctatggggcgctcagggatattttttcccatcaattccgctgacggagattgagtccatagatagtaagtgg

SEQ ID NO: 572686 - DNA, 75 bp, synthetic construct
  source 1..75: mol_type = other DNA
ttgaccgttacaacatggtaaccatccatcaggaatcaagtcatattcctctggtactgcgtccgtcctacctgc

SEQ ID NO: 572687 - DNA, 75 bp, synthetic construct
  source 1..75: mol_type = other DNA
gctggtacgtcacttaacccgacggctgttatggggggtatatactgaggaaaacacgctgattgcctgcttccg

SEQ ID NO: 572688 - DNA, 75 bp, synthetic construct
  source 1..75: mol_type = other DNA
acgcgcgaagctacattcgcgccgttgttaaggcagcggaagggcaatggccccttattctgcatcggcttgtga

SEQ ID NO: 572689 - DNA, 75 bp, synthetic construct
  source 1..75: mol_type = other DNA
gttcggctccccggtcagcacataccaggccgccaggctggtgggtaatgtgctgggtattgtcgaagccacacc

SEQ ID NO: 572690 - DNA, 75 bp, synthetic construct
  source 1..75: mol_type = other DNA
ccgcgcgtaaattaaccccgcttatccgcgcctggcctggggaatcccagcataaacgggcggtgtccgggctgg

SEQ ID NO: 572691 - DNA, 75 bp, synthetic construct
  source 1..75: mol_type = other DNA
tctttctcagggagtttagtctccaggatttccggggcggttcactggctgaatttggctgggatctgtatcccg

SEQ ID NO: 572692 - DNA, 75 bp, synthetic construct
  source 1..75: mol_type = other DNA
gcatatgctggaaatcccccctgaatctgccgctgcattcaggcaaatttacgctgattacgaactgcttccccc

SEQ ID NO: 572693 - DNA, 75 bp, synthetic construct
  source 1..75: mol_type = other DNA
gcaccccaaaagttggacactcaacgaagtaaggtgcagttttttatgagtaaatattctctcagctttaagctt

SEQ ID NO: 572694 - DNA, 75 bp, synthetic construct
  source 1..75: mol_type = other DNA
ttgtagagtgtattagtttcatattacttctctgcagcttttttatgataaaaaagatgcgtcctaaaaaaacat

SEQ ID NO: 572695 - DNA, 75 bp, synthetic construct
  source 1..75: mol_type = other DNA
gatctctattcagataatggtgaaacattactggctcgccgtggcgctatgctgatgggagagcagaataaagta

SEQ ID NO: 572696 - DNA, 75 bp, synthetic construct
  source 1..75: mol_type = other DNA
gggcgactcaatggcagtgtgcaagaaggatttgagctatggagtaactttgattggattggtacatcgcctttt

SEQ ID NO: 572697 - DNA, 75 bp, synthetic construct
  source 1..75: mol_type = other DNA
gaacagaaccgcagcgatattgctgacagaccgaccgcgacaacgggcaggataccgccattcaggacgcacaac

SEQ ID NO: 572698 - DNA, 75 bp, synthetic construct
  source 1..75: mol_type = other DNA
accaatacgctgaacccgataaccaatcaagcgcagaccgaccgcgacaacgggcaggataccgccattcaggac

SEQ ID NO: 572699 - DNA, 75 bp, synthetic construct
  source 1..75: mol_type = other DNA
agacagcttgatgattatgcggcaataattcaaagacatccggggtttagtagtcaaaatttgcattttgagctc

SEQ ID NO: 572700 - DNA, 75 bp, synthetic construct
  source 1..75: mol_type = other DNA
agaactattgccagtcttaaagaaaaaaatatataaggatctaagaagtaagtatttaaccttgcttcgtgaagg

SEQ ID NO: 572701 - DNA, 75 bp, synthetic construct
  source 1..75: mol_type = other DNA
tgaaattcctgttgcaataacaaaatctgttgtagaatatttccgaaataaaggtattaattttaaagtgattac

SEQ ID NO: 572702 - DNA, 75 bp, synthetic construct
  source 1..75: mol_type = other DNA
atttctttgctgtttcacaacctgacctgttgtcgctgtatggcgatttacaacagcagcataaagaaaaatgcc

SEQ ID NO: 572703 - DNA, 75 bp, synthetic construct
  source 1..75: mol_type = other DNA
caaaaaagaaggcttgtagtggacaagcttcgttatttaatggatcatcattataaggaaataagagagactcca

SEQ ID NO: 572704 - DNA, 75 bp, synthetic construct
  source 1..75: mol_type = other DNA
atattaatattccgtatcaagagcagcattcaacattaatcggacaaaaaagtggcacatgtgtcatgttgaatc

SEQ ID NO: 572705 - DNA, 75 bp, synthetic construct
  source 1..75: mol_type = other DNA
gcaggaattgttcgaaggtatagtggcggtgattgccgtggtgatcctcacctggatggttttctggatgcgtaa

SEQ ID NO: 572706 - DNA, 75 bp, synthetic construct
  source 1..75: mol_type = other DNA
tttcatgattatttgattagagaaaaaattaatgtaccggttattaacgcatgggttgaagggtatggtataggt

SEQ ID NO: 572707 - DNA, 75 bp, synthetic construct
  source 1..75: mol_type = other DNA
ttaacctttaataaagaaaggattatgccaagaagtggcgcgaaacaatcccttaatagcaagaaagttatgctt

SEQ ID NO: 572708 - DNA, 75 bp, synthetic construct
  source 1..75: mol_type = other DNA
ggatcaacaaatgatagacggtaatgcagattgtaacgctcgcggcgttacaaaaagtgcaatagatcgcatcac

SEQ ID NO: 572709 - DNA, 75 bp, synthetic construct
  source 1..75: mol_type = other DNA
ttttttgataaagcaaaaaaaattattgaaaatgataatactgaaataattttccataaaaatgataaaaactat

SEQ ID NO: 572710 - DNA, 75 bp, synthetic construct
  source 1..75: mol_type = other DNA
gagttaggtaatattgatgccattaaaaattttggtttggcggaaacaactacagtaaaaagagatagtcgtgag

SEQ ID NO: 572711 - DNA, 75 bp, synthetic construct
  source 1..75: mol_type = other DNA
gaacaaatacggaatgcttggtttactctttgttcaagtgctgagttcaaaaaaactttatcaggtgggctacag

SEQ ID NO: 572712 - DNA, 75 bp, synthetic construct
  source 1..75: mol_type = other DNA
cgatctgataatgaatctggtaatggggacgatgtttatggtgttgccggcagtctggcttggtgctctgtcgtg

SEQ ID NO: 572713 - DNA, 75 bp, synthetic construct
  source 1..75: mol_type = other DNA
gctgcagccccggtatggtgggtggtggttcataaattgtcgaaaggtgtcacccaggcggcagtggcttcgatt

SEQ ID NO: 572714 - DNA, 75 bp, synthetic construct
  source 1..75: mol_type = other DNA
tgatagctttggtgagcatattactcttgatgacaacccactccgcgctgccatgattgtctttctcatgatgca

SEQ ID NO: 572715 - DNA, 75 bp, synthetic construct
  source 1..75: mol_type = other DNA
agttgacttctcgcagagtcaacttggtcatagtaatttatatgaacgcatcccgtttgcaaggcatccattgtt

SEQ ID NO: 572716 - DNA, 75 bp, synthetic construct
  source 1..75: mol_type = other DNA
cagtgctgttgctgcactgggggcgtttccggcgcttgatgcgatgcgacaggcgctgccaatggtacaggccat

SEQ ID NO: 572717 - DNA, 75 bp, synthetic construct
  source 1..75: mol_type = other DNA
gtccgacggctggtgagtccgaagagtctgacagtctctcaggacggtgaggtttaccgtggatatggtggtaat

SEQ ID NO: 572718 - DNA, 75 bp, synthetic construct
  source 1..75: mol_type = other DNA
aaagacgtccgcaactgcgggcagcgctggccgcgtgtaaaaaaaaaggtgctaatttgctaatcgctaagcttg

SEQ ID NO: 572719 - DNA, 75 bp, synthetic construct
  source 1..75: mol_type = other DNA
tgctacaacaagttacagatcccggtacagcgcagtctggcgcgttatgctgactggctgaaagattttaaatag

SEQ ID NO: 572720 - DNA, 75 bp, synthetic construct
  source 1..75: mol_type = other DNA
gattttcaaagccggtaattctatctacggggatgggatatttatctgaagttgaacacgctattgaaacattat

SEQ ID NO: 572721 - DNA, 75 bp, synthetic construct
  source 1..75: mol_type = other DNA
cagattatgaccgtatgatgatacagcaactcagaaatcatttcgaaataaaaaacattacctatccagaaggac

SEQ ID NO: 572722 - DNA, 75 bp, synthetic construct
  source 1..75: mol_type = other DNA
gcgaaaagtggtatcaaacactcgcctggtgggcgctgcctgctgctgttgcgctctttgcctggtggtggcaga

SEQ ID NO: 572723 - DNA, 75 bp, synthetic construct
  source 1..75: mol_type = other DNA
ccaagttatttcttgccgctcgttccgatggtataggaaaagcctgtctgtggtgcatgtcgtatttaagaaata

SEQ ID NO: 572724 - DNA, 75 bp, synthetic construct
  source 1..75: mol_type = other DNA
aacctatacagcaagacatgtttcatatcctgatgatttggggtatctcctggctgttggcggtgtggatgttca

SEQ ID NO: 572725 - DNA, 75 bp, synthetic construct
  source 1..75: mol_type = other DNA
actcgtgttcctctctgtgggtctctatatggtcctctccggtcgactcggtgtgaatgtattcgacactctgtc

SEQ ID NO: 572726 - DNA, 75 bp, synthetic construct
  source 1..75: mol_type = other DNA
tacatggtcctctctggtcgactcggtgtggatgtgttcgacactctgtctaaggctgtgggtggacttctaggt

SEQ ID NO: 572727 - DNA, 75 bp, synthetic construct
  source 1..75: mol_type = other DNA
gtgaggaaagccgccgctggctggcatcgtgcggcctgaccgtggagcagatgcaaaaccagatggacccggtat

SEQ ID NO: 572728 - DNA, 75 bp, synthetic construct
  source 1..75: mol_type = other DNA
gccatgctctggcgattaagggggttaaatgccacgctaagcgaccagcttccccatagcctggcgattaagggg

SEQ ID NO: 572729 - DNA, 75 bp, synthetic construct
  source 1..75: mol_type = other DNA
tgcacaaacgctacggctggtggtcgatcttaccgaaaacggtaaaaccgaagcggtgaagcggcagaatggcag

SEQ ID NO: 572730 - DNA, 75 bp, synthetic construct
  source 1..75: mol_type = other DNA
tgatggggctgtggtccgcggctctgatgggcggcggtggacttggtgccgccattacgccctggttagttcaac

SEQ ID NO: 572731 - DNA, 75 bp, synthetic construct
  source 1..75: mol_type = other DNA
ttttaatgcagcgattttcaaataattttgttcgcattggtgtagataatcacgaccataaactcttaaccaata

SEQ ID NO: 572732 - DNA, 75 bp, synthetic construct
  source 1..75: mol_type = other DNA
taactgatcgtgtcaatgacataataaatgacagattctggagtgatgggaaaaaacccgacagatgtgacgtac

SEQ ID NO: 572733 - DNA, 75 bp, synthetic construct
  source 1..75: mol_type = other DNA
agctattgaaaggtcggattgatctaggttttatgcgcaaatcaggagaagataacttatcgttcataccacttg

SEQ ID NO: 572734 - DNA, 75 bp, synthetic construct
  source 1..75: mol_type = other DNA
tcaagaatataatagattcgccgacaatactactgatacgtttatctttacaattataccagacaataaccatgt

SEQ ID NO: 572735 - DNA, 75 bp, synthetic construct
  source 1..75: mol_type = other DNA
gtgactacgtatgatttcgttgatcagcagcttgttcccgtcgatatcaaccgtgtgtatgtttgtgatgcgcat

SEQ ID NO: 572736 - DNA, 75 bp, synthetic construct
  source 1..75: mol_type = other DNA
cattggtaatgaaaataagatgtattatatattcacaaccatcacgaatatggaaaatgaaagatattgggcagt

SEQ ID NO: 572737 - DNA, 75 bp, synthetic construct
  source 1..75: mol_type = other DNA
ttgctaataatcttcatccaaccagcggtgcggcggcgctctcttacgccactgtctatccgttagtgatgttcc

SEQ ID NO: 572738 - DNA, 75 bp, synthetic construct
  source 1..75: mol_type = other DNA
gcgctctttgcctggtggtggcaaagctcccgcgaggtcgcctcttcccacaagacaacaaccactccggttcgc

SEQ ID NO: 572739 - DNA, 75 bp, synthetic construct
  source 1..75: mol_type = other DNA
ctgacgccctggttagttcaacacagcgagatttggttccagactctcgcctggtgggcgctgcctgccattatt

SEQ ID NO: 572740 - DNA, 75 bp, synthetic construct
  source 1..75: mol_type = other DNA
gtcaattgtcgtttataaaacttatgagcaaaactctaatgaccttataacattaatagaaaaagccattgacat

SEQ ID NO: 572741 - DNA, 75 bp, synthetic construct
  source 1..75: mol_type = other DNA
acaataaataaagaagacattcttttcacttgtttattcctgggtggtgtattgatttcaatattttttaaaaaa

SEQ ID NO: 572742 - DNA, 75 bp, synthetic construct
  source 1..75: mol_type = other DNA
acaggttcagatgctgccggtgtttattggtatcgggcttggcgtattgttaggttctattcccgtctttgtgcc

SEQ ID NO: 572743 - DNA, 75 bp, synthetic construct
  source 1..75: mol_type = other DNA
cgcgaaaccattttgggatcagcagggaagaggctgaaaaccttaccatgaccgaattcgccatgatgcttaacg

SEQ ID NO: 572744 - DNA, 75 bp, synthetic construct
  source 1..75: mol_type = other DNA
ttttgtgcgtgaggcgcttctctcggccatcaatgtcattcaatcctgctgcgatgaagatgtttccgagttaac

SEQ ID NO: 572745 - DNA, 75 bp, synthetic construct
  source 1..75: mol_type = other DNA
agaatgcttgatgcggcgagagaaattcacagcgctatacctgagcatcagcgcaagttctacgcccactatttc

SEQ ID NO: 572746 - DNA, 75 bp, synthetic construct
  source 1..75: mol_type = other DNA
gcaggcaccggttttggccacctggcgataccgcgtgtgggtcaggaggtgattgtggacttcctcaacggcgat

SEQ ID NO: 572747 - DNA, 75 bp, synthetic construct
  source 1..75: mol_type = other DNA
aggcaaggctggtgctgacgaaggacggacaaatttttctcaacggcacaaaaattcatttgcagggtaaggagc

SEQ ID NO: 572748 - DNA, 75 bp, synthetic construct
  source 1..75: mol_type = other DNA
atggttactgcgtcggatgtggtgcttgtaaattggctcttggagagtcagtggaaataaaaatgtatgaagatg

SEQ ID NO: 572749 - DNA, 75 bp, synthetic construct
  source 1..75: mol_type = other DNA
ggaaaggatatgctggagttttgtttgaagattttagggatggtcaaataaaagtaattggcacttctatggata

SEQ ID NO: 572750 - DNA, 75 bp, synthetic construct
  source 1..75: mol_type = other DNA
ttggtaatattgcggcgctggcgatattacaattagctacatatatcacgcctttgttaattgtcccttatctta

SEQ ID NO: 572751 - DNA, 75 bp, synthetic construct
  source 1..75: mol_type = other DNA
tttctaatgattaaaccaaaagttaaaaaaattgaaaagagattgtttcctcggcataaaaaattaatatctttg

SEQ ID NO: 572752 - DNA, 75 bp, synthetic construct
  source 1..75: mol_type = other DNA
atgatggtggaattgtaatcaagccagaaactggaacgatggtatggagacgaattaattttaccacttacgaca

SEQ ID NO: 572753 - DNA, 75 bp, synthetic construct
  source 1..75: mol_type = other DNA
ctcctgtgttccagaggaggcggggcagattgtatacgtagcatcagcagctagcactacacatgctgaaaacca

SEQ ID NO: 572754 - DNA, 75 bp, synthetic construct
  source 1..75: mol_type = other DNA
ctgtacagaatcactccatggctgtatatgatgcgtatggcgcacaacaattctattatcctgatctactgaaat

SEQ ID NO: 572755 - DNA, 75 bp, synthetic construct
  source 1..75: mol_type = other DNA
gctcgtggcggatttaacctgctgattaacgatcttcccgatgccgacagcgtagaaaaactgcatatcacacaa

SEQ ID NO: 572756 - DNA, 75 bp, synthetic construct
  source 1..75: mol_type = other DNA
ttaatgaaggtgacagaattacaggagataccgccgatccatcaggaaacctctatggtgtaatgaccccagcag

SEQ ID NO: 572757 - DNA, 75 bp, synthetic construct
  source 1..75: mol_type = other DNA
cacagaaaatgagttggctgctagcaagctaggattgtcattaaatcaaaacaactgcaaaactattaccgagta

SEQ ID NO: 572758 - DNA, 75 bp, synthetic construct
  source 1..75: mol_type = other DNA
ggctgaagaagccatgaacgcgctgcacgccgaagcgctggaaatgaacatcaagttcgatcaggagttggcggc

SEQ ID NO: 572759 - DNA, 75 bp, synthetic construct
  source 1..75: mol_type = other DNA
cggtcggcaccaacatcgttaacgcgctcaccagccacaccagcttaacccgcgaacaggctatcgaagtgctca

SEQ ID NO: 572760 - DNA, 75 bp, synthetic construct
  source 1..75: mol_type = other DNA
cacgccgaagcgctggagatgaacatcaggttcgatcaggagctggctgccaagttcgaagcggaccacgaaatg

SEQ ID NO: 572761 - DNA, 75 bp, synthetic construct
  source 1..75: mol_type = other DNA
gtgcgttatctgccggagtcctttgagatcccctggaatccgaacacccgtaccgaggtgagcaccctctgcatc

SEQ ID NO: 572762 - DNA, 75 bp, synthetic construct
  source 1..75: mol_type = other DNA
atctccgttattgggggaaaacaaacaaacacattgaaaataatagtgatgcatatcaccttttagcctatcact

SEQ ID NO: 572763 - DNA, 75 bp, synthetic construct
  source 1..75: mol_type = other DNA
tagcgcagacaattttcctgcactgacggtcagccattttattaccgccaatctgctcccggtgatgctgggtaa

SEQ ID NO: 572764 - DNA, 75 bp, synthetic construct
  source 1..75: mol_type = other DNA
ctaatcttggcatttctcactgcaggaattggtccttgggtagcttcacttgtctgggcatttatatacaataaa

SEQ ID NO: 572765 - DNA, 75 bp, synthetic construct
  source 1..75: mol_type = other DNA
tagtaaaaaaagccaacgaaacaggattgaaatttcaagagattaaaagtgcgtatgcggatgaacttcctactg

SEQ ID NO: 572766 - DNA, 75 bp, synthetic construct
  source 1..75: mol_type = other DNA
aaccgataattcgtatttcagcctatttcctagtataagaatatatagaaatctagtcagagatgtaggcgtaga

SEQ ID NO: 572767 - DNA, 75 bp, synthetic construct
  source 1..75: mol_type = other DNA
ttagggttacatgatgctaatttttatttgtttagttcttatcagaaaattaaattttgtttcaattttgagatg

SEQ ID NO: 572768 - DNA, 75 bp, synthetic construct
  source 1..75: mol_type = other DNA
gtgagcatgtgctcgcctataaaaaaaatattgaacgagtcgtcaatgatgcactcagtgaattccccagaacaa

SEQ ID NO: 572769 - DNA, 75 bp, synthetic construct
  source 1..75: mol_type = other DNA
gtgttacctgatgctgaaacatggtttgaccggatagatattacccgggcattagatatggccatcaccactggt

SEQ ID NO: 572770 - DNA, 75 bp, synthetic construct
  source 1..75: mol_type = other DNA
ttggagtcggttctttagaaggtacaaccgtctcacatgttcagcgattgcatcattcgttaatcgcagctggtt

SEQ ID NO: 572771 - DNA, 75 bp, synthetic construct
  source 1..75: mol_type = other DNA
caggtgggaaaaaataatccactctggctgaagtacgccccggggcttgcgttgtacaagaaagatgcttttaca

SEQ ID NO: 572772 - DNA, 75 bp, synthetic construct
  source 1..75: mol_type = other DNA
gtgagcatgtaatcgcctatagaaaaaatattgaagatgtagtccaaaatgctaccggtgaattttcaagaacaa

SEQ ID NO: 572773 - DNA, 75 bp, synthetic construct
  source 1..75: mol_type = other DNA
actgtttgctgttttcctaatctagagcctggtgccatatcccgtttccgtaatgcattaaatgccatgttggag

SEQ ID NO: 572774 - DNA, 75 bp, synthetic construct
  source 1..75: mol_type = other DNA
tcacagcagaagacagcactatcgttattaaagataaagcaaaagcattattttcaaattatgtatacctgctga

SEQ ID NO: 572775 - DNA, 75 bp, synthetic construct
  source 1..75: mol_type = other DNA
tccagccttgcaatgaataatgcgctctggaaagtgaccggcaattccgagttgaaaaaactgaactccaccggc

SEQ ID NO: 572776 - DNA, 75 bp, synthetic construct
  source 1..75: mol_type = other DNA
ctatcctgtcatctgcttgatttattttgttttataggggaaagcccggtagtggttcatgggatcaaaacggta

SEQ ID NO: 572777 - DNA, 75 bp, synthetic construct
  source 1..75: mol_type = other DNA
ccgttccagcagatcaccgcaaaagatgagttcatgaatgttaaggcggcatcccgtgatgatgtgctggctgcg

SEQ ID NO: 572778 - DNA, 75 bp, synthetic construct
  source 1..75: mol_type = other DNA
gcggacgaggtgctgccgccggagccgcccgcataccgggtgctgacgggcgtggtggacggcttcgggcggacg

SEQ ID NO: 572779 - DNA, 75 bp, synthetic construct
  source 1..75: mol_type = other DNA
ggcttgcacttggtcttttaggtggctttgatgtctcatatcgcggttcagtcaatgccccgtcagcatctgcca

SEQ ID NO: 572780 - DNA, 75 bp, synthetic construct
  source 1..75: mol_type = other DNA
gataagatggcctggatgcaggatgtgaccacggagaagctgggcccctcattatggcatatgcatcctcttaga

SEQ ID NO: 572781 - DNA, 75 bp, synthetic construct
  source 1..75: mol_type = other DNA
ctgaagtttggtgaaacttacatcaaccgtgaaaacttcgaagctatgcaaggcttccacgccggatggcgtaaa

SEQ ID NO: 572782 - DNA, 75 bp, synthetic construct
  source 1..75: mol_type = other DNA
tgtcatcactgtgaggaagccccttgcctgcaggtctgcccggtcaatgccatctcccagagggatgatgcgatc

SEQ ID NO: 572783 - DNA, 75 bp, synthetic construct
  source 1..75: mol_type = other DNA
gtaacctttaaagcaatgttctttttgtggtttttttatggttactatctttcacgaaaaaatagggatgaggta

SEQ ID NO: 572784 - DNA, 75 bp, synthetic construct
  source 1..75: mol_type = other DNA
tttaggtctgctagcaatttctataaaattcattcattcttactttaagaatgatgtgaatgaaaatttattctt

SEQ ID NO: 572785 - DNA, 75 bp, synthetic construct
  source 1..75: mol_type = other DNA
gtgctcaagatcggcgtcggtttcaagcgcccgccggccgtgccggtcggcaccagtgccgacctcaaggtgggt

SEQ ID NO: 572786 - DNA, 75 bp, synthetic construct
  source 1..75: mol_type = other DNA
tatggtcactcgtctcctaagctggcggacctgtcatccggccttcatatacaggaaataattgaggcattctga

SEQ ID NO: 572787 - DNA, 75 bp, synthetic construct
  source 1..75: mol_type = other DNA
tcgggaaaactcccttattccggtctccggtaaggatgccgagcgtctgctggcagcaggtgtaattgccgatgt

SEQ ID NO: 572788 - DNA, 75 bp, synthetic construct
  source 1..75: mol_type = other DNA
gcataattatcagcgcctgctggataaaattgacagcggaagtgaccgatattctccaatggagtactggagagc

SEQ ID NO: 572789 - DNA, 75 bp, synthetic construct
  source 1..75: mol_type = other DNA
tgcttaccgcatctgcagggattatctgacgattgcatgggaatccggtccgctgaatttttccggctcatttgt

SEQ ID NO: 572790 - DNA, 75 bp, synthetic construct
  source 1..75: mol_type = other DNA
tatttatatatactgtgtttgggtttaaattatctctattagggactgctaatgatgataaaaattctagtttac

SEQ ID NO: 572791 - DNA, 75 bp, synthetic construct
  source 1..75: mol_type = other DNA
gatttgcgaccggagtggagcaaatcatgggcggagcccgtcctcgcgactggggttttgactttcaaattgctc

SEQ ID NO: 572792 - DNA, 75 bp, synthetic construct
  source 1..75: mol_type = other DNA
gcaatgccactgttctggggctaagttatgtcacaggtagtcgtccggttcagttagctaaattggctgctggtg

SEQ ID NO: 572793 - DNA, 75 bp, synthetic construct
  source 1..75: mol_type = other DNA
accactgaattaattcgggaactgaattctgttttacgtggatttcctttgttctggaacgggcaggaattacag

SEQ ID NO: 572794 - DNA, 75 bp, synthetic construct
  source 1..75: mol_type = other DNA
agagttgattaagagttctggattaattaataattgcgatgtatctgaattttttgttgcgcaaaataaagcttg

SEQ ID NO: 572795 - DNA, 75 bp, synthetic construct
  source 1..75: mol_type = other DNA
tggcctaactttcatcaattgaatgtctttgtttatcacaaaggcggagttagtttcgctggcgagcaaagcccg

SEQ ID NO: 572796 - DNA, 75 bp, synthetic construct
  source 1..75: mol_type = other DNA
ttctttgatttatatgtatgcagagaagagagatcatacatggtttgacttcttcagaaatttagccttattgaa

SEQ ID NO: 572797 - DNA, 75 bp, synthetic construct
  source 1..75: mol_type = other DNA
aagatggcagtatctggattaatttagatgataatgaagcgcactatcttaaagtgcttatggatcaagatactg

SEQ ID NO: 572798 - DNA, 75 bp, synthetic construct
  source 1..75: mol_type = other DNA
gcaagggttccattaggggccgggcatgatcatattcttgtctattctttaaatccagaattgtttagaactaaa

SEQ ID NO: 572799 - DNA, 75 bp, synthetic construct
  source 1..75: mol_type = other DNA
ctgtcccggatgaagcaccattcgacgttcagcatgtcatccagtggatactcccttcaccgctggcttcgctga

SEQ ID NO: 572800 - DNA, 75 bp, synthetic construct
  source 1..75: mol_type = other DNA
tggggaaaggagttaagaaatattttaattttacaccattacataattataatcatttttgggtgatgctgccaa

SEQ ID NO: 572801 - DNA, 75 bp, synthetic construct
  source 1..75: mol_type = other DNA
tattgggacagtttgagttcagaaatccaagaatttctatcacgaatgatcaggctagattgcctataaatttct

SEQ ID NO: 572802 - DNA, 75 bp, synthetic construct
  source 1..75: mol_type = other DNA
aattgtaacattgtgtttcatctcaatgattaccgctgcgataattgtctgcatagatatagttaggacaagaga

SEQ ID NO: 572803 - DNA, 75 bp, synthetic construct
  source 1..75: mol_type = other DNA
acgctttgatgcaatcactaataatatatgtattctattgatagaaattattgaggtatggtttaatatcaacat

SEQ ID NO: 572804 - DNA, 75 bp, synthetic construct
  source 1..75: mol_type = other DNA
tgcagctccatcagcaaaaagggatgataagtttatcaccaccgactatttgcaacagtgccgcctggcgttttg

SEQ ID NO: 572805 - DNA, 75 bp, synthetic construct
  source 1..75: mol_type = other DNA
aactgaagacaaaagagatgaatacttgttgaatctgttagagaaagagctgagggaaatttcaaaggagcagga

SEQ ID NO: 572806 - DNA, 75 bp, synthetic construct
  source 1..75: mol_type = other DNA
atgagttcagatgtgaaattaaaagatcgaagaaagaaggtatcacgaaatgcgtggtggctggcgctggcaggg

SEQ ID NO: 572807 - DNA, 75 bp, synthetic construct
  source 1..75: mol_type = other DNA
agccgcaggaagatcgcgataaggttaacgttgacctggctgcctccggagtggcgtacaaagagcgcctgaata

SEQ ID NO: 572808 - DNA, 75 bp, synthetic construct
  source 1..75: mol_type = other DNA
tttctgccgattttccggcggcggtggcactggctgaggcctgcccggcatttgttgacgcggcgctggcagatg

SEQ ID NO: 572809 - DNA, 75 bp, synthetic construct
  source 1..75: mol_type = other DNA
cgcgatggtgatattctcagtaacgaaaacggtgatgaattcattaaggtgatcgccgctgatgaagccgtttct

SEQ ID NO: 572810 - DNA, 75 bp, synthetic construct
  source 1..75: mol_type = other DNA
ccgttcctggagaatgaccaagggttatcgttatctgggcctgcagatccatttgctgaggcagtatggtttcgt

SEQ ID NO: 572811 - DNA, 75 bp, synthetic construct
  source 1..75: mol_type = other DNA
acgccacaggactgcagctggccggcaaaccttgtccagtcgttcttcgtgtttgtgaatgaactgtttgctgaa

SEQ ID NO: 572812 - DNA, 75 bp, synthetic construct
  source 1..75: mol_type = other DNA
gaaaccgtcgtatggtttcggtgctgatcgatcaggatgcaatttcgtccggacaaatgcagaaaggagaaccat

SEQ ID NO: 572813 - DNA, 75 bp, synthetic construct
  source 1..75: mol_type = other DNA
tccataactcagcaaatatagtgcagagttcaccctgtcaaacggtttcttttgccggaaaggaatatgagttaa

SEQ ID NO: 572814 - DNA, 75 bp, synthetic construct
  source 1..75: mol_type = other DNA
tggattaaaactttcggaaaaaagtacggatacagttcctgttaataacttacccgtttttgataatactatttc

SEQ ID NO: 572815 - DNA, 75 bp, synthetic construct
  source 1..75: mol_type = other DNA
gcaaaacatgaattagtttgcgagttttcacgcggttgcggcgttgattatgcaactgctctgacaataactact

SEQ ID NO: 572816 - DNA, 75 bp, synthetic construct
  source 1..75: mol_type = other DNA
tgacaaaacgtcatctatcgccaaggtctggaatctttcgtttaatgaagacgctcctcattataactgtaatga

SEQ ID NO: 572817 - DNA, 75 bp, synthetic construct
  source 1..75: mol_type = other DNA
gtgggtgtaatgcgaaatcatattcaaatttaaatatatataaactaaatccgctaattccagatcatgatgcag

SEQ ID NO: 572818 - DNA, 75 bp, synthetic construct
  source 1..75: mol_type = other DNA
tgtaaagcttttcgtcatgacagagatgcgctgttagctgctcaaagtaaattagataaacgcttcgataaagac

SEQ ID NO: 572819 - DNA, 75 bp, synthetic construct
  source 1..75: mol_type = other DNA
tcaggcaggcattgatgcaggcctggctgatcaactgattaatgctgcagatgccgttgaagtgatggtttctgc

SEQ ID NO: 572820 - DNA, 75 bp, synthetic construct
  source 1..75: mol_type = other DNA
aagggggcttagaaaagcaataagtgagttttctattcgttttaaatatatgataaaactcagggagtttaatat

SEQ ID NO: 572821 - DNA, 75 bp, synthetic construct
  source 1..75: mol_type = other DNA
gtataaaatactggagtctcttttaaaaaagagtgaaggtaaacaattggataatctcttaaacgttaaaggtat

SEQ ID NO: 572822 - DNA, 75 bp, synthetic construct
  source 1..75: mol_type = other DNA
ttttgttgtctatattaaatgggttaaaagaaataaggttattcataggtattaatatatcgcaaagtatttata

SEQ ID NO: 572823 - DNA, 75 bp, synthetic construct
  source 1..75: mol_type = other DNA
gcaaatgggggttgtatatttaccggatcgacatcatacctcacctggctctaaatactacctttccatttcatt

SEQ ID NO: 572824 - DNA, 75 bp, synthetic construct
  source 1..75: mol_type = other DNA
tggcctgttcagccgccatgttgctggcggcggcctgtacgcgtcggctggtcacgcagacggcaaaaattggtt

SEQ ID NO: 572825 - DNA, 75 bp, synthetic construct
  source 1..75: mol_type = other DNA
ttttttcatccccgcattttcgtctccggcagccatgctgtctccgggtgaccgcagtgcaattcagcagcaaca

SEQ ID NO: 572826 - DNA, 75 bp, synthetic construct
  source 1..75: mol_type = other DNA
gtaatcatccggctctacttgaggggttgtcttttatgcacaaaaaagtagatgctcatccatattatgatggat

SEQ ID NO: 572827 - DNA, 75 bp, synthetic construct
  source 1..75: mol_type = other DNA
cctgaacaatataagaaagatgaggttccaatagttaatactaagcagcatccctatttagataatgtcatgaat

SEQ ID NO: 572828 - DNA, 75 bp, synthetic construct
  source 1..75: mol_type = other DNA
gtaaacaaaccaacagcagcaaagacatttatcagtactacagttctactggaaacattcatttttgccaccttt

SEQ ID NO: 572829 - DNA, 75 bp, synthetic construct
  source 1..75: mol_type = other DNA
gattaaacagatggacgaagaggaactgaagtcagtgacatcggttcttgatgcgctcatcttaaaacatcaggc

SEQ ID NO: 572830 - DNA, 75 bp, synthetic construct
  source 1..75: mol_type = other DNA
cggactgagcgaacacattgatgccgaagcctgctggagccggctgtcggattacccggagcaggcgcagccctg

SEQ ID NO: 572831 - DNA, 75 bp, synthetic construct
  source 1..75: mol_type = other DNA
acatttccagtatgtatttgatggttattacaactgctctcaatatatactatttacctcgattatctgaaatta

SEQ ID NO: 572832 - DNA, 75 bp, synthetic construct
  source 1..75: mol_type = other DNA
tttgcaggagggaaaacagtagcctttgttgactttaaagatataccagagaaagatattaatagagagccatcg

SEQ ID NO: 572833 - DNA, 75 bp, synthetic construct
  source 1..75: mol_type = other DNA
tgaagcaggcatgtcctccgccgttacagtacacttcgaagaatcagtgtatttaaacagcttttcttttggtat

SEQ ID NO: 572834 - DNA, 75 bp, synthetic construct
  source 1..75: mol_type = other DNA
atgtggcctacttctcaagaacaaatttcttccacgatcagattaaaaaatcgatctcttcggggaaaatttctg

SEQ ID NO: 572835 - DNA, 75 bp, synthetic construct
  source 1..75: mol_type = other DNA
ttcccctgagaatttgcctgaaaatggctctcttgtacgtaagcatttcactgattttatgaagcgtttgcgtaa

SEQ ID NO: 572836 - DNA, 75 bp, synthetic construct
  source 1..75: mol_type = other DNA
ggcttgtactcgtcctttgaacgcgtaccaaatgccatcggggaagatttttttcacgccgtcacgtggcgctaa

SEQ ID NO: 572837 - DNA, 75 bp, synthetic construct
  source 1..75: mol_type = other DNA
gttatccagggtaaaaatacctatgctttcagcgaaggaacaagctcgcattgtcgacatactcgataaattcga

SEQ ID NO: 572838 - DNA, 75 bp, synthetic construct
  source 1..75: mol_type = other DNA
ctgaaaactactgaatctaccattggggtattgagtttaacccgatggaatagaatatctactataagagaagct

SEQ ID NO: 572839 - DNA, 75 bp, synthetic construct
  source 1..75: mol_type = other DNA
aggttcagaacatatagatgatgtgctgaaaactactgaatctaccattggggtattgagtttaacccgatggaa

SEQ ID NO: 572840 - DNA, 75 bp, synthetic construct
  source 1..75: mol_type = other DNA
atgtttgctcgctctctccgagagaccgagctttttgaccatgcagatacacatgggattaccgttggtgaagcc

SEQ ID NO: 572841 - DNA, 75 bp, synthetic construct
  source 1..75: mol_type = other DNA
tttttcttactcagcaatggctatcacctctgcgattatggttcctacctcacagtttatcattcgtgattatat

SEQ ID NO: 572842 - DNA, 75 bp, synthetic construct
  source 1..75: mol_type = other DNA
atttaaaattgcatcatggttattagcatatgtaatgctagcaaaggctatgacgagaatttttatcattagtga

SEQ ID NO: 572843 - DNA, 75 bp, synthetic construct
  source 1..75: mol_type = other DNA
ttgattctcaacttaccaaagtctttacaaccagcagcactttctattcagcttcgctctaaggatcatgagcga

SEQ ID NO: 572844 - DNA, 75 bp, synthetic construct
  source 1..75: mol_type = other DNA
cttcgccgcatcatatcccgcctgaatgaaattttccgctatgcagcaacagaagaactcatagaattcaacccg

SEQ ID NO: 572845 - DNA, 75 bp, synthetic construct
  source 1..75: mol_type = other DNA
cattaccgatggatagtgaacgaaataactcaattgcagttaatgaagggcatagctcaatttgcaagcccgaaa

SEQ ID NO: 572846 - DNA, 75 bp, synthetic construct
  source 1..75: mol_type = other DNA
aaacttcatttccaaaactattagcagaagatgaagacattggcaatgtatttgatattgcatgtttcaattatt

SEQ ID NO: 572847 - DNA, 75 bp, synthetic construct
  source 1..75: mol_type = other DNA
cccgcatcatgtgtatcagccgtaccgtctgccagggcagcagcatgatgaggaatcagggctgtactataaccg

SEQ ID NO: 572848 - DNA, 75 bp, synthetic construct
  source 1..75: mol_type = other DNA
cgactggctaatggactggataactttgccctattggcaatcccctttttcatctttgccggaacgctgatgaaa

SEQ ID NO: 572849 - DNA, 75 bp, synthetic construct
  source 1..75: mol_type = other DNA
attggtaaatcacttgatactgcatatggtggtgataagtctaaacaggcagaggcatataaacaattagaagaa

SEQ ID NO: 572850 - DNA, 75 bp, synthetic construct
  source 1..75: mol_type = other DNA
ggcaaatcagagttattcatataaggatctggattatccccaggataacataaaatggagtggtggaagtaataa

SEQ ID NO: 572851 - DNA, 75 bp, synthetic construct
  source 1..75: mol_type = other DNA
ggtgagctggcgaaaacgcagcgccgcagcctggcggatgcgcttcagcagtccggcggcgaagacggtggcagt

SEQ ID NO: 572852 - DNA, 75 bp, synthetic construct
  source 1..75: mol_type = other DNA
atttgatagtactgcagatgctgcgttagatgctttgaaagaaacgcagaatagatctctatgtaatgatatgga

SEQ ID NO: 572853 - DNA, 75 bp, synthetic construct
  source 1..75: mol_type = other DNA
aaaaagcgcagcggcgcagcctggcagagacgctccagcaggaagggagtgagaacggccacggcgtggtgttcc

SEQ ID NO: 572854 - DNA, 75 bp, synthetic construct
  source 1..75: mol_type = other DNA
atgctgcaaaagcattgacaaaatggtggaacgatacagcatcacaaagaatatttgactctctaatattgaata

SEQ ID NO: 572855 - DNA, 75 bp, synthetic construct
  source 1..75: mol_type = other DNA
atgagcaaaatcagggtgttatctgtcgatgattcggcactgatgcgccagatcatgacagaaatcatcaacagc

SEQ ID NO: 572856 - DNA, 75 bp, synthetic construct
  source 1..75: mol_type = other DNA
actgcgaccatcgcggcctgccgctggcccttatcagcaaggaagggacaacagaatggtgcgcagaatacgatg

SEQ ID NO: 572857 - DNA, 75 bp, synthetic construct
  source 1..75: mol_type = other DNA
tatcgggcgcgtcttcacggcgaacggtacggaatcaaaccgctttatggtgcaatccggcgctgcatgggtata

SEQ ID NO: 572858 - DNA, 75 bp, synthetic construct
  source 1..75: mol_type = other DNA
cgtaacacgtgcgtactggcacaggatagcaagcaaattaatgtaccgttaggtgatgtttcgctgacgcgtttt

SEQ ID NO: 572859 - DNA, 75 bp, synthetic construct
  source 1..75: mol_type = other DNA
tgttattaatttcaccgatcatacaaaaatggatcaatatttttcgttaaatatgatttctgaaaataacacagg

SEQ ID NO: 572860 - DNA, 75 bp, synthetic construct
  source 1..75: mol_type = other DNA
aataacagaaatgtattacaaactagcattaaaaactttggcatagctctttatcaaggggatggtaatactaca

SEQ ID NO: 572861 - DNA, 75 bp, synthetic construct
  source 1..75: mol_type = other DNA
ggatcgttattaccaactcggcgttacctacaatggcattgattatgattcaaccctcggtaaaaacaagattga

SEQ ID NO: 572862 - DNA, 75 bp, synthetic construct
  source 1..75: mol_type = other DNA
ttgaaacgaataatctggattctgtgcctggtgggatggatggggagctgtgaggtgtttgcccatgatggcacg

SEQ ID NO: 572863 - DNA, 75 bp, synthetic construct
  source 1..75: mol_type = other DNA
tttttatgcgcaattgcgacctgttaatagcgatgtgcagtcgggtaaagtgaatgccagcgcgacatttgtact

SEQ ID NO: 572864 - DNA, 75 bp, synthetic construct
  source 1..75: mol_type = other DNA
ttattcgcaccttccttagccaattggttagaaacttatattggaaaggatggaaccggcgatgatgatagctgt

SEQ ID NO: 572865 - DNA, 75 bp, synthetic construct
  source 1..75: mol_type = other DNA
taaagatgagaaaatagttaaaagtaaagataacaatatcaagtcattttatttaggtacgcccagtggtaattt

SEQ ID NO: 572866 - DNA, 75 bp, synthetic construct
  source 1..75: mol_type = other DNA
ttatccgcaaagtgatattcttgataagttcgcgacgataaataaagaagattgtcgtgtttttacggctttagt

SEQ ID NO: 572867 - DNA, 75 bp, synthetic construct
  source 1..75: mol_type = other DNA
tatttcaagtgctcataattggagaaaaatagatgttcctgttagttgtgaatatgccaatggcagcgcatatgt

SEQ ID NO: 572868 - DNA, 75 bp, synthetic construct
  source 1..75: mol_type = other DNA
acgtgtcgctaaatatgatccacccttttgaaacattgacattaccaattccggctggcgtggcaggaaaatcgc

SEQ ID NO: 572869 - DNA, 75 bp, synthetic construct
  source 1..75: mol_type = other DNA
tgtttgctgccaagtgtttgagaaaattgcacgagaaggcagaaaatttggtcttgggatggtggtttcctcgca

SEQ ID NO: 572870 - DNA, 75 bp, synthetic construct
  source 1..75: mol_type = other DNA
gtgagtgacaacggcgacctggtgcgcatcagcggcccgcgacagacgcgggaatacggctacagcgccacgggc

SEQ ID NO: 572871 - DNA, 75 bp, synthetic construct
  source 1..75: mol_type = other DNA
cacagctttgacccgtgcctcgcctgttcaacacacgtgctgggcgacgacggtagcgagctgatctccgtgcag

SEQ ID NO: 572872 - DNA, 75 bp, synthetic construct
  source 1..75: mol_type = other DNA
aaaaaaagcaacatatttggagcatcattcactaataccagaataaaaaatttgctctgtgaagatattatgcct

SEQ ID NO: 572873 - DNA, 75 bp, synthetic construct
  source 1..75: mol_type = other DNA
tgcataacatgtacatgctggaacaacaaacgtgggataatgtgcccggagttaataccactaattttctgaaca

SEQ ID NO: 572874 - DNA, 75 bp, synthetic construct
  source 1..75: mol_type = other DNA
gacaatgtaaagctaaataatgatgtgtataaagaactgaaaagtttatgcacgattacgacaaaacatccccag

SEQ ID NO: 572875 - DNA, 75 bp, synthetic construct
  source 1..75: mol_type = other DNA
agcagatgatgtaataataaataaaacaagacaaaatgagttagtaaaagtgttttgcgagtataaaacagagtt

SEQ ID NO: 572876 - DNA, 75 bp, synthetic construct
  source 1..75: mol_type = other DNA
atgcgctacgcttatcaggcctacaattctcgcgccactcgtaggccggataaggcgttcacgccgcatccggca

SEQ ID NO: 572877 - DNA, 75 bp, synthetic construct
  source 1..75: mol_type = other DNA
acagataaaaaattagcacgaaaaatttatgctacccatcgtcgctacgattatgttagcttcgaaaatatagat

SEQ ID NO: 572878 - DNA, 75 bp, synthetic construct
  source 1..75: mol_type = other DNA
tgcgcaaaaaacgtcagcaggccagttgtttgatgtaaatggcgctattaattgcacaacgctgaatcagtcatc

SEQ ID NO: 572879 - DNA, 75 bp, synthetic construct
  source 1..75: mol_type = other DNA
cggagggcggattgatgtccttggaagcacgtcagactatagcaaaatggattgctttgtacgtgggtttgatag

SEQ ID NO: 572880 - DNA, 75 bp, synthetic construct
  source 1..75: mol_type = other DNA
tatggagaaagatatcaggttatagcgtctcagtatcgctccaatatttgtgtggattatgtatcaccgatacta

SEQ ID NO: 572881 - DNA, 75 bp, synthetic construct
  source 1..75: mol_type = other DNA
tacgcacaatgataacaacagcctggtatagtgcgcttggtatcccaatagatgactctggaaagttagttaatt

SEQ ID NO: 572882 - DNA, 75 bp, synthetic construct
  source 1..75: mol_type = other DNA
gggtggattacatgaccaaagaaagaactaaaatattcggtgatggagaccgtaacttcggatgtagtcgagaat

SEQ ID NO: 572883 - DNA, 75 bp, synthetic construct
  source 1..75: mol_type = other DNA
gcatgtcacgctcaaaggtaaaaaagcgggcacgcatacggttaccgcaacgctgggtaatacaataccagtgat

SEQ ID NO: 572884 - DNA, 75 bp, synthetic construct
  source 1..75: mol_type = other DNA
actgaaatatagtggttgggttcgttcatctgatacagataaacactatcagactgagacaatttttaaagatga

SEQ ID NO: 572885 - DNA, 75 bp, synthetic construct
  source 1..75: mol_type = other DNA
tcggtaagctcggaatttctctggattggtcatttctggcctcaaaaacggagatgaaagatatttaccggcaag

SEQ ID NO: 572886 - DNA, 75 bp, synthetic construct
  source 1..75: mol_type = other DNA
cgcgatcatttattgatgcttcaccattcattcttgcaatggcaatagctatagctattctgcgtggtcctgtgg

SEQ ID NO: 572887 - DNA, 75 bp, synthetic construct
  source 1..75: mol_type = other DNA
atgaacggtataaagatgaattgcgacagaaaatgggaaaacccgacgttacagattcaaatttgaaaaatatta

SEQ ID NO: 572888 - DNA, 75 bp, synthetic construct
  source 1..75: mol_type = other DNA
caggcggttcgattattgaaaatatgtctggatacccgggagcctgttctcaatttaagcttactgaaactacgt

SEQ ID NO: 572889 - DNA, 75 bp, synthetic construct
  source 1..75: mol_type = other DNA
ctttctattcgccagaatcccgccccagcctggtgctggcacatagtgcccgcacattaatggaccgctttaatg

SEQ ID NO: 572890 - DNA, 75 bp, synthetic construct
  source 1..75: mol_type = other DNA
cgatgcgggcttcatgggccagtggcaggatgaagagagcgggctgtggtataatttacaccgctactacgacgc

SEQ ID NO: 572891 - DNA, 75 bp, synthetic construct
  source 1..75: mol_type = other DNA
gtggacttattgtagggattgcggtgggggctctggttgtcgctacagggggcgcggcattgggtgtgctggctg

SEQ ID NO: 572892 - DNA, 75 bp, synthetic construct
  source 1..75: mol_type = other DNA
ggtgatatcaccgtcaccaacacagctccgcaacatatgactgcaaccttgcaggataaaaatggcaacccacta

SEQ ID NO: 572893 - DNA, 75 bp, synthetic construct
  source 1..75: mol_type = other DNA
accgcgggtaatgagcatcaacagcgcaatcccgccagcctgacaaagctgatgacgggttatgtcgtggatcgc

SEQ ID NO: 572894 - DNA, 75 bp, synthetic construct
  source 1..75: mol_type = other DNA
atgtcagtcagctataacatatatagaatgccatataagagtcttccagaattgacaaaaaaaatcattaaagaa

SEQ ID NO: 572895 - DNA, 75 bp, synthetic construct
  source 1..75: mol_type = other DNA
agcgggctattattttcgacgaatactcacaactgggttatatctttacgcccatctcccccagcgcacgccgcc

SEQ ID NO: 572896 - DNA, 75 bp, synthetic construct
  source 1..75: mol_type = other DNA
aagataataatcttgaagcattttatctcgcaacacctgatggacgatttgaggcgcttaataataaaggagaat

SEQ ID NO: 572897 - DNA, 75 bp, synthetic construct
  source 1..75: mol_type = other DNA
agtgcgggctgacggtggagcaactggccagacaggtggagccggaatacacaccggcgcgaaaagctcatcttt

SEQ ID NO: 572898 - DNA, 75 bp, synthetic construct
  source 1..75: mol_type = other DNA
aggagaatcatcactacctgatccttctgagaaagaaaacgaatctaatgaaatattgaacgtttcagaaatcat

SEQ ID NO: 572899 - DNA, 75 bp, synthetic construct
  source 1..75: mol_type = other DNA
ggcagcctgagttcacagataaaacactctccaggaaacccggggcggttcatggagataaatactacatcaagc

SEQ ID NO: 572900 - DNA, 75 bp, synthetic construct
  source 1..75: mol_type = other DNA
ttatggctgaacgaggttataaaactgactatccgattgccctatggccgcaaagaacaatccactctacggaag

SEQ ID NO: 572901 - DNA, 75 bp, synthetic construct
  source 1..75: mol_type = other DNA
gagtccggcctctattacaaccgccaccgctattatgacccgctgcaggggcggtatatcactcaggatccgatt

SEQ ID NO: 572902 - DNA, 75 bp, synthetic construct
  source 1..75: mol_type = other DNA
ccgttgtctggatgaccaccggcaccacacatgtggcccgcgccgaagagtgtgaaccgccccgggtttcctgga

SEQ ID NO: 572903 - DNA, 75 bp, synthetic construct
  source 1..75: mol_type = other DNA
cgtgaccgcgttgctccggcagttaaacctatgcaaatcatcgagcctgaaggtaaaaattacaccattactggc

SEQ ID NO: 572904 - DNA, 75 bp, synthetic construct
  source 1..75: mol_type = other DNA
aaaaggattaaaatatatcaaaagtgaatatgaactttataaacttattgttgatttaggcattaataaaggggt

SEQ ID NO: 572905 - DNA, 75 bp, synthetic construct
  source 1..75: mol_type = other DNA
gcagcgcagtctcaccgccgccagcagtctcgatgatatgctgatgcgctttcaccgctgggcgcgcgatctcgg

SEQ ID NO: 572906 - DNA, 75 bp, synthetic construct
  source 1..75: mol_type = other DNA
gatcgtcaggtgcgtaatattataaatatgtttattgatatgggtgttctttctgtagaggcacgggacgggcaa

SEQ ID NO: 572907 - DNA, 75 bp, synthetic construct
  source 1..75: mol_type = other DNA
gatctggcagcctgagttcacagataaaacactctccaggaaacccggggcggttcacacctttattaacgatgt

SEQ ID NO: 572908 - DNA, 75 bp, synthetic construct
  source 1..75: mol_type = other DNA
gatgaccccggagtctaatacttctcaaaaaattccattggttgcacgattgatacaaacagacactaacgttac

SEQ ID NO: 572909 - DNA, 75 bp, synthetic construct
  source 1..75: mol_type = other DNA
actccgctacagcagctgcgctatgacaactctgtttctttagtcgacaaattgttcgtgatgatgacgttgggc

SEQ ID NO: 572910 - DNA, 75 bp, synthetic construct
  source 1..75: mol_type = other DNA
tactaccctgtattcagtgtcgtgtcgattatatgatgtcatttgcggtctctccccggagttttggaacattat

SEQ ID NO: 572911 - DNA, 75 bp, synthetic construct
  source 1..75: mol_type = other DNA
tcgcacccgtacctgaccatggacttcaaaactgaagccaatatcatccgcgcgctgggcaaaatcatcggcaac

SEQ ID NO: 572912 - DNA, 75 bp, synthetic construct
  source 1..75: mol_type = other DNA
gtgcaaatggcatgttaggtagtagtttactacgctacttttcatcaattggagattatgaagttcttggtacga

SEQ ID NO: 572913 - DNA, 75 bp, synthetic construct
  source 1..75: mol_type = other DNA
gactggttcttgagtcaatctactgaagttaatggttattcaaaagcgatattttctggtctgccgacttgttat

SEQ ID NO: 572914 - DNA, 75 bp, synthetic construct
  source 1..75: mol_type = other DNA
acctggaaaaacgcgggctgcaactggcgggcagtgaaacgcaccgcctgccggagacgatgcctgcaatggtgg

SEQ ID NO: 572915 - DNA, 75 bp, synthetic construct
  source 1..75: mol_type = other DNA
gtggaagagtaatcatgcggatagtattgtggacatattattaattaataaaaacaacatcaaactggcagaaga

SEQ ID NO: 572916 - DNA, 75 bp, synthetic construct
  source 1..75: mol_type = other DNA
gttttaataatcaatagagaagttgccaagaaaaaagaagggcaagacattaaaaagaatgagataaattcagtt

SEQ ID NO: 572917 - DNA, 75 bp, synthetic construct
  source 1..75: mol_type = other DNA
agctgcatccgcgtaccctcgaactaatggaagaagtggctaaacgcgttgaagttgacggcatccaggcgtggt

SEQ ID NO: 572918 - DNA, 75 bp, synthetic construct
  source 1..75: mol_type = other DNA
tattatcttagattctgaggatattataactatggaagtttattgtacaaacggtaaccttccatttacttaccc

SEQ ID NO: 572919 - DNA, 75 bp, synthetic construct
  source 1..75: mol_type = other DNA
tattcctattaatccgctcttaggcttggaacactctaacaggaatcgagactataatatttactggcagagttt

SEQ ID NO: 572920 - DNA, 75 bp, synthetic construct
  source 1..75: mol_type = other DNA
tggtcaggagtatctttaaatatcgaatcaattcgattttatctgaatggagctgagaacattgtcggcaccatt

SEQ ID NO: 572921 - DNA, 75 bp, synthetic construct
  source 1..75: mol_type = other DNA
tgcaaaactcgacaccaagcacaggaagcgtattacgtctggctgcgacagattacgccggaaatgaaggcccac

SEQ ID NO: 572922 - DNA, 75 bp, synthetic construct
  source 1..75: mol_type = other DNA
cccctcaatatgatccgtccttttgaaacgctcacgttacctttacctgctaattctgcgggaggccaaatgacc

SEQ ID NO: 572923 - DNA, 75 bp, synthetic construct
  source 1..75: mol_type = other DNA
gaaagtgaaatggcgccgggaagggcgaaatctgatagcagagaatcccaacccaattcatatcagtgtgatgga

SEQ ID NO: 572924 - DNA, 75 bp, synthetic construct
  source 1..75: mol_type = other DNA
tatttagtaaggaagaaaaaatcccttatctcatacaggcatgggtggatccttttaataaagatgataaaaaca

SEQ ID NO: 572925 - DNA, 75 bp, synthetic construct
  source 1..75: mol_type = other DNA
taattcttcgggtagccaaatgacctggcgatttattaatgattacggcgcgataagcgaaccattaaagcaagc

SEQ ID NO: 572926 - DNA, 75 bp, synthetic construct
  source 1..75: mol_type = other DNA
ttatctcatccaggcatgggtagatccgtttaataaagaggataaaagcaaagcaccgtttaccgttattcctcc

SEQ ID NO: 572927 - DNA, 75 bp, synthetic construct
  source 1..75: mol_type = other DNA
taactcggcgggcagccaaatgatttggcgatttattaatgattacggtgcagtaagcgaaccgataaaaatgtc

SEQ ID NO: 572928 - DNA, 75 bp, synthetic construct
  source 1..75: mol_type = other DNA
ttatactgttaaactatccagtaaatcttttgttattaataacgaacctagttctaaaatgttgattaataatat

SEQ ID NO: 572929 - DNA, 75 bp, synthetic construct
  source 1..75: mol_type = other DNA
cgacttgttgccaccggaggaaataagcgggaagaagccagcccgtctgcccctagcgacacacctaccaaggga

SEQ ID NO: 572930 - DNA, 75 bp, synthetic construct
  source 1..75: mol_type = other DNA
gtgaaatcacggcactgctggcggtggtgctgctgtttgcattacccggttttctcgaccgccagtatttaagtg

SEQ ID NO: 572931 - DNA, 75 bp, synthetic construct
  source 1..75: mol_type = other DNA
tagtaagacaaaagctacctattcatatcttggagttaaaacaaaggtcctagatgctaacatcgaaggctggtg

SEQ ID NO: 572932 - DNA, 75 bp, synthetic construct
  source 1..75: mol_type = other DNA
tgacagtcattttattattgtcaattgttttgatggaatcctgggggcattggtatctttgcacaatataggaga

SEQ ID NO: 572933 - DNA, 75 bp, synthetic construct
  source 1..75: mol_type = other DNA
actagaacacgacgaaaatggaaatatacgaccggtacttatttataagcaaccatcaataaaaaaggttgaaaa

SEQ ID NO: 572934 - DNA, 75 bp, synthetic construct
  source 1..75: mol_type = other DNA
atccgctttaaattcggtatcccgcttgagcaatctgccgtcgtgaaatacgccgatctaaccatgttagctacc

SEQ ID NO: 572935 - DNA, 75 bp, synthetic construct
  source 1..75: mol_type = other DNA
tcccctgccgttgatgtcattatcaacaaaacgcaggccagctactgcaccggatggcaaattgccatcggggga

SEQ ID NO: 572936 - DNA, 75 bp, synthetic construct
  source 1..75: mol_type = other DNA
aaaacaaaaaaaatgagataattggtattgttcatgaactatttactgaggatgataaaaccgctatttccttag

SEQ ID NO: 572937 - DNA, 75 bp, synthetic construct
  source 1..75: mol_type = other DNA
caatacaactactatcgcgaccagttgttgagttttgatgaggagcaggaaaaacctatttatctggaaaaattg

SEQ ID NO: 572938 - DNA, 75 bp, synthetic construct
  source 1..75: mol_type = other DNA
tctggaagagaacatggcgttgttgatggaacaggctatcgccaacgaaggcctgttttatcgtctactctacct

SEQ ID NO: 572939 - DNA, 75 bp, synthetic construct
  source 1..75: mol_type = other DNA
atgaactaaaagaaacaacagaaatatattttagaaataaaggtaataatcttgttccttgcctgacacaagaaa

SEQ ID NO: 572940 - DNA, 75 bp, synthetic construct
  source 1..75: mol_type = other DNA
tgcgcggctggtcgcgttcgaaaaaagagattgcaggtattcgatgcagcagcgggctggcctcactggatgatt

SEQ ID NO: 572941 - DNA, 75 bp, synthetic construct
  source 1..75: mol_type = other DNA
ctcattcatctggatgccagcgctgaatgcctgccgggtttacctactttcaactggtaaccagaaacaacatga

SEQ ID NO: 572942 - DNA, 75 bp, synthetic construct
  source 1..75: mol_type = other DNA
gttctgcggcttaaacgcctggggctgtcaaaaacgttccgtcgtctggttatcacacttacccgacgttatggc

SEQ ID NO: 572943 - DNA, 75 bp, synthetic construct
  source 1..75: mol_type = other DNA
gcacttctacagcgtcgcccaacatgcggttctttgcagccagctggtaccgcaggaatttgcttttgaagcgtt

SEQ ID NO: 572944 - DNA, 75 bp, synthetic construct
  source 1..75: mol_type = other DNA
ctgagtggtgccaaaaaaacacaacgatgtccagttttgcgtctgttgatatggatggattcaaaaaatttttaa

SEQ ID NO: 572945 - DNA, 75 bp, synthetic construct
  source 1..75: mol_type = other DNA
cgcaaaactaaaaaagttccagaaaacatatgtcatatattcagagaagatttaaaaaagccagtgaaaaaagta

SEQ ID NO: 572946 - DNA, 75 bp, synthetic construct
  source 1..75: mol_type = other DNA
gaacgcccatgggggttcactaacctgaaaagtggtgaaggtctgcaaaacatcatcgcctttatcgaagagcag

SEQ ID NO: 572947 - DNA, 75 bp, synthetic construct
  source 1..75: mol_type = other DNA
cggcggatatattatttgtcaggagactggctgagtgtttatctggaagccagctggcggaagatgaggcgttat

SEQ ID NO: 572948 - DNA, 75 bp, synthetic construct
  source 1..75: mol_type = other DNA
ctatgctatcctggattatattgaggaggctttactggcagatatcagtgcccgggtagcgagcagctcctgctc

SEQ ID NO: 572949 - DNA, 75 bp, synthetic construct
  source 1..75: mol_type = other DNA
tacgggaaactcgatcaaaaaggtaaagacatgctaagggcggcatatatcagcaaaatagctgacaaggtaggt

SEQ ID NO: 572950 - DNA, 75 bp, synthetic construct
  source 1..75: mol_type = other DNA
ctggtaagcaattattttgaccgttttggtgagtataaccctgatgatgtggtgaaatctctgaccaccacgtta

SEQ ID NO: 572951 - DNA, 75 bp, synthetic construct
  source 1..75: mol_type = other DNA
tttatcgtccagtagatcgaccaacagacccttatgcgcaagctggagaaacaattggcgggtatttagttccag

SEQ ID NO: 572952 - DNA, 75 bp, synthetic construct
  source 1..75: mol_type = other DNA
acatctgaagtcgaatgtggtaataatatatctgtatttggtggtgtttttaataacaatggcaatatatacaaa

SEQ ID NO: 572953 - DNA, 75 bp, synthetic construct
  source 1..75: mol_type = other DNA
cccactcgcggcattgatgttggcgccaaattggaaatctatgagttaatgaatcgcctggtggcaaaagggaaa

SEQ ID NO: 572954 - DNA, 75 bp, synthetic construct
  source 1..75: mol_type = other DNA
gcatagatgtgactggcgatgatcagtacagtaaaggtccgtatgttaccgcgtcgttcagggtaagaagtgatc

SEQ ID NO: 572955 - DNA, 75 bp, synthetic construct
  source 1..75: mol_type = other DNA
ggggggcaaacgacgacaggattacgacaccttaatggtcatataaaaaacctccgtttctggaacagagcattg

SEQ ID NO: 572956 - DNA, 75 bp, synthetic construct
  source 1..75: mol_type = other DNA
gcttcatctgcaacgtatattgataagtccgggcatattaccgtggcaggtaataacgttcctcgttttgaaaaa

SEQ ID NO: 572957 - DNA, 75 bp, synthetic construct
  source 1..75: mol_type = other DNA
cggttctgaaggtaaacggactgacgcgcaaaggcgtcctgaacgatattaattttacgctttatcgtggcgaga

SEQ ID NO: 572958 - DNA, 75 bp, synthetic construct
  source 1..75: mol_type = other DNA
ccgtattttagtgatgcgcagtggtcgaattaccggcgaacttagcgcaaaagaagcgacacaagaaaaaatcat

SEQ ID NO: 572959 - DNA, 75 bp, synthetic construct
  source 1..75: mol_type = other DNA
gcttatgaaagagcgctaaatcaggcggctactgccgtgcgcccgctcttagttaacgaagctacccggcagtag

SEQ ID NO: 572960 - DNA, 75 bp, synthetic construct
  source 1..75: mol_type = other DNA
aggttattcgcctgacaaaatcgaaaaggcgatgccgcacatgctggatctagcgaaagcggcggggatggatac

SEQ ID NO: 572961 - DNA, 75 bp, synthetic construct
  source 1..75: mol_type = other DNA
agcccagcagcgtagccgcaccgtactgcgcaacgctggtatcgatacccgtaatctcagccagcgccagagtga

SEQ ID NO: 572962 - DNA, 75 bp, synthetic construct
  source 1..75: mol_type = other DNA
ttcactacgtctaataccgacctgcagatgctgggtgaaaccatgaaatacgtcggcccggctgcacaggctgcg

SEQ ID NO: 572963 - DNA, 75 bp, synthetic construct
  source 1..75: mol_type = other DNA
tgagcttggattgttgagcggcggagaggagtcggcgaccgaacgcgtcagcgttcgcgagtcgagtcctgctcc

SEQ ID NO: 572964 - DNA, 75 bp, synthetic construct
  source 1..75: mol_type = other DNA
gattactgattatgtggacgcaatggctttaattgacgacgttaacgacgactttaacagcctgccgtccacgat

SEQ ID NO: 572965 - DNA, 75 bp, synthetic construct
  source 1..75: mol_type = other DNA
atacccgctatgacccgccgccgtctcccggcgttgagttcttcgagcccacaatgacccagcaacatttccgcg

SEQ ID NO: 572966 - DNA, 75 bp, synthetic construct
  source 1..75: mol_type = other DNA
ggcaaaggatattattgctgtcaatggttctgcgcaatatctgttaagtcataatattgttccctttatttatgt

SEQ ID NO: 572967 - DNA, 75 bp, synthetic construct
  source 1..75: mol_type = other DNA
agtatgcgcggattatttgttctggtcttgatttaacgggtagctgttctcgtttctatgatgagaataaaaatc

SEQ ID NO: 572968 - DNA, 75 bp, synthetic construct
  source 1..75: mol_type = other DNA
tccagccagacggcagcgaagaccagcgaaacgaatgccaaagccagcgaaactgcggcaaaaaacagtcaggat

SEQ ID NO: 572969 - DNA, 75 bp, synthetic construct
  source 1..75: mol_type = other DNA
agaatgcagggggagaaacacgatacttatataacggtagttccggaagtgatgttattacagtaggcgaaagct

SEQ ID NO: 572970 - DNA, 75 bp, synthetic construct
  source 1..75: mol_type = other DNA
atgattttgcctgttatgccagccaaagcgaaactgaacgttgagcagctgctttatcttgatggcacgatttca

SEQ ID NO: 572971 - DNA, 75 bp, synthetic construct
  source 1..75: mol_type = other DNA
tacgcaaagttggcggaaaaatagcctctcttgatttacccgatcaacatagcatgacattctatcatcacgttg

SEQ ID NO: 572972 - DNA, 75 bp, synthetic construct
  source 1..75: mol_type = other DNA
gacggcatgacatgctcatttgcaaataagcatataagcactgaaaccaaaacagtatggaaatatattcgtgaa

SEQ ID NO: 572973 - DNA, 75 bp, synthetic construct
  source 1..75: mol_type = other DNA
gctcatcttcggactatcggccgtatgggctttgtacccggtcttttcaacatcaacgaaccgatattgttcggc

SEQ ID NO: 572974 - DNA, 75 bp, synthetic construct
  source 1..75: mol_type = other DNA
taacggtacgacggtgagcggtacgaatagtgaaggggcattctccatccacaatcacgttgcaacaatgtgttg

SEQ ID NO: 572975 - DNA, 75 bp, synthetic construct
  source 1..75: mol_type = other DNA
atgaatggcaacgtttgtcgtctgattagggggagtctgatggcgctgccgttactgatacccccgtttgtgctg

SEQ ID NO: 572976 - DNA, 75 bp, synthetic construct
  source 1..75: mol_type = other DNA
tcgatccgattatgtctggcttgctggcatttatggcatttttactggtcgcagcgccttatgctgacggcaaaa

SEQ ID NO: 572977 - DNA, 75 bp, synthetic construct
  source 1..75: mol_type = other DNA
gcgcgtcatgggccgccaactggagtttcagtccggtcattttgtgtctgatgtgcatggtgacatccgctgcga

SEQ ID NO: 572978 - DNA, 75 bp, synthetic construct
  source 1..75: mol_type = other DNA
gtgtttattttcccaccgttttcgcctgataccacctgggggtttgcacaggcgtggctgaaattctcgctggat

SEQ ID NO: 572979 - DNA, 75 bp, synthetic construct
  source 1..75: mol_type = other DNA
acaaatggcgcaccacatctctgagaaagcgccgttagccattgccgttatcaaagaagagctgcgtgtactggg

SEQ ID NO: 572980 - DNA, 75 bp, synthetic construct
  source 1..75: mol_type = other DNA
taaacctcggcgtcccgtataacctggtcggcattcacaacctgacccgcgacgcgggcttccacattgtcaaag

SEQ ID NO: 572981 - DNA, 75 bp, synthetic construct
  source 1..75: mol_type = other DNA
tttgatgagactctccctgcaattcaagattatgacttttatctccgcattgtaaaagaggggagaatcacgact

SEQ ID NO: 572982 - DNA, 75 bp, synthetic construct
  source 1..75: mol_type = other DNA
aacctccgccggtcagtcgcgggcaccgggacaggatgacggtacgcaggcccgtcgtcagccggttcgttacag

SEQ ID NO: 572983 - DNA, 75 bp, synthetic construct
  source 1..75: mol_type = other DNA
ctccggtcaggactctggaggcggtgccgggtgttcacccggtcagtcatcacctgcccggacgcatcaccaccc

SEQ ID NO: 572984 - DNA, 75 bp, synthetic construct
  source 1..75: mol_type = other DNA
ccaaagtcttctccgcaggccacgacatccatgaactgccatcaggcggtcgcgatcctctctcttacgatgatc

SEQ ID NO: 572985 - DNA, 75 bp, synthetic construct
  source 1..75: mol_type = other DNA
tgaacgctcattgctgaaaagcgaagaacaaaaagcgcaggataccgtctccgtggccaatacagcccgtagcaa

SEQ ID NO: 572986 - DNA, 75 bp, synthetic construct
  source 1..75: mol_type = other DNA
agctggagcgtgggcgtcacggcggcgcaggttagccctggcctgcggggacggttaatattgccgtttcagggg

SEQ ID NO: 572987 - DNA, 75 bp, synthetic construct
  source 1..75: mol_type = other DNA
gtcaccctctggcactacgatgcgtcggaccgcatcacgcaccggacggtgaacggcgacccggcagagcagtgg

SEQ ID NO: 572988 - DNA, 75 bp, synthetic construct
  source 1..75: mol_type = other DNA
tgcctgccatcgctggtgggcgttatatttcccccgctggtgtaaatccaccagccgggcgtaggaacccgttta

SEQ ID NO: 572989 - DNA, 75 bp, synthetic construct
  source 1..75: mol_type = other DNA
gaaatgtatcatgagcttgagcgcctgattgaagacgccaaaccggcaagccgccacctgaccgggctggctatc

SEQ ID NO: 572990 - DNA, 75 bp, synthetic construct
  source 1..75: mol_type = other DNA
aactggagcgtcaccgttccggcatcggcggttacagcattaggccaggccaactatacggtaacggcggcggtg

SEQ ID NO: 572991 - DNA, 75 bp, synthetic construct
  source 1..75: mol_type = other DNA
gcggtgatcgccgtggtgatccttacctggatggttttctggatgcgcaaagtgtcgcgcaacgtcaaagtacaa

SEQ ID NO: 572992 - DNA, 75 bp, synthetic construct
  source 1..75: mol_type = other DNA
caactactgttcataaacacgggcgttacaggatcatcacaggtgatgttttcattcgtcatggttactcctacc

SEQ ID NO: 572993 - DNA, 75 bp, synthetic construct
  source 1..75: mol_type = other DNA
tctggatggggctgacgggcgggaaagcaacgctggtggagttgccaaaaaaaacggaaagatatccgaatcatt

SEQ ID NO: 572994 - DNA, 75 bp, synthetic construct
  source 1..75: mol_type = other DNA
actggtggtgagcatacgctggtgcatttagcgaagaagaaggccgaatacccaaaccattatgttattgagcgc

SEQ ID NO: 572995 - DNA, 75 bp, synthetic construct
  source 1..75: mol_type = other DNA
ttatgagcgtggaaactcaggcggtgactccttaaatttgcaaaaggaggctgccagaatggctacgaccccaac

SEQ ID NO: 572996 - DNA, 75 bp, synthetic construct
  source 1..75: mol_type = other DNA
gcagtgccagcaggtcggaccaccagcaccggaaaccgtgttatatttcccccgctggtgtaaatccaccagccg

SEQ ID NO: 572997 - DNA, 75 bp, synthetic construct
  source 1..75: mol_type = other DNA
aatctggatgggtctgacgggcggtaaagcagcgctggtggagctgccaaaggcaacggaaagatatccgaatta

SEQ ID NO: 572998 - DNA, 75 bp, synthetic construct
  source 1..75: mol_type = other DNA
acaatctggctacgtttacactaagtggcggacggaatgtcgaatacagcataactgccactcaacgccagaatc

SEQ ID NO: 572999 - DNA, 75 bp, synthetic construct
  source 1..75: mol_type = other DNA
ttctcaccttctcctgaatttatcacagctgtattgacgctccgattaggttcggtagtcgccttgattgacaat

SEQ ID NO: 573000 - DNA, 75 bp, synthetic construct
  source 1..75: mol_type = other DNA
aactcaggcggttattatgatggcaataacgaggcatcgctagttgacgacacgcttaaaatataccccacacct

SEQ ID NO: 573001 - DNA, 75 bp, synthetic construct
  source 1..75: mol_type = other DNA
aagaacaatgcaggatagacaatccgatgtcaaatggtaccattcgatatcggattgtccaaaaacagggttttt

SEQ ID NO: 573002 - DNA, 75 bp, synthetic construct
  source 1..75: mol_type = other DNA
cgcgaaatcgttgcaggcgttggatttcagcgcaattgcagacaagactgcttacgacaatattggctggccgga

SEQ ID NO: 573003 - DNA, 75 bp, synthetic construct
  source 1..75: mol_type = other DNA
aattaaaaccccaaaaagattaaaaaaacaccacaaaacggatgtttcttcaacaccacttttgctccatatgaa

SEQ ID NO: 573004 - DNA, 75 bp, synthetic construct
  source 1..75: mol_type = other DNA
agagtataaggagcaagaagggaacccagaagtgaaatctaagcgccgagaacgccatcaagaaatactgtcaga

SEQ ID NO: 573005 - DNA, 75 bp, synthetic construct
  source 1..75: mol_type = other DNA
ggcgctgctctcatcggcgcttaccgtcaaggcgctgctatgggccatccgacaactggataaccccggtcaact

SEQ ID NO: 573006 - DNA, 75 bp, synthetic construct
  source 1..75: mol_type = other DNA
tgcgaattatccagaagcaggtctttatcttgcagaaatgctttattatcccattaatctaattgaaaagtttca

SEQ ID NO: 573007 - DNA, 75 bp, synthetic construct
  source 1..75: mol_type = other DNA
cgccagcggggataaaccgtcaacgaaaacgcagagcgaggaacggatattgtgttccccgcgccagcggggata

SEQ ID NO: 573008 - DNA, 75 bp, synthetic construct
  source 1..75: mol_type = other DNA
ctggataatttatttggtatcaactttatcaattcagaacttgataatgcaggcttcgccataaccgtgccaggt

SEQ ID NO: 573009 - DNA, 75 bp, synthetic construct
  source 1..75: mol_type = other DNA
gacgatctcaattcatctaccgatcttgctgtcaggtcattaaccacatctaacccggtaaaatctggcggaggg

SEQ ID NO: 573010 - DNA, 75 bp, synthetic construct
  source 1..75: mol_type = other DNA
ccagcacatcagcccgggatgcgtcggcttcaaaagaggcagcaaaatcatcagaaatgagcgcagcctcttcgg

SEQ ID NO: 573011 - DNA, 75 bp, synthetic construct
  source 1..75: mol_type = other DNA
aaacagatgatcgcgttaccgcgctggaagaagaaaacgcagaattaaaacaaagattatctgcaattgaggcgg

SEQ ID NO: 573012 - DNA, 75 bp, synthetic construct
  source 1..75: mol_type = other DNA
ggacgcacttaattatcgcaaccaggcgcaattaattgttggcgataatatcggtcttggctcagccccgcgtga

SEQ ID NO: 573013 - DNA, 75 bp, synthetic construct
  source 1..75: mol_type = other DNA
ccgccgtgacggggttacttgttcaggtcgcccgtgaaacagatgatcgcgttaccgcgctggaagaggaaaata

SEQ ID NO: 573014 - DNA, 75 bp, synthetic construct
  source 1..75: mol_type = other DNA
ggaagtaatggaggcgatacctgaagctgtgggatcgtttactcattatggtgaagagttgcaaggtccgaccgt

SEQ ID NO: 573015 - DNA, 75 bp, synthetic construct
  source 1..75: mol_type = other DNA
aattcttaacaaagatcagaccttcggatactcaaaaggaagactggaaaagtggggccaaaacactgcgtgaaa

SEQ ID NO: 573016 - DNA, 75 bp, synthetic construct
  source 1..75: mol_type = other DNA
ataaaattattctgattgatataaagtgtatttcatctattgattcgcctgtttctgaatggaactctttatgta

SEQ ID NO: 573017 - DNA, 75 bp, synthetic construct
  source 1..75: mol_type = other DNA
aaaagaacttatagaggtttttgcatccatttctttatttgctgaagcacatttcgattctaaagcagctccttt

SEQ ID NO: 573018 - DNA, 75 bp, synthetic construct
  source 1..75: mol_type = other DNA
taaagactttactcattttgttttacctcattacagatttaagggtgaacaaatccctgccattgctggcatata

SEQ ID NO: 573019 - DNA, 75 bp, synthetic construct
  source 1..75: mol_type = other DNA
tctggtgtatcagtaaaggagccgtgttgaaacggaaattctggatattttgcctgctggtatttaacagtttta

SEQ ID NO: 573020 - DNA, 75 bp, synthetic construct
  source 1..75: mol_type = other DNA
aaaccgagcttgtaacggccattacataaacctcgtcagggcagtaaagtggtggagacaacaaaatgtcgacaa

SEQ ID NO: 573021 - DNA, 75 bp, synthetic construct
  source 1..75: mol_type = other DNA
tcaagcgtgaggcctgcagggcaagaaatttttatacgagattttcaaattgttaatggatgtcaaacgtctaat

SEQ ID NO: 573022 - DNA, 75 bp, synthetic construct
  source 1..75: mol_type = other DNA
tctacaaacacggtatgaatgccggattgcccggtgtcggggagagtaaaaatgtggtcaacctgcactgtgatg

SEQ ID NO: 573023 - DNA, 75 bp, synthetic construct
  source 1..75: mol_type = other DNA
gttcattccgttaatcaacaagggaggcggtgccggtatgcaggtgacggcttacacgcagacctcttctgatat

SEQ ID NO: 573024 - DNA, 75 bp, synthetic construct
  source 1..75: mol_type = other DNA
agcgggtgggccacaccattgtttatggtaccacccgtgtcggtaaaacccggctggcagagctgctggtcacac

SEQ ID NO: 573025 - DNA, 75 bp, synthetic construct
  source 1..75: mol_type = other DNA
ggatccataccaatgagactcgggtttgcttcgtaccacggcgatagattcgcacttcaggcactgggaagatgg

SEQ ID NO: 573026 - DNA, 75 bp, synthetic construct
  source 1..75: mol_type = other DNA
gcagattacttcggtaaagtgcttgatcgccttaaatcgctttcgcaccttacgacaagtgagtttatatctgat

SEQ ID NO: 573027 - DNA, 75 bp, synthetic construct
  source 1..75: mol_type = other DNA
agatttacaccaaaacactggtgtcggggcatcaggataccgccgatgtgacgtccggacaggatttcacctcca

SEQ ID NO: 573028 - DNA, 75 bp, synthetic construct
  source 1..75: mol_type = other DNA
aagacggcccaggtacagggtaactttaataacctgattatgctgcgcgtcagggagaaccgcaccgccgagctg

SEQ ID NO: 573029 - DNA, 75 bp, synthetic construct
  source 1..75: mol_type = other DNA
agttgcacgaaggctacgtcacgttaccgctacgcgaccgaccggggcatacgctggtcctcggcacaacccgcg

SEQ ID NO: 573030 - DNA, 75 bp, synthetic construct
  source 1..75: mol_type = other DNA
ggacagttccgatttcgtgcgcagccggtgtttccggcgaacgtgaaagcgggggaatacacaggcgcactgacc

SEQ ID NO: 573031 - DNA, 75 bp, synthetic construct
  source 1..75: mol_type = other DNA
tctgggcgcacttttgcgtcaggactctccgctgaatccggtacgccccctgccgccggtgggcgggaatccggc

SEQ ID NO: 573032 - DNA, 75 bp, synthetic construct
  source 1..75: mol_type = other DNA
tctgcgaagcgcggtacgttatgatcgtacctattttgacaaaattgtggcatccctgttgccgttgctggaaaa

SEQ ID NO: 573033 - DNA, 75 bp, synthetic construct
  source 1..75: mol_type = other DNA
gacgcagattgagaataatcagcaggtgctgggagaggacgacgtgccccgtaacatgcagggtcagccggatgc

SEQ ID NO: 573034 - DNA, 75 bp, synthetic construct
  source 1..75: mol_type = other DNA
acttaccgatgttcgctttttacatcaacggcgtgatgatttttataaatttagccagagaagtcgttataccat

SEQ ID NO: 573035 - DNA, 75 bp, synthetic construct
  source 1..75: mol_type = other DNA
aaagaaatactttcgttcagttaacttccgacactgggtattcggcacagaaacagggaagctcctgccatcagg

SEQ ID NO: 573036 - DNA, 75 bp, synthetic construct
  source 1..75: mol_type = other DNA
gtgcgtgaagcattattacgtctggtttcggtgaatgcgctctctgtcgcaccagcgcaagcatttacagtaccg

SEQ ID NO: 573037 - DNA, 75 bp, synthetic construct
  source 1..75: mol_type = other DNA
tcgatgccttttgcaaagcattcgctgcgccctatgaggagaccaaaaattttgaggcgtttgtgaactattgtg

SEQ ID NO: 573038 - DNA, 75 bp, synthetic construct
  source 1..75: mol_type = other DNA
caataccacgccagcgcgatggatcaaaccgggagaaagtatcatcattcaaaacatcgtcattaagaacggtaa

SEQ ID NO: 573039 - DNA, 75 bp, synthetic construct
  source 1..75: mol_type = other DNA
gtcgggcagcaattattatgcgcggctatatttccggcctgatggaaaactggctctttgccccgcaatcttttg

SEQ ID NO: 573040 - DNA, 75 bp, synthetic construct
  source 1..75: mol_type = other DNA
gggcgttgatgatctgaaccagcaagttgaaaaagcgttggaggatttagccaaccaatccctccgacacgaaat

SEQ ID NO: 573041 - DNA, 75 bp, synthetic construct
  source 1..75: mol_type = other DNA
gataacaattcaaaactagatgtaaaaaatgatgtggttgtatctacgggggtagatggtattcctaatgaaaaa

SEQ ID NO: 573042 - DNA, 75 bp, synthetic construct
  source 1..75: mol_type = other DNA
ccattatgaagataaagatcgcgacaaccagatttacttttcgatctccttaccgattggggaaagtggtcgact

SEQ ID NO: 573043 - DNA, 75 bp, synthetic construct
  source 1..75: mol_type = other DNA
caggcgttacctggcaccctgccctatggagcccggactttcctcccctccgcccgtctcccccgaagaggacga

SEQ ID NO: 573044 - DNA, 75 bp, synthetic construct
  source 1..75: mol_type = other DNA
ttccccgcaaagggcacatatatggacttcctcgagcggggggatatggtgtttgtatttgaggatgttatgtac

SEQ ID NO: 573045 - DNA, 75 bp, synthetic construct
  source 1..75: mol_type = other DNA
aaaaggcgcaggagaaagagcagtgtttgtctctgaatgtatcccttctaaatcctgttgaaaaaacgactcata

SEQ ID NO: 573046 - DNA, 75 bp, synthetic construct
  source 1..75: mol_type = other DNA
caagcggtgctcatgctccggcatttattcgttcacgacgggatacgaccgacgcaaactggtcgccgtgggcgc

SEQ ID NO: 573047 - DNA, 75 bp, synthetic construct
  source 1..75: mol_type = other DNA
gagttactcatcggctggagtggtacaagcggtgctcatgctccggcatttattcgttcacgacgggatacgacc

SEQ ID NO: 573048 - DNA, 75 bp, synthetic construct
  source 1..75: mol_type = other DNA
agactgttagttttatatttttaagtgcaagcgtatattttttgacctctaataggaatcataaagatttaaatg

SEQ ID NO: 573049 - DNA, 75 bp, synthetic construct
  source 1..75: mol_type = other DNA
gggcaatcctgccagtggtcgggccgtattctctcaggaacaggacggcattaaatcgcatacccacagcgccag

SEQ ID NO: 573050 - DNA, 75 bp, synthetic construct
  source 1..75: mol_type = other DNA
gggcaaacctgccagtggtcgggccgtattatctcaggaacaggacggcattaaatcgcagacccacagcgccag

SEQ ID NO: 573051 - DNA, 75 bp, synthetic construct
  source 1..75: mol_type = other DNA
tggttgctcggcgtgcaatatgcccgtgcgccggttgtcctgttagtggtgggtaatattctcaacattgtgctg

SEQ ID NO: 573052 - DNA, 75 bp, synthetic construct
  source 1..75: mol_type = other DNA
aacacatcattgcgttgctgacgtcattaacccagattcagcaactggccgaccgctatcttatctggcaggtca

SEQ ID NO: 573053 - DNA, 75 bp, synthetic construct
  source 1..75: mol_type = other DNA
attgacgaaaagttatctcataaagcaagtaaggattttgtcgaagtaaaaacaggtaatttaaaggcttggatg

SEQ ID NO: 573054 - DNA, 75 bp, synthetic construct
  source 1..75: mol_type = other DNA
gaaaaacatgatattatcccctatatatgagataataaaggaatcaaaatttaaagacatggagaaatatctaga

SEQ ID NO: 573055 - DNA, 75 bp, synthetic construct
  source 1..75: mol_type = other DNA
gcaaatccctccatcagatagtggttgtcgaacgtaagctactcacacaggaagaatgggagaagacattcaatc

SEQ ID NO: 573056 - DNA, 75 bp, synthetic construct
  source 1..75: mol_type = other DNA
gttgctgatttatcgcgctttgagagaggtaatcatcaacctgcgggcgtgtatcgggtggatctctggcgtaat

SEQ ID NO: 573057 - DNA, 75 bp, synthetic construct
  source 1..75: mol_type = other DNA
gatgcagaagtcttatcgcgcatcctgaatatcattggcgatatgccagcatacgggtatcgccgtatctgggcg

SEQ ID NO: 573058 - DNA, 75 bp, synthetic construct
  source 1..75: mol_type = other DNA
gggcaaccctgccagtggtcgggccgtattttctcaggaacaggacggcattaaatcgcatacccacagcgccag

SEQ ID NO: 573059 - DNA, 75 bp, synthetic construct
  source 1..75: mol_type = other DNA
atggagaaagagggtaaaggtgttgttgaagcgacactgatggcagtacgtatgcgtctgcgtcctatcctgatg

SEQ ID NO: 573060 - DNA, 75 bp, synthetic construct
  source 1..75: mol_type = other DNA
tcacgaaatccatcttctataaaaaaatcaaaacgctgcatctggattttaccccgcgtacggccattaacgctg

SEQ ID NO: 573061 - DNA, 75 bp, synthetic construct
  source 1..75: mol_type = other DNA
gtattgtctcaggaacaggacggcattaaatcgcagacccacagcgccagcgcatccagtacagatttggggacg

SEQ ID NO: 573062 - DNA, 75 bp, synthetic construct
  source 1..75: mol_type = other DNA
gatttatgtgaacactatcaatttagtgttagtacgctgcggcgctggcaagaacagcacgcagaaggcgtaaga

SEQ ID NO: 573063 - DNA, 75 bp, synthetic construct
  source 1..75: mol_type = other DNA
gtgttgattaacgcggttatcatgctagtaatgacgctggttgaacgtaaagttcgcctgcctggcaacatgggg

SEQ ID NO: 573064 - DNA, 75 bp, synthetic construct
  source 1..75: mol_type = other DNA
ttatcactgtggtgtgtgtaacgtccagcgttatggcggccgatgataatgccatcacggacggctccgttacgt

SEQ ID NO: 573065 - DNA, 75 bp, synthetic construct
  source 1..75: mol_type = other DNA
gtattatctcaggaacaggacggcattaaatcgcatacccacagcgccagcgcatccagtactgatttggggacg

SEQ ID NO: 573066 - DNA, 75 bp, synthetic construct
  source 1..75: mol_type = other DNA
gtattatctcaggaacaggacggcattaaatcgcaaacccacagcgccagcgcatccagtacagatttggggacg

SEQ ID NO: 573067 - DNA, 75 bp, synthetic construct
  source 1..75: mol_type = other DNA
gggcaagcctgccagtggtcgggccgtattgtctcaggaacaggacggcattaaatcgcacacccacagcgccag

SEQ ID NO: 573068 - DNA, 75 bp, synthetic construct
  source 1..75: mol_type = other DNA
gtattctctcaggaacaggacggcattaaatcgcacacccacagcgccagcgcatccagtacagatttggggacg

SEQ ID NO: 573069 - DNA, 75 bp, synthetic construct
  source 1..75: mol_type = other DNA
gtattatctcaggaacaggacggcattaaatcgcagacccacagcgccagcgcatccagtacggatttggggacg

SEQ ID NO: 573070 - DNA, 75 bp, synthetic construct
  source 1..75: mol_type = other DNA
gtattatctcaggaacaggacggcattaaatcgcacacccacagcgccagcgcatccagtaccgatttggggacg

SEQ ID NO: 573071 - DNA, 75 bp, synthetic construct
  source 1..75: mol_type = other DNA
ttaatgtaattctgcaggagatgaaaaatcaggccggagaagaaaaagaagacatcaaaaacattacaaaaatgc

SEQ ID NO: 573072 - DNA, 75 bp, synthetic construct
  source 1..75: mol_type = other DNA
cggagagtacatcgatttgacgctggatcaattcgacgaatatccggactacattccttacgaacctgtcgaatc

SEQ ID NO: 573073 - DNA, 75 bp, synthetic construct
  source 1..75: mol_type = other DNA
agcgtcttccggcgcagaaacggcatcagcaaaggccactgaggcatcaaaaagtgccgctgctgcagagtcctc

SEQ ID NO: 573074 - DNA, 75 bp, synthetic construct
  source 1..75: mol_type = other DNA
tagtggcttttttagtcattaatgtagctaatgccagcgtgatccttaataacacccgtattgtgattgacaatg

SEQ ID NO: 573075 - DNA, 75 bp, synthetic construct
  source 1..75: mol_type = other DNA
accggcattaaattggtggacggttgttttccggatttggaacgcatcattccgaaaaaatttgacctctgtaca

SEQ ID NO: 573076 - DNA, 75 bp, synthetic construct
  source 1..75: mol_type = other DNA
tatggcctggctggccatgttaacgaaaaaatccgtaatgcaatccagaaaaaggggaagtccaatgtccactga

SEQ ID NO: 573077 - DNA, 75 bp, synthetic construct
  source 1..75: mol_type = other DNA
gggcgtaatattttccagtctgaccatccggtggcgatgatgaaagccgtacaggcggtggttcaccataacgaa

SEQ ID NO: 573078 - DNA, 75 bp, synthetic construct
  source 1..75: mol_type = other DNA
gtcagtaagctcgataacacgctgctgtctaacggtacgttgctgaacgtgaaattcactccggcgaccctggaa

SEQ ID NO: 573079 - DNA, 75 bp, synthetic construct
  source 1..75: mol_type = other DNA
atgcatcagagcttccatgtaaaactgataagcgggtgtatcaagcaatttcgtccatccgcgattatcaaatct

SEQ ID NO: 573080 - DNA, 75 bp, synthetic construct
  source 1..75: mol_type = other DNA
cttcaggtctggaaacagtgaatgcggcgtttgtccgcaaactgcttgctgctcttgtgggttcatctcctgaaa

SEQ ID NO: 573081 - DNA, 75 bp, synthetic construct
  source 1..75: mol_type = other DNA
tcggcaccgcctgggggggggggatgtgcactcaacggttcagggcgtatctgctgaacgagcctggcgcgatcc

SEQ ID NO: 573082 - DNA, 75 bp, synthetic construct
  source 1..75: mol_type = other DNA
tatggtatgccgaaatcactgcatgacctgagtaatcaccgctgtaatacatttcgacatgcggcaaccgggcga

SEQ ID NO: 573083 - DNA, 72 bp, synthetic construct
  source 1..72: mol_type = other DNA
gaaggggggatggaatttttatcagtatccgttgaatccggtcataaatgtagatccgcaaggtttggttga

SEQ ID NO: 573084 - DNA, 75 bp, synthetic construct
  source 1..75: mol_type = other DNA
agctaactgcaacggttaaagatcagttcgacaatgaggtgaacaatcttccggtaacattcagctcagcctctt

SEQ ID NO: 573085 - DNA, 75 bp, synthetic construct
  source 1..75: mol_type = other DNA
gtggtgtatcagagcactgcatggccggatttgcgcgatgtgcgggtttttaaccatctgggggatatggtgccg

SEQ ID NO: 573086 - DNA, 75 bp, synthetic construct
  source 1..75: mol_type = other DNA
atgaaaaaaagtgtattgacggcgtttataactgtggtatgtgcaacgtccagtgttatggcagctgatgataat

SEQ ID NO: 573087 - DNA, 75 bp, synthetic construct
  source 1..75: mol_type = other DNA
tcattattccgcccattatctttaacggaatagcgtatagcgatccgggaagtggtaatattggtgctcatacgc

SEQ ID NO: 573088 - DNA, 75 bp, synthetic construct
  source 1..75: mol_type = other DNA
ttttaccgctggttggtgtctggtgttatctactggacggcatgtttataggtgcaacgcgcgccgccgaaatgc

SEQ ID NO: 573089 - DNA, 75 bp, synthetic construct
  source 1..75: mol_type = other DNA
acgctgaacatccctgctcaacaggtggtgacgaataacagcgacagcgtgcagctgacggcgacggtgaaagat

SEQ ID NO: 573090 - DNA, 75 bp, synthetic construct
  source 1..75: mol_type = other DNA
aaatgcaactaataaccattttgatttgcctgctagtgaaattgttacagcaaacactaaagatgctggattttt

SEQ ID NO: 573091 - DNA, 75 bp, synthetic construct
  source 1..75: mol_type = other DNA
gacgtcaggaaattgaagcatggcgcacagaacaggaggcgaagccgttcacgtttgaatggaacggccgcacgt

SEQ ID NO: 573092 - DNA, 75 bp, synthetic construct
  source 1..75: mol_type = other DNA
ggcgctgcgcgggctttctctggcggctatctggcgtcgtcactggcgcaacggaacctggtttgccggagcgtg

SEQ ID NO: 573093 - DNA, 75 bp, synthetic construct
  source 1..75: mol_type = other DNA
gaagcgccgggtattcgtggaatggtgatgttggtgtttacgctgccgggctttgatcgggtattcaaagtcatc

SEQ ID NO: 573094 - DNA, 75 bp, synthetic construct
  source 1..75: mol_type = other DNA
gggaaattctgccaggtaaaaccaccgctgaattgtatatggctatcggctgccagaagcacgccaaaaccgaaa

SEQ ID NO: 573095 - DNA, 75 bp, synthetic construct
  source 1..75: mol_type = other DNA
cacaacagtgcgcatcttgagatcataccattcattagtggttacagagataaggattcactacgctacatagaa

SEQ ID NO: 573096 - DNA, 75 bp, synthetic construct
  source 1..75: mol_type = other DNA
tgtaatcccgatgatgatacagtttgtactgccgactggaaaccagttgctgtagatcctgcattctccgatggt

SEQ ID NO: 573097 - DNA, 75 bp, synthetic construct
  source 1..75: mol_type = other DNA
aaatggcgcaagcaaggcactgttgcaaagttagcgatgaggcagccttttgtcttattcaaaggccttacattt

SEQ ID NO: 573098 - DNA, 75 bp, synthetic construct
  source 1..75: mol_type = other DNA
agagcaagccgcagcggtgttaaagctgattgagcgcggggttattggctggaatgagccggacgtcgtgaaggt

SEQ ID NO: 573099 - DNA, 75 bp, synthetic construct
  source 1..75: mol_type = other DNA
tttatatgggacatctgcgacaaaaactggaacaggatcccgctcgcccccgccatttcattactgaaaccggta

SEQ ID NO: 573100 - DNA, 75 bp, synthetic construct
  source 1..75: mol_type = other DNA
gcctcatgaaaatcacaataatattaagatatcagaattttttcgtacattccttgttcgaatggtagataaatt

SEQ ID NO: 573101 - DNA, 75 bp, synthetic construct
  source 1..75: mol_type = other DNA
aatgttttcaaaacattcttcagagtattaagcccttacgactacacactgtattgcaggaagtgggtaaaacca

SEQ ID NO: 573102 - DNA, 75 bp, synthetic construct
  source 1..75: mol_type = other DNA
tcgtgtccaaaaaaactgaggttcaggatgtaaaaaaaatagtagaaatgcttaaggaacaagagcgctcagagt

SEQ ID NO: 573103 - DNA, 75 bp, synthetic construct
  source 1..75: mol_type = other DNA
atttgggggaattggtaaggctaaagggaattcccagcctaaaattgaacaaatcctcaagccagagaaaaactg

SEQ ID NO: 573104 - DNA, 75 bp, synthetic construct
  source 1..75: mol_type = other DNA
gtaataatgttgctgccggtgcagcaggcgcagcaacgggagagctggcagccagagcgattgccggaatgctgt

SEQ ID NO: 573105 - DNA, 75 bp, synthetic construct
  source 1..75: mol_type = other DNA
agtttaaatatcttcagcttttagctggggaacatccagaatacgttctgtgcaaaagggacaagcctaaatgta

SEQ ID NO: 573106 - DNA, 75 bp, synthetic construct
  source 1..75: mol_type = other DNA
ctggttgatgacggtgttatcgaatggaatgacccggaggccgtgagggcgctcagaggtgcattaaaacacgga

SEQ ID NO: 573107 - DNA, 75 bp, synthetic construct
  source 1..75: mol_type = other DNA
tgtggctggcattaaccgtctttctggctttgcgcgggctttctctggcggctatctggcggcgtcactggcgca

SEQ ID NO: 573108 - DNA, 75 bp, synthetic construct
  source 1..75: mol_type = other DNA
ggttctgaacagatactccgctcgtttgagctgcacctgttctctaaaatcgggaatatccctcacgatgcagct

SEQ ID NO: 573109 - DNA, 75 bp, synthetic construct
  source 1..75: mol_type = other DNA
gactcaactctatatagcgccattgtccaaaaaggcgatttggctgacaacatcagaaaagagagaaaaacgacc

SEQ ID NO: 573110 - DNA, 75 bp, synthetic construct
  source 1..75: mol_type = other DNA
taaaagcaaaccgccattttctgtgatacctcccgtttctcgcattgaaccacagcaagagaaaatattacgcat

SEQ ID NO: 573111 - DNA, 75 bp, synthetic construct
  source 1..75: mol_type = other DNA
gctaacggtgcctggagcgtgcaggtgccgaccgccgatgcacaggcgttaggcgaagggaatcaggcggtactg

SEQ ID NO: 573112 - DNA, 75 bp, synthetic construct
  source 1..75: mol_type = other DNA
agatggttgaagtgttatcaggacctgagcggcgtcggcgtcgtacaccgcaggaaaaaattgccattattcagc

SEQ ID NO: 573113 - DNA, 75 bp, synthetic construct
  source 1..75: mol_type = other DNA
cgcttattcgatgaggcgttccgtgccaagataaggggattgcgtaactgggcggctaatcatggagatcaggga

SEQ ID NO: 573114 - DNA, 75 bp, synthetic construct
  source 1..75: mol_type = other DNA
tggctcggttctacattcatggatagtaaccaggtgtggtttcaaagcatgatttccggatatttattagattca

SEQ ID NO: 573115 - DNA, 75 bp, synthetic construct
  source 1..75: mol_type = other DNA
ataataatgaatctaaacacaaggaacgtcagataatgcaacacgccctaaaagttgttggaatgatgtcaattt

SEQ ID NO: 573116 - DNA, 75 bp, synthetic construct
  source 1..75: mol_type = other DNA
tcgattttgtgatttagagaaaaagtatagcaagtccatcagaagatatttcttttattctaataatgatgtata

SEQ ID NO: 573117 - DNA, 75 bp, synthetic construct
  source 1..75: mol_type = other DNA
atcaggctgagttcagcatcaaggcaatgtgccgcgtgccccgggtggcccgcagcggctggtatacgtggtgtc

SEQ ID NO: 573118 - DNA, 75 bp, synthetic construct
  source 1..75: mol_type = other DNA
ccggcgcggcgtctcgagcaatcacgctggtcggtgtctctccgttaatcaccattaacaccgtctccggcgatg

SEQ ID NO: 573119 - DNA, 75 bp, synthetic construct
  source 1..75: mol_type = other DNA
gctaacggtgcctggagcgtgcaggtaccgaccgccgatgcgcaggcgttaggcgaagggaatcaggcagtgctg

SEQ ID NO: 573120 - DNA, 75 bp, synthetic construct
  source 1..75: mol_type = other DNA
aatgatctgttgatctatatgcaggatggcacggttatccgttgcaacggctatttcctgcaagcggcaaatacc

SEQ ID NO: 573121 - DNA, 75 bp, synthetic construct
  source 1..75: mol_type = other DNA
ttttgccgttgagcctttgaccttaaaaagcggctctgccgcgcctcggagtcctgtcaataactgtggaaagct

SEQ ID NO: 573122 - DNA, 75 bp, synthetic construct
  source 1..75: mol_type = other DNA
tggtttactgatggctgtcaccggtgcgctgattgatgaatcgcttgtggaaaaagcgaataagttctggggtat

SEQ ID NO: 573123 - DNA, 75 bp, synthetic construct
  source 1..75: mol_type = other DNA
cgtttgctcttgagaaattccttaaagagcacaggaaaaagctctcgttgcaaaccctggaacgaaccaaatctg

SEQ ID NO: 573124 - DNA, 75 bp, synthetic construct
  source 1..75: mol_type = other DNA
ttaacgaagggatcaacgcccgcgaaaccatcagtgccgcgatggctcagcgctataagaacattgaagttattg

SEQ ID NO: 573125 - DNA, 75 bp, synthetic construct
  source 1..75: mol_type = other DNA
aaaacctttttaatggtaaggaaggaataagcacctgtactaaacatctacttgagcttatacaaaacgccatac

SEQ ID NO: 573126 - DNA, 75 bp, synthetic construct
  source 1..75: mol_type = other DNA
aacaatgatgaagttaatggattagtacaagagttcaaaagcctttttaatggtaaggaaggaataagcacctga

SEQ ID NO: 573127 - DNA, 75 bp, synthetic construct
  source 1..75: mol_type = other DNA
ctatatgttagaaattaaggatttagttagatgtgatgtgactgctaaatgtatgagcgcagttactagaggtgg

SEQ ID NO: 573128 - DNA, 75 bp, synthetic construct
  source 1..75: mol_type = other DNA
ctgccttacgtactccttattatattgtttttaggataccctgttgcatctttatttattgggatgtctaataat

SEQ ID NO: 573129 - DNA, 75 bp, synthetic construct
  source 1..75: mol_type = other DNA
aaggagcgcttgaaaaagccctggctattgcgtgccagcttcagaaaatggggatgacgccggagcagattaagc

SEQ ID NO: 573130 - DNA, 75 bp, synthetic construct
  source 1..75: mol_type = other DNA
ttgtatcgggaataatattgagttcttgcagttgggctgcagatccattagggacgattaatatcgaattgcatg

SEQ ID NO: 573131 - DNA, 75 bp, synthetic construct
  source 1..75: mol_type = other DNA
gccgtttggcgtggctgtcatctttacgggtgaagtgatgctgaactttgtcttcttctggcccttgttcatgtc

SEQ ID NO: 573132 - DNA, 75 bp, synthetic construct
  source 1..75: mol_type = other DNA
ctggtcgctccgctgatccagttcccacgcgttggggcggtaaccggcaacccgcgtattcgcacccgttccacg

SEQ ID NO: 573133 - DNA, 75 bp, synthetic construct
  source 1..75: mol_type = other DNA
ccgcagattcagagagggaaaaaaactgaacaaagcactgaatatcttaaacgagaagttaaaacagcttccgtc

SEQ ID NO: 573134 - DNA, 75 bp, synthetic construct
  source 1..75: mol_type = other DNA
ttgccggggggttacgctgaagctgctgactggctggatgtaacagagaacgcattatttaaccgccttcgtgcc

SEQ ID NO: 573135 - DNA, 75 bp, synthetic construct
  source 1..75: mol_type = other DNA
gctggataaaccgctggcggtgcttatccagtcgtcgtcggcggcggggaagtcctcgctgatggatgcggtgct

SEQ ID NO: 573136 - DNA, 75 bp, synthetic construct
  source 1..75: mol_type = other DNA
atggatcataattttgaaaaaggcgcatatcgagaggaaagcgatttcattcagcgattttggaacgaaggatac

SEQ ID NO: 573137 - DNA, 75 bp, synthetic construct
  source 1..75: mol_type = other DNA
ttcgtgtgctgcgatttccagagcacgttaaaaatcatgattggtagtgacgcggttatctattgcgatccgcca

SEQ ID NO: 573138 - DNA, 75 bp, synthetic construct
  source 1..75: mol_type = other DNA
gagccctttgggtgggctgtatttcctcaaaaacacgtttgagcgcaagctgctgccgcgtcttgagcgtgttaa

SEQ ID NO: 573139 - DNA, 75 bp, synthetic construct
  source 1..75: mol_type = other DNA
taccactgcgaccatcgcgccctgccgctggcgctcatcagcacggaaggggcaacagcgtggtgcgcagaatat

SEQ ID NO: 573140 - DNA, 75 bp, synthetic construct
  source 1..75: mol_type = other DNA
tgggatggtgacaacacacaggctccgcacctgtgcggtctgccggatgtggaagggctgataaacgcagcctca

SEQ ID NO: 573141 - DNA, 75 bp, synthetic construct
  source 1..75: mol_type = other DNA
ccggtggcaaaagccgcgtgatgcctgaattactcccgcatttaccaaaggctggttgcctcgtggagccttttg

SEQ ID NO: 573142 - DNA, 75 bp, synthetic construct
  source 1..75: mol_type = other DNA
aggcctatccgatgctggaggcgataaaggcggaactgcagtttaacccccgtctgctgatggactttcctgaag

SEQ ID NO: 573143 - DNA, 75 bp, synthetic construct
  source 1..75: mol_type = other DNA
gaacgatgcaatagcggctccccgtggtgaagccaaatccaccatcgtgagtcagctttttgtcatctggtgcat

SEQ ID NO: 573144 - DNA, 75 bp, synthetic construct
  source 1..75: mol_type = other DNA
atggaaaaaacgggatcaatcaaaaaggtactgggtaacagaatcagggctctacgccgtgagatggacctgtcc

SEQ ID NO: 573145 - DNA, 75 bp, synthetic construct
  source 1..75: mol_type = other DNA
atgagtgcgcttgatgaccgctgtaatattattgctgacgaccgtagccgttttagtgttatcaacgcaggttta

SEQ ID NO: 573146 - DNA, 75 bp, synthetic construct
  source 1..75: mol_type = other DNA
ttggtcagcataaaagcgcgccttacttcccggaggcggagatccggcagtttgctgagaaggccaacgacacca

SEQ ID NO: 573147 - DNA, 75 bp, synthetic construct
  source 1..75: mol_type = other DNA
ttgagccgcggaacgttcttaaccgcctgtggcagcagctacgccagcgcggattgttcccggttgtagcggtag

SEQ ID NO: 573148 - DNA, 75 bp, synthetic construct
  source 1..75: mol_type = other DNA
gcttaaagaagttattttcagtatcagaaaggggaaagggaagaaaaaaacactcagggaggcgtcgtgttcgcg

SEQ ID NO: 573149 - DNA, 75 bp, synthetic construct
  source 1..75: mol_type = other DNA
ttcagtggtgcaattaccaactggcgtactgttggcggtaacgatcaggagatccagacctggcagcgcccggaa

SEQ ID NO: 573150 - DNA, 75 bp, synthetic construct
  source 1..75: mol_type = other DNA
attttaggtctgggtcagggttccggctactccctgtacatccaggatcgcggagggctgggctatggcgcgctg

SEQ ID NO: 573151 - DNA, 75 bp, synthetic construct
  source 1..75: mol_type = other DNA
atataaaatgccctgaaggttcagagagagtaggcgattatcacactcacggtttttactctgacgataaaggca

SEQ ID NO: 573152 - DNA, 75 bp, synthetic construct
  source 1..75: mol_type = other DNA
cagcaggtcagcagccgtcgcttgctgtcgaacctggtgagcgagtttcgccgcgaattgccgcgccaccaggca

SEQ ID NO: 573153 - DNA, 75 bp, synthetic construct
  source 1..75: mol_type = other DNA
atggtgctcactggcagcggcatgctttgcactaccgctaacgccgaagagtattatttcgaccccatggtaatg

SEQ ID NO: 573154 - DNA, 75 bp, synthetic construct
  source 1..75: mol_type = other DNA
aagattttaaagtagtaaatgatttttttgcatcacatgttcaaaaaacatttaacgtgaatatagccaaatggg

SEQ ID NO: 573155 - DNA, 75 bp, synthetic construct
  source 1..75: mol_type = other DNA
agtcagtgatgacatcataaatgcattgcgggatgaaacaccgcttcaggatagccgccttgaagtcctgaggtc

SEQ ID NO: 573156 - DNA, 75 bp, synthetic construct
  source 1..75: mol_type = other DNA
atgaaactcggcgacacaccgctggtggagtacacccgcgaccgcctgcaccgggaaacgctgcgccgcttcggc

SEQ ID NO: 573157 - DNA, 75 bp, synthetic construct
  source 1..75: mol_type = other DNA
gggccgcacagtccagcgcgaaggccgtctggccgcgatatccgcaaaagccgcgccaacaccggctacatcttc

SEQ ID NO: 573158 - DNA, 75 bp, synthetic construct
  source 1..75: mol_type = other DNA
cgataaaaatataaaactgctagcgattaacggtattgcaccgactgccgaaaacattcgcaacggcaaatatcc

SEQ ID NO: 573159 - DNA, 75 bp, synthetic construct
  source 1..75: mol_type = other DNA
tgtggtatgcaacaacactggcaaatgaaagttccctatggattatctttgcagtgttagcattgtttgatttca

SEQ ID NO: 573160 - DNA, 75 bp, synthetic construct
  source 1..75: mol_type = other DNA
ccccgcgtgaagcgtacaacgcgattgtcgacaacaatgtcgaactggtatccattgaaaatctgccaggacgta

SEQ ID NO: 573161 - DNA, 75 bp, synthetic construct
  source 1..75: mol_type = other DNA
ctactcacctttaccgcctatgcgctggatggttttgccggtaatgactccaacttattgatagtgttttatgtt

SEQ ID NO: 573162 - DNA, 75 bp, synthetic construct
  source 1..75: mol_type = other DNA
ttagtggtaaatgacaacgacttgcgtaacgacctggcctggctttccgttcgtggggtcatccatctgagcctg

SEQ ID NO: 573163 - DNA, 75 bp, synthetic construct
  source 1..75: mol_type = other DNA
aaaaattggatccagcctaagtgcatcatttaataattcaggttcaattagtaccctggatgggacacagtttat

SEQ ID NO: 573164 - DNA, 75 bp, synthetic construct
  source 1..75: mol_type = other DNA
gccataccgtctgccggggcagcagcatgatgaggaatcagggctgtactataaccggaaccggtactatgaccc

SEQ ID NO: 573165 - DNA, 75 bp, synthetic construct
  source 1..75: mol_type = other DNA
atagtttatattttttaattacaaataatcaacagatatctgattctggtaattatataaaaatagtcccatcaa

SEQ ID NO: 573166 - DNA, 75 bp, synthetic construct
  source 1..75: mol_type = other DNA
taatctcacctgggtgcgcggttcgctggaagatacacattcgcttagcgaactggttgccggagccagcgcggt

SEQ ID NO: 573167 - DNA, 75 bp, synthetic construct
  source 1..75: mol_type = other DNA
tagggatgtttctacagtacggcattgaagacaatacatcttttcgaggagcatcggatgatactcatgcggtga

SEQ ID NO: 573168 - DNA, 75 bp, synthetic construct
  source 1..75: mol_type = other DNA
ttatcgagaccaaatggcacgataagcaaaccttagtcagtgttagcgagtcggagtactcgctaaagcttgagc

SEQ ID NO: 573169 - DNA, 75 bp, synthetic construct
  source 1..75: mol_type = other DNA
atcgctgaaaaaacaacaaatagtataaaaatgaacaatccgaatccatgcatgacgtgtggtgcctgttgtgca

SEQ ID NO: 573170 - DNA, 75 bp, synthetic construct
  source 1..75: mol_type = other DNA
attatataatatcagcaatgaaatgctaatggtgttgaataaatttctaactaaaaatcaaaataattacaaaag

SEQ ID NO: 573171 - DNA, 75 bp, synthetic construct
  source 1..75: mol_type = other DNA
agggcaatcaacttaacttaaaaaacccgaccggctattacctgacaatcgcctacctgggacgaaatgagcaag

SEQ ID NO: 573172 - DNA, 75 bp, synthetic construct
  source 1..75: mol_type = other DNA
cctttatcatctccatttctccagcctgtggaaacgctgtcgttatgcctggtatacctttcgtattccagctag

SEQ ID NO: 573173 - DNA, 75 bp, synthetic construct
  source 1..75: mol_type = other DNA
aagctggacatgaaaaagcatgggggctttttttacttaatatctttgaggtgaaagaactctcacttgctcatt

SEQ ID NO: 573174 - DNA, 75 bp, synthetic construct
  source 1..75: mol_type = other DNA
ttatatcaatgattttggtggattaagtttttatgaaataaactgcccgacggttaataactcttgtaatgtttc

SEQ ID NO: 573175 - DNA, 75 bp, synthetic construct
  source 1..75: mol_type = other DNA
tattatcagcagtggctctcctcagtgcatgtaccgtcgtaccaggctcccatatttctacaagtggtaaaacca

SEQ ID NO: 573176 - DNA, 75 bp, synthetic construct
  source 1..75: mol_type = other DNA
gccaaacccggcactcagccaattaccaatgtccccatgacattacttgatgccttcaatcttgctggcgggctt

SEQ ID NO: 573177 - DNA, 75 bp, synthetic construct
  source 1..75: mol_type = other DNA
tccaccagcatccgtgtagcggtagaaaaggttgatcaattaattaacctcgtcggcgagctggttatcacctag

SEQ ID NO: 573178 - DNA, 75 bp, synthetic construct
  source 1..75: mol_type = other DNA
ataacaataccgctgagcgtttacgcggttttgtcgatgctcatcaggcgattgggttaactgttccggataatc

SEQ ID NO: 573179 - DNA, 75 bp, synthetic construct
  source 1..75: mol_type = other DNA
cgtgaactcagcctgtatgaatcacagctctacaactggcgcagtaaacagcaaaatcagcagacgtcttctgaa

SEQ ID NO: 573180 - DNA, 75 bp, synthetic construct
  source 1..75: mol_type = other DNA
ggggtttttccagcgagagggtattttgggttttgaaaaagatgaagggcagggcgatgcttggctggaaaaagc

SEQ ID NO: 573181 - DNA, 75 bp, synthetic construct
  source 1..75: mol_type = other DNA
ggcgtgctgctcagtggtactgttgacattatctggccagaatatcagcacaatcccagtccggtatatatacct

SEQ ID NO: 573182 - DNA, 75 bp, synthetic construct
  source 1..75: mol_type = other DNA
atcaccagaagccctggacacgctgaacgagctggcagcggcgctgggtaatgacccgaactttgcgacaacggt

SEQ ID NO: 573183 - DNA, 75 bp, synthetic construct
  source 1..75: mol_type = other DNA
taaatgatttgatgtacagtggattcattgattattgtgaaactacaattaacccaatggaccagaaaaacgaaa

SEQ ID NO: 573184 - DNA, 75 bp, synthetic construct
  source 1..75: mol_type = other DNA
atgtcacctcggacacaccgccagctcgtaagtgttgaagtgatgtggcctgctcagacgctaccgcttccccta

SEQ ID NO: 573185 - DNA, 75 bp, synthetic construct
  source 1..75: mol_type = other DNA
ttaataaagcctttgaggaaaaatttccgctgaaagaattaaataatccagagcatgacagttacgcaatcagtg

SEQ ID NO: 573186 - DNA, 75 bp, synthetic construct
  source 1..75: mol_type = other DNA
gaaaggactcacatctcttctttctgatcttggcattgatacggctaaggataatgatttttcgttgggaaaagg

SEQ ID NO: 573187 - DNA, 75 bp, synthetic construct
  source 1..75: mol_type = other DNA
atgaacgagaaaaaaatgttaactgaaaatacaccagaaaacattaaacgtctgcggcaaaaaattggcctgacg

SEQ ID NO: 573188 - DNA, 75 bp, synthetic construct
  source 1..75: mol_type = other DNA
gccagaccatgattgaagcacttggtgaatatattgaggaaaatgaaagtctttcacaggatgatatttcaatac

SEQ ID NO: 573189 - DNA, 75 bp, synthetic construct
  source 1..75: mol_type = other DNA
aacctgcttaatatgcagaatatctccaccctgatccgccgtgccggatttaaacactggggaaaccggctgtgc

SEQ ID NO: 573190 - DNA, 75 bp, synthetic construct
  source 1..75: mol_type = other DNA
aataaaggtctagcttatgcattaaattacttgattgataaaattcttctagataagaatattaagtatattgct

SEQ ID NO: 573191 - DNA, 75 bp, synthetic construct
  source 1..75: mol_type = other DNA
aaacgatccgcattgaaccgccactgacactgaccattgaacagtgtgaactggtgatcaaagcggcgcgtaagg

SEQ ID NO: 573192 - DNA, 75 bp, synthetic construct
  source 1..75: mol_type = other DNA
ctgcatccaatatggtttcaacaactgaggtcgactttactaaatcaattcctagagaaaactggtcgaacgttc

SEQ ID NO: 573193 - DNA, 75 bp, synthetic construct
  source 1..75: mol_type = other DNA
tgttgatggtaactctgagctatatctttctactaaagattttatgcgcgagggtttaaaattcttcacggactt

SEQ ID NO: 573194 - DNA, 75 bp, synthetic construct
  source 1..75: mol_type = other DNA
gggaagaccaaatgaaagagacatagataatatcccaaccattggtgtttatgggataggtatgaagcgagctat

SEQ ID NO: 573195 - DNA, 75 bp, synthetic construct
  source 1..75: mol_type = other DNA
tatgtaagatttaatgtgaatttgaaaaatcaggacacaaataatagttcatttagctacggagataaccgattc

SEQ ID NO: 573196 - DNA, 75 bp, synthetic construct
  source 1..75: mol_type = other DNA
attgaaccaccactgacactgaccattgaacagtgtgaactggtgatcaaagcggcgcgtaaggcgctggcggcc

SEQ ID NO: 573197 - DNA, 75 bp, synthetic construct
  source 1..75: mol_type = other DNA
gtgcaaaaaaccggtgatgatgtggctgcggtgatcctcgaaccgattcagggtgaaggtggcgtaattctgccg

SEQ ID NO: 573198 - DNA, 75 bp, synthetic construct
  source 1..75: mol_type = other DNA
actccgatgagcaaaaacaggttgccgttgaacattatcttaaccacggctgctgcctggcgtttaccagcagag

SEQ ID NO: 573199 - DNA, 75 bp, synthetic construct
  source 1..75: mol_type = other DNA
ctgtcatggcactctgtacacgacaaatatcagccagtgaaatcggaaataacggagtaccgccttccatgccgc

SEQ ID NO: 573200 - DNA, 75 bp, synthetic construct
  source 1..75: mol_type = other DNA
atgaacatcttcacccaagttgtggaagggggatgcggacgatttcctagactctcaggagatgaaacatgttta

SEQ ID NO: 573201 - DNA, 75 bp, synthetic construct
  source 1..75: mol_type = other DNA
gatgttggctccattaaatgtaggtgacagtcctgaggctgtgatagccaaaataaacctagtggctcgctatat

SEQ ID NO: 573202 - DNA, 75 bp, synthetic construct
  source 1..75: mol_type = other DNA
attattggagggcctaactgccgttcatattacaaatatcgcatatgcaaaagcagaaattttccctgtagaaaa

SEQ ID NO: 573203 - DNA, 75 bp, synthetic construct
  source 1..75: mol_type = other DNA
ctgaccatcgaacgagtgacaaaacatgggatttaggttattcacaatatgcatatttagagttgccaaatagat

SEQ ID NO: 573204 - DNA, 75 bp, synthetic construct
  source 1..75: mol_type = other DNA
cgtcttatccgtctgccagaagtgcaaaaacgtactggattcagcaaagcatggatttatagacttatcagcgaa

SEQ ID NO: 573205 - DNA, 75 bp, synthetic construct
  source 1..75: mol_type = other DNA
ttcatccatttgaaattcatttgtattctatccctgtagaaacaacagaggacatacatatggaaaatcaagctc

SEQ ID NO: 573206 - DNA, 75 bp, synthetic construct
  source 1..75: mol_type = other DNA
ttgaagacagaataccttgcatggaagcattgtttaattttggtagctatagtttagttgatggggatgatgagt

SEQ ID NO: 573207 - DNA, 75 bp, synthetic construct
  source 1..75: mol_type = other DNA
cacccaaccagaaatgggcaggcgatatcacttatggtgtgcccggagttcagggcgggcatggatgcttaaatg

SEQ ID NO: 573208 - DNA, 75 bp, synthetic construct
  source 1..75: mol_type = other DNA
tggattcgaattgactgacaagcctatttcaaaagataaaaatattaacaggactgcaaaatttaaacagatgaa

SEQ ID NO: 573209 - DNA, 75 bp, synthetic construct
  source 1..75: mol_type = other DNA
ataactccataaatgaaatgttaatattccgtgatgaaatattaccttcaaactattttgttacagatcgttttg

SEQ ID NO: 573210 - DNA, 75 bp, synthetic construct
  source 1..75: mol_type = other DNA
gaaaaataccagccttacattataacaacagacaagagctacaaattatgagtagaacacaagaatataaattca

SEQ ID NO: 573211 - DNA, 75 bp, synthetic construct
  source 1..75: mol_type = other DNA
ctggcagtaccagagccacggtcgcgactatcatctgcatccggcagctggctcaatgttgattaatcagttgat

SEQ ID NO: 573212 - DNA, 75 bp, synthetic construct
  source 1..75: mol_type = other DNA
ttttaattaatagtgggttcgtgaaaaatagtgacactgacttttataaagtgcatgataagtttgtatactgta

SEQ ID NO: 573213 - DNA, 75 bp, synthetic construct
  source 1..75: mol_type = other DNA
agatactattgatagaatagagactgctgctgataattctcttgttttaattgaagaaattgaaaatggactgca

SEQ ID NO: 573214 - DNA, 75 bp, synthetic construct
  source 1..75: mol_type = other DNA
acactgccgccgtctgcttgaacgttaccgcgaacacggaccactttcgctggtaaatcgtcgccgtgggcagcc

SEQ ID NO: 573215 - DNA, 75 bp, synthetic construct
  source 1..75: mol_type = other DNA
ttcatccattggtttattaacccagacaggcgattacacgcggcgttcgtttatttatggcagcgttatttgcct

SEQ ID NO: 573216 - DNA, 75 bp, synthetic construct
  source 1..75: mol_type = other DNA
aatgttatatacagatataatcatggtaatgtaggcatagcaaaagctcagaatttaggtattgaatatgcgatg

SEQ ID NO: 573217 - DNA, 75 bp, synthetic construct
  source 1..75: mol_type = other DNA
gatcgtgaaagagaaagataacgccgtgcttcgcgtgcactcctcgcccaccttcgggctgtcatggctgttgcg

SEQ ID NO: 573218 - DNA, 75 bp, synthetic construct
  source 1..75: mol_type = other DNA
gttcgacctcgataaagggctgtatctcgatggtgaatgggtgctgccgggagaggctatcaactgccgttgtac

SEQ ID NO: 573219 - DNA, 75 bp, synthetic construct
  source 1..75: mol_type = other DNA
agcgttaaaggctggcggatttaccgttaagttcacaatgaatgacgagcttaagaacgtgatgcaggctgtcgt

SEQ ID NO: 573220 - DNA, 75 bp, synthetic construct
  source 1..75: mol_type = other DNA
tttcaattgaccggcttcgagtggtcaatccgaatgcctacacttaccagagctaaaattgagcctgttggtgaa

SEQ ID NO: 573221 - DNA, 75 bp, synthetic construct
  source 1..75: mol_type = other DNA
actgtttacccgacaggaaaaagaggctgccagtagtgccattgtggtcggtgccacagtcgcaaccgaaccggc

SEQ ID NO: 573222 - DNA, 75 bp, synthetic construct
  source 1..75: mol_type = other DNA
gcgccatccagacgatcaccatgagcaaagaggaatacaaatccgcacggcaggagatgatggaggatgacgact

SEQ ID NO: 573223 - DNA, 75 bp, synthetic construct
  source 1..75: mol_type = other DNA
gatcagccgggcactccgcaggggtttggtcagacacagccggcagataactcgttaggcctggcgttcaacaac

SEQ ID NO: 573224 - DNA, 75 bp, synthetic construct
  source 1..75: mol_type = other DNA
ggcgctgcgcgggctttctctggcagctatctggcagcgtcactggcgcaacggtacctggtttgcagcaacgtg

SEQ ID NO: 573225 - DNA, 75 bp, synthetic construct
  source 1..75: mol_type = other DNA
aaagtatgggttaaagaatttaaaggtgcggcacaaccgccagcggatactacattacaaacattcatccgtaat

SEQ ID NO: 573226 - DNA, 75 bp, synthetic construct
  source 1..75: mol_type = other DNA
caacgcactctcctttccttttgtcctccccttaccttaaaaatatcggtctgtttgttttcaaaaaagagaata

SEQ ID NO: 573227 - DNA, 75 bp, synthetic construct
  source 1..75: mol_type = other DNA
aacgccaacggcgcctatggcgcggtgaaattctggaaccagtggctctcctttggccagataccgcagtggtgg

SEQ ID NO: 573228 - DNA, 75 bp, synthetic construct
  source 1..75: mol_type = other DNA
tgggcggggatggtcaactccttgccggtaaggttgatctgattacggaggataaccagcgctggagcacgcgtt

SEQ ID NO: 573229 - DNA, 75 bp, synthetic construct
  source 1..75: mol_type = other DNA
tccgcggggatgcgatgcgaccgatgaccggtttcctgatgcagcgagccgagcaggcggcgccggaaacctggt

SEQ ID NO: 573230 - DNA, 75 bp, synthetic construct
  source 1..75: mol_type = other DNA
cttcagcagcttctgggatggctttaccgggaaagacaataccggaacggataacgagccggggaaccagttggc

SEQ ID NO: 573231 - DNA, 75 bp, synthetic construct
  source 1..75: mol_type = other DNA
aatacttcactgtggtacaccaacgctaataacagcgacagcgacgacgttggggccagcgcagggattgaaata

SEQ ID NO: 573232 - DNA, 75 bp, synthetic construct
  source 1..75: mol_type = other DNA
tcgacgtggccgctgagccaggaagagatcgcccgggcgctgaaaaaggccaaaccttcctattcttctgagcaa

SEQ ID NO: 573233 - DNA, 75 bp, synthetic construct
  source 1..75: mol_type = other DNA
gctgacgataaccccagttttacacgtgtctttagaaagggacagattttattaggaaagcgtcgtccctatctt

SEQ ID NO: 573234 - DNA, 75 bp, synthetic construct
  source 1..75: mol_type = other DNA
cgtactcaatatggcagcaacattaccgttggtatttgatgctgagctaaacagtattcgcgagcggttgaacat

SEQ ID NO: 573235 - DNA, 75 bp, synthetic construct
  source 1..75: mol_type = other DNA
tcccattcacatattggttttgatcgtggaggacatggcagtgtggccagttattctctggggggctatgccagc

SEQ ID NO: 573236 - DNA, 75 bp, synthetic construct
  source 1..75: mol_type = other DNA
atgcttcgtttacgctgggcaataccggcggtttcgttgatcttgggacctatgagtatgtcctgaaaagtgacg

SEQ ID NO: 573237 - DNA, 75 bp, synthetic construct
  source 1..75: mol_type = other DNA
cattaggatttttatcagatcaacgccgtataaatgttttacttagtagagcaaagtacaaattgatcatagtcg

SEQ ID NO: 573238 - DNA, 75 bp, synthetic construct
  source 1..75: mol_type = other DNA
gcagtgtctggcttaacagcaataattcctgtgcaggtaccagcaactgcgaatatagagtaaacagtttgctac

SEQ ID NO: 573239 - DNA, 75 bp, synthetic construct
  source 1..75: mol_type = other DNA
cgttaagcgggcatcttggggtggggtatagccatagtgccggtgtggaatccccgtggaacgcggtagctggtg

SEQ ID NO: 573240 - DNA, 75 bp, synthetic construct
  source 1..75: mol_type = other DNA
tcatatcaaggcttgatgaggcaactgaagagttgtcaaaatctcttagcatagaatccccatcagttaggcttg

SEQ ID NO: 573241 - DNA, 75 bp, synthetic construct
  source 1..75: mol_type = other DNA
taagaattttgtaaaagatgatttatctgagactcctgtattgtttgtaaataattatgaaaacgattattacga

SEQ ID NO: 573242 - DNA, 75 bp, synthetic construct
  source 1..75: mol_type = other DNA
aattaattaatgaattagaaacatctgctcaaatcggtaatcttttattaattgagagtaactcaacaaaaaagc

SEQ ID NO: 573243 - DNA, 75 bp, synthetic construct
  source 1..75: mol_type = other DNA
cacttgtatggattaatcaacaagatgtacaaaaaacaaagggaagtcgagccggagaacataaaccaatttggt

SEQ ID NO: 573244 - DNA, 75 bp, synthetic construct
  source 1..75: mol_type = other DNA
agcttaatattcgctacaacaaattccgattatgtcgaaagaatgataaaggaaagagcacaatttgattggtct

SEQ ID NO: 573245 - DNA, 75 bp, synthetic construct
  source 1..75: mol_type = other DNA
tgtttgtagaaagcgatctttttaaaaattcatctaatgataaattaaagaatgacattgctggtttacttaaat

SEQ ID NO: 573246 - DNA, 75 bp, synthetic construct
  source 1..75: mol_type = other DNA
tctgaacaacaccaaatgggttggttcagcgaatattgattatgacgttgttgttgctgacgaagccttctacga

SEQ ID NO: 573247 - DNA, 75 bp, synthetic construct
  source 1..75: mol_type = other DNA
tacaaatatctgcagcgtatatcagtctcaggtacgccgcgttatggtctggatggcaaagttcatggaactgta

SEQ ID NO: 573248 - DNA, 75 bp, synthetic construct
  source 1..75: mol_type = other DNA
ccttccggcaggcgccagcctgccaggggggttcgcgcgggctgacaggcggcctccaccgcctgcccctgtatc

SEQ ID NO: 573249 - DNA, 75 bp, synthetic construct
  source 1..75: mol_type = other DNA
gccttttgcagggatgcccggagcgcaggccacggcgcgacagaggcggcgcgaccggaacggtcgctgcaagcc

SEQ ID NO: 573250 - DNA, 75 bp, synthetic construct
  source 1..75: mol_type = other DNA
gggatgatgtagccagattcatcgaggcgtcatttgctgacggtctatttgaagatgttgctgccgcctttgaag

SEQ ID NO: 573251 - DNA, 75 bp, synthetic construct
  source 1..75: mol_type = other DNA
ggaagaaactggaaaccttacttgatgaaatcaattgcgaacggcaacccatagttattgcgggacagaagttta

SEQ ID NO: 573252 - DNA, 75 bp, synthetic construct
  source 1..75: mol_type = other DNA
ttgagtaacgctctcgatgatctgaaaggaaaggggcaaaacattgatctggctatcctgacccacattgatgat

SEQ ID NO: 573253 - DNA, 75 bp, synthetic construct
  source 1..75: mol_type = other DNA
acgacgtgaagcgcggtttgcgaaacggcgttgctccttacataccagcggccttttgctgggatgcctggagcg

SEQ ID NO: 573254 - DNA, 75 bp, synthetic construct
  source 1..75: mol_type = other DNA
gggtaaaaaactgattgtggacgaggacaccggcgaactgcacggcagacagctgacgccgcgccggttgcgcac

SEQ ID NO: 573255 - DNA, 75 bp, synthetic construct
  source 1..75: mol_type = other DNA
acgacgtgaagcgcggtttgcgaaacggcgttgctccttacataccggcggccttttgccgggatgcccggagcg

SEQ ID NO: 573256 - DNA, 75 bp, synthetic construct
  source 1..75: mol_type = other DNA
acgacgtgaagcgcggtttgcgaaacggcgttgctccttacatacccgcggccttttgcagggatgccaggagcg

SEQ ID NO: 573257 - DNA, 75 bp, synthetic construct
  source 1..75: mol_type = other DNA
acgacgtgaagcgcggtttgcgaaacggcgttgctccttacatacctgcggccttttgcggggatgcctggagcg

SEQ ID NO: 573258 - DNA, 75 bp, synthetic construct
  source 1..75: mol_type = other DNA
cgctggtcgagagtatattcagtaccgttaaaatgttgaccgcaccaatacgcagccatcttacctatctacggg

SEQ ID NO: 573259 - DNA, 75 bp, synthetic construct
  source 1..75: mol_type = other DNA
accagacataataaagaaaaaaaaacaaacgacattcgccccttcgcaaaaatcccctttttaattttgatcgaa

SEQ ID NO: 573260 - DNA, 75 bp, synthetic construct
  source 1..75: mol_type = other DNA
acctgaataaattctctactatatgcaccgacgttctatcccccctcgtcaccagacataataaagaaaaaaaac

SEQ ID NO: 573261 - DNA, 75 bp, synthetic construct
  source 1..75: mol_type = other DNA
atgaagccacgaaatattaataatagcctaccactgcaaccattagttcctgatcaggagaacaaaaataagaaa

SEQ ID NO: 573262 - DNA, 75 bp, synthetic construct
  source 1..75: mol_type = other DNA
gaacactggtcacaattaaccgcaaagcggcaattgcccgctatgtgcattcaaccgccaacagaaggaacacac

SEQ ID NO: 573263 - DNA, 75 bp, synthetic construct
  source 1..75: mol_type = other DNA
atggctgtaaatgaactcataaaactgaccaaaatagagaataatgtagacctgaataaattcactactatatgc

SEQ ID NO: 573264 - DNA, 75 bp, synthetic construct
  source 1..75: mol_type = other DNA
cagacgacttactacccttcgcaaaaatcccctttttaattttcatcgaaaaaatggaaattgataatatgaatc

SEQ ID NO: 573265 - DNA, 75 bp, synthetic construct
  source 1..75: mol_type = other DNA
atccaagccaggtgatcctaacatagccaactacaaggggcgttgcgttaagattcaaaaattagtaaatcatca

SEQ ID NO: 573266 - DNA, 75 bp, synthetic construct
  source 1..75: mol_type = other DNA
tgtctggtggagtaatcaccgagggcaaagtccgtacactggcccagctttttgcacttgaataccaacaattga

SEQ ID NO: 573267 - DNA, 75 bp, synthetic construct
  source 1..75: mol_type = other DNA
gggatgatgtagccaggtttgtcgaggcgtcatttgctaacggcctctttgaagatgttgctgccgcctttgaag

SEQ ID NO: 573268 - DNA, 75 bp, synthetic construct
  source 1..75: mol_type = other DNA
atagtaattttcgcgaatgtcagattagaaattcaaacttcgataattgttatctttacgcttcgcacttcacca

SEQ ID NO: 573269 - DNA, 75 bp, synthetic construct
  source 1..75: mol_type = other DNA
ttccaaccgtaccggagcagtcagcatttactgctgttgacgttgattcaccgctcgatatggtaaagcaaagcg

SEQ ID NO: 573270 - DNA, 75 bp, synthetic construct
  source 1..75: mol_type = other DNA
cgttagttccgatcatacaggagcagacaacaccaattactattgacgctgatacaccgctcgatgtggtaaaac

SEQ ID NO: 573271 - DNA, 75 bp, synthetic construct
  source 1..75: mol_type = other DNA
agtttgccggattaagcgacggcagctacaccattagcgcgacggttagcgatcaggccggaaaccccggcagcg

SEQ ID NO: 573272 - DNA, 75 bp, synthetic construct
  source 1..75: mol_type = other DNA
atactgacgcggtgtttacaagaagtgtacacggagggaaaattgagagaggatatacaagatttgagaataact

SEQ ID NO: 573273 - DNA, 75 bp, synthetic construct
  source 1..75: mol_type = other DNA
agattattaagtataatcaagatatagcaatagggtattgctcctcatataactatgtggacaaagagttaaatc

SEQ ID NO: 573274 - DNA, 75 bp, synthetic construct
  source 1..75: mol_type = other DNA
ttaatccactaaatcttccgggaatgggaagtggtgtgcttgaagatattatgagtattccagatagttcactta

SEQ ID NO: 573275 - DNA, 75 bp, synthetic construct
  source 1..75: mol_type = other DNA
ctttcgggcgatggcgtgtagtgcgctgagtgagtcggggctatggagcaaagaagccattgaaaagcaaatgag

SEQ ID NO: 573276 - DNA, 75 bp, synthetic construct
  source 1..75: mol_type = other DNA
atttcgcccagaaaaaatgaccaatttgatcagtataaaaaacaggttggttattcactatttaaggactatata

SEQ ID NO: 573277 - DNA, 75 bp, synthetic construct
  source 1..75: mol_type = other DNA
atgattaatgtttataaacgttttaccttctggaatcattatgattctgggatgttttatattcttttgtatatc

SEQ ID NO: 573278 - DNA, 75 bp, synthetic construct
  source 1..75: mol_type = other DNA
aatacttttacgtgctgcgtccgctgctggccgtgcgctgggtcgaagcgggtaaaggcgtaccgcctgcgcttt

SEQ ID NO: 573279 - DNA, 75 bp, synthetic construct
  source 1..75: mol_type = other DNA
ccgaagtggttttctccgctacgtgcgcgctggcattactattcgatggcgcagaaaaacttccgcggctatttg

SEQ ID NO: 573280 - DNA, 75 bp, synthetic construct
  source 1..75: mol_type = other DNA
atgttttctacaaacttaatacagagtaattatggtgatttaaatattaaaactctggcttttgactcttttaaa

SEQ ID NO: 573281 - DNA, 75 bp, synthetic construct
  source 1..75: mol_type = other DNA
ttattcactatttaaggactatatactatgaacaaaattatatacatcctgtcgggagcattttgctgcgattca

SEQ ID NO: 573282 - DNA, 75 bp, synthetic construct
  source 1..75: mol_type = other DNA
ttattcactatttaaggactatatactatgaaaaaaattatatacatcctgccgggagcatttttgctgcgattc

SEQ ID NO: 573283 - DNA, 75 bp, synthetic construct
  source 1..75: mol_type = other DNA
tggatacccgaagaacaataaccaacctggcctgtctgatgtcttttcacaattattcctccgggaaaaaatcag

SEQ ID NO: 573284 - DNA, 75 bp, synthetic construct
  source 1..75: mol_type = other DNA
accggggcgaggcggtggtcattccggtaattttaagaaactgtgcatggcatcagttagaattcggcagcatta

SEQ ID NO: 573285 - DNA, 75 bp, synthetic construct
  source 1..75: mol_type = other DNA
ggaacttaatattaagttagctgttgaaactataaatttctacaaagcaatttccaatatttaccttgacaaaca

SEQ ID NO: 573286 - DNA, 75 bp, synthetic construct
  source 1..75: mol_type = other DNA
agtacattggataacttgaataaaactctgaatgacccatcgaagcaaggtacgcctgcaaacttttcaaatctc

SEQ ID NO: 573287 - DNA, 75 bp, synthetic construct
  source 1..75: mol_type = other DNA
aaaataatgaatctatatgaaatagacgaactctgtgcaaaaagaataatatctctgctttctgaatctgagaaa

SEQ ID NO: 573288 - DNA, 75 bp, synthetic construct
  source 1..75: mol_type = other DNA
atcacacaataactttgagatcgcagattcttttacttttacagcattcgtccccccattgttgggcaaatatag

SEQ ID NO: 573289 - DNA, 75 bp, synthetic construct
  source 1..75: mol_type = other DNA
taaacgcaacaagcgaaatctggtaaaactggataatgcgttagatcgtctggaggcacttactggttatcttta

SEQ ID NO: 573290 - DNA, 75 bp, synthetic construct
  source 1..75: mol_type = other DNA
aaatgtgcgcttctcttatcgtggctcgaaaatgaaaattcagcatatcgtgccgctgtcagatcaggcgattgc

SEQ ID NO: 573291 - DNA, 75 bp, synthetic construct
  source 1..75: mol_type = other DNA
aaacgtgcgcttctcttatcgcggttcgaaaatgaaaattcagcatattgtaccgctgtcggatcaggcaattgc

SEQ ID NO: 573292 - DNA, 75 bp, synthetic construct
  source 1..75: mol_type = other DNA
ttagctttcggcccttacccggagatctcgctgttgcaggctcgccgcctgcgcgaaacggcacgcaataacatt

SEQ ID NO: 573293 - DNA, 75 bp, synthetic construct
  source 1..75: mol_type = other DNA
aacagcggattatttgtcatgcttaattaataaaaagcatacgattattcctgtatcatcaacaccattatatga

SEQ ID NO: 573294 - DNA, 75 bp, synthetic construct
  source 1..75: mol_type = other DNA
ggacgagcggcgacgtccgttttcttcgtgaccgggaaatggatatgcgtttttttatctggcgaaaagctggca

SEQ ID NO: 573295 - DNA, 75 bp, synthetic construct
  source 1..75: mol_type = other DNA
tacccggccctttcgctggataaattgcctgagcttttatcccggacagagaattactgcggcaggctgctgacg

SEQ ID NO: 573296 - DNA, 75 bp, synthetic construct
  source 1..75: mol_type = other DNA
atcaaatttgtcatatcagttacgagcttaccgaacaacaaattaacgctgcgattacgcggatggattcagtat

SEQ ID NO: 573297 - DNA, 75 bp, synthetic construct
  source 1..75: mol_type = other DNA
actgacccgcgcgactcaagcgtgcgaagccagcaatcaagctgcatctgaccatttcgttgaaaccaccaaaat

SEQ ID NO: 573298 - DNA, 75 bp, synthetic construct
  source 1..75: mol_type = other DNA
gtggcccataacgacagctacctggttcttgatgagtcgaagttgttagataaagacgtactggcagctgctaag

SEQ ID NO: 573299 - DNA, 75 bp, synthetic construct
  source 1..75: mol_type = other DNA
ccgtgacattatttcagggaaaaatgagtaccgacggaaataactattacatcatcaaaggtaaagtaagcgtaa

SEQ ID NO: 573300 - DNA, 75 bp, synthetic construct
  source 1..75: mol_type = other DNA
catttctcgaaaagtggaaagtggcaatcttggcatggtaaatatcttagtgcgagacgaaaggatcaattgctt

SEQ ID NO: 573301 - DNA, 75 bp, synthetic construct
  source 1..75: mol_type = other DNA
ttctgcgaaggcacgagaggggcactctatcgaacaactctgtgcaacagcagccctggcgggggaagcgataaa

SEQ ID NO: 573302 - DNA, 75 bp, synthetic construct
  source 1..75: mol_type = other DNA
gggcactcaatcgaacaactctgtgcaacagctgcactggcgggggaagcgataaaaactcttctcaaggagtga

SEQ ID NO: 573303 - DNA, 75 bp, synthetic construct
  source 1..75: mol_type = other DNA
gaggtattaaaagaagcggcgcgcagatatagccaaaacggcggctgcgctggctgtatggttcttgaaggtatt

SEQ ID NO: 573304 - DNA, 75 bp, synthetic construct
  source 1..75: mol_type = other DNA
ggcgaatagacgactattatgtcaccccagtcatacagattccaaacgacactttcgagaaattccctcctttgc

SEQ ID NO: 573305 - DNA, 75 bp, synthetic construct
  source 1..75: mol_type = other DNA
aaacctgcatttctcaagcgcctggtagcggatattcaggatgatcgtgagagtgtgaaacggaagcttgaaaaa

SEQ ID NO: 573306 - DNA, 75 bp, synthetic construct
  source 1..75: mol_type = other DNA
tatgggggatgagtagtataggaaaaacctccagtgcctacatgctggcgtcattagcaggatcgccgaaagaca

SEQ ID NO: 573307 - DNA, 75 bp, synthetic construct
  source 1..75: mol_type = other DNA
ttgaagcgctggagatgatgggctcaggccgcgatcgcgaaattcgctatggcgaaggttcgccgtggtttgaca

SEQ ID NO: 573308 - DNA, 75 bp, synthetic construct
  source 1..75: mol_type = other DNA
acactgttccttcgcattatatgtcaaaaacatgaagtacttctttacctcactgaaaaaatataccgatatcag

SEQ ID NO: 573309 - DNA, 75 bp, synthetic construct
  source 1..75: mol_type = other DNA
attattctattagtatagaagataataaattgattagagtaaaaaatgctgacaatttatcccttctaaggaagg

SEQ ID NO: 573310 - DNA, 75 bp, synthetic construct
  source 1..75: mol_type = other DNA
tctgtgttggaacaccgacaccggtagcggcggctatacccataaattcttccgcgtggcgaaaagtgccgacga

SEQ ID NO: 573311 - DNA, 75 bp, synthetic construct
  source 1..75: mol_type = other DNA
caatgtcatcggtgcgcattgtccacacgatggtagaaattatagacgcactgaatcgtattcagcccacgccac

SEQ ID NO: 573312 - DNA, 75 bp, synthetic construct
  source 1..75: mol_type = other DNA
gaaagccattttcatcagcactggacagtaccggattacgctaacgaactgcatatcaccgaatcacgactcacg

SEQ ID NO: 573313 - DNA, 75 bp, synthetic construct
  source 1..75: mol_type = other DNA
tagttctcattcacaagcgcgagaaccacgactcctatgcggtggcgatcaccaatgggagtcacgattattacg

SEQ ID NO: 573314 - DNA, 75 bp, synthetic construct
  source 1..75: mol_type = other DNA
gagcacttgatggctatcctcatcgtcttatgggagatgcattgatggctttttttggaagatccgatgtaagca

SEQ ID NO: 573315 - DNA, 75 bp, synthetic construct
  source 1..75: mol_type = other DNA
atttcttttctttattgatgttaagattgatttattgattatggaaataatacgtttgaatggtaaatcagagga

SEQ ID NO: 573316 - DNA, 75 bp, synthetic construct
  source 1..75: mol_type = other DNA
tattaagtaggccttattttagaggtaataagataagactggaagaggtaacgtcaattctctccatgcgaaaag

SEQ ID NO: 573317 - DNA, 75 bp, synthetic construct
  source 1..75: mol_type = other DNA
aggaagagagaaaaaagatctgttaaaagaaatgaagccagagatccctcgtgcgcctgtgcgaaaaagacttta

SEQ ID NO: 573318 - DNA, 75 bp, synthetic construct
  source 1..75: mol_type = other DNA
atctggacattctggtcggaaaaaaaattctccaggatttggtacaggtaaataaaaatattgatgccaaacgac

SEQ ID NO: 573319 - DNA, 75 bp, synthetic construct
  source 1..75: mol_type = other DNA
ggatggaattttgctgtacaaaatccagagataagttgcgacaaaattcatcccatgatgattgacatgctggat

SEQ ID NO: 573320 - DNA, 75 bp, synthetic construct
  source 1..75: mol_type = other DNA
cattgtttcttatagtactgcaggggggggcgagattgcaaacccaaatgtaagtccggtttctgaagatactgc

SEQ ID NO: 573321 - DNA, 75 bp, synthetic construct
  source 1..75: mol_type = other DNA
ccgggatggggcaatcccgagcactcctgcttgcgtacgcgtccggcaacgcaagagcgcatcgcacgcctgctg

SEQ ID NO: 573322 - DNA, 75 bp, synthetic construct
  source 1..75: mol_type = other DNA
tttgctggcagaaaatgcccgcaaggtgtttgcttcaaacctggcagataagtttgcggtgtattcgcgtgagaa

SEQ ID NO: 573323 - DNA, 75 bp, synthetic construct
  source 1..75: mol_type = other DNA
catgaattcaacaatactacgcattcagaaaataaagcatcttttgattctatttggcagcgtctgacaaatcat

SEQ ID NO: 573324 - DNA, 75 bp, synthetic construct
  source 1..75: mol_type = other DNA
atttcacggagaaaatccgctccgcgccctcccctctttgaaacgaaaatcacccgaaatgacgtatctcaccac

SEQ ID NO: 573325 - DNA, 75 bp, synthetic construct
  source 1..75: mol_type = other DNA
aagagagaagaaaaatttattcaaggttattatgatggctatacaaaaggcattattgatgtgatggataatttt

SEQ ID NO: 573326 - DNA, 75 bp, synthetic construct
  source 1..75: mol_type = other DNA
ttcgctagtattgatggtgctgtttttgatttggttagtatgaagttgaaggttactaaacaagtacagggaatt

SEQ ID NO: 573327 - DNA, 75 bp, synthetic construct
  source 1..75: mol_type = other DNA
atttagtctcaatagagatgaatattccatcatctgatggtaaaagtacggaaaagttaggaccaataacgtata

SEQ ID NO: 573328 - DNA, 75 bp, synthetic construct
  source 1..75: mol_type = other DNA
ttaatcgaagtattatcacacctggtaataatgttctggttaataatactggaggtgacttaaacataatttcgt

SEQ ID NO: 573329 - DNA, 75 bp, synthetic construct
  source 1..75: mol_type = other DNA
agcgccatgatttcagcgccatcatgagtggacgcattccggcactgacgctgagcggcgtcagtgttcgaccac

SEQ ID NO: 573330 - DNA, 75 bp, synthetic construct
  source 1..75: mol_type = other DNA
ggtggccagccccgatcgcaccaccacaaccaccatcaccgacatacttaacaggcgaccgggcagtgaatatca

SEQ ID NO: 573331 - DNA, 75 bp, synthetic construct
  source 1..75: mol_type = other DNA
gtttgcgccgttactccgtgccagccatataaaaccgtgggctgcctgcgagaatgggaatgaacgccttgatcc

SEQ ID NO: 573332 - DNA, 75 bp, synthetic construct
  source 1..75: mol_type = other DNA
gacgagcagggcgctcctgctgcgctttctcattcagcgcagcgtgtgtatcagcgaatgagtgtgctttcagac

SEQ ID NO: 573333 - DNA, 75 bp, synthetic construct
  source 1..75: mol_type = other DNA
gctttcgaatatcaactaaaacaacaaggcaaaaactggtatttgacaagttatcagtcattgaatgaggaggat

SEQ ID NO: 573334 - DNA, 75 bp, synthetic construct
  source 1..75: mol_type = other DNA
atatggtagaacaagattttctctcactcggcctaagcgatatctcagcaaaagttgatccttacagacttatta

SEQ ID NO: 573335 - DNA, 75 bp, synthetic construct
  source 1..75: mol_type = other DNA
gccgtacggagtgttatgccatgacggttcattattaccgtctgcgggattacgccctgcaacatccggaatacg

SEQ ID NO: 573336 - DNA, 75 bp, synthetic construct
  source 1..75: mol_type = other DNA
ctgatgacgtacagtcatcacgcctgccgtacggagtgttatgccatgacggttcattattaccgtctgcgggat

SEQ ID NO: 573337 - DNA, 75 bp, synthetic construct
  source 1..75: mol_type = other DNA
gatatgcacggatccggcaatgaaggcgatgatgaataaaggcgtttattatataataaaaattaatgaaatgcg

SEQ ID NO: 573338 - DNA, 75 bp, synthetic construct
  source 1..75: mol_type = other DNA
tgcgcagcctgagcccacgcgagctggcgacccgcaggggctggcgtccgtgctggcaaaaatcgagcgggtcag

SEQ ID NO: 573339 - DNA, 75 bp, synthetic construct
  source 1..75: mol_type = other DNA
gttccgctgtgataacggagaaaaactgcgggtcacgtgcgcgctggccagttgcgatcgtgaagccatagactg

SEQ ID NO: 573340 - DNA, 75 bp, synthetic construct
  source 1..75: mol_type = other DNA
gtcggcgtgggtacgctgaccctgttacaaagcgacagcctcgacagttatcgggcaatccccgccagtgcgcaa

SEQ ID NO: 573341 - DNA, 75 bp, synthetic construct
  source 1..75: mol_type = other DNA
attttttcagtttttttgatgccgctcctcatccttatgagtcctggtttccatgggtagaggccgttacaggac

SEQ ID NO: 573342 - DNA, 75 bp, synthetic construct
  source 1..75: mol_type = other DNA
gttatttttcattgctcttcatgatattggaaagtttgatatacgattccaatataaatcagcagaaagttggct

SEQ ID NO: 573343 - DNA, 75 bp, synthetic construct
  source 1..75: mol_type = other DNA
gggcactccatcgaacaactctgtgcaacagctgcactggcgggggaagcgataaaaactattctcaaggagtga

SEQ ID NO: 573344 - DNA, 75 bp, synthetic construct
  source 1..75: mol_type = other DNA
gttcagaaaaaacagcgtgagaagacacccaaaaagcagaaaaaaacggcggacataacggataaaagcaaaaaa

SEQ ID NO: 573345 - DNA, 75 bp, synthetic construct
  source 1..75: mol_type = other DNA
aataagcgatgttatgaaggtgttcatgcactactggacaatggctatcaacccagacaattacaggtgttagtt

SEQ ID NO: 573346 - DNA, 75 bp, synthetic construct
  source 1..75: mol_type = other DNA
taatgaggatgcgccttccgacataaatgctctgagaacgtatttccaggaccgacagcaggatgcgagccgggt

SEQ ID NO: 573347 - DNA, 75 bp, synthetic construct
  source 1..75: mol_type = other DNA
ggtttacagagcataatacgaatagccgtagagccagccagttacggtggtcgcgatggtgtgtccgccagaaaa

SEQ ID NO: 573348 - DNA, 75 bp, synthetic construct
  source 1..75: mol_type = other DNA
gcgtcagcggatacatattctaatgttatggaaattgatttaattatttacaacaatgatgtaataatgatggct

SEQ ID NO: 573349 - DNA, 75 bp, synthetic construct
  source 1..75: mol_type = other DNA
gcccagccgctcacccgcgagagcgtggcgcagttttttaatatcacgcccaatcatctgtcaaaactgtttgct

SEQ ID NO: 573350 - DNA, 75 bp, synthetic construct
  source 1..75: mol_type = other DNA
tacactaaatcagtaagttggcagcatcaccggatgcttgactaccattcttcagatgataaagacgtcatcgca

SEQ ID NO: 573351 - DNA, 75 bp, synthetic construct
  source 1..75: mol_type = other DNA
atgcttgactaccattcttcagatgataaagacgtcatcgcaattgatggaaaaatacaccggcattcttatgac

SEQ ID NO: 573352 - DNA, 75 bp, synthetic construct
  source 1..75: mol_type = other DNA
catgacagttacgcaattagtgaaaagagtcacggcagagaagaaacccgtcttcatattgtttgcgatgtccct

SEQ ID NO: 573353 - DNA, 75 bp, synthetic construct
  source 1..75: mol_type = other DNA
tgagaaatcgtgtccagcatcctgaggaacttacctcaattaatatttctcactcaaaaaatgacttggaaaaat

SEQ ID NO: 573354 - DNA, 75 bp, synthetic construct
  source 1..75: mol_type = other DNA
gttaatcagttaattgaaagaaattctgggaagacgattatttatttaaaaaatgaacaagctcgtggagcctgt

SEQ ID NO: 573355 - DNA, 75 bp, synthetic construct
  source 1..75: mol_type = other DNA
ctacgtgacgttaaccagtgccgaggaaatggtacgccacatgaacgagatgcttgccaatatgccggcccgcgc

SEQ ID NO: 573356 - DNA, 75 bp, synthetic construct
  source 1..75: mol_type = other DNA
cgtaatccccgggcggcagagttaatggaagatatcagaagaatgaagaccagtggcctgaccgatcgtgaaata

SEQ ID NO: 573357 - DNA, 75 bp, synthetic construct
  source 1..75: mol_type = other DNA
aataatgaaaactataaatatgccctgatttgtggtcagggacgacttgaagcgtatattgagtatggtgaaacg

SEQ ID NO: 573358 - DNA, 75 bp, synthetic construct
  source 1..75: mol_type = other DNA
tctgaagggagtgtgagcaaactatcaacttggagtgatgggttcaagattctgaaaacaataattaaactttac

SEQ ID NO: 573359 - DNA, 75 bp, synthetic construct
  source 1..75: mol_type = other DNA
ggcgatgcaaaatggacatagcgatatcgtgaaagttattctcgaagcattaccttgtctggcccaggaaattaa

SEQ ID NO: 573360 - DNA, 75 bp, synthetic construct
  source 1..75: mol_type = other DNA
ggtacgaatttaagctggagaactcccatcgccataatagatggcagctatagtcattctaaaaacgcctggcaa

SEQ ID NO: 573361 - DNA, 75 bp, synthetic construct
  source 1..75: mol_type = other DNA
cttagcaatataccagtcccgtctctgatcttgatggcgtggactatccaaaaccgtatcgcggtaagcataaaa

SEQ ID NO: 573362 - DNA, 75 bp, synthetic construct
  source 1..75: mol_type = other DNA
taccgaaacaactgaagacgaatatgccagaaatggttatgaaattgaagaccgagaattgctgctctggccgtt

SEQ ID NO: 573363 - DNA, 75 bp, synthetic construct
  source 1..75: mol_type = other DNA
aatgatttcaataatcagtttataagttcatatataaataataatatcagcacctaccagaatatatcaaatggt

SEQ ID NO: 573364 - DNA, 75 bp, synthetic construct
  source 1..75: mol_type = other DNA
caaagtttatataattgatgaaattgatcgtagtttgcatccaaagattacaaaaacatttatgaaattattctc

SEQ ID NO: 573365 - DNA, 75 bp, synthetic construct
  source 1..75: mol_type = other DNA
ataaattcatcgatcagatcgtcacagaagatttgctgtttaccctgcgtaaggtggagagcaaaggctttctgg

SEQ ID NO: 573366 - DNA, 75 bp, synthetic construct
  source 1..75: mol_type = other DNA
atgcaaacagtagatatatcgctagtggcagggccagcagacgcctcgcagtccctccttaagaaaaaacagtca

SEQ ID NO: 573367 - DNA, 75 bp, synthetic construct
  source 1..75: mol_type = other DNA
ctagctttatcgctgatccatcgactatcgccgccaccaacagtgatttaagtaccttaaaggcaacggttgagg

SEQ ID NO: 573368 - DNA, 75 bp, synthetic construct
  source 1..75: mol_type = other DNA
atgcaaaatgggcatagcgatatcgtgagagttatactcgaagcattgccctgtctggcccaggaaattaacatt

SEQ ID NO: 573369 - DNA, 75 bp, synthetic construct
  source 1..75: mol_type = other DNA
acaggggatacatcgaaaaacatcatcatctgcgggcaatatagttacacagaatgatcattgctacctgttatg

SEQ ID NO: 573370 - DNA, 75 bp, synthetic construct
  source 1..75: mol_type = other DNA
cactgaatttggccacctgaacagaggtgatatgctcacctcagaacaacacaggtgctccaatgaaaaaaagaa

SEQ ID NO: 573371 - DNA, 75 bp, synthetic construct
  source 1..75: mol_type = other DNA
tacccggccctgtcgctggataagttgcctgagcttttatcccggatggatagctactgcggcaggctgctgacg

SEQ ID NO: 573372 - DNA, 75 bp, synthetic construct
  source 1..75: mol_type = other DNA
tcaggggaaaaatatcctgcaactggcgttccgcacccgcatcaagctgttttatcgcccggctaacctggtcgg

SEQ ID NO: 573373 - DNA, 75 bp, synthetic construct
  source 1..75: mol_type = other DNA
atgcaactgagaaaaagcttattgttaccatcactgcttgtttttatcagcaaccgtgcggtgggcggagattat

SEQ ID NO: 573374 - DNA, 75 bp, synthetic construct
  source 1..75: mol_type = other DNA
gataacaaccggcagattgatttctacatgagcgttccgctgagtcgtctgcttgggcgtgaggagtcaacctcc

SEQ ID NO: 573375 - DNA, 75 bp, synthetic construct
  source 1..75: mol_type = other DNA
tccctacagcagtgtcacctttaatcagggagagagcagggtcgatattcgcgtgccacaggctttcctggggcg

SEQ ID NO: 573376 - DNA, 75 bp, synthetic construct
  source 1..75: mol_type = other DNA
gtaccgacaccaggaaaacaaagtatcgttttgtcgtgttaacgatgattttcctggtttatgcaataaattatg

SEQ ID NO: 573377 - DNA, 75 bp, synthetic construct
  source 1..75: mol_type = other DNA
tgcaactttaaatggaagtatacctgatacggattttcgatatcgtgttggtggcagttgggggaacgataacgt

SEQ ID NO: 573378 - DNA, 75 bp, synthetic construct
  source 1..75: mol_type = other DNA
tctgagaataaacagatcgatctttatgtaagtgtacctttttctaaatttttaggcaataatgacattacttca

SEQ ID NO: 573379 - DNA, 75 bp, synthetic construct
  source 1..75: mol_type = other DNA
atcaggcgcatgtctggtctatctgctaataatcctgcttaatggctttctcttctccagactttttaccttttc

SEQ ID NO: 573380 - DNA, 75 bp, synthetic construct
  source 1..75: mol_type = other DNA
gacaccactaaccggttcctgccgggaggtggtcaccgtaataaaaactggacaatgacactgaaacactatgcc

SEQ ID NO: 573381 - DNA, 75 bp, synthetic construct
  source 1..75: mol_type = other DNA
cgtcaatgacctgtttgctcttgccgaccaggcgaagccactgcagctggtcagtggagaaggggatgttctggg

SEQ ID NO: 573382 - DNA, 75 bp, synthetic construct
  source 1..75: mol_type = other DNA
aataccggggacaaagggttgctgcctaatttcccgccggatttctttaataatttgctggatgcaggacatcgc

SEQ ID NO: 573383 - DNA, 75 bp, synthetic construct
  source 1..75: mol_type = other DNA
ccgaaaggggatacgggagctgcaggaccggcagggcctcagggtccaaaaggggatacgggagctgcaggtccg

SEQ ID NO: 573384 - DNA, 75 bp, synthetic construct
  source 1..75: mol_type = other DNA
cctgccggagagagagggccgcaaggattgcagggtgtggcaggggagagaggcgatacaggtccggctggtcca

SEQ ID NO: 573385 - DNA, 75 bp, synthetic construct
  source 1..75: mol_type = other DNA
ctttggtttttccgcatttacctggcttatgggcactgtcagctcagtattcggcttaaagctggtgcgtctcgg

SEQ ID NO: 573386 - DNA, 75 bp, synthetic construct
  source 1..75: mol_type = other DNA
aaagtgtgttctggtttaacgtgctggaagttccgcccaaaatcagcaataacaccactgacaacaacatgctgc

SEQ ID NO: 573387 - DNA, 75 bp, synthetic construct
  source 1..75: mol_type = other DNA
tttaaccagcgctccggtgttcgctgatattgtcatttccggtacacgtattatttatgatgccaataaaaaaga

SEQ ID NO: 573388 - DNA, 75 bp, synthetic construct
  source 1..75: mol_type = other DNA
tcagttcactgggtatgctgttcggtgctatcgctttaataatgggcattatccacttttcattcggcccttttt

SEQ ID NO: 573389 - DNA, 75 bp, synthetic construct
  source 1..75: mol_type = other DNA
gcgtcagttactccttgcttcacttttcacctgcgcaggtgcattagccagcttttctgcctgtgccgatattgt

SEQ ID NO: 573390 - DNA, 75 bp, synthetic construct
  source 1..75: mol_type = other DNA
acttttttatcgcccgagcggtttgcagggtgaacctgctgaagcgccagcaaaaatcacctggaagttgaacaa

SEQ ID NO: 573391 - DNA, 75 bp, synthetic construct
  source 1..75: mol_type = other DNA
gacattattatttccggaacacgtatcatttataacgctgataaaaaagatgttaacgttcgtctggaaaataaa

SEQ ID NO: 573392 - DNA, 75 bp, synthetic construct
  source 1..75: mol_type = other DNA
gatggaggaaaaaatatttaatgtggatttctcttatgcaaatggagggtggaagattaattctctttatcaggc

SEQ ID NO: 573393 - DNA, 75 bp, synthetic construct
  source 1..75: mol_type = other DNA
acagttggtttccgcccaaagagaaggccacggctacgggcgtgtacattgccgcgacaatgttcgccccaatta

SEQ ID NO: 573394 - DNA, 75 bp, synthetic construct
  source 1..75: mol_type = other DNA
cctaccccattgcctcatcaattattaacactggtggtaatctcggcggatttgtttccccgatgatggcaggct

SEQ ID NO: 573395 - DNA, 75 bp, synthetic construct
  source 1..75: mol_type = other DNA
tgggatcagtagcaaagtgagttctgcacaagttcacttctttgccattaatgattttggcggcgcaattgaagg

SEQ ID NO: 573396 - DNA, 75 bp, synthetic construct
  source 1..75: mol_type = other DNA
cctactccatactatgtctcattttcagccgttgatgttgtatcaggcacaaagtcttatgttgtaaatacttct

SEQ ID NO: 573397 - DNA, 75 bp, synthetic construct
  source 1..75: mol_type = other DNA
cattatgtgttgccagtagtatggcatttagtatgcctgttatggctgatattgttatttccggtacacgcgtca

SEQ ID NO: 573398 - DNA, 75 bp, synthetic construct
  source 1..75: mol_type = other DNA
atgccagcactgtggaatttagcggtgatgttctgaacactgacggtctgaaattccaagccaagttgaaaggtg

SEQ ID NO: 573399 - DNA, 75 bp, synthetic construct
  source 1..75: mol_type = other DNA
atggtgacagtttaaaatcatctaaagttggaaaactaccagaggaaagcattaaacttgataattatttaagag

SEQ ID NO: 573400 - DNA, 75 bp, synthetic construct
  source 1..75: mol_type = other DNA
tggcaagcggttatcgccatattgatgttgaatttaacaggagtgacttaactaagtgggcagatataaaccatc

SEQ ID NO: 573401 - DNA, 75 bp, synthetic construct
  source 1..75: mol_type = other DNA
aggatatttcgaatggtgttctttttttagctagtgagaaatcatcttttattactggtcaaacattaaaaattg

SEQ ID NO: 573402 - DNA, 75 bp, synthetic construct
  source 1..75: mol_type = other DNA
taggaactgatggtaatataggtcagagtaattatgccgcaactaaaggtggtgttattgcaatgtctaaaggtt

SEQ ID NO: 573403 - DNA, 75 bp, synthetic construct
  source 1..75: mol_type = other DNA
cgttacttgggcttctgcaaccctaaatgctaatggttttggtgcaactagtggtacagctgcagacgcaacggt

SEQ ID NO: 573404 - DNA, 75 bp, synthetic construct
  source 1..75: mol_type = other DNA
tacagagtcaggctatagcattgattttgttggtacctatacggacccactgaagcatgcggtttacccggatcg

SEQ ID NO: 573405 - DNA, 75 bp, synthetic construct
  source 1..75: mol_type = other DNA
ttctcatttacgagtaatatctaataaaacacttagtttgcttagatattacttgttagcttttgcagttttaag

SEQ ID NO: 573406 - DNA, 75 bp, synthetic construct
  source 1..75: mol_type = other DNA
cgggaaattcgcgataccgctgatgcactgaacaaactgaacttacgacatacggaaatcttgccgctttatgcg

SEQ ID NO: 573407 - DNA, 75 bp, synthetic construct
  source 1..75: mol_type = other DNA
tggttacacaggccagtgcttctatcagtgaaaccattcaggtggtcaatagccttggtggggacgagcatctac

SEQ ID NO: 573408 - DNA, 75 bp, synthetic construct
  source 1..75: mol_type = other DNA
aaacactgaaatattagcggtgggacgtttggtcgttaaaaagggcttcagtacgctgattgaagcgctgcgttt

SEQ ID NO: 573409 - DNA, 75 bp, synthetic construct
  source 1..75: mol_type = other DNA
ccctgcattatcagtagtgatggggaccgggatgggttgccgacagtattactggaggccatggcgcagggattg

SEQ ID NO: 573410 - DNA, 75 bp, synthetic construct
  source 1..75: mol_type = other DNA
ataaggcattatctgatcgagagactatctttgagtctaacgataaggtttctggtttgtcgtatgcaaaatcag

SEQ ID NO: 573411 - DNA, 75 bp, synthetic construct
  source 1..75: mol_type = other DNA
tgcgtgatctgatccttcaactcagcaaaagttcgatttattcaacaaagccacgcaatggtgccaattcacgtt

SEQ ID NO: 573412 - DNA, 75 bp, synthetic construct
  source 1..75: mol_type = other DNA
tgaatgtctgggggaatgtgggcgttcaggttgccgataggggatataatgacacctctgcaatggttggcatta

SEQ ID NO: 573413 - DNA, 75 bp, synthetic construct
  source 1..75: mol_type = other DNA
ttccgtcgccggattatgatggtaagcatcatcacagagaacgggatacacctggcaggctacggtgaggccata

SEQ ID NO: 573414 - DNA, 75 bp, synthetic construct
  source 1..75: mol_type = other DNA
gggaaattccaccgattttaccggacagtcgagatggagatgttcgggagctagataatttgctgtatcaaacgg

SEQ ID NO: 573415 - DNA, 75 bp, synthetic construct
  source 1..75: mol_type = other DNA
cgcgctggcattattattcgatggcgcgaaaaaactttcgcggttatttgcagggcgacgaagttcggctgaaaa

SEQ ID NO: 573416 - DNA, 75 bp, synthetic construct
  source 1..75: mol_type = other DNA
caactacgttcaggagtttgtgggcgatgctggccgtatacgtcccacgcgtgctatgtggcgtgatgcagctac

SEQ ID NO: 573417 - DNA, 75 bp, synthetic construct
  source 1..75: mol_type = other DNA
agtggacgaatgaaatattaccgttaagattccgggacgacgtgatgagcctgaccggttcagctccagtatcag

SEQ ID NO: 573418 - DNA, 75 bp, synthetic construct
  source 1..75: mol_type = other DNA
accagattcaggccgcaaccggacacgtagtaacactcctcgcgagggcaaaaaaaccgcttcaggatgcggatt

SEQ ID NO: 573419 - DNA, 75 bp, synthetic construct
  source 1..75: mol_type = other DNA
aacgggatacacctggcaggctacggtgaggccataaaccgtgatgctgatactccgtacccaccggagccgaag

SEQ ID NO: 573420 - DNA, 75 bp, synthetic construct
  source 1..75: mol_type = other DNA
tcatcaccgccgacccgaaagagcgtcacgccctgcagtcctggcgcttcttcctggcggcggcgggctcgctcg

SEQ ID NO: 573421 - DNA, 75 bp, synthetic construct
  source 1..75: mol_type = other DNA
atgtcaaccgacggggactctccccgtcataaacgttaacgccccactcctctctgtcgctcaagaggttaatga

SEQ ID NO: 573422 - DNA, 75 bp, synthetic construct
  source 1..75: mol_type = other DNA
ccagtcgcacagcggacggcgcattgtgctggcgaccaacgtcgcggaaacctcgctgaccgtaccggggattaa

SEQ ID NO: 573423 - DNA, 75 bp, synthetic construct
  source 1..75: mol_type = other DNA
cttaacgatcttttggatctgattcagaaaaacgactttatcaacgctaacgctcttctgaatacgctaagcctg

SEQ ID NO: 573424 - DNA, 75 bp, synthetic construct
  source 1..75: mol_type = other DNA
tgctggtttattctctggataatggcgaattaacgcagctcccgtctctgtatgggcaagatgcgaatactgtgc

SEQ ID NO: 573425 - DNA, 75 bp, synthetic construct
  source 1..75: mol_type = other DNA
gccagatgctgcttgatgccggagtgattctggcgagcagcagcaccaataccggattgctggcgcgtgaattta

SEQ ID NO: 573426 - DNA, 75 bp, synthetic construct
  source 1..75: mol_type = other DNA
taatatataaaagcgatcaaaaaagtgtcaacgtacgtctggaaaataaagggaataacccgttgcttgtccaga

SEQ ID NO: 573427 - DNA, 75 bp, synthetic construct
  source 1..75: mol_type = other DNA
acttggtgcgccaccgcatgtcattgaaaaactgctgggtcatcaaatgtcaggagtgatggccagatacaacct

SEQ ID NO: 573428 - DNA, 75 bp, synthetic construct
  source 1..75: mol_type = other DNA
acggcaatcatggcctcgtcccgggatcgccagttgaccgccgtcagaacggccattagtcgctttatgccaggg

SEQ ID NO: 573429 - DNA, 75 bp, synthetic construct
  source 1..75: mol_type = other DNA
aaagaaaaccatatttaattctcactgaccatgataaatattttagctttatcaaatatgcatttaacaatggaa

SEQ ID NO: 573430 - DNA, 75 bp, synthetic construct
  source 1..75: mol_type = other DNA
tccattatgtaatttcaaaactcaagactttgaaacaagattaatacttgcattgcctgagttaacaatcgagca

SEQ ID NO: 573431 - DNA, 75 bp, synthetic construct
  source 1..75: mol_type = other DNA
tttcagattactcaacctttcttttaaaattatttcaggatactaaagtaaacagattatgtgattattataagt

SEQ ID NO: 573432 - DNA, 75 bp, synthetic construct
  source 1..75: mol_type = other DNA
ctcaatcaggggaaagcacatcatcacttaccaacacaacaactgttggcaatgatgcaagggtgtctggaagta

SEQ ID NO: 573433 - DNA, 75 bp, synthetic construct
  source 1..75: mol_type = other DNA
cttatcttgacaatttagctattaaaatcaaagttaacttaaaggatttcctggagaagctaagattttctgata

SEQ ID NO: 573434 - DNA, 75 bp, synthetic construct
  source 1..75: mol_type = other DNA
aacctttttaaagcagccctaatacaatatataacaaacaataacaccctactaattgaaatatataaaaatgcg

SEQ ID NO: 573435 - DNA, 75 bp, synthetic construct
  source 1..75: mol_type = other DNA
agcacctcactgcctaaagacagagagagcgtgttctggtttaacgtactggaagttccaccaaaaccagatgca

SEQ ID NO: 573436 - DNA, 75 bp, synthetic construct
  source 1..75: mol_type = other DNA
tacccggccctgtcgctggacaggctgccagagcttttaacccgtacggataactactgcggcaggctgctgacg

SEQ ID NO: 573437 - DNA, 75 bp, synthetic construct
  source 1..75: mol_type = other DNA
gttataaagttcctatgtattatcgccctgcggggcttaaaaatattgcacaaagacctgatatgttggaatggc

SEQ ID NO: 573438 - DNA, 75 bp, synthetic construct
  source 1..75: mol_type = other DNA
acatggttagttcagggctggattgaagatctcaaggaagttaagactaaagattttaccgttgtcccaacagta

SEQ ID NO: 573439 - DNA, 75 bp, synthetic construct
  source 1..75: mol_type = other DNA
gcgatctctgtactgctctcgaccagtcgcagcccaagatctcccgccacctggcattgctgcgtgaaagcgggc

SEQ ID NO: 573440 - DNA, 75 bp, synthetic construct
  source 1..75: mol_type = other DNA
agtgagatgggtgagttatgcgtgtgtgatctctgtactgccctgaatcagtcgcagcccaagatctcacgccac

SEQ ID NO: 573441 - DNA, 75 bp, synthetic construct
  source 1..75: mol_type = other DNA
catattccagcatgggcggcgaaaattattgatgaggcctggcgatgtgaacaggaaaaggttcaggcgattgtc

SEQ ID NO: 573442 - DNA, 75 bp, synthetic construct
  source 1..75: mol_type = other DNA
aacaagtgtatatacatattttaatgtgattttattatctttttatgctggtgactatgttgtggcaaattttaa

SEQ ID NO: 573443 - DNA, 75 bp, synthetic construct
  source 1..75: mol_type = other DNA
gaggaaaattcagcgtgttccccgcgccagcggggataaaccggcgctgatgcgcttaatattaacgtattcgtc

SEQ ID NO: 573444 - DNA, 75 bp, synthetic construct
  source 1..75: mol_type = other DNA
gcaaaagcagcaaatcaaagcctgctacaactggcatttcgtacacgtataaaactgttctatcgcccggaagga

SEQ ID NO: 573445 - DNA, 75 bp, synthetic construct
  source 1..75: mol_type = other DNA
gtcttttttgtgttttttttcataaaattgccatatcttctgaaacctttggtccatatgaaagtcgtctaatat

SEQ ID NO: 573446 - DNA, 75 bp, synthetic construct
  source 1..75: mol_type = other DNA
cggaagaaatgtattggcaggatgcgccagttgaaggcagcagcaaagcggctgcatacgctacaggctggaacg

SEQ ID NO: 573447 - DNA, 75 bp, synthetic construct
  source 1..75: mol_type = other DNA
tttccacgcactccgtttccagaaatgcgtctgtggttcgcgtggcattactgtcaccaaaagcttccgtttcca

SEQ ID NO: 573448 - DNA, 75 bp, synthetic construct
  source 1..75: mol_type = other DNA
caactgaatttaaaattcgtacggggatgaatactccctcttggaaagatttgatagagaagatgtacaatgaat

SEQ ID NO: 573449 - DNA, 75 bp, synthetic construct
  source 1..75: mol_type = other DNA
agagacggtgggcagtaaccagatcattaaagtgggctctgttcaggtggaaacgattggacttgttcgtgcgct

SEQ ID NO: 573450 - DNA, 75 bp, synthetic construct
  source 1..75: mol_type = other DNA
cggtgggcaagacgatgaaggaaaacaccggacaaacagcagtttattctgccggtgagcatcttgaactctgct

SEQ ID NO: 573451 - DNA, 75 bp, synthetic construct
  source 1..75: mol_type = other DNA
atggaataatagaaagagaacatattatccctaaatttatatataaatatcaaaaagaatctggagatcgtttta

SEQ ID NO: 573452 - DNA, 75 bp, synthetic construct
  source 1..75: mol_type = other DNA
aaatgtattcatttctatcatgagaatgatcttcgggatagttgtaataccgaatcgatgcttgataagttaatg

SEQ ID NO: 573453 - DNA, 75 bp, synthetic construct
  source 1..75: mol_type = other DNA
tgtcagtggtgacccggccacgcgggacaaaatgcgccgcctgatccgtcggctggactcagaaatggaacgcag

SEQ ID NO: 573454 - DNA, 75 bp, synthetic construct
  source 1..75: mol_type = other DNA
cgtaccgtttgccggggcagcagtatgatgaggagtcgggactgtattacaaccgtcaccggtactacgatccgt

SEQ ID NO: 573455 - DNA, 75 bp, synthetic construct
  source 1..75: mol_type = other DNA
cggcagcaacacgacgtttctcctgaagcctgacagcatcgccatttccacacctgacagcttcaccgtaaccgt

SEQ ID NO: 573456 - DNA, 75 bp, synthetic construct
  source 1..75: mol_type = other DNA
cgtgcagagtatctcacagaacgtgtggttctcatgcaatggtggagtgactatgtttcgtctcaaaaatacaaa

SEQ ID NO: 573457 - DNA, 75 bp, synthetic construct
  source 1..75: mol_type = other DNA
tcacggtatgcgatccattgctagaacggctgctgaggagtctggcaagtttaggactgatgtcttagaagccgc

SEQ ID NO: 573458 - DNA, 75 bp, synthetic construct
  source 1..75: mol_type = other DNA
ggcttcgatcgtcaacaatatacatcgcactatacaaaccgaagctcagatcaacaccgctgaaacgaaaaatgc

SEQ ID NO: 573459 - DNA, 75 bp, synthetic construct
  source 1..75: mol_type = other DNA
aataatgtttggctctcccgcaaagaaaataaaaagcagaagaaaaaacatactaaaaatggaagaagaattgca

SEQ ID NO: 573460 - DNA, 75 bp, synthetic construct
  source 1..75: mol_type = other DNA
ctgctgatttaaccgctgagaagtttgcgacagcgattcgaaatcactggcacgtggagaataagttgctctggc

SEQ ID NO: 573461 - DNA, 75 bp, synthetic construct
  source 1..75: mol_type = other DNA
gagttttacgaggcagcagccagaatgagcgtccggcaagtcttcctggaagtagcagaaaattgtcagaaaagt

SEQ ID NO: 573462 - DNA, 75 bp, synthetic construct
  source 1..75: mol_type = other DNA
tgcaaggcagtaaaacacgcaataagaaattactcaagcaattaatttcattttcagaccacagttcatgggcta

SEQ ID NO: 573463 - DNA, 75 bp, synthetic construct
  source 1..75: mol_type = other DNA
gcagatatatttcaaataatcagcgcaactggggccagacgtttcaggggcgtgggctaagaatccccatctctc

SEQ ID NO: 573464 - DNA, 75 bp, synthetic construct
  source 1..75: mol_type = other DNA
actatgacctgcagaacaataccttttcagtcagtttaagcttcaacccttggattctggtaaacaactgcccgg

SEQ ID NO: 573465 - DNA, 75 bp, synthetic construct
  source 1..75: mol_type = other DNA
ggtgaatgatttatttgatcttgccgatcaggcgaaaccccagcagcttgtcagcggagaaggtgatgtactggg

SEQ ID NO: 573466 - DNA, 75 bp, synthetic construct
  source 1..75: mol_type = other DNA
aagattccggccagcgcagtgcaggcgcattacggggtgggcaggaagcccgcgtgatgatgatgctggggaatt

SEQ ID NO: 573467 - DNA, 75 bp, synthetic construct
  source 1..75: mol_type = other DNA
agaaccctttctgatcctgtgatttatcgactgcagttaaagaagaatacctcgggtaccattattattagagca

SEQ ID NO: 573468 - DNA, 75 bp, synthetic construct
  source 1..75: mol_type = other DNA
cgcagtattaccttcttgataaggaaaatttcatggctcttttaagccgaacagataagaaatatgagaataaag

SEQ ID NO: 573469 - DNA, 75 bp, synthetic construct
  source 1..75: mol_type = other DNA
caagtttatggtgatcgacggcaaaaacgtccagaccgggtcgtttaactacacggcaagcgccgtttcgcgcaa

SEQ ID NO: 573470 - DNA, 75 bp, synthetic construct
  source 1..75: mol_type = other DNA
gtgctcacagacagtcacttacatcatttagtggcaaagagattattttgattgttatgaatattagtgaaaacg

SEQ ID NO: 573471 - DNA, 75 bp, synthetic construct
  source 1..75: mol_type = other DNA
tcaggctgaaatgtgttactggaccagtagttgtcctttagatagcccacatgagaatgataattcgtcagggag

SEQ ID NO: 573472 - DNA, 75 bp, synthetic construct
  source 1..75: mol_type = other DNA
ttctcgtgtatacgagttgaaaaaaagagctgatgatcctaatagctcaataaccggtgaaactacgataccagt

SEQ ID NO: 573473 - DNA, 75 bp, synthetic construct
  source 1..75: mol_type = other DNA
atcagcccggaaggggaaacggcgtggtgcggggagtatgacgaatggggaaacctgctgggcgaaaccagtgcg

SEQ ID NO: 573474 - DNA, 75 bp, synthetic construct
  source 1..75: mol_type = other DNA
ggcaaagaatgtggtgttaaaaatgggtgcggaaggcgcgatgttcgccaatgagaacaggcgaatcatctactc

SEQ ID NO: 573475 - DNA, 75 bp, synthetic construct
  source 1..75: mol_type = other DNA
gaattgttatcagtaaaatacctgttatgcaagcagggttaaaagaggtcggtgatgctgccaacttactgattt

SEQ ID NO: 573476 - DNA, 75 bp, synthetic construct
  source 1..75: mol_type = other DNA
tcaccttggacgccagttgtggtaaccctgtacagtccaccgccagcgagcttaccacctccggcggtggggata

SEQ ID NO: 573477 - DNA, 75 bp, synthetic construct
  source 1..75: mol_type = other DNA
taatatatgactttattttggggatgattattgcagaggcctacattaggctaccttctagacttataaataaaa

SEQ ID NO: 573478 - DNA, 75 bp, synthetic construct
  source 1..75: mol_type = other DNA
ttaacgatcaaaagatccagtatttgactgcccctaatatcaatatacataaaatgtcgctatcaaatataacaa

SEQ ID NO: 573479 - DNA, 75 bp, synthetic construct
  source 1..75: mol_type = other DNA
tcaaacgccatcgttggccgctttcactatgagtacgagggcgactggtcgaaatgtgccagcagccgcgagata

SEQ ID NO: 573480 - DNA, 75 bp, synthetic construct
  source 1..75: mol_type = other DNA
gcgacaccatgcatgagctaagaagtcgagttgctcaacactatggaaagaaacctgttcaaatgacaatgtatt

SEQ ID NO: 573481 - DNA, 75 bp, synthetic construct
  source 1..75: mol_type = other DNA
agcgatgcgtcatcgggatataattattgcaaaaatagatttgtttattcaaagaatcactcataatttatggac

SEQ ID NO: 573482 - DNA, 75 bp, synthetic construct
  source 1..75: mol_type = other DNA
ttaaacgatcgtgaatttattgcatcagttgttgaccgggctatttttcatttcgcgattaatagtatatgtaat

SEQ ID NO: 573483 - DNA, 75 bp, synthetic construct
  source 1..75: mol_type = other DNA
atgtgggtcaataagtatattgacgattgcactgatgaggatttaaacgatcgtgactttattgcatcagttgtt

SEQ ID NO: 573484 - DNA, 75 bp, synthetic construct
  source 1..75: mol_type = other DNA
cgccggtattcaaagtatctctcgtgggcagtcgagcgccgcgctggcactaggcatgacccactggcagtcaat

SEQ ID NO: 573485 - DNA, 75 bp, synthetic construct
  source 1..75: mol_type = other DNA
attttagaaacgtgcattacacctaagatgctcaatataaatgacattgatgatgctatcatcaagagtctttta

SEQ ID NO: 573486 - DNA, 75 bp, synthetic construct
  source 1..75: mol_type = other DNA
accttaagaaggacattaatgaggctctatatgaactatcaaagagccaaaccaaatgtgataatacaataaagt

SEQ ID NO: 573487 - DNA, 75 bp, synthetic construct
  source 1..75: mol_type = other DNA
atggtcaccaataaatttggcgttgtcttttcttactgcggagataatataaaggaatttatacttttattaccc

SEQ ID NO: 573488 - DNA, 75 bp, synthetic construct
  source 1..75: mol_type = other DNA
attcacaacacattacattagccgacaattttaaacaaaaaaataaagccttagatacctggtatgtgggaatga

SEQ ID NO: 573489 - DNA, 75 bp, synthetic construct
  source 1..75: mol_type = other DNA
tggaaactggtatctgagcagtagtaaaaatactccagaaccaaggcctgatcctgaacccactccggaagggca

SEQ ID NO: 573490 - DNA, 75 bp, synthetic construct
  source 1..75: mol_type = other DNA
cggtaacaaccatagcagtacaggtgcagtacgcaccggataccattcaaaaggcagcgtaaatggttacagtac

SEQ ID NO: 573491 - DNA, 75 bp, synthetic construct
  source 1..75: mol_type = other DNA
aaaacatgcaaatataaatgcagatgtagcaggtttaattgatatattgctttgtcatgaattcatgattttgga

SEQ ID NO: 573492 - DNA, 75 bp, synthetic construct
  source 1..75: mol_type = other DNA
aactggaaccgaataatagcaacacccaggcagcgcttggttacgccttgtgggatagcggtgatatcgcacagt

SEQ ID NO: 573493 - DNA, 75 bp, synthetic construct
  source 1..75: mol_type = other DNA
aaatcagcaacgcttcaatttccgccgtctgcatgaggaggtcggtcgccactggacgttcagtttcgattcttc

SEQ ID NO: 573494 - DNA, 75 bp, synthetic construct
  source 1..75: mol_type = other DNA
tttgctctgtgaagatattatgcctggtcgatggaccactcaacttgtcaataagcacttaggttacagatacac

SEQ ID NO: 573495 - DNA, 75 bp, synthetic construct
  source 1..75: mol_type = other DNA
aaaggaatttatacttttattaccctataataaatcactggagatgtatgaacttaacgatcaaaagatccagta

SEQ ID NO: 573496 - DNA, 75 bp, synthetic construct
  source 1..75: mol_type = other DNA
tattaattccgacgtataatgtcggagcatggattgatgaagccataaatagtattattgaacaaacttataaaa

SEQ ID NO: 573497 - DNA, 75 bp, synthetic construct
  source 1..75: mol_type = other DNA
gagatagctaatggaacataccagtggtttgatctgagtcagccaggtaatgagaacaaaaactgggactggaaa

SEQ ID NO: 573498 - DNA, 75 bp, synthetic construct
  source 1..75: mol_type = other DNA
tggaaaggttctcctggcatgtggcggataaggggggccgcatggtgaggttctacgggttcctgagtccggcga

SEQ ID NO: 573499 - DNA, 75 bp, synthetic construct
  source 1..75: mol_type = other DNA
gcaaaattgagttccacaaaggcatccatgacataaaaaaatcccacgatgttcatgtctcaaaggaaaaactcg

SEQ ID NO: 573500 - DNA, 75 bp, synthetic construct
  source 1..75: mol_type = other DNA
gtgccggggtttcgctttgatggcccgcaattggcaaaaaccacgggcggtaacggttggataaaaatgttaagg

SEQ ID NO: 573501 - DNA, 75 bp, synthetic construct
  source 1..75: mol_type = other DNA
acgcaatatatttacactttaaattggctatatttattaggcctggttgatgctaacgaaaatggagatttgata

SEQ ID NO: 573502 - DNA, 75 bp, synthetic construct
  source 1..75: mol_type = other DNA
attttaataatacctgatattaactcggcctcaccatggcctgatgattctagaaatataataaaatttggcggt

SEQ ID NO: 573503 - DNA, 75 bp, synthetic construct
  source 1..75: mol_type = other DNA
gaaagcagctcgcggcataaatgtcatgcgtgagatcaaggacgaacgaactggcgaaatcatcgatcgcgtaat

SEQ ID NO: 573504 - DNA, 75 bp, synthetic construct
  source 1..75: mol_type = other DNA
gtggtgccccgacgagggcgaagcggttgtacgaatgctcaaagagctggcaatatcgggcattacaaatccgga

SEQ ID NO: 573505 - DNA, 75 bp, synthetic construct
  source 1..75: mol_type = other DNA
aatcaatcttcgatctggaagcaatcttcgaacagtcccgcaacaatgttagtgaacttgaacagctgttgagcg

SEQ ID NO: 573506 - DNA, 75 bp, synthetic construct
  source 1..75: mol_type = other DNA
aactctctatcagcgacagccgcgcaggtgggaaagactacctgctcaggccatcattcgaggctatgacgcgga

SEQ ID NO: 573507 - DNA, 75 bp, synthetic construct
  source 1..75: mol_type = other DNA
caccacggttactgagacggtggcactgaaaagcaagaagccagtgatgttcttcagccttgaaatgcccatcga

SEQ ID NO: 573508 - DNA, 75 bp, synthetic construct
  source 1..75: mol_type = other DNA
gatgagcctaatttatttcaggccagctactactacggtctgaataactatctaacgggtggtgatgctgccaac

SEQ ID NO: 573509 - DNA, 75 bp, synthetic construct
  source 1..75: mol_type = other DNA
cactaactctggggctttctttgctacaggacttgttaataactctgatgggagttgtacattaaccggagttac

SEQ ID NO: 573510 - DNA, 75 bp, synthetic construct
  source 1..75: mol_type = other DNA
gcatgcgttggacttctgaatggttaccgaatcaatgaagtaaaaaatttcattgagaaacccggcatcacaaat

SEQ ID NO: 573511 - DNA, 75 bp, synthetic construct
  source 1..75: mol_type = other DNA
cgatcagctacggaaacaggcagaacaagtccaaaagcaggctgatacaaaaaggctacaggcacagcgtaatct

SEQ ID NO: 573512 - DNA, 75 bp, synthetic construct
  source 1..75: mol_type = other DNA
acaccagattgctgaatcctgccaacgagagcatgggaaggcaaaatcgcagatcgagcaggacaagataatgct

SEQ ID NO: 573513 - DNA, 75 bp, synthetic construct
  source 1..75: mol_type = other DNA
caactgggaccgttataacccggcagaccaagacagttcgtgctggatccgtgtggcacaggcgtgggcatcgga

SEQ ID NO: 573514 - DNA, 75 bp, synthetic construct
  source 1..75: mol_type = other DNA
cgtgacaggaccggcaggcgaggaaatcttctgcgacgaacatggtcgcgtgcgggtgaagtttaactgggaccg

SEQ ID NO: 573515 - DNA, 75 bp, synthetic construct
  source 1..75: mol_type = other DNA
aggcgaacctgaaccgggaatggcaggtggtggcaagtgaactgcacggcgaacagccacaggcggtgccgggac

SEQ ID NO: 573516 - DNA, 75 bp, synthetic construct
  source 1..75: mol_type = other DNA
tggaagtggacggcctgccaccggacgcttttgcggtggtctcctttcatctcacccagtcactctcttcacttt

SEQ ID NO: 573517 - DNA, 75 bp, synthetic construct
  source 1..75: mol_type = other DNA
ggcgacccggaccagccgattattatggggcgtacctaccaccatgaaaaccgcacccccggcagcctgccggga

SEQ ID NO: 573518 - DNA, 75 bp, synthetic construct
  source 1..75: mol_type = other DNA
tttaatgagctgaagtttgatgatgcgacagggagagaacaggtctacatccacgcgcagaagaacatggatacc

SEQ ID NO: 573519 - DNA, 75 bp, synthetic construct
  source 1..75: mol_type = other DNA
gtactgggcaggagatgtatttccagtgttacgacagcagggaaacggctgaaatggcgattaaggttatgaatt

SEQ ID NO: 573520 - DNA, 75 bp, synthetic construct
  source 1..75: mol_type = other DNA
aaaacgctccatcgtggtgggcgacccgttgcaaatcccacctgtggtatcgctacccgagaagctgaacgccga

SEQ ID NO: 573521 - DNA, 75 bp, synthetic construct
  source 1..75: mol_type = other DNA
cgagcacgaggctatccacctgactgcgccatggcttcccgatgaggttcatcgcctgcgggaggatcttttcgc

SEQ ID NO: 573522 - DNA, 75 bp, synthetic construct
  source 1..75: mol_type = other DNA
ccttcttccgtggtgaccaaagactacacctttaaacgccccggctgggccggacgttttgaacaggaaggccag

SEQ ID NO: 573523 - DNA, 75 bp, synthetic construct
  source 1..75: mol_type = other DNA
aaaaggatcgattaccgaacagctgcttaacgctcgtgccgacgttacgcttggcggcggcgcaaaaacctttgc

SEQ ID NO: 573524 - DNA, 75 bp, synthetic construct
  source 1..75: mol_type = other DNA
aaatcgcccaacttggtttacgcgcgctggcggcggcgacactttctaacctgatgagtgctactattgcaggat

SEQ ID NO: 573525 - DNA, 75 bp, synthetic construct
  source 1..75: mol_type = other DNA
tattagatgtattgtattattatttggggtattattttcaaataacactgcgcatagaactcctcaaaaaaaatt

SEQ ID NO: 573526 - DNA, 75 bp, synthetic construct
  source 1..75: mol_type = other DNA
atataagatggagaatattttttgtacttttccttcttgttgttgtcagtatgattgatcgagcctcaatatcta

SEQ ID NO: 573527 - DNA, 75 bp, synthetic construct
  source 1..75: mol_type = other DNA
tgaaacctggataacgctggcgggagacgtctggaaattgatgctcacaccttattcaccaccaggcggtggcag

SEQ ID NO: 573528 - DNA, 75 bp, synthetic construct
  source 1..75: mol_type = other DNA
attggacactgatggtatctattatcagttcagaacgctggatgctaccgctccgagttccactactattggtca

SEQ ID NO: 573529 - DNA, 75 bp, synthetic construct
  source 1..75: mol_type = other DNA
tgcagcccgccacgcaaaaatgctcgaaaccgatcaggcatgggaagtgttcgaaaaactggaagataactactt

SEQ ID NO: 573530 - DNA, 75 bp, synthetic construct
  source 1..75: mol_type = other DNA
atccccctatgtctatccatttttgctgggactcagtgattgataaaaaagtgtatgaaacctggataacgctgg

SEQ ID NO: 573531 - DNA, 75 bp, synthetic construct
  source 1..75: mol_type = other DNA
agcactattagggttatgcccaacaggctttgccttacttgctgctaatctattgcttggtgcaagtgaagcacc

SEQ ID NO: 573532 - DNA, 75 bp, synthetic construct
  source 1..75: mol_type = other DNA
tcaaattgaaattatcgatgctgcacgattaatacagcttaataatcagttcttgtctaatggtaactatattag

SEQ ID NO: 573533 - DNA, 75 bp, synthetic construct
  source 1..75: mol_type = other DNA
aggcgcgtatcgggctgcagagtctgctgcagtacaccgggaaaaacgggcgaaccgtccgccttgaaggggaat

SEQ ID NO: 573534 - DNA, 75 bp, synthetic construct
  source 1..75: mol_type = other DNA
agctggcgctggagtgaacaggaacgcatcggcaaacaggaccttcttcagtacaccggaaagcccgggcgtact

SEQ ID NO: 573535 - DNA, 75 bp, synthetic construct
  source 1..75: mol_type = other DNA
atgcgtagtaaattatccattcttattcttgctttgatgacctgtggtgccgcaaatgccgcaactgcagtaggt

SEQ ID NO: 573536 - DNA, 75 bp, synthetic construct
  source 1..75: mol_type = other DNA
tcagggcggcgtcgccgtcaggccttgcggaaaagctgacacacaaactgaaagagggctggcagccatacggcg

SEQ ID NO: 573537 - DNA, 75 bp, synthetic construct
  source 1..75: mol_type = other DNA
tcagcaagacgattggaattaataaatttttctgaaaggtatttgaataactgtcacttttttcttgctgaacta

SEQ ID NO: 573538 - DNA, 75 bp, synthetic construct
  source 1..75: mol_type = other DNA
ctggctttgcttaaatcgcgcggatggctggtaatgccacgagatgaactggccggaaaattaatggagctttaa

SEQ ID NO: 573539 - DNA, 75 bp, synthetic construct
  source 1..75: mol_type = other DNA
gaagaagcgattctttacgtcgctgacttcgactatctgcgctgccagacggttgatgactccatcccaatcaac

SEQ ID NO: 573540 - DNA, 75 bp, synthetic construct
  source 1..75: mol_type = other DNA
tccacgccggcggcgtgttccctaatccgctgcttaaccgcgaaggcggggcggctgcatcgactctgcctggta

SEQ ID NO: 573541 - DNA, 75 bp, synthetic construct
  source 1..75: mol_type = other DNA
attctgctggaagtcgaacggctgcatagtcatttgctcaaccttggcctctcctgccattttgttggatttgat

SEQ ID NO: 573542 - DNA, 75 bp, synthetic construct
  source 1..75: mol_type = other DNA
tggctctgtggcaaacgaagaaaatacgatctccgtaggttcttccactaaccaacgccgtatcaccaacgttgc

SEQ ID NO: 573543 - DNA, 75 bp, synthetic construct
  source 1..75: mol_type = other DNA
tatggtattgcgatgccgccatcgccgggacaaaccatcggctataccgcctttataaaaaccagtaacccggaa

SEQ ID NO: 573544 - DNA, 75 bp, synthetic construct
  source 1..75: mol_type = other DNA
acgccgacaaaggttaagcactctgaccccaaaagtgcatttatgtgcaggatgccggagtttagcagtgaatat

SEQ ID NO: 573545 - DNA, 75 bp, synthetic construct
  source 1..75: mol_type = other DNA
agtccgcaggtctgccgtgtggctgacgcgttcgctgtactggaggcggcgcttgttatgacgcgaccgctcacc

SEQ ID NO: 573546 - DNA, 75 bp, synthetic construct
  source 1..75: mol_type = other DNA
atagcacaaccgtaacgggcgttgccgcatcatccaccgatactgtggccgccgtgcacacctcaggaacgcaag

SEQ ID NO: 573547 - DNA, 75 bp, synthetic construct
  source 1..75: mol_type = other DNA
tgctgactgacggtatgggtaatacgcatggcgtaaagctcggcaccgttaagtctgaccagcagatcgcagccg

SEQ ID NO: 573548 - DNA, 75 bp, synthetic construct
  source 1..75: mol_type = other DNA
gccggatttgtttatttcgttattagccttagcgcatcgttgttggtcagctacttgaaaagaaggacagcataa

SEQ ID NO: 573549 - DNA, 75 bp, synthetic construct
  source 1..75: mol_type = other DNA
atgagtggttctacgtggctcccgctgcgttcagggaccacatcgcaaagggccacaacgacagacaggccgccg

SEQ ID NO: 573550 - DNA, 75 bp, synthetic construct
  source 1..75: mol_type = other DNA
tgacatggaacggaacagcgagcgggatagggaacaaagcggccgcccgttgtgacagttttctatggcttgatg

SEQ ID NO: 573551 - DNA, 75 bp, synthetic construct
  source 1..75: mol_type = other DNA
acattcgtggtaaagctctgggtatttacaatatatcagtagtttctggtcaggtgattgtttttattgttaatt

SEQ ID NO: 573552 - DNA, 75 bp, synthetic construct
  source 1..75: mol_type = other DNA
ctcctcacaattgtatatgccataatacattctcttaccctccgggccttcagctttaaatgggacaagaagtgt

SEQ ID NO: 573553 - DNA, 75 bp, synthetic construct
  source 1..75: mol_type = other DNA
gacatattggtgtcaaacgtgaaggtgatcactggctggtcttccgggcagacctgacagaacgaaaattctccc

SEQ ID NO: 573554 - DNA, 75 bp, synthetic construct
  source 1..75: mol_type = other DNA
ttgaataagtatattgtagcgtatgtcaataatagtgacttccgcattaattcagtaagccccggtggaattttt

SEQ ID NO: 573555 - DNA, 75 bp, synthetic construct
  source 1..75: mol_type = other DNA
tggaatgttaaatgtagaatctgtcttgggctctattattttccttttatcagatggctcgcaatatgtaacagg

SEQ ID NO: 573556 - DNA, 75 bp, synthetic construct
  source 1..75: mol_type = other DNA
atttataatgagccgtgcaaaataaataacgatgcgggcgttaatattgattttggaaaggtaccaattcaagaa

SEQ ID NO: 573557 - DNA, 75 bp, synthetic construct
  source 1..75: mol_type = other DNA
gcttctgagttcaatgcgctgcgtgaagctgaaaaaaccctgaaggccgcaatgggcgaactggagcaacatgtt

SEQ ID NO: 573558 - DNA, 75 bp, synthetic construct
  source 1..75: mol_type = other DNA
gcgtctgaatttaacgcccttcgtgaagctgaaaaaacactaaaagcaaccgttggtgaccttgaacaacatgtc

SEQ ID NO: 573559 - DNA, 75 bp, synthetic construct
  source 1..75: mol_type = other DNA
atgattaccccggagaacggcaacaccacgccgctgtttgtggcgcaggggaatcagctgtttatgaacgacgtg

SEQ ID NO: 573560 - DNA, 75 bp, synthetic construct
  source 1..75: mol_type = other DNA
acagcctcacttcccaggcgctggcgggcctgaataacggcactggggggcaacgaaggggcgattgcccggcag

SEQ ID NO: 573561 - DNA, 75 bp, synthetic construct
  source 1..75: mol_type = other DNA
ctgctgcttttgaagtcgagcagcagaacggcattgatgatctgcgtctcgctatgcttcaggcgcaactggcgc

SEQ ID NO: 573562 - DNA, 75 bp, synthetic construct
  source 1..75: mol_type = other DNA
cggtgcattcaacgcagcggcgcagctcttcgaccgtgaagatgccaacgttgttatttctactgagaacgccga

SEQ ID NO: 573563 - DNA, 75 bp, synthetic construct
  source 1..75: mol_type = other DNA
tattgatactgcttttgcggtggcaaatattgctgaatatcggcgtagcgtggcaattgatcttatcaacacgct

SEQ ID NO: 573564 - DNA, 75 bp, synthetic construct
  source 1..75: mol_type = other DNA
cttaacccactgtatatgaaggactttaaccgtgtgcgagtggagttcgttggccattatcgacaagcttgcgag

SEQ ID NO: 573565 - DNA, 75 bp, synthetic construct
  source 1..75: mol_type = other DNA
ggttcgtgaccatatgaatgcagatcaactggcacagctggcttatttggaaagccgtgattgtgctctgctgga

SEQ ID NO: 573566 - DNA, 75 bp, synthetic construct
  source 1..75: mol_type = other DNA
actgtgaagagcgtctgcgccgcgtagcgccagaggaatacgaggcggcgttgctgggctggcgtaaaaatcgtg

SEQ ID NO: 573567 - DNA, 75 bp, synthetic construct
  source 1..75: mol_type = other DNA
tgcaccacaattaattagcttcgcgaagtcgtttgacccaacctcaaaggaagagattaaaatacttacagacac

SEQ ID NO: 573568 - DNA, 75 bp, synthetic construct
  source 1..75: mol_type = other DNA
ctgactgcgttggcgaacaacacgggcttgggtgcggaaggcatgatcctgaatcacacgctgttcccgctctat

SEQ ID NO: 573569 - DNA, 75 bp, synthetic construct
  source 1..75: mol_type = other DNA
atgctaaaaaaactgttttgtatctatgctctggcaatgggaataacattaatgccagcgacagcttctacaccg

SEQ ID NO: 573570 - DNA, 75 bp, synthetic construct
  source 1..75: mol_type = other DNA
tctccaagaaacaagccattgcacagactatcaaaaatgaattgggtggctctattgaggatatcagcaagatcg

SEQ ID NO: 573571 - DNA, 75 bp, synthetic construct
  source 1..75: mol_type = other DNA
gcggagttggggctacagccaatcattactcttatagattcggacttgcctgtgcgtgctggtgatcagccagta

SEQ ID NO: 573572 - DNA, 75 bp, synthetic construct
  source 1..75: mol_type = other DNA
accagccgtagatgagatacttaatcatttccgtggacgtatgcgtgtggttgttaacgaaaagaaatatgccct

SEQ ID NO: 573573 - DNA, 75 bp, synthetic construct
  source 1..75: mol_type = other DNA
gtacaggcacttgaattgcacaacggcgaattcatcgcagccctggcaggccacgagcgcattgaggcgaaagcc

SEQ ID NO: 573574 - DNA, 75 bp, synthetic construct
  source 1..75: mol_type = other DNA
tactccattatcgacagcaaagcgatcggtcactttatgccaccggttttccccggcgcacaggccaatacgcta

SEQ ID NO: 573575 - DNA, 75 bp, synthetic construct
  source 1..75: mol_type = other DNA
cgtctcagtcccactgtgtggcgattgatgcacgggcgccgttgtacgacggcggcatttgtacccgcgtggatt

SEQ ID NO: 573576 - DNA, 75 bp, synthetic construct
  source 1..75: mol_type = other DNA
caaacacctggttaggtggaaaaccgcaccttatatccccgccctgaatgaacggggttttacggcgcaccggat

SEQ ID NO: 573577 - DNA, 75 bp, synthetic construct
  source 1..75: mol_type = other DNA
ggaaggtcggctgcttgtggaggccgcccctccaggtcatatcaaacgtcggtatatcaatatagcgcccttgaa

SEQ ID NO: 573578 - DNA, 75 bp, synthetic construct
  source 1..75: mol_type = other DNA
aatatcttgtactatttacaaaacctatggtaactctttaggcattccttcgaacaagatgcaagaaaagacaaa

SEQ ID NO: 573579 - DNA, 75 bp, synthetic construct
  source 1..75: mol_type = other DNA
actagaatccaacgagcccgtttgagtcttgctcatgaagttgagtatgacagacttgatgcgatagaacatgca

SEQ ID NO: 573580 - DNA, 75 bp, synthetic construct
  source 1..75: mol_type = other DNA
cgccgtgattgacgccaaaatcctccatcgccagccgaaatatctcgggccatcggtcatgattgggccgtttag

SEQ ID NO: 573581 - DNA, 75 bp, synthetic construct
  source 1..75: mol_type = other DNA
ggtagcgcttgatcgcatcatgattggctttaacggcacatcccacgcctacgagtctgaattttcacaccaaca

SEQ ID NO: 573582 - DNA, 75 bp, synthetic construct
  source 1..75: mol_type = other DNA
ggcctcgtgtttgttttggttcttctggcgattacgccactgtcagaactgcactctggcatagccggatgcagg

SEQ ID NO: 573583 - DNA, 75 bp, synthetic construct
  source 1..75: mol_type = other DNA
taaactttgtattcatcccgaaactggtgttatccattctgtatcggaagatgcttcagccctttatccggcagg

SEQ ID NO: 573584 - DNA, 75 bp, synthetic construct
  source 1..75: mol_type = other DNA
taaaagataaaattactagtatagatgatgaatttattaatgtgcgaaaatctatagatgttaactttgtgacat

SEQ ID NO: 573585 - DNA, 75 bp, synthetic construct
  source 1..75: mol_type = other DNA
ggacggtgatgcgctttagcgaaaccgaacagaacggcaagctggagtggctgatccgtaaagacggctgtatgc

SEQ ID NO: 573586 - DNA, 75 bp, synthetic construct
  source 1..75: mol_type = other DNA
gaaatgcagtgatgcaaggcatggcgctacctttccttgctgtcgagatggatagggtatggataccaatgtcag

SEQ ID NO: 573587 - DNA, 75 bp, synthetic construct
  source 1..75: mol_type = other DNA
aaggaatattgaactctatgtaagccgcgatgtgtactactggatggttcatccgccatatcctgttccgaccca

SEQ ID NO: 573588 - DNA, 75 bp, synthetic construct
  source 1..75: mol_type = other DNA
gccgtacattgctggtgtggtgcggtgaaaatcgaacctccgcccaacagcagcaactcaccagttggcaggaac

SEQ ID NO: 573589 - DNA, 75 bp, synthetic construct
  source 1..75: mol_type = other DNA
tgtcttttcgctgtctggtcacaagagagtacgcagaactgaaacgacaagacggattgagtgacaaaccagaaa

SEQ ID NO: 573590 - DNA, 75 bp, synthetic construct
  source 1..75: mol_type = other DNA
gtttactgctgcggacctggctgcgggatggtgaagtgtttgcgcagatggtcagtggtgcgggaaacggtctgg

SEQ ID NO: 573591 - DNA, 75 bp, synthetic construct
  source 1..75: mol_type = other DNA
aactggcccgcgcctcgctggtggatcgtggtatcggtatttctggtgtcggtaccgcacaggcgatggttgggc

SEQ ID NO: 573592 - DNA, 75 bp, synthetic construct
  source 1..75: mol_type = other DNA
gcgtttcctgctttcggctcgctgaaagcagaatgcatcacggatatttcctgctcagcggaacaggcccgcacc

SEQ ID NO: 573593 - DNA, 75 bp, synthetic construct
  source 1..75: mol_type = other DNA
tggaaaaagtttatgataccactagaattagtaatcttgctaacgacccgaaacagttttgttcttttttttgtg

SEQ ID NO: 573594 - DNA, 75 bp, synthetic construct
  source 1..75: mol_type = other DNA
tggaagacagagcaacccagcttattcgttctacgtcgctaccagacgcgcagaacagcggtgtgtttaatccat

SEQ ID NO: 573595 - DNA, 75 bp, synthetic construct
  source 1..75: mol_type = other DNA
cagtgcggcgcgtaactataacggcacctacagcgcccagcggcaggagttggtcgagtccacggatggttacct

SEQ ID NO: 573596 - DNA, 75 bp, synthetic construct
  source 1..75: mol_type = other DNA
ttacgggaatattttcagcattacccgccaggcgataatcaatgatgaccttgatcagttatcaacggtgccaat

SEQ ID NO: 573597 - DNA, 75 bp, synthetic construct
  source 1..75: mol_type = other DNA
gtctgaaatccatcttcgcatccattcacctggtggcgacatctttgaagggctggctatctataacgccctgaa

SEQ ID NO: 573598 - DNA, 75 bp, synthetic construct
  source 1..75: mol_type = other DNA
gacggattgagtgacgagccagaaatctgttcacttcgcatttcagataaaacgggaagcgttggaaattacaag

SEQ ID NO: 573599 - DNA, 75 bp, synthetic construct
  source 1..75: mol_type = other DNA
gattaattcctggttcaggatgcaggctggtcaccagagtgacgcggatatttatatttatgacgagattggttt

SEQ ID NO: 573600 - DNA, 75 bp, synthetic construct
  source 1..75: mol_type = other DNA
ccgggggcagatgccaacagcggcattgttaacccgatccagaactttgccaccgttctgtcagaagcccgtctg

SEQ ID NO: 573601 - DNA, 75 bp, synthetic construct
  source 1..75: mol_type = other DNA
ggatatcagcgcaattgcttcgcaggttcagcaacaactgatggcagccaatgcggaacgtgtgcaggctgtaac

SEQ ID NO: 573602 - DNA, 75 bp, synthetic construct
  source 1..75: mol_type = other DNA
aatagagctaaggaagggttaattaagggtttagaaaaagacaaagtcagattagatgatatcattgaaaatata

SEQ ID NO: 573603 - DNA, 75 bp, synthetic construct
  source 1..75: mol_type = other DNA
gaaaaaatagcatttaattcattgatatcttggattaatgacggttcacatcattcaaatgacgatctttacatt

SEQ ID NO: 573604 - DNA, 75 bp, synthetic construct
  source 1..75: mol_type = other DNA
aaaagagctcacagataacatagacaaattgatacaacaaagggataaagagcaaagctcaatagattccaagaa

SEQ ID NO: 573605 - DNA, 75 bp, synthetic construct
  source 1..75: mol_type = other DNA
ctgaagtttgacgatgcgacagggaaagaacaggtctacatccacgcgcagaagaacatgaacaccgaggtgctg

SEQ ID NO: 573606 - DNA, 75 bp, synthetic construct
  source 1..75: mol_type = other DNA
tcacggcgaacagccgcaggcggtaccgggacgcaggggttcaggcaccacgctggataaccactttgcggtaat

SEQ ID NO: 573607 - DNA, 75 bp, synthetic construct
  source 1..75: mol_type = other DNA
gctgaattggattatgtattggctaatgtagatgaaaacaatatggatatagagtttattacattagataggcaa

SEQ ID NO: 573608 - DNA, 75 bp, synthetic construct
  source 1..75: mol_type = other DNA
tggcctacctgacggtatggcagggcgatgacgtacagcgccgggtgaaaggcgtggtgacctggtttgaactcg

SEQ ID NO: 573609 - DNA, 75 bp, synthetic construct
  source 1..75: mol_type = other DNA
aatgcccattttgtggtgggattgggcgacctcgaaatttagatcattatttgcctaaagctcactatcctcagt

SEQ ID NO: 573610 - DNA, 75 bp, synthetic construct
  source 1..75: mol_type = other DNA
aggcgaacctgaaccgggaatggcaggtggtggcaagtgaactgcacggcgagcagccgcaggcggtgccgggac

SEQ ID NO: 573611 - DNA, 75 bp, synthetic construct
  source 1..75: mol_type = other DNA
taactcagtgctaccactctccagagataaaaatgctgctaaacaccttatatttcaaacaataattaataaatc

SEQ ID NO: 573612 - DNA, 75 bp, synthetic construct
  source 1..75: mol_type = other DNA
atgacattcgaatcctattttgccgatcacctccgcgttcgttggcaacgattgcgcttataccactttccgggc

SEQ ID NO: 573613 - DNA, 75 bp, synthetic construct
  source 1..75: mol_type = other DNA
aacatggtcgcgtgcgggtgaaattcaactgggatcgctataacccgtcaaaccaggacagctcgtgctggatac

SEQ ID NO: 573614 - DNA, 75 bp, synthetic construct
  source 1..75: mol_type = other DNA
agtaaatatacctcatgaagccggacatgtacttggttacttagatgatgattatgattcttcgtctccgtatgt

SEQ ID NO: 573615 - DNA, 75 bp, synthetic construct
  source 1..75: mol_type = other DNA
tgctgagaccattggcaacaatcagatgattgcggttaccaacaatcagatacagacggtgggtgttaaccagat

SEQ ID NO: 573616 - DNA, 75 bp, synthetic construct
  source 1..75: mol_type = other DNA
cgtacagcgccgggtgaaaggtgtggtgacctggtttgaactcggggagaacgacaaaaaccagatgctgtacag

SEQ ID NO: 573617 - DNA, 75 bp, synthetic construct
  source 1..75: mol_type = other DNA
gggcagaccgcgatttactccgccggtgagcatctggagctctgctgtggtaaggcaaggctggtgctgacaaag

SEQ ID NO: 573618 - DNA, 75 bp, synthetic construct
  source 1..75: mol_type = other DNA
agcaagccgctgctctgccggcattccccttatatccgcctctatggcgtacaactgaccgatctgctccagggc

SEQ ID NO: 573619 - DNA, 75 bp, synthetic construct
  source 1..75: mol_type = other DNA
gccgtcgtgatgctggtttataaaagacctttaatagctatcacccttgggattgtcgtttcagccttggtcaga

SEQ ID NO: 573620 - DNA, 75 bp, synthetic construct
  source 1..75: mol_type = other DNA
ccgggaatggcaggtggtggcgagcgatcttcacggcgaacagccgcaggcggtaccgggacgcaggggttcagg

SEQ ID NO: 573621 - DNA, 75 bp, synthetic construct
  source 1..75: mol_type = other DNA
caccacattgagtggctttctaaagggggagaggattccgtggaaaatgccatcgcattatgccctaattgtcac

SEQ ID NO: 573622 - DNA, 75 bp, synthetic construct
  source 1..75: mol_type = other DNA
cactgaaaatatggccggcattgtaggtgaagatggtattgcttatgtttctggcttgagtgcggaaggcgagtt

SEQ ID NO: 573623 - DNA, 75 bp, synthetic construct
  source 1..75: mol_type = other DNA
cggttccttcagtatgattaacggagatcagttggtgcaggttacccgtggtatcgcgcagggggccgcaatcta

SEQ ID NO: 573624 - DNA, 75 bp, synthetic construct
  source 1..75: mol_type = other DNA
gatagggtattgcgtgacgcaaaaaataagttgcgagaacttgagaaagagcttcagtgtaaagataaagctctg

SEQ ID NO: 573625 - DNA, 75 bp, synthetic construct
  source 1..75: mol_type = other DNA
cttgcaattggatatgctaataatgatcagcttgttccattttcagtaagaaaagaagctatcgatttcatacaa

SEQ ID NO: 573626 - DNA, 75 bp, synthetic construct
  source 1..75: mol_type = other DNA
atgttcttatttatcagggaaaggttgggggtttatttcgtgaaagaaaaaatgaaagggttgctacagatattg

SEQ ID NO: 573627 - DNA, 75 bp, synthetic construct
  source 1..75: mol_type = other DNA
tatatcgcatagtcgtaccaagttcaaaacataaaaataattttctaaaccccttcccttctggattcattcagt

SEQ ID NO: 573628 - DNA, 75 bp, synthetic construct
  source 1..75: mol_type = other DNA
atttcctcaacggcgatccagaccagccgattattatggggcgcacctaccaccaggaaaaccgcacccccggca

SEQ ID NO: 573629 - DNA, 75 bp, synthetic construct
  source 1..75: mol_type = other DNA
caggcaccggttttggccacctggcgataccgcgtgtgggtcaggaggtgattgtagacttcctcaacggcgatc

SEQ ID NO: 573630 - DNA, 75 bp, synthetic construct
  source 1..75: mol_type = other DNA
gtctttcaggacagaggcacgattgccggttcagtgcatgttgacgctgtaaacaatggtggcgaaggcgacggt

SEQ ID NO: 573631 - DNA, 75 bp, synthetic construct
  source 1..75: mol_type = other DNA
gctgcggtgaataaccttattccattagcgggaattaaacagggcttatacaacgacttacccgacttgaaataa

SEQ ID NO: 573632 - DNA, 75 bp, synthetic construct
  source 1..75: mol_type = other DNA
ggccattgatattgcttatgaaggttccggcagtggcgactggcgcactgacggtttcatcgttggtgtcggtta

SEQ ID NO: 573633 - DNA, 75 bp, synthetic construct
  source 1..75: mol_type = other DNA
ggccgcgtgcgggtgaaatttaactgggaccgttataacccgtcaaaccaggacagttcatgctggatccgtgtg

SEQ ID NO: 573634 - DNA, 75 bp, synthetic construct
  source 1..75: mol_type = other DNA
cgcatattgcggtggtatgatgctgacgctggggatggcatataattacgtggcgctgcctgccgccctgctttc

SEQ ID NO: 573635 - DNA, 75 bp, synthetic construct
  source 1..75: mol_type = other DNA
atgcggtccgggcatggtcgtcggcgctggacaatcaggacgtcgtttcggcgctgatcatcaacgaataccggg

SEQ ID NO: 573636 - DNA, 75 bp, synthetic construct
  source 1..75: mol_type = other DNA
gctttctcgatgtggatttttgtcgtctttaatttggtctgctatatctttatttctcgttatgtgccggaaaca

SEQ ID NO: 573637 - DNA, 75 bp, synthetic construct
  source 1..75: mol_type = other DNA
tttgcccttactgtggccacacaaacggttatgaaatgaccagtggattgatttccagtaaaaaaatagaagaac

SEQ ID NO: 573638 - DNA, 75 bp, synthetic construct
  source 1..75: mol_type = other DNA
tctctgcgggagtgtgcggggataatcaaaaacgatgcacaccgggttttctcatttttcacgagatgggagcga

SEQ ID NO: 573639 - DNA, 75 bp, synthetic construct
  source 1..75: mol_type = other DNA
ttgaagcccgtaagctcagcgatatcccggatgcactggcggtaaacaagcatgctcaggcgtattacggtgtat

SEQ ID NO: 573640 - DNA, 75 bp, synthetic construct
  source 1..75: mol_type = other DNA
aaccgtatggcctgctatttgtgaagttctgaaatttatcgctgcaacattccatcttggtccttacgcgggata

SEQ ID NO: 573641 - DNA, 75 bp, synthetic construct
  source 1..75: mol_type = other DNA
tgatgtgctggcaggatacctttcaggaacctgccccggtatggcaaaactggtgctggcagtggggcttgcaga

SEQ ID NO: 573642 - DNA, 75 bp, synthetic construct
  source 1..75: mol_type = other DNA
agcaggcgggagaacaactgctaaaaacggttctcacccgtttgcgccagcacaagttgcctgcttcgaccgcgg

SEQ ID NO: 573643 - DNA, 75 bp, synthetic construct
  source 1..75: mol_type = other DNA
aaagctgacacgacaaatatctcctccggaagccggcaggttgttgagaaagatggtacggcaactggcagcaat

SEQ ID NO: 573644 - DNA, 75 bp, synthetic construct
  source 1..75: mol_type = other DNA
ccctcgaactacacgtcttccctaccgttggcaataccgccatcaccgaacttaaagcacgtcactttatcaccg

SEQ ID NO: 573645 - DNA, 75 bp, synthetic construct
  source 1..75: mol_type = other DNA
cgctatcaccacaagctctagccatccttgaaatcatgaaacctatcagtggtcatagtgaagtggtcaacaaaa

SEQ ID NO: 573646 - DNA, 75 bp, synthetic construct
  source 1..75: mol_type = other DNA
ttggaaaataaaaaattagcgtcaatcgacgtaacggactccgcacgtctgcgcggcaaggttgaccacaccaca

SEQ ID NO: 573647 - DNA, 75 bp, synthetic construct
  source 1..75: mol_type = other DNA
ctgaagtcctgactgaccataccgatgtgatttgctccaccagcattgaacgtattgttaccgggcgtaacgccg

SEQ ID NO: 573648 - DNA, 75 bp, synthetic construct
  source 1..75: mol_type = other DNA
ggggtgatcaacgtcttcagagggctgaactggaattacaaaaccaactccccctgtaaatttggtaataaaatt

SEQ ID NO: 573649 - DNA, 75 bp, synthetic construct
  source 1..75: mol_type = other DNA
agatcgctccacccgtattgatggacaggtattttcaaacccaacatttaaaaactttcttcctcatatcgagtc

SEQ ID NO: 573650 - DNA, 75 bp, synthetic construct
  source 1..75: mol_type = other DNA
aatagtgaaggtggatttgcccctatatttccagacatctgttatcacttaacccattacaagcccactgccgca

SEQ ID NO: 573651 - DNA, 75 bp, synthetic construct
  source 1..75: mol_type = other DNA
taggctaaaattaattaaaacaaggcaaaaaatatatagaacattcatgaaaagaatagtattaaaattcaggtc

SEQ ID NO: 573652 - DNA, 75 bp, synthetic construct
  source 1..75: mol_type = other DNA
agacctgatgaagaaatcggggatgctgagcctgatggatgctcaggcccgtgatgagtggtacaaaaaccttga

SEQ ID NO: 573653 - DNA, 75 bp, synthetic construct
  source 1..75: mol_type = other DNA
accatcacgaatgcacaaccgaacaggcagacgagttggtggcgagttatcgccgtcgtggcgccacggtagaac

SEQ ID NO: 573654 - DNA, 75 bp, synthetic construct
  source 1..75: mol_type = other DNA
agctttatcgacaaattttaagcagtgacaacatggttattgaggtcggaaatgtgccagagaaaatctccggca

SEQ ID NO: 573655 - DNA, 75 bp, synthetic construct
  source 1..75: mol_type = other DNA
tctgaatctatcacctgaaacacataccttaatacatttatttctgttaagtcatgggcaaattcactgtgagaa

SEQ ID NO: 573656 - DNA, 75 bp, synthetic construct
  source 1..75: mol_type = other DNA
aacagtgcgtggtgcattaccggttaccggaacaggaaaaccagccgtcagtgatcatggtgaaccaggaatgcc

SEQ ID NO: 573657 - DNA, 75 bp, synthetic construct
  source 1..75: mol_type = other DNA
gaggtcctgtcctgactatgtacgttttcggcctcttttacgaaatcataatgacaatatccagcgccagcagcg

SEQ ID NO: 573658 - DNA, 75 bp, synthetic construct
  source 1..75: mol_type = other DNA
aaatatgggggcaactgatttgtatgttgcgctctcaaggggagctaaatctgttacgatcttctcaggtcgtga

SEQ ID NO: 573659 - DNA, 75 bp, synthetic construct
  source 1..75: mol_type = other DNA
gctgccaacgtgatgccaaggcttttacaggcagcagctgagctgatgacaaacgttggcgttagtacaacctta

SEQ ID NO: 573660 - DNA, 75 bp, synthetic construct
  source 1..75: mol_type = other DNA
ggttttattataatcgcgatagcgcaattgattctccggacgacgaaaaagccttttactggctgaagctggccg

SEQ ID NO: 573661 - DNA, 75 bp, synthetic construct
  source 1..75: mol_type = other DNA
ggactgggtaagtgcgacacgcaatggcgcagtgattgatccggagacattctgtttctggctggagcaatcgac

SEQ ID NO: 573662 - DNA, 75 bp, synthetic construct
  source 1..75: mol_type = other DNA
gctgattaattttattgagcagcgtgctgatatccgtcgggtgcgggtatgggcgaagtcaccggtgtttgactg

SEQ ID NO: 573663 - DNA, 75 bp, synthetic construct
  source 1..75: mol_type = other DNA
tataacactcaggttaaagacatttcgctgggattgtcatggaactacactaaatcgcgtggtcagcccaatgcc

SEQ ID NO: 573664 - DNA, 75 bp, synthetic construct
  source 1..75: mol_type = other DNA
ttgcttcaaattatcgtgatggggaatcatatgttttactcgctgaaaaaatgacaactgtgatcagcgggccta

SEQ ID NO: 573665 - DNA, 75 bp, synthetic construct
  source 1..75: mol_type = other DNA
gaagaacttatcagcaacgaaactggcgaagttcacaaattatcaatgtgtgcttatagcatccttttagagctg

SEQ ID NO: 573666 - DNA, 75 bp, synthetic construct
  source 1..75: mol_type = other DNA
gaatgaatttatggactggttctccctctggggaccatggcatgctgtactgaagcgtacggaagctgaccgctg

SEQ ID NO: 573667 - DNA, 75 bp, synthetic construct
  source 1..75: mol_type = other DNA
ccagtgccgaacaggcagcggccttattgaaagcaatgagccaccctaaacgattgctgattctgtgcatgctta

SEQ ID NO: 573668 - DNA, 75 bp, synthetic construct
  source 1..75: mol_type = other DNA
ttttttgaagcaatatggtgattttgaaaatggtattactgttcacgataccattgccagagtgtatcctgtatc

SEQ ID NO: 573669 - DNA, 75 bp, synthetic construct
  source 1..75: mol_type = other DNA
tgcggataacatcggcggcgtgtattacaaacaaactcagatttatatcaatggcggatggcgcacggtatccgg

SEQ ID NO: 573670 - DNA, 75 bp, synthetic construct
  source 1..75: mol_type = other DNA
cgcctgttgatcctgtgtatgctttgcggttcgcctggcaccagcgccggtgaactggcacgcatcactggtctt

SEQ ID NO: 573671 - DNA, 75 bp, synthetic construct
  source 1..75: mol_type = other DNA
cgctcatcagcacggaaggggcaacagcgtggtgcgcagaatatgatgaatgggggcaacctgctgaatgaagag

SEQ ID NO: 573672 - DNA, 75 bp, synthetic construct
  source 1..75: mol_type = other DNA
cgtgatcgccagaacgcttggacacgcgggaaaaaaacaaacttttcgcgagtatgttgcgcagacagcggtcgc

SEQ ID NO: 573673 - DNA, 75 bp, synthetic construct
  source 1..75: mol_type = other DNA
ttgattactcgtttactttggcaaccgatattgatatgcatatttttggttggttgctcctctggatttaattct

SEQ ID NO: 573674 - DNA, 75 bp, synthetic construct
  source 1..75: mol_type = other DNA
tcggagataaggttccgaaacagccgatgcagtggctgacagatgatggttcggcctatacggctcatgaaacac

SEQ ID NO: 573675 - DNA, 75 bp, synthetic construct
  source 1..75: mol_type = other DNA
cgggcaggttgcgctgagacacgcgctttcctgctacaacaccggctcactcacaaacgggatttctaacgggta

SEQ ID NO: 573676 - DNA, 75 bp, synthetic construct
  source 1..75: mol_type = other DNA
ccatcagcagcatcagcggcaacgccggaacagcaacccgccttcagaacgcccgcagaatcaacaatgtgctgt

SEQ ID NO: 573677 - DNA, 75 bp, synthetic construct
  source 1..75: mol_type = other DNA
gcgccgatacgacgcccatcttcgtcgcctgcgtcgccagcttgcggaacgtaaacaacgtgcctggcaggcact

SEQ ID NO: 573678 - DNA, 75 bp, synthetic construct
  source 1..75: mol_type = other DNA
ataaaaaatggaatgctgttttgtctccattggaaatgaaaatattacttgggcaagaagcaatacagaaagttc

SEQ ID NO: 573679 - DNA, 75 bp, synthetic construct
  source 1..75: mol_type = other DNA
tgtccagaagcactggtgttttcatgggtgtcaccatcctggttgctacatcggtactgttgtttttgaaataca

SEQ ID NO: 573680 - DNA, 75 bp, synthetic construct
  source 1..75: mol_type = other DNA
tgaagcaaactatcgctgaatacgaagccaatcgtgatgaattaccgtttggactggataccaacagtgccattt

SEQ ID NO: 573681 - DNA, 75 bp, synthetic construct
  source 1..75: mol_type = other DNA
gctggaagcaaaaccaatagcgtgggaatgcggcgaaaacataatcctgtttaatcctgacacagttgaagcata

SEQ ID NO: 573682 - DNA, 75 bp, synthetic construct
  source 1..75: mol_type = other DNA
acatcctcgagtatgccagacagcagaggcgctttggtcagcattgcaaaatcccgccaggagatatggttgaaa

SEQ ID NO: 573683 - DNA, 75 bp, synthetic construct
  source 1..75: mol_type = other DNA
ttcacccgccgtgcccatgaaaatgatgactggcgaacagagttgaatgctttctggcagacatggtggatcgaa

SEQ ID NO: 573684 - DNA, 75 bp, synthetic construct
  source 1..75: mol_type = other DNA
gtattctgacaaagcagaagtcgaacggtgggtgcggctgcataaagcatgtaattttcgggcagatataacacc

SEQ ID NO: 573685 - DNA, 75 bp, synthetic construct
  source 1..75: mol_type = other DNA
tctatctggtgcatacaatatgttttctgagttctggaatgttgctgtctcagctgcgcctaaggtggatgattt

SEQ ID NO: 573686 - DNA, 75 bp, synthetic construct
  source 1..75: mol_type = other DNA
aacggacagattgccaaattcgtaactgtgcaaggccattctatggctgtttatgatgcatatggggcgcagcag

SEQ ID NO: 573687 - DNA, 75 bp, synthetic construct
  source 1..75: mol_type = other DNA
attagaggataatgtattcgttggtccttctgttgctttcacaaatgatatttatcctcgttcaaaaatgcataa

SEQ ID NO: 573688 - DNA, 75 bp, synthetic construct
  source 1..75: mol_type = other DNA
agttgctgaatattggactgatgagataccttggatttccggaggagatatttcagcagctcatcaaggctatct

SEQ ID NO: 573689 - DNA, 75 bp, synthetic construct
  source 1..75: mol_type = other DNA
aagttgtttttttccagaaactttaaacttgcattatcagtagtagatgttttttgtaaaggtagacatcccaaa

SEQ ID NO: 573690 - DNA, 75 bp, synthetic construct
  source 1..75: mol_type = other DNA
gaggtggatactcagtaacaggaaattcaacgtatactgttcttgggagggttgagggaggggtgattacaatac

SEQ ID NO: 573691 - DNA, 75 bp, synthetic construct
  source 1..75: mol_type = other DNA
caatgacaggatgtgctgtggattttgcaaatggaactgcatataaattcgtggattgcaccgggattgtgttag

SEQ ID NO: 573692 - DNA, 75 bp, synthetic construct
  source 1..75: mol_type = other DNA
aggcggtgatctttgatatcgacggcacactctgcgctcccgctgatgcggatatcctgcatcgccgtctgtggg

SEQ ID NO: 573693 - DNA, 75 bp, synthetic construct
  source 1..75: mol_type = other DNA
ggatacggtcacacaaaagcgcccttacgtgtgggtcgacggcaaagctgaaacgcagggctatttgctgaaaaa

SEQ ID NO: 573694 - DNA, 75 bp, synthetic construct
  source 1..75: mol_type = other DNA
ggactggtctgtatcgacatcaatgaagatggggacgggaagtctgtgaagaacaaacattcagtccgacttgtg

SEQ ID NO: 573695 - DNA, 75 bp, synthetic construct
  source 1..75: mol_type = other DNA
agggggcggtcatccatattgtgccgcgactggccggggccggaaagggtggactgcagattgtgctgggggcgg

SEQ ID NO: 573696 - DNA, 75 bp, synthetic construct
  source 1..75: mol_type = other DNA
cgcactgcgggaaaaaatcatcagcaggctggagtggcatcagcggggctggtttgactcccctgaccctttgca

SEQ ID NO: 573697 - DNA, 75 bp, synthetic construct
  source 1..75: mol_type = other DNA
agattttttgtctgcgtcgcgtcgtcaggcgttccagtttaaaagcattattcagaaggccgcggctgaagttga

SEQ ID NO: 573698 - DNA, 75 bp, synthetic construct
  source 1..75: mol_type = other DNA
atgccaaagcaagcaaatcatctccgtttgaagaaaccttgcgccaactgtccattccggaaggagggcgctatc

SEQ ID NO: 573699 - DNA, 75 bp, synthetic construct
  source 1..75: mol_type = other DNA
ccaatctattgaagtactggaagttagttaaaggtacgacgaagacacgattaacactaatggatgtaatgagct

SEQ ID NO: 573700 - DNA, 75 bp, synthetic construct
  source 1..75: mol_type = other DNA
acagtaatctttctgctgcaaaaaaagccaaaaatgacgaattttacacccaataccatgatattgaaaaagaga

SEQ ID NO: 573701 - DNA, 75 bp, synthetic construct
  source 1..75: mol_type = other DNA
gaaggctggctgtatctggcagtggtcattgacctgtggtcacgtgccgttattggctggtcaatgtcgccacgc

SEQ ID NO: 573702 - DNA, 75 bp, synthetic construct
  source 1..75: mol_type = other DNA
gagctggcccctgggcgattagaaggcatcatcaacgacatcgttgaaaacgacatgacgacgtttcattgccac

SEQ ID NO: 573703 - DNA, 75 bp, synthetic construct
  source 1..75: mol_type = other DNA
tgtaaaccggagcgcaattaaaaatatgaccgtagagcagctgctagactggccccctgaatctccagacaacca

SEQ ID NO: 573704 - DNA, 75 bp, synthetic construct
  source 1..75: mol_type = other DNA
ctatgacattaacccgattgaccaggttaacagcgagctatggtgggcgattcaaaacggttatatgacggttaa

SEQ ID NO: 573705 - DNA, 75 bp, synthetic construct
  source 1..75: mol_type = other DNA
gtaggccgctttaactttaaaggggtggatcagggtaaacgcgttggcgaactttccggtggtgagcgcggtcgt

SEQ ID NO: 573706 - DNA, 75 bp, synthetic construct
  source 1..75: mol_type = other DNA
gatggatacccagcgcgctctcaacttcctggtacgtaaagcacgcttaccgggtgggcaactggagcaggcgcg

SEQ ID NO: 573707 - DNA, 75 bp, synthetic construct
  source 1..75: mol_type = other DNA
aaataccggtaattggtgagcggagcggggatttgattggttttgataacggcgtttatgacctcgctacgcaga

SEQ ID NO: 573708 - DNA, 75 bp, synthetic construct
  source 1..75: mol_type = other DNA
cagcgcgtggcagcgtggcgcacaggtggtggggctatgcctgggtacctacgtgctggcttatactgggctgct

SEQ ID NO: 573709 - DNA, 75 bp, synthetic construct
  source 1..75: mol_type = other DNA
ggatcaccacagagcgtctccggcggagtcaggaactgctggaaagtacagatattgcagtggagcgggttgccg

SEQ ID NO: 573710 - DNA, 75 bp, synthetic construct
  source 1..75: mol_type = other DNA
gccggcagtaatgtcggctttttacgtccatatattccactcatccggaactgtgacacagaacctgaatacagg

SEQ ID NO: 573711 - DNA, 75 bp, synthetic construct
  source 1..75: mol_type = other DNA
aaagagttaaccggaaaaaacgatatagaaacagagatcagtaatcagtgcggtcgcctgatctccaacgcgatc

SEQ ID NO: 573712 - DNA, 75 bp, synthetic construct
  source 1..75: mol_type = other DNA
ttcgcagcatttatacgctgaagtatctgcgcgatccgcaaatggaacgcaatattcgccgttcccagaaccgga

SEQ ID NO: 573713 - DNA, 75 bp, synthetic construct
  source 1..75: mol_type = other DNA
tcagtgaggccgaaaaagacagggagctaccggaaaagatcgcggctgaaatccctgtcattatccgccgattgc

SEQ ID NO: 573714 - DNA, 75 bp, synthetic construct
  source 1..75: mol_type = other DNA
tagtggagaccaaaaagattggtcagaagctggcggcggcagatattcaggacgcaaatttttaccctgatggta

SEQ ID NO: 573715 - DNA, 75 bp, synthetic construct
  source 1..75: mol_type = other DNA
atatcactgcaccgcaaagctgtgaaattaacagtttaagacccattaattttgattttaaagaaattcctgcag

SEQ ID NO: 573716 - DNA, 75 bp, synthetic construct
  source 1..75: mol_type = other DNA
ttgccacggccggatttagcccatttcacttttcagtcccttgtattattttcgggcagtctatgccgcaaccgg

SEQ ID NO: 573717 - DNA, 75 bp, synthetic construct
  source 1..75: mol_type = other DNA
tgcggtaacgaccggaaaaaacatcattgagggcgaaggcatagagcgctatgaaatcgactggaagataccgga

SEQ ID NO: 573718 - DNA, 75 bp, synthetic construct
  source 1..75: mol_type = other DNA
aagatacaataaattcttcatgccaacagatgaaagaaaggatgaagtgacaggagaggcatatagcttcaacgt

SEQ ID NO: 573719 - DNA, 75 bp, synthetic construct
  source 1..75: mol_type = other DNA
catacagtaaggaaccttaaggaggatgactcatcccttgaggatatttataacataataaatgttgatgataag

SEQ ID NO: 573720 - DNA, 75 bp, synthetic construct
  source 1..75: mol_type = other DNA
tttcatagccgctttgcttttagcgatcgccagcgaatcgaaacgaaaacgctggcgcgctttggtaaagaaggt

SEQ ID NO: 573721 - DNA, 75 bp, synthetic construct
  source 1..75: mol_type = other DNA
gcggcttctggggctgagtaacaaaatcctgctggctgatgagatccacgcctgtgacgcttacatgtcgtgcat

SEQ ID NO: 573722 - DNA, 75 bp, synthetic construct
  source 1..75: mol_type = other DNA
aatcttatcctgccgcctgccgcgcctgcaggcatcacgctgctgcgctgtagcgtaaatgctgcccacagtcgt

SEQ ID NO: 573723 - DNA, 75 bp, synthetic construct
  source 1..75: mol_type = other DNA
tcggctggaaagttcgcctgtgtctgatggatacccagcgtgcgctcaacttcctggtacgcaaggcgcgtttac

SEQ ID NO: 573724 - DNA, 75 bp, synthetic construct
  source 1..75: mol_type = other DNA
tattaacgcgttgtacgtagacgatgacggcattattacctctgccggtactgccgcggcgctggattgctgttt

SEQ ID NO: 573725 - DNA, 75 bp, synthetic construct
  source 1..75: mol_type = other DNA
cggattaaatttatttagttggcagatacactctgatgccagctatagcaagcctgatgatatgaaaggcacatg

SEQ ID NO: 573726 - DNA, 75 bp, synthetic construct
  source 1..75: mol_type = other DNA
ctaattatttttttcaggctacgaataacaataggccattggctgtttttgtactaattgctcgtggtatgtcat

SEQ ID NO: 573727 - DNA, 75 bp, synthetic construct
  source 1..75: mol_type = other DNA
aaatcagaaattaaagcagcctatgacaacgccaaaagagcattgtcaggtggcttggttaaaacaaaagaacaa

SEQ ID NO: 573728 - DNA, 75 bp, synthetic construct
  source 1..75: mol_type = other DNA
gaaagcacggtattcacgtaaatattttggtcgtggtaaaggcatggtggcctacacgctgctgtgcaaccacat

SEQ ID NO: 573729 - DNA, 75 bp, synthetic construct
  source 1..75: mol_type = other DNA
tttaatgacggacagcaattaccagggagctatcttgtagctgtttctgttaatgataaaagaaaaaaacaaggt

SEQ ID NO: 573730 - DNA, 75 bp, synthetic construct
  source 1..75: mol_type = other DNA
ttctacccgcgatctccgtatgcggtcgccaaactgtatgcctactggatcaccgttaactaccgcgaatcctac

SEQ ID NO: 573731 - DNA, 75 bp, synthetic construct
  source 1..75: mol_type = other DNA
agttagagagcaatctggctgagctgcgtggcggcagcgattacgcgcaacgtaaaatcaagatagccgctgcgc

SEQ ID NO: 573732 - DNA, 75 bp, synthetic construct
  source 1..75: mol_type = other DNA
acatgcggtatcagataattaatgaacgggataacagtgtcagcaattcactgagtttaaacggaaatgcttacg

SEQ ID NO: 573733 - DNA, 75 bp, synthetic construct
  source 1..75: mol_type = other DNA
cgggttataccggcgtacaagccagcaataattatttctctggcgcaattggttttggttttaactttaatgagt

SEQ ID NO: 573734 - DNA, 75 bp, synthetic construct
  source 1..75: mol_type = other DNA
atctattaagtcgggaagcttgaagtacgatgtaacatttggcaaatatcgtccttattacaatgttagcagaaa

SEQ ID NO: 573735 - DNA, 75 bp, synthetic construct
  source 1..75: mol_type = other DNA
gcggttcccccggcacgagcgcgggagagctgacgcgcattaccggactgagtgctgagagatcccctcataatt

SEQ ID NO: 573736 - DNA, 75 bp, synthetic construct
  source 1..75: mol_type = other DNA
ttctgtcgacactcttcctgcaatcacccacaaccagatccgcgttattacaactgaacttctggcgcagttata

SEQ ID NO: 573737 - DNA, 75 bp, synthetic construct
  source 1..75: mol_type = other DNA
ctggtggaggtggtgctggcgcatcatatgactcaatcgccagggcatcagggaagggcgctaacggctatgtca

SEQ ID NO: 573738 - DNA, 75 bp, synthetic construct
  source 1..75: mol_type = other DNA
agttggagtcattacccgaaaaaacgcatcccggttatcgaagctctgttacgacatcccggtgctttcctgaag

SEQ ID NO: 573739 - DNA, 75 bp, synthetic construct
  source 1..75: mol_type = other DNA
ggagggaattactcacgcgattgcccttggcgggcgcgacctcagccgtgaagtgggcggcatcagtgcgctaac

SEQ ID NO: 573740 - DNA, 75 bp, synthetic construct
  source 1..75: mol_type = other DNA
gccgggtaattatggaagggcatcagggcgatgagtacgacgaggcgctctccactctggcggaactggaagata

SEQ ID NO: 573741 - DNA, 75 bp, synthetic construct
  source 1..75: mol_type = other DNA
cgcttatgtttggctttgttatgttggtgttactaattttcatgttcgccttttatttcattgggcgctcaatta

SEQ ID NO: 573742 - DNA, 75 bp, synthetic construct
  source 1..75: mol_type = other DNA
gtcgatcgtgacgatctggaaaaccctttatttgaattactctgcgtgcggatccgcgaatatgaaaataacgct

SEQ ID NO: 573743 - DNA, 75 bp, synthetic construct
  source 1..75: mol_type = other DNA
aggactaccagcgcacgcagtatgaagtgtatgactaccccggacgtttcaagagcgcccacgggcagaactttg

SEQ ID NO: 573744 - DNA, 75 bp, synthetic construct
  source 1..75: mol_type = other DNA
attggacctgaaagactaagtgttgaagctgagaacggattttatctagtcaccttactggaatatgatgaatct

SEQ ID NO: 573745 - DNA, 75 bp, synthetic construct
  source 1..75: mol_type = other DNA
ccgttattttcagggtgaatcacttccggagctgactctcaccaggcacgagcgctatgctcaacgcgaaaaaat

SEQ ID NO: 573746 - DNA, 75 bp, synthetic construct
  source 1..75: mol_type = other DNA
cagacggagctggcagataacggaattatcgtcggtcgtgacagactggcacgtcttcgtaaggagctgaggctg

SEQ ID NO: 573747 - DNA, 75 bp, synthetic construct
  source 1..75: mol_type = other DNA
actagccaaaagtctcaaaaatcctgaagatctcagtcagtttgattggatgctgaaaatgaaaccgtactcaat

SEQ ID NO: 573748 - DNA, 75 bp, synthetic construct
  source 1..75: mol_type = other DNA
caattcgctggcgaactggcagtcagacaaactgctgcagatggcggatctggtctacaccggacggtttgatct

SEQ ID NO: 573749 - DNA, 75 bp, synthetic construct
  source 1..75: mol_type = other DNA
tgataccatatattgaacgtgcgtttgtgccaactgtaagaggggttgctaatagtgtggcacgaattgatgtac

SEQ ID NO: 573750 - DNA, 75 bp, synthetic construct
  source 1..75: mol_type = other DNA
ggataggtgccgagctttttatgaactgaataataaaaatgctttaggattatattcagaaacattgaaatgtat

SEQ ID NO: 573751 - DNA, 75 bp, synthetic construct
  source 1..75: mol_type = other DNA
tctaccagtgaagggaatgttccggcgacaccgggattccagaaagggcatgggtggaaaacaatcccgtccata

SEQ ID NO: 573752 - DNA, 75 bp, synthetic construct
  source 1..75: mol_type = other DNA
cgcctgattcgcgaacgccgcgattactactggaactggtcagaagatgaaggctggcagtcacagtttgattaa

SEQ ID NO: 573753 - DNA, 75 bp, synthetic construct
  source 1..75: mol_type = other DNA
gtgattaaacccgatgggcaggtactcaggagcgtcgttagtcagccggagaatggcctctaccactttacctgg

SEQ ID NO: 573754 - DNA, 75 bp, synthetic construct
  source 1..75: mol_type = other DNA
tatagctaagaccttatcaaggtacatcggttggggtagtatagttgtattactattggctgcaacaccttcagt

SEQ ID NO: 573755 - DNA, 75 bp, synthetic construct
  source 1..75: mol_type = other DNA
tccttgttcttgtcattatgttttattttgtaataacaaatttaattgaagcgaatgattactacaaagaaatac

SEQ ID NO: 573756 - DNA, 75 bp, synthetic construct
  source 1..75: mol_type = other DNA
acgcaaattcagcctggtgtcgaaaagtttattaaagattttaacgatgctaaaaagaaaggtgaacatgccggt

SEQ ID NO: 573757 - DNA, 75 bp, synthetic construct
  source 1..75: mol_type = other DNA
cgcgatgtatgtcgatatcaccggcacgcggtcgacgtcaggccagcccttttctatcaccattccactgagtta

SEQ ID NO: 573758 - DNA, 75 bp, synthetic construct
  source 1..75: mol_type = other DNA
aaggcatttttgactcggtacagacggtcgacgaaacggaagagtggaaagtcagtgccggaacaccggtcggat

SEQ ID NO: 573759 - DNA, 75 bp, synthetic construct
  source 1..75: mol_type = other DNA
gagtggttcgtccatctggaggttctgagtacagacccgaatatgccaaagttcttatccaacccggcaggcgtt

SEQ ID NO: 573760 - DNA, 75 bp, synthetic construct
  source 1..75: mol_type = other DNA
caccggcgacgcatattttgagttcgtcgagatgtttatccgcgcggttaagcgccgttggccggacgtgctatt

SEQ ID NO: 573761 - DNA, 75 bp, synthetic construct
  source 1..75: mol_type = other DNA
ccagtgtcaatgacatccggcaggtgacgcaggccatcgcccttaacgttgccgtggctgcccagatggacggcg

SEQ ID NO: 573762 - DNA, 75 bp, synthetic construct
  source 1..75: mol_type = other DNA
tatatgtgatttttataaggtggcaggacgaatagaggatacactgattattaatcaatataaaattaaccactt

SEQ ID NO: 573763 - DNA, 75 bp, synthetic construct
  source 1..75: mol_type = other DNA
acgcaaattcagcctggtgtcgaaaagtttattaaagattttaacgatgctaaaaaaaaggtgaacatgcctacg

SEQ ID NO: 573764 - DNA, 75 bp, synthetic construct
  source 1..75: mol_type = other DNA
tgcaaacgcagcatcagcagctacaggccgattattccacgctgaaaactcagcttgcaaagcaaccggccacac

SEQ ID NO: 573765 - DNA, 75 bp, synthetic construct
  source 1..75: mol_type = other DNA
atttttgaaagtatgaactccaccggtaaggcgttaagtcaagccgacctggtgcgcaattttattctgatgggt

SEQ ID NO: 573766 - DNA, 75 bp, synthetic construct
  source 1..75: mol_type = other DNA
ttcagatgaccaagtcctctaggacaaaccagaggattatgtttgttctttttgctagacgttttgagaagaatg

SEQ ID NO: 573767 - DNA, 75 bp, synthetic construct
  source 1..75: mol_type = other DNA
gcgcgccctctgctcggcttcaccggtgaggatgtgcagatgattgaagagattatcctgtctcacctcgaccgt

SEQ ID NO: 573768 - DNA, 75 bp, synthetic construct
  source 1..75: mol_type = other DNA
acgccgtatgtaccgagaaaaaaccaaccagtacgaaataagaaaggccggataaagcgggaaatgtttatgaaa

SEQ ID NO: 573769 - DNA, 75 bp, synthetic construct
  source 1..75: mol_type = other DNA
atgaatgaatttaaaccttttgatgacaaactggcgggactgattgcggcaatatcaccggcgggtcggcgcaag

SEQ ID NO: 573770 - DNA, 75 bp, synthetic construct
  source 1..75: mol_type = other DNA
gatcctaaagattggcttgattgtaattcaaaaaaaccattaaaggatcactcgtatgcattaattaatgccctc

SEQ ID NO: 573771 - DNA, 75 bp, synthetic construct
  source 1..75: mol_type = other DNA
ttgcgggacagatgaacctgaccggtaaacccgatctaaatacaaccacctggtcgccatctatttatttaggta

SEQ ID NO: 573772 - DNA, 75 bp, synthetic construct
  source 1..75: mol_type = other DNA
catcagaaaaaacagccaccttatctttatccagtacatccgactatctttaccatgggaatatcagtaataata

SEQ ID NO: 573773 - DNA, 75 bp, synthetic construct
  source 1..75: mol_type = other DNA
gaatctgttacgcattatgtacattggtgcaccgttagcaaaagacagggaaagccttttctataccagtgtgcg

SEQ ID NO: 573774 - DNA, 75 bp, synthetic construct
  source 1..75: mol_type = other DNA
tactcagctgctcatccgcatgggcggcaggtaaaggcgggattggacttgcagcaacacgtcttgtttattcag

SEQ ID NO: 573775 - DNA, 75 bp, synthetic construct
  source 1..75: mol_type = other DNA
agagaatggaaatttaagggggtatatttttgagctttttgtttcctctcaaatttgtaatttctatggttatgg

SEQ ID NO: 573776 - DNA, 75 bp, synthetic construct
  source 1..75: mol_type = other DNA
acatagcccgctctatttgaatatcggtcttggacagtgcgaaaaatgggatgaagctgccattcacgcccgagc

SEQ ID NO: 573777 - DNA, 75 bp, synthetic construct
  source 1..75: mol_type = other DNA
ggtgcgccgttggcgaaagacagagaaactcttttcttcactagcgtacgggcagtcccttcaacaacgaagcgg

SEQ ID NO: 573778 - DNA, 75 bp, synthetic construct
  source 1..75: mol_type = other DNA
caaaaagcagcggtgtaacatatcgcacaatcaatgattacggggctgaaacaccgcagctcagctgtaagttgt

SEQ ID NO: 573779 - DNA, 75 bp, synthetic construct
  source 1..75: mol_type = other DNA
catcatgccgttgtcgaggccgatcctcgcggtggtggcgctgttctcgttcactgggccgctgggggatttcat

SEQ ID NO: 573780 - DNA, 75 bp, synthetic construct
  source 1..75: mol_type = other DNA
acaacaagccgtgcacgatatggcgcaagggtgcaggtggcaatgacgagtggggcgatcctgtcgacccatacg

SEQ ID NO: 573781 - DNA, 75 bp, synthetic construct
  source 1..75: mol_type = other DNA
ccgctaatgaaacaccgttaatagttatcaactttggtttcaatacggtaaaccagccaatcggctatcttaagc

SEQ ID NO: 573782 - DNA, 75 bp, synthetic construct
  source 1..75: mol_type = other DNA
aaggagcttgttcttcagcagatctacaatcttggttggaatctggcaggaacattccaggacggagctatcgtt

SEQ ID NO: 573783 - DNA, 75 bp, synthetic construct
  source 1..75: mol_type = other DNA
ggctggccgaaacatccctgttgttcggggaaatggatatgcaacccaattgcaccagcaacagcacgctgtttt

SEQ ID NO: 573784 - DNA, 75 bp, synthetic construct
  source 1..75: mol_type = other DNA
acaccgcgacggcgacaatctggcgcaatctcggtaacgatgaatacggtgactcgctcggcttctctgcccctg

SEQ ID NO: 573785 - DNA, 75 bp, synthetic construct
  source 1..75: mol_type = other DNA
cggttgtggccggtgccgacgaggtgcggcaggttatccgctacgccgacacgttcgagcgcctggcggatgatt

SEQ ID NO: 573786 - DNA, 75 bp, synthetic construct
  source 1..75: mol_type = other DNA
cgtaataggacaaatctaccatgttaccaatcttaacaatggaggatttgttattgaatcttctggtactgcgct

SEQ ID NO: 573787 - DNA, 75 bp, synthetic construct
  source 1..75: mol_type = other DNA
acgttgatcgtctgacctggaccgtttctgtatatcttcctgttcgcgcacatctgccacgaacaaatgcctgct

SEQ ID NO: 573788 - DNA, 75 bp, synthetic construct
  source 1..75: mol_type = other DNA
ctggactgtcagtgcaaaattacctgaatgcgaacatccggcgcgtacgccaagaacctttcggcaaaaggtctg

SEQ ID NO: 573789 - DNA, 75 bp, synthetic construct
  source 1..75: mol_type = other DNA
caattcaactcaagaatggccagacgtttaattttccaaatgttccaattcctgatttctcgccggcctcaaata

SEQ ID NO: 573790 - DNA, 75 bp, synthetic construct
  source 1..75: mol_type = other DNA
aagaatctggtactgcagcagatttataatctcggctggaatccggttggaacattccagggcggtgcaactctg

SEQ ID NO: 573791 - DNA, 75 bp, synthetic construct
  source 1..75: mol_type = other DNA
gtcctcagagtgtcactctctggtgagttaatagaccactctgttgtgaaatcagataagttgatgacttatctg

SEQ ID NO: 573792 - DNA, 75 bp, synthetic construct
  source 1..75: mol_type = other DNA
gtaccactgcgaccatcgcggcctgccgctggcgcttgtcagcacggaaggggcaacagaatggtgcgcagaata

SEQ ID NO: 573793 - DNA, 75 bp, synthetic construct
  source 1..75: mol_type = other DNA
agttgtctgatgtgtcgctggcctggcggcacggtttatccccgctggcgcggggaacacccgttcatattcgtt

SEQ ID NO: 573794 - DNA, 75 bp, synthetic construct
  source 1..75: mol_type = other DNA
acatcaacgttatcgattacaactgacagggagccggtttatccccgctggcgcggggaacactggcaaaacaaa

SEQ ID NO: 573795 - DNA, 75 bp, synthetic construct
  source 1..75: mol_type = other DNA
ccggtttatccccgctggcgcggggaacacgttatcaccgagtgcagtagcccgcgcgcgctcggtttatccccg

SEQ ID NO: 573796 - DNA, 75 bp, synthetic construct
  source 1..75: mol_type = other DNA
caacaggcatcgacatcaccaaaaaatgtctggaacattatttgcaacatttaaaggtttcatcctcggtgtttt

SEQ ID NO: 573797 - DNA, 75 bp, synthetic construct
  source 1..75: mol_type = other DNA
catttttaaagaaaaaggatttaagacggcaattatatccggaggtttagatattttcactgagagattaaaaga

SEQ ID NO: 573798 - DNA, 75 bp, synthetic construct
  source 1..75: mol_type = other DNA
gaggcgaccgccaattttgataccggaccactgacgcatactgtgagttatcgtcgctgcgggctgcgccttcaa

SEQ ID NO: 573799 - DNA, 75 bp, synthetic construct
  source 1..75: mol_type = other DNA
cgaaccggaaggctcagcgaaagctgacgctggtaaggaaggagtatccgaagctatttgttcactggtatttac

SEQ ID NO: 573800 - DNA, 75 bp, synthetic construct
  source 1..75: mol_type = other DNA
ctgctgatatggccggcggccatgctgctgggggtggccatcactgtgaccatggcgtcattcaaaaaatacctc

SEQ ID NO: 573801 - DNA, 75 bp, synthetic construct
  source 1..75: mol_type = other DNA
tgcaatgcagtcacgtctgctcaagtggatgcagtctaaatatagactttcgaaccggaaggctcagcgaaagct

SEQ ID NO: 573802 - DNA, 75 bp, synthetic construct
  source 1..75: mol_type = other DNA
caagattgacagtgagtaagcaacggaacgctatcacacagcaactaatcgataatcttattaaaggattactgc

SEQ ID NO: 573803 - DNA, 75 bp, synthetic construct
  source 1..75: mol_type = other DNA
tctttcttatgaaaaatataaaacagctaacaatgtgtatttcaatatcattggtacgttaagtgacagtgaatt

SEQ ID NO: 573804 - DNA, 75 bp, synthetic construct
  source 1..75: mol_type = other DNA
aacagcacaagaacctgaagatagaacgttaacattgaatcagcaaatagaagttttaggtctcaaatttgctgt

SEQ ID NO: 573805 - DNA, 75 bp, synthetic construct
  source 1..75: mol_type = other DNA
ggtttaaaatctgttttactaaatgaaattgactcccatgcttgtaagacgttacgaaaaaataggcctgaatgg

SEQ ID NO: 573806 - DNA, 75 bp, synthetic construct
  source 1..75: mol_type = other DNA
tatttcaaaagatgaaatcgttgtcaatattcatttggattttctacagaaaaaagcgttcaggaaatgtagttt

SEQ ID NO: 573807 - DNA, 75 bp, synthetic construct
  source 1..75: mol_type = other DNA
ctggagttaagccatgaattggattatacacgctggctttttggcgagctagatgttctccatgctacagtccga

SEQ ID NO: 573808 - DNA, 75 bp, synthetic construct
  source 1..75: mol_type = other DNA
agattaattggaagaaaaccattcatagttttcaaccttatccttctgataactcgctgttttatcttgagtatg

SEQ ID NO: 573809 - DNA, 75 bp, synthetic construct
  source 1..75: mol_type = other DNA
gatgccttattacaacgaggtagcgaataacccgctgtttatctgggatccgcgcagcggcgtaaaaggcgaacg

SEQ ID NO: 573810 - DNA, 75 bp, synthetic construct
  source 1..75: mol_type = other DNA
gcagaccggtggcggtgtttctggtctgtggcgccatgactgggcaaaccgggaatatattcagcaggaagcgga

SEQ ID NO: 573811 - DNA, 75 bp, synthetic construct
  source 1..75: mol_type = other DNA
catcaacgataacaccaccattcgcaatactacccgttggtcgcgcgtaaagcaggattacctgatgacggcgat

SEQ ID NO: 573812 - DNA, 75 bp, synthetic construct
  source 1..75: mol_type = other DNA
gccccatctgcgggagcggcggccctgaatcattccggaaaagttgatactcataacttttacggcacggattcc

SEQ ID NO: 573813 - DNA, 75 bp, synthetic construct
  source 1..75: mol_type = other DNA
ctggttccgccgcggcacgctggacgtcaatcaggtcattggtgatactaccgcggtgcgcctgaatgtgatggg

SEQ ID NO: 573814 - DNA, 75 bp, synthetic construct
  source 1..75: mol_type = other DNA
gttaaaacaggtcagcatcatgaccagcgaatgggaaaaagacctgctgctgggattaatcagtgacgaagacag

SEQ ID NO: 573815 - DNA, 75 bp, synthetic construct
  source 1..75: mol_type = other DNA
cctgaccggctggagagggacagggggtggactgcatcacaactgaatgaagtacagattgtggttgatgagatc

SEQ ID NO: 573816 - DNA, 75 bp, synthetic construct
  source 1..75: mol_type = other DNA
cttagcaataaaacagttagtgcgcataaatctaatatttatggcaagctaggtttgcattcaattgtagagctt

SEQ ID NO: 573817 - DNA, 75 bp, synthetic construct
  source 1..75: mol_type = other DNA
gctggaattatttatgacataagcaaaggtttgggatggctcacttactctgaaccagagtattacgaaagtatt

SEQ ID NO: 573818 - DNA, 75 bp, synthetic construct
  source 1..75: mol_type = other DNA
tgttagctaaacttcccaatggtttaattatccaggtctttcggcgtaggcttgccaactcaacatcaattggta

SEQ ID NO: 573819 - DNA, 75 bp, synthetic construct
  source 1..75: mol_type = other DNA
caatgctcatgtttacggggtttattgactatgtacaggcagtaactgatccaaatcagaagcaaaacgaaatga

SEQ ID NO: 573820 - DNA, 75 bp, synthetic construct
  source 1..75: mol_type = other DNA
gcatcagcatgacctttgccgactggcgctttaacctgcgctcctccaacaccgaaccggtggtgcggttgaatg

SEQ ID NO: 573821 - DNA, 75 bp, synthetic construct
  source 1..75: mol_type = other DNA
tttaaattcaattgagaaatttaatgaagaaatatctccgatatttagtaagaaagagacgaacactcagcaaat

SEQ ID NO: 573822 - DNA, 75 bp, synthetic construct
  source 1..75: mol_type = other DNA
agagactgaaagagaggtgctttttcacaatatgataggggagcgattgtgtggatggggcagaaaagtaccata

SEQ ID NO: 573823 - DNA, 75 bp, synthetic construct
  source 1..75: mol_type = other DNA
caattttaaaattagcaatgtaaacgcctcggttcgtgctcttgcccttggtggtttcttgaaagatgcacagat

SEQ ID NO: 573824 - DNA, 75 bp, synthetic construct
  source 1..75: mol_type = other DNA
ctattgtcaagcaacagcagatccaaaccagaaagttacagaactaacgattaacgttaacagtatctaccagaa

SEQ ID NO: 573825 - DNA, 75 bp, synthetic construct
  source 1..75: mol_type = other DNA
aaaacggagagttctgggcacaagctactgccttgcgttttgtgcttggatgttatgagtccacccgtaatgaga

SEQ ID NO: 573826 - DNA, 75 bp, synthetic construct
  source 1..75: mol_type = other DNA
aaatattttgactcaggatacataccctgtagtagagctgatgaatctatccagttctcttatgctgatatggaa

SEQ ID NO: 573827 - DNA, 75 bp, synthetic construct
  source 1..75: mol_type = other DNA
ttctctgttttgtaaaaagagcggtaccagccggaagcaagggtacaaactggtaccgccaaagcagtggctgtt

SEQ ID NO: 573828 - DNA, 75 bp, synthetic construct
  source 1..75: mol_type = other DNA
ctggggagaaaacgcctcaacaaaatgcatcttcaattattcactttcgacaccagaaagtgagagcggattaat

SEQ ID NO: 573829 - DNA, 75 bp, synthetic construct
  source 1..75: mol_type = other DNA
cggttttccggatagcgactatttttgtcgcgttttccggcgtcagtttggtctgacgccgggagagtacagcgc

SEQ ID NO: 573830 - DNA, 75 bp, synthetic construct
  source 1..75: mol_type = other DNA
aaccttccttgttcatagtctgggacccgatgagcttccatatggttacccggttcggcctgaggacgagtacct

SEQ ID NO: 573831 - DNA, 75 bp, synthetic construct
  source 1..75: mol_type = other DNA
ggcttgcgcagtgcgggctgacggcggaacagatggccgcgcagctggaggcggaatatatcccggagaggaaac

SEQ ID NO: 573832 - DNA, 75 bp, synthetic construct
  source 1..75: mol_type = other DNA
cccgctacaggggaggtatatcacccaggatccaatagatataaaaggaggatggaatttatattcttatgcgct

SEQ ID NO: 573833 - DNA, 75 bp, synthetic construct
  source 1..75: mol_type = other DNA
agagtaccgaatcagccgggaaaattcagacgttacagcactggtggcggcgtgtacgaagatgaaagacgcaga

SEQ ID NO: 573834 - DNA, 75 bp, synthetic construct
  source 1..75: mol_type = other DNA
gcggtgctgctgggcggcatggtcggcgcgggtattgtgctggggcgtaacgcgctgcgtaattacaacgcgaag

SEQ ID NO: 573835 - DNA, 75 bp, synthetic construct
  source 1..75: mol_type = other DNA
gtagcgaaggagaaatggacgtcaacagcaattatcactcagcctgacgtggggcaaattgctggctataacaat

SEQ ID NO: 573836 - DNA, 75 bp, synthetic construct
  source 1..75: mol_type = other DNA
tcgattttttaaaacgttcgcagcagtttgttattcccatttatcaacgcacctattcatggaccgggcaacaat

SEQ ID NO: 573837 - DNA, 75 bp, synthetic construct
  source 1..75: mol_type = other DNA
tgattcgtcttggcattgatgaacaaaccgcgtttgcgcgtaaacctgaccaccaactggcagcgttacaggaaa

SEQ ID NO: 573838 - DNA, 75 bp, synthetic construct
  source 1..75: mol_type = other DNA
actctatgaccaggccggaattatgatgctctctgacgaacagcactggctcaaagctggcatcgaatttaacga

SEQ ID NO: 573839 - DNA, 75 bp, synthetic construct
  source 1..75: mol_type = other DNA
tcaggatccgcgcaaacttcaccacactctatgaccaggccggaattatgatgctctctgacgaacagcactggc

SEQ ID NO: 573840 - DNA, 75 bp, synthetic construct
  source 1..75: mol_type = other DNA
gcattccgtgcggcgcttgatgctgagttccgaatcagtcgggaacattcagaggctacggcgctggttgcagca

SEQ ID NO: 573841 - DNA, 75 bp, synthetic construct
  source 1..75: mol_type = other DNA
gccggaaacctggacgatatgcagatgctgaccattgccaccaaactggcgatcgcaggtgtccgggaagcgcgg

SEQ ID NO: 573842 - DNA, 75 bp, synthetic construct
  source 1..75: mol_type = other DNA
atgcgcagttgtacgttactggcaaaaatgtacgctcttggcgtattaagttcttattcccgtccccgggtcagc

SEQ ID NO: 573843 - DNA, 75 bp, synthetic construct
  source 1..75: mol_type = other DNA
tcaccaaactactatcagacacgtcaaaacctgttggatattgaaaacttaaaggttgatgatcttgatattcat

SEQ ID NO: 573844 - DNA, 75 bp, synthetic construct
  source 1..75: mol_type = other DNA
aaattgacatctcctcaaggatactgataggcagagaatatattacaagccaaggagataaagccgaggctgata

SEQ ID NO: 573845 - DNA, 75 bp, synthetic construct
  source 1..75: mol_type = other DNA
agcctgaacagattaagtggctccctgattttctcgcccactggcggaaactctcaggcccttccctggtggatg

SEQ ID NO: 573846 - DNA, 75 bp, synthetic construct
  source 1..75: mol_type = other DNA
aaatttgatacttacaatggattcggggccgaccgtgagcatgtgcggatgaccggtcgcgctatccagtcagcg

SEQ ID NO: 573847 - DNA, 75 bp, synthetic construct
  source 1..75: mol_type = other DNA
cgcatgatgcggtgtttaaaacctttatgttcacacccgaaaccgcaggggattttctcgaaatacatttaccag

SEQ ID NO: 573848 - DNA, 75 bp, synthetic construct
  source 1..75: mol_type = other DNA
ttgggtaactggtaacttaagcgaaaattcaaatcataggataaatgattttataagtaaaaaccccaaaacaaa

SEQ ID NO: 573849 - DNA, 75 bp, synthetic construct
  source 1..75: mol_type = other DNA
agattccattagaacaagaggaggaatgatcaggaaagacgagtttggaataatctgtggttctccagtaaggca

SEQ ID NO: 573850 - DNA, 75 bp, synthetic construct
  source 1..75: mol_type = other DNA
agagcttgtaattaatgacccaggaaattatggagttgatgttacatctgaaaaaggtcgtattgaactaaatgt

SEQ ID NO: 573851 - DNA, 75 bp, synthetic construct
  source 1..75: mol_type = other DNA
acaaatccactttatgacttggcagctggagttccatatataaatcgaactaataataaagatttaaattctccc

SEQ ID NO: 573852 - DNA, 75 bp, synthetic construct
  source 1..75: mol_type = other DNA
tacgaaggacagtaatggaaaatatcaggctgattttagtagcctcgctggaaatagaaatagtggtgggcaatt

SEQ ID NO: 573853 - DNA, 75 bp, synthetic construct
  source 1..75: mol_type = other DNA
gaggttgagcgccttcgggatatcggtatgtctcgcgcatcggcggttgagttcatcgccaaagagtcacgcaag

SEQ ID NO: 573854 - DNA, 75 bp, synthetic construct
  source 1..75: mol_type = other DNA
gcatgatgctggaccatgaaaaacgccttaatgccgatctgcccgttggtggctatgagtcaactgacctacagg

SEQ ID NO: 573855 - DNA, 75 bp, synthetic construct
  source 1..75: mol_type = other DNA
tacgagcaaggaacgcagatggcgctgttagaaatggcggataagataaacaaccacgaagtagccatcatcgac

SEQ ID NO: 573856 - DNA, 75 bp, synthetic construct
  source 1..75: mol_type = other DNA
ccagtatccagggatggatacaaagacagcaagtgattacctgccacagacaaattggccaacaactcaattacc

SEQ ID NO: 573857 - DNA, 75 bp, synthetic construct
  source 1..75: mol_type = other DNA
gccgagggccgcagcggcgttgcgcttcccgacgcccttgagcggaagtatccgcgcgccgggcattcctggccg

SEQ ID NO: 573858 - DNA, 75 bp, synthetic construct
  source 1..75: mol_type = other DNA
attagcgcagcaataataactcacctccgagaaaatatagatggtgttattcatccaagtcaagcgtatagttat

SEQ ID NO: 573859 - DNA, 75 bp, synthetic construct
  source 1..75: mol_type = other DNA
tctattacttacgaccgttatgctaaagaggttgaggttgataggctggtcaatgtgattactgatatttataag

SEQ ID NO: 573860 - DNA, 75 bp, synthetic construct
  source 1..75: mol_type = other DNA
caccaggtgatggctggaaatatcgtggtagaggattaattcaaatcactggcctccataattatcgcatctgtg

SEQ ID NO: 573861 - DNA, 75 bp, synthetic construct
  source 1..75: mol_type = other DNA
atgaaccaacaattatttcaaaaggcggctggtattagcgccgggctggctgcacgctggtttccgcacattgat

SEQ ID NO: 573862 - DNA, 75 bp, synthetic construct
  source 1..75: mol_type = other DNA
tgatgatgattccaatcttgagtcgttatgctgggaatgccacagagtgaagacagcaagagaacatattcgatg

SEQ ID NO: 573863 - DNA, 75 bp, synthetic construct
  source 1..75: mol_type = other DNA
cgatgatgattcgaacctcgaaagcctgtgctggccctgccaccgctcgaaaacaggtcgcgagcgctttaaatg

SEQ ID NO: 573864 - DNA, 75 bp, synthetic construct
  source 1..75: mol_type = other DNA
agacgcagacagcaacctgcagagtctgtgctggccctgccacaaagcgaaaacagcgcgtgaacgaataaagtg

SEQ ID NO: 573865 - DNA, 75 bp, synthetic construct
  source 1..75: mol_type = other DNA
tggaacggaataaattaacaattaaaattgataatttactccatacaagatttcgtacctttaatgatgagtata

SEQ ID NO: 573866 - DNA, 75 bp, synthetic construct
  source 1..75: mol_type = other DNA
gccgcaagcgtggatgtcctggcaccaccactgaccgctcaggctactgcgagaagcaccgaaacgaaggctggc

SEQ ID NO: 573867 - DNA, 75 bp, synthetic construct
  source 1..75: mol_type = other DNA
ttattccgaaagctcatggtggcacggatgcagacagtaatctgcagagtctgtgctggccctgccataaagcaa

SEQ ID NO: 573868 - DNA, 75 bp, synthetic construct
  source 1..75: mol_type = other DNA
gaacagcaacggggaattttgatttgattatagcagcattaagctctgtgccacttaatggctgggggaaatata

SEQ ID NO: 573869 - DNA, 75 bp, synthetic construct
  source 1..75: mol_type = other DNA
ccggcagccagccggttacgatttccggcgacaactccggcacgctgacgctgaccggtcgcgccagcgacattg

SEQ ID NO: 573870 - DNA, 75 bp, synthetic construct
  source 1..75: mol_type = other DNA
gccgccttcggcacgccggtgaccgtcaccatcaccgcgccgtccggcaccctcggcatcggcggcgcggacgtg

SEQ ID NO: 573871 - DNA, 75 bp, synthetic construct
  source 1..75: mol_type = other DNA
gctgtgccgctcccagggccgacgccccggttcacgtaccatcaaatctgtgtttgaagcgtgcgatgaggacac

SEQ ID NO: 573872 - DNA, 75 bp, synthetic construct
  source 1..75: mol_type = other DNA
cgacggcaacgacggcggcaccactaccgcgacgctcgccatcaccgtcaccccggtagcggacgtgaaagatga

SEQ ID NO: 573873 - DNA, 75 bp, synthetic construct
  source 1..75: mol_type = other DNA
acggcggcaccgctaccgcgacgctcgccatcaccgtcaccccggtagcggacgtgaaagatgacagcgccacca

SEQ ID NO: 573874 - DNA, 75 bp, synthetic construct
  source 1..75: mol_type = other DNA
gtggctgactggaacggcaacgtaccggtggtgacctacacggcaacggacggccgggataacggcagcgtcaca

SEQ ID NO: 573875 - DNA, 75 bp, synthetic construct
  source 1..75: mol_type = other DNA
tggcgctggcaggcggttataccgggcatctgggggattattcgaccggcgcggcacaggcgatcatgccgtatg

SEQ ID NO: 573876 - DNA, 75 bp, synthetic construct
  source 1..75: mol_type = other DNA
cttatcggtcagtttcacctgttttacgtaaaaacccgcttcggcgggtttttacttttggaggggcagaaagat

SEQ ID NO: 573877 - DNA, 75 bp, synthetic construct
  source 1..75: mol_type = other DNA
ctggcggcgatgcgcctgctgatctcgctggtcacggatacgcgggaaagtgtgcttcagccgatggattttatc

SEQ ID NO: 573878 - DNA, 75 bp, synthetic construct
  source 1..75: mol_type = other DNA
ggtttgtggtttacccactcacgtaaaatgatcgaactggtttatgcgacttttgaggtcgctcattatcttggc

SEQ ID NO: 573879 - DNA, 75 bp, synthetic construct
  source 1..75: mol_type = other DNA
atggtcgtaacatcaaaccctaacgtggggataaaaatttacgacaaaaataataacgaaatcaaagtgaacggt

SEQ ID NO: 573880 - DNA, 75 bp, synthetic construct
  source 1..75: mol_type = other DNA
ttcgcccaggggatcaccataataaaatgctgaggcctggcctttgcgtagtgcacgcatcacctcaataccttt

SEQ ID NO: 573881 - DNA, 75 bp, synthetic construct
  source 1..75: mol_type = other DNA
tctgggttttgaagctgccggacggcttgatgatgcccagcgtcatgacatcatgcaaaaacggtctgaaccgga

SEQ ID NO: 573882 - DNA, 75 bp, synthetic construct
  source 1..75: mol_type = other DNA
ggctgtcagccagaatgcctatataaacatctcagaccaggcaacaattaatggttcggttaataacaatggaaa

SEQ ID NO: 573883 - DNA, 75 bp, synthetic construct
  source 1..75: mol_type = other DNA
tgaatcctacaaaagaaagtagggggaaccgcagaattcggaaaaaatcgtacgctaagctaacggtgttctcgt

SEQ ID NO: 573884 - DNA, 75 bp, synthetic construct
  source 1..75: mol_type = other DNA
aaataaaccataatgatcttatttttaatgttgacactaatattttaggggagattgttattgatagttttgaac

SEQ ID NO: 573885 - DNA, 75 bp, synthetic construct
  source 1..75: mol_type = other DNA
ctctgattgccttcctgacagaagaatgctgctcagggactgacgactgcctcaccatgtcccagaagacggaga

SEQ ID NO: 573886 - DNA, 75 bp, synthetic construct
  source 1..75: mol_type = other DNA
gtgatatagagctgttattccatatatatagtggaagactcatacagaattatcagcgtgggttaggtttgttta

SEQ ID NO: 573887 - DNA, 75 bp, synthetic construct
  source 1..75: mol_type = other DNA
ccagtccggtacattccctgaaatgtcgacccggcctccgaaacctggccttctggatccctggcgtgagtggct

SEQ ID NO: 573888 - DNA, 75 bp, synthetic construct
  source 1..75: mol_type = other DNA
atttattttcaactatcgaatcatataatgattttatcacctctctattatttgatggaaatttagttttcactg

SEQ ID NO: 573889 - DNA, 75 bp, synthetic construct
  source 1..75: mol_type = other DNA
attataccttaaatatggccctcctttttgttcatcttcagttgttatagcaaaaaataaattgtccgatctgca

SEQ ID NO: 573890 - DNA, 75 bp, synthetic construct
  source 1..75: mol_type = other DNA
accgggacaccgggtagtgttatttctcttggtggtgtgcttgaaggagataattctcttacggatcgtctggtg

SEQ ID NO: 573891 - DNA, 75 bp, synthetic construct
  source 1..75: mol_type = other DNA
tttggcgtaagcaatgttaacggcccaatttcgctggttatctggaccaccacgccgtggacgctgcctgctaac

SEQ ID NO: 573892 - DNA, 75 bp, synthetic construct
  source 1..75: mol_type = other DNA
cttatctgccgggcacttacccgacgctggatggcgtgaacgtcttcaaagcgaacgacatcgtcgttgcgctgc

SEQ ID NO: 573893 - DNA, 75 bp, synthetic construct
  source 1..75: mol_type = other DNA
attcatagagatcataacgataaaataaattaccctcgattaaatgaggtcaaaaccgatttagaaagcttagtt

SEQ ID NO: 573894 - DNA, 75 bp, synthetic construct
  source 1..75: mol_type = other DNA
tatttaaatttaaagaaggcaaactttcgaatgtagatattaatcatcttagaggcttgatcggttttgcttata

SEQ ID NO: 573895 - DNA, 75 bp, synthetic construct
  source 1..75: mol_type = other DNA
tgcggctggcggacctgggaccgttaattggcgttgactccgggaaaggggcagaaaagtcgaaacggtctgaac

SEQ ID NO: 573896 - DNA, 75 bp, synthetic construct
  source 1..75: mol_type = other DNA
gaaggtgatgtcgagtcgcggcaattgcggctggcggacctgggaccgttaattggcgttgactccgggaaaggg

SEQ ID NO: 573897 - DNA, 75 bp, synthetic construct
  source 1..75: mol_type = other DNA
tggcgatctgactcaggtgaatattgagagtctgcttaaactctcgccacaggttgtgtttgtcgccaactatgc

SEQ ID NO: 573898 - DNA, 75 bp, synthetic construct
  source 1..75: mol_type = other DNA
ggtacatggcctacctcaccagccgcccgctgcgcctgcccggcgtgccgctgctggcctccggcggacgcggct

SEQ ID NO: 573899 - DNA, 75 bp, synthetic construct
  source 1..75: mol_type = other DNA
ctgtttaccggcacgccgctctgctacaccgaaggcgcgcacctgtatcgccacgcgggatggtactacctgatg

SEQ ID NO: 573900 - DNA, 75 bp, synthetic construct
  source 1..75: mol_type = other DNA
gttattgcgggtttcttcatcgggaatgttgctgctctgctgggtgttgcagggggagagctcctgataccaacc

SEQ ID NO: 573901 - DNA, 75 bp, synthetic construct
  source 1..75: mol_type = other DNA
ttagtgagttcctgacaactcagaaaaaacatggctgtcaaaaactctttagtacccgtgaaatagcagatgctg

SEQ ID NO: 573902 - DNA, 75 bp, synthetic construct
  source 1..75: mol_type = other DNA
aaacaagaagtggttcatatggctgatgattttattcattatcaatccaaatttattaagttacagcatgcgctt

SEQ ID NO: 573903 - DNA, 75 bp, synthetic construct
  source 1..75: mol_type = other DNA
tcaattaacacccgcctctcatatgaagatagggaataaaaatatatttgtcaaagagtataatggaaaaggaat

SEQ ID NO: 573904 - DNA, 75 bp, synthetic construct
  source 1..75: mol_type = other DNA
gtgaatcaatatgttctttgttgggggataatttcctcaaaaatggtgtgattggaggttgggctgcagaagcta

SEQ ID NO: 573905 - DNA, 75 bp, synthetic construct
  source 1..75: mol_type = other DNA
gaagaagcggtaattgaactgacctataactggggcgtggataaatacgaacttggcaccgcttatggtcacatc

SEQ ID NO: 573906 - DNA, 75 bp, synthetic construct
  source 1..75: mol_type = other DNA
ctatattctggttaacttctataccggagtcggaagttgccggaccctgcagatgaaggcgcattacagaaatgg

SEQ ID NO: 573907 - DNA, 75 bp, synthetic construct
  source 1..75: mol_type = other DNA
atcatttattagtgaaaaatatggaatgagattttattgggaaactacagaaaatgagaatacaggtgttatagc

SEQ ID NO: 573908 - DNA, 75 bp, synthetic construct
  source 1..75: mol_type = other DNA
taattccgatatttcacgggtaggtataatattttatgttctagctgttattgtcgtatatgctattatattaat

SEQ ID NO: 573909 - DNA, 75 bp, synthetic construct
  source 1..75: mol_type = other DNA
gaaaaatccatccgagccggctttacaaggccggggcaatcgcaatgctattcagatgtttttggagcaaaatgg

SEQ ID NO: 573910 - DNA, 75 bp, synthetic construct
  source 1..75: mol_type = other DNA
gtggtcacaaaatgggtcagtacataaggtagtgtctgcggccagtgtgaatacaagtgctgcaggagcgcacac

SEQ ID NO: 573911 - DNA, 75 bp, synthetic construct
  source 1..75: mol_type = other DNA
tgacaaatctgcttacccgaaacttgcagccgcttatccgtcaggcgtgatccctgatatgcgtggctggacgat

SEQ ID NO: 573912 - DNA, 75 bp, synthetic construct
  source 1..75: mol_type = other DNA
tgatgaaacaggaacgcattttttgaatggactgctatgcgcagcctctgtagaggctaagcctcgactaacggt

SEQ ID NO: 573913 - DNA, 75 bp, synthetic construct
  source 1..75: mol_type = other DNA
caacttatttattactctattcgcatgatcgatttggtcagaaagttgagcataaaattgaatttgacggacatt

SEQ ID NO: 573914 - DNA, 75 bp, synthetic construct
  source 1..75: mol_type = other DNA
acgtttatagaacggttaaaagagtaaatgagacaatccagaccccaaatataaattgctatactacatgtattt

SEQ ID NO: 573915 - DNA, 75 bp, synthetic construct
  source 1..75: mol_type = other DNA
tcacctgattattctaaatacagtgttaacacttcttctgcaggcgctcatacgcactctgtatcgggtactgct

SEQ ID NO: 573916 - DNA, 75 bp, synthetic construct
  source 1..75: mol_type = other DNA
gcgctattgttcctcggcattttgctgcacggcgtaagttacgatttttactacgttaccgcctacatctatgtc

SEQ ID NO: 573917 - DNA, 75 bp, synthetic construct
  source 1..75: mol_type = other DNA
cgatatgagcgcggtgctctcaactcactcgctgttcggcacgctgatggaaggtatttttggttatcaggaagc

SEQ ID NO: 573918 - DNA, 75 bp, synthetic construct
  source 1..75: mol_type = other DNA
gaaaaaccagtctcccggggggaatctcgttaccaaaactatttatcagaccttcaatatggggaatgtcacatt

SEQ ID NO: 573919 - DNA, 75 bp, synthetic construct
  source 1..75: mol_type = other DNA
ggggaaacacatctcgattttttaaaacaatacggtgattttgaaaatggtattcctgttcacgataccatcgcc

SEQ ID NO: 573920 - DNA, 75 bp, synthetic construct
  source 1..75: mol_type = other DNA
ggcgaggggctcaatctcgccagaaaatacgttatgtgtcagtttttatattggaaatatagaaatatatactca

SEQ ID NO: 573921 - DNA, 75 bp, synthetic construct
  source 1..75: mol_type = other DNA
gcgtgataagtttacccactggctgataaattttaataaactcaaagaacatgcaatagatccggaaaatatggc

SEQ ID NO: 573922 - DNA, 75 bp, synthetic construct
  source 1..75: mol_type = other DNA
gcatgtttatgctgagattaattttcaaccaatcaaccaatcaaccaatcaaccaatcaaccaatcaaccaatgt

SEQ ID NO: 573923 - DNA, 75 bp, synthetic construct
  source 1..75: mol_type = other DNA
ttaatgaacatagctcttctgaacatgcaagagatatattaattatcaatggctgtgagatacctgtatttttaa

SEQ ID NO: 573924 - DNA, 75 bp, synthetic construct
  source 1..75: mol_type = other DNA
ggggcgggatcatcagtaacggacgacttttgacaggcccgggaggtcttgcaggtcacctggggcatttgattg

SEQ ID NO: 573925 - DNA, 75 bp, synthetic construct
  source 1..75: mol_type = other DNA
cagttcagggagataccgtcagcctcggtgaatataaccccaaagacatcattgatggcgttgacggcatccctt

SEQ ID NO: 573926 - DNA, 75 bp, synthetic construct
  source 1..75: mol_type = other DNA
cagggggatggcaacgcaacggcaacgttcagcacaggggcgaatcagatagtgatcccaacctcagcggggcta

SEQ ID NO: 573927 - DNA, 75 bp, synthetic construct
  source 1..75: mol_type = other DNA
ttaagcggtggtgtctaacactgctggttctgttgcccttctattcaggctgcctgcactctgccgacacaataa

SEQ ID NO: 573928 - DNA, 75 bp, synthetic construct
  source 1..75: mol_type = other DNA
agtaatgcttactttaacggggttgtcatttgtggtattgactgtctcgaggttgacctgagcaatgctgaaacg

SEQ ID NO: 573929 - DNA, 75 bp, synthetic construct
  source 1..75: mol_type = other DNA
gggtcgtgcgtatgatgatgaaaactgttgtcgtcacattgtacatgttatctgtaaggaccgactcattgacga

SEQ ID NO: 573930 - DNA, 75 bp, synthetic construct
  source 1..75: mol_type = other DNA
tgagaatgaattgtgtagagcgggggtgggatatcaggaatgtttgaaaaaaaataaagatggtagtcttgcaga

SEQ ID NO: 573931 - DNA, 75 bp, synthetic construct
  source 1..75: mol_type = other DNA
ctggcggtaatctgagtgcagccctggcaggtggtgcagcaccgtatattgctgaaattatcaaacagactaccc

SEQ ID NO: 573932 - DNA, 75 bp, synthetic construct
  source 1..75: mol_type = other DNA
gaagatcgccgcaggcagctggacgatcgccagcgccagcttgatcaggagcgtcggcaactggaagatgaagag

SEQ ID NO: 573933 - DNA, 75 bp, synthetic construct
  source 1..75: mol_type = other DNA
cttctcgaagtattaccacttcattccgatgccggatctgcgcgcgtttgccaatgcgggcttcccgttcagccg

SEQ ID NO: 573934 - DNA, 75 bp, synthetic construct
  source 1..75: mol_type = other DNA
gaaaagcatatcattgttatatctcatgatgaacaacttataaataatatacctaaagcacagattatagatatc

SEQ ID NO: 573935 - DNA, 75 bp, synthetic construct
  source 1..75: mol_type = other DNA
catccacaaaatccttttatcaaattgctggtacttttgggccgcgatgacaaagatttattacaggcggcaaaa

SEQ ID NO: 573936 - DNA, 75 bp, synthetic construct
  source 1..75: mol_type = other DNA
gcatgtggcgaagctgcattgcccacaattacacccactgatttacgccacaatgttgggcactctttggcgatg

SEQ ID NO: 573937 - DNA, 75 bp, synthetic construct
  source 1..75: mol_type = other DNA
atgaaacgctttccgctatttcttttattcaccctgctcaccctgctcacgctgtccaccgttccggcccaggct

SEQ ID NO: 573938 - DNA, 75 bp, synthetic construct
  source 1..75: mol_type = other DNA
cgtcgggcaacgtctttagcaacgacgctatcggcgcagacggcgccgcggcgggcggcccggtgagcgcgattt

SEQ ID NO: 573939 - DNA, 75 bp, synthetic construct
  source 1..75: mol_type = other DNA
tcggttctccgtcaacggccagcagacccgcgcgccgggcctgctgcgcgtcaatattctcaacgacgcgccggt

SEQ ID NO: 573940 - DNA, 75 bp, synthetic construct
  source 1..75: mol_type = other DNA
gcggctcccgggcgtcggcgagctgaccattgagcgcaacggcggctaccgctttacgccggtggccgactggaa

SEQ ID NO: 573941 - DNA, 75 bp, synthetic construct
  source 1..75: mol_type = other DNA
tgccttaaccgctacggcgtgtttgcccgctcccatgccacgcctacgcagtcggcatggacctataaaattcgc

SEQ ID NO: 573942 - DNA, 75 bp, synthetic construct
  source 1..75: mol_type = other DNA
tcaacaataaaaagcggtaaaagaacaattccgcccctcttcagcagcctcacagatcacttccccgttattgct

SEQ ID NO: 573943 - DNA, 75 bp, synthetic construct
  source 1..75: mol_type = other DNA
ttaaaaatgccagggtgaatgccgaatgtggtgagcacatgtcgcctgaagaggttacgactttgcttaacgtgg

SEQ ID NO: 573944 - DNA, 75 bp, synthetic construct
  source 1..75: mol_type = other DNA
aaattgttggtactttttggtcgcgatgacaacgatttattacaggcggcaaaaggccttgcgcagggaaatata

SEQ ID NO: 573945 - DNA, 75 bp, synthetic construct
  source 1..75: mol_type = other DNA
atattaattccacgccggaaacagccaatgtgccgtttttgctgtcgccgccagtgataaaggttaacgaacata

SEQ ID NO: 573946 - DNA, 75 bp, synthetic construct
  source 1..75: mol_type = other DNA
tgcagcgtggaaatcatcatggctgggcgctggtgatgatggtcttttttgccgttgcaagggaagggctggagt

SEQ ID NO: 573947 - DNA, 75 bp, synthetic construct
  source 1..75: mol_type = other DNA
ttataaaggagaaaagaaacttatcgcattcagagccggctctggtgtggtatccgttaaaaaaaaatggacgca

SEQ ID NO: 573948 - DNA, 75 bp, synthetic construct
  source 1..75: mol_type = other DNA
caatcatgacctggtgattggtgtgtttgacaagctggaagagcgggtgattggtgccaggggaattattgtgga

SEQ ID NO: 573949 - DNA, 75 bp, synthetic construct
  source 1..75: mol_type = other DNA
gagctttcccccgttacgctgtgcgattactacggtttcttccatctgttttgtttaccatgctgctggttgtta

SEQ ID NO: 573950 - DNA, 75 bp, synthetic construct
  source 1..75: mol_type = other DNA
acctttcagcaactgacctggccggaggatctcaataaagatctccaacaggttgaaaagctgataagcggtgaa

SEQ ID NO: 573951 - DNA, 75 bp, synthetic construct
  source 1..75: mol_type = other DNA
gggttactcaacaatgcgttggttgatagtgtaaagcgcggcaatatctttggctcagtcgcggttattcgtgaa

SEQ ID NO: 573952 - DNA, 75 bp, synthetic construct
  source 1..75: mol_type = other DNA
ttcgcggcgatagtgtggttgtaaatgacgtgaaaccactgctgccacgcaaaccttatgatgcgccaaactggg

SEQ ID NO: 573953 - DNA, 75 bp, synthetic construct
  source 1..75: mol_type = other DNA
tacttattacgttgggcatctcccctggattgaacgagtgcaatatgtgttagccagacatcccattctactggc

SEQ ID NO: 573954 - DNA, 75 bp, synthetic construct
  source 1..75: mol_type = other DNA
ctttagagctggatgacaaagaagcgctggcgctggcgcagtttgttaagcggttgacgtggagtgatttacggg

SEQ ID NO: 573955 - DNA, 75 bp, synthetic construct
  source 1..75: mol_type = other DNA
acagtcatattacaggagggctaatcgctgtttctgaattatccggcagagtatcatccagagcatcgggtaaga

SEQ ID NO: 573956 - DNA, 75 bp, synthetic construct
  source 1..75: mol_type = other DNA
atgcggcactctgataacgcacaaattatgacagatgaaaacaaccaaaaaactgaaacacaaacaagcatgatc

SEQ ID NO: 573957 - DNA, 75 bp, synthetic construct
  source 1..75: mol_type = other DNA
aaaacagggaggtgattatttattcgcggtaaaaggaaaccaggggcggctaaataaagcctttgaggaaaattt

SEQ ID NO: 573958 - DNA, 75 bp, synthetic construct
  source 1..75: mol_type = other DNA
caccattcagaacgatatcctcaaagagtacctctgccgcaacacctatatttacccgccaaaaccgtcaatgcg

SEQ ID NO: 573959 - DNA, 75 bp, synthetic construct
  source 1..75: mol_type = other DNA
cgtgtcatcgttggtgtcaacaagtacaaactggatcacgaagacgaaaccgacgtccttgagatcgacaacgtg

SEQ ID NO: 573960 - DNA, 75 bp, synthetic construct
  source 1..75: mol_type = other DNA
atacctgttcaggttcacctgctaatcaaacaatcttaaatatgattatgcaacgttatggccgttctttctctg

SEQ ID NO: 573961 - DNA, 75 bp, synthetic construct
  source 1..75: mol_type = other DNA
agatatttcaacaaaagacgacagaaaatacggagttataagatatataatcgacagtcaggaaatttgcccgtg

SEQ ID NO: 573962 - DNA, 75 bp, synthetic construct
  source 1..75: mol_type = other DNA
gttcacgataccattgccagagttgtatcctgtatcagtcctgcaaaatttcacgagtgctttattaactggatg

SEQ ID NO: 573963 - DNA, 75 bp, synthetic construct
  source 1..75: mol_type = other DNA
gggatttagttttaaagtgatgtatctcaccgcagccatcgcatttgttgtttgcggactgatagtctggttgtt

SEQ ID NO: 573964 - DNA, 75 bp, synthetic construct
  source 1..75: mol_type = other DNA
tccgcgagctgattgaggctaaacaatttaatggctatacgctggtcagcggagaagactggcagatacccacgg

SEQ ID NO: 573965 - DNA, 75 bp, synthetic construct
  source 1..75: mol_type = other DNA
ggggcaggatggacacgatcgcggggccaaagtcattgccagcgcctattccgatcttggatttgacgttgattt

SEQ ID NO: 573966 - DNA, 75 bp, synthetic construct
  source 1..75: mol_type = other DNA
ccgtaacctcgcggccgggcaaaaaggtctttccgttgcctttgacctcgccacccaccgcggttacgactccga

SEQ ID NO: 573967 - DNA, 75 bp, synthetic construct
  source 1..75: mol_type = other DNA
gacgttcacgtagtgggcgcatcctcactggctgccggtcataaaacgctgatcccggaactggtcgaagcgctg

SEQ ID NO: 573968 - DNA, 75 bp, synthetic construct
  source 1..75: mol_type = other DNA
atgaccgccgacgatatggtggtggttgagatagccagcggcaaggtggtggaaggcagcaaaaagccctcttcc

SEQ ID NO: 573969 - DNA, 75 bp, synthetic construct
  source 1..75: mol_type = other DNA
cgcagtttggttcgctaacgcgccccgtgaacgacagtgcaatgaacaactggcagcaagaaggctggaaagaag

SEQ ID NO: 573970 - DNA, 75 bp, synthetic construct
  source 1..75: mol_type = other DNA
agccacgcaagcaccttaaaatcaccatcatacactaaatcagtaagttggcagcattacctgcaaattgaagaa

SEQ ID NO: 573971 - DNA, 75 bp, synthetic construct
  source 1..75: mol_type = other DNA
agattgtcccttctatgggctatcgcacgctttatatcgaagcgaatcagcctggcaacgtaattgcggcaaaaa

SEQ ID NO: 573972 - DNA, 75 bp, synthetic construct
  source 1..75: mol_type = other DNA
aactcgaaacaaacacagatgatcaacggcacgtttatctattggctaaaccttaatacaccaggaaacctacgc

SEQ ID NO: 573973 - DNA, 75 bp, synthetic construct
  source 1..75: mol_type = other DNA
tggggcttgattatgtcccttggaattttcaatgcctcccaatggatgtagcacaggatcgcagtactaagaagg

SEQ ID NO: 573974 - DNA, 75 bp, synthetic construct
  source 1..75: mol_type = other DNA
tcaccagactgtactaaggaagaagcaccagcatggaacgagctagagaagtttctcaagacaccatttaaaaca

SEQ ID NO: 573975 - DNA, 75 bp, synthetic construct
  source 1..75: mol_type = other DNA
ctcttccaactggaataccgtcgattatcgattaaaaaataaggtgtctgctgaagtatcagcgtttaagacgtt

SEQ ID NO: 573976 - DNA, 75 bp, synthetic construct
  source 1..75: mol_type = other DNA
tggttttgaccctcatgatggtaataactttccggtaaaagtgaagttaccgccaggtgtggccaaacatgtatt

SEQ ID NO: 573977 - DNA, 75 bp, synthetic construct
  source 1..75: mol_type = other DNA
ggatgctaaactagtaattaagcgtctacagtttgacgtatttggctttagtcggggggctgctgccgcgcggca

SEQ ID NO: 573978 - DNA, 75 bp, synthetic construct
  source 1..75: mol_type = other DNA
ccctgtgcaggttgtgaagcggatttacactgaagaagattttaccaaacgacgaatttatctgcaaaaaaactg

SEQ ID NO: 573979 - DNA, 75 bp, synthetic construct
  source 1..75: mol_type = other DNA
tcaactttacagcgatcaaaaaaaatatacagacctgctactacattctgagaaaaaatacagaatggtacaaat

SEQ ID NO: 573980 - DNA, 75 bp, synthetic construct
  source 1..75: mol_type = other DNA
aacagctctgataaaccttataaaaccagcagtaaggaaagtattaaaagtcaactttacagcgatcaaaaaaaa

SEQ ID NO: 573981 - DNA, 75 bp, synthetic construct
  source 1..75: mol_type = other DNA
tgaaggtgagaaaagtaagatccgtatatataaaaaatacattagtaacttacctatggatcgagaaacattgtt

SEQ ID NO: 573982 - DNA, 75 bp, synthetic construct
  source 1..75: mol_type = other DNA
aaatatggcgatgcactaatcaatgcttcttatacacaattagaaaaaacacactcacaacccaaaaatagagca

SEQ ID NO: 573983 - DNA, 75 bp, synthetic construct
  source 1..75: mol_type = other DNA
gtttgacggcccgatcatcgaagcgcatatgagcaacatctggaagcgcgagccgttccgtcatcactctatggt

SEQ ID NO: 573984 - DNA, 75 bp, synthetic construct
  source 1..75: mol_type = other DNA
atggtgcaattttaaaaacaaacactaacggtacgacggtgagcggtacgaatagtgaaggtgcattctccatcc

SEQ ID NO: 573985 - DNA, 75 bp, synthetic construct
  source 1..75: mol_type = other DNA
gatgtactaaatgcagaatttaaaggacaatacccgtttgtttatttactgctggagctctttttagaatcagat

SEQ ID NO: 573986 - DNA, 75 bp, synthetic construct
  source 1..75: mol_type = other DNA
tggtaagcatgccttcgcaactcttcactatggctcgttcttttaaagccgtagccaatggtaaaatttatatcg

SEQ ID NO: 573987 - DNA, 75 bp, synthetic construct
  source 1..75: mol_type = other DNA
cattacgtgcactaggccatgataaagaaaattcacttaagcgtgtcattaatagtttcaattctaaaatcatgg

SEQ ID NO: 573988 - DNA, 75 bp, synthetic construct
  source 1..75: mol_type = other DNA
gggacgagctgctgaaagtgcgtggcgaagtgaacaaagtcatcgagcaggctcgtgcggataagaaagtcggcg

SEQ ID NO: 573989 - DNA, 75 bp, synthetic construct
  source 1..75: mol_type = other DNA
ttgggaacaatgtcaaaggtctttatctgactaaattaattgatactggcgatggctttgcttttattttctcat

SEQ ID NO: 573990 - DNA, 75 bp, synthetic construct
  source 1..75: mol_type = other DNA
tcatcccagcttggtgatggtaaacaattttcgtgcagcagggattttgcagcatccacaggacttgttccccga

SEQ ID NO: 573991 - DNA, 75 bp, synthetic construct
  source 1..75: mol_type = other DNA
caccatattctgcgcgacgaagaaaacacccgttttcgccatacttcgacgaccacatcggtacgcgctttcaat

SEQ ID NO: 573992 - DNA, 75 bp, synthetic construct
  source 1..75: mol_type = other DNA
caacgggctgggcggtcacattgaaaccgggatgcgatttaccgatggtaactggaacctgacgccgtatgcatc

SEQ ID NO: 573993 - DNA, 75 bp, synthetic construct
  source 1..75: mol_type = other DNA
aaactcggtgcttaatgaaggcggcactctcgatgtgcgggagaaaggcagcgcaacggggatacagcaaagtag

SEQ ID NO: 573994 - DNA, 75 bp, synthetic construct
  source 1..75: mol_type = other DNA
tgtcccacatatgtacttgtcatgaccgattaccaacaggtagtcgcatcagtatgccgttggcatattttgcaa

SEQ ID NO: 573995 - DNA, 75 bp, synthetic construct
  source 1..75: mol_type = other DNA
atagtgggcgcgaaaatgtttcaaatggtggtgcatcttataatgccattatcaatgatggaggaaaccagtata

SEQ ID NO: 573996 - DNA, 75 bp, synthetic construct
  source 1..75: mol_type = other DNA
aacaacatctgctgctctcaagagaactggaacaatggcggattatcaaagatgaaccatatgcaattaatgcta

SEQ ID NO: 573997 - DNA, 75 bp, synthetic construct
  source 1..75: mol_type = other DNA
aaagtacaacaggggattatcgccggttgttctggcggtaactatgaaaacgttatcgccgcagcaaatgcgctg

SEQ ID NO: 573998 - DNA, 75 bp, synthetic construct
  source 1..75: mol_type = other DNA
ggtgttgtcaatatgggggagttttcagctaactggcagggaaagcccgctccctttgatattgaggtgaattgt

SEQ ID NO: 573999 - DNA, 75 bp, synthetic construct
  source 1..75: mol_type = other DNA
taaggttgtggatttcactgatgcatctgttgcaggcacgtggattgagaagcaaattcagcggcttgaatcaaa

SEQ ID NO: 574000 - DNA, 75 bp, synthetic construct
  source 1..75: mol_type = other DNA
tcactcggttaacaagattctgaaagacataatcatcaagtccaaagggctttccggttatgactcgccgtatgt

SEQ ID NO: 574001 - DNA, 75 bp, synthetic construct
  source 1..75: mol_type = other DNA
tataaaaaccgtgtttatcagggctttgtgaaaggggcgacccagcaaccgctgatctacggaccgaacatcaaa

SEQ ID NO: 574002 - DNA, 75 bp, synthetic construct
  source 1..75: mol_type = other DNA
tctaagccagctaatggtcagatgtcagcggtggcgttgatggacgcccgttctattgcggcgactgcggcaaac

SEQ ID NO: 574003 - DNA, 75 bp, synthetic construct
  source 1..75: mol_type = other DNA
atcgcagccggtatttatggatttagccaaaaaaggcgtagtagcagatttgattggcgcaggtgcaatcatcag

SEQ ID NO: 574004 - DNA, 75 bp, synthetic construct
  source 1..75: mol_type = other DNA
ttgcgcgtattaagcagattgctggtcaggaaaatattgatccgctgcaaactgaaattggcagcatggtctatg

SEQ ID NO: 574005 - DNA, 75 bp, synthetic construct
  source 1..75: mol_type = other DNA
gggatgttaccattgcaaatggcggaagcaccgacgtttgacgtgggggattacatttatatcccaggtataaaa

SEQ ID NO: 574006 - DNA, 75 bp, synthetic construct
  source 1..75: mol_type = other DNA
ggcgcgggcgatacgccaatcaacaacggtttgagtattcgccacaccacgcgtaacttcccgaaccgcgaaggc

SEQ ID NO: 574007 - DNA, 75 bp, synthetic construct
  source 1..75: mol_type = other DNA
cggcgacgacgctgaccagtacgtgaaagtgccggatacgctggacgtgtggtttgactccgggtctacccactc

SEQ ID NO: 574008 - DNA, 75 bp, synthetic construct
  source 1..75: mol_type = other DNA
tacgaagacgtttatcacgccagtgagcttgccgatttgcgggacaactggcgctacatcatcgagaacggcgag

SEQ ID NO: 574009 - DNA, 75 bp, synthetic construct
  source 1..75: mol_type = other DNA
gctgggtgacctggctaagtatttcaacttaccaactattcttaccaccagttttgaaaccggtcctaacggccc

SEQ ID NO: 574010 - DNA, 75 bp, synthetic construct
  source 1..75: mol_type = other DNA
tcagcaggcctttagtttactgggatggccaagtattaaaatcaacgactgaaattaaaaattatgatgggtcga

SEQ ID NO: 574011 - DNA, 75 bp, synthetic construct
  source 1..75: mol_type = other DNA
aaagctgcagccgacaaaaaagcagcagaaaaagcggctgctgaaaaggcagcagctgataagaaagcagcggca

SEQ ID NO: 574012 - DNA, 75 bp, synthetic construct
  source 1..75: mol_type = other DNA
gcgctacagccttatacccgctgtatgcctccgcgtattataaattagtacccgagccaaaagataaggatcgaa

SEQ ID NO: 574013 - DNA, 75 bp, synthetic construct
  source 1..75: mol_type = other DNA
tactggttctgcgcattattcagctggaagcggtgcaggaagaaatggctaacgaatttcgtgatctgcttgttg

SEQ ID NO: 574014 - DNA, 75 bp, synthetic construct
  source 1..75: mol_type = other DNA
acgaacattcaaaccaaggacaaaccaaggtttacacgggcaagatgaaagtttcggatttgcttccagtcgttg

SEQ ID NO: 574015 - DNA, 75 bp, synthetic construct
  source 1..75: mol_type = other DNA
cctcgcgtgcctggcaggcgtatggtttgcagcaaacccgaacagcagaagcctacgatagtctaattaaaggta

SEQ ID NO: 574016 - DNA, 75 bp, synthetic construct
  source 1..75: mol_type = other DNA
atgaataaattcataggcgttttactgctaggtgcggttttactggcgggatgtgtcgaccgggaagggtactat

SEQ ID NO: 574017 - DNA, 75 bp, synthetic construct
  source 1..75: mol_type = other DNA
atgaataaattcaccggtgttttactattaggtacggcgctactggcgggatgtgtcgaccgggaagggtactat

SEQ ID NO: 574018 - DNA, 75 bp, synthetic construct
  source 1..75: mol_type = other DNA
ttgtaaggagcagacgtctggcaatatctatggcaaggcattggctgaaaaaggctatgtcgttctcgcttatga

SEQ ID NO: 574019 - DNA, 75 bp, synthetic construct
  source 1..75: mol_type = other DNA
tctggttgaaagcgtaatgcagcgtatcggcgtgaccgattacaccattctcggcacggtaaaaggtgcggagct

SEQ ID NO: 574020 - DNA, 75 bp, synthetic construct
  source 1..75: mol_type = other DNA
gtcataatccgggcattaaatctaaaatggttgtgttactctaccggctcgcgacattgcataccaagcactatg

SEQ ID NO: 574021 - DNA, 75 bp, synthetic construct
  source 1..75: mol_type = other DNA
gcttcgacgcctggcataacggcacgttcgatcgcgcgttgccggaaaacatccaatcagattaccgtaaaccta

SEQ ID NO: 574022 - DNA, 75 bp, synthetic construct
  source 1..75: mol_type = other DNA
atgaaggttaagtatagcatcgtagtcccgttatataataaatctagttatgtaaaagatactttagaaagtata

SEQ ID NO: 574023 - DNA, 75 bp, synthetic construct
  source 1..75: mol_type = other DNA
caaaaaaagccttactacatcggcagcttagtggtgtatccacgggataatcagctatttgaagtgattgacggc

SEQ ID NO: 574024 - DNA, 75 bp, synthetic construct
  source 1..75: mol_type = other DNA
aacgccgcagtggttcgtcagtatggatcagaaaggtctgcgcgcgcagtctctgaaagagatcaaaggtgtgca

SEQ ID NO: 574025 - DNA, 75 bp, synthetic construct
  source 1..75: mol_type = other DNA
catttgcgcatcccgttactgaagtttttgttctctggtaaaccggttgttaagcgtgagaacgataaagcacca

SEQ ID NO: 574026 - DNA, 75 bp, synthetic construct
  source 1..75: mol_type = other DNA
taatggactttatgaactaaaagatagaataatcgaagatagaggcaagtatcattatcaaattcaaagttgtac

SEQ ID NO: 574027 - DNA, 75 bp, synthetic construct
  source 1..75: mol_type = other DNA
acaaaacgccgatcattttccgcgcgacgccgcagtggtttgtcagcatggaccagaaaggtctacgtgcgcagt

SEQ ID NO: 574028 - DNA, 75 bp, synthetic construct
  source 1..75: mol_type = other DNA
tggcgtgattgtcattaaggcgcaggaataccgtagtcaggagctcaaccgcgaagcggcgctggcccggttggt

SEQ ID NO: 574029 - DNA, 75 bp, synthetic construct
  source 1..75: mol_type = other DNA
attaataccatgacgaatgggaaagtcgagtttaattctgagcaattatctaaactcatggcagaaataacctct

SEQ ID NO: 574030 - DNA, 75 bp, synthetic construct
  source 1..75: mol_type = other DNA
ccgcctgccgggtcagcagtatgatgaggagtcaggcctgtattacaaccgccaccgctattatgacccgctgca

SEQ ID NO: 574031 - DNA, 75 bp, synthetic construct
  source 1..75: mol_type = other DNA
ctgacgtatggcgggtacgaaatgacgcctgtgaaggtgacaattaacgccgttgctgcagagactgaaaatggc

SEQ ID NO: 574032 - DNA, 75 bp, synthetic construct
  source 1..75: mol_type = other DNA
gccggaacgcgctatttcgacaaaaacaataatccggttgacgatccctcgctggatgtatgcaacggcacgctg

SEQ ID NO: 574033 - DNA, 75 bp, synthetic construct
  source 1..75: mol_type = other DNA
gagttgtgtaagaaagtgacaagttggatgtattcgcatcctggagagagaattagatatgaacgttttaagaca

SEQ ID NO: 574034 - DNA, 75 bp, synthetic construct
  source 1..75: mol_type = other DNA
aaaggcataataaccaaggcattaagcaaaatctgcaaagctgttaatgctattgagttcgatagtgtattggct

SEQ ID NO: 574035 - DNA, 75 bp, synthetic construct
  source 1..75: mol_type = other DNA
ccgttcatgctggcccctgaactggtcagtgacccgcgggccgtcacgctgcatatttcaccggatatcgatgaa

SEQ ID NO: 574036 - DNA, 75 bp, synthetic construct
  source 1..75: mol_type = other DNA
ggagtatctacttgagtctgttcgttcattaagaacattatctagcctaaatatatttttggcatatgataatcc

SEQ ID NO: 574037 - DNA, 75 bp, synthetic construct
  source 1..75: mol_type = other DNA
gaatcgttgcttagtaattttagttctttttcaagtcgtacttttgggaattcaaagatttatttccacacttca

SEQ ID NO: 574038 - DNA, 75 bp, synthetic construct
  source 1..75: mol_type = other DNA
ctgcgctcgggcagcaccaggaagtggtgggaagtgccgccagagtcggtttattccttctcgttttatatctgg

SEQ ID NO: 574039 - DNA, 75 bp, synthetic construct
  source 1..75: mol_type = other DNA
aatcagccgtatgtattcaccattaaatacaattactgaaatggtcagtaagtatgccgatgctctttataactt

SEQ ID NO: 574040 - DNA, 75 bp, synthetic construct
  source 1..75: mol_type = other DNA
gtgggattacttgccgtatggtgttactttgacgaagttagtaattgtgagattacgaatgaaggtaatccaata

SEQ ID NO: 574041 - DNA, 75 bp, synthetic construct
  source 1..75: mol_type = other DNA
gttgctgagaagttcgccatagcggcctatgctggcgaactgtcttctgagataacgggttggagtccgggaact

SEQ ID NO: 574042 - DNA, 75 bp, synthetic construct
  source 1..75: mol_type = other DNA
tgtaaaaatgttatagctatagaattggataacaaattatatcaattattacaggataaatttaaaaatcctaaa

SEQ ID NO: 574043 - DNA, 75 bp, synthetic construct
  source 1..75: mol_type = other DNA
ggggctacggcgaagaccccacgctgcgcgtcaaggccgtctccgaccgcgactggatcgtcacgctggatgtga

SEQ ID NO: 574044 - DNA, 75 bp, synthetic construct
  source 1..75: mol_type = other DNA
agattgacgtcagggcacaggaggtttcggttgccgggtatgtgtttgaggtccagaccagtgagcgtaacggtt

SEQ ID NO: 574045 - DNA, 75 bp, synthetic construct
  source 1..75: mol_type = other DNA
catttaaatataagggtattggaaatgaaatattagacatgaaaggtcaacaattgcctaaagcttgtcaagagt

SEQ ID NO: 574046 - DNA, 75 bp, synthetic construct
  source 1..75: mol_type = other DNA
ggcaaatggcaatcctgtatttaaagaactattctggaaagcaatagacgaatttaactttccgcaagaggagct

SEQ ID NO: 574047 - DNA, 75 bp, synthetic construct
  source 1..75: mol_type = other DNA
gctgaatgccattaaggtgaaagaccttaaaggacgaatcaacgggcggctgcgaccgcaccatacccggcgtga

SEQ ID NO: 574048 - DNA, 75 bp, synthetic construct
  source 1..75: mol_type = other DNA
ggtgacgcagcggctgaagtttcttgtcgccctgcgtcccagcgtaacctcacctaccgttgccgcccgccaggc

SEQ ID NO: 574049 - DNA, 75 bp, synthetic construct
  source 1..75: mol_type = other DNA
gcctgggcgcaatggcgaacggcgtttacggcccgtttgccattttcgcctccgtcaaaatggtttcggcattta

SEQ ID NO: 574050 - DNA, 75 bp, synthetic construct
  source 1..75: mol_type = other DNA
ttccggtgaatatttgccctgacagttcccatatcggcggcacacctgaaaaaaccgtgtacacaaggatgtaca

SEQ ID NO: 574051 - DNA, 75 bp, synthetic construct
  source 1..75: mol_type = other DNA
gaagcgtattacccccacgatacagaaagacgatgctgacgccatgaaactgattgataaaatcatagaggtcta

SEQ ID NO: 574052 - DNA, 75 bp, synthetic construct
  source 1..75: mol_type = other DNA
accgtttcgccgcaggatgtgatgaacaaactgggcgcggatattctgcgtctgtgggtggcatcaaccgactac

SEQ ID NO: 574053 - DNA, 75 bp, synthetic construct
  source 1..75: mol_type = other DNA
atcatggatcttaaaaataacactgtcggtattgcttgtggcgatttttctgccaaatgtagcgatgcatgtatt

SEQ ID NO: 574054 - DNA, 75 bp, synthetic construct
  source 1..75: mol_type = other DNA
gggatttacccgtcgatattgatgtggatgtaatctggcgaattgcggacagtatcggtgcgacgcaaaaacagt

SEQ ID NO: 574055 - DNA, 75 bp, synthetic construct
  source 1..75: mol_type = other DNA
aggcatggatgttaaaaaaccatatatatcaataagggagatctcatttgacaaatgtaagctatatcttgttcc

SEQ ID NO: 574056 - DNA, 75 bp, synthetic construct
  source 1..75: mol_type = other DNA
aatgagctgattgagctaacagatcctgagcgaccaatggaaagaaaactgaataggaaaaaattttcaattgct

SEQ ID NO: 574057 - DNA, 75 bp, synthetic construct
  source 1..75: mol_type = other DNA
tggtaaaagcaaaagattatcacgacacatataccatcccggttcttactgccggaaaaacatttattcttggat

SEQ ID NO: 574058 - DNA, 75 bp, synthetic construct
  source 1..75: mol_type = other DNA
tgatttatattggtcggattgttaaagataaaggagttgaaaggttaattaatgcagtaataaatcacccgtcta

SEQ ID NO: 574059 - DNA, 75 bp, synthetic construct
  source 1..75: mol_type = other DNA
atggaattgagcgagtcagggtttcgtcctgggtttcattttcctgtttttcacggcgtagttccccacttcaac

SEQ ID NO: 574060 - DNA, 75 bp, synthetic construct
  source 1..75: mol_type = other DNA
ggcggagtgacgtccggccatccggtcaatcccctgctcggtgcaaaggtccttcccggtgaaaccgacatcgcc

SEQ ID NO: 574061 - DNA, 75 bp, synthetic construct
  source 1..75: mol_type = other DNA
tggttctgatcatgtggatctcgacgcggccgcgaaggcaggtatcactgtcgcggaaattactgggtcaaacag

SEQ ID NO: 574062 - DNA, 75 bp, synthetic construct
  source 1..75: mol_type = other DNA
cagccagaggttttactcaaacatgccgaatttatctgtgagcgatttcaggcgggggacgacagccacctgctg

SEQ ID NO: 574063 - DNA, 75 bp, synthetic construct
  source 1..75: mol_type = other DNA
gcagtaaaaagttatcaaaaacaaatttggcaaaaagtatctacgacgccggctggtgtcagctaaaaaatcaga

SEQ ID NO: 574064 - DNA, 75 bp, synthetic construct
  source 1..75: mol_type = other DNA
accttcgattatattaaatctctcaactacgaaccaaacaagaacgtattcattactgatgatatggcattttat

SEQ ID NO: 574065 - DNA, 75 bp, synthetic construct
  source 1..75: mol_type = other DNA
gcttaaatcggtgtgggaaagcgatgaagaggtgtatttgatcggtgcccaacactttgatctttcgatacacga

SEQ ID NO: 574066 - DNA, 75 bp, synthetic construct
  source 1..75: mol_type = other DNA
gcattggcaaatgacatcgaatctacttacccattccacccaagctttaaaagcatcgttgctttgttcaaagaa

SEQ ID NO: 574067 - DNA, 75 bp, synthetic construct
  source 1..75: mol_type = other DNA
ctgctatttgcttcaaaagccggagcggatccggtacgtgtgcgccaggcgctgatgggcggctttgcttcctca

SEQ ID NO: 574068 - DNA, 75 bp, synthetic construct
  source 1..75: mol_type = other DNA
caactgcttcagaacggactccgaatctctaactggagactacaaagaaaacaatcatgatatttcgctcacctg

SEQ ID NO: 574069 - DNA, 75 bp, synthetic construct
  source 1..75: mol_type = other DNA
gcctacgtcgagtcgaacctccctgcccccggaggttctcatcctcttcaggtcgcagaaagcaaaaaaccagcc

SEQ ID NO: 574070 - DNA, 75 bp, synthetic construct
  source 1..75: mol_type = other DNA
ttagctttgcaccattcttctgtacttatatgcgtcgtgaaattgtagaccaggttggtgggttagatgcggaat

SEQ ID NO: 574071 - DNA, 75 bp, synthetic construct
  source 1..75: mol_type = other DNA
cggatgtcaaagctaataatgttaaagtcaattatgaaactattatgattgcccccttagaaagtcagagtgtta

SEQ ID NO: 574072 - DNA, 75 bp, synthetic construct
  source 1..75: mol_type = other DNA
tccaaatctcaggataaacatgcgcttttccccatttttactgcgagttggcgagctcatcgtataatgaataag

SEQ ID NO: 574073 - DNA, 75 bp, synthetic construct
  source 1..75: mol_type = other DNA
ccggcatgggtatcgagaaccgtgacgaggtaccgggccgatcaccaagcggcgacaagtgggaggctgatgttc

SEQ ID NO: 574074 - DNA, 75 bp, synthetic construct
  source 1..75: mol_type = other DNA
atttaaataattataaagatgtcgaactttctggcatggatccgtatcagcattatcaaaaaataggtaaactga

SEQ ID NO: 574075 - DNA, 75 bp, synthetic construct
  source 1..75: mol_type = other DNA
acatgttacaatagttattcctaactatgaatcactggaagatattcaggattgtctggaatctatacgtaaata

SEQ ID NO: 574076 - DNA, 75 bp, synthetic construct
  source 1..75: mol_type = other DNA
gctaaagccttactgtttccatcaagactagaaacatttggtataccattgatagaagctgtaaaatttaattct

SEQ ID NO: 574077 - DNA, 75 bp, synthetic construct
  source 1..75: mol_type = other DNA
tatttacattagatcgtgatgaaaattcgaagttgtttgatcggataaaaaaatataatcttcaagagattatta

SEQ ID NO: 574078 - DNA, 75 bp, synthetic construct
  source 1..75: mol_type = other DNA
agaaatggtccgcattattcgggataaacgaccagcatattttatagctgaaaatgtcaaaggtatattatcctt

SEQ ID NO: 574079 - DNA, 75 bp, synthetic construct
  source 1..75: mol_type = other DNA
aactccagcttcttggggtaaatctgcaaatatgaatgtcgctgaggttggaactgatagttttggttttactta

SEQ ID NO: 574080 - DNA, 75 bp, synthetic construct
  source 1..75: mol_type = other DNA
attaagaataatctttataatcttccttttacagttctttgtgaggtacataagaactggtataaaacgccaaat

SEQ ID NO: 574081 - DNA, 75 bp, synthetic construct
  source 1..75: mol_type = other DNA
caaccgtatctggtgactatatttatctggccaccccacaagtagaaaatgggccttgtgtatcatcttttatta

SEQ ID NO: 574082 - DNA, 75 bp, synthetic construct
  source 1..75: mol_type = other DNA
ataccagcgcaacttacccagaatccattaatgaaaataacaatgatgaagttaatggattagtacaagagctca

SEQ ID NO: 574083 - DNA, 75 bp, synthetic construct
  source 1..75: mol_type = other DNA
cgaaaatatggcgtacgaggtttacgttatgatgcggcaaaacactcaaaacatgaacaaatagaaagatcaata

SEQ ID NO: 574084 - DNA, 75 bp, synthetic construct
  source 1..75: mol_type = other DNA
tggcagcgactcagaagaaggatctcgtgaaggcgctgaaaaaagatcgggacggagccagggcggtaatggaga

SEQ ID NO: 574085 - DNA, 75 bp, synthetic construct
  source 1..75: mol_type = other DNA
tccacaatctcattggtcgagcgggccgagcggggatgcatactgaaggcagcattttgtttgccgaccctattg

SEQ ID NO: 574086 - DNA, 75 bp, synthetic construct
  source 1..75: mol_type = other DNA
cggcgcttcgctggaaaacggcttgctggcgattgaattacatcaggacattccggaagaagagaaaccgcagcg

SEQ ID NO: 574087 - DNA, 75 bp, synthetic construct
  source 1..75: mol_type = other DNA
atgacctggattatccctctgctgatatacgagcgaagatcagtaaagatatagaaagtggtatccctggctatt

SEQ ID NO: 574088 - DNA, 75 bp, synthetic construct
  source 1..75: mol_type = other DNA
gttatgatgcggcaaaacactcaaaacatgaacaaatagaaagatcaataaccccaccgcttaaaaattataatg

SEQ ID NO: 574089 - DNA, 75 bp, synthetic construct
  source 1..75: mol_type = other DNA
cccatatcttatgcttcttggtgcagcctcatactatttatgcgaactcccaggtagttcatcagttttgataag

SEQ ID NO: 574090 - DNA, 75 bp, synthetic construct
  source 1..75: mol_type = other DNA
ttttctataagaaaagtaaaagaggtgctttatcaatgagcatcggggcacctagttctccatttttgtcaaatg

SEQ ID NO: 574091 - DNA, 75 bp, synthetic construct
  source 1..75: mol_type = other DNA
cgccactctttagcttctacagacttatcgataaaggctttggaattttaatatttattctgttaatcgcctgcg

SEQ ID NO: 574092 - DNA, 75 bp, synthetic construct
  source 1..75: mol_type = other DNA
gtcgaaggaacaaccctgattccgactttcaggtcggtcgggttcgcgagctggctcgatcagttgggaaggatc

SEQ ID NO: 574093 - DNA, 75 bp, synthetic construct
  source 1..75: mol_type = other DNA
ccaagtttgatgaaccagaggtgcttaaagaaatatcgtatgaatggatcagtggcaaacccttcaacgacctcc

SEQ ID NO: 574094 - DNA, 75 bp, synthetic construct
  source 1..75: mol_type = other DNA
tcgactggcagtagagcatgctatgcgtgacaatcttgtgcgattcgttgtttgtacatctaccttagcgcaggg

SEQ ID NO: 574095 - DNA, 75 bp, synthetic construct
  source 1..75: mol_type = other DNA
ccaccgagattcaggcgcagctggatgacctggaccgcctgaacaacgcgttaagcgcgatgagttcggtgagta

SEQ ID NO: 574096 - DNA, 75 bp, synthetic construct
  source 1..75: mol_type = other DNA
ttgtggaagtgataaagacaaaaatggccgcaggctgttacccctgcggccggtttcgggcgcatattgccatca

SEQ ID NO: 574097 - DNA, 75 bp, synthetic construct
  source 1..75: mol_type = other DNA
acgctgaaaaagaactgaaattaaacgcagtctttcacagcgcgctgggatgggcctctctgttgggtgactcgc

SEQ ID NO: 574098 - DNA, 75 bp, synthetic construct
  source 1..75: mol_type = other DNA
cacaacctgtaccccaggaccatggtacatttatcaaatgctgcaggctgcagacagcctgccggtcaatatcgg

SEQ ID NO: 574099 - DNA, 75 bp, synthetic construct
  source 1..75: mol_type = other DNA
taacatagatacatcaaaaatatactctgtaaatcaagatcccaatgtgggtaagccagtttgttatgttgtaaa

SEQ ID NO: 574100 - DNA, 75 bp, synthetic construct
  source 1..75: mol_type = other DNA
cctggcatctttaaaatattgtaactttaaaaatgtgacattcactggtaatatatcttacgaaaatcttaatgg

SEQ ID NO: 574101 - DNA, 75 bp, synthetic construct
  source 1..75: mol_type = other DNA
ttacagataaatttgctactctgactaaaatgcaagatgaaaatctgaatgaaaaaaatagaacgcaaaaatatt

SEQ ID NO: 574102 - DNA, 75 bp, synthetic construct
  source 1..75: mol_type = other DNA
tgtggcttatgaaaaacaagtctcttatggaattcatataatagtatttaatgtaatcaaaaccataatatcatt

SEQ ID NO: 574103 - DNA, 75 bp, synthetic construct
  source 1..75: mol_type = other DNA
gagcttgaaggattaattaacttttgttcaaagctaaaagcgaatgaaaacattgatgacctgatacttaaacca

SEQ ID NO: 574104 - DNA, 75 bp, synthetic construct
  source 1..75: mol_type = other DNA
caataaaggactgaatgagcaggacaagctggcaaaaaccaccgagattcaggcgcagctggatgacctggaccg

SEQ ID NO: 574105 - DNA, 75 bp, synthetic construct
  source 1..75: mol_type = other DNA
atgagtaatatttcacgccaggcctatgctgacatgttcggccctaccaccggtgataaaattcgtctggcagac

SEQ ID NO: 574106 - DNA, 75 bp, synthetic construct
  source 1..75: mol_type = other DNA
agccacgcaagcaccttaaaatcaccatcatacactaaatcagtaagttggcagcattaccaaaaagttgatttg

SEQ ID NO: 574107 - DNA, 75 bp, synthetic construct
  source 1..75: mol_type = other DNA
cgcgttcgacagcctgatcccgtccctgaaattcagaaaatatgacgccgtaatctccggtatggatatcacccc

SEQ ID NO: 574108 - DNA, 75 bp, synthetic construct
  source 1..75: mol_type = other DNA
aaaacaatatatgcaaacgtttatatgcatttgtataatcttgtggaatcaacgattacattattaattaaagct

SEQ ID NO: 574109 - DNA, 75 bp, synthetic construct
  source 1..75: mol_type = other DNA
agttattaaaaggaaatttaattttaatcgtttagtatcaggcttatccctttttgctgtgtcagttgctctttt

SEQ ID NO: 574110 - DNA, 75 bp, synthetic construct
  source 1..75: mol_type = other DNA
atgcgacgctggcgcgtcttatccgacctacggggacgcatgtgttggtcacataatgcgttcatgtcgcatccg

SEQ ID NO: 574111 - DNA, 75 bp, synthetic construct
  source 1..75: mol_type = other DNA
ggaaggatagttttggttttacctatggaaagttcgtctgtaacgattctctgattgggcaaacctcagccatta

SEQ ID NO: 574112 - DNA, 75 bp, synthetic construct
  source 1..75: mol_type = other DNA
cgcgcatcaacggcaacatatatcaacaaatctggcgaactgaaaacggcggaaattaatgagccgcgatttgag

SEQ ID NO: 574113 - DNA, 75 bp, synthetic construct
  source 1..75: mol_type = other DNA
aaggacaatagaggtgtgattcaattaattacttacacccgaaataagctagcacatggtgaaatttctttttca

SEQ ID NO: 574114 - DNA, 75 bp, synthetic construct
  source 1..75: mol_type = other DNA
tccaaatacccaggttaaaaatcttgatagcctgaaagaaaacgtcgccaggagtatcgaagaagtcaaagacaa

SEQ ID NO: 574115 - DNA, 75 bp, synthetic construct
  source 1..75: mol_type = other DNA
aatggttgatgacagccggatcacacagtcacagcctggaagttccggtcaaaaaacggcaggcgctacgccagc

SEQ ID NO: 574116 - DNA, 75 bp, synthetic construct
  source 1..75: mol_type = other DNA
agaggaacaagccagggaagaagcaccaccggaaaacaaggaaaataaaggtgtcactctgccagcagaaaacga

SEQ ID NO: 574117 - DNA, 75 bp, synthetic construct
  source 1..75: mol_type = other DNA
ggtgctgttggtccgtatcagttcatgaaggatactgccatagcgtacgggttaaaggtcggggatgggattgat

SEQ ID NO: 574118 - DNA, 75 bp, synthetic construct
  source 1..75: mol_type = other DNA
cgcgctgctcttaatgcaaaagaaaacgagacgctggcttactatcagcagcagcaacgcatcgcttcaacacca

SEQ ID NO: 574119 - DNA, 75 bp, synthetic construct
  source 1..75: mol_type = other DNA
agtcggatctcgcagtcacagccaggtagctccggtcagaaaacggcaggcgctactcctgcgtcagacaacacg

SEQ ID NO: 574120 - DNA, 75 bp, synthetic construct
  source 1..75: mol_type = other DNA
atgaaactgctgcgtaccagcgaaaacccggaatacaaatactcactggcttttgttggctacggcccggaaacc

SEQ ID NO: 574121 - DNA, 75 bp, synthetic construct
  source 1..75: mol_type = other DNA
ttaggttttttattgtttcttaaaaataataaaatctataacttcaaatatacaaggtacataacatatattctg

SEQ ID NO: 574122 - DNA, 75 bp, synthetic construct
  source 1..75: mol_type = other DNA
catcacacccttcctgtttttttactcgatggttattagcgttggagtaaatgaagtatttatggtgctaaacta

SEQ ID NO: 574123 - DNA, 75 bp, synthetic construct
  source 1..75: mol_type = other DNA
atgtatcagtggtatttcgctatttggtgcatattcaccatttttatttatattgaatgctgttatttataacga

SEQ ID NO: 574124 - DNA, 75 bp, synthetic construct
  source 1..75: mol_type = other DNA
ctgaggtggccacacgggcgcttggcgtgctgggcgctatcagcgtacccggtatggaaagctcccacgggcttt

SEQ ID NO: 574125 - DNA, 75 bp, synthetic construct
  source 1..75: mol_type = other DNA
acctgttcccggcgatgccaactcgacagccccggccaacggcgcggaaacgatagtcgaggagtctaatgttat

SEQ ID NO: 574126 - DNA, 75 bp, synthetic construct
  source 1..75: mol_type = other DNA
agcatgaccggcgacaaccagaagctgtaccgctggcgctgccgtgccgcgacctacgcgaactggccgaccctg

SEQ ID NO: 574127 - DNA, 75 bp, synthetic construct
  source 1..75: mol_type = other DNA
caaagcgctgtatgacatcgaaggcttaacctggcaggggccgttgaaccagttctggcaaacggatttcgcgcc

SEQ ID NO: 574128 - DNA, 75 bp, synthetic construct
  source 1..75: mol_type = other DNA
gtacgctgaatgattttctgggtgccatgacggaagaggatgtcatgccggaggcattgcgtcgttttgaggtaa

SEQ ID NO: 574129 - DNA, 75 bp, synthetic construct
  source 1..75: mol_type = other DNA
tattgcaaaagctgatggtcactttcatgtggtgacaaatggtaaagcggttaatgaagtttattgtgaatataa

SEQ ID NO: 574130 - DNA, 75 bp, synthetic construct
  source 1..75: mol_type = other DNA
gcacataacatatatgtaactttagttttagaatttggttttattgggtcttttctttttataacttttattttt

SEQ ID NO: 574131 - DNA, 75 bp, synthetic construct
  source 1..75: mol_type = other DNA
aacgacgatgcgcattctcgcgatcattttgtcgccgcctgtgttaacgccgggtttaatcctgatattcgcctg

SEQ ID NO: 574132 - DNA, 75 bp, synthetic construct
  source 1..75: mol_type = other DNA
agattgaaggcctgcgccagcgcagtctcgatttttctctggtcgatacgccgcccaccgacagcgagcaggatc

SEQ ID NO: 574133 - DNA, 75 bp, synthetic construct
  source 1..75: mol_type = other DNA
cgaaagaaggtttgctgataacagaaccatgtttactcaacatatcgaaaagcaaaggaatgttcatacgctcaa

SEQ ID NO: 574134 - DNA, 75 bp, synthetic construct
  source 1..75: mol_type = other DNA
ttgttaacattcttttcggtttttcagatagcgttgctgcgttctatgtcctgtatagccttaatgctattcttc

SEQ ID NO: 574135 - DNA, 75 bp, synthetic construct
  source 1..75: mol_type = other DNA
gggggatggaatttttatcagtatccgttgaatccggtatctggtttcgatccattagggttaaaagtgtctttt

SEQ ID NO: 574136 - DNA, 75 bp, synthetic construct
  source 1..75: mol_type = other DNA
ttggtgctgtttttggtcggcctgaccgaatttaacgacatcgcgcaatacctgtggggcaagtcgcttggtcgt

SEQ ID NO: 574137 - DNA, 75 bp, synthetic construct
  source 1..75: mol_type = other DNA
agatgctgcgtaagtttgccgcaggcctggcgaaagctaacggccaggtggacacgtcgcgctacttctcgctga

SEQ ID NO: 574138 - DNA, 75 bp, synthetic construct
  source 1..75: mol_type = other DNA
accgtgagatcgccggacgcaagtcattcagtccgccatttatgccggataaccgcctggttgtcaccacgctct

SEQ ID NO: 574139 - DNA, 75 bp, synthetic construct
  source 1..75: mol_type = other DNA
attagatcctttagaacaactctatgttcttcgtactgagtcagaaaaacgattagataacgattactataacgg

SEQ ID NO: 574140 - DNA, 75 bp, synthetic construct
  source 1..75: mol_type = other DNA
ttccaaagaatgtgtctgaacaagcaaatttacttgcagcaaaaattcttgaatctcaatcatcactttctattc

SEQ ID NO: 574141 - DNA, 75 bp, synthetic construct
  source 1..75: mol_type = other DNA
aattttgctaggccattcgaatcaaaaaatgatcgatatttacaacgacgcacgcggtaaggaatggaaaaaact

SEQ ID NO: 574142 - DNA, 75 bp, synthetic construct
  source 1..75: mol_type = other DNA
ccgtggctattgcaccaccatcacgcgaaagggacagctaagcgcggcgggatggttaagccagcaacattaacc

SEQ ID NO: 574143 - DNA, 75 bp, synthetic construct
  source 1..75: mol_type = other DNA
gccgaggaactggtgaccggcggcaagctgacgcctgcggctaaaggcgtggttgtcgcgctgctggatgaagta

SEQ ID NO: 574144 - DNA, 75 bp, synthetic construct
  source 1..75: mol_type = other DNA
tgactgaagaagaaattaaggcgatgcgcgaagagaatgcccgcctgaaagccgacgctgctgaccgcgcgaagg

SEQ ID NO: 574145 - DNA, 75 bp, synthetic construct
  source 1..75: mol_type = other DNA
atggttgacgctgagaaatccggcaaggttattccgctggataaagcaccggaatttaaactggtcgattcaatc

SEQ ID NO: 574146 - DNA, 75 bp, synthetic construct
  source 1..75: mol_type = other DNA
aacagtccgctggcgcagtcgatggcgcataagctcggaaatttgcccaaaaagatgcttacggagatacagcgc

SEQ ID NO: 574147 - DNA, 75 bp, synthetic construct
  source 1..75: mol_type = other DNA
atgacccgcaggaaaatgcgctgcgtctggcgctgctggagtccgtggagttcctgaacatgatcacctgtctgg

SEQ ID NO: 574148 - DNA, 75 bp, synthetic construct
  source 1..75: mol_type = other DNA
gatggagacaaaaaaaatggagagcaagcccatttaatagatattactaacgaaagaaggtttgctgataacaaa

SEQ ID NO: 574149 - DNA, 75 bp, synthetic construct
  source 1..75: mol_type = other DNA
ggagatgaaggttatgttggaactgatcatctgacagttgatagctacatggatttgcccctatatttccagaca

SEQ ID NO: 574150 - DNA, 75 bp, synthetic construct
  source 1..75: mol_type = other DNA
gatttacaaccacgctcagtatctagataagcgcagagaaatgatgcagtggtgggctgactggcttgatgaaaa

SEQ ID NO: 574151 - DNA, 75 bp, synthetic construct
  source 1..75: mol_type = other DNA
ttagccccgggtttcgcctcgaagctgcccagcttttactcgatcagcattacaccgttgccgccgctgctacgg

SEQ ID NO: 574152 - DNA, 75 bp, synthetic construct
  source 1..75: mol_type = other DNA
cgtggaaaattatgcgcagcgcttctgctgatttgcgtaccttcgctgatgataagtcctgcactagcgcgctgc

SEQ ID NO: 574153 - DNA, 75 bp, synthetic construct
  source 1..75: mol_type = other DNA
ttcctgaactggatcaccacgctggacgttgaccagctgagtggtcaggtcgtcaacgtgggcgcatctgtcctt

SEQ ID NO: 574154 - DNA, 75 bp, synthetic construct
  source 1..75: mol_type = other DNA
cggcagatatgtatgacgttgcgccgaacagcctgacccctggtgccaccatcgaagctaatgattggggccggt

SEQ ID NO: 574155 - DNA, 75 bp, synthetic construct
  source 1..75: mol_type = other DNA
aacagtccactggcgcagacgatggcgcataagctcggtaatttgcccaaaaagatgcttgcggagatacagcgc

SEQ ID NO: 574156 - DNA, 75 bp, synthetic construct
  source 1..75: mol_type = other DNA
gtaactatgtgaattatagtggctttgtctactataacaacacaaacggtgatttcgataccacctttaatggtg

SEQ ID NO: 574157 - DNA, 75 bp, synthetic construct
  source 1..75: mol_type = other DNA
tgatactttagctataaataatggctctgaagtcaatgttacgaattcttccttactttctgatactattggctt

SEQ ID NO: 574158 - DNA, 75 bp, synthetic construct
  source 1..75: mol_type = other DNA
gtattcactttaaatattgctaattctacaattgatgacgattatgaaggtttatacttcactgattcatatctg

SEQ ID NO: 574159 - DNA, 75 bp, synthetic construct
  source 1..75: mol_type = other DNA
cgaattattccgtcaacatcttagccagaccatgcgcgaattaaatgccattacccccgcgcccggttttaatca

SEQ ID NO: 574160 - DNA, 75 bp, synthetic construct
  source 1..75: mol_type = other DNA
aagcatcctcggcacgattttgcaggaaaacggggtgaccgagtggagtccgctgttcagcgagccccatccttc

SEQ ID NO: 574161 - DNA, 75 bp, synthetic construct
  source 1..75: mol_type = other DNA
aagcatcctcggcacgattttgcaggaaaacggggtgaccgactggagtccgctgttcagcgagccgcatccttc

SEQ ID NO: 574162 - DNA, 75 bp, synthetic construct
  source 1..75: mol_type = other DNA
caagcactacgagaaggtaaagccgatgggtgtcagtctggtgaaatttgtcagtgttattgggcggcttagcgg

SEQ ID NO: 574163 - DNA, 75 bp, synthetic construct
  source 1..75: mol_type = other DNA
atgacaccagcaaatgaaaacgccatccgcgcggcctgccgacgctgcaccgaagaaatccagcaggccatgcgc

SEQ ID NO: 574164 - DNA, 75 bp, synthetic construct
  source 1..75: mol_type = other DNA
aaacggtgcctcccatcatcaacaagcatcacaagaaaattgaagctctgggagtcagcctcctggagttcgtcg

SEQ ID NO: 574165 - DNA, 75 bp, synthetic construct
  source 1..75: mol_type = other DNA
gcggcaaggctttcaagattgatgaagctggttactcagacattttgaaacaggttcgcgatgctgactttgaga

SEQ ID NO: 574166 - DNA, 75 bp, synthetic construct
  source 1..75: mol_type = other DNA
gagggagaagatcttgagttttcatgggccagaaaagtaatgggttatactcacggtgaactcagttatttaaaa

SEQ ID NO: 574167 - DNA, 75 bp, synthetic construct
  source 1..75: mol_type = other DNA
tggtttcgtagaaatgtgttcacgtcttgggatcgggattggtgaagggtgctctaacgtaagcattggtcaggg

SEQ ID NO: 574168 - DNA, 75 bp, synthetic construct
  source 1..75: mol_type = other DNA
aagcatcctcggcacgattttgcaggaaaacggggtgaccgattggaggccgctgttcagcgagccacatccttc

SEQ ID NO: 574169 - DNA, 75 bp, synthetic construct
  source 1..75: mol_type = other DNA
aagcatcctcggcacgattttgcaggaaaacggggtgaccgaatggaggccgctgttcagcgagcctcatccttc

SEQ ID NO: 574170 - DNA, 75 bp, synthetic construct
  source 1..75: mol_type = other DNA
gcatctatcacagtagtaagtgccggagccgatgaaacacgaactgatcacgaacttctgatccgcccagatagt

SEQ ID NO: 574171 - DNA, 75 bp, synthetic construct
  source 1..75: mol_type = other DNA
aacgcctttgtcgccctgccgcccaacagtcctcagcgtaccgccaccggtgaacaacgctataagcagcttaag

SEQ ID NO: 574172 - DNA, 75 bp, synthetic construct
  source 1..75: mol_type = other DNA
ttgccaaagcgaaagcggcaacgctactcggcatggcacgactacaggatttgcgtaatctgccgcgaccaatac

SEQ ID NO: 574173 - DNA, 75 bp, synthetic construct
  source 1..75: mol_type = other DNA
tttcgacgacctcgatccagccagcgagaatatccgggccgaactagccattgccaaagcgaaagcggcaacgct

SEQ ID NO: 574174 - DNA, 75 bp, synthetic construct
  source 1..75: mol_type = other DNA
ttgtagatatagcaaaaaatattccacaatagatatgtatttgatgtcacaatgtgatcattttataatagctaa

SEQ ID NO: 574175 - DNA, 75 bp, synthetic construct
  source 1..75: mol_type = other DNA
ctgtctaaattgtttagtataatgggtaagaaaagcgggattattaaggatataaggtgtttgcacgctacagga

SEQ ID NO: 574176 - DNA, 75 bp, synthetic construct
  source 1..75: mol_type = other DNA
gttttagcctaaaacaaccccaaaaaaaagaaaatgaagacttttatttaccgccatcttttgatagcgatttta

SEQ ID NO: 574177 - DNA, 75 bp, synthetic construct
  source 1..75: mol_type = other DNA
tacataaaattgctgaatatacaaatagtcaaaacgctattaaaccatcagatttgaaatcattagcggcagaac

SEQ ID NO: 574178 - DNA, 60 bp, synthetic construct
  source 1..60: mol_type = other DNA
atgaccatctacatcactgagctaataacaggcctgctggtaatcgcaggcctttttatt

SEQ ID NO: 574179 - DNA, 75 bp, synthetic construct
  source 1..75: mol_type = other DNA
taacaggcctgctggtaatcgcaggcctgctggtaatcgcaggcctttttatttgggggagagtaaatcgtggct

SEQ ID NO: 574180 - DNA, 75 bp, synthetic construct
  source 1..75: mol_type = other DNA
ggctggctattgtgggtaccttcggcctgtggatagcactgattattattgttcgtgaagccctgaacgcgatcg

SEQ ID NO: 574181 - DNA, 75 bp, synthetic construct
  source 1..75: mol_type = other DNA
actcgcttttagcgctatggcgctgtgctggctaatgcgctggacgttactcatccaggtgcagaccgtaccgaa

SEQ ID NO: 574182 - DNA, 75 bp, synthetic construct
  source 1..75: mol_type = other DNA
tctaagcaaagatgcattaatgtgctatagtgaagacaataaggcaacagcaaagtcttatatattaagagtcag

SEQ ID NO: 574183 - DNA, 75 bp, synthetic construct
  source 1..75: mol_type = other DNA
gcaataacgccgacccgattcatgtctctaccggtctgttgctgaacaaagagcaaaaggccggggagtcgaagc

SEQ ID NO: 574184 - DNA, 75 bp, synthetic construct
  source 1..75: mol_type = other DNA
attgcatactcagtcggcgaaaatatatttaacggcaattcatggaaaagccatacaaataaataaatacattaa

SEQ ID NO: 574185 - DNA, 75 bp, synthetic construct
  source 1..75: mol_type = other DNA
agactatcacttatttaagtgatattggttgtctggagattcagggggccagtctagcgggttccggcagtggtg

SEQ ID NO: 574186 - DNA, 75 bp, synthetic construct
  source 1..75: mol_type = other DNA
cgctgatcggcacatgccgtctgaacaatgtggagccagaaaagtggctgcgctacgtcattgaacatatccagg

SEQ ID NO: 574187 - DNA, 75 bp, synthetic construct
  source 1..75: mol_type = other DNA
gcaacatcatcgattcgatcttcggcacagacagtgaggaacctgttcaggaagacccgagaaagcggttaagcc

SEQ ID NO: 574188 - DNA, 75 bp, synthetic construct
  source 1..75: mol_type = other DNA
gataaaatcagcccgcgtttggtgacgaataaagatattccggatatctgtatcagccgcgatgagttcatagcc

SEQ ID NO: 574189 - DNA, 75 bp, synthetic construct
  source 1..75: mol_type = other DNA
tccattccgcaagagttacccgctggacccaatatccccgaacaaacctggctttacgatccctcaacacaacgt

SEQ ID NO: 574190 - DNA, 75 bp, synthetic construct
  source 1..75: mol_type = other DNA
gcaggattttactattcggcatggtgtttctgctgttatctggttgtgataataagctggaagaattaaaactgg

SEQ ID NO: 574191 - DNA, 75 bp, synthetic construct
  source 1..75: mol_type = other DNA
atgggactcgatctcttctttttcgaacgggcaaaaaacgcgcccgatgaaagccagtacgccagagtgggttat

SEQ ID NO: 574192 - DNA, 75 bp, synthetic construct
  source 1..75: mol_type = other DNA
ttctgagcgacctgcagagcctgacgccggataactgcggcgcggtttatcccacgattgatggctttttctatg

SEQ ID NO: 574193 - DNA, 75 bp, synthetic construct
  source 1..75: mol_type = other DNA
ggaaccatcatcagtggcggggagcagctagtctccccccctgctcttttacccatcttaccccgccgacgaaaa

SEQ ID NO: 574194 - DNA, 75 bp, synthetic construct
  source 1..75: mol_type = other DNA
tattcacaatgcaggtcttgcgaccggaaccatcatcagtggcggggagcagctagtctccccccctgctctttt

SEQ ID NO: 574195 - DNA, 75 bp, synthetic construct
  source 1..75: mol_type = other DNA
atgggcgattttggcccgacaatgggggaacgcttacctttcagtccagagatagatgatgaccatctgcaccag

SEQ ID NO: 574196 - DNA, 75 bp, synthetic construct
  source 1..75: mol_type = other DNA
gaatgcagtggaagtatttgcctgccaaacgtagctctttacgcggcaggctaccggaaatcaaaacaactgacg

SEQ ID NO: 574197 - DNA, 75 bp, synthetic construct
  source 1..75: mol_type = other DNA
atgcaatccatcatcgccgaacaggtcaagtacatcaaatcgctccccctcgaggcggctgacagggtgtacgac

SEQ ID NO: 574198 - DNA, 75 bp, synthetic construct
  source 1..75: mol_type = other DNA
tgagctacgcaatctggtaaacagttccccgcctgggcaggtgatgaaatccatcgttgccgaacaggttaagta

SEQ ID NO: 574199 - DNA, 75 bp, synthetic construct
  source 1..75: mol_type = other DNA
atgaccggtcacgctggcgagctcccgaattgtcgctgttataaagaaatcgtttttcccaaccctcattcttat

SEQ ID NO: 574200 - DNA, 75 bp, synthetic construct
  source 1..75: mol_type = other DNA
atgaaaaagttagttcttgccgcattactggcatcctgtgcgttcggcgcttctgccgcagagaaaatcaatttt

SEQ ID NO: 574201 - DNA, 75 bp, synthetic construct
  source 1..75: mol_type = other DNA
tgggggccggactttgcgcgaggacttgccgggccgcttttttacgatactcaccccgtaatcatttttcaggac

SEQ ID NO: 574202 - DNA, 75 bp, synthetic construct
  source 1..75: mol_type = other DNA
ttttgtgatatgcccgtttcacgggcaccagaagccgattttcgtccagcaggttaaacaaacgatcccgcccta

SEQ ID NO: 574203 - DNA, 75 bp, synthetic construct
  source 1..75: mol_type = other DNA
aatccttcgcgctggacatcctgcgcatcggctttaatggtaaaagttttgccgaaaataccgatccggtggcga

SEQ ID NO: 574204 - DNA, 75 bp, synthetic construct
  source 1..75: mol_type = other DNA
aaaagcgacaacgttgtcgcttttaggtaaggcaaaattatttgaacttgttgctgaagatgacgacgaccttgc

SEQ ID NO: 574205 - DNA, 75 bp, synthetic construct
  source 1..75: mol_type = other DNA
gactggtctgcgaactggagagcgctacccgcaacctgcgttctgcatttgatctgccggatgagccgaccggca

SEQ ID NO: 574206 - DNA, 75 bp, synthetic construct
  source 1..75: mol_type = other DNA
gctgacagggtgtacgacatccagaatcgggcgattgaagctgttgtgaccggtgggagagcggaacattttgct

SEQ ID NO: 574207 - DNA, 75 bp, synthetic construct
  source 1..75: mol_type = other DNA
acgtggccgccagcagggcgcagctgattgcccgtacagagattggacgagctaccggcgcgctgacgcaggcca

SEQ ID NO: 574208 - DNA, 75 bp, synthetic construct
  source 1..75: mol_type = other DNA
ggagaaactgaataacgcactggcagccgttaaagcggatggtacgtatcagaaaatcagcgaccagtggttccc

SEQ ID NO: 574209 - DNA, 75 bp, synthetic construct
  source 1..75: mol_type = other DNA
cgcagaacgttcccgccgccagagactcccggtgggcagatgccaacggttttggcgacctgacactgcagttca

SEQ ID NO: 574210 - DNA, 75 bp, synthetic construct
  source 1..75: mol_type = other DNA
cagtctgcaacaggcgcagaggaaaaggctttagaggaacagggcctccatgatgataccgatatgttgctgagt

SEQ ID NO: 574211 - DNA, 75 bp, synthetic construct
  source 1..75: mol_type = other DNA
cagaaacatcaacagaggccagtacgccggaaacgccggcagttgtcacggaggaggacggatttacgctgcagc

SEQ ID NO: 574212 - DNA, 75 bp, synthetic construct
  source 1..75: mol_type = other DNA
gggatggaatttatatcagtatcctttaaatccactacaacaaattgaccctatgggattattgcagacttggga

SEQ ID NO: 574213 - DNA, 75 bp, synthetic construct
  source 1..75: mol_type = other DNA
cgcgtaaaccggaggagacatggtacggctgggacggcgacaggctgacgacggtacagaccgacaccacgcgta

SEQ ID NO: 574214 - DNA, 75 bp, synthetic construct
  source 1..75: mol_type = other DNA
gacaggctgcaccgtgagacggtgcgcagcttcggcagcatggcaggcagtaatgccgcatatgaactgaccagc

SEQ ID NO: 574215 - DNA, 75 bp, synthetic construct
  source 1..75: mol_type = other DNA
ctactttctcagggaaagtacgcagcatatttctttcagatgtatctaaacattggaaactaagagacttaactg

SEQ ID NO: 574216 - DNA, 75 bp, synthetic construct
  source 1..75: mol_type = other DNA
aattacggtgatgtgttgttgcttaagcattctgagcatgaatgcttaaaaatgtattcagacaaatatatagaa

SEQ ID NO: 574217 - DNA, 75 bp, synthetic construct
  source 1..75: mol_type = other DNA
atttcttaaggatttcttaatattaaattatggtgatgtgctattgcttaaacattctgaacgcgaattcttaca

SEQ ID NO: 574218 - DNA, 75 bp, synthetic construct
  source 1..75: mol_type = other DNA
aggaaacagtgcctgaaacagctgtgggaaaacagcagtatgccagccgatgtgtatcagcagttctgtctggca

SEQ ID NO: 574219 - DNA, 75 bp, synthetic construct
  source 1..75: mol_type = other DNA
aggaaacagtacctgaaacagctgtgggaaaacagcagtatgccatccgacatgtatcagcagttctgtctgacg

SEQ ID NO: 574220 - DNA, 75 bp, synthetic construct
  source 1..75: mol_type = other DNA
tcataaagaaaccaataaactttcagtttcttaaggatttactgatattaaactatggtgatgttctgttgctta

SEQ ID NO: 574221 - DNA, 75 bp, synthetic construct
  source 1..75: mol_type = other DNA
ggaaaatattttgcatctaaggcagaaactgataatttaagaaaggagtcatatcctctgaaaagaaaatgtccc

SEQ ID NO: 574222 - DNA, 75 bp, synthetic construct
  source 1..75: mol_type = other DNA
aacttgccatttgtgaagatggtgaggaagtctctggccttgggccagcttatgcttccctggaaaacagacagg

SEQ ID NO: 574223 - DNA, 75 bp, synthetic construct
  source 1..75: mol_type = other DNA
aaataagagtacgcgttgccaattctattggtcagaaaagcatccagatgagcttagggcgatagtatctctccc

SEQ ID NO: 574224 - DNA, 75 bp, synthetic construct
  source 1..75: mol_type = other DNA
atgaaattagctttgatcggtactggcaacatgccgctgatgcagtggattctagatggcaagggcgatgatgcg

SEQ ID NO: 574225 - DNA, 75 bp, synthetic construct
  source 1..75: mol_type = other DNA
acagggaatagtctggtgtacatccctgcctgggaatcgggtcctgctgtctcgtattcctgttgtcccggacag

SEQ ID NO: 574226 - DNA, 75 bp, synthetic construct
  source 1..75: mol_type = other DNA
gcctgcaatgaaggaaatgtggccaacagcgaagagagctgggcaacggatgtgctggtggaggtgagcgcctcc

SEQ ID NO: 574227 - DNA, 75 bp, synthetic construct
  source 1..75: mol_type = other DNA
cgtaaactgacggtgacttttgaggatggtcaggttttgaagatccgcttcgatcaggggatgggctactggcgt

SEQ ID NO: 574228 - DNA, 75 bp, synthetic construct
  source 1..75: mol_type = other DNA
ggaatgtgccgacatatggtggcccattagatagttacaccattccaacaaaggacggtgacggtgagttttcat

SEQ ID NO: 574229 - DNA, 75 bp, synthetic construct
  source 1..75: mol_type = other DNA
ctgtgcgcatcgtggaagctaatgtgccacgcgccgctggcattcgcatcaaaggagaggagcatggaaatcaaa

SEQ ID NO: 574230 - DNA, 75 bp, synthetic construct
  source 1..75: mol_type = other DNA
taatagtggcagatatttctcaacagcacctaaccgaggagaaagaaaaggatcatatccattcaatagcccttg

SEQ ID NO: 574231 - DNA, 75 bp, synthetic construct
  source 1..75: mol_type = other DNA
ccaccacctgcgatggtcacggcctccatcctggagcgccgtggcgacacagcagcccttacgcggctacaggat

SEQ ID NO: 574232 - DNA, 75 bp, synthetic construct
  source 1..75: mol_type = other DNA
tcatctctagccatgatgtctgtgttattccttatcgggatgcaagtcagtcaggagtaattcctacggtaatga

SEQ ID NO: 574233 - DNA, 75 bp, synthetic construct
  source 1..75: mol_type = other DNA
tatcattaccatgatcgacgaacgtgaatttggcaaaaaattacaggcaggcagaaaaagtgtgtcaggagggca

SEQ ID NO: 574234 - DNA, 75 bp, synthetic construct
  source 1..75: mol_type = other DNA
ctggcggatgcgcttcagcagtccggcggcgaagacggtggcagtgtggtgttcccgccggtgctggtgcagatg

SEQ ID NO: 574235 - DNA, 75 bp, synthetic construct
  source 1..75: mol_type = other DNA
ggaaaaactgaataacgcactggcggcgattaaagcggatggcacgtatcagaaaatcagcgatcagtggttccc

SEQ ID NO: 574236 - DNA, 75 bp, synthetic construct
  source 1..75: mol_type = other DNA
aatggcggcaaaaattccgctcggtagcgcattaacacaaagcgacctgctggggctggggttattcaaaaataa

SEQ ID NO: 574237 - DNA, 75 bp, synthetic construct
  source 1..75: mol_type = other DNA
attgtttccagtgaaaatgcgcgtgtcatttgtgccgttattccgactaacgaagaaaaaatgattgctttggat

SEQ ID NO: 574238 - DNA, 75 bp, synthetic construct
  source 1..75: mol_type = other DNA
atggcttccgctctttcgtcatttataaacagaagagaccttgagaaactgaaaggaacaaatagtgatagtcag

SEQ ID NO: 574239 - DNA, 75 bp, synthetic construct
  source 1..75: mol_type = other DNA
aggttgacttgcacttggccaagtggattgtccgcaaacacaagcgaggtagtctggtgcgtgcattcgagtggt

SEQ ID NO: 574240 - DNA, 75 bp, synthetic construct
  source 1..75: mol_type = other DNA
cagatcgctacgactgcttacgtacgggctgctatctctgcattggtcggctcatcacctgaagctcttgatacc

SEQ ID NO: 574241 - DNA, 75 bp, synthetic construct
  source 1..75: mol_type = other DNA
acgcatattccccattgccggggtgacaactaacccgagcattatcgctgccagcaaggagtccatatgggaagt

SEQ ID NO: 574242 - DNA, 75 bp, synthetic construct
  source 1..75: mol_type = other DNA
ggctgaagatatcgccgccgcacgtctgttgggtaaaaccgaagccgagttcctgaaaatgaaagaggaaatgca

SEQ ID NO: 574243 - DNA, 75 bp, synthetic construct
  source 1..75: mol_type = other DNA
cgcaaaaggcacaccggctggcggcagtattgatctgacgaaatacgtgcccgttgaaacgtataacgccctgcg

SEQ ID NO: 574244 - DNA, 75 bp, synthetic construct
  source 1..75: mol_type = other DNA
ctatcgttgttattgtgctactggttatcattttcatcttgccagcatattggagcgtgatcaattttgatcagc

SEQ ID NO: 574245 - DNA, 75 bp, synthetic construct
  source 1..75: mol_type = other DNA
tgcgccatttttgcattactaataagaaaaagcaaaaaacatcgatattcatttttgaacaatggattttctggc

SEQ ID NO: 574246 - DNA, 75 bp, synthetic construct
  source 1..75: mol_type = other DNA
agaccatgagccgcgacgcgcaggggatggtggaagaagcgaagcgcctgcgcgacgctattccgggtattgtgg

SEQ ID NO: 574247 - DNA, 75 bp, synthetic construct
  source 1..75: mol_type = other DNA
tttagaagagctgatggcttgcgacaacaggggtgagagcattttgttcagggctatgcgggacggggatacaga

SEQ ID NO: 574248 - DNA, 75 bp, synthetic construct
  source 1..75: mol_type = other DNA
gaaataccgccgcaaaggcgggctggccacctggcagattgaagccgctgcggcggcgctgggcttcaccattaa

SEQ ID NO: 574249 - DNA, 75 bp, synthetic construct
  source 1..75: mol_type = other DNA
cggcatcggactcttggttttcacagtaattttcaggtttgctctgagtgttgctgacttgctagttgaagttaa

SEQ ID NO: 574250 - DNA, 75 bp, synthetic construct
  source 1..75: mol_type = other DNA
aattagttaatggattaaatagcttgctggaaaatggttatatagaccctaactcggtagacgacgaagctgatg

SEQ ID NO: 574251 - DNA, 75 bp, synthetic construct
  source 1..75: mol_type = other DNA
gggtgacgtggcgggcgcggtgacgggggtgacggacggcgcgggccgccgttttcacctggtgctgaccacaca

SEQ ID NO: 574252 - DNA, 75 bp, synthetic construct
  source 1..75: mol_type = other DNA
agaccgacaccacgcgtatccagacggtaggtgcgccgacgggagtggcctgttcggtgtgtccgggagggatta

SEQ ID NO: 574253 - DNA, 75 bp, synthetic construct
  source 1..75: mol_type = other DNA
gcggcacgattgacagcacgctgctgcgttttgcgggtgaatactacaccgatgcagaaagcgacctgtatgaag

SEQ ID NO: 574254 - DNA, 75 bp, synthetic construct
  source 1..75: mol_type = other DNA
cgcttatcgaacggctggactccacgcaggttgcaagtgacattactggcaacaaagaacatcttgcacacctga

SEQ ID NO: 574255 - DNA, 75 bp, synthetic construct
  source 1..75: mol_type = other DNA
tctctccggaagctgtgttttttacgtcagacatatgatatccgtaacatggaaaactcatggttccggtaatta

SEQ ID NO: 574256 - DNA, 75 bp, synthetic construct
  source 1..75: mol_type = other DNA
gagaaattacaactcagcaaagaggatgtctttaatatactgtcttcattcaacgataaaacttcccaaaacccc

SEQ ID NO: 574257 - DNA, 75 bp, synthetic construct
  source 1..75: mol_type = other DNA
ctgaggatatgcgcagttatgccgatttgctggataaagtcgaatcggtactgttgccagcctatgcgcagaaaa

SEQ ID NO: 574258 - DNA, 75 bp, synthetic construct
  source 1..75: mol_type = other DNA
ccctggttttaagtgcactcagtattcagtcagtacttgccgctgaatacagtgaaaagacgcagtacctggggg

SEQ ID NO: 574259 - DNA, 75 bp, synthetic construct
  source 1..75: mol_type = other DNA
ccgacagacccggtgctgtaccgaagtggagatactacgcctcttcccgacagtctgaccatccacaatgcagag

SEQ ID NO: 574260 - DNA, 75 bp, synthetic construct
  source 1..75: mol_type = other DNA
tggaagtggacggcctgccaccggatgcttttgcggtggtctcagggaaagatcatcagaagttcactttttgta

SEQ ID NO: 574261 - DNA, 75 bp, synthetic construct
  source 1..75: mol_type = other DNA
actttgaaagtttcggttttttcaatcgcaaaggattagataaatacatcatggattttatggatgtaaagaact

SEQ ID NO: 574262 - DNA, 75 bp, synthetic construct
  source 1..75: mol_type = other DNA
atcgcgagttacaaaatgctggagatgtaagaaacgaactggaattatcaggggtatttctgtttacagtaagtc

SEQ ID NO: 574263 - DNA, 75 bp, synthetic construct
  source 1..75: mol_type = other DNA
gctgccgggatatcccgtcctggcgacgtatctgtaagactcttataaagaatgatttctggtgccggacgctgt

SEQ ID NO: 574264 - DNA, 75 bp, synthetic construct
  source 1..75: mol_type = other DNA
gatgccggacagatgaatatgtatctcaactacgccaaagagcactggacgctaccggatgaaaatccgcccatc

SEQ ID NO: 574265 - DNA, 75 bp, synthetic construct
  source 1..75: mol_type = other DNA
cgatttgcatgtgctaccgatcaagaggcaagggaaaaaatcgctaaaattggacgaaaagtttgtgggacatgt

SEQ ID NO: 574266 - DNA, 75 bp, synthetic construct
  source 1..75: mol_type = other DNA
aatccttgccagagaaacggcacatgtaaaattccggccgtggcaggatgataagtggagtcgagtattgacgca

SEQ ID NO: 574267 - DNA, 75 bp, synthetic construct
  source 1..75: mol_type = other DNA
atataccagaaaataacaaagagaaattaatacctactggtatcaaagaacatccggaatatgtaagagaaaata

SEQ ID NO: 574268 - DNA, 75 bp, synthetic construct
  source 1..75: mol_type = other DNA
atgatgtattcggaagtgctacaggaatcggtggtgcatttactggaaaccggcaaaatcagcggggccagcgcc

SEQ ID NO: 574269 - DNA, 75 bp, synthetic construct
  source 1..75: mol_type = other DNA
caccgtgtccgtgaatctctggttcaggataaggtaaaaacaaccaatcagatgcatgcttttttgctggaattt

SEQ ID NO: 574270 - DNA, 75 bp, synthetic construct
  source 1..75: mol_type = other DNA
ccagcggagcgctttatgccaatgagagcggtgcctattttgccctgcgtaagcgtatcacgaagccgcctcatc

SEQ ID NO: 574271 - DNA, 75 bp, synthetic construct
  source 1..75: mol_type = other DNA
gttcagtgaatactgactcggcagaccaggttgtcacactcggtcaatatcgtaccgatattttcaatgctgttg

SEQ ID NO: 574272 - DNA, 75 bp, synthetic construct
  source 1..75: mol_type = other DNA
ggcgcaatggcgaatatgctgcgggcgagggtgaccgatgcgttcggtaatgcgcttgccggacagacggtcagc

SEQ ID NO: 574273 - DNA, 75 bp, synthetic construct
  source 1..75: mol_type = other DNA
ggctggtttgcctaacaccgttctggcgagtgaatataagatgcaactacctgatgaaaaacgactcgcggatga

SEQ ID NO: 574274 - DNA, 75 bp, synthetic construct
  source 1..75: mol_type = other DNA
taaggataacatcagtgatgtaaaacctattttatccgccacattacctacaggagaacgtgggcaggtagtttt

SEQ ID NO: 574275 - DNA, 75 bp, synthetic construct
  source 1..75: mol_type = other DNA
tccaagaagcagcacacgcagcagatcgtgcagtcagcggtgcgatgctgaagtattctaatgggttggtcacgg

SEQ ID NO: 574276 - DNA, 75 bp, synthetic construct
  source 1..75: mol_type = other DNA
ttaccaagcagcaaaaaatattttattaagccttgatgatgaaagttatgctgatattagtataaggaactttcg

SEQ ID NO: 574277 - DNA, 75 bp, synthetic construct
  source 1..75: mol_type = other DNA
ccagaaaaatggcggcgcgttgctgtgaaagatattgatgaattcgttacctgctgtttcaccgaacagggttgt

SEQ ID NO: 574278 - DNA, 75 bp, synthetic construct
  source 1..75: mol_type = other DNA
accgtatgaatccggacagaatactgataacagaagtcagggggggtgaggcatggggattttctgaagattgtc

SEQ ID NO: 574279 - DNA, 75 bp, synthetic construct
  source 1..75: mol_type = other DNA
catagaggataacccggaggttaagttttatcgtcatcagaattatgtgcatttattttatcctagtgaggccgg

SEQ ID NO: 574280 - DNA, 75 bp, synthetic construct
  source 1..75: mol_type = other DNA
tccacttggagctaactacggattatggtctgattgatattgccagggagcgttttgatgccggtgcgcgacggg

SEQ ID NO: 574281 - DNA, 75 bp, synthetic construct
  source 1..75: mol_type = other DNA
gagcctgacacagacagaagctggtgaacgcctgatacaactgacagggccagcacttgaaaaaatcgtagtcgg

SEQ ID NO: 574282 - DNA, 75 bp, synthetic construct
  source 1..75: mol_type = other DNA
tttaatcgaagccgaagatcgtgaaaacgttaacctttcccaatttgaaactgatggccaattacccgtcggcaa

SEQ ID NO: 574283 - DNA, 75 bp, synthetic construct
  source 1..75: mol_type = other DNA
acgcaccgcaaatcacgggtgtcgcacaaacgaatgcaaaggtcactgtctcacagaacaaccgtattatttatc

SEQ ID NO: 574284 - DNA, 75 bp, synthetic construct
  source 1..75: mol_type = other DNA
gatactgaatcctctattttcgactctttccatttttctggcgtttcgttgaaaagcgatgagaatatgttgccg

SEQ ID NO: 574285 - DNA, 75 bp, synthetic construct
  source 1..75: mol_type = other DNA
aaacgctcttattaataataaaaggacgccaatccatctggacctgcaatgggtattaattgataaccaaactgc

SEQ ID NO: 574286 - DNA, 75 bp, synthetic construct
  source 1..75: mol_type = other DNA
aatttaagggcagtaacagcattaatgttactccggtgtttgatgatgtggatggacaggcgtttgacctggtga

SEQ ID NO: 574287 - DNA, 75 bp, synthetic construct
  source 1..75: mol_type = other DNA
ttcgcatcggcgtcgagggtgacacctgcgatggtcgtgtcatcaacggtgatgacattcaggacatggcggata

SEQ ID NO: 574288 - DNA, 75 bp, synthetic construct
  source 1..75: mol_type = other DNA
gtcaaaaggcacagcagaagaggcctcaatgacggcacagcagcacgaaagagaagcaaaagtcagctacctggt

SEQ ID NO: 574289 - DNA, 75 bp, synthetic construct
  source 1..75: mol_type = other DNA
cctggtggactgctctgtggtgcattcgtccgggaaatggaaaggcgtgcggcttgaacaggtggcggcggatgt

SEQ ID NO: 574290 - DNA, 75 bp, synthetic construct
  source 1..75: mol_type = other DNA
ccgctgtcgctgaacatgtgcaggaaaaactgagcgccactgagcagcgcctcgctgagatggaaactgcctttt

SEQ ID NO: 574291 - DNA, 75 bp, synthetic construct
  source 1..75: mol_type = other DNA
ataaaagaagtggcgaatctcaagcgatagtagatgcaagacagttctttagcgaacacccggaatatatatcat

SEQ ID NO: 574292 - DNA, 75 bp, synthetic construct
  source 1..75: mol_type = other DNA
tcgcgaatttgcacaggttactacagttccagcttataaagagatgagtatgtatcaattgcttctcatttcgca

SEQ ID NO: 574293 - DNA, 75 bp, synthetic construct
  source 1..75: mol_type = other DNA
gcccagatgcagcaaatagtatggtttatggtggtattcatgtaggctttagtggtaattacggattccaaattg

SEQ ID NO: 574294 - DNA, 75 bp, synthetic construct
  source 1..75: mol_type = other DNA
ctacaactttaaccgcgacggtacatttagtgcaccacaaggttatgtaactggtactggtaatgattggggtgc

SEQ ID NO: 574295 - DNA, 75 bp, synthetic construct
  source 1..75: mol_type = other DNA
tcctgaacagtttgcgtatacggttccttcttatagtgatcatagaggggtattctgtgaagtattgaaaacgaa

SEQ ID NO: 574296 - DNA, 75 bp, synthetic construct
  source 1..75: mol_type = other DNA
cacgcggtgaatggtacaaagcgcggatgatgggcgaagccaacagcaccgaaattacactggcaggatggcgcg

SEQ ID NO: 574297 - DNA, 75 bp, synthetic construct
  source 1..75: mol_type = other DNA
ctaatgtaacattcacaggtacaccaactttcaattatcgtattaaatcagatagtggtattgattgtacaggta

SEQ ID NO: 574298 - DNA, 75 bp, synthetic construct
  source 1..75: mol_type = other DNA
aaagtcgctgttactaatggtgttaatgatttcactgatacaactacatttactggtaagatttcaaacagtgcc

SEQ ID NO: 574299 - DNA, 75 bp, synthetic construct
  source 1..75: mol_type = other DNA
gaaaacgcagaagaagtgaaagagcgtcaaatcgccgcgttactgtcgtgggaaatggacattatctataaggtc

SEQ ID NO: 574300 - DNA, 75 bp, synthetic construct
  source 1..75: mol_type = other DNA
tgttggttgctaaattctttggcgtgtctggattatgtcattattaatttaacacctgaaaccaaaaagatgtta

SEQ ID NO: 574301 - DNA, 75 bp, synthetic construct
  source 1..75: mol_type = other DNA
aacaaaagatgatattcggattactcccgttggtaaatttttaagacgaacatccttagatgaattaccacaatt

SEQ ID NO: 574302 - DNA, 75 bp, synthetic construct
  source 1..75: mol_type = other DNA
aggtctggagtttatcggttactgcgccaaattctctcgtgttattgccgaacaacaggcggattctgtctccag

SEQ ID NO: 574303 - DNA, 75 bp, synthetic construct
  source 1..75: mol_type = other DNA
tgctgacgtcgatcccggcagataaggctttatcactggttggtaaaggcctgaaggtcattgataacaaaatcc

SEQ ID NO: 574304 - DNA, 75 bp, synthetic construct
  source 1..75: mol_type = other DNA
cctccgcgggtacagaggcctttttaccgctgttcgaacagcgcatggaagatttctcgctgcgcaaagcacttt

SEQ ID NO: 574305 - DNA, 75 bp, synthetic construct
  source 1..75: mol_type = other DNA
agtacagaatataatacacaacatcctgatgaacatatcacgcttgcacctcctgttcgttgtgtcgaaaccttg

SEQ ID NO: 574306 - DNA, 75 bp, synthetic construct
  source 1..75: mol_type = other DNA
ttgtcgcacgttggttggcacgacaaggtcgccgagcctgacgggatatatagatatcagatgggcgtactcgaa

SEQ ID NO: 574307 - DNA, 75 bp, synthetic construct
  source 1..75: mol_type = other DNA
gtggtacgaaactggcagctgcactggttgatgatacccttaacatttcatcccggcgtgaaattcccactccgg

SEQ ID NO: 574308 - DNA, 75 bp, synthetic construct
  source 1..75: mol_type = other DNA
taagcaataaagcatcacgggtgaaattcctgctgcaaatccgcaataccgtctcgcagatcattacgctactgc

SEQ ID NO: 574309 - DNA, 75 bp, synthetic construct
  source 1..75: mol_type = other DNA
tgtaatatcttctatcattggtggggttatgtttatcaatattaaacgaagatttgattgtggctacgatgggaa

SEQ ID NO: 574310 - DNA, 75 bp, synthetic construct
  source 1..75: mol_type = other DNA
aactttcggagcatttccagaagaagatcaagaacaaatgctaaaagatatgaaagacaaaaaagagtcaatgga

SEQ ID NO: 574311 - DNA, 75 bp, synthetic construct
  source 1..75: mol_type = other DNA
ccaagcttttagtgcgtttcctgaggaagaccaagaaaaaatgcttcaagaaatcaaagacaagaaaaaatcaat

SEQ ID NO: 574312 - DNA, 75 bp, synthetic construct
  source 1..75: mol_type = other DNA
cagctggcacctgtgccggtttccccggtaatcacggccccggtggtgcaaccggttaagggaggcttcctgaaa

SEQ ID NO: 574313 - DNA, 75 bp, synthetic construct
  source 1..75: mol_type = other DNA
gcagatgatggccggtccggcgtggcaacttgaagttgatgatgtgcagcgggttgtctgtcacagcctgcggga

SEQ ID NO: 574314 - DNA, 75 bp, synthetic construct
  source 1..75: mol_type = other DNA
tggttttttctttaccaattctggaggacaggtttcattacgaactaaattactaaaaaaaatattggtttcgct

SEQ ID NO: 574315 - DNA, 75 bp, synthetic construct
  source 1..75: mol_type = other DNA
atgtcgatttatatgatcgaatggacaagatcccattcgataacatcactgcatttttcaataaatatctgaata

SEQ ID NO: 574316 - DNA, 75 bp, synthetic construct
  source 1..75: mol_type = other DNA
gcccgaatttctggcgcagtatcgccagtcaaacggccgaccaatgaccgaggcttacgaggattttgttgctga

SEQ ID NO: 574317 - DNA, 75 bp, synthetic construct
  source 1..75: mol_type = other DNA
aggaaagtcagcgttagaaacgaaaatgacgcagaagagttggcgctactgctacgcgaactcaaaactcgcaac

SEQ ID NO: 574318 - DNA, 75 bp, synthetic construct
  source 1..75: mol_type = other DNA
tggcatcccggccagtaagattgagttttatgctgatggtgccgggttgagcgctaaggtaactctcaaagaggc

SEQ ID NO: 574319 - DNA, 75 bp, synthetic construct
  source 1..75: mol_type = other DNA
gataactcatcggacccgagaggctggcccggcgacacatttagtgattatccgtggggatcgaaactctggttg

SEQ ID NO: 574320 - DNA, 75 bp, synthetic construct
  source 1..75: mol_type = other DNA
tcacccataacggcctctcactggatgaggggctggtcactcaggttcttatctgccttttcaccgatgcccgtg

SEQ ID NO: 574321 - DNA, 75 bp, synthetic construct
  source 1..75: mol_type = other DNA
taatgaaggcccgagcatgacgcggagtggctttaacgctgctaataatagaatcaccaatgtagctcctgggat

SEQ ID NO: 574322 - DNA, 75 bp, synthetic construct
  source 1..75: mol_type = other DNA
ctatcaaacatcgctttcgatcatggttacaggaatgctcgttggaatgggatggtggatacaatgcataacgtc

SEQ ID NO: 574323 - DNA, 75 bp, synthetic construct
  source 1..75: mol_type = other DNA
gggatatggaggcgtgggtgtggacagtaccaaaagcgcatagtaaaggcggtgaaaagattgtgcgtccagttc

SEQ ID NO: 574324 - DNA, 75 bp, synthetic construct
  source 1..75: mol_type = other DNA
tgacgattaaatatctgcgcatgatgaaggctgaaactgaccagctcccgctgattattcgcggcgagcgtgatt

SEQ ID NO: 574325 - DNA, 75 bp, synthetic construct
  source 1..75: mol_type = other DNA
ggcgatatattggaatagtagagcatctttattttgttcaactgaattaaactcgaaatcacaatcgcctgcatt

SEQ ID NO: 574326 - DNA, 75 bp, synthetic construct
  source 1..75: mol_type = other DNA
gctgttgagtatttaaaacaagattcacaaatgaaagaaactatagattttttatcaagctctgaagaaactata

SEQ ID NO: 574327 - DNA, 75 bp, synthetic construct
  source 1..75: mol_type = other DNA
gacaacggcgagcgggagaaaacgcagcggcggagcctggcggagaagttgcagcaggaaggaagcgaggacggc

SEQ ID NO: 574328 - DNA, 75 bp, synthetic construct
  source 1..75: mol_type = other DNA
agtacaaaacagatggcatggagccgttacggtcaactgctggccttcacggactgctcggggtacacgacgcgg

SEQ ID NO: 574329 - DNA, 75 bp, synthetic construct
  source 1..75: mol_type = other DNA
ggaccgcatcccggcgggtgtgatacggacggacgacgagcggccccatcactaccattacgacagcctgcaccg

SEQ ID NO: 574330 - DNA, 75 bp, synthetic construct
  source 1..75: mol_type = other DNA
gtgcgcatcagcggcccgcaggagtgccgggagtaccgttacagcggcacgggaaggctgacgggcgtccacact

SEQ ID NO: 574331 - DNA, 75 bp, synthetic construct
  source 1..75: mol_type = other DNA
gcatggcaggcagtaatgccgcatataaactgaccagcacatacacccccgcaggccagttacagagccagcacc

SEQ ID NO: 574332 - DNA, 75 bp, synthetic construct
  source 1..75: mol_type = other DNA
caggactggcgctgatggtcgacgcgcaggccgatacgattattgcagccaaaccgcaggataaactgagcggag

SEQ ID NO: 574333 - DNA, 75 bp, synthetic construct
  source 1..75: mol_type = other DNA
tgaccactcaccggttggcggcgccctgcccgtcgacagtgatatgaccgagcaaaccgccagggcattgcaaca

SEQ ID NO: 574334 - DNA, 75 bp, synthetic construct
  source 1..75: mol_type = other DNA
cccaccactaccactacgacagccagcaccgtctggtgttctacacgcggatacagcacggtgagccgcaggtgg

SEQ ID NO: 574335 - DNA, 75 bp, synthetic construct
  source 1..75: mol_type = other DNA
gtgctgtacacggagggcgaaggtggcctgaagcgggtggtgaagaaggagcatgccgacgggagcatcacccgc

SEQ ID NO: 574336 - DNA, 75 bp, synthetic construct
  source 1..75: mol_type = other DNA
ggctggagcgggagctgcgtgcgggagcggtgagtgcggagagtgaggcatggcttgcgcagtgcgggctgacgg

SEQ ID NO: 574337 - DNA, 75 bp, synthetic construct
  source 1..75: mol_type = other DNA
acgctgaaccgtattactggcgacagcatggctgatgaactctatggccgtggctccatgctgggtgaaatggca

SEQ ID NO: 574338 - DNA, 75 bp, synthetic construct
  source 1..75: mol_type = other DNA
atccatgcattaccgacacaccctaaacaatggcattaattacaacaatagttatggcattttatgtcgatatat

SEQ ID NO: 574339 - DNA, 75 bp, synthetic construct
  source 1..75: mol_type = other DNA
aaaaacatacaactgcatgatactaaaaatcaacgaccctgatgaggcggaatccgttgacatttatccgcaagc

SEQ ID NO: 574340 - DNA, 75 bp, synthetic construct
  source 1..75: mol_type = other DNA
gattggcaattgagttctgctctgataaaaattatatccgtagagatatcggagcatttatactcgggcaaataa

SEQ ID NO: 574341 - DNA, 75 bp, synthetic construct
  source 1..75: mol_type = other DNA
aataagcttgctgcaattatcgctcgttgggtcccgtggattggttgggcttcactgtctgaaccgccccgggtt

SEQ ID NO: 574342 - DNA, 75 bp, synthetic construct
  source 1..75: mol_type = other DNA
atccatgcattaccgacacacagtgaacaatggcattaattataacaatagttatggtattttgtgtcgatatat

SEQ ID NO: 574343 - DNA, 75 bp, synthetic construct
  source 1..75: mol_type = other DNA
aggaagcgactataaagagagtaatagaagattgccgttcagagtataatgaaagctacattcctgaaaagaaca

SEQ ID NO: 574344 - DNA, 75 bp, synthetic construct
  source 1..75: mol_type = other DNA
gcatggttacttcaaaataaggtattactgcccggagcaaccacactagtacgtctcatcagtgaaattcgtgaa

SEQ ID NO: 574345 - DNA, 75 bp, synthetic construct
  source 1..75: mol_type = other DNA
tgttctggtgattgcggcgcggagatggaattgcaggaactgcttaagaataacctgacgtatgcatcagaattt

SEQ ID NO: 574346 - DNA, 75 bp, synthetic construct
  source 1..75: mol_type = other DNA
agaccctggcatctgacacccaggcatcatctggtgatgttgtgtgttcgtatacagaacaaaagatttacacac

SEQ ID NO: 574347 - DNA, 75 bp, synthetic construct
  source 1..75: mol_type = other DNA
gcatgatgcattgaactccagagtcccttcggaagcaatacgagaatacttaactgagcgttatgcatggcaacc

SEQ ID NO: 574348 - DNA, 75 bp, synthetic construct
  source 1..75: mol_type = other DNA
gtcgttgggctgatgattataaccctgcgttttgcaccagcacgttttccgcagctgtgggtcaaagaggcatga

SEQ ID NO: 574349 - DNA, 75 bp, synthetic construct
  source 1..75: mol_type = other DNA
ctgggtgtttactttggtctgattaacggtggttacgccagcctgattgcctggttacccgccttctatattgag

SEQ ID NO: 574350 - DNA, 75 bp, synthetic construct
  source 1..75: mol_type = other DNA
gaagtgtatgactaccccggacgtttcaagggtgcccacgggcagaactttgcccgctggcagatggatggctgg

SEQ ID NO: 574351 - DNA, 75 bp, synthetic construct
  source 1..75: mol_type = other DNA
acaacaaatattcgcaatcgtaactttcaggaacaagatttaaaatttgtaaacaaagaaacctatgagttttgg

SEQ ID NO: 574352 - DNA, 75 bp, synthetic construct
  source 1..75: mol_type = other DNA
tatctccgccgccgtcaccggcaaaatagatctccgcaactggaccgcccccatcgccaaaacggaagcacccac

SEQ ID NO: 574353 - DNA, 75 bp, synthetic construct
  source 1..75: mol_type = other DNA
attaaaaaacctagctaaaatatgtaatggacaggattataaactcgttcaagcagaaaccggttatccagtaat

SEQ ID NO: 574354 - DNA, 75 bp, synthetic construct
  source 1..75: mol_type = other DNA
tgccgcacctgttggcgctgccgcaaaagccacgctgaccgtgctgggtacagcgactgaagccggaacggtggc

SEQ ID NO: 574355 - DNA, 75 bp, synthetic construct
  source 1..75: mol_type = other DNA
ggaaatgtaacgaatttctagagtatttaattcgggaaaaaaaagtatcgataacaacagacgatgaacttattt

SEQ ID NO: 574356 - DNA, 75 bp, synthetic construct
  source 1..75: mol_type = other DNA
agcattgtcactggctaatgcgcaatcagtactggctgctaatgaatccgctaaagatatgacctgccaggagtt

SEQ ID NO: 574357 - DNA, 75 bp, synthetic construct
  source 1..75: mol_type = other DNA
caggccagttccagaaagatgtgaagaaggctcagaagcgtcataaagacatgagcaagcttaaagcccttatga

SEQ ID NO: 574358 - DNA, 75 bp, synthetic construct
  source 1..75: mol_type = other DNA
taggcattgagttgttaactaatgctctgaggcagggattctcaatagcagtactgttattatcgttctgtttgt

SEQ ID NO: 574359 - DNA, 75 bp, synthetic construct
  source 1..75: mol_type = other DNA
gtatcgccaatttgtttgtgattccgttcgccattgccattcgccatttcgcccctcccccccttctggcaactg

SEQ ID NO: 574360 - DNA, 75 bp, synthetic construct
  source 1..75: mol_type = other DNA
aatttggtgcaataacactgccctcaccatctcttccagagcagtcaataattgctcattttctcgaccacgaaa

SEQ ID NO: 574361 - DNA, 75 bp, synthetic construct
  source 1..75: mol_type = other DNA
catcagtcctcttgggtagaaagggtacaattgataaaccattgtatatagacaaggcattttggaccgtcgata

SEQ ID NO: 574362 - DNA, 75 bp, synthetic construct
  source 1..75: mol_type = other DNA
cctttaagcatgctagctattttagaggggcatgcgtacgctcaggagcaattatttcattgggaaatattagaa

SEQ ID NO: 574363 - DNA, 75 bp, synthetic construct
  source 1..75: mol_type = other DNA
gcgatctggcggcattaggtcaggccaactatacggtcagcgccagcgccaccagtgcagcaggcaacaccgcca

SEQ ID NO: 574364 - DNA, 75 bp, synthetic construct
  source 1..75: mol_type = other DNA
agcgtcgtctcggcactggcgaacggcacggtgaccattaacgccagcgtcactgatgccggaggaaacagtggc

SEQ ID NO: 574365 - DNA, 75 bp, synthetic construct
  source 1..75: mol_type = other DNA
aacctggagcacgctcaccgtgaccggcacgacctggcgctataacgacagccgcacgctgactgatggcaatta

SEQ ID NO: 574366 - DNA, 75 bp, synthetic construct
  source 1..75: mol_type = other DNA
ggcgtggtgtacggcgcgcgcgacccggatgacgttgagcgtcttgtggtgccgaaactgctgaaaaccttcccg

SEQ ID NO: 574367 - DNA, 75 bp, synthetic construct
  source 1..75: mol_type = other DNA
agtgcgtacagccacaggtcaggtgacggcgaagtatgtgattgtcgccgggaatgcctacctgggcgataaagt

SEQ ID NO: 574368 - DNA, 75 bp, synthetic construct
  source 1..75: mol_type = other DNA
aaccgttaacgcctcggtcaccaacgccgttggcaacaccggtagcggcacgcgcgatatcaccatcgatgccag

SEQ ID NO: 574369 - DNA, 75 bp, synthetic construct
  source 1..75: mol_type = other DNA
tcgccgttggcactctgacgtggtatggctcggtagtcgcgtttgataaagagggcgacggctatcttgatttct

SEQ ID NO: 574370 - DNA, 75 bp, synthetic construct
  source 1..75: mol_type = other DNA
cgcgtaaaacatccgtcaaacaaacgctgattaatcctggcgacgttacggttgttatttatgagccctctgtgg

SEQ ID NO: 574371 - DNA, 75 bp, synthetic construct
  source 1..75: mol_type = other DNA
ccctggtagcgccagccgtggcgtgacattgaacggcgacgtcccctccgtcaccatcaacacctttgcgggcga

SEQ ID NO: 574372 - DNA, 75 bp, synthetic construct
  source 1..75: mol_type = other DNA
gatctccggcaccagcagcggcggggaagcgggtgatgtggtgagcgttgtgctcaacggcaaaacatacaccac

SEQ ID NO: 574373 - DNA, 75 bp, synthetic construct
  source 1..75: mol_type = other DNA
gctcgcgagatatcacgatcgacgccaatctgcctggcctgcgggtcgataccgtggcgggcgatgatgttatta

SEQ ID NO: 574374 - DNA, 75 bp, synthetic construct
  source 1..75: mol_type = other DNA
cggcagttatccgatcaacgtttcagtcactgaccgcgccggaaacagcggcagccagtcactcaccgtcacggt

SEQ ID NO: 574375 - DNA, 75 bp, synthetic construct
  source 1..75: mol_type = other DNA
acatgcagggctacagcggccacggcgttacctgtacccatcttgccgggcgtttgattgctgaactgctgcgcg

SEQ ID NO: 574376 - DNA, 75 bp, synthetic construct
  source 1..75: mol_type = other DNA
cgtgctggacgccaacggcaactggagcatcggcgtgcctgccagcgtgatttccgcgctggcgcagggcgatgt

SEQ ID NO: 574377 - DNA, 75 bp, synthetic construct
  source 1..75: mol_type = other DNA
gttgataccgtggcgggcgatgatgtggtcaatagcatcgagcacgctcaggcgctggtgataaccggtagcagc

SEQ ID NO: 574378 - DNA, 75 bp, synthetic construct
  source 1..75: mol_type = other DNA
ttaacgccgcagaaaaaggcgctgatttaaccctttccggcactaccactaacgtagagccaggccaaaccgtca

SEQ ID NO: 574379 - DNA, 75 bp, synthetic construct
  source 1..75: mol_type = other DNA
caccacggttgccgcggataatacctgggggctgacgatccctgccgccgatgttgcaaccttgccagacggcgc

SEQ ID NO: 574380 - DNA, 75 bp, synthetic construct
  source 1..75: mol_type = other DNA
acggtcacaactacagcgccaccaccgacgcgtcgggcaactggatcttaaccgtgccggtgagcgatctggcgg

SEQ ID NO: 574381 - DNA, 75 bp, synthetic construct
  source 1..75: mol_type = other DNA
accctttccggcgatgatgtgatcaacgccgttgaaaaaggcgaaacgctggtcgtaagtggcagcaccagcggc

SEQ ID NO: 574382 - DNA, 75 bp, synthetic construct
  source 1..75: mol_type = other DNA
ccaccgagcggctgtcggatgatttagcccgttcgttgattccgaaaaactactgtgtggaagattgtaactatc

SEQ ID NO: 574383 - DNA, 75 bp, synthetic construct
  source 1..75: mol_type = other DNA
agcccgttcgctgatcccgaaaaactactgcgttgaagactgtaactatctgcttgattactaccgtctgactgc

SEQ ID NO: 574384 - DNA, 75 bp, synthetic construct
  source 1..75: mol_type = other DNA
ccgctacaccggcgcgctgttggatcacagcggcggacatattcacccgttgaacctcgccattggcgaagcgga

SEQ ID NO: 574385 - DNA, 75 bp, synthetic construct
  source 1..75: mol_type = other DNA
cgctactaccgatagcaacggcaactggagcgccacggtgccagcctcggcggtcagtgcattgggtgaagccaa

SEQ ID NO: 574386 - DNA, 75 bp, synthetic construct
  source 1..75: mol_type = other DNA
cagcgcgctgcccggcgtgaccattaacccggtggcaaccgacgatattattaacgccgccgaagcgggcgtggc

SEQ ID NO: 574387 - DNA, 75 bp, synthetic construct
  source 1..75: mol_type = other DNA
caataccgccgcgccccttatcggcattaacagcattgcgggcgatgatgtgattaacgccagcgaaaaaggggc

SEQ ID NO: 574388 - DNA, 75 bp, synthetic construct
  source 1..75: mol_type = other DNA
tggcaacagcgccacggcaacacatgaatacagcgtcgatagcgccgcgccaacggtgaccatcaacaccattgc

SEQ ID NO: 574389 - DNA, 75 bp, synthetic construct
  source 1..75: mol_type = other DNA
tgcaagtcacctaaaagtaacctagatttcaaggtgacttgcaccaaaaaaaaacaacgccccacagtgctggaa

SEQ ID NO: 574390 - DNA, 75 bp, synthetic construct
  source 1..75: mol_type = other DNA
accaaattcatttcgcttaaaacgtctagaggtactctagcagttttttgttgtgacttgttgttggttgtacct

SEQ ID NO: 574391 - DNA, 75 bp, synthetic construct
  source 1..75: mol_type = other DNA
ccaagggggctaatggacagtttatatcgagccctgacttcaccactaaaggtaaaggcgtgttcgacgttacaa

SEQ ID NO: 574392 - DNA, 75 bp, synthetic construct
  source 1..75: mol_type = other DNA
acttcgccttaaaaagcggctccaccacattaacgtcattaacagcagtgaccgatcaaaacggaatcgcgacaa

SEQ ID NO: 574393 - DNA, 75 bp, synthetic construct
  source 1..75: mol_type = other DNA
accgcctcaacattgttcataacttcatgtggaacccttgccgcaactgtttgtgattttgcgtttactgctttt

SEQ ID NO: 574394 - DNA, 75 bp, synthetic construct
  source 1..75: mol_type = other DNA
gttcctcacaccacggcgctgatggtgattattctgattctttggtcttgcggcgctggcggtattcaacttccc

SEQ ID NO: 574395 - DNA, 75 bp, synthetic construct
  source 1..75: mol_type = other DNA
tgaccgggtattgcagcgcacagggggagcagtgggaataccgctacgacgccagcggcaggcggacggaaaaac

SEQ ID NO: 574396 - DNA, 75 bp, synthetic construct
  source 1..75: mol_type = other DNA
cgcggacgaatcatgcggtgagcgacctgacgggccgtccgctgatgctctttaacagtgaaggtaaaaccgtct

SEQ ID NO: 574397 - DNA, 75 bp, synthetic construct
  source 1..75: mol_type = other DNA
cggaaacagagcggttccggtgggacagccgggaccagctgaccgggtattgcagcgcacagggtgagcagtggg

SEQ ID NO: 574398 - DNA, 75 bp, synthetic construct
  source 1..75: mol_type = other DNA
ggagtggcagtaccgctatgatgagcgcggcctgctcagcaacatcaccgacccagccgggcagacgtggacaca

SEQ ID NO: 574399 - DNA, 75 bp, synthetic construct
  source 1..75: mol_type = other DNA
atggaagctatgggattagctcgttctacaacatggaaaggatatagagcacatcatattataccgaaagaatta

SEQ ID NO: 574400 - DNA, 75 bp, synthetic construct
  source 1..75: mol_type = other DNA
gcctgcccgcagacaccggctacccggacccgcgcggggaactggacccggaagccgaccccggcctgctgtatg

SEQ ID NO: 574401 - DNA, 75 bp, synthetic construct
  source 1..75: mol_type = other DNA
agcgcaggtggaatgcaaacagtagatatatcgctagtggcaggcccagcagacgcctcgcagtccatccttaag

SEQ ID NO: 574402 - DNA, 75 bp, synthetic construct
  source 1..75: mol_type = other DNA
aacagttaatattgccgtatccggggaaagtagcgccgaaaatccggtgagcattacgcatccggttatggtcga

SEQ ID NO: 574403 - DNA, 75 bp, synthetic construct
  source 1..75: mol_type = other DNA
ttaatgccgcagaaaaaggcgcgccgttaacgctgactggcaccaggcagttggtggaaaccgggcaaaccgtgg

SEQ ID NO: 574404 - DNA, 75 bp, synthetic construct
  source 1..75: mol_type = other DNA
tcgacctggttcagcacaccttcaacctgaacaactattacacgctatcttcgctcatcaaccaggggaatggga

SEQ ID NO: 574405 - DNA, 75 bp, synthetic construct
  source 1..75: mol_type = other DNA
agcgggcaaccccggcagcgccagccagaatctggcggtagacaccaccgcgccggttctcaccattaacaccgt

SEQ ID NO: 574406 - DNA, 75 bp, synthetic construct
  source 1..75: mol_type = other DNA
gcggcagcaccacccatacggtgaatgtcgaatcgctcctgcctggggtgatcattaataccgtggcgggcgatg

SEQ ID NO: 574407 - DNA, 75 bp, synthetic construct
  source 1..75: mol_type = other DNA
ggcgtacagcgccactaccgatagttccggcaactggagcgttaccgtgcccgcttcggcggtcggcgcgctggg

SEQ ID NO: 574408 - DNA, 75 bp, synthetic construct
  source 1..75: mol_type = other DNA
cacattaatatccataacagcggtgtgatgtcgggaaatgtcaccactgcaggtgatatgaacgttatgcctggg

SEQ ID NO: 574409 - DNA, 75 bp, synthetic construct
  source 1..75: mol_type = other DNA
aacgtgactggcgaactgcgtaatagcataagcgggaagggtatcgtgagcgcaaccgccaggacagatgtagag

SEQ ID NO: 574410 - DNA, 75 bp, synthetic construct
  source 1..75: mol_type = other DNA
aacaaccagtcatcactgaaaggggactttaccgatagtgctgagctacatcttgttctgcacgatatatcaggc

SEQ ID NO: 574411 - DNA, 75 bp, synthetic construct
  source 1..75: mol_type = other DNA
tatgggagcggcttcgtgatgagcatggagtagctacgtcaaaacttcgttttgaccctattggagaatactgga

SEQ ID NO: 574412 - DNA, 75 bp, synthetic construct
  source 1..75: mol_type = other DNA
cttcgcctgactggtgggggcgcaaaatctggcgcctgcgttgtgactggcgcgaaaaccagctgcgagccgttg

SEQ ID NO: 574413 - DNA, 75 bp, synthetic construct
  source 1..75: mol_type = other DNA
gttcctggttctatggaatttgatctcaacaaaaactggcaactggcgtgtgagtgtatgcgccaggcgttgcac

SEQ ID NO: 574414 - DNA, 75 bp, synthetic construct
  source 1..75: mol_type = other DNA
accgatggcaactacaattatcaggtgcgggtgatcgacaccgccggaaatatcggcgcgaccgccagccagata

SEQ ID NO: 574415 - DNA, 75 bp, synthetic construct
  source 1..75: mol_type = other DNA
cgcaacaccaacacggtgagctacggcacttcgctacacctgcgcatcaccgatcccaacggcattaacgtctat

SEQ ID NO: 574416 - DNA, 75 bp, synthetic construct
  source 1..75: mol_type = other DNA
cggcaccagcgatcagcctgcaggtacggcgatcaccgtgacgctgaacggacaaaactacagcgccactactga

SEQ ID NO: 574417 - DNA, 75 bp, synthetic construct
  source 1..75: mol_type = other DNA
gtagtggcatttgataaagagggcgacggctatctcgacttctggattggcgacgcgggcgggccggactccaac

SEQ ID NO: 574418 - DNA, 75 bp, synthetic construct
  source 1..75: mol_type = other DNA
ccacgctggcgcaaattaccagccagaccacgcgcgataccacgccgattatcagcggggtgatcacggcggcac

SEQ ID NO: 574419 - DNA, 75 bp, synthetic construct
  source 1..75: mol_type = other DNA
agcgcggcggtcagcgacaaagccggaaatccggcttcagcaacgcataatctgacggtggaccttgccgctccg

SEQ ID NO: 574420 - DNA, 75 bp, synthetic construct
  source 1..75: mol_type = other DNA
caactacacggtaacggcggcggtgaccagcggtatcggcaacagcgccaccgccagccataacgtactggtcga

SEQ ID NO: 574421 - DNA, 75 bp, synthetic construct
  source 1..75: mol_type = other DNA
acgggcgcgacgacgggtaacacggtttccgtgacgattggcacgaccacttacaccaccgtgctggacgccaac

SEQ ID NO: 574422 - DNA, 75 bp, synthetic construct
  source 1..75: mol_type = other DNA
attaataccgttgcgggcgatgacattatcaacgccgctgaaattggtgttaaccagaccattagcggacaggtt

SEQ ID NO: 574423 - DNA, 75 bp, synthetic construct
  source 1..75: mol_type = other DNA
accaccaacggcacgcagtggacctacaccgacggccgcacgctgaccgacggcagctacgtttatcaggtgcgg

SEQ ID NO: 574424 - DNA, 75 bp, synthetic construct
  source 1..75: mol_type = other DNA
caataccgcgctgcctggtgtcatcattaatccggtggcgagcgacgatattattaacgccgccgaatcgggcgt

SEQ ID NO: 574425 - DNA, 75 bp, synthetic construct
  source 1..75: mol_type = other DNA
agtgcagcaggcaacaccgccagcagccaggcgaatttactggtcgacagcggcctgccgggcgtcaccatcaac

SEQ ID NO: 574426 - DNA, 75 bp, synthetic construct
  source 1..75: mol_type = other DNA
agcgccaccagtgcggcaggcaacaccgccagcagccaggcgaatttactggtcgacagcggcctgccgggtgtc

SEQ ID NO: 574427 - DNA, 75 bp, synthetic construct
  source 1..75: mol_type = other DNA
taaacatagggaaatctatgttagaggagttgccaattaacataccaataaatggtatttttaattcacacatag

SEQ ID NO: 574428 - DNA, 75 bp, synthetic construct
  source 1..75: mol_type = other DNA
cgctgggaaaataaggtaaaatactcccttataattagtcttgaagttccagatgaaacagtaaatatatacact

SEQ ID NO: 574429 - DNA, 75 bp, synthetic construct
  source 1..75: mol_type = other DNA
gctgctttgcaactacttccaccagaaacaccagttaaaatgcgtgtcactctttcatatttcattgaacccaat

SEQ ID NO: 574430 - DNA, 75 bp, synthetic construct
  source 1..75: mol_type = other DNA
gagcgggtgtcaggagctgccagtggagcgctttatgccaatgaaagcggtgcctattttgccctgcataaacga

SEQ ID NO: 574431 - DNA, 75 bp, synthetic construct
  source 1..75: mol_type = other DNA
atgctgatgctgcaccggagcgctcgcgtcagtgacgttgccagaacgctctgtttcgcccgttcatctgtcggg

SEQ ID NO: 574432 - DNA, 75 bp, synthetic construct
  source 1..75: mol_type = other DNA
cactcaagcaacatacaatagccaattccatgttactagtgtatttgatgaaattgctatacgtgcaacactgca

SEQ ID NO: 574433 - DNA, 75 bp, synthetic construct
  source 1..75: mol_type = other DNA
cggatggatccaccaacgcacgttaccggcttttatctgctcgatgcgctgcttgaaggcaacggtgaagtcttc

SEQ ID NO: 574434 - DNA, 75 bp, synthetic construct
  source 1..75: mol_type = other DNA
gaaaatattcgccagcaactgggactggaccagccactgtatgtacagttttaccgctacgtcagcgacctgttt

SEQ ID NO: 574435 - DNA, 75 bp, synthetic construct
  source 1..75: mol_type = other DNA
tcagcacctttgaaggcgatcccgccgtcacctgggcgccgttccagtctggcaagcgtcaggtcaccagtttta

SEQ ID NO: 574436 - DNA, 75 bp, synthetic construct
  source 1..75: mol_type = other DNA
cgcttatactgaactcaccacgattgatgaccccactttcgctggatggtcagcttttgcattccctggcgatgt

SEQ ID NO: 574437 - DNA, 75 bp, synthetic construct
  source 1..75: mol_type = other DNA
tatgctaatggctcagtacccagaatattggcctgaaactattaggggattacttgttcatacagcaagatggac

SEQ ID NO: 574438 - DNA, 75 bp, synthetic construct
  source 1..75: mol_type = other DNA
actcttggaggccaaccgtcctcatggtctgcagagattgacaagtttagttttggtttagaggatgatatccgc

SEQ ID NO: 574439 - DNA, 75 bp, synthetic construct
  source 1..75: mol_type = other DNA
cagcctcagcgcgccagtgattagcatcaacaccatcgcgggcgatgatgtgatcaacgcgacggaaaaaggatc

SEQ ID NO: 574440 - DNA, 75 bp, synthetic construct
  source 1..75: mol_type = other DNA
gcggcggcgggcagcaccgtcaccgttgaactgggcggtaaaacttacaccgccaccgtgcagccagatttaagc

SEQ ID NO: 574441 - DNA, 75 bp, synthetic construct
  source 1..75: mol_type = other DNA
cgatcaaaccatcagcggggtggtcacccgcgccgccgctggcgatacggtcaccgtgacgctgggcgggaacac

SEQ ID NO: 574442 - DNA, 75 bp, synthetic construct
  source 1..75: mol_type = other DNA
ggcgatacggtcaccgtgacgctgggcggtaacacttacacagcgcaggttcagcccgatttaagctggagtatc

SEQ ID NO: 574443 - DNA, 75 bp, synthetic construct
  source 1..75: mol_type = other DNA
gcggctccagcggtctggcgaccggcaccacggtcactgtgatgttgaacggcctggcgtacagagccaccaccg

SEQ ID NO: 574444 - DNA, 75 bp, synthetic construct
  source 1..75: mol_type = other DNA
gcgctgggtgaagctaactacacagtaaccgcgaacgtcaccgatacggcaggcaacagcaactccgccagccat

SEQ ID NO: 574445 - DNA, 75 bp, synthetic construct
  source 1..75: mol_type = other DNA
gtaaccgtcacgcttaatggcgtcagctataccggcaccgttcaggcggacggaagctggagcgtcagcgtaccg

SEQ ID NO: 574446 - DNA, 75 bp, synthetic construct
  source 1..75: mol_type = other DNA
taccgcgccagatcccgcggtgaaaaccatcgccatcagcgcgatcaccaccgatacgggcttgatcactaacga

SEQ ID NO: 574447 - DNA, 75 bp, synthetic construct
  source 1..75: mol_type = other DNA
cactggcagcagcacggcggaagcggggcagacggtgaccgtcaccctcaatggcgaaaactatactggcacggt

SEQ ID NO: 574448 - DNA, 75 bp, synthetic construct
  source 1..75: mol_type = other DNA
gtgggcaatacaggtaacggcacgcgcgaaatcaccatcgacgcgaatctccccggtctgcgggtcgacgccgtg

SEQ ID NO: 574449 - DNA, 75 bp, synthetic construct
  source 1..75: mol_type = other DNA
ccgaagccggagcggcactgaccatcaccggcagcagcacggcggaagcggggcagacggtcaccgtcacgctca

SEQ ID NO: 574450 - DNA, 75 bp, synthetic construct
  source 1..75: mol_type = other DNA
acacgcgacaccacgctgaccgtgcgcggcacgctcggcgcggcgcttgccgccgatgaacgggcgcaaatcagc

SEQ ID NO: 574451 - DNA, 75 bp, synthetic construct
  source 1..75: mol_type = other DNA
taccaggtgcgggtgatcgacaccgccggaaatatcggcgcgaccgccagccagatagtcactgtggataccacc

SEQ ID NO: 574452 - DNA, 75 bp, synthetic construct
  source 1..75: mol_type = other DNA
gagaaaggcagcgatttgcagctctccggcaccacctccggcgtggaagcggggcagaccattaccgttattttc

SEQ ID NO: 574453 - DNA, 75 bp, synthetic construct
  source 1..75: mol_type = other DNA
caaagatcaatatcctaaagggttaggaaaagctggcgagattttagtcgaagttaaaggtaatgtatcaaaagt

SEQ ID NO: 574454 - DNA, 75 bp, synthetic construct
  source 1..75: mol_type = other DNA
aaatcaatgaccgactcgatgctgaatactataacccggcagcattgagcacgttgaagaagatggaaaccaaag

SEQ ID NO: 574455 - DNA, 75 bp, synthetic construct
  source 1..75: mol_type = other DNA
ggatgtgatggtgcgcaggcgttatacccccctgagtacctgtcgtgcacaagatggtttccggttttcttttta

SEQ ID NO: 574456 - DNA, 75 bp, synthetic construct
  source 1..75: mol_type = other DNA
gtcaattacctttaacgccatcagcggcgataacgtcctgaatgccgatgaaaaaggccagccgttgaccatcag

SEQ ID NO: 574457 - DNA, 75 bp, synthetic construct
  source 1..75: mol_type = other DNA
gattcaacagaatgaaatcgccgatattctgcaaatcagccgctcatattatggatttgatgcgcaagggtttga

SEQ ID NO: 574458 - DNA, 75 bp, synthetic construct
  source 1..75: mol_type = other DNA
aaatcgatgatcggttagatgctgaatactataacccggcagcattgagcacgttgaagaagatggaaaccaaag

SEQ ID NO: 574459 - DNA, 75 bp, synthetic construct
  source 1..75: mol_type = other DNA
caggcgggtaaccctggcagcgccagcaaaggtgtgaccgtcgataccaccgcgcccgtcatcagctttaacacc

SEQ ID NO: 574460 - DNA, 75 bp, synthetic construct
  source 1..75: mol_type = other DNA
gttaacgctcaccggcagcacttctggtgtcgaagccggacaaacggtcaccgtcacctttggcggcaaaactta

SEQ ID NO: 574461 - DNA, 75 bp, synthetic construct
  source 1..75: mol_type = other DNA
gacagttccggcggcggatctcgcaaccttgccagatggcgcagcaaacgtacaagccagcgtcagcaatgtagc

SEQ ID NO: 574462 - DNA, 75 bp, synthetic construct
  source 1..75: mol_type = other DNA
aacatcggtgattttgtcaaagtcacccagagcggcagcgacactatcgtgcagatcgaccgcgatggcacgggc

SEQ ID NO: 574463 - DNA, 75 bp, synthetic construct
  source 1..75: mol_type = other DNA
caaaacttacacttcgcagccaggcggcgcggtggtggtcgatccggcgcacaacacctggtatgtgcaactgcc

SEQ ID NO: 574464 - DNA, 75 bp, synthetic construct
  source 1..75: mol_type = other DNA
accaccgcgccgctggcgagcaaaaccatcaccattgcgggcatcagcgatgacaccgggttaagcagcagcgat

SEQ ID NO: 574465 - DNA, 75 bp, synthetic construct
  source 1..75: mol_type = other DNA
gcagcgtgagtgaagaaagccagcagtggcttgcgcagtgcgggctgacggcggaacagatggccgcgcaactgg

SEQ ID NO: 574466 - DNA, 75 bp, synthetic construct
  source 1..75: mol_type = other DNA
gatgatgtggttaacagcatcgaacacggtcaggcactggtgataactggtagcagcagcgggctggcggcgggc

SEQ ID NO: 574467 - DNA, 75 bp, synthetic construct
  source 1..75: mol_type = other DNA
gaccatcaacaccgtctccggcgatgacattattaacgccgccgaacacggacaggcgctggtgatctccggctc

SEQ ID NO: 574468 - DNA, 75 bp, synthetic construct
  source 1..75: mol_type = other DNA
ctccggcaactggagcgtcaccgttccggcatcggcggtgacagcattaggccaggccaactacacggtaacggc

SEQ ID NO: 574469 - DNA, 75 bp, synthetic construct
  source 1..75: mol_type = other DNA
aggcactaatactgctggaaccacaaccagcattactcatccggtcacggtcgatctcgcggccgtggcgattac

SEQ ID NO: 574470 - DNA, 75 bp, synthetic construct
  source 1..75: mol_type = other DNA
aacatcggcaacggcggccacgacaccttgctctataaactgctcaacgccagcgacgccactggcggcaacggc

SEQ ID NO: 574471 - DNA, 75 bp, synthetic construct
  source 1..75: mol_type = other DNA
gagcgacaaagcaggcaacccggcaagcgccgaccacgcgctggcggtggacgttaccgcgccggatctcaccat

SEQ ID NO: 574472 - DNA, 75 bp, synthetic construct
  source 1..75: mol_type = other DNA
actaatgacgaatgccaattggtaagagactctctaaatgaagattctgtttcttcagaaaagatagatgacatc

SEQ ID NO: 574473 - DNA, 75 bp, synthetic construct
  source 1..75: mol_type = other DNA
gaacaacacgaaggggaaagattgttaaaggagagccaacaccgcaatctagggcttgtttaacgattcaggagg

SEQ ID NO: 574474 - DNA, 75 bp, synthetic construct
  source 1..75: mol_type = other DNA
cgggcgcttttaggtagtgtggctaatacaactgttttgccgggtgatgttttcgaaatagactcaactgtcgct

SEQ ID NO: 574475 - DNA, 75 bp, synthetic construct
  source 1..75: mol_type = other DNA
agggagagtatcgacaaaagtctcgaggataatatttataaatttaatatgatagaacaaagcggcctgctcgat

SEQ ID NO: 574476 - DNA, 75 bp, synthetic construct
  source 1..75: mol_type = other DNA
gaatttagctcactccttgtagatgcagaaaggcaagttctggagggaagttcatttgttttatgttgcggtgaa

SEQ ID NO: 574477 - DNA, 75 bp, synthetic construct
  source 1..75: mol_type = other DNA
tatttgctgatttttcagaacatacatttaaacaaaattactatattctgagagcagtaggaaataatgaggctg

SEQ ID NO: 574478 - DNA, 75 bp, synthetic construct
  source 1..75: mol_type = other DNA
accagcattactcatccggtcacggtcgatctcgcggccgtggcgattaccatcaacaccctttccactgacgat

SEQ ID NO: 574479 - DNA, 75 bp, synthetic construct
  source 1..75: mol_type = other DNA
aaacctacaccaccacgctggacgcttccggcaactggagcgtcggcgttccggcggcagacgttactgcgcttg

SEQ ID NO: 574480 - DNA, 75 bp, synthetic construct
  source 1..75: mol_type = other DNA
gcaggcaacatcgccagcagccaggcgaatttactggtcgatagcggcctgccgggcgtcaccatcaacaccgtg

SEQ ID NO: 574481 - DNA, 75 bp, synthetic construct
  source 1..75: mol_type = other DNA
ttaacgacattctgaccggcagcagcggcgataaccaactggaagggcgcggcggcaacgacacgctcaacatcg

SEQ ID NO: 574482 - DNA, 75 bp, synthetic construct
  source 1..75: mol_type = other DNA
tgaccatcaccggcagcagcacggcggaagtggggcagacggtgaccgtcacgcttaatggcgcaaactatactg

SEQ ID NO: 574483 - DNA, 75 bp, synthetic construct
  source 1..75: mol_type = other DNA
taataccattgcgggcgatgacattattaatgccatcgaacacggtcaggcgctggtcgtcagcggaaccagcac

SEQ ID NO: 574484 - DNA, 75 bp, synthetic construct
  source 1..75: mol_type = other DNA
gctaacggtgcctggagcgtgcaggtgccgaccgccgatgcacaggcgttaggcgaagggaatcaggcagtgctg

SEQ ID NO: 574485 - DNA, 75 bp, synthetic construct
  source 1..75: mol_type = other DNA
atgtgctggtcaacagcgccttgcctgccgttaccattaacgcggtggcgactgacgatattattaacgctgccg

SEQ ID NO: 574486 - DNA, 75 bp, synthetic construct
  source 1..75: mol_type = other DNA
gatgtcagcgcctggcctgcgggatcggtgacgattgcggcgagcggtagcacctctgccggaaatccggtaagc

SEQ ID NO: 574487 - DNA, 75 bp, synthetic construct
  source 1..75: mol_type = other DNA
ctgaccattaacgggcaaacctatgttgcggcggtgctggcggatggcacctggagcgtcggcgttccggcggtg

SEQ ID NO: 574488 - DNA, 75 bp, synthetic construct
  source 1..75: mol_type = other DNA
ggacgtggttgatttccggctttcgacggtgggcgtgacggctaacttaagcagcactgccgcgcaggccaccgg

SEQ ID NO: 574489 - DNA, 75 bp, synthetic construct
  source 1..75: mol_type = other DNA
cgtcgatagccaggccccggccttaagcattgatccactgaccgctgataacatcattaacgccgccgaaagcgg

SEQ ID NO: 574490 - DNA, 75 bp, synthetic construct
  source 1..75: mol_type = other DNA
agagcaacgggagctggagcgtgaacgtgcctgcggcggatgttgcggcactcagtgatggcaccagctacacgg

SEQ ID NO: 574491 - DNA, 75 bp, synthetic construct
  source 1..75: mol_type = other DNA
gtattactagctgcaatgcgtagaagtggaaataattggtcattaagtagttattttgatgattctccttttgag

SEQ ID NO: 574492 - DNA, 75 bp, synthetic construct
  source 1..75: mol_type = other DNA
tctcaatcttgctggcgattatgattttaatacagagttgtcagggaatggtgctcttatcaaagataactcagg

SEQ ID NO: 574493 - DNA, 75 bp, synthetic construct
  source 1..75: mol_type = other DNA
taaccagtatatctctgctggcgctaatgccactgaaaccattgtcagtttcggcggtttccagcgcgttaattc

SEQ ID NO: 574494 - DNA, 75 bp, synthetic construct
  source 1..75: mol_type = other DNA
tcatggatatcctgatgatatacctgatgagcaggataatgatctgggcagtcgtgatattccgtcatggcggcg

SEQ ID NO: 574495 - DNA, 75 bp, synthetic construct
  source 1..75: mol_type = other DNA
accttagggattatgggaggatacgcgaatgcaaaaggtaaaacgataaatcacacgagcaacaaagctgccaga

SEQ ID NO: 574496 - DNA, 75 bp, synthetic construct
  source 1..75: mol_type = other DNA
cagtgccgtgaatgatagtacacagcctgagtcggcatctgtgtggatgaagattacgggtggaagaacctctgg

SEQ ID NO: 574497 - DNA, 75 bp, synthetic construct
  source 1..75: mol_type = other DNA
tggtggggtgcttgaaggagataattcccttacggatcgtctggtggtgaaaggtaatacctctggtcaaagtga

SEQ ID NO: 574498 - DNA, 75 bp, synthetic construct
  source 1..75: mol_type = other DNA
ccccgacggtgagcacagagccggacggcacggtggaaatcagtgtcaccagccagacggcggggatcagtacag

SEQ ID NO: 574499 - DNA, 75 bp, synthetic construct
  source 1..75: mol_type = other DNA
aaggagaaaacttaaactcttatctacatattaatggttggtatgtagacgggcaaccgtcttataccatccttc

SEQ ID NO: 574500 - DNA, 75 bp, synthetic construct
  source 1..75: mol_type = other DNA
gaagcgaacttgaatgcgcaactgaagatggctggttggagcgatgccaattattcaaaaaactacactattaac

SEQ ID NO: 574501 - DNA, 75 bp, synthetic construct
  source 1..75: mol_type = other DNA
aagagggaggagagggacatataaagattatgagtcaacaaaggttctatctggaacaaaattcacctacgacct

SEQ ID NO: 574502 - DNA, 75 bp, synthetic construct
  source 1..75: mol_type = other DNA
tgatatatcggattccactcggtggtggaggatgttagagaataaattcatcatacgaggaaataaaaaaactcg

SEQ ID NO: 574503 - DNA, 75 bp, synthetic construct
  source 1..75: mol_type = other DNA
gttgatgcaatttgtaatcattacgcctacttccttagaaataaaaccctgcatggagatcaaacagatcattct

SEQ ID NO: 574504 - DNA, 75 bp, synthetic construct
  source 1..75: mol_type = other DNA
atgcacaggttaaccagaaagggcaattaaatatatttacaggaaatgcggttggtactgtccttaatcaggacg

SEQ ID NO: 574505 - DNA, 75 bp, synthetic construct
  source 1..75: mol_type = other DNA
gactggaacgctacaacggtctgccgtcaatggagattcagggggaagccgcgccaggaaccagttccggcgatg

SEQ ID NO: 574506 - DNA, 75 bp, synthetic construct
  source 1..75: mol_type = other DNA
ggtaaaggtgttgttgaagcgacactaatggcagtacgtatgcgtctgcgtcctatcctgatgacctctctcgcc

SEQ ID NO: 574507 - DNA, 75 bp, synthetic construct
  source 1..75: mol_type = other DNA
aaccctgattgggcgatttctttcaaagaaggaagtgttaaacacatttactttattgcagagactaaaggaacg

SEQ ID NO: 574508 - DNA, 75 bp, synthetic construct
  source 1..75: mol_type = other DNA
tattggtgcgagtgtggatactggtgctatggagcgatatcctgatttatatagtggtaatgaatcatttgaagt

SEQ ID NO: 574509 - DNA, 75 bp, synthetic construct
  source 1..75: mol_type = other DNA
cacctgcctttttcccgttaatcgacaaactggcggcaaaagccaatacccaactggcaatcatcaccgaagtgc

SEQ ID NO: 574510 - DNA, 75 bp, synthetic construct
  source 1..75: mol_type = other DNA
accgcgatggttctttggtttggaaagccagaagctctgaatttttcaacaacaaaaagaatcgcaactatcaca

SEQ ID NO: 574511 - DNA, 75 bp, synthetic construct
  source 1..75: mol_type = other DNA
gcggtagataccggttttaaaaatgctgagctcacactcaatgaggttgccttgcttgataacatccaacaggca

SEQ ID NO: 574512 - DNA, 75 bp, synthetic construct
  source 1..75: mol_type = other DNA
cctatcaggctgccgccgtgcaggcagttatagatatttttcaggggcagccaccggcctctaatgcggccatga

SEQ ID NO: 574513 - DNA, 75 bp, synthetic construct
  source 1..75: mol_type = other DNA
cgtgttgttgccggagcatatgattacactttacaaaaagggaatacaaacggaacaaatccgaagggctggtat

SEQ ID NO: 574514 - DNA, 75 bp, synthetic construct
  source 1..75: mol_type = other DNA
acgaacaactcaaagctggacaaagtttcaaggtgaaaaacactgagactgaaactcatcaatcgagcattcatt

SEQ ID NO: 574515 - DNA, 75 bp, synthetic construct
  source 1..75: mol_type = other DNA
cattttgctcagaattacgacggtaaaaaggcccggttctttatctataactcgaaacaattgcaccagttagag

SEQ ID NO: 574516 - DNA, 75 bp, synthetic construct
  source 1..75: mol_type = other DNA
aaccaatgcctatctctatttacaagccatcgaaatctcaaacaaaaaaccgccaatcgcggttgtggagttcga

SEQ ID NO: 574517 - DNA, 75 bp, synthetic construct
  source 1..75: mol_type = other DNA
gtattcctacgggaccagtgcccaggatgtcatttttgcatacctgatggagagaattgggaaaataacaggcta

SEQ ID NO: 574518 - DNA, 75 bp, synthetic construct
  source 1..75: mol_type = other DNA
ttatcggtttgccgaaagatcatcccgtcacgctaaatgttgcacaacaatatttagcgttggatgctgaaaatt

SEQ ID NO: 574519 - DNA, 75 bp, synthetic construct
  source 1..75: mol_type = other DNA
attgctaaagccagcaaaggagacaaggttaattctgttgtattggatgacattggtgctgaaattaataacgaa

SEQ ID NO: 574520 - DNA, 75 bp, synthetic construct
  source 1..75: mol_type = other DNA
ggtatacacgccggcgcgaaaaattcacctgtaccactgcgaccatcgcggcctgccgctggcccttatcagcac

SEQ ID NO: 574521 - DNA, 75 bp, synthetic construct
  source 1..75: mol_type = other DNA
gttctgcgcgcagcaactgcccgcattgagtggatttttgaaacatttccgtcggtatgtttgtctttttccgga

SEQ ID NO: 574522 - DNA, 75 bp, synthetic construct
  source 1..75: mol_type = other DNA
tggatttttgaaacatttccatcagtttgtctctctttttccggtggaaaggattccacggtactcttccatctt

SEQ ID NO: 574523 - DNA, 75 bp, synthetic construct
  source 1..75: mol_type = other DNA
gtgagcattacgcatccggtgacggtggatctcactccggcagcgatcaccatcaacaccatcgccacggacgat

SEQ ID NO: 574524 - DNA, 75 bp, synthetic construct
  source 1..75: mol_type = other DNA
cgttgtgctcaacggcaaaacctacaccaccaccctggatgcctccggcaactggagcgttggcgttccggcggc

SEQ ID NO: 574525 - DNA, 75 bp, synthetic construct
  source 1..75: mol_type = other DNA
atctcagcgcgttacgcgacggcgacgccacggtacaggcgagcgtcagcactattaacggcaacacggcttcgg

SEQ ID NO: 574526 - DNA, 75 bp, synthetic construct
  source 1..75: mol_type = other DNA
tgaaccttacaaatctgtaagtaacattgctaaagccagcaaaggagacaaggttaattctgttgtattggatga

SEQ ID NO: 574527 - DNA, 75 bp, synthetic construct
  source 1..75: mol_type = other DNA
ttaaaggaacaggtaaaaacaaagggattctttgtgatgggacatctaaaaaattaccggcagtagttttgctat

SEQ ID NO: 574528 - DNA, 75 bp, synthetic construct
  source 1..75: mol_type = other DNA
atggggagcaggaaaggtttttctaaaaatattcagggaggggcaagtagatgcgaactttctatttctctctgt

SEQ ID NO: 574529 - DNA, 75 bp, synthetic construct
  source 1..75: mol_type = other DNA
tacagaaagggaatgaaggggaaaatcagtttggccctgatcctaaacaggatgaagtatctttaatcaatacca

SEQ ID NO: 574530 - DNA, 75 bp, synthetic construct
  source 1..75: mol_type = other DNA
acagtgatgccggctaccaggtcgatatgctgattacaggtgacgataaagacggaaaagtgatccatgatgcag

SEQ ID NO: 574531 - DNA, 75 bp, synthetic construct
  source 1..75: mol_type = other DNA
tggaaatgttaggaatgacctcacacgaccatcagtctcgcaaacgtagacgtagaaaaacaaaaaaagttacaa

SEQ ID NO: 574532 - DNA, 75 bp, synthetic construct
  source 1..75: mol_type = other DNA
atattgcccgtgcctgccatgtggcagatgacgcaataagctacataatgaggaaagaccatgaacgatctgtta

SEQ ID NO: 574533 - DNA, 75 bp, synthetic construct
  source 1..75: mol_type = other DNA
tttttgatcctgctgtaggaacgctaaacattggtgcagctcacggtgaggcggcggcagatgccgggtatataa

SEQ ID NO: 574534 - DNA, 75 bp, synthetic construct
  source 1..75: mol_type = other DNA
gcgttggtgccgtgacgttaatacccgaagacgaaaccgtaacgcatccgataatggcatgggaaaagcttactg

SEQ ID NO: 574535 - DNA, 75 bp, synthetic construct
  source 1..75: mol_type = other DNA
tcagtttggccctgaccctaaacaggatgaagtatctttaatcagtgccagagatgacaaagcacagactgattt

SEQ ID NO: 574536 - DNA, 75 bp, synthetic construct
  source 1..75: mol_type = other DNA
cgtagaaaaacaaaaaaagttacaactactcaacctgcagccaacacgagccctctgaattcatctcaaatagcc

SEQ ID NO: 574537 - DNA, 75 bp, synthetic construct
  source 1..75: mol_type = other DNA
gcgtcggcgaaaaaaagcgacacgatgaagacgggtgaaaatacgctccattatgaaagcctgcgcggtcgttat

SEQ ID NO: 574538 - DNA, 75 bp, synthetic construct
  source 1..75: mol_type = other DNA
gccagcgggcagtatgttgaagtggtgatcaatggcaaaacctacacctctgaaccgggcggtgcggtggtagtc

SEQ ID NO: 574539 - DNA, 75 bp, synthetic construct
  source 1..75: mol_type = other DNA
tcaggcgtctgcggttggtacgctcggtgaagcgacttatacggtgactgccgccgcaaccgatgttgatggcaa

SEQ ID NO: 574540 - DNA, 75 bp, synthetic construct
  source 1..75: mol_type = other DNA
ggtagctggacaaccaccgtgcctgccgccgatctcagcgcgttacgtgacggcgacgcctcggtgcaggccagc

SEQ ID NO: 574541 - DNA, 75 bp, synthetic construct
  source 1..75: mol_type = other DNA
acccggcggtaacccgcacgctggatcgcggagccaatacgattttcgtcaccgtgacagatactgcaggaaata

SEQ ID NO: 574542 - DNA, 75 bp, synthetic construct
  source 1..75: mol_type = other DNA
ggcagcaatctcacctggagcgtgaatgttccggcggcagatttacaggcgctgggcgatggtgcgttaaccatt

SEQ ID NO: 574543 - DNA, 75 bp, synthetic construct
  source 1..75: mol_type = other DNA
gcgaagtggcgcagattagcctcgacggcggcgcgacctggatcacgctcaccaccaacggcacgcagtggacct

SEQ ID NO: 574544 - DNA, 75 bp, synthetic construct
  source 1..75: mol_type = other DNA
gtagtgctggcggacggtacatggaatgtggcgctggatccggcggtaacccgcaccctggcgcgtggccctaac

SEQ ID NO: 574545 - DNA, 75 bp, synthetic construct
  source 1..75: mol_type = other DNA
tgggcgcggcgctcggcgctaatgagttcgcacaaatcagtaccgacaacggcgcaacctgggtgaacgtgacgc

SEQ ID NO: 574546 - DNA, 75 bp, synthetic construct
  source 1..75: mol_type = other DNA
ccgttgtgcgttatgtccgtgacggaaatgacctgttgatctatatgcaagacggcacggtgatccgctgcaacg

SEQ ID NO: 574547 - DNA, 75 bp, synthetic construct
  source 1..75: mol_type = other DNA
gtgataaataatcaaacttacgccgccacggtgctggcgaacggcagctggagcgtcggcgttccggcggcggat

SEQ ID NO: 574548 - DNA, 75 bp, synthetic construct
  source 1..75: mol_type = other DNA
atggcaccagctacacggttagcgcctccgcccaggatagcgccggaaacagcgccacggcctcgcgcagtgtgg

SEQ ID NO: 574549 - DNA, 75 bp, synthetic construct
  source 1..75: mol_type = other DNA
gcatcagcgatgacaccgggttaagcagcagcgattttgttactcgcgacaccacgctgaccgtgcgcggcacgc

SEQ ID NO: 574550 - DNA, 75 bp, synthetic construct
  source 1..75: mol_type = other DNA
gtatttccggctcgaattttaacgacactctgaccggcagcagcggcgataaccaactggaagggcgcggcggca

SEQ ID NO: 574551 - DNA, 75 bp, synthetic construct
  source 1..75: mol_type = other DNA
gcagacgtatcagggcgtcgtgcagtcagacggcacctggagcgtgactgtgcccgccgccaacgtgggcgcact

SEQ ID NO: 574552 - DNA, 75 bp, synthetic construct
  source 1..75: mol_type = other DNA
tattactcgcgatgactacggcacggggtatatcaacggctttaccaataacggcgatggtacgttttccagcgc

SEQ ID NO: 574553 - DNA, 75 bp, synthetic construct
  source 1..75: mol_type = other DNA
cggcggcagtagcggcctgaatgcaggcgcagcgctgacggtcaccatcaacggtgtggcctatgccgccacggt

SEQ ID NO: 574554 - DNA, 75 bp, synthetic construct
  source 1..75: mol_type = other DNA
gcagcgcgagcggtaacagtgcctcggcgacccatgcgtatagcgttgacgccagcgcgccgacgctcaccatta

SEQ ID NO: 574555 - DNA, 75 bp, synthetic construct
  source 1..75: mol_type = other DNA
gcgaatggcaacactggcagcggtacgcgggatatcaccattgatgccaacctgcctgggctgcgggtggatacc

SEQ ID NO: 574556 - DNA, 75 bp, synthetic construct
  source 1..75: mol_type = other DNA
acgccgctgaaaaaggcgcggcgttaacgctctccggcagcacctctggcgtcgaagccgggcaaacggtcaccg

SEQ ID NO: 574557 - DNA, 75 bp, synthetic construct
  source 1..75: mol_type = other DNA
gggagtgctacggtcggtggggcggtaaccggttatctgtcactcaacgaaggttccggtgtcgatctcaataat

SEQ ID NO: 574558 - DNA, 75 bp, synthetic construct
  source 1..75: mol_type = other DNA
gcatcaacaccgttgccagcgacgacgtgattaacgccgccgaaaaaggcactaatctgaccctttctggcagca

SEQ ID NO: 574559 - DNA, 75 bp, synthetic construct
  source 1..75: mol_type = other DNA
agcggggcaaaccgtcaccgtcacctttggcggcaaaacctacaccaccacggtggcggcaaacggtagctggag

SEQ ID NO: 574560 - DNA, 75 bp, synthetic construct
  source 1..75: mol_type = other DNA
gacgatcaccgccagcctgagcgatcgcgcgggcaacagcgacagcactacccataatgtgaccgttgatctcag

SEQ ID NO: 574561 - DNA, 75 bp, synthetic construct
  source 1..75: mol_type = other DNA
agcagcaccgccgaagcggggcagacggtaaccgtcacgcttaatggcgtgacttacagtggcaccgttcaggcg

SEQ ID NO: 574562 - DNA, 75 bp, synthetic construct
  source 1..75: mol_type = other DNA
gggcgtggcgcagaccatcagcggccaggtgacgggcgcggcggcgggcgatacggttaccgtaacgcttggcgg

SEQ ID NO: 574563 - DNA, 75 bp, synthetic construct
  source 1..75: mol_type = other DNA
accgccaccgtgcaggctgatttaagctggaatgtgagcgtacctgccgccgactggcaggcgttaggtaacggt

SEQ ID NO: 574564 - DNA, 75 bp, synthetic construct
  source 1..75: mol_type = other DNA
cattaggtggtcatgcaggacttggcgttgcgtttgctaaaaagaaaggtgaaatgttatctgatatttgtattt

SEQ ID NO: 574565 - DNA, 75 bp, synthetic construct
  source 1..75: mol_type = other DNA
gtgaagaattaaaaaatttgcgacttactttaagtaagtcacaaaaccccatatctcccaaagcccgcccctcac

SEQ ID NO: 574566 - DNA, 75 bp, synthetic construct
  source 1..75: mol_type = other DNA
gtgccattgcccgggaattcaaaacctcgcggcaaaccattttaagagccaaagcaaaacttcagacacctgaca

SEQ ID NO: 574567 - DNA, 75 bp, synthetic construct
  source 1..75: mol_type = other DNA
tgacgcgcagcatggggtatgacgctgccgggcgcatcaccgtgctgactaacgagaacggcagccagtccacgt

SEQ ID NO: 574568 - DNA, 75 bp, synthetic construct
  source 1..75: mol_type = other DNA
aggctggtatcggagacatcgcgcagtggggacgtcatccggtatgcttatgataatccgcacagtgaattaccg

SEQ ID NO: 574569 - DNA, 75 bp, synthetic construct
  source 1..75: mol_type = other DNA
acatcaccacaccggacgggcgggagacgaaattttactataacgacgggaaccagctgacggcggtggtgtccc

SEQ ID NO: 574570 - DNA, 75 bp, synthetic construct
  source 1..75: mol_type = other DNA
catcacccgcagcgagtatgatgaggcggggaggctgaaggcgcagacggatgcggcggggcggcggacggagta

SEQ ID NO: 574571 - DNA, 75 bp, synthetic construct
  source 1..75: mol_type = other DNA
ggctataacagccagcggcaggtgacgtcagtgacgtacccggacgggcttcgcagcagccgggagtatgatgag

SEQ ID NO: 574572 - DNA, 75 bp, synthetic construct
  source 1..75: mol_type = other DNA
gatgaagctgggcggaacaccgctggtcgagtacacgcgggacaggctgcaccgtgagacggcccgcagcttcgg

SEQ ID NO: 574573 - DNA, 75 bp, synthetic construct
  source 1..75: mol_type = other DNA
atgaacagactgaaacggattatcccttttacttttcctgtatggcttcttttttcagcgaacgtcagtgctgaa

SEQ ID NO: 574574 - DNA, 75 bp, synthetic construct
  source 1..75: mol_type = other DNA
cggccaggtacgcgtccattatcggcaccactatatccgtttagccaaatttttccggagttagatgattggggg

SEQ ID NO: 574575 - DNA, 75 bp, synthetic construct
  source 1..75: mol_type = other DNA
atgaggagtcggggctgtactataaccgcaaccggtactatgacccgttgcaggggcggtatatcacccaggatc

SEQ ID NO: 574576 - DNA, 75 bp, synthetic construct
  source 1..75: mol_type = other DNA
ggccagtcaccgggtcgcctgaccgggccgcgcggttgtctgcgtgacagccagggcgacattatcagttttacc

SEQ ID NO: 574577 - DNA, 75 bp, synthetic construct
  source 1..75: mol_type = other DNA
ttttatcagcgcatgtgaaaagtcaactgcatagcagttttttaaacaacccggttaaaagccaaattatcaaaa

SEQ ID NO: 574578 - DNA, 75 bp, synthetic construct
  source 1..75: mol_type = other DNA
ctcaaagcattacgtaaaagcaatgcttatattgatatcattttttgcggccattttcattgtcatggtcgcagg

SEQ ID NO: 574579 - DNA, 75 bp, synthetic construct
  source 1..75: mol_type = other DNA
ctttcaataaacgtccccgttcaattcgcctggttctggccgagctgtttagcggtcgtgtttctgcacgccttg

SEQ ID NO: 574580 - DNA, 75 bp, synthetic construct
  source 1..75: mol_type = other DNA
ttttgggatcgtagttttactgataaattatatacagagctttatcagcttttccggcaggcagttatacgcatt

SEQ ID NO: 574581 - DNA, 75 bp, synthetic construct
  source 1..75: mol_type = other DNA
tgcgttgttttcgaggctggatagccggagtgagttcgataccctacctctgtttaaagttaaaaatattgagtc

SEQ ID NO: 574582 - DNA, 75 bp, synthetic construct
  source 1..75: mol_type = other DNA
tactctgttataaaaagtgaaatttcgatacaggaagtcattaaagatatctatgtgaggccattgaagattatt

SEQ ID NO: 574583 - DNA, 75 bp, synthetic construct
  source 1..75: mol_type = other DNA
tagtatcagtgacatcgacatatttaaagacaggtactcgggcaggaaacctgaatatagaaattagccccaaat

SEQ ID NO: 574584 - DNA, 75 bp, synthetic construct
  source 1..75: mol_type = other DNA
gggttgagcataatgaccttagtcgcgcgctgaatggaatttacgcctctttggaaacatctgattggggaataa

SEQ ID NO: 574585 - DNA, 75 bp, synthetic construct
  source 1..75: mol_type = other DNA
tcttatattgatactacttttgaagtccaatttagaactattttatctgaaggatggcatgaagttgagcatgat

SEQ ID NO: 574586 - DNA, 75 bp, synthetic construct
  source 1..75: mol_type = other DNA
ataacaattgatgctaatagtgatcacgagcgtgtattatggcatgaaataggtcaccatatagaacattcaaat

SEQ ID NO: 574587 - DNA, 75 bp, synthetic construct
  source 1..75: mol_type = other DNA
actccgagcaaaaagcggacttacaggatctgtgttaaggctgtcttatgattcagacactatcggccgttatct

SEQ ID NO: 574588 - DNA, 75 bp, synthetic construct
  source 1..75: mol_type = other DNA
caaaagcagttttaagaactcagcatgacaaaaataaagaagcaataagtatcctggattttggtgttattgatg

SEQ ID NO: 574589 - DNA, 75 bp, synthetic construct
  source 1..75: mol_type = other DNA
ctaccactacgacagccagcaccgtctggtgttctacacgcggatacagcacggtgagccgcgggtggagagccg

SEQ ID NO: 574590 - DNA, 75 bp, synthetic construct
  source 1..75: mol_type = other DNA
gtacttcacacttttagatggtgaaattcacaatacgagcactttccctgtatctcctatgctatttgggaaacc

SEQ ID NO: 574591 - DNA, 75 bp, synthetic construct
  source 1..75: mol_type = other DNA
cagcgaagacggcaatacggcgtggagcggggagtatgatgagtggggaaacctgctgaatgaggaaaccccgca

SEQ ID NO: 574592 - DNA, 75 bp, synthetic construct
  source 1..75: mol_type = other DNA
ccggctgaactggtgcggctgctggacaggctggagggggaaatccgggcagaccgcgtgagcagtgaaagccgc

SEQ ID NO: 574593 - DNA, 75 bp, synthetic construct
  source 1..75: mol_type = other DNA
ttgaaagggggatggaatttatatcagtatcctttaaatccactacaacaaattgaccctatgggattattgcag

SEQ ID NO: 574594 - DNA, 75 bp, synthetic construct
  source 1..75: mol_type = other DNA
catcagcaaggaagggacaacagaatggtgcgcagaatacgatgaatggggcaacctgctgaatgaagagaaccc

SEQ ID NO: 574595 - DNA, 75 bp, synthetic construct
  source 1..75: mol_type = other DNA
gcaggtaaccgcctgcccgacccggagctgcacccggacagcaccctcagcatgtggccggataaccgtatcgcc

SEQ ID NO: 574596 - DNA, 75 bp, synthetic construct
  source 1..75: mol_type = other DNA
gtatgatgagcgggacaggctggtatcggagacatcgcgcagtggggacgtcatccggtatgcttatgataatcc

SEQ ID NO: 574597 - DNA, 75 bp, synthetic construct
  source 1..75: mol_type = other DNA
gggcgtcgctgccgccggatatccggttaagcccgcatctttacctggcgaccaacagcgcacagggaccgtggt

SEQ ID NO: 574598 - DNA, 75 bp, synthetic construct
  source 1..75: mol_type = other DNA
atgaaaaccatctccgtggagtccctctatatacctgtggtgactacagagcttcttgccagcttatatggcaca

SEQ ID NO: 574599 - DNA, 75 bp, synthetic construct
  source 1..75: mol_type = other DNA
accctcgcaccggacctggacatccgcatcccgtatgccacggacccggcgggcaaccggctgccggacccggag

SEQ ID NO: 574600 - DNA, 75 bp, synthetic construct
  source 1..75: mol_type = other DNA
gtcacagcgacttcagctacgatgcgctggaccggctggtacagcagggcggctttgacgggcggacgcaacgtt

SEQ ID NO: 574601 - DNA, 75 bp, synthetic construct
  source 1..75: mol_type = other DNA
gcgccgctgccgccgtaccgggagctgacggggctggcggaccgcttcgggcggacgctgacgtaccggcgtgag

SEQ ID NO: 574602 - DNA, 75 bp, synthetic construct
  source 1..75: mol_type = other DNA
agtaatattggaggtgtttttgttgaggggggaggtgataaattttttgtattcataatgttttttatactttac

SEQ ID NO: 574603 - DNA, 75 bp, synthetic construct
  source 1..75: mol_type = other DNA
ctaccactacgacagccagcaccgtctggtgttctacacgcggatacagcacggtgagccactggttgagagccg

SEQ ID NO: 574604 - DNA, 75 bp, synthetic construct
  source 1..75: mol_type = other DNA
ctaccactacgacagccagcaccgtctggtgttctacacgcggatacagcacggtgagccacaggtggagagccg

SEQ ID NO: 574605 - DNA, 75 bp, synthetic construct
  source 1..75: mol_type = other DNA
acccgttatgagtacagtgccgcaggcgacctcaccactatcattgccccgaacggcagccggagtgagacacag

SEQ ID NO: 574606 - DNA, 75 bp, synthetic construct
  source 1..75: mol_type = other DNA
ctaccactacgacagccagcaccgtctggtgttctacacgcggatacagcacggtgagccccgggtcgagagccg

SEQ ID NO: 574607 - DNA, 75 bp, synthetic construct
  source 1..75: mol_type = other DNA
ctaccactacgacagccagcaccgtctggtgttctacacgcggatacagcacggtgagcccccggtggagagccg

SEQ ID NO: 574608 - DNA, 75 bp, synthetic construct
  source 1..75: mol_type = other DNA
ctaccactacgacagccagcaccgtctggtgttctacacgcggatacagcacggtgagccacgggtagagagccg

SEQ ID NO: 574609 - DNA, 75 bp, synthetic construct
  source 1..75: mol_type = other DNA
ccggagaaattcgccgagattgctgaactgatgggcgaaaatatcaccggactgtccactctcgacgcggcggaa

SEQ ID NO: 574610 - DNA, 75 bp, synthetic construct
  source 1..75: mol_type = other DNA
cgcagggtgaaggcgggctgaagcgggtggtgaaaaaggaacacgcggacggcagcgtcacgcagagtcagtttg

SEQ ID NO: 574611 - DNA, 75 bp, synthetic construct
  source 1..75: mol_type = other DNA
tattatgcgttaacaaagatgaaggttttctcaatgatgctcttgagagtattataaaccaagactattcttatg

SEQ ID NO: 574612 - DNA, 75 bp, synthetic construct
  source 1..75: mol_type = other DNA
agtcggggctgtactataaccggaaccggtactatgatccgttgcaggggaggtatatcacccaggatcccattg

SEQ ID NO: 574613 - DNA, 75 bp, synthetic construct
  source 1..75: mol_type = other DNA
agaaactataaatatagagtatattgaaggaaccaatgttagatttaattcgaataatatggcgatatattggaa

SEQ ID NO: 574614 - DNA, 75 bp, synthetic construct
  source 1..75: mol_type = other DNA
gcctggacgtttttcgtaaagagcaatgcgatatcatcgttaccgtcggcggtggtagcccgcatgactgcggta

SEQ ID NO: 574615 - DNA, 75 bp, synthetic construct
  source 1..75: mol_type = other DNA
ttgtaccgtggtggcagtaccaccatcgctcgttttttgtaccgtggtggcagtaccaccattgctcatttttta

SEQ ID NO: 574616 - DNA, 75 bp, synthetic construct
  source 1..75: mol_type = other DNA
acaaaacgacatctttacctgttgagctagatgcactaaataataaagatatctcttatgccaaagatttctttt

SEQ ID NO: 574617 - DNA, 75 bp, synthetic construct
  source 1..75: mol_type = other DNA
ttattgataaagagttcttcaataaaatcagtgaagatttcgaccctaagatgttcaacaaaaattctgaggtga

SEQ ID NO: 574618 - DNA, 75 bp, synthetic construct
  source 1..75: mol_type = other DNA
gatattgccaaaacacgtcaccaaattaacttatcgaattcgacctcattttccaaagatggctattcctccaac

SEQ ID NO: 574619 - DNA, 75 bp, synthetic construct
  source 1..75: mol_type = other DNA
tcgtttcgataataaacaaccgcttccaggaaactacgaacttgatttttatgtaaataaccagtggcgtggaaa

SEQ ID NO: 574620 - DNA, 75 bp, synthetic construct
  source 1..75: mol_type = other DNA
ttagcgtggccgcctggcgttatgcttcgcaggattacaggacattggatttgcccctatatttccagacatctg

SEQ ID NO: 574621 - DNA, 75 bp, synthetic construct
  source 1..75: mol_type = other DNA
gagaaaaaaacacaggcaaacctcactttacctaaaaccattacttccgtgaatgagttaaaaacatggtatgta

SEQ ID NO: 574622 - DNA, 75 bp, synthetic construct
  source 1..75: mol_type = other DNA
gatgactataccgatgctcccgacaaaaaaaaatgggagattcacgagcaatatatagatatacagatattgctc

SEQ ID NO: 574623 - DNA, 75 bp, synthetic construct
  source 1..75: mol_type = other DNA
gctggccggcgcttcattcagtaacaaaacttttgaacaggctgtcggaaatttatttgaagcaattggtgagac

SEQ ID NO: 574624 - DNA, 75 bp, synthetic construct
  source 1..75: mol_type = other DNA
gggttcaccggtgagctgcatctgttttccgatgagcaacatcttccatatgaacgtccaccgctctcgaaagcc

SEQ ID NO: 574625 - DNA, 75 bp, synthetic construct
  source 1..75: mol_type = other DNA
tggaagacgtggtgccgggctgaaattctgatactccggcagtgcgcgggaacgatgactgtcgaaagtatcggc

SEQ ID NO: 574626 - DNA, 75 bp, synthetic construct
  source 1..75: mol_type = other DNA
gattttcgcctgtcagccaaattaccgtataaagcgatggactgcctgaagcgaaacggactgattggcgctgag

SEQ ID NO: 574627 - DNA, 75 bp, synthetic construct
  source 1..75: mol_type = other DNA
acaaaggaaataaaatagcaacaaagatgttttacttccttataatttcactaatcccaatgttctcaataatca

SEQ ID NO: 574628 - DNA, 75 bp, synthetic construct
  source 1..75: mol_type = other DNA
atcgccacggataaaaacgcatacaccgctggcgagactataaccgtcgccgtgacgctgaaagatgcgcacggt

SEQ ID NO: 574629 - DNA, 75 bp, synthetic construct
  source 1..75: mol_type = other DNA
gtttgtcgcggatgtcaggacggcgaagatcgctgatctggaggtcattaaggatggttcagaggcggacggtgc

SEQ ID NO: 574630 - DNA, 75 bp, synthetic construct
  source 1..75: mol_type = other DNA
cccgcgaaaagtaggttcgttatggggtgaatatggtaatctgacttcgtatgacggaatatttcgcgctgaaca

SEQ ID NO: 574631 - DNA, 75 bp, synthetic construct
  source 1..75: mol_type = other DNA
gagaaaacttaaactcatatctacatattaatggttggtatgtagacgggcaaccgtcttataccatcctacctt

SEQ ID NO: 574632 - DNA, 75 bp, synthetic construct
  source 1..75: mol_type = other DNA
cgaacacgctgcaggtgaaggtcaccgatgcgttcggcaatgcgcttggcggacagacggtcagcgtgacggcag

SEQ ID NO: 574633 - DNA, 75 bp, synthetic construct
  source 1..75: mol_type = other DNA
gtgcaacggtcgctccggcggtcaccacaaatccggacgggacggcggagatcagtgtcaccagtcagacggcgg

SEQ ID NO: 574634 - DNA, 75 bp, synthetic construct
  source 1..75: mol_type = other DNA
agtgtgagtataactggagtaataaaaccaaattaaaattatcaatatttaacaaatgtaatttattaagtttat

SEQ ID NO: 574635 - DNA, 75 bp, synthetic construct
  source 1..75: mol_type = other DNA
gcattatacaaaagaactcaacaatgattgggttcttttttatctatcaatactattcgccgcgagatatatcag

SEQ ID NO: 574636 - DNA, 75 bp, synthetic construct
  source 1..75: mol_type = other DNA
cattacgggtatgatgagaaaggccggctgaccggtgagcgtcagacggtgcatcacccgcagacggaagcactg

SEQ ID NO: 574637 - DNA, 75 bp, synthetic construct
  source 1..75: mol_type = other DNA
cggttacagcggaagattcgaaaggaaatttctcccggcgtgaagaaagtatggtggtcgtggaaaaatccacac

SEQ ID NO: 574638 - DNA, 75 bp, synthetic construct
  source 1..75: mol_type = other DNA
gaatttataccgcaacgtataccgccttactccctggcaccggtttaaaagcacagctacagatgtccggctggg

SEQ ID NO: 574639 - DNA, 75 bp, synthetic construct
  source 1..75: mol_type = other DNA
ggaaggagccgtacgttcaggagagtggtctgaaactgccggtgtttatactgctacatggtcggcgcaaatggc

SEQ ID NO: 574640 - DNA, 75 bp, synthetic construct
  source 1..75: mol_type = other DNA
atcgttttaaagtacctatgatttaccgcccgacttcattgaagaatattcagcaaaaacccgaaagccttgaat

SEQ ID NO: 574641 - DNA, 75 bp, synthetic construct
  source 1..75: mol_type = other DNA
agcgaagggacgctgaatacctggtacgtccagccacaggcgcaaatcacctggatgggtgtgaaagattctgac

SEQ ID NO: 574642 - DNA, 75 bp, synthetic construct
  source 1..75: mol_type = other DNA
ataattcacccaccgataagatgaacgtgaaaggcgatacccaagggaacactcgcgttcgggttgataacattg

SEQ ID NO: 574643 - DNA, 75 bp, synthetic construct
  source 1..75: mol_type = other DNA
ttcaataattctttgtctgaagatgaaatgtttaaaaaaagtaatcaaataatatcaaaggaaatgaaaagaaga

SEQ ID NO: 574644 - DNA, 75 bp, synthetic construct
  source 1..75: mol_type = other DNA
cgtgatgggggcggagtctggcgaaaatctctgttccgttctcatcaatgccatgcaggagcgcggcggcgcgga

SEQ ID NO: 574645 - DNA, 75 bp, synthetic construct
  source 1..75: mol_type = other DNA
actgcaggtgatgtgaacgttatgtctggggggacactgcgtgtcgctaaaaccacaatcggcggcaacctggag

SEQ ID NO: 574646 - DNA, 75 bp, synthetic construct
  source 1..75: mol_type = other DNA
atctccactgagcgtagctgggcgatgacgcacagtatcagcggtagcggtgatgtgacaaaacttggtaccggg

SEQ ID NO: 574647 - DNA, 75 bp, synthetic construct
  source 1..75: mol_type = other DNA
tgacggtacacacgtctggaaactgccggtcaccccttacgtcatgttttccgttcagggcaataacatccccct

SEQ ID NO: 574648 - DNA, 75 bp, synthetic construct
  source 1..75: mol_type = other DNA
tacagagcgaatactatagatagtgtcgagggtaaagaagatatattgttttatgacgaagacagaaaggttcag

SEQ ID NO: 574649 - DNA, 75 bp, synthetic construct
  source 1..75: mol_type = other DNA
gttattttcactatttggcaatgtttctttagctccagtcgagaatagtaatgtaatgaagcccatcgttttcac

SEQ ID NO: 574650 - DNA, 75 bp, synthetic construct
  source 1..75: mol_type = other DNA
tgctctcccctatgcaatcagcggtgaatggtcaattaggtcactggttacaggatggtaatgcatgcgcagtta

SEQ ID NO: 574651 - DNA, 75 bp, synthetic construct
  source 1..75: mol_type = other DNA
gaaattctgcgtaaagtctctcaggccttttatgacaacgtccgcagtagtgattatgttttccgctacggggcg

SEQ ID NO: 574652 - DNA, 75 bp, synthetic construct
  source 1..75: mol_type = other DNA
accaagctactcaaccgccgtttcctgccgactatcttcaaacgtgaaattgcccatgccaatagaaccggcacg

SEQ ID NO: 574653 - DNA, 75 bp, synthetic construct
  source 1..75: mol_type = other DNA
gtcgtggtcaggattccccggtacgcgctccacgcgttgaagcccggcgtctgactcacgtcgaggcggcgaagg

SEQ ID NO: 574654 - DNA, 75 bp, synthetic construct
  source 1..75: mol_type = other DNA
tagtgatgtaaaaatcaactatactgtttgcagtatacttgagatcgcatcggtgttgtcattgtttttgacaat

SEQ ID NO: 574655 - DNA, 75 bp, synthetic construct
  source 1..75: mol_type = other DNA
aaacttttttgccaattatcgagcgttagccagcggtgttcagcctggtgtggcgaaagcggatgcgatatttat

SEQ ID NO: 574656 - DNA, 75 bp, synthetic construct
  source 1..75: mol_type = other DNA
tcattaaagcactgggaccgccaccgtccccgcgccggttatcagcagcgacggtgcacccgccgcgccacagga

SEQ ID NO: 574657 - DNA, 75 bp, synthetic construct
  source 1..75: mol_type = other DNA
tgcgtcttgatgaaggatttcttggttacgagacaagtccactcagagaaaaagtgaccatcattggggtgggcg

SEQ ID NO: 574658 - DNA, 75 bp, synthetic construct
  source 1..75: mol_type = other DNA
gtggcgctactggcatcgatatcgccaatggcttggtaaaacgatgccctggggagtcctggatacccttgaccg

SEQ ID NO: 574659 - DNA, 75 bp, synthetic construct
  source 1..75: mol_type = other DNA
gcgattggcggagacaaactggctcgagggctaacgcttgagggattatgcaccagttttttttacgcgcctccc

SEQ ID NO: 574660 - DNA, 75 bp, synthetic construct
  source 1..75: mol_type = other DNA
ctaaagatatgacttgtcaggaatttattgacctgaatccgaaagcgatgacacctgttgcatggtggatgctgc

SEQ ID NO: 574661 - DNA, 75 bp, synthetic construct
  source 1..75: mol_type = other DNA
ttctcctgatctgtgggaagaaggaataaatgccgggctactaaactatagttttaatggtaattctattaataa

SEQ ID NO: 574662 - DNA, 75 bp, synthetic construct
  source 1..75: mol_type = other DNA
acaccgccgctatgacgaagaacctctgtcgttcgctgggcattgacgtggtggcgcataaagcccacaacgccc

SEQ ID NO: 574663 - DNA, 75 bp, synthetic construct
  source 1..75: mol_type = other DNA
aacatcagcgactgcactgtaccggtcatgaaccgcatgctgatgtacatgttcggcaccagcgggcgggcttac

SEQ ID NO: 574664 - DNA, 75 bp, synthetic construct
  source 1..75: mol_type = other DNA
ctgtgcgagaaagctctctttaagtggcgttatccccaaggcttgggtgttagctatgcacgcagaaatttagca

SEQ ID NO: 574665 - DNA, 75 bp, synthetic construct
  source 1..75: mol_type = other DNA
ggtttctgtttcggcaaactatccgggcgctgatgcgcagaccgtgcaggatacggtgacgcaggttatcgaaca

SEQ ID NO: 574666 - DNA, 75 bp, synthetic construct
  source 1..75: mol_type = other DNA
tactgatgacgcagataaccccaagaaacgcggttttttcaaaagaaatgatgctgatcgactctttgagtcaga

SEQ ID NO: 574667 - DNA, 75 bp, synthetic construct
  source 1..75: mol_type = other DNA
gagtaaagcacgaacctttaaagaagtcgcgattgagtggcatggcaccaataaaaagtggtctgaagatcatgc

SEQ ID NO: 574668 - DNA, 75 bp, synthetic construct
  source 1..75: mol_type = other DNA
ttattggggaggggttgcttcagagttttcatctggatttattaaagatctcaataaaccgaaaggttcgtcaga

SEQ ID NO: 574669 - DNA, 75 bp, synthetic construct
  source 1..75: mol_type = other DNA
ctcagagagaaacttcaggagcaactacatttggaaaatataatttccaatatcattgggctttatgcagaataa

SEQ ID NO: 574670 - DNA, 75 bp, synthetic construct
  source 1..75: mol_type = other DNA
aacctttttcaattgaggggcagggggaagcaggggaaagggtgggcgatgttttagtccgcgctttgcaaaaag

SEQ ID NO: 574671 - DNA, 75 bp, synthetic construct
  source 1..75: mol_type = other DNA
atacaacggtacccagcgttatcgcaaaaaattcgaccacgttcaccgggaaatttcttgtgaaatcagtcagac

SEQ ID NO: 574672 - DNA, 75 bp, synthetic construct
  source 1..75: mol_type = other DNA
gccgatccactggcggcaatccaggcgcaacagcagcgcgaattcgaaatgctggaaagctaccgacagcaaaat

SEQ ID NO: 574673 - DNA, 75 bp, synthetic construct
  source 1..75: mol_type = other DNA
gaaaatccgctggcagcaattcaggcgcaacagcaacgtgaattcgaaatgctggaaatgtatcgccagcggaat

SEQ ID NO: 574674 - DNA, 75 bp, synthetic construct
  source 1..75: mol_type = other DNA
ggcagatgctgcgcggggaagaaaaccctgctcgggtgctaaaggtggtatttcacactgcacgtcagacggacg

SEQ ID NO: 574675 - DNA, 75 bp, synthetic construct
  source 1..75: mol_type = other DNA
ataaagtcagtcacagtggaatcagtctgagcggtggtggcagcttcggggataaatttcagggtaacatgccgg

SEQ ID NO: 574676 - DNA, 75 bp, synthetic construct
  source 1..75: mol_type = other DNA
ggcggcagttttacctttggctccatgaccggctcaggttacatcgctgcctcccgggataagatgaagagccgc

SEQ ID NO: 574677 - DNA, 75 bp, synthetic construct
  source 1..75: mol_type = other DNA
gtgtctgaaaagacagagcttgagatagcaaaacagaagcttaaaaacagtaaagatccggcagagcgtgaaaag

SEQ ID NO: 574678 - DNA, 75 bp, synthetic construct
  source 1..75: mol_type = other DNA
gggacgctgatcggtggctattacgatccgcaggtaagccaggatgatgaaggtgtgcattgcacggtaggaaac

SEQ ID NO: 574679 - DNA, 75 bp, synthetic construct
  source 1..75: mol_type = other DNA
tcaactcgctaggctggcggtcaaagatgttcgtatcgatacacgaaatcaggaatctggtctgattcgatacag

SEQ ID NO: 574680 - DNA, 75 bp, synthetic construct
  source 1..75: mol_type = other DNA
ggggttgagtgatgatttttacgcagaacagctgcggactccaaatcttgaaaagatctgccaggagatgaatat

SEQ ID NO: 574681 - DNA, 75 bp, synthetic construct
  source 1..75: mol_type = other DNA
aaggtatgagaataacagattcaaaaggagttttgggtttggggtctcctggtctttactacatggattttttga

SEQ ID NO: 574682 - DNA, 75 bp, synthetic construct
  source 1..75: mol_type = other DNA
cagccaccggaagacgctattatggatatgacgtatttccccttttaccggtatgccatgacctttgaggaattt

SEQ ID NO: 574683 - DNA, 75 bp, synthetic construct
  source 1..75: mol_type = other DNA
agatttctctattaaaatttaaagaattagaagatgaacatgattatatggtagccataggtgatttcctaacag

SEQ ID NO: 574684 - DNA, 75 bp, synthetic construct
  source 1..75: mol_type = other DNA
ttctggcgatcccctcagaaattggggagttaattatgaactataccgtgagatacaagaaaaaccccgaagata

SEQ ID NO: 574685 - DNA, 75 bp, synthetic construct
  source 1..75: mol_type = other DNA
actacagaagaaaaagcacattatttttctaactcccttggtttaaaaaagataattgatagtttggaatcagac

SEQ ID NO: 574686 - DNA, 75 bp, synthetic construct
  source 1..75: mol_type = other DNA
ttaactttaggtctttatgccgtggctatattcatgggcattcagctggtgggacaaatccttctttagtcgagg

SEQ ID NO: 574687 - DNA, 75 bp, synthetic construct
  source 1..75: mol_type = other DNA
ggattttattaattaaacacctgcagtttatgcgtgactttattgttcatggtgaagtaaatgaggatgctttga

SEQ ID NO: 574688 - DNA, 75 bp, synthetic construct
  source 1..75: mol_type = other DNA
attgcttggtgttccagcaatcatcgctgcaggaacaggactttataagctatcaatgtactttttctttagtgc

SEQ ID NO: 574689 - DNA, 75 bp, synthetic construct
  source 1..75: mol_type = other DNA
ttcatgaaaaataggcttgaaacatcacttaaattattatcagatgatgggtttatttttatacaatgtgatgat

SEQ ID NO: 574690 - DNA, 75 bp, synthetic construct
  source 1..75: mol_type = other DNA
ttcttattcccggccaagagtcagcaatgataatccttactcagaatctttgttccggactctcaaatattgtcc

SEQ ID NO: 574691 - DNA, 75 bp, synthetic construct
  source 1..75: mol_type = other DNA
cctggggatcaccgcactggatatttatggcctgtcagaagtgatggggccgggggtggcgatggagtgtctgga

SEQ ID NO: 574692 - DNA, 75 bp, synthetic construct
  source 1..75: mol_type = other DNA
cccactttcctgatggaaaatggcaaactgtgtaacgggaataattttgatgagcgtggtgcctactgccgtttt

SEQ ID NO: 574693 - DNA, 75 bp, synthetic construct
  source 1..75: mol_type = other DNA
acagccggatttagtttcgtggactggcgatagttctactcaaccatctatgtcgaaaatttcggacagcagggt

SEQ ID NO: 574694 - DNA, 75 bp, synthetic construct
  source 1..75: mol_type = other DNA
gctttgtgcatgcacccggcaaccgtattgtgcgcaaaacagcgctggtacgtgagcgccgtaatgcctggcgac

SEQ ID NO: 574695 - DNA, 75 bp, synthetic construct
  source 1..75: mol_type = other DNA
atatgaagttgcgggtggatacaaccgcacagcagcccatagattccacctgccggttcacttacatactgaata

SEQ ID NO: 574696 - DNA, 75 bp, synthetic construct
  source 1..75: mol_type = other DNA
tcctggaatgaaaatatggtcgtgcataacaaagtggtcaggatgcaatcaacaggtgctgtgattgaacaaacg

SEQ ID NO: 574697 - DNA, 75 bp, synthetic construct
  source 1..75: mol_type = other DNA
gcctgattcaagttgcccaggccttgaagaatatgacgcacgcaccccagaaacgtcctggtcctgcatggaaat

SEQ ID NO: 574698 - DNA, 75 bp, synthetic construct
  source 1..75: mol_type = other DNA
aaagtattcgccgcttacgtcagggtgagcgtgccacactcgcccaggccatgacgctggtggaaagccgtcacc

SEQ ID NO: 574699 - DNA, 75 bp, synthetic construct
  source 1..75: mol_type = other DNA
acggcagaattgtcatccacgccgggtacgcccatcgacgttggtccctttgatacagtggtacttttcaaaatt

SEQ ID NO: 574700 - DNA, 75 bp, synthetic construct
  source 1..75: mol_type = other DNA
ggcttaggatgggtactgacgttcatcattctatggaactacgtcattgtgccagtactggccttatgtggtgta

SEQ ID NO: 574701 - DNA, 75 bp, synthetic construct
  source 1..75: mol_type = other DNA
atatattgcgcagatgtcgattgccgggctgcgtgaagaacccgcacaagactggttgtctttgcataaacggct

SEQ ID NO: 574702 - DNA, 75 bp, synthetic construct
  source 1..75: mol_type = other DNA
gcagttgcagctcaaccgcttcctgccaccgacgccggtacgtatgctgctggataaaaacggcaacaacctggc

SEQ ID NO: 574703 - DNA, 75 bp, synthetic construct
  source 1..75: mol_type = other DNA
aagtacctttcttgaggcctttggcatgttgttgattcgagagggattaaaggtcgcggttattgcggtcgatcc

SEQ ID NO: 574704 - DNA, 75 bp, synthetic construct
  source 1..75: mol_type = other DNA
gcaccatcaccaacggtggcaccggcacccagattaatggtgatgacgccacggcaaacaacaacggcaaaacca

SEQ ID NO: 574705 - DNA, 75 bp, synthetic construct
  source 1..75: mol_type = other DNA
ctagataatgcaaaatatcaggcatggaatgccggattctctgccgaagatgaaacaatgaaaaataatcttcaa

SEQ ID NO: 574706 - DNA, 75 bp, synthetic construct
  source 1..75: mol_type = other DNA
tcagaacaacaaatcaggcattaaagaaagagctttcacaaaaaacgttgactaaaacatcgctagaagaaatag

SEQ ID NO: 574707 - DNA, 75 bp, synthetic construct
  source 1..75: mol_type = other DNA
atgcacagccagaagcgggagaactggcgcgaatatctggaacgggagcgggggaaaaagccaggggaagaaaaa

SEQ ID NO: 574708 - DNA, 75 bp, synthetic construct
  source 1..75: mol_type = other DNA
atgataaccaatacaaagcttgacccgattgaaaccgcgtctgttgatgagttacaggcgttgcaaacacagcgt

SEQ ID NO: 574709 - DNA, 75 bp, synthetic construct
  source 1..75: mol_type = other DNA
ttttttcaggtattcgtgatattgaatatttcagtttatatagggactcaaatgataaatgcttcactttgcgcg

SEQ ID NO: 574710 - DNA, 75 bp, synthetic construct
  source 1..75: mol_type = other DNA
ttctgctgttaatagcaaggtagatgagaaacattattcaaaatttattgcctttgagaacatgcgcgatgtttt

SEQ ID NO: 574711 - DNA, 75 bp, synthetic construct
  source 1..75: mol_type = other DNA
ggctggcgggggcggcggtaggcggtggcgcgcttggtgcactgctggcaagcggtggcgatggcgactcgaaaa

SEQ ID NO: 574712 - DNA, 75 bp, synthetic construct
  source 1..75: mol_type = other DNA
gcctgctggccgttattccggcacttaaccttgcctccagtgatgcagcggcggtggccggtcttgtaatgacgg

SEQ ID NO: 574713 - DNA, 75 bp, synthetic construct
  source 1..75: mol_type = other DNA
gcggtaacggcgcatgcaatggccgggcaaaaagagaagctgcttggcgcagggatgagcgattatctggcgaaa

SEQ ID NO: 574714 - DNA, 75 bp, synthetic construct
  source 1..75: mol_type = other DNA
acaggtggcggaaacctgaatgttacagggggaacgctggctatcgaggggcttaatgcacgctacaatgcgtta

SEQ ID NO: 574715 - DNA, 75 bp, synthetic construct
  source 1..75: mol_type = other DNA
caacggcttcttcagtaaattcccgctgtttgctgccggttttgcgttgtcagtggagtactggatcctgctgcc

SEQ ID NO: 574716 - DNA, 75 bp, synthetic construct
  source 1..75: mol_type = other DNA
cgtcggtatatctgaccaatggaggaatgagctttattctcgaaactttatggcagagttatacgctatggtcgc

SEQ ID NO: 574717 - DNA, 75 bp, synthetic construct
  source 1..75: mol_type = other DNA
agctggaaaaaatgcgtttgccatctccgtttcaaataactcatccctgaccattactaatggtgcatctattgc

SEQ ID NO: 574718 - DNA, 75 bp, synthetic construct
  source 1..75: mol_type = other DNA
aaaacaagaatcgcttaggatgttttacgccccgtttaacgctactgtcaaccatagttggagctttattatcaa

SEQ ID NO: 574719 - DNA, 75 bp, synthetic construct
  source 1..75: mol_type = other DNA
attggttttgtcggtatttatgccattttcgatattctgaccagcaatgtcgggccagcggcccaggcgatggtt

SEQ ID NO: 574720 - DNA, 75 bp, synthetic construct
  source 1..75: mol_type = other DNA
ggccatgttgatatccgcagtattcattcatatctttttaattttaatgaaaaagttagtccgtctcatgggttt

SEQ ID NO: 574721 - DNA, 75 bp, synthetic construct
  source 1..75: mol_type = other DNA
tttatcggcagtgtctgaaaatggcagtagccgtaccgttcgtcgcgccagtgaagcgggtattccggtgatttg

SEQ ID NO: 574722 - DNA, 75 bp, synthetic construct
  source 1..75: mol_type = other DNA
ggttggtggcggcgggttattgctggcgcaaaaagccttacataaaacgtcggatacagcattttgcctttcctg

SEQ ID NO: 574723 - DNA, 75 bp, synthetic construct
  source 1..75: mol_type = other DNA
ctttttgcattggcgcagaaaaaaatgccggatgcgacgctggcgcgtcttatccagcttacgcaggcacgatag

SEQ ID NO: 574724 - DNA, 75 bp, synthetic construct
  source 1..75: mol_type = other DNA
cgctgttactaactgtgcgaaagtggggcttacgcaacttgggtggaacctttcaagccaaaggactcatcaccc

SEQ ID NO: 574725 - DNA, 75 bp, synthetic construct
  source 1..75: mol_type = other DNA
gaattagatatgttgcttatgagtaaatgtaaaaataatataatttcaaatagttctttcagttggtgggctgct

SEQ ID NO: 574726 - DNA, 75 bp, synthetic construct
  source 1..75: mol_type = other DNA
tgagttcaattttatggctgaacacatcatggggattaatgttagcgatgcacttagcaaaccatgttccacgct

SEQ ID NO: 574727 - DNA, 75 bp, synthetic construct
  source 1..75: mol_type = other DNA
cagacaggactttattctctctggtacacaaattaagtatgcaactattccctgaaattatcgttgtgcgaggga

SEQ ID NO: 574728 - DNA, 75 bp, synthetic construct
  source 1..75: mol_type = other DNA
aaaaattatcctgatgttcgtcttttaccttacggtgagagatatggttctgcggggaaaaatttctatcgatta

SEQ ID NO: 574729 - DNA, 75 bp, synthetic construct
  source 1..75: mol_type = other DNA
cccggcggcgagcgcgattgcctcggtgatcctcgcggcatccctgctgctgttgttctcaattaacactctgca

SEQ ID NO: 574730 - DNA, 75 bp, synthetic construct
  source 1..75: mol_type = other DNA
gtggcgacacggcagtcgcagaacgtgcccattaccgatctcggaacaaacaaagagccccgcaatgccggggct

SEQ ID NO: 574731 - DNA, 75 bp, synthetic construct
  source 1..75: mol_type = other DNA
tctttaccactcgatgtttatcagaccaaaaatgatcagcgcacgaaagtggacaacagtcaccccctggcgaag

SEQ ID NO: 574732 - DNA, 75 bp, synthetic construct
  source 1..75: mol_type = other DNA
ctgtatttaaagaactattctggaaagcaatagacgaatttaactttccgcaagaggagcttaatcgattaaacc

SEQ ID NO: 574733 - DNA, 75 bp, synthetic construct
  source 1..75: mol_type = other DNA
aaatcctggcgggtaagaatgtcctgtatgcggccattcaccgtattgagtggttgtttgagacattctcttctg

SEQ ID NO: 574734 - DNA, 75 bp, synthetic construct
  source 1..75: mol_type = other DNA
aagcctcgctcctaatgctaaggaacgtagcagaatgctgacggtaatgggttcagcgtcatcgctgggcgtata

SEQ ID NO: 574735 - DNA, 75 bp, synthetic construct
  source 1..75: mol_type = other DNA
cgccgggaactggctgcaaggttacgccaggtgaaaccgaaacggcgtaaagactacaaacagcgaattacagac

SEQ ID NO: 574736 - DNA, 75 bp, synthetic construct
  source 1..75: mol_type = other DNA
cgaaccctgtctgactgcctgaataccgatgaatggccagctattaagacattatcactaccccgctgggctaag

SEQ ID NO: 574737 - DNA, 75 bp, synthetic construct
  source 1..75: mol_type = other DNA
aacgtattttccccagagtgactttcatgacaaaccttaataaaatcaggcggcgtccgcgagaccgctatgctt

SEQ ID NO: 574738 - DNA, 75 bp, synthetic construct
  source 1..75: mol_type = other DNA
caaatcctctcaaccggcgaaaaagtgctgactgaacagcagcgctcgcaggtcgaagagaacttcaaagagatc

SEQ ID NO: 574739 - DNA, 75 bp, synthetic construct
  source 1..75: mol_type = other DNA
tatcgccgggaacatcgcatggaaaaccgaagtcacatcgctgatgatttttgtgcggttacaggaatttgatta

SEQ ID NO: 574740 - DNA, 75 bp, synthetic construct
  source 1..75: mol_type = other DNA
tcttaacccgctaccgctttccggggcgcactctgcttgatgcactgatggatttaccctttgcgctaccgacgg

SEQ ID NO: 574741 - DNA, 75 bp, synthetic construct
  source 1..75: mol_type = other DNA
ccgctaatattcacatgtcgcgtacctttctcgctcgcatgcggttatacgtcaaaatacgagaaatgccgccgc

SEQ ID NO: 574742 - DNA, 75 bp, synthetic construct
  source 1..75: mol_type = other DNA
tgaaacgtcaggaagacgaaggaaaacgagtcctaaaagacgttacaaaaatgcatggtgcggcgcagaaattaa

SEQ ID NO: 574743 - DNA, 75 bp, synthetic construct
  source 1..75: mol_type = other DNA
tgcaacaccgtcatcgatgatagtaaataaagggaaaaacactccctataaaaaggacataaaaaaaaccatact

SEQ ID NO: 574744 - DNA, 75 bp, synthetic construct
  source 1..75: mol_type = other DNA
tgcaggcgtggagctgagaaaaatcgcgggtctttaccgcattgagaaactcatccgtgagcgccctgtggaaaa

SEQ ID NO: 574745 - DNA, 75 bp, synthetic construct
  source 1..75: mol_type = other DNA
aaaatgcagactgcaggtgagacgttaattaaattcgttcaatcatttgacccagactcaacgggacccattgta

SEQ ID NO: 574746 - DNA, 75 bp, synthetic construct
  source 1..75: mol_type = other DNA
aagcacctgtagcgtcattacatctaaaaacagtaagcgaaggctttttaaatttggaaaatgcatataatgtaa

SEQ ID NO: 574747 - DNA, 75 bp, synthetic construct
  source 1..75: mol_type = other DNA
ttatatgtctgtgcaactgtttctttagaggcactgatcacttgcttgctcctttatttttattataaaaagaat

SEQ ID NO: 574748 - DNA, 75 bp, synthetic construct
  source 1..75: mol_type = other DNA
ggccccgttccgtacagggggaaacgctggacactggttaaccctgaaatctggacggcggaaaccatggatctg

SEQ ID NO: 574749 - DNA, 75 bp, synthetic construct
  source 1..75: mol_type = other DNA
tactggcttgctgccgtagatattcccgtggcgagcgataacccagtgcactatgcggatgccattcgttataat

SEQ ID NO: 574750 - DNA, 75 bp, synthetic construct
  source 1..75: mol_type = other DNA
gaaaaagcagaatttcagaaaccatatagtattacagatgacaataattgttggaaaatcgagggaaaacaaccg

SEQ ID NO: 574751 - DNA, 75 bp, synthetic construct
  source 1..75: mol_type = other DNA
gccagcagggagccccgtgcaggcgtggagctgagaaaaatcgcgggtctttaccgcattgagaaactcatccgt

SEQ ID NO: 574752 - DNA, 75 bp, synthetic construct
  source 1..75: mol_type = other DNA
gataaatgaaaattctccatttggaagtgttgatgggcagaagcacacttgcagaataaatacatttaaagcccg

SEQ ID NO: 574753 - DNA, 75 bp, synthetic construct
  source 1..75: mol_type = other DNA
gctgggaaatcgtggaccccgaaatctgggaggcgtcgcaactggaatttattgtccagcgtggtgacgcgtcgt

SEQ ID NO: 574754 - DNA, 75 bp, synthetic construct
  source 1..75: mol_type = other DNA
actatgaattattgaacttaaatgaaatcgatattgctttgttcgctgccagagaaattatcatagggctgttta

SEQ ID NO: 574755 - DNA, 75 bp, synthetic construct
  source 1..75: mol_type = other DNA
ccagccaaccaggtcattgattttggtaaatttaatgtactggatatccggcgacacaacatgacaaaaacattc

SEQ ID NO: 574756 - DNA, 75 bp, synthetic construct
  source 1..75: mol_type = other DNA
ggatcgctattatcaactcggcgtaacttacaatggtgttgattatgatgctaaccagggaaaaagccgcatcga

SEQ ID NO: 574757 - DNA, 75 bp, synthetic construct
  source 1..75: mol_type = other DNA
aatattcatatgtcgcgtacatttctcgctcgtatgcggctctatgttaaagttcgtgaaatgccgccgcatgat

SEQ ID NO: 574758 - DNA, 75 bp, synthetic construct
  source 1..75: mol_type = other DNA
agtcagttcctccttttataccgaagaaacgttggttgaagtggatttgcccctatatttccagacatctgttat

SEQ ID NO: 574759 - DNA, 75 bp, synthetic construct
  source 1..75: mol_type = other DNA
cactaaccagtgtatcgacagtaagaacattgacatttatacccctgagcagattatcgcgatgggatggcagaa

SEQ ID NO: 574760 - DNA, 75 bp, synthetic construct
  source 1..75: mol_type = other DNA
ggatccctattatcaattaggcgtaacctatgaaggtgtggactatgacgccagtctggggcaaagccgcatcga

SEQ ID NO: 574761 - DNA, 75 bp, synthetic construct
  source 1..75: mol_type = other DNA
acgcaagtcccgtgattgccgttatgctgggcggtgaggctgtcctggattgctggcacgttatgcttcacaact

SEQ ID NO: 574762 - DNA, 75 bp, synthetic construct
  source 1..75: mol_type = other DNA
tcatgtgcattagttcagcattaccactatgaattatctaccctaaatgaaatagatatcgctttgtttgctgcc

SEQ ID NO: 574763 - DNA, 75 bp, synthetic construct
  source 1..75: mol_type = other DNA
cacaactaaatgcttttgccatttcactgactgtcaaaagtgcgctggcatttttaatattaattatttattttg

SEQ ID NO: 574764 - DNA, 75 bp, synthetic construct
  source 1..75: mol_type = other DNA
cactgctgattggtaatggactgaagctccgtttgctggatgaaaattcttcaccctatactttcaacaaataca

SEQ ID NO: 574765 - DNA, 75 bp, synthetic construct
  source 1..75: mol_type = other DNA
attgaactttattctggaaactctttggcaaagttataatttatggccttcaggcaatttaattttcctaaatta

SEQ ID NO: 574766 - DNA, 75 bp, synthetic construct
  source 1..75: mol_type = other DNA
gaattagcaagattatttaaccttttctctgcagcagtttatcttactaacggtggattgaactttattctggag

SEQ ID NO: 574767 - DNA, 75 bp, synthetic construct
  source 1..75: mol_type = other DNA
agcgaggacggacacggcgtggtgttcccggctgaactggtgcggctgctggacaggctggagggggaaatccgg

SEQ ID NO: 574768 - DNA, 75 bp, synthetic construct
  source 1..75: mol_type = other DNA
ggtttcgagccagaaccaagtaaagatctgtcatgcaaaacctccgggctatcaactactgatgcggctcttgca

SEQ ID NO: 574769 - DNA, 75 bp, synthetic construct
  source 1..75: mol_type = other DNA
gggcagcaacacgatgaggagtcggggctgtattataaccgtcaccggtactacgatccgttgcaggggcggtat

SEQ ID NO: 574770 - DNA, 75 bp, synthetic construct
  source 1..75: mol_type = other DNA
tcgtgatatatggatatataacgccagaacccgagctatctacaatcccctgtatgacctgatgtaccgtgccgg

SEQ ID NO: 574771 - DNA, 75 bp, synthetic construct
  source 1..75: mol_type = other DNA
atgaatataaagacgcttcacgtcagccttttgtctttttctattattacagcattatttccattgaacgcgatg

SEQ ID NO: 574772 - DNA, 75 bp, synthetic construct
  source 1..75: mol_type = other DNA
atgactctttcatcacaaaaatcctgacaggtaataacgttctgcgtgctgcaattgcccgcattgagtgggttt

SEQ ID NO: 574773 - DNA, 75 bp, synthetic construct
  source 1..75: mol_type = other DNA
tctggcgatttacgccctgcgtaatcaactgaccgatgagtggccgcaatatccggtaatgctgccaacttactg

SEQ ID NO: 574774 - DNA, 75 bp, synthetic construct
  source 1..75: mol_type = other DNA
gagtcgattatgctgatgccgcagccagaagcctcttcgcggaaggaagtgacaacttccaacgctacaatctac

SEQ ID NO: 574775 - DNA, 75 bp, synthetic construct
  source 1..75: mol_type = other DNA
gtgtagtaatgatttctattgaacaggccactcattggatagctggatttaacgatggtgaaaaaattatgtttt

SEQ ID NO: 574776 - DNA, 75 bp, synthetic construct
  source 1..75: mol_type = other DNA
gtacagttatgttatgaacaatcctgtgcaatggattgatccattgggattagctcatacttcaggaaaatggaa

SEQ ID NO: 574777 - DNA, 75 bp, synthetic construct
  source 1..75: mol_type = other DNA
acccgcaaaccgatctcagcgccgtcactcgcccgcgtgcgttaccgttattaacgccattccagatgcgcgatc

SEQ ID NO: 574778 - DNA, 75 bp, synthetic construct
  source 1..75: mol_type = other DNA
gcgtctggaaatctatctggaattattcattgtgtttctcactgcaggtgctctgctgttatggataatgagatt

SEQ ID NO: 574779 - DNA, 75 bp, synthetic construct
  source 1..75: mol_type = other DNA
tcgtgattttgaaatcatgaataaatttttaaataatttacgcgattgcgtgttgaagaataatcgtgtttatat

SEQ ID NO: 574780 - DNA, 75 bp, synthetic construct
  source 1..75: mol_type = other DNA
ctgaagtgatggtgcgcctctactggcagggaaacaccagttatttcgtgccaacccgcgtcacttatccgcagg

SEQ ID NO: 574781 - DNA, 75 bp, synthetic construct
  source 1..75: mol_type = other DNA
ttatactactctgctaacctttcagtcattttaaaaaaagatggtagcggtagttttacgattgttggcttaact

SEQ ID NO: 574782 - DNA, 75 bp, synthetic construct
  source 1..75: mol_type = other DNA
gtcttatttttatttttagtgctattttagattgtgcttttgctgctgacattaatactaatgtagttactgtta

SEQ ID NO: 574783 - DNA, 75 bp, synthetic construct
  source 1..75: mol_type = other DNA
cagatgaaaatggagatatagatgctctaggtattcctgttgtttcaacttcatataatgaacgtgttatttctt

SEQ ID NO: 574784 - DNA, 75 bp, synthetic construct
  source 1..75: mol_type = other DNA
cgctgactctttcgatcgcgtcttcactgaaagtgagattgtctcgaagactcgtaaagcaattcaggaagcgac

SEQ ID NO: 574785 - DNA, 75 bp, synthetic construct
  source 1..75: mol_type = other DNA
aaatccgcctggatatcatcaagaaagttaactacgacaccgcagcggccaagctggccattgactgggttggtg

SEQ ID NO: 574786 - DNA, 75 bp, synthetic construct
  source 1..75: mol_type = other DNA
ttagtaacagttcttctggggggattttaggaactatcgggagtgctattagtaaatttattccgaatgcaaagg

SEQ ID NO: 574787 - DNA, 75 bp, synthetic construct
  source 1..75: mol_type = other DNA
tgcgcaccaccgcgctgctcaccgacatgaatcaggtactggcctccagtgcaggtaacgcggttgaagttcgtg

SEQ ID NO: 574788 - DNA, 75 bp, synthetic construct
  source 1..75: mol_type = other DNA
gctgcacccggtacagtacactcacagtgtggccggataaccgcatcgcggaggatgcgcactatgtctaccgcc

SEQ ID NO: 574789 - DNA, 75 bp, synthetic construct
  source 1..75: mol_type = other DNA
atgaaatcactacttattacttcattggtcgtgggatttattacagtgaatgccgcatctgccgctcaggaaatt

SEQ ID NO: 574790 - DNA, 75 bp, synthetic construct
  source 1..75: mol_type = other DNA
tgcattttagcctgaaagaaattgccatgttcgtctggctgcctttcctgctgggcgatctcggctgtttagcca

SEQ ID NO: 574791 - DNA, 75 bp, synthetic construct
  source 1..75: mol_type = other DNA
tatcccaaggcgggcaatggccgacggccctatccgctggagaccatgctgcgtatggcactgttgcaaagttag

SEQ ID NO: 574792 - DNA, 75 bp, synthetic construct
  source 1..75: mol_type = other DNA
gggcgcttacatgcccgggaggatgggataaaaccatttattcagtcagtacgccagggatactggggatattac

SEQ ID NO: 574793 - DNA, 75 bp, synthetic construct
  source 1..75: mol_type = other DNA
gcccccgtggtgttgtcaggtgcatacctgcaacgtgcgggggttttctctctccagcaaccaatgccaccaggg

SEQ ID NO: 574794 - DNA, 75 bp, synthetic construct
  source 1..75: mol_type = other DNA
gccgctgattctacgattgctttttaccgtcagcacccggcaatcttcctcattgcgcgatgccttccagcttaa

SEQ ID NO: 574795 - DNA, 75 bp, synthetic construct
  source 1..75: mol_type = other DNA
cgagctgatatagcggaggatggtttctcctggtgcggctgtggaacggcgaactccgaagcagagggagtaact

SEQ ID NO: 574796 - DNA, 75 bp, synthetic construct
  source 1..75: mol_type = other DNA
gatggttccggatgtgatggtataattaccattacctaccagtgcgacaacagtgggagacatgaggcatggtta

SEQ ID NO: 574797 - DNA, 75 bp, synthetic construct
  source 1..75: mol_type = other DNA
aaaacggactggaaatttttgctggtctggctgattccgtttttatgggtggttgcccggttaattactgctatt

SEQ ID NO: 574798 - DNA, 75 bp, synthetic construct
  source 1..75: mol_type = other DNA
atggcaactgctgccgccaatggaccctggcggaatgggagagctgggtgtagttgaggcagagcaaaccgagaa

SEQ ID NO: 574799 - DNA, 75 bp, synthetic construct
  source 1..75: mol_type = other DNA
gttgcaggggcggtatatcactcaggacccgatagggctggagggggggatggagtctgtatgcgtacccgctga

SEQ ID NO: 574800 - DNA, 75 bp, synthetic construct
  source 1..75: mol_type = other DNA
caatacggcgtggagcgcggaatatgatgaatggggcaaccagcttaatgaggagaacccgcatcacctgcacca

SEQ ID NO: 574801 - DNA, 75 bp, synthetic construct
  source 1..75: mol_type = other DNA
taaagaaaattcttttctttacggaaaatatatgtatatgaaagatgctccggatgtctggagttttataaatcc

SEQ ID NO: 574802 - DNA, 75 bp, synthetic construct
  source 1..75: mol_type = other DNA
ctattagtggtaacaatgtcaccggcacaggtactaattttaccgccgcaggttctctgatccgcaacggctgca

SEQ ID NO: 574803 - DNA, 75 bp, synthetic construct
  source 1..75: mol_type = other DNA
tttcattgatgggtaaggatcgtaacaaaataactaaagcctttgatgcaaaaataatttcaaaggaagaggcga

SEQ ID NO: 574804 - DNA, 75 bp, synthetic construct
  source 1..75: mol_type = other DNA
atgatccagaaggcgtggctgagtgcaatgaagctatatggctggctggagtaccggacgctgatccatttcccg

SEQ ID NO: 574805 - DNA, 75 bp, synthetic construct
  source 1..75: mol_type = other DNA
tacggcgatggttggcgatgccgttgcaggtgtgctcggttctggcgtctcaccgtttgtatttattgtcgcctt

SEQ ID NO: 574806 - DNA, 75 bp, synthetic construct
  source 1..75: mol_type = other DNA
agcgtattgctatggcggttaaagcaaacgaatcagcaccggaaccggacactgccgaacttaacttcaaaaaag

SEQ ID NO: 574807 - DNA, 75 bp, synthetic construct
  source 1..75: mol_type = other DNA
gcagaacgtaaatttcgcagagggtttgcggctgttcttgagaatatcgacgcggttgatgaaaagctgatccaa

SEQ ID NO: 574808 - DNA, 75 bp, synthetic construct
  source 1..75: mol_type = other DNA
gcgttctgaatttgaaccgattctcgatgccctggatgaggcgtttcgtattgggcgtcatggcaaagtgcctgt

SEQ ID NO: 574809 - DNA, 75 bp, synthetic construct
  source 1..75: mol_type = other DNA
tttataaatttgatgtgcgaatctctcaactttcagaagaaattaacgcagcagcaagattgatttatatggtca

SEQ ID NO: 574810 - DNA, 75 bp, synthetic construct
  source 1..75: mol_type = other DNA
aaaggcgcattagtgtctgcatcattaaataatgcggttgcaggtgtctggcttattactattataattaaaaga

SEQ ID NO: 574811 - DNA, 75 bp, synthetic construct
  source 1..75: mol_type = other DNA
ttacgatactcagtggtgtagtaacatgctttagactaatttgtggccttcttatttcaaaagttgttgcaattt

SEQ ID NO: 574812 - DNA, 75 bp, synthetic construct
  source 1..75: mol_type = other DNA
agagcggcccgaaaacgccggatctggaatcgtacttcgagccgacccggaaaactgatgcccgtacacctgata

SEQ ID NO: 574813 - DNA, 75 bp, synthetic construct
  source 1..75: mol_type = other DNA
tctaaagaacgggcttttcgcaaaggtatggcggctgtacttgagaatatcgacgcggttgatgaaaaactggtc

SEQ ID NO: 574814 - DNA, 75 bp, synthetic construct
  source 1..75: mol_type = other DNA
aatcgaaaggtcctgaggctttaggttttaagcccgccgtcaggcaccgccgccaccgacaagtggacaggcatc

SEQ ID NO: 574815 - DNA, 75 bp, synthetic construct
  source 1..75: mol_type = other DNA
actattgccgtgatgaaggtttattccctctgaccacggctatccacaaaatgaccgggctttctgccagccgtt

SEQ ID NO: 574816 - DNA, 75 bp, synthetic construct
  source 1..75: mol_type = other DNA
aaacgccggatctggaatcgtacttcgagccgacccggaaaactgatacccggacaccggatattggcagttatt

SEQ ID NO: 574817 - DNA, 75 bp, synthetic construct
  source 1..75: mol_type = other DNA
caggagctaatgaccgtcctcctcgaccaactggaacgccgattcagtggcaaacagccagcagaacaacagcca

SEQ ID NO: 574818 - DNA, 75 bp, synthetic construct
  source 1..75: mol_type = other DNA
agaaacaagataataaatattctcttctgcctgatatttatttatctacagggcaatctgcatacaacaaatcag

SEQ ID NO: 574819 - DNA, 75 bp, synthetic construct
  source 1..75: mol_type = other DNA
tcatttgaggcaaaacgattcagatattgaaaacaggcgactacaatatctctttgaaaagggagatgtatcagg

SEQ ID NO: 574820 - DNA, 75 bp, synthetic construct
  source 1..75: mol_type = other DNA
tagattctctaaactgtaccctcggagtcgatcaagataacacagagatatttaagattacaagtattgatggag

SEQ ID NO: 574821 - DNA, 75 bp, synthetic construct
  source 1..75: mol_type = other DNA
aaatttggatctatttcgcgttgcttgcagcccctagtcatagctatgctaatgacggcacaggagaggctttta

SEQ ID NO: 574822 - DNA, 75 bp, synthetic construct
  source 1..75: mol_type = other DNA
cactggctgactggttttatctcaacccggaatggctgaacggcagggtgcattatccgctgtatcgtccggggg

SEQ ID NO: 574823 - DNA, 75 bp, synthetic construct
  source 1..75: mol_type = other DNA
atgagcgaacagctttctctttccgtctctgacctgacgcgtatcctggtcgaagaggcgttaagtgaaatgttt

SEQ ID NO: 574824 - DNA, 75 bp, synthetic construct
  source 1..75: mol_type = other DNA
atagtagaaaatcacaaaaaaaatataaagttgttaaaaaatgaactacatcatctggagtgggagcttcagaga

SEQ ID NO: 574825 - DNA, 75 bp, synthetic construct
  source 1..75: mol_type = other DNA
agattagttctctgttaaaagagtatcaacacaaacaaaaagaagcagatatagagaataaccggttgcaatata

SEQ ID NO: 574826 - DNA, 75 bp, synthetic construct
  source 1..75: mol_type = other DNA
ttctgagaaaagtaaaatgtcaaatcgcaaccattaatgagaaattgcttgattgtggatatcagccgctcatag

SEQ ID NO: 574827 - DNA, 75 bp, synthetic construct
  source 1..75: mol_type = other DNA
cgcatttgcgtatgtttgtcctcttgacttatatttcagaaaaaatatcgattacataacgtatcaaataaaatc

SEQ ID NO: 574828 - DNA, 75 bp, synthetic construct
  source 1..75: mol_type = other DNA
ttggattgatacctaaaaatggaggaactattagagatatatcaatagatcatggtagttatgctgcttcagtta

SEQ ID NO: 574829 - DNA, 75 bp, synthetic construct
  source 1..75: mol_type = other DNA
gaaacaatttcttattaacaaaaacaaagttagctatctcaaggaaagactaaaaaacaataccaatatgttgtc

SEQ ID NO: 574830 - DNA, 75 bp, synthetic construct
  source 1..75: mol_type = other DNA
gaacaaatttaatagcgaatatcttataagaacaataccggcttcatcttatcaagcgtttgaagatactgttaa

SEQ ID NO: 574831 - DNA, 75 bp, synthetic construct
  source 1..75: mol_type = other DNA
tgtcgatattgttgagggtcgttttgatgccgggatacgcctgggtgaaattgtcgataacgatatggttgcagt

SEQ ID NO: 574832 - DNA, 75 bp, synthetic construct
  source 1..75: mol_type = other DNA
tgtcgatattgttgagggtcgttttgatgccgggatacgcctgggtgaaattgtagataaagatatggttgcagt

SEQ ID NO: 574833 - DNA, 75 bp, synthetic construct
  source 1..75: mol_type = other DNA
tgtcgatattgttgacggtcgttttgatgccgggatacgcctgggtgaaattgtcgataaggatatggttgcagt

SEQ ID NO: 574834 - DNA, 75 bp, synthetic construct
  source 1..75: mol_type = other DNA
gttcacgggatgatccctgccgcttcgtacaatccctcgtcgggtatcaatgcccggggaagcctggatgaatgg

SEQ ID NO: 574835 - DNA, 75 bp, synthetic construct
  source 1..75: mol_type = other DNA
accgcctgatttcccgcaaactcatggggaataaagcgatcaacggcttcattattgacgacagtttcctccgtg

SEQ ID NO: 574836 - DNA, 75 bp, synthetic construct
  source 1..75: mol_type = other DNA
tgtcgatattgttgagggtcgttttgatgccgggatacgcctgggtgaaattgtggataaggatatggttgcagt

SEQ ID NO: 574837 - DNA, 75 bp, synthetic construct
  source 1..75: mol_type = other DNA
gaaggttgatgctacaatggtgggcagattttcttgatgctaaccgggatgggatggtcaggccgtttgagtttg

SEQ ID NO: 574838 - DNA, 75 bp, synthetic construct
  source 1..75: mol_type = other DNA
tgacaatgctctgggcgttctgtctagctggtggctgtggctggacgctaatttttgcgtaccacttttgcgcac

SEQ ID NO: 574839 - DNA, 75 bp, synthetic construct
  source 1..75: mol_type = other DNA
attttcattatgtaagtttagtgttccagcatcaaaatatattggagcacataatataccgataaaaatcatttc

SEQ ID NO: 574840 - DNA, 75 bp, synthetic construct
  source 1..75: mol_type = other DNA
tgtcgatattgttgatggtcgttttgatgccgggatacgcctgggtgaaattgttgataaggatatggttgcagt

SEQ ID NO: 574841 - DNA, 75 bp, synthetic construct
  source 1..75: mol_type = other DNA
tgtcgatattgttgaaggtcgttttgatgccgggatacgcctgggtgaaattgtagataaggatatggttgcagt

SEQ ID NO: 574842 - DNA, 75 bp, synthetic construct
  source 1..75: mol_type = other DNA
tacgcgcagctaaaagcgaagtcgccgccggtgaaattgaggtcatctgcatcgatccggttgtcacatccaccc

SEQ ID NO: 574843 - DNA, 75 bp, synthetic construct
  source 1..75: mol_type = other DNA
attattaattcagataagaaatttgttatgccaagtggagaagaacatcatagttatgatggaataagtgaggtg

SEQ ID NO: 574844 - DNA, 75 bp, synthetic construct
  source 1..75: mol_type = other DNA
cttccgtcccgcccgccgctcagcgcaatcggctgttgctgaatgcgattatgactggtggcggttttgtcggta

SEQ ID NO: 574845 - DNA, 75 bp, synthetic construct
  source 1..75: mol_type = other DNA
tatctgggcaacgcttttgcgcttattgatgctaacggggcatctggcgtgaggatacaaaactatccggggatt

SEQ ID NO: 574846 - DNA, 75 bp, synthetic construct
  source 1..75: mol_type = other DNA
ctaaggtgagcttaggaacctatcctcaccttacacttgcgaaggcacgaactttacgtgatgaatacttgtcgt

SEQ ID NO: 574847 - DNA, 75 bp, synthetic construct
  source 1..75: mol_type = other DNA
tttcgtagctgtatcagggaattacacagatgatgatggagtatttatttcgtctgcttccccatctgtatattg

SEQ ID NO: 574848 - DNA, 75 bp, synthetic construct
  source 1..75: mol_type = other DNA
attgaatcaaagacgttcgttgatgcatcggtcaatggacgagatcaggctatgcttacgcgtgagtccgttagt

SEQ ID NO: 574849 - DNA, 75 bp, synthetic construct
  source 1..75: mol_type = other DNA
aagtgcggcgacacgaaatttagggatgaaattacctccgagtggagaaattgattttcttgttctccatcctgt

SEQ ID NO: 574850 - DNA, 75 bp, synthetic construct
  source 1..75: mol_type = other DNA
acaacacatacgcgaagccatcgtggcgatggagcgtaataatcagagtaactactgggaagcgttgggcagggt

SEQ ID NO: 574851 - DNA, 75 bp, synthetic construct
  source 1..75: mol_type = other DNA
atgctgactttaacatcagataacacgctggtttcagcgctgtatcgtaccgaagctgttgtcgtttccctccag

SEQ ID NO: 574852 - DNA, 75 bp, synthetic construct
  source 1..75: mol_type = other DNA
accagtagttgtcctttagatagcccacatgagaatgataattcgtcagggagtcagccgaatgttgggaaggat

SEQ ID NO: 574853 - DNA, 75 bp, synthetic construct
  source 1..75: mol_type = other DNA
atattgccgcctatgccgcgctaactcaggcagaaaataccactaataatagcgactatctgtatacgatggggg

SEQ ID NO: 574854 - DNA, 75 bp, synthetic construct
  source 1..75: mol_type = other DNA
ctgacggggaaatcacccgtcatcagggaatttctccgttttttcaggagaaattcaatgaaggtatctacattt

SEQ ID NO: 574855 - DNA, 75 bp, synthetic construct
  source 1..75: mol_type = other DNA
ccgccgtatccgtcaaatggcgggctacctgccggtaattatggcactgttgcaaatagtcggtggtgataaact

SEQ ID NO: 574856 - DNA, 75 bp, synthetic construct
  source 1..75: mol_type = other DNA
aatgggtaataactggcaacactttcgtaggtgtacccggagtggtagggcagacagggtctggaaggacagttt

SEQ ID NO: 574857 - DNA, 75 bp, synthetic construct
  source 1..75: mol_type = other DNA
gaggctaaagccatcctgattgctgattgtgaaaatgggggggggttatgcgtgatgatcgttttaattccctga

SEQ ID NO: 574858 - DNA, 75 bp, synthetic construct
  source 1..75: mol_type = other DNA
aataaccatatttgagtggatagaatcctgcatgccggaaggtgaaaggtgtgtaaaaaatgctgaaggtactgt

SEQ ID NO: 574859 - DNA, 75 bp, synthetic construct
  source 1..75: mol_type = other DNA
gcgccggacattattgcgtcaggctgcgccaccgggaatgaaggttaacgtggtcaatattgaaaaagccgtcgc

SEQ ID NO: 574860 - DNA, 75 bp, synthetic construct
  source 1..75: mol_type = other DNA
aaaatgaatacccattcattgttgagtggattgcttaccatatggctcttggcattaatgatatatatattgccg

SEQ ID NO: 574861 - DNA, 75 bp, synthetic construct
  source 1..75: mol_type = other DNA
atgtgcaataaaaccacaccggacgcagccgccgccgcgctcactacgctgatgcacgcgctgattgatatttct

SEQ ID NO: 574862 - DNA, 75 bp, synthetic construct
  source 1..75: mol_type = other DNA
cagcagccgccgcgctcactacgctgatgcacgcgcttattgatatttctgttattgctgacagggcgcataagc

SEQ ID NO: 574863 - DNA, 75 bp, synthetic construct
  source 1..75: mol_type = other DNA
tttctccattgttactattgttcagtttatcgtgattactaaaggttcggaacgtgtggctgaagttgctgcccg

SEQ ID NO: 574864 - DNA, 75 bp, synthetic construct
  source 1..75: mol_type = other DNA
tacagtacacgattaccggaattgagtcatcacgggatgaaataccgttcggactcgatgaagatcaaaacaaca

SEQ ID NO: 574865 - DNA, 75 bp, synthetic construct
  source 1..75: mol_type = other DNA
tacactgggttacttggaatggctgcgtattaatcgacagtatgaccacaattaacgaggccagtgtatcaccag

SEQ ID NO: 574866 - DNA, 75 bp, synthetic construct
  source 1..75: mol_type = other DNA
atgaccgtctgatccacggccaggtcactaccgtctggtcgaaagtggctaacgcccagcgcattattatctgca

SEQ ID NO: 574867 - DNA, 75 bp, synthetic construct
  source 1..75: mol_type = other DNA
gtgatgcccaaaaattaacaaaaattggctgttatactcgcacggccatggatgaaatgtacaatcatttatctg

SEQ ID NO: 574868 - DNA, 75 bp, synthetic construct
  source 1..75: mol_type = other DNA
aatattcagatgaagtggtttcgactttgatcaagaaacctgtcatcgtaaatagtaatggtgaacaatattatt

SEQ ID NO: 574869 - DNA, 75 bp, synthetic construct
  source 1..75: mol_type = other DNA
caaacgcattcacagcgcaacagcaggcaccaaatccgcgagaatatttcggggaaaatctggatgatttcacac

SEQ ID NO: 574870 - DNA, 75 bp, synthetic construct
  source 1..75: mol_type = other DNA
attttaaaccatatacactggatttttgaattatggctaaatgtaactaatgaaaattacaatgaagtttatatt

SEQ ID NO: 574871 - DNA, 75 bp, synthetic construct
  source 1..75: mol_type = other DNA
gacattctcgcaacctttctcatccgttgttcaaatgttacgccctggcgttggacgttggacgttgggatatta

SEQ ID NO: 574872 - DNA, 75 bp, synthetic construct
  source 1..75: mol_type = other DNA
gcaacaatctggacatcgtgcgaatgtgtagaatgtgacgcagattatatttccatcggcgaagcgttggcgaat

SEQ ID NO: 574873 - DNA, 75 bp, synthetic construct
  source 1..75: mol_type = other DNA
cgagttataccgggatgccggtttccactactcacgtactctcctcttctgtcgcggggacgatggtggtagatg

SEQ ID NO: 574874 - DNA, 75 bp, synthetic construct
  source 1..75: mol_type = other DNA
tggcctctgcagtaactaatattccgaatttatttttattgatatatgtgttttgttattcgtcatttaacataa

SEQ ID NO: 574875 - DNA, 75 bp, synthetic construct
  source 1..75: mol_type = other DNA
ttgtgtgattataagttttattaatatcgacttgatatataaattgtttttatcttgtgtttttttatttgctat

SEQ ID NO: 574876 - DNA, 75 bp, synthetic construct
  source 1..75: mol_type = other DNA
aatggtcatactaaaattggccgcgacaatgagatttatcagttcgcctccatcggcgaagttaaccaggatctg

SEQ ID NO: 574877 - DNA, 75 bp, synthetic construct
  source 1..75: mol_type = other DNA
gaaaatattgtattggcgaactgtgtggcggatgacccagcgttacccagttatatccctgatgattacactgca

SEQ ID NO: 574878 - DNA, 75 bp, synthetic construct
  source 1..75: mol_type = other DNA
tggcgaaagttgttgagaagatgaaatcctacggtggcatcgccagtgtggcgcagattcttaccacttctgacg

SEQ ID NO: 574879 - DNA, 75 bp, synthetic construct
  source 1..75: mol_type = other DNA
ctggccgtaatttcagcaggcgttattagtacgaagttacagcgtaaaataccggtatccttgatcatcagcggt

SEQ ID NO: 574880 - DNA, 75 bp, synthetic construct
  source 1..75: mol_type = other DNA
ttggctgatgtggcccgcaggaaaaaacgtcgtttctctgtactgttcattgactgggaggctcagtaccagtgc

SEQ ID NO: 574881 - DNA, 75 bp, synthetic construct
  source 1..75: mol_type = other DNA
gaaggtgaactgctgggcgaaaacactgaaaccagtgaagaagacgtgtctttcggcggtgcaacgctgggggct

SEQ ID NO: 574882 - DNA, 75 bp, synthetic construct
  source 1..75: mol_type = other DNA
tggctctgagattctaattgatcaagcatctcttgggaaaaaccctagaaaattgactccaagagagtgtgcaag

SEQ ID NO: 574883 - DNA, 75 bp, synthetic construct
  source 1..75: mol_type = other DNA
gttattttgatgctattccaacttctttggatgaggccgctaaaatagatggagcagggcatctgactattttta

SEQ ID NO: 574884 - DNA, 75 bp, synthetic construct
  source 1..75: mol_type = other DNA
tagataaagcagatgcagatttaatttatttttgtgatgatgatgttgtattaagtgaaaattttgatgagatta

SEQ ID NO: 574885 - DNA, 75 bp, synthetic construct
  source 1..75: mol_type = other DNA
ttgtaagctttaaatttaatattctcgatagagaaaaacaaaatagtgccttagttattcttgacaaattccatg

SEQ ID NO: 574886 - DNA, 75 bp, synthetic construct
  source 1..75: mol_type = other DNA
gctgccgtaaaacgtgctggcattcgtcgtcggaatccatatcacacacggcatactttcgcctgctggttgtta

SEQ ID NO: 574887 - DNA, 75 bp, synthetic construct
  source 1..75: mol_type = other DNA
aagtttactttaaaagatattcactctaagcattacattatgtcacattataacatatattaccaaccaatatat

SEQ ID NO: 574888 - DNA, 75 bp, synthetic construct
  source 1..75: mol_type = other DNA
gttaactcctgaaaaattattagtcttgcaggatcatgtgcttaattataatgtcgaggtttcattggtggaaca

SEQ ID NO: 574889 - DNA, 75 bp, synthetic construct
  source 1..75: mol_type = other DNA
cttgcaagttatggacaggctggagacagtggttctccactatatgcatttgacacacttctgaataaatgggtt

SEQ ID NO: 574890 - DNA, 75 bp, synthetic construct
  source 1..75: mol_type = other DNA
caaggtcctgtttctggcgtttacgccaataaaaatcggtaccctgtattttatcgtatggggtcaggtacccaa

SEQ ID NO: 574891 - DNA, 75 bp, synthetic construct
  source 1..75: mol_type = other DNA
acaacgtttaaattactgggttgattatagagttttgcgcgctgctgattttggtgtacctcaaaatagagaacg

SEQ ID NO: 574892 - DNA, 75 bp, synthetic construct
  source 1..75: mol_type = other DNA
atccggttcagtatatagattcaatgggactggcatcaaaatatggacacttaaataatggcggatatggagcga

SEQ ID NO: 574893 - DNA, 75 bp, synthetic construct
  source 1..75: mol_type = other DNA
ctggaaagcacagtccgttatctgggcattgaagtcgatgatgcgttagagatctctgaatcgattgaagtctaa

SEQ ID NO: 574894 - DNA, 75 bp, synthetic construct
  source 1..75: mol_type = other DNA
caggggaggaaatcttgatctaaatggtaataatattacctttactaggttgaatgctgatgattatggggcgaa

SEQ ID NO: 574895 - DNA, 75 bp, synthetic construct
  source 1..75: mol_type = other DNA
ctggcggtgctgctgggcggcatggttggcgcgggtattgtactggggcgtaacgcgctgcgtaattacaacgcg

SEQ ID NO: 574896 - DNA, 75 bp, synthetic construct
  source 1..75: mol_type = other DNA
gcctaagaacaaaatatatgagcacagcgcggcaagcactgggttgaagtcactttttgtagagcaagtagagca

SEQ ID NO: 574897 - DNA, 75 bp, synthetic construct
  source 1..75: mol_type = other DNA
gcagggtatggcattaatgaatgattcggctgtgccagctatagcaatgctaagagaagaggatactacaagcgt

SEQ ID NO: 574898 - DNA, 75 bp, synthetic construct
  source 1..75: mol_type = other DNA
ggagcaaaaagaaatggtatagatgatgatactcacgctatagaatctgcgctgtcagcatcaaaaaaatattca

SEQ ID NO: 574899 - DNA, 75 bp, synthetic construct
  source 1..75: mol_type = other DNA
acccctgttgctggggattatcggtaagataaccgccagggcgctggtactggcaagtccggtgcttgcagtgtt

SEQ ID NO: 574900 - DNA, 75 bp, synthetic construct
  source 1..75: mol_type = other DNA
agtaggaaagcggatcgtcagcgcgtttaaacagcttggcctggatacaagtttggacgaggtattttcagatga

SEQ ID NO: 574901 - DNA, 75 bp, synthetic construct
  source 1..75: mol_type = other DNA
agcgcggcaagcactgggttgaagtcactttttgtagagcaagtagagcaaatcctttgggcttacaagctatcg

SEQ ID NO: 574902 - DNA, 75 bp, synthetic construct
  source 1..75: mol_type = other DNA
agggcggctatagccgccttttttacgggtcctcccggtggggtggcctgccacggggcgggagcggcgcggaaa

SEQ ID NO: 574903 - DNA, 75 bp, synthetic construct
  source 1..75: mol_type = other DNA
gcgatcatcggcggtatgacagcagtccatcagttctgcatcattggtgcgcacgtgatggttggcggttgttcc

SEQ ID NO: 574904 - DNA, 75 bp, synthetic construct
  source 1..75: mol_type = other DNA
tggttctgctggcgttggtgctgtccagggtggaacaggcggaacctcaatcattaacggcattagcggattggg

SEQ ID NO: 574905 - DNA, 75 bp, synthetic construct
  source 1..75: mol_type = other DNA
agagttcggtaagtaaccgttatggtacgacgaaagtgtttgaaagccagaatttgacggataaacagatccaca

SEQ ID NO: 574906 - DNA, 75 bp, synthetic construct
  source 1..75: mol_type = other DNA
gctgaaaatggtcatatggccgtacagctgtggcacaccggacgcatttctcacgccagcctgcaacctggcggt

SEQ ID NO: 574907 - DNA, 75 bp, synthetic construct
  source 1..75: mol_type = other DNA
tttgggaaaaagaactacccatgtataaagcatggggagattttgtcgtctcaaatatttgcaaagaactctcag

SEQ ID NO: 574908 - DNA, 75 bp, synthetic construct
  source 1..75: mol_type = other DNA
tcattgacgtaggacagtctgaaagctcaaaacaaattactctaaaagcgcaagtcgtcccgacagataaagctg

SEQ ID NO: 574909 - DNA, 75 bp, synthetic construct
  source 1..75: mol_type = other DNA
acgcagtgaagctaggaaaatgctcgctgctggaggcgatccaggggtggcaaaaaaagagaaaaaatcgcgcag

SEQ ID NO: 574910 - DNA, 75 bp, synthetic construct
  source 1..75: mol_type = other DNA
ggaactggggacctgaaagtggatgggggtcacctggtgctcagtggtactctgtcacaggatggtggggtctcc

SEQ ID NO: 574911 - DNA, 75 bp, synthetic construct
  source 1..75: mol_type = other DNA
ctgaagatgaaagcgattgttgcccgtggcgcaggaacagtgattgtcacgctgggtgaaaacggcagcattgcc

SEQ ID NO: 574912 - DNA, 75 bp, synthetic construct
  source 1..75: mol_type = other DNA
gactacggcacaaagctgaagcaggatctcgcccgcatgggcgtcgatatcagccatgtccatacgaaacacggc

SEQ ID NO: 574913 - DNA, 75 bp, synthetic construct
  source 1..75: mol_type = other DNA
caacgaaaactgccgaatctaaattcgttgcggatgataaaaacgcggtactcaccgcatcatctgatatgcaat

SEQ ID NO: 574914 - DNA, 75 bp, synthetic construct
  source 1..75: mol_type = other DNA
atgacaacaacgggaatattttctggtgtgatgcgcatcgtcaggttaccggaaaatgtgaagccatgtctgttg

SEQ ID NO: 574915 - DNA, 75 bp, synthetic construct
  source 1..75: mol_type = other DNA
agcagtttttcgaggatcgccttctccgggtgctacagaccggtatggaggatgccagttggcatgtcggtccca

SEQ ID NO: 574916 - DNA, 75 bp, synthetic construct
  source 1..75: mol_type = other DNA
aatcggggcacatcatcaatacggcctccattgcaggccacctggtttttcccgcttctgccgtttactctgcca

SEQ ID NO: 574917 - DNA, 75 bp, synthetic construct
  source 1..75: mol_type = other DNA
cccctgaagaccgtgacgctgacaccttccgttgtgtcatcctggagttatcaggaaggtgaacgggggagctct

SEQ ID NO: 574918 - DNA, 75 bp, synthetic construct
  source 1..75: mol_type = other DNA
ggggttcaacggaaatctggtcaataaaggcagttttaccgtctgtcaggtggcaagcggtggtcctccccgccg

SEQ ID NO: 574919 - DNA, 75 bp, synthetic construct
  source 1..75: mol_type = other DNA
atttttaaacataaaatgagaatcgttcagtacaaaaaagcagcgttgcgtaatctttccctgattaaatacgct

SEQ ID NO: 574920 - DNA, 75 bp, synthetic construct
  source 1..75: mol_type = other DNA
tgattatttttatgggttgagtagttccagtggtggctatacaatttttgaggctataaatacttataaatatga

SEQ ID NO: 574921 - DNA, 75 bp, synthetic construct
  source 1..75: mol_type = other DNA
ccattaccagatagctatcgtaactttttatcttattttggagataatataatgtttgattatattatgtcattt

SEQ ID NO: 574922 - DNA, 75 bp, synthetic construct
  source 1..75: mol_type = other DNA
atgtcaaatagtatttcgctgatagcgatattatcattatttacactattgccgtttataatagcatccggaaca

SEQ ID NO: 574923 - DNA, 75 bp, synthetic construct
  source 1..75: mol_type = other DNA
gtacaacaaataacgctcatatcatcaatcacggcaatcaggaggtatatggcgggatttctaatggaagtatta

SEQ ID NO: 574924 - DNA, 75 bp, synthetic construct
  source 1..75: mol_type = other DNA
cccaaatccgaacccaaacccaaatccgaacccaaatccgaacccaaatccgaacccaaacccaaatccgaaccc

SEQ ID NO: 574925 - DNA, 75 bp, synthetic construct
  source 1..75: mol_type = other DNA
tgtgtgtttgccttgaggggaaaagaaaaggggaggtctggttttgggatcatgaaactgatcctgtttttaatg

SEQ ID NO: 574926 - DNA, 75 bp, synthetic construct
  source 1..75: mol_type = other DNA
taaagtcggtacatatacggtgactgcatcgttccataacggcgtaacaatacagacacagacaaccgtgaaagt

SEQ ID NO: 574927 - DNA, 75 bp, synthetic construct
  source 1..75: mol_type = other DNA
cccagagcaaactatttaaaccactgtagttcccgaggcatcgggtcactgtacagtgaatgtggagatatgggg

SEQ ID NO: 574928 - DNA, 75 bp, synthetic construct
  source 1..75: mol_type = other DNA
aaaaatgagatcacaggtaatggcgtcgatagcgcaacgctaactgcaacggtcaaagatcagttcgacaatgag

SEQ ID NO: 574929 - DNA, 75 bp, synthetic construct
  source 1..75: mol_type = other DNA
gtgaacttcaccagcaacgcagcgacagccgaaatgacgaacggcggtcaagccgtgacgaacgaacagggtaag

SEQ ID NO: 574930 - DNA, 75 bp, synthetic construct
  source 1..75: mol_type = other DNA
ttaatgtcaacgctgatgcgtctacggcacatctcaccttgctacaggcactttttgatacagtctccgcaggcg

SEQ ID NO: 574931 - DNA, 75 bp, synthetic construct
  source 1..75: mol_type = other DNA
atttaaaccacagtagttcccgaggcatcgggtcactgtacagtgaatggggagatatggggcattacacgactg

SEQ ID NO: 574932 - DNA, 75 bp, synthetic construct
  source 1..75: mol_type = other DNA
ccaaacccaaatccagacccgactcccgatccaacgccgacacccgttccggagaaacgcatcacgccttctacg

SEQ ID NO: 574933 - DNA, 75 bp, synthetic construct
  source 1..75: mol_type = other DNA
gtggcgggttactctgcctgcctgaccagcttcacttcgtcaatacggttctcactgcacgcttacattcaattc

SEQ ID NO: 574934 - DNA, 75 bp, synthetic construct
  source 1..75: mol_type = other DNA
tatggaaccttcagtgccggatacagctacggtaatgacagcagccaatacaattacggcgttaccggcggcgtg

SEQ ID NO: 574935 - DNA, 75 bp, synthetic construct
  source 1..75: mol_type = other DNA
aattcgataaccagcactcttttcatggctatcaatggcgtacgcagtacatcaaagatatcccggaaaccaaca

SEQ ID NO: 574936 - DNA, 75 bp, synthetic construct
  source 1..75: mol_type = other DNA
gttttatccatatacatcacctgattccgctatcagacatcaaagagaattactctctggatcccaaaaaagatc

SEQ ID NO: 574937 - DNA, 75 bp, synthetic construct
  source 1..75: mol_type = other DNA
agaaaaaaattcttagaggaatatggttattttgatgaaaattatgcgttattagaggattatccattttatata

SEQ ID NO: 574938 - DNA, 75 bp, synthetic construct
  source 1..75: mol_type = other DNA
tgttccattaagtgctgatgacatattctatgataatatgagcctaaagaaaataatagaggtttttgctaacac

SEQ ID NO: 574939 - DNA, 75 bp, synthetic construct
  source 1..75: mol_type = other DNA
actaaacaatggattgatataatattctcgctaatgttatttctttccgtattttcaccactacttttatatatc

SEQ ID NO: 574940 - DNA, 75 bp, synthetic construct
  source 1..75: mol_type = other DNA
aataaatatatcccaattgcaacatgtggggggggggcaaggatattattacccatcggtaaagtttagtgatat

SEQ ID NO: 574941 - DNA, 75 bp, synthetic construct
  source 1..75: mol_type = other DNA
tttgagtcagtatattttgatgatgaagctggcggtgattattttattccaaaaacaacggcggttgaattgtgg

SEQ ID NO: 574942 - DNA, 75 bp, synthetic construct
  source 1..75: mol_type = other DNA
accctgaaatgacgttcctggaaaaagcagaaatcgaaaaactgttaaatgttttggatggtgatgacttacttg

SEQ ID NO: 574943 - DNA, 75 bp, synthetic construct
  source 1..75: mol_type = other DNA
actggaggcgtttgactacattctcaaaccgtatcaggagtcacgtattaccgggatgctgcaaaaactggaagc

SEQ ID NO: 574944 - DNA, 75 bp, synthetic construct
  source 1..75: mol_type = other DNA
ttctgcagacaattacgcaaagttaaacctgatctaccgcgaggacaggccacacacatacttcgccatacgttt

SEQ ID NO: 574945 - DNA, 75 bp, synthetic construct
  source 1..75: mol_type = other DNA
ttcatgctcggtggaaagccgcctctgcgtgatatccctgagcgcgttggctacgaccttgttctattggggctt

SEQ ID NO: 574946 - DNA, 75 bp, synthetic construct
  source 1..75: mol_type = other DNA
agccactattcaggaaatgtttgactgtgatgtcttacacattccatggagtgaattaaaagtagggaagccggt

SEQ ID NO: 574947 - DNA, 75 bp, synthetic construct
  source 1..75: mol_type = other DNA
gccggtttttcgttatccatttacctgccgtttattccgtttatcttctggatgaccggcatcggtaactggata

SEQ ID NO: 574948 - DNA, 75 bp, synthetic construct
  source 1..75: mol_type = other DNA
aactcaagaccctcaatcagcaatcttaaaattgattgggtttaacctaacaagaatgactaactggacagccac

SEQ ID NO: 574949 - DNA, 75 bp, synthetic construct
  source 1..75: mol_type = other DNA
tattatctagaaagaggggattcttcattacgtttctacccagacgaaacgacgatccggggggatgaagacacg

SEQ ID NO: 574950 - DNA, 75 bp, synthetic construct
  source 1..75: mol_type = other DNA
aaataacaaacttccagattaaaagtactgaacctgtctattcaaatcagacatggacagggcaacgtatcatga

SEQ ID NO: 574951 - DNA, 75 bp, synthetic construct
  source 1..75: mol_type = other DNA
tatcaagatattcatattaactttggttcttttgctcgaaggaccaagataagacctcttgatgatatagatatc

SEQ ID NO: 574952 - DNA, 75 bp, synthetic construct
  source 1..75: mol_type = other DNA
aatcattcctcgtgagaggactcatcttaaaccaattaagataagtggaatatcaagaccccttgccgtgagtaa

SEQ ID NO: 574953 - DNA, 75 bp, synthetic construct
  source 1..75: mol_type = other DNA
acgaaaactacactggcaatgttttatggcgaaaagaggattttattaataaagtcgacgatatctcaacatctc

SEQ ID NO: 574954 - DNA, 75 bp, synthetic construct
  source 1..75: mol_type = other DNA
ccttggctatagctggttatacggcacctttaaagatttcgacggtacttttacctttgacgaaaaaaatccgga

SEQ ID NO: 574955 - DNA, 75 bp, synthetic construct
  source 1..75: mol_type = other DNA
acggtatcggtgatggacttcacctccggcctgaactggcaggagaaaaccctgaccctgaaaccgacgtcgctg

SEQ ID NO: 574956 - DNA, 75 bp, synthetic construct
  source 1..75: mol_type = other DNA
tattaatgatctggcgctgaaagacattcaggtcaacatcgacagtaaaaaaatgcctccttctgaacaggttga

SEQ ID NO: 574957 - DNA, 75 bp, synthetic construct
  source 1..75: mol_type = other DNA
atttatcttctatctacgatggagtcgttgaaaatgaactttcaaaattagttagctccgtagttagggcatgta

SEQ ID NO: 574958 - DNA, 75 bp, synthetic construct
  source 1..75: mol_type = other DNA
actttatgggattatgcggggcaaggtcctgctaccggatattatcgccgacaattagtgttaatgctttgcacc

SEQ ID NO: 574959 - DNA, 75 bp, synthetic construct
  source 1..75: mol_type = other DNA
gataaacttcctcctgagcggccaggtacgcgtccattatcggcaccactatatccgtttagccaaatttttccg

SEQ ID NO: 574960 - DNA, 75 bp, synthetic construct
  source 1..75: mol_type = other DNA
agtacttttggctatcaggcggcagttacaaacagggttctttataagcagtcaagtgatttttttgatttttgc

SEQ ID NO: 574961 - DNA, 75 bp, synthetic construct
  source 1..75: mol_type = other DNA
attctatttatatgcttatatttatggccattaaggtttttttatcgaccattaccaatggtatgcaatccgtat

SEQ ID NO: 574962 - DNA, 75 bp, synthetic construct
  source 1..75: mol_type = other DNA
gttgatctgcagaagtcgaaaaatgaagtggtcgctgacggcaatgatagcgccacaatgaccgcgacagtccgg

SEQ ID NO: 574963 - DNA, 75 bp, synthetic construct
  source 1..75: mol_type = other DNA
gacgggatcgccacagctacgctgaccagtttgaaaaatggtgattatagggttactgaaccgccccgggtttcc

SEQ ID NO: 574964 - DNA, 75 bp, synthetic construct
  source 1..75: mol_type = other DNA
gtacgcgtccattatcggcaccactatatccgtttagccaaatttttccggagttagatgattgggggaatagat

SEQ ID NO: 574965 - DNA, 75 bp, synthetic construct
  source 1..75: mol_type = other DNA
atgaaacacacaccgtttttcttcgcattctttttaccttcccctgaatgggaggcgtttcgtcgtgtgaaacag

SEQ ID NO: 574966 - DNA, 75 bp, synthetic construct
  source 1..75: mol_type = other DNA
taaataattatattaaagattcattccttgaggatgtctttaagctttataaacttggggggtggccgtgtgggc

SEQ ID NO: 574967 - DNA, 75 bp, synthetic construct
  source 1..75: mol_type = other DNA
tcatgaaatacagcaagcgaaagttattgatttaaatgaccgggttctcaatcttgataacccggatgataaaat

SEQ ID NO: 574968 - DNA, 75 bp, synthetic construct
  source 1..75: mol_type = other DNA
atatcgttttttcaatagtttttattaaaatatatgggcttcctggtgtattgctaggttccattatctcttatt

SEQ ID NO: 574969 - DNA, 75 bp, synthetic construct
  source 1..75: mol_type = other DNA
cgactcaccgaaaaattactcgcagcaggaaattgacaactctgtagatattattaaaaatggagttgccagtta

SEQ ID NO: 574970 - DNA, 75 bp, synthetic construct
  source 1..75: mol_type = other DNA
aatgcgaagacgaacaataaggcctcccaaatcggggggccttttttattgataacaaaaaggcaacactatgac

SEQ ID NO: 574971 - DNA, 75 bp, synthetic construct
  source 1..75: mol_type = other DNA
ccgcaaaatgagtcagggaaaacgacacaatcaggcgcttatcgccctggcgagacgacgctgcgacgttctgtt

SEQ ID NO: 574972 - DNA, 75 bp, synthetic construct
  source 1..75: mol_type = other DNA
agttacagcaggaagggagcgaagacggtcacggtgtggtgttcccggctgaactggtggggctgctggacaggc

SEQ ID NO: 574973 - DNA, 75 bp, synthetic construct
  source 1..75: mol_type = other DNA
gttgcgaactggcgtaaaacagcttatcagtatggcaccagatatcactgtggttggcgaagcgagtaatggcga

SEQ ID NO: 574974 - DNA, 75 bp, synthetic construct
  source 1..75: mol_type = other DNA
aaaatcctatgatattaatgaggccgggcaagttcatgtatacattggtgatttggctcatttaccttatgaaga

SEQ ID NO: 574975 - DNA, 75 bp, synthetic construct
  source 1..75: mol_type = other DNA
gtcatgaactggatgatgtctaacgttacggtaaaaccggacaaaaacgacaacatcttcccgaataaatccacg

SEQ ID NO: 574976 - DNA, 75 bp, synthetic construct
  source 1..75: mol_type = other DNA
cggcgcgtgctggaagagtacatccaggtgcgctttatcgacagcgacagcgttcagcctacgcaggcagaactg

SEQ ID NO: 574977 - DNA, 75 bp, synthetic construct
  source 1..75: mol_type = other DNA
actactgaaccgattcctcgcagagattgccatcatgagttatcagaaaaccccatccctggtaatgagcatatt

SEQ ID NO: 574978 - DNA, 75 bp, synthetic construct
  source 1..75: mol_type = other DNA
agtattgaggaaatttgtcgctggtttcgcgtgcctcctttcatggtcggtcataccacgaaacaaagcagctgg

SEQ ID NO: 574979 - DNA, 75 bp, synthetic construct
  source 1..75: mol_type = other DNA
gaaataggacggtgcctgctggacagcgatgatgaggtgttcgcggagttctctgtagaaggtctgctgcgcgcc

SEQ ID NO: 574980 - DNA, 75 bp, synthetic construct
  source 1..75: mol_type = other DNA
gcctcagcgccggacttagcccgaaagagacataccaaaagctgctggatatgcagcttgagcgcgtaccgttcg

SEQ ID NO: 574981 - DNA, 75 bp, synthetic construct
  source 1..75: mol_type = other DNA
gacttcattgatacatcgtcaatcggcctcagcgccggacttagcccgaaagagacataccaaaagctgctggat

SEQ ID NO: 574982 - DNA, 75 bp, synthetic construct
  source 1..75: mol_type = other DNA
cggtatgccatgacgtttgaagaatttgttccggcattttcttcctggtttgccggtaaccggtgtggagtggca

SEQ ID NO: 574983 - DNA, 75 bp, synthetic construct
  source 1..75: mol_type = other DNA
tttcacctggctacgggcaaacaggttgtcgagcttctcttcgtactggtagtagttgatgctttcgtacagctc

SEQ ID NO: 574984 - DNA, 75 bp, synthetic construct
  source 1..75: mol_type = other DNA
ggtggctcttggcagacaaccacaggcggagaagccaatcaggctcccaggaaaccatcttcacccgcgccagtt

SEQ ID NO: 574985 - DNA, 75 bp, synthetic construct
  source 1..75: mol_type = other DNA
ttatctcattgataacagcaatcgttatggtggtgacattgcaaaaatgcttgcgcaatataacggcggcaatgc

SEQ ID NO: 574986 - DNA, 75 bp, synthetic construct
  source 1..75: mol_type = other DNA
cttatgcgtataaagatcacgagaatatcattgcctcggcaaattcatcatgggactacaccaagagaaatgttg

SEQ ID NO: 574987 - DNA, 75 bp, synthetic construct
  source 1..75: mol_type = other DNA
caaaaaggggcgaccttggaatcggggccaaatgctcgttttgccagtttcccgacgatgctcgaaggcattgct

SEQ ID NO: 574988 - DNA, 75 bp, synthetic construct
  source 1..75: mol_type = other DNA
tcaactttgattattttaacgaagtgcaggagtggcaaaaaaacaatccgggtaaggtctggcctggaggattgc

SEQ ID NO: 574989 - DNA, 75 bp, synthetic construct
  source 1..75: mol_type = other DNA
agtcttcttggggctacagccggaacagtagctggattggctattcctacaaatgacacacctaccaccagtgag

SEQ ID NO: 574990 - DNA, 75 bp, synthetic construct
  source 1..75: mol_type = other DNA
ccaaatgcaggccgcacgtgccacctattcgccatatttttctggcacagaagaactggttcagcatctggcgaa

SEQ ID NO: 574991 - DNA, 75 bp, synthetic construct
  source 1..75: mol_type = other DNA
aaagaatctgcccaaacttatgagcgcgcttgcatctctcgttaagcaatataaaggttcaggacttactcaggg

SEQ ID NO: 574992 - DNA, 75 bp, synthetic construct
  source 1..75: mol_type = other DNA
tggggcttccggttgaatatctggaatttatgccggacggtgtgattgcagtaggtgactttaagcgcggttatt

SEQ ID NO: 574993 - DNA, 75 bp, synthetic construct
  source 1..75: mol_type = other DNA
acgggtctggataaacttggtaagtacgtaaatagcccggatttttataacgacctgaataatttcgccggaaat

SEQ ID NO: 574994 - DNA, 75 bp, synthetic construct
  source 1..75: mol_type = other DNA
aggatggaatccaaatgcaatcagcaaagctggtgcgaaaggtttatttcaatttattccagaaacagcaaaagc

SEQ ID NO: 574995 - DNA, 75 bp, synthetic construct
  source 1..75: mol_type = other DNA
attgccctgggtgacttcaaacgcggttactacattgttgatcacgaaacaggtgttcgcaccagaccggacaac

SEQ ID NO: 574996 - DNA, 75 bp, synthetic construct
  source 1..75: mol_type = other DNA
gtattcaccatgaacatggtttacacctatgcactgatcgagggttaccagaccaatgggcaaaccgcctatttc

SEQ ID NO: 574997 - DNA, 75 bp, synthetic construct
  source 1..75: mol_type = other DNA
attacgttgtggttatgcgtttgtacttgaacagggttataaaaatatcattactattgacggtaatgataagga

SEQ ID NO: 574998 - DNA, 75 bp, synthetic construct
  source 1..75: mol_type = other DNA
atgactgaattcatatctcaaacacttcgtaccaaatggcaagtccctgcctacgaaaaccaaatgtggcttggt

SEQ ID NO: 574999 - DNA, 75 bp, synthetic construct
  source 1..75: mol_type = other DNA
gcaccgttccgtgatattttctcatcttatgaactactggcatatctttcataccgagtcccacaacttggttat

SEQ ID NO: 575000 - DNA, 75 bp, synthetic construct
  source 1..75: mol_type = other DNA
gtgtactggaaacgcattttgccaaaggactaaagctgagcaccgtgacaaccaacggggtgaatttataccgca

SEQ ID NO: 575001 - DNA, 75 bp, synthetic construct
  source 1..75: mol_type = other DNA
cagcctgctgctgtgagccgtgttcagtccattattgatgatctgcgcgatcagatagccctgcgggtgaccgaa

SEQ ID NO: 575002 - DNA, 75 bp, synthetic construct
  source 1..75: mol_type = other DNA
tcgttcgggttcaaaaagtcatcgatgacctgcgggatcagatagccctgaaggttgagcaggcagatacgccgg

SEQ ID NO: 575003 - DNA, 75 bp, synthetic construct
  source 1..75: mol_type = other DNA
ttatgacgttgagagctagtctgaacgaagcaatattctcttatcttgaacttttattacctacatattcagaac

SEQ ID NO: 575004 - DNA, 75 bp, synthetic construct
  source 1..75: mol_type = other DNA
tgcggaaggaacaacatttggctccatgacgaaagatgatttacattcactgcaagtcgtttgcccagaacccgg

SEQ ID NO: 575005 - DNA, 75 bp, synthetic construct
  source 1..75: mol_type = other DNA
tatcaattttatgatagcaccgagagtcaaacgcttaaggcgataaagaaattatgtatttctgcggggaaggct

SEQ ID NO: 575006 - DNA, 75 bp, synthetic construct
  source 1..75: mol_type = other DNA
cgccgaagcaacccagtcggtggtacaagccacgctaactgaaggggcgattggctaccgcaaatttgccgtcat

SEQ ID NO: 575007 - DNA, 75 bp, synthetic construct
  source 1..75: mol_type = other DNA
gttctgccgttgcggataccgccgccgttgccgctctactggtgccgatgatgcgcagcgccaactatccggtca

SEQ ID NO: 575008 - DNA, 75 bp, synthetic construct
  source 1..75: mol_type = other DNA
tgttcttcatgctaatccccacaattattgtacttgctcgtaattttggtggagttggcgcgggttatgcctggt

SEQ ID NO: 575009 - DNA, 75 bp, synthetic construct
  source 1..75: mol_type = other DNA
ggttttcgcacctgagacgatcaacagccaaaccttccgcgatcgtgcgtttctgcgggcatcagcagggcaaac

SEQ ID NO: 575010 - DNA, 75 bp, synthetic construct
  source 1..75: mol_type = other DNA
atagtctctggtttcaagatttctcgatttataataagataggttttatcatgatagaaaaatcagggaactggt

SEQ ID NO: 575011 - DNA, 75 bp, synthetic construct
  source 1..75: mol_type = other DNA
tttttgatttcctgctggcgctgatgctgtttatggggctgacgaacccgcagagcgtggcagtcaatttcgttg

SEQ ID NO: 575012 - DNA, 75 bp, synthetic construct
  source 1..75: mol_type = other DNA
atggggacggttctccgggtagagtatttaagctcgatgaagactctattgcagaacgattattcgcattagaag

SEQ ID NO: 575013 - DNA, 75 bp, synthetic construct
  source 1..75: mol_type = other DNA
ccatcgtggagcggcttcgcaaaggtatgggccgtatggctaagaacgtgcgctcctacggcggcgagctggacg

SEQ ID NO: 575014 - DNA, 75 bp, synthetic construct
  source 1..75: mol_type = other DNA
ggaatgccacacaacaggcatgggttgtcgccggcgagttctgccgaacacataaaaaaacaaaaatcctctttt

SEQ ID NO: 575015 - DNA, 75 bp, synthetic construct
  source 1..75: mol_type = other DNA
cgctaaagtcgatcacgcgttccggggtgatttccagaattcgggtcgccagggagcttacgaactcacggtcgt

SEQ ID NO: 575016 - DNA, 75 bp, synthetic construct
  source 1..75: mol_type = other DNA
gcacagtcaggtaagacaacggttgagaataactacctgagtgctgatcagatcgataactttgcggcgagggcg

SEQ ID NO: 575017 - DNA, 75 bp, synthetic construct
  source 1..75: mol_type = other DNA
ggcagcaccggcgatcaggggcagaacaacgcagaacagaacaacaaggacgacaaaaccttcacgctgaccact

SEQ ID NO: 575018 - DNA, 75 bp, synthetic construct
  source 1..75: mol_type = other DNA
tctcattattttctctgttaccacgggatgtttacttggggctggctggatcctaacggcgctgctctacctgct

SEQ ID NO: 575019 - DNA, 75 bp, synthetic construct
  source 1..75: mol_type = other DNA
gccggtgaaggttggtttgtcggttcaattcacaacaccgaagatggcgcggtatgcatctggttacgtaacgtt

SEQ ID NO: 575020 - DNA, 75 bp, synthetic construct
  source 1..75: mol_type = other DNA
gtttgcagtcagcagcaccgagagatctgaatgagcagatgttctggaagcaggttgaatcaaatccttcacaag

SEQ ID NO: 575021 - DNA, 75 bp, synthetic construct
  source 1..75: mol_type = other DNA
ggtaaatcagcaacagaaatcattgctgtttccgggccgcgctgctggatgggatttgattattcgcgtggcgtg

SEQ ID NO: 575022 - DNA, 75 bp, synthetic construct
  source 1..75: mol_type = other DNA
cttatttctggcttgattcatcaccatattcataactccgagattacctcaattgaggctatggttgcagagatt

SEQ ID NO: 575023 - DNA, 75 bp, synthetic construct
  source 1..75: mol_type = other DNA
aggcttttttgcgggatatgattaacggtaagcaaaagagctggctggcgcattgtactgatgcagaggcgttat

SEQ ID NO: 575024 - DNA, 75 bp, synthetic construct
  source 1..75: mol_type = other DNA
ccttcgcggcggcagtattccgtcaggagcaggcctgcgtatcttctatcggaaccagcgtttgcaggaagatga

SEQ ID NO: 575025 - DNA, 75 bp, synthetic construct
  source 1..75: mol_type = other DNA
atgagcaccatcctgaaatgggcgggtaataaaactaccattatgtccgaactgaaaaaacatcttcctgctggc

SEQ ID NO: 575026 - DNA, 75 bp, synthetic construct
  source 1..75: mol_type = other DNA
cggaaattgctgaactggcggaaacgcatccggaagtgaaagcctttgccgatttctttgctcgctcaacgcgcg

SEQ ID NO: 575027 - DNA, 75 bp, synthetic construct
  source 1..75: mol_type = other DNA
atccagaccttgatttccagttcacttttcatgatctaaaagccaaaggaatttctgatcttgaaggtacgttaa

SEQ ID NO: 575028 - DNA, 75 bp, synthetic construct
  source 1..75: mol_type = other DNA
cgtgcgggtttaacaacccctctatgaatacaaatgcgcctataagcctacaagtgctcggtgagttttatggat

SEQ ID NO: 575029 - DNA, 75 bp, synthetic construct
  source 1..75: mol_type = other DNA
agatgaagaagaacaatgtatgatgaataaggcaatagaccttaataaaaaactaaaaactattaacctcgggcc

SEQ ID NO: 575030 - DNA, 75 bp, synthetic construct
  source 1..75: mol_type = other DNA
agcgtccttcggcaacggtatgaggggcgggggatgaccaaatgcaaaatggctgaactgctgaatgatgcacac

SEQ ID NO: 575031 - DNA, 75 bp, synthetic construct
  source 1..75: mol_type = other DNA
aagtgctcggtgagttatatggatatcaaagatattttatgcctaaaggtcctttcactggattcccatttgaat

SEQ ID NO: 575032 - DNA, 75 bp, synthetic construct
  source 1..75: mol_type = other DNA
tgtggtgagaatatcacctttcatcaggtggccaaatttagtgtgccactacaggcggggggatggagtctgtat

SEQ ID NO: 575033 - DNA, 75 bp, synthetic construct
  source 1..75: mol_type = other DNA
ggtcattgttgatgccgtctggtacaacaatcattcaaacgacgtcggtgataatggttcctggtatccagtggt

SEQ ID NO: 575034 - DNA, 75 bp, synthetic construct
  source 1..75: mol_type = other DNA
gccaacggcggatctgtgcgcggaatttacaaccatgctcagtatctcgataagcgcagagaaatgatgcagtgg

SEQ ID NO: 575035 - DNA, 75 bp, synthetic construct
  source 1..75: mol_type = other DNA
ataatgttgctcgtgatggcagtccacggtatgcaggtttactacaacaaatagcatccaagtgtgcgatattac

SEQ ID NO: 575036 - DNA, 75 bp, synthetic construct
  source 1..75: mol_type = other DNA
ccgtgttatcgattatgcagtaactctgccatatgttaatgctgaacgtattggcgtgctgggagtgtgggtaat

SEQ ID NO: 575037 - DNA, 75 bp, synthetic construct
  source 1..75: mol_type = other DNA
tattttttccctacttttgtcagaaaaaatcaaatcaaaacaaatcagaataacccgcaagaaaaaacagaagaa

SEQ ID NO: 575038 - DNA, 75 bp, synthetic construct
  source 1..75: mol_type = other DNA
tgttatagctgaacctgaagacgttgaaaaatttgtagagggcatcataaatttatatcatgagcctaacaagtt

SEQ ID NO: 575039 - DNA, 75 bp, synthetic construct
  source 1..75: mol_type = other DNA
tattgaacagcgaaaaaaaattctttctattaggccatatgcatctcgtatctatgcaaatgatttgatggtaaa

SEQ ID NO: 575040 - DNA, 75 bp, synthetic construct
  source 1..75: mol_type = other DNA
atggctattgtcggcgccgcggtggttccggcaattcagggatatattgcagatatgttccactcacttcagctt

SEQ ID NO: 575041 - DNA, 75 bp, synthetic construct
  source 1..75: mol_type = other DNA
gtccttgcgcgtatggatgagctaccggaggaggagcggctggagtccggtgtgtctgctaatgcggtaatgacg

SEQ ID NO: 575042 - DNA, 75 bp, synthetic construct
  source 1..75: mol_type = other DNA
agcgcaacggctatctcgtcagccagtggcgaaagccagatgtctctcgatgagattgaagatgtgtaccacacg

SEQ ID NO: 575043 - DNA, 75 bp, synthetic construct
  source 1..75: mol_type = other DNA
cagcgaagacggcaatacggcgtggagcgcggaatatgatgaatggggcaaccagcttaatgaggagaacccgca

SEQ ID NO: 575044 - DNA, 75 bp, synthetic construct
  source 1..75: mol_type = other DNA
ggtacagatagagttgctgcttatcatactcacggtgcagatagtcatggcgattatgttgatgaatttttttca

SEQ ID NO: 575045 - DNA, 75 bp, synthetic construct
  source 1..75: mol_type = other DNA
cgatgatggatgatacgtatgagacggatgacgggggaagtgaagcggaacaacatgcgcagtctgtagtggcac

SEQ ID NO: 575046 - DNA, 75 bp, synthetic construct
  source 1..75: mol_type = other DNA
gttgataaaaaagcaggcgggaaattaattgtctcaacgaatgcgctggaagtgagtggtacaaacagtaaaggc

SEQ ID NO: 575047 - DNA, 75 bp, synthetic construct
  source 1..75: mol_type = other DNA
ccaataaagtcatcagatgggtaacagatcctgtcgatccggtacctgaaggcgcagtctgcgggcaggcaccgg

SEQ ID NO: 575048 - DNA, 75 bp, synthetic construct
  source 1..75: mol_type = other DNA
gcggatggtgttctctcatgcgcagaaaacgctggcctgggatgccttcgctttcgccgaagtgtttctgactca

SEQ ID NO: 575049 - DNA, 75 bp, synthetic construct
  source 1..75: mol_type = other DNA
ttattgaaggtgaagaaaacgaagataatgagaaatttggaaaaaaaaagagaccagacttcagtcaaacatact

SEQ ID NO: 575050 - DNA, 75 bp, synthetic construct
  source 1..75: mol_type = other DNA
ccgcacgcgtgatcccgaaagccatcttcctgacggcggtctacggtggcgttatctttatcgctgcgtcgttct

SEQ ID NO: 575051 - DNA, 75 bp, synthetic construct
  source 1..75: mol_type = other DNA
ccggggcgacgatcgtctgcttctctttccttggtttcgatgcagtgaccacactttcggaagagacaccagacg

SEQ ID NO: 575052 - DNA, 75 bp, synthetic construct
  source 1..75: mol_type = other DNA
tcacatatctggatatccagccggagttcccgccgtggcagagaatgatcctggggggaataacgatagccagct

SEQ ID NO: 575053 - DNA, 75 bp, synthetic construct
  source 1..75: mol_type = other DNA
tgaattcggcggaatttaatgcgaataaggatgttgtgaatgcagtggttgtaaagagaaataacattattcatc

SEQ ID NO: 575054 - DNA, 75 bp, synthetic construct
  source 1..75: mol_type = other DNA
cttgcgaatggctgcaatacctgaatctcacccataatcaattaactgatattgttgcaggtaataaaaatgaac

SEQ ID NO: 575055 - DNA, 75 bp, synthetic construct
  source 1..75: mol_type = other DNA
cagtaacttagaaaataactgggatcgacttaccagtgggtttcagggagcgatgtcgggtaattctgaacaact

SEQ ID NO: 575056 - DNA, 75 bp, synthetic construct
  source 1..75: mol_type = other DNA
gcattactatgcgatcagttatgtggcgatgctggtttatgatgccataaccaccgaatggggctggtttcactg

SEQ ID NO: 575057 - DNA, 75 bp, synthetic construct
  source 1..75: mol_type = other DNA
atgatccttcatacccatgcgttgattggtgagattctggcgttccgtcttggcaaagaaacaattctgttacgt

SEQ ID NO: 575058 - DNA, 75 bp, synthetic construct
  source 1..75: mol_type = other DNA
aatcagggaaacctgctgtggcaagtacatctgcaacaatgtctgctttggtatgaccacgttcaagccaaacga

SEQ ID NO: 575059 - DNA, 75 bp, synthetic construct
  source 1..75: mol_type = other DNA
atgccagcgtgtcgcgtctgctgtatgtgatggggcgtgacaatgtgtttccggagcgcgtgtttggctatgtgc

SEQ ID NO: 575060 - DNA, 75 bp, synthetic construct
  source 1..75: mol_type = other DNA
gaagctgaaaaaaaatataaatacttgtgtaagttagatgctgatatgcgattttgtgatcaggatgtgctaaga

SEQ ID NO: 575061 - DNA, 75 bp, synthetic construct
  source 1..75: mol_type = other DNA
tagaattgccagtattgttagggatgatgcccatatcatacggagggagccagtgggggcgattgcgcgtggaaa

SEQ ID NO: 575062 - DNA, 75 bp, synthetic construct
  source 1..75: mol_type = other DNA
cgtatggcatgacgctaaatatattgccgaccacatcgcattgcagaacgcttataccaactacgttaaatcgta

SEQ ID NO: 575063 - DNA, 75 bp, synthetic construct
  source 1..75: mol_type = other DNA
aggtgacagagtcaatgtctattatccgcatcccgaacaaaagcatgagaatgatccgccaggcagcacctcgac

SEQ ID NO: 575064 - DNA, 75 bp, synthetic construct
  source 1..75: mol_type = other DNA
tcagaacagttgttagaattaatctcatctgcgctgatgattaaatctgatttcctatttactgaacgaaaatat

SEQ ID NO: 575065 - DNA, 75 bp, synthetic construct
  source 1..75: mol_type = other DNA
aactggctatatgcatcttaattccagagggtatacgagagttgaacctggtgatgaacttttgcgccctgaaga

SEQ ID NO: 575066 - DNA, 75 bp, synthetic construct
  source 1..75: mol_type = other DNA
ttacggcaataccgtgaagctgtacaactcggcgggagtgctggtcgccacgcaaatcatcaacccgcagtcggg

SEQ ID NO: 575067 - DNA, 75 bp, synthetic construct
  source 1..75: mol_type = other DNA
gcttcgttaggcggcgcatatttgtggtatctgatccgccgctatcgcaaagtgccgctgtacgaaggtgacaga

SEQ ID NO: 575068 - DNA, 75 bp, synthetic construct
  source 1..75: mol_type = other DNA
atcgattaatccgcacgtcggctttatggtcggctggtcatcattgctggattacctttttttgccgatgatcaa

SEQ ID NO: 575069 - DNA, 75 bp, synthetic construct
  source 1..75: mol_type = other DNA
gctcatggcatcaatcccgcgcagaaaaagcaggaagaaaagcttaaacagaaagacccaacgacagtcaaaaca

SEQ ID NO: 575070 - DNA, 75 bp, synthetic construct
  source 1..75: mol_type = other DNA
gagacgatgaagctcatcactccgcagccgcgttcgggttattttgtcgcacaacgtaaagcccagccgccagtg

SEQ ID NO: 575071 - DNA, 75 bp, synthetic construct
  source 1..75: mol_type = other DNA
tcatgactatatggacgatcagcatgaatggctggatatctggcagaagcatttgcaggagattattgggtatcc

SEQ ID NO: 575072 - DNA, 75 bp, synthetic construct
  source 1..75: mol_type = other DNA
aaatgaagtttattgcacgctatgtggcaaccaatgcaaccgtaacggctggtacggcgaacgctgattcacaat

SEQ ID NO: 575073 - DNA, 75 bp, synthetic construct
  source 1..75: mol_type = other DNA
gaagatccgaaggtgatactgaagcgattaaaagatctggaaaaagagattctggcggatctggatgagctggag

SEQ ID NO: 575074 - DNA, 75 bp, synthetic construct
  source 1..75: mol_type = other DNA
ctggcgttgattttaaagatcgcactcaggcggcgtttatagtgccaaaagaagatattgctgcccagaaatacg

SEQ ID NO: 575075 - DNA, 75 bp, synthetic construct
  source 1..75: mol_type = other DNA
atggcgcaagtagttcgttccgtactgattgatgttttcaaagaggcgcaacactacggagaagtccccctggct

SEQ ID NO: 575076 - DNA, 75 bp, synthetic construct
  source 1..75: mol_type = other DNA
tgctgagcatcgttcttttcttacctatcgttattttatgttttgcctctgttttattctttatatatgacataa

SEQ ID NO: 575077 - DNA, 75 bp, synthetic construct
  source 1..75: mol_type = other DNA
ttccattctggtattctaagcaaactaggtttcgaacaattccaagatttttttcatggattataatttatgtga

SEQ ID NO: 575078 - DNA, 75 bp, synthetic construct
  source 1..75: mol_type = other DNA
ttactccgcatgatctccggcctgatttgcaccctactccagttagtgggattccagaagaagttatcagatcca

SEQ ID NO: 575079 - DNA, 75 bp, synthetic construct
  source 1..75: mol_type = other DNA
taactaagggtataggcggaaaatatgaatggacaatttacccaccgttggaagagagtaaatcaacatgtcggt

SEQ ID NO: 575080 - DNA, 75 bp, synthetic construct
  source 1..75: mol_type = other DNA
caacccattcctctgactttatctctatcaggtaaaagttgtgtatccgataatcctgaatgcccaaagggaatt

SEQ ID NO: 575081 - DNA, 75 bp, synthetic construct
  source 1..75: mol_type = other DNA
gggttttatatggttattttcttgaacaactattctctgtagcgactggtcgtctcgataaacttcttgaaccgc

SEQ ID NO: 575082 - DNA, 75 bp, synthetic construct
  source 1..75: mol_type = other DNA
gagctttctgattttgaaaaaagaataaaaaagggtgtaagaaaaaataagaagtatgctctaggattaataaga

SEQ ID NO: 575083 - DNA, 75 bp, synthetic construct
  source 1..75: mol_type = other DNA
caatagcctgggtaaatcgctgaccgactggcgtgttctggccctcgcgctggtatacgggttcatctgctttgg

SEQ ID NO: 575084 - DNA, 75 bp, synthetic construct
  source 1..75: mol_type = other DNA
aggagaatatctttcttattatatgagagaaatgctcctttcattgttgtaagttgtttgttactgttacaagtt

SEQ ID NO: 575085 - DNA, 75 bp, synthetic construct
  source 1..75: mol_type = other DNA
cggcgttgacggctgggctcgaatcatcaacgaacatcctcagtttgatggaatggagtttgcctacgacaagga

SEQ ID NO: 575086 - DNA, 75 bp, synthetic construct
  source 1..75: mol_type = other DNA
gccgccgtttccatcggcccgtttcgtccccgaggtgaccgtatcaccacgtccgccacgctggcgcaccggcgg

SEQ ID NO: 575087 - DNA, 75 bp, synthetic construct
  source 1..75: mol_type = other DNA
gccgccgtttccatcggcccgtttcgaccccgaagtgaccgtatcaccacgtccgccacgctggcgcactggcgg

SEQ ID NO: 575088 - DNA, 75 bp, synthetic construct
  source 1..75: mol_type = other DNA
acggctgaacgcattgagcgcttgctggaacttgctccgccgcccgcgatgccgccgtttccatcggcccgtttc

SEQ ID NO: 575089 - DNA, 75 bp, synthetic construct
  source 1..75: mol_type = other DNA
attcctgccgtggttgattacctggcaatcaaaaccatgctctatgtaatcataatatttgcaatatctttattt

SEQ ID NO: 575090 - DNA, 75 bp, synthetic construct
  source 1..75: mol_type = other DNA
gcgcatattgcgaacgaggatttgcgtgtcatgggcttggccgattccatcagccggctcacccatcttctggcc

SEQ ID NO: 575091 - DNA, 75 bp, synthetic construct
  source 1..75: mol_type = other DNA
atgatcagtcgtgatctgcgccacgcgcagaatgtcggcgcgcggcatcgctggctcaatcgcctgcaaaccgcg

SEQ ID NO: 575092 - DNA, 75 bp, synthetic construct
  source 1..75: mol_type = other DNA
gattgtcgataccggcggtatcgcacatggggtttacctggacacggggagcgctttagttgccaatacgggcgc

SEQ ID NO: 575093 - DNA, 75 bp, synthetic construct
  source 1..75: mol_type = other DNA
aggtgagtccgccgcgcgccttggaaccgttaagtatcaggagttctgggtggcgctgagcgccgaagagaaaca

SEQ ID NO: 575094 - DNA, 75 bp, synthetic construct
  source 1..75: mol_type = other DNA
ccatcgttactgagtacatgggagagtgcaaacgcaacactcagccatggcagtcccaccctacccgtatgcttc

SEQ ID NO: 575095 - DNA, 75 bp, synthetic construct
  source 1..75: mol_type = other DNA
caaggcagggttaagacgtaagatgcgaaaagcagccatggacagaaactacctggcgtcagtccttgcggggag

SEQ ID NO: 575096 - DNA, 75 bp, synthetic construct
  source 1..75: mol_type = other DNA
ccgcagccatcaaattagacatttacttaatactatagctcaacgaagcgtattgtcagagatacaaattgccca

SEQ ID NO: 575097 - DNA, 75 bp, synthetic construct
  source 1..75: mol_type = other DNA
gacgtataaaaaagtgcatgatgccggtttccgctgggcacccaaacaggcgctgtttgtcgcgccagcctggac

SEQ ID NO: 575098 - DNA, 75 bp, synthetic construct
  source 1..75: mol_type = other DNA
caaagagtgtgacaacctgcttaaggcagatctgcgaaaggtggcaagcgccatcgacccgctgatcaaggttcg

SEQ ID NO: 575099 - DNA, 75 bp, synthetic construct
  source 1..75: mol_type = other DNA
cgcacgcgcaaacctgccaacaaaccggcggcaaagcgcgggcgtccaccaaaggcggtaaaaaccgccggttaa

SEQ ID NO: 575100 - DNA, 75 bp, synthetic construct
  source 1..75: mol_type = other DNA
cgcgatgccggtcagagcgccgaagcgctgacacagtttcagcgcgcgatgcagctcgaccgcaatgccggtgtg

SEQ ID NO: 575101 - DNA, 75 bp, synthetic construct
  source 1..75: mol_type = other DNA
tgatgacagtcatgctgtggcgtctcgatgccggtgatatcgctggcgcgctggaaattgctccatacgcgctga

SEQ ID NO: 575102 - DNA, 75 bp, synthetic construct
  source 1..75: mol_type = other DNA
gtctgtggatacccgcctgctgacggagacccttgaactgaccgccactgctgacatgcctgatgaagtgcgcgc

SEQ ID NO: 575103 - DNA, 75 bp, synthetic construct
  source 1..75: mol_type = other DNA
ggaatatgtgccggaagggattgatccgggctggaactacaatcccggcataaaccgcgagcaggcgctggcacg

SEQ ID NO: 575104 - DNA, 75 bp, synthetic construct
  source 1..75: mol_type = other DNA
tgatgcgggtctcggccattgaaaccgcgcagcgggaaaataacccgctgcggcatgccactgcctacgagcaga

SEQ ID NO: 575105 - DNA, 75 bp, synthetic construct
  source 1..75: mol_type = other DNA
aggctgtggctgattgaaacaggatgtctatcctattcacagcttgctgaggcctacccatgggcagacgatgtg

SEQ ID NO: 575106 - DNA, 75 bp, synthetic construct
  source 1..75: mol_type = other DNA
gaaaataagcagagttaccctgttcttattgaatcagctgtttttgatgaaaactctgacactaaatctgatatg

SEQ ID NO: 575107 - DNA, 75 bp, synthetic construct
  source 1..75: mol_type = other DNA
tcagcagactttataaacttggatttaacgcatttaacctttttaaagccatttattttctttattccgcgcagt

SEQ ID NO: 575108 - DNA, 75 bp, synthetic construct
  source 1..75: mol_type = other DNA
gtgagctgctaccgttttatctgccgtgggtgggtggcgttctcagctccggcaaaggggcgcaggatgacattg

SEQ ID NO: 575109 - DNA, 75 bp, synthetic construct
  source 1..75: mol_type = other DNA
acgacgcattccgttttccgagccagcgagtaaaagtggatcaggaaaagcagcttgttcttcttccgaagcttg

SEQ ID NO: 575110 - DNA, 75 bp, synthetic construct
  source 1..75: mol_type = other DNA
atgcaattttcggatatccgggatggttatcttcatgtcgaacagcaaaaaacaggaacccggattgccatccct

SEQ ID NO: 575111 - DNA, 75 bp, synthetic construct
  source 1..75: mol_type = other DNA
aattgtgtatgtggaaaatctgatcatcgatttgaatcaatgtgctataacgtggttggataaattagaagatga

SEQ ID NO: 575112 - DNA, 75 bp, synthetic construct
  source 1..75: mol_type = other DNA
gaggctgggagcacttcgggaaactgggaaacatcgacggtagaaattgcccgcggaccgatgcttgccgcgacg

SEQ ID NO: 575113 - DNA, 75 bp, synthetic construct
  source 1..75: mol_type = other DNA
cccgctaaaagcgagaagtgggtgagcttcaaagcccttagtgatgccacggcaaaattttcaggttcctgctca

SEQ ID NO: 575114 - DNA, 75 bp, synthetic construct
  source 1..75: mol_type = other DNA
gtttggcaatacgaatgtgggtgttgcgcgattcccaatggatgcggagattaaactgtttgacggtcagcatcg

SEQ ID NO: 575115 - DNA, 75 bp, synthetic construct
  source 1..75: mol_type = other DNA
ggtggcaaacagtggaaggggcttatcacccggcgcgagattgagcgtgaagtttgcgagtggggccagaaatga

SEQ ID NO: 575116 - DNA, 75 bp, synthetic construct
  source 1..75: mol_type = other DNA
agtgcgggcttgttcaccgactgttgaggacgaaagccggattgctgacagttacgaagattctgatcagcggcg

SEQ ID NO: 575117 - DNA, 75 bp, synthetic construct
  source 1..75: mol_type = other DNA
ggccggcgccggtagtccagataaccttgcgcgccgacctatccgtgttctgttggcggatgaggtggataaata

SEQ ID NO: 575118 - DNA, 75 bp, synthetic construct
  source 1..75: mol_type = other DNA
tatcggaaagagaatcattactggcattgccagacgatgagttaacactgactcgaatgacgtatttcagtgagc

SEQ ID NO: 575119 - DNA, 75 bp, synthetic construct
  source 1..75: mol_type = other DNA
cagtttattaacaagggcgtggtggatgcgaaagtcaccgtggcggtaagtactgccggtgcgacagaaagcgat

SEQ ID NO: 575120 - DNA, 75 bp, synthetic construct
  source 1..75: mol_type = other DNA
atcgatttgaatcaatgtgctataacgtggttggataaattagaagatgaaataactaagcctgaagataatgag

SEQ ID NO: 575121 - DNA, 75 bp, synthetic construct
  source 1..75: mol_type = other DNA
attggtattctggtctatatttacaaccacaacatttccagtcaattgatctccatcatagttatatgcttgctc

SEQ ID NO: 575122 - DNA, 75 bp, synthetic construct
  source 1..75: mol_type = other DNA
cagtacttactcatccggcgcgatatagccgtcaggccgttgaacaatggcttaaagccggaggaattaaccgag

SEQ ID NO: 575123 - DNA, 75 bp, synthetic construct
  source 1..75: mol_type = other DNA
atgaaacgactgctgccaaccctgctcctgtatattttcaacggagtggccaccgcctcccctgccacgccagaa

SEQ ID NO: 575124 - DNA, 75 bp, synthetic construct
  source 1..75: mol_type = other DNA
tacacggaaggcgagggtggcctgaagcgggtggtgaagaaggaacatgcggacgggagcatcacccgcagcgag

SEQ ID NO: 575125 - DNA, 75 bp, synthetic construct
  source 1..75: mol_type = other DNA
agtggatgttgataatccagaatcatcgacagaatctgttggtatcggtgcaggtgttgacgcttcagttatgac

SEQ ID NO: 575126 - DNA, 75 bp, synthetic construct
  source 1..75: mol_type = other DNA
ccatctttacgatgattctgttttttatgccgttgcccattctgaaaaaatagttgtaaggacatcttcttttga

SEQ ID NO: 575127 - DNA, 75 bp, synthetic construct
  source 1..75: mol_type = other DNA
gctgacgtatggcagcggttatcttgcggggatgaagctgggcggaacaccgctggtcgagtacacgcgggaccg

SEQ ID NO: 575128 - DNA, 75 bp, synthetic construct
  source 1..75: mol_type = other DNA
gaacggcagacggtggagaacccggagacgggggagatgctgtgggagcatgagacggggcatgcgtacagcgaa

SEQ ID NO: 575129 - DNA, 75 bp, synthetic construct
  source 1..75: mol_type = other DNA
acggcgacccggcggaacagtggcagtatgatgaacacgggtggctaaccaccatcagccataccagtgacggcc

SEQ ID NO: 575130 - DNA, 75 bp, synthetic construct
  source 1..75: mol_type = other DNA
atttaaaagaagatgacccctatattcctagtgatgtagctgagatcccattattgcaattgataaacagtaaat

SEQ ID NO: 575131 - DNA, 75 bp, synthetic construct
  source 1..75: mol_type = other DNA
cattttgaacactgacctaaatggaataaatcgacagagtaatattcccgatgaactcgatagattaggtctttt

SEQ ID NO: 575132 - DNA, 75 bp, synthetic construct
  source 1..75: mol_type = other DNA
gtcaggtacttgagctacatggcatcagccacggttcggccggagcaagaagcatcgccacaatggcaacccgga

SEQ ID NO: 575133 - DNA, 75 bp, synthetic construct
  source 1..75: mol_type = other DNA
aaaaagaagcgctgtttcgccctaagccttctcctgaattagtgcaggaattgcaaatgctggatgaaggcaacg

SEQ ID NO: 575134 - DNA, 75 bp, synthetic construct
  source 1..75: mol_type = other DNA
ctgacaatgagattctggagttgaccgatcagcaattgggttaccagcctgttgttctgggtttgctcaaccgtg

SEQ ID NO: 575135 - DNA, 75 bp, synthetic construct
  source 1..75: mol_type = other DNA
ggatatttatcaatgacataattgcacctgttgttgtgtcttcgacaaatagtgaattcatggtccgtgcgggag

SEQ ID NO: 575136 - DNA, 75 bp, synthetic construct
  source 1..75: mol_type = other DNA
cgattttttcattgcaaaaaaatggcttcgaaataatggcgcatatggcgttattcagtatagatataaatctaa

SEQ ID NO: 575137 - DNA, 75 bp, synthetic construct
  source 1..75: mol_type = other DNA
cattcagatgggtggcgtacccaagactatgacagtgcgtggtactccatcatcaggtacagcaacgctctataa

SEQ ID NO: 575138 - DNA, 75 bp, synthetic construct
  source 1..75: mol_type = other DNA
cacaactcttgatcgccttgctgaaacgagcattattgcaatgcaacgtggaggttttctttggcatgaaggttg

SEQ ID NO: 575139 - DNA, 75 bp, synthetic construct
  source 1..75: mol_type = other DNA
attacgttagtcccgtcagtaaaattacagataggcgatcgtgataatcgcggttattactgggatggcggtcac

SEQ ID NO: 575140 - DNA, 75 bp, synthetic construct
  source 1..75: mol_type = other DNA
gctcagatccagcaactgatgcaacttatcagcctgtgccgccagcgacggctgcgggaggttcgccatgacgcc

SEQ ID NO: 575141 - DNA, 75 bp, synthetic construct
  source 1..75: mol_type = other DNA
gatcagcacaccagagttgctgacacaggagaaacatgcagcccgttctgctgcatggtatttcacattacgtgg

SEQ ID NO: 575142 - DNA, 75 bp, synthetic construct
  source 1..75: mol_type = other DNA
tctcgatgaaggcgatcttaaaccggatgttgtgaaacgttttgaggaaatggtggggcaggcgcagcagagtgc

SEQ ID NO: 575143 - DNA, 75 bp, synthetic construct
  source 1..75: mol_type = other DNA
tatcatttagggcgactctattatgaaggcgttattattaaaaaggattataataaagccgccttttggtatgat

SEQ ID NO: 575144 - DNA, 75 bp, synthetic construct
  source 1..75: mol_type = other DNA
tttcagcaacgcacgccactggtgatggggctgtggtctgcggctctgatgggcggcggtggacttggtgccgcc

SEQ ID NO: 575145 - DNA, 75 bp, synthetic construct
  source 1..75: mol_type = other DNA
ctggcccggtggtattaatatcactaaccagctatccgatacatttgcaattctggatgcgcctgggttagaagg

SEQ ID NO: 575146 - DNA, 75 bp, synthetic construct
  source 1..75: mol_type = other DNA
gctgcaggggcggtatatcactcaggatccgattgggctgaaggggggatggaacctgtatggatatcaattgaa

SEQ ID NO: 575147 - DNA, 75 bp, synthetic construct
  source 1..75: mol_type = other DNA
aaattagagaattaccgctcatagaacgagaggtttctgttaataacaataagttaactgttactttttctttaa

SEQ ID NO: 575148 - DNA, 75 bp, synthetic construct
  source 1..75: mol_type = other DNA
aatacattgcgaaacgggtgaaacacgtcgtctcggcgaataccattttattttgctggaaacattagcaaaaaa

SEQ ID NO: 575149 - DNA, 75 bp, synthetic construct
  source 1..75: mol_type = other DNA
tcgctgcgcaacagaccactttttgccgggttcttcccgttactgctggcctactcgctaacctatatgccgacc

SEQ ID NO: 575150 - DNA, 75 bp, synthetic construct
  source 1..75: mol_type = other DNA
tggatcgacccacttggattgtgtcctaaatctgacttcaaatggggaaatccaaaaagtaagcctacatacggt

SEQ ID NO: 575151 - DNA, 75 bp, synthetic construct
  source 1..75: mol_type = other DNA
caaagatatacgacaggctaaatactggtttgagaaagctgctactcaaaacttacctattgcacaaattacttt

SEQ ID NO: 575152 - DNA, 75 bp, synthetic construct
  source 1..75: mol_type = other DNA
ctcaaataaactgtgcgaatatttatcaatttggcccacaggaattccaaaacattaacaaagccaagtattggc

SEQ ID NO: 575153 - DNA, 75 bp, synthetic construct
  source 1..75: mol_type = other DNA
atcagctaattaccatggggaaacccgggcacaatcttccggcacagaaacgcagggggggtatacattatggga

SEQ ID NO: 575154 - DNA, 75 bp, synthetic construct
  source 1..75: mol_type = other DNA
acctatacctatacagatggacgggatttgagtagcggagaagataagccactgaatgacagcccgtttcataat

SEQ ID NO: 575155 - DNA, 75 bp, synthetic construct
  source 1..75: mol_type = other DNA
gtttattaattgaaatattgggtagtagaaaaccaattgtttttgttgagggggaaaatggaagctatgatgtat

SEQ ID NO: 575156 - DNA, 75 bp, synthetic construct
  source 1..75: mol_type = other DNA
tactttttccatttccggcaatttagcgaccaatatgttgctggaaaatggcggtaatttattggtattagcagg

SEQ ID NO: 575157 - DNA, 75 bp, synthetic construct
  source 1..75: mol_type = other DNA
gctgaaggcacagacggatgcggcggggcggcggacggagtacagcctgcatatggcgtcgggtgcggtgacggc

SEQ ID NO: 575158 - DNA, 75 bp, synthetic construct
  source 1..75: mol_type = other DNA
taacggtacgacggtgagcggtacgaatagtgaaggtgcattctccatccacaataaagtggaagacaatgtgtt

SEQ ID NO: 575159 - DNA, 75 bp, synthetic construct
  source 1..75: mol_type = other DNA
caaattattgataacaccagctcctcggatgttattgaagtttattccggtggcgtgcttgatgttagtggtggt

SEQ ID NO: 575160 - DNA, 75 bp, synthetic construct
  source 1..75: mol_type = other DNA
tacccgcagtatatatcgtgaactgggcgcaacgctgagttacaacatgcgtctggggaacggtatggaagttga

SEQ ID NO: 575161 - DNA, 75 bp, synthetic construct
  source 1..75: mol_type = other DNA
cagggtattcttttgaccgtcaggaccgggagtctgaaggtagtagtgataaaaaccggatggaacgacagaatt

SEQ ID NO: 575162 - DNA, 75 bp, synthetic construct
  source 1..75: mol_type = other DNA
ccgatccaagtaaattgccggacatagcgaaacaattaagactgccatatcctattgaccaggccagtagtgcgc

SEQ ID NO: 575163 - DNA, 75 bp, synthetic construct
  source 1..75: mol_type = other DNA
ttacatcaggggataattaaatatgtttctttcttaagagatcgttctcagaatggagaattaaatcgaggttta

SEQ ID NO: 575164 - DNA, 75 bp, synthetic construct
  source 1..75: mol_type = other DNA
ttgatactgaggaagccggaaaggctttgatcgatggtggattgattgagcgtttgatgtcaactatcatgccct

SEQ ID NO: 575165 - DNA, 75 bp, synthetic construct
  source 1..75: mol_type = other DNA
tactcaaaaggcaacagcgcaacttgatgagataggagcttgctttgccggttatccgaaacctcttgatttaat

SEQ ID NO: 575166 - DNA, 75 bp, synthetic construct
  source 1..75: mol_type = other DNA
tatgaaattactaccccttctgggcggatagtttctccacctgctggaacttgttggcgagtatcacaagagcga

SEQ ID NO: 575167 - DNA, 75 bp, synthetic construct
  source 1..75: mol_type = other DNA
aacaattagaaaactatgctagcccaattaagcagggacgtaatgaggcggacttgcttattgaacttatgctca

SEQ ID NO: 575168 - DNA, 75 bp, synthetic construct
  source 1..75: mol_type = other DNA
cgttgaggggttgtggttcactgaactaatcacgcttgccgcgctcacgggcactccttcggctgaaatcactga

SEQ ID NO: 575169 - DNA, 75 bp, synthetic construct
  source 1..75: mol_type = other DNA
aaaattctgggcgcggttttcaagaacagagtttatatgatagcaaagttaataccagtcagtaaaaatgatgct

SEQ ID NO: 575170 - DNA, 75 bp, synthetic construct
  source 1..75: mol_type = other DNA
taactatttgttgttactcagtatggccgtacagggatttggctggtgctctctgccctgtgctctggttgagga

SEQ ID NO: 575171 - DNA, 75 bp, synthetic construct
  source 1..75: mol_type = other DNA
attactctttggagagagttgtatttaaagaaatatatttctgttataccagaacattgttctgcatataataac

SEQ ID NO: 575172 - DNA, 75 bp, synthetic construct
  source 1..75: mol_type = other DNA
taagaaaattggagtgaaaagtgatattactctttggagagagttgtatttaaagaaatatatttctgttatacc

SEQ ID NO: 575173 - DNA, 75 bp, synthetic construct
  source 1..75: mol_type = other DNA
aagagcagatagaacaggcaaaaaagcagcttgaggcgttgcccgatctgactgaaacacgcctgaccggaaagg

SEQ ID NO: 575174 - DNA, 75 bp, synthetic construct
  source 1..75: mol_type = other DNA
cgatcgcattgatattcgtgaactgttacagggcagcggctacaccggcaacggcaaagccagctacgtcaacgg

SEQ ID NO: 575175 - DNA, 75 bp, synthetic construct
  source 1..75: mol_type = other DNA
cgatcccaacggcattaacgtctattacggcaataccgtgaagctgtacaactcggcgggagtgctggtcgccac

SEQ ID NO: 575176 - DNA, 75 bp, synthetic construct
  source 1..75: mol_type = other DNA
cgccagcaaaaccaccgcctgggggctgacctacggcctcgactcgcacgggatgtggacggtgctggcaaacca

SEQ ID NO: 575177 - DNA, 75 bp, synthetic construct
  source 1..75: mol_type = other DNA
aggttatggatatgatatagaaaaaataacaaagtatagtgaaaatgactttctctttgaattttatgttccagt

SEQ ID NO: 575178 - DNA, 75 bp, synthetic construct
  source 1..75: mol_type = other DNA
attaaacaataaaaacgtttgtatatcacacaaagtatcatcagaaaaatgtgggaaattagtggttaatgccgt

SEQ ID NO: 575179 - DNA, 75 bp, synthetic construct
  source 1..75: mol_type = other DNA
gtgctggatctggcggggaacaccggcccggtggtgtcgaaaacggtggtggtcgatacgattaaccccaccgcc

SEQ ID NO: 575180 - DNA, 75 bp, synthetic construct
  source 1..75: mol_type = other DNA
ctgccccgacggtgatcaccgagccggacggcacggtggaaatcagtgtcaccagccagacggcgggagtcagtg

SEQ ID NO: 575181 - DNA, 75 bp, synthetic construct
  source 1..75: mol_type = other DNA
caggcaacggtgccacgactgctccgacggtcaccacgcagccggacggcacggtggagatctctgtcaccagcc

SEQ ID NO: 575182 - DNA, 75 bp, synthetic construct
  source 1..75: mol_type = other DNA
cgtcatgagcgtgttgcatgacagctacgacaacggcaaatccggggaaaaatttttacaggagctttgcggggt

SEQ ID NO: 575183 - DNA, 75 bp, synthetic construct
  source 1..75: mol_type = other DNA
attgagatggagcgaatacttggccttctaaccactgaactgtataaagcattcaaagttcattttggctgtaca

SEQ ID NO: 575184 - DNA, 75 bp, synthetic construct
  source 1..75: mol_type = other DNA
gtttgtatcagtacacatctgttgatgactgcactcgttacagagtcctgagactctactctcgtcgcacggctg

SEQ ID NO: 575185 - DNA, 75 bp, synthetic construct
  source 1..75: mol_type = other DNA
gatgtgtcatacaccgcgggtggcaagataaaagtgtccgtcacccttatggatgagcagaaaaacctggtgaaa

SEQ ID NO: 575186 - DNA, 75 bp, synthetic construct
  source 1..75: mol_type = other DNA
aacatgttatttagatggccagtgggatggtaatgtcagagtaacaactttaaaaacagctgatattagaatcac

SEQ ID NO: 575187 - DNA, 75 bp, synthetic construct
  source 1..75: mol_type = other DNA
tggtacaaataatcctgattttagtcatccagacgtgccggaaccgacgctagatacaccaccttctgcggagga

SEQ ID NO: 575188 - DNA, 75 bp, synthetic construct
  source 1..75: mol_type = other DNA
gtgggtcaggtggcggttctgataatggctctactaaccctgattttagtcatccagatgtaccggaaccgactc

SEQ ID NO: 575189 - DNA, 75 bp, synthetic construct
  source 1..75: mol_type = other DNA
attgatactagatctattttaaataaaagaaagaatgatatagaatcgttacttcataagtataaaaatagctta

SEQ ID NO: 575190 - DNA, 75 bp, synthetic construct
  source 1..75: mol_type = other DNA
tggccccgcaagccggagaaaatgcagagcaggctaagcaagctttctatgcagcctatccattgccatctgtgc

SEQ ID NO: 575191 - DNA, 75 bp, synthetic construct
  source 1..75: mol_type = other DNA
cacgcggatcaacagcgtttgagaaagccatgcagcaggcacaaaaggctattaacgctatgacgcagggtgtta

SEQ ID NO: 575192 - DNA, 75 bp, synthetic construct
  source 1..75: mol_type = other DNA
aacccggcgacaactggcgcagcagtaagctacggacttcttactcgcgcctatgagagcgaaccattcagaaat

SEQ ID NO: 575193 - DNA, 75 bp, synthetic construct
  source 1..75: mol_type = other DNA
ggaagggttgcgggtgccgggtaagcgcctgccggtacgtattcagacagataacggcagcgagtttatctcaaa

SEQ ID NO: 575194 - DNA, 75 bp, synthetic construct
  source 1..75: mol_type = other DNA
ttttatcctacgacaaacgagaagcggataagcgtcctattggagaacttatcttagaggtgattgatcctaaag

SEQ ID NO: 575195 - DNA, 75 bp, synthetic construct
  source 1..75: mol_type = other DNA
gcttttaaggctaagaattatttcaaaagtaaaaatgatgaggaagcatataatgatgcaaaaaaattgatattt

SEQ ID NO: 575196 - DNA, 75 bp, synthetic construct
  source 1..75: mol_type = other DNA
accacattaatgaaagtactatgtggactatttgaacctgatagcgggagggtactgataaatggtatagatata

SEQ ID NO: 575197 - DNA, 75 bp, synthetic construct
  source 1..75: mol_type = other DNA
agcttcaagctattaatgtcatttattgatactatagcttatattgagtttggaaacaaaagaagagtctttcaa

SEQ ID NO: 575198 - DNA, 75 bp, synthetic construct
  source 1..75: mol_type = other DNA
acagaatggcgccagcagaaaacggtcagttttgatatggcggggacggtgaacagctttatggcgcaggccgca

SEQ ID NO: 575199 - DNA, 75 bp, synthetic construct
  source 1..75: mol_type = other DNA
catgaagtatgtttctaactcttcagatcaggccgtttctgatgctttggcatcatggccgttattgaaaaaagc

SEQ ID NO: 575200 - DNA, 75 bp, synthetic construct
  source 1..75: mol_type = other DNA
gcggtggcagacggttcgacggcgaatacgctgcaggtgaaggtcaccgatgctaacggtaatacgcttgccgga

SEQ ID NO: 575201 - DNA, 75 bp, synthetic construct
  source 1..75: mol_type = other DNA
acaacagcagtctgagccggaacgtgacatttatcgccgatgtcagcacggcgaagatcgctgatctggtggtca

SEQ ID NO: 575202 - DNA, 75 bp, synthetic construct
  source 1..75: mol_type = other DNA
cggcgcagatcgctgatctggtggtcattaaggacggctcagtggcagacggttcgacggcgaacacgctgcagg

SEQ ID NO: 575203 - DNA, 75 bp, synthetic construct
  source 1..75: mol_type = other DNA
tcaggacggcgcagatcgcggagctggtggtcattaaggacggtgcagtggcagacggcgcaatggcgaacatgc

SEQ ID NO: 575204 - DNA, 75 bp, synthetic construct
  source 1..75: mol_type = other DNA
aaacgatatatatcgctggggatagcataacggtgaccgttgttcttaaagacgcccagggtaactttattactg

SEQ ID NO: 575205 - DNA, 75 bp, synthetic construct
  source 1..75: mol_type = other DNA
catcgcagctcacttcaaccgttgaaacaaataagtcgaactatacggttggagagacaatcaccatcacggtaa

SEQ ID NO: 575206 - DNA, 75 bp, synthetic construct
  source 1..75: mol_type = other DNA
tcgcggacctggtggtcattaaggacgactcagtggcagacggcgcaatggcgaatatgctgcgggcgagggtca

SEQ ID NO: 575207 - DNA, 75 bp, synthetic construct
  source 1..75: mol_type = other DNA
gtgttggcggacaacggcgcaacggttgctccgacgatgaccacaaagccggacggcacggtggagatcagtgtc

SEQ ID NO: 575208 - DNA, 75 bp, synthetic construct
  source 1..75: mol_type = other DNA
gaatcaggtggcgtgtataccacaacccgaatggcgacgattgccagtaccaatcagcacgccaacctgcaattg

SEQ ID NO: 575209 - DNA, 75 bp, synthetic construct
  source 1..75: mol_type = other DNA
gagaaatttaatcctgaaactggtatatcagagcttgggacaggaaagtcttctggcttgtgcgtagagtattat

SEQ ID NO: 575210 - DNA, 75 bp, synthetic construct
  source 1..75: mol_type = other DNA
cgcttggttcacagcttcgtatacgagaagttttagtagtggaaggggcggatttacctgtcagtgctttattag

SEQ ID NO: 575211 - DNA, 75 bp, synthetic construct
  source 1..75: mol_type = other DNA
ccgatgcgttcggtaatgcgcttgccgggcagacggtcagcgtgttggcaggcaacggtgccacgactgccccga

SEQ ID NO: 575212 - DNA, 75 bp, synthetic construct
  source 1..75: mol_type = other DNA
gcatcacctttgtaccgggtgatgcatcgcagctcacttcaaccattgagacaaataagtcgaactacacggtcg

SEQ ID NO: 575213 - DNA, 75 bp, synthetic construct
  source 1..75: mol_type = other DNA
tgattttaagctggtagcaaaagatgcaactcaggctggatgtgctggttttacggatcaaaatgttgcaactat

SEQ ID NO: 575214 - DNA, 75 bp, synthetic construct
  source 1..75: mol_type = other DNA
tcgagccaaagcattgggtatcaatccggtatggcaaaacatggtggctatgatgttgactggtgaactgacctc

SEQ ID NO: 575215 - DNA, 75 bp, synthetic construct
  source 1..75: mol_type = other DNA
ccacgccctattcgtcctccgttgctacgccactggatatcgtcaaacagaccggccaactggcggccacggaac

SEQ ID NO: 575216 - DNA, 75 bp, synthetic construct
  source 1..75: mol_type = other DNA
ttatcagttcgaagctaaacttatttccgatgcagccggtactgtaggtactttcgaatcagcagtatcttatgc

SEQ ID NO: 575217 - DNA, 75 bp, synthetic construct
  source 1..75: mol_type = other DNA
ggtaacgtttcgtaaaaaactgtacggcgatcttgatacattacagtcggagcttgatgaatggctggctcacta

SEQ ID NO: 575218 - DNA, 75 bp, synthetic construct
  source 1..75: mol_type = other DNA
gatcagagagcgttggcgcagcatgagaatatggctgcgctctgtttctgccatgacggcaattactggcgtcta

SEQ ID NO: 575219 - DNA, 75 bp, synthetic construct
  source 1..75: mol_type = other DNA
tggaggtggcgcaggataacgccgtggctgacggcacaatggcgaacacgctgcaggtgaaggtcaccgatgcta

SEQ ID NO: 575220 - DNA, 75 bp, synthetic construct
  source 1..75: mol_type = other DNA
atcatatatcgataattttacggtgggcggcgcagtccccgattcgatgcaatgggtcgaacagaataatggtga

SEQ ID NO: 575221 - DNA, 75 bp, synthetic construct
  source 1..75: mol_type = other DNA
ggacggcacggtggagatcagtgtcaccagccagacggcgggagtcagtgcagtcactgcaaccatcaacagcag

SEQ ID NO: 575222 - DNA, 75 bp, synthetic construct
  source 1..75: mol_type = other DNA
agatcgccgagctggtggtcattaaggacgactcagtggcagacggtgcaatggcgaatatgctgcgggcgagag

SEQ ID NO: 575223 - DNA, 75 bp, synthetic construct
  source 1..75: mol_type = other DNA
aaaaatggagatatgtgggtgatggaatatatgaacgtacatatatggcctaccaagaaggagaaaatttaactt

SEQ ID NO: 575224 - DNA, 75 bp, synthetic construct
  source 1..75: mol_type = other DNA
cgggcaccagtacagtcaccgccagcatcaacaacagcagccagagccagaacgtcacctttgtacctggtgatg

SEQ ID NO: 575225 - DNA, 75 bp, synthetic construct
  source 1..75: mol_type = other DNA
gaggctcttgttgatgcggcattcaatgatctcagggaagatgtaaagacattattcggcgttgagttgcaatct

SEQ ID NO: 575226 - DNA, 75 bp, synthetic construct
  source 1..75: mol_type = other DNA
atgatacacaaatttattcaggggtttcaggaggtattacatatacatatacaatatgttcgagatattgatatt

SEQ ID NO: 575227 - DNA, 75 bp, synthetic construct
  source 1..75: mol_type = other DNA
actggttttaaaagaacatgagtattcatgggcgctgggcactgagagatcccctcataatttccccaaaacgta

SEQ ID NO: 575228 - DNA, 75 bp, synthetic construct
  source 1..75: mol_type = other DNA
caattgcaatgaccatgactgcaggttctgctatggctgcactgggcgatgcggcttctcgtggtcaggttcagt

SEQ ID NO: 575229 - DNA, 75 bp, synthetic construct
  source 1..75: mol_type = other DNA
ggcagcctgagttcacagataaaatactctccaggaaacccggggcggttcaatatgttcgagatattgatattg

SEQ ID NO: 575230 - DNA, 75 bp, synthetic construct
  source 1..75: mol_type = other DNA
atgagcacgaaaaaaaatcaaaaatattcaatcacgctttttgaaaacacacttgtgtgttttattcagttgtat

SEQ ID NO: 575231 - DNA, 75 bp, synthetic construct
  source 1..75: mol_type = other DNA
attcaatcacgctttttgaaaacacactggtgtgttttatgcggttgtataaagaaatcagacgtcaacaagctg

SEQ ID NO: 575232 - DNA, 75 bp, synthetic construct
  source 1..75: mol_type = other DNA
atgggtagtaatatacatggaattagttgcactgcaaataattatttgaaacaggcctggaacgatataaaaaat

SEQ ID NO: 575233 - DNA, 75 bp, synthetic construct
  source 1..75: mol_type = other DNA
gtaaagtaaatgaagaggatactccatgtctggaatgtgaatcactagaaaaagaatttgaggaaatgcagaatg

SEQ ID NO: 575234 - DNA, 75 bp, synthetic construct
  source 1..75: mol_type = other DNA
ttgccgggcagaggttcagagtctatcacagattttaaaggttattattggtatggctttatggaatatattgaa

SEQ ID NO: 575235 - DNA, 75 bp, synthetic construct
  source 1..75: mol_type = other DNA
atgagtacgaaaaaaaatcaaacatattcaatcacgctttttgaaaacacactggtgtgttttatgcggttatac

SEQ ID NO: 575236 - DNA, 75 bp, synthetic construct
  source 1..75: mol_type = other DNA
ttatttattgttaatagtaatgtggcatcaatctccttggtggatttgcccctatatttccagacacctgttatc

SEQ ID NO: 575237 - DNA, 75 bp, synthetic construct
  source 1..75: mol_type = other DNA
cctgctgaacgtgaaggcaaatgtcgtggcctgcgatttgcatccctctttccgctctacccggcatgcgctgga

SEQ ID NO: 575238 - DNA, 75 bp, synthetic construct
  source 1..75: mol_type = other DNA
attggactctgagttcattatctgaaacttttgatgatggaactcaaacattacaaggtgaactaacattggcac

SEQ ID NO: 575239 - DNA, 75 bp, synthetic construct
  source 1..75: mol_type = other DNA
tgtacagagagattcgtttgcccacactgaccagacagcagaaaagttacgtggagaaatgagaatcgaagggga

SEQ ID NO: 575240 - DNA, 75 bp, synthetic construct
  source 1..75: mol_type = other DNA
gacggaagcgggcgtcacgtcagtggttggtctgctgggcaccgactctatctctcgccaagacccgtgcgctca

SEQ ID NO: 575241 - DNA, 75 bp, synthetic construct
  source 1..75: mol_type = other DNA
gtaagtctgggattaacggcaaattacgcacgtaccggagggcaggtgactgcagggaatgtgcaatcgattatt

SEQ ID NO: 575242 - DNA, 75 bp, synthetic construct
  source 1..75: mol_type = other DNA
taaaccactaaataacgatgttcttgagcaaataaaaaagcatttcttagttgagtgcagttcggatgaaagtaa

SEQ ID NO: 575243 - DNA, 75 bp, synthetic construct
  source 1..75: mol_type = other DNA
ttaagataatggaatattcggagagaaacgtcaggcagttgacctcaaatgaacaggaagaatatatccccagga

SEQ ID NO: 575244 - DNA, 75 bp, synthetic construct
  source 1..75: mol_type = other DNA
ttataattcagcgttaactccagatcccaactttaatatagatgcaacgtcagatttagactcatatttaaacct

SEQ ID NO: 575245 - DNA, 75 bp, synthetic construct
  source 1..75: mol_type = other DNA
ccattagcaaaaattattcttgactatattgaatcagataaaaaccctgagtcattaaaatttgatgaaaaatca

SEQ ID NO: 575246 - DNA, 75 bp, synthetic construct
  source 1..75: mol_type = other DNA
acctaacaaatatgaattgcactggcgcaattcttgataatgcgatgatatatggtaaagaacctgagatgcaac

SEQ ID NO: 575247 - DNA, 75 bp, synthetic construct
  source 1..75: mol_type = other DNA
gtcttcgcggagaaatcggtggcgtgaaacgtgattcttatgagcatacagacaagaagtttgctgaagcaggaa

SEQ ID NO: 575248 - DNA, 75 bp, synthetic construct
  source 1..75: mol_type = other DNA
cgtgatgatgacgttgggcgatgaccgttcgatctaccgcacctacgttgatggtcgtctggtgtacgaacgcaa

SEQ ID NO: 575249 - DNA, 75 bp, synthetic construct
  source 1..75: mol_type = other DNA
aacctggatgggtggcatggtggggtctgtggtttctggtgtggcttcaaaaatcactggtgctgttgagttttt

SEQ ID NO: 575250 - DNA, 75 bp, synthetic construct
  source 1..75: mol_type = other DNA
gaaatgcagaatgataatgatttatcattatttttgagaacattgcgtactaatgatacagaaacttattcaggg

SEQ ID NO: 575251 - DNA, 75 bp, synthetic construct
  source 1..75: mol_type = other DNA
atactgaagattcagcctggacaataatccagaattggttaaaagaagccacaaaccatgccgaactcttaccgg

SEQ ID NO: 575252 - DNA, 75 bp, synthetic construct
  source 1..75: mol_type = other DNA
tggccgttgttccttgtctctccgtcaaatctggcccgtctgaataatgccttggtcgagtgccggaggccagca

SEQ ID NO: 575253 - DNA, 75 bp, synthetic construct
  source 1..75: mol_type = other DNA
cctttatggggcatcaggaaattttaggcacgcgcccgttaccgccgctgcggatgccttttcgcgatgtgattg

SEQ ID NO: 575254 - DNA, 75 bp, synthetic construct
  source 1..75: mol_type = other DNA
aacctgctggacaacgacgatgacttctacgaagcaaacggcatcgctaccgatgatatcgttgctgtgggctta

SEQ ID NO: 575255 - DNA, 75 bp, synthetic construct
  source 1..75: mol_type = other DNA
gctaacaaaacccaaaactttgaagttgttgctcagtatcagttcgactttggcctgcgcccgtccatcgcttac

SEQ ID NO: 575256 - DNA, 75 bp, synthetic construct
  source 1..75: mol_type = other DNA
tattattttgcgccagatacgctgaattgggaaagtcggaagttggatattctgagtttcttcagtgggcattat

SEQ ID NO: 575257 - DNA, 75 bp, synthetic construct
  source 1..75: mol_type = other DNA
atgtgattcgcgctttaaatttgaacgcaatgatgactatataccgcccccatctgaagaagagataggtagagc

SEQ ID NO: 575258 - DNA, 75 bp, synthetic construct
  source 1..75: mol_type = other DNA
ggtttccgctgggcacccaaacaggcgctgtttgtcgcgccggcctggacaccgggccgggaagacgtgctcctc

SEQ ID NO: 575259 - DNA, 75 bp, synthetic construct
  source 1..75: mol_type = other DNA
gcgtctttggcatgaaatccgatcggctgaaagaggcgatccgcgcagctaacgcgtatacacaggaggcaaaat

SEQ ID NO: 575260 - DNA, 75 bp, synthetic construct
  source 1..75: mol_type = other DNA
gccacgcgaaacgacaggcgcggaacgcggagaaaacccggctgaccctgcgctggttgcgggaagagctgtgtt

SEQ ID NO: 575261 - DNA, 75 bp, synthetic construct
  source 1..75: mol_type = other DNA
gtcagggtcattcaggatgaccaccacctttatggggttacaggggagccagtcgcctctccccggttattgtgc

SEQ ID NO: 575262 - DNA, 75 bp, synthetic construct
  source 1..75: mol_type = other DNA
catatctccaattatggtaattgctgtattgattctttttcaagatagaatcgcaactattgatggcggtattga

SEQ ID NO: 575263 - DNA, 75 bp, synthetic construct
  source 1..75: mol_type = other DNA
ttacaaaatcaacctgctggacaacgacgacgacttctacaaagaaaacggcatcgctaccgatgatatcgttgc

SEQ ID NO: 575264 - DNA, 75 bp, synthetic construct
  source 1..75: mol_type = other DNA
tgatggcacgctccatattacgaaccacaagtatggagagggttatgtcatctttaaggcggaggtatctcttgc

SEQ ID NO: 575265 - DNA, 75 bp, synthetic construct
  source 1..75: mol_type = other DNA
aggcggaccgtatcgcgatgattaacccggagaacggcaacaccacgccgctgtttgtggcgcaggggaatcagc

SEQ ID NO: 575266 - DNA, 75 bp, synthetic construct
  source 1..75: mol_type = other DNA
aggctgcccatgtccgtaccagccgttacctgtcggataacgtcaaacagagctacctccagtgcgtgaatgtct

SEQ ID NO: 575267 - DNA, 75 bp, synthetic construct
  source 1..75: mol_type = other DNA
atcattatgacgtttacctccctcctgaactttttgaccaggcttgcgagttaaacaataaggaaaggaatgcgc

SEQ ID NO: 575268 - DNA, 75 bp, synthetic construct
  source 1..75: mol_type = other DNA
tcctgaactttttgatcaagcttacgagttaaacaataaggaaaggaatgcgcaaattgattttttaactcgtta

SEQ ID NO: 575269 - DNA, 75 bp, synthetic construct
  source 1..75: mol_type = other DNA
ttatgaaaacattgcgtactaatgataaacaaatttattcaggggtttcaggaggtattacatatactatacaat

SEQ ID NO: 575270 - DNA, 75 bp, synthetic construct
  source 1..75: mol_type = other DNA
gtttacaaaatgaagtaatgtatgcaaaagataaaagctacaattttaatctttataacaataattggattatcg

SEQ ID NO: 575271 - DNA, 75 bp, synthetic construct
  source 1..75: mol_type = other DNA
agatcatgagaatgaatggggtaacccgacgtagttttcttaagttttgtagtctgacggcaacctctctgggat

SEQ ID NO: 575272 - DNA, 75 bp, synthetic construct
  source 1..75: mol_type = other DNA
ccctcaggagtgcagggaaagctgaaatttcagaccgttaatgattatggttcagtaaccccggtcagagaagtg

SEQ ID NO: 575273 - DNA, 75 bp, synthetic construct
  source 1..75: mol_type = other DNA
ccagcgcgcattcccgcaccagccggtatctgtccgataacgtcaaacagcgctatcaccagtgcatgaacatcg

SEQ ID NO: 575274 - DNA, 75 bp, synthetic construct
  source 1..75: mol_type = other DNA
ctatatgtctgagagcgtcaaagaaagttacctgcagtgccagaatgtgcactgctcggcgacatttaaaacgca

SEQ ID NO: 575275 - DNA, 75 bp, synthetic construct
  source 1..75: mol_type = other DNA
agtaatgctatgttgagaacattttttcgtataatgccatctaaattaaaggagctgatgtattcaatcgttagg

SEQ ID NO: 575276 - DNA, 75 bp, synthetic construct
  source 1..75: mol_type = other DNA
ccgcctttatgatgatgctgttttttattctgttgcacattctgattcagtgattgttgaaaccagtaacggaaa

SEQ ID NO: 575277 - DNA, 75 bp, synthetic construct
  source 1..75: mol_type = other DNA
tcaccatcgcccacactctggggtatggacgatggcacagcgccttcgtgatccttttgccgcaattgttaccgc

SEQ ID NO: 575278 - DNA, 75 bp, synthetic construct
  source 1..75: mol_type = other DNA
actgatcaccgcggtttttaatgaatacgtcataaataaagactcaataaacgagaaacacttattattaaattt

SEQ ID NO: 575279 - DNA, 75 bp, synthetic construct
  source 1..75: mol_type = other DNA
gcataaagacatttatctaatttgcaccattgcatttattgtagcttacattgccgctcactttattaaaccaca

SEQ ID NO: 575280 - DNA, 75 bp, synthetic construct
  source 1..75: mol_type = other DNA
caggatggcaacctggaatctgcggttggcaatggagaaggaatttcctgatgaagaatggcggtcggcagattt

SEQ ID NO: 575281 - DNA, 75 bp, synthetic construct
  source 1..75: mol_type = other DNA
tgcattgttgaagatgggggcatgtgtattgacggggtcggtgagtatgtgggtcactcgctacctgatggaacg

SEQ ID NO: 575282 - DNA, 75 bp, synthetic construct
  source 1..75: mol_type = other DNA
actgcgcctggcgcaacaaggtttgcccaaaggcggcgcggtcggtttcgaactgctcgatcaggaaaagtttgg

SEQ ID NO: 575283 - DNA, 75 bp, synthetic construct
  source 1..75: mol_type = other DNA
gttactataactgcatttagtccatcaactactgttggtgtatcgtcaacaaaaccaataacattgggcgcaaca

SEQ ID NO: 575284 - DNA, 75 bp, synthetic construct
  source 1..75: mol_type = other DNA
aaggatgatgaccctgaatataacaagaaagtggaagcagcaatagcttcagttttgaaaaaagaagaaaaagac

SEQ ID NO: 575285 - DNA, 75 bp, synthetic construct
  source 1..75: mol_type = other DNA
agacaatgttgatactttcacatatgttaaggaagctgtaaaagcatatccggaaatttattttgcaaaagttgt

SEQ ID NO: 575286 - DNA, 75 bp, synthetic construct
  source 1..75: mol_type = other DNA
ttaatgataaaaaagcaagactaaatgacttctctgttgttgtgaagtttaaaaacacgaaaacaaaattcagta

SEQ ID NO: 575287 - DNA, 75 bp, synthetic construct
  source 1..75: mol_type = other DNA
cagcaaatgccggaagtcggtcagcgtctgcgcgttggcgggatggtgatgccgggtagcgtgcagcgcgatccc

SEQ ID NO: 575288 - DNA, 75 bp, synthetic construct
  source 1..75: mol_type = other DNA
tctgcgggcaagtgtcagggttgatcctaaaactcatgtattaataccaggcgaatatacaatgacactccatac

SEQ ID NO: 575289 - DNA, 75 bp, synthetic construct
  source 1..75: mol_type = other DNA
aaccgaacgctgaagaatttactggtcattagattctgttccggcatgggtatatggtgtgacagggaaaataat

SEQ ID NO: 575290 - DNA, 75 bp, synthetic construct
  source 1..75: mol_type = other DNA
cacaccagtaccgccagacgatggcggagacacaccagtaccgccggacgatggcggagacacaccagtaccgcc

SEQ ID NO: 575291 - DNA, 75 bp, synthetic construct
  source 1..75: mol_type = other DNA
atcccgcacaaacccgaagagatgccgctggcgcatctgggtaaagtgcttattccgtggccgaaccggatcgcc

SEQ ID NO: 575292 - DNA, 75 bp, synthetic construct
  source 1..75: mol_type = other DNA
tttgttgataccggcgctggagcaacgttagttcccggcgatgtgctgtacgttgccgctggtggctggaatttc

SEQ ID NO: 575293 - DNA, 75 bp, synthetic construct
  source 1..75: mol_type = other DNA
ctggtcgtgattggaccctgttcaattcatgatagggatgctgcacaggagtatgctgggctgcttgcgatccag

SEQ ID NO: 575294 - DNA, 75 bp, synthetic construct
  source 1..75: mol_type = other DNA
atggcgaaaaggccagtacgttacgacgctaacctgccccgtaacctgacctatcgtaaaagagacaggctttat

SEQ ID NO: 575295 - DNA, 75 bp, synthetic construct
  source 1..75: mol_type = other DNA
ataaaaaacccatcaaaaattgattatgctcttacagtttcggggaaaaagcctgcttgtgtcgagtcccagtta

SEQ ID NO: 575296 - DNA, 75 bp, synthetic construct
  source 1..75: mol_type = other DNA
cagaccaccccggacggtgcgggacgtgtggcaactcatgcagtagtgaatgcagccctgtctctggcacagggt

SEQ ID NO: 575297 - DNA, 75 bp, synthetic construct
  source 1..75: mol_type = other DNA
agcgatattaaccaatagcggttcgcttgcgacaactagcctggattttaattcaacagacaccacgaagccggt

SEQ ID NO: 575298 - DNA, 75 bp, synthetic construct
  source 1..75: mol_type = other DNA
cagcaatattacggttctcgataagttaatcgcagagaacaatattctgtatgtaaaaccggccagaccgcttaa

SEQ ID NO: 575299 - DNA, 75 bp, synthetic construct
  source 1..75: mol_type = other DNA
ggaattattatttgatgctgtaggattaaatggcgatattcattatcgtatgtttgaagaatttctattattagt

SEQ ID NO: 575300 - DNA, 75 bp, synthetic construct
  source 1..75: mol_type = other DNA
gcagctaccggtgaagtggttgggataatagccacacagatgtacggtaagccggtgagtgaactgagcgagaca

SEQ ID NO: 575301 - DNA, 75 bp, synthetic construct
  source 1..75: mol_type = other DNA
ggcaggtggtgctgcgccgtatattgctgaaattatcaaacagaccaccccggatggtgcgggacgtgtggccgc

SEQ ID NO: 575302 - DNA, 75 bp, synthetic construct
  source 1..75: mol_type = other DNA
agaatatgaaaaaaatattacagcatatgaaagatcaaaaatccatgttcattatgtccctgcttatcgcgatcc

SEQ ID NO: 575303 - DNA, 75 bp, synthetic construct
  source 1..75: mol_type = other DNA
atgggtgtcgcgacaggataatgattctgatttctgggtaacgggcaaccgtcgcagccgcttcgaaggcacctg

SEQ ID NO: 575304 - DNA, 75 bp, synthetic construct
  source 1..75: mol_type = other DNA
cgcttgcatcgggcatatgtctgctctgttccatatctgcttttgcccgggatagcttgttcaaccccagattac

SEQ ID NO: 575305 - DNA, 75 bp, synthetic construct
  source 1..75: mol_type = other DNA
ccagcatggataggttgtgaaataatcgttgatataccagaagaaaaaattagcataaactttcaatatgatgat

SEQ ID NO: 575306 - DNA, 75 bp, synthetic construct
  source 1..75: mol_type = other DNA
cttacgatgataaataccggggccggatggtggcgcaccgtcacacgggccggccggaaatccgttaccgttacg

SEQ ID NO: 575307 - DNA, 75 bp, synthetic construct
  source 1..75: mol_type = other DNA
gctgacgcacgacccggaatacccggagaatttacctgccgcgccgctggtacgctatggctggacgccgcgcgg

SEQ ID NO: 575308 - DNA, 75 bp, synthetic construct
  source 1..75: mol_type = other DNA
ggcaaccagcttaatgaggagaacccgcatcatgtgtatcagccgtaccgtctgccagggcagcagcatgatgag

SEQ ID NO: 575309 - DNA, 75 bp, synthetic construct
  source 1..75: mol_type = other DNA
tcaactgttaaaaaactggctgagatgtggcctgaggcagtgccatatttgcctgaggtggaacgccgtgaagcg

SEQ ID NO: 575310 - DNA, 75 bp, synthetic construct
  source 1..75: mol_type = other DNA
agcgatgagcaaataactaaggctcgggaagatttcaaagataactccttcatcaagatgcaggtcggcgctaaa

SEQ ID NO: 575311 - DNA, 75 bp, synthetic construct
  source 1..75: mol_type = other DNA
tggctgcggctattctggcagtgattgctgcctgtatcagtgggttacgtatcactcagccaagatccagggcat

SEQ ID NO: 575312 - DNA, 75 bp, synthetic construct
  source 1..75: mol_type = other DNA
cccgtttcactccttgccgatgaggtgcatcagcgagatgaacgcaatttgacgccgttccctgaagatgccatt

SEQ ID NO: 575313 - DNA, 75 bp, synthetic construct
  source 1..75: mol_type = other DNA
atgcttcattggcgattcttacgtgaaggtcagacagatgttgatgtcagcgtgggtgaattgcgcgatgaagac

SEQ ID NO: 575314 - DNA, 75 bp, synthetic construct
  source 1..75: mol_type = other DNA
tgctgaaaattatggttctgcagctctgggtgtcggtaaagatcttggcgctttgggcgcaatttctttcgatgt

SEQ ID NO: 575315 - DNA, 75 bp, synthetic construct
  source 1..75: mol_type = other DNA
ggggggcgggggaatgtcatatgcctatgaatatgatgtaaaatataatatatgtcatttgagaaaaaagagcag

SEQ ID NO: 575316 - DNA, 75 bp, synthetic construct
  source 1..75: mol_type = other DNA
cgttattctgtattgcctgatatattcacacctataaatttagggctatttaaaaactgccaagactggtctaat

SEQ ID NO: 575317 - DNA, 75 bp, synthetic construct
  source 1..75: mol_type = other DNA
atgcacttccgtttataccaaaatgtgtcgcgagaaaatattagtgatgcgatgactggactgtataatcgcaaa

SEQ ID NO: 575318 - DNA, 75 bp, synthetic construct
  source 1..75: mol_type = other DNA
cggtgaactgttattacgcgcatcagctattgacggagtagttccatctgaaaaaacgcagctacctacgtttat

SEQ ID NO: 575319 - DNA, 75 bp, synthetic construct
  source 1..75: mol_type = other DNA
gtacacaagagaaactaggaatagctgaaaaattaggacgttatggactagggagtgcagaaacgcacgttaagg

SEQ ID NO: 575320 - DNA, 75 bp, synthetic construct
  source 1..75: mol_type = other DNA
aaagtgaattagtttgggaagtaggagatgaggagagaaaaatatcagcttatgagaggtcaagaattcatattc

SEQ ID NO: 575321 - DNA, 75 bp, synthetic construct
  source 1..75: mol_type = other DNA
aaaaaccctcacccctgctgatctcaaggcaagtaagatgggcgatttggttaagctattcgaaggaatgaaata

SEQ ID NO: 575322 - DNA, 75 bp, synthetic construct
  source 1..75: mol_type = other DNA
ggaagtggataataatgccgcggaaagagcgcttcgtgcagtctgtctcggaaagaaaaactttatgttcttcgg

SEQ ID NO: 575323 - DNA, 75 bp, synthetic construct
  source 1..75: mol_type = other DNA
aataaaaatatcagtaacgcgatgcttaatattctggattggttcgaacggtatcccgatattgtgaaaaatata

SEQ ID NO: 575324 - DNA, 75 bp, synthetic construct
  source 1..75: mol_type = other DNA
atcagtgacgcgatgcgtaatattctggattggttcgaacggtatcccgatattgtgaaaaatataacccaggct

SEQ ID NO: 575325 - DNA, 75 bp, synthetic construct
  source 1..75: mol_type = other DNA
cggtgaactgttattacgcgcatcagctattgatggagtcgttccatccgaaaaaatgcagctacttacgtttat

SEQ ID NO: 575326 - DNA, 75 bp, synthetic construct
  source 1..75: mol_type = other DNA
gcaaccattccagcggcgcaaaaaggaaaatatgaatatgtactttgtgaaattgttgctcctgatttgaataac

SEQ ID NO: 575327 - DNA, 75 bp, synthetic construct
  source 1..75: mol_type = other DNA
ttaattataataaaaaaatatatatatctcgtgaaaccttcttggacttcgattcgaacgttatttcttgaaggt

SEQ ID NO: 575328 - DNA, 75 bp, synthetic construct
  source 1..75: mol_type = other DNA
gaactggcggaacgttacggtatatccgcagagcgcgtgagacaacttgaaaataacgcgatgaaaaaacttcgc

SEQ ID NO: 575329 - DNA, 75 bp, synthetic construct
  source 1..75: mol_type = other DNA
caaaagaagctgctggccgttgtgacctcgttgaaaccgataatagttgtgtggagaactgtttaaaagggaagt

SEQ ID NO: 575330 - DNA, 75 bp, synthetic construct
  source 1..75: mol_type = other DNA
ttttttgattgttaattatatatattatcatgatggtaataaattgatatcaattccatccgttgcctcgatcgc

SEQ ID NO: 575331 - DNA, 75 bp, synthetic construct
  source 1..75: mol_type = other DNA
ataccagcgcagcttacacagaatccatcaatgaaaataacaatgatgaagttaatggattagtacaagagttca

SEQ ID NO: 575332 - DNA, 75 bp, synthetic construct
  source 1..75: mol_type = other DNA
cttgagcttataaaaaacgccatacgagtaaacgacaatcctgatagatttaatattaataattcctcagttact

SEQ ID NO: 575333 - DNA, 75 bp, synthetic construct
  source 1..75: mol_type = other DNA
ctgaccattctcaaaatatatatgtgcactataagaaactcgaaggtaaaattgaagaaaggcttcaaaattgcc

SEQ ID NO: 575334 - DNA, 75 bp, synthetic construct
  source 1..75: mol_type = other DNA
cagcagttcctgaatacgcctgttatcaaagagtttctgaatacatcagggatggagtccctccctgtcacctta

SEQ ID NO: 575335 - DNA, 75 bp, synthetic construct
  source 1..75: mol_type = other DNA
cagcagttcctgaattcgccggtcattaaagagtttctgaacacatcagggatggagtctctccctgtcaccttg

SEQ ID NO: 575336 - DNA, 75 bp, synthetic construct
  source 1..75: mol_type = other DNA
cgcccgttgggctggtattccgcttactcaggactggagtgaagacagcacgcaaccacgctgctgcagcattcc

SEQ ID NO: 575337 - DNA, 75 bp, synthetic construct
  source 1..75: mol_type = other DNA
ttgtggaatctgtcagtcctttattctgaacgccacgaactgagagggactccatgcattttattttgccatcag

SEQ ID NO: 575338 - DNA, 75 bp, synthetic construct
  source 1..75: mol_type = other DNA
atttaacgtgacggcaaaacaggcgggatattatatgggtaaattgtcggtcatctttaccccgtcattaccgac

SEQ ID NO: 575339 - DNA, 75 bp, synthetic construct
  source 1..75: mol_type = other DNA
gataaattcagcgtgatggataaacaggccgggtactacatgggcaaattgtcagtaatctttacgccttccttg

SEQ ID NO: 575340 - DNA, 75 bp, synthetic construct
  source 1..75: mol_type = other DNA
taaccaagaaccaataaaattacttgcgagctataaagacaaagaactcgtccgtactatcattaatgacaacat

SEQ ID NO: 575341 - DNA, 75 bp, synthetic construct
  source 1..75: mol_type = other DNA
tcaaaagtaatgatgaatgggctgagcaactcaaagaggcattgagccagggaaaagaccttgcgcctcttcatg

SEQ ID NO: 575342 - DNA, 75 bp, synthetic construct
  source 1..75: mol_type = other DNA
acattattaacaattgtgaggatgatagtgttaagagtaaagcgcaggcatatattgaactcttaaacgataatt

SEQ ID NO: 575343 - DNA, 75 bp, synthetic construct
  source 1..75: mol_type = other DNA
aaactcctcggatgtaagctcacactttgatactttcaaaaaatttggttggcctttgtttgacttaagaaacgg

SEQ ID NO: 575344 - DNA, 75 bp, synthetic construct
  source 1..75: mol_type = other DNA
gcatagctctaagcataatggccgcaagcagcttcaattacgcggccacaagcgagatacaaaaaccaaacgtca

SEQ ID NO: 575345 - DNA, 75 bp, synthetic construct
  source 1..75: mol_type = other DNA
ggcgcgacgttaccagagctggcgaccgcgaccgctggcatggataaaacgcaaaaacataaagcttttaacgca

SEQ ID NO: 575346 - DNA, 75 bp, synthetic construct
  source 1..75: mol_type = other DNA
aaacaaaaaaagactttcacaaaatcaagcagttaaaaatacagacaagtggtataaaaaagcatctcagaatcc

SEQ ID NO: 575347 - DNA, 75 bp, synthetic construct
  source 1..75: mol_type = other DNA
cctttcagcttaccctggcttttcagcgggtgaatgatgctgtgcgggccgtttttctggcaagtgcgcagaatg

SEQ ID NO: 575348 - DNA, 75 bp, synthetic construct
  source 1..75: mol_type = other DNA
gtgattttcggggcctggctggcacgtctgcgcgaactggatcctgaatttgatgcactggtggaatccgacccg

SEQ ID NO: 575349 - DNA, 75 bp, synthetic construct
  source 1..75: mol_type = other DNA
agtatcaggagctggacacgttgttttcggccctggtggaatccgatccggcgtataaatgggcagaggcgctgg

SEQ ID NO: 575350 - DNA, 75 bp, synthetic construct
  source 1..75: mol_type = other DNA
taaacagcggtgaccatattttattagttaatcaaatctatggtccggctatcgaattagttaaaaacctggcaa

SEQ ID NO: 575351 - DNA, 75 bp, synthetic construct
  source 1..75: mol_type = other DNA
gccctgaatatgtggtccggtattgtcttcagcattacatttttattttcgtccatcgcctcaccggttttgggg

SEQ ID NO: 575352 - DNA, 75 bp, synthetic construct
  source 1..75: mol_type = other DNA
acgtttaaacagggggaggtgaatgcctaccagctgacgctggcgttccagcgggttaatgatgccgtgcgggcg

SEQ ID NO: 575353 - DNA, 75 bp, synthetic construct
  source 1..75: mol_type = other DNA
tcggggagaagcagggcggattgaacccggcgtagtgggaacggcaatgtggggacggatgcgcccggttatgcg

SEQ ID NO: 575354 - DNA, 75 bp, synthetic construct
  source 1..75: mol_type = other DNA
cggcaatctgccgacagatcgcgaaacgatgtactggatgaatattaaaacgatacctgcaactgaaaagcagga

SEQ ID NO: 575355 - DNA, 75 bp, synthetic construct
  source 1..75: mol_type = other DNA
ctactgcattgttattatccaactctgttgcacaggcgggtgtcattgttggaggaacacgagttatttataacg

SEQ ID NO: 575356 - DNA, 75 bp, synthetic construct
  source 1..75: mol_type = other DNA
gggaccctccctcacgttgggacgacggtattcctggcctgattgccgactacagcctcaatgcgcaaactcgcc

SEQ ID NO: 575357 - DNA, 75 bp, synthetic construct
  source 1..75: mol_type = other DNA
gccaaacgcaactggggctatcacgccgacgatcttatgaagaactggaagaattattgggctcgaatctggaag

SEQ ID NO: 575358 - DNA, 75 bp, synthetic construct
  source 1..75: mol_type = other DNA
taaccctgtcttaccgtgaggttaaggaaggtgcgaataagcggggaaattcttctcggctgactcagtcatttc

SEQ ID NO: 575359 - DNA, 75 bp, synthetic construct
  source 1..75: mol_type = other DNA
acctgaataacgtcattaatcacgaggtaaaagggaaagatgaccgtaattttgtctataccaactggacagaag

SEQ ID NO: 575360 - DNA, 75 bp, synthetic construct
  source 1..75: mol_type = other DNA
cgcaccgcgctgggggatcgcaacgggcttgcctcgctgttgaccatcggtattatctgcctgatcgtctttatc

SEQ ID NO: 575361 - DNA, 75 bp, synthetic construct
  source 1..75: mol_type = other DNA
tagaaaaagatatagccaatgaaatagatattgataaagtgaatttcatgcataacctctatactggattctttt

SEQ ID NO: 575362 - DNA, 75 bp, synthetic construct
  source 1..75: mol_type = other DNA
tttttaaatatttttttaccctagcatttgttctcgaattgacattgagcttaaatataaccaaggcaaatgcaa

SEQ ID NO: 575363 - DNA, 75 bp, synthetic construct
  source 1..75: mol_type = other DNA
gtgtttgcggatctgcaccttccaacggtcatcggcggcaccttgctaagtcttccgctgatgtggcaattggca

SEQ ID NO: 575364 - DNA, 75 bp, synthetic construct
  source 1..75: mol_type = other DNA
ggtggcggtggttcagggcatcctcggcgggattgcgtttgcgattgccggtattgacggcagcgtgctctgggg

SEQ ID NO: 575365 - DNA, 75 bp, synthetic construct
  source 1..75: mol_type = other DNA
cttctcagggcgcgatcacgaaggtaacgccgaagagctggaccccgacttcatcgaagaaggaaaaaatcctcc

SEQ ID NO: 575366 - DNA, 75 bp, synthetic construct
  source 1..75: mol_type = other DNA
ttaagcgaaaccggtaatcaagcctgtgttgaagtttcaaaccctggcgagccgatagcgccagagcacttacac

SEQ ID NO: 575367 - DNA, 75 bp, synthetic construct
  source 1..75: mol_type = other DNA
gggaattgaaaaaagatgaaattattcatccccttcctgcgtataccccaggttttgatggttgggacgatcccc

SEQ ID NO: 575368 - DNA, 75 bp, synthetic construct
  source 1..75: mol_type = other DNA
gcaagatggtcggagatcgactttgaaaatgcgatgtggactatccctggagaacgcgagccattaccaggggtc

SEQ ID NO: 575369 - DNA, 75 bp, synthetic construct
  source 1..75: mol_type = other DNA
cgctgctgttgctcggcgtgatgctgctctggacgaactggcagcgtatgacgcagcaggaacagcttattgaac

SEQ ID NO: 575370 - DNA, 75 bp, synthetic construct
  source 1..75: mol_type = other DNA
caatttcttcgcttcaatgattatcctattaaactggtaagcagtaatgggcattcaataattggttatatttca

SEQ ID NO: 575371 - DNA, 75 bp, synthetic construct
  source 1..75: mol_type = other DNA
caatgcttgtcaggtcggaatgattagacctaatggcaaccatatgcagatcatgtttgactgggttagcagaat

SEQ ID NO: 575372 - DNA, 75 bp, synthetic construct
  source 1..75: mol_type = other DNA
taatggagaaatgctgattgccgcaaaagtgactccgcgtattctgcctggcgttaccgccatcgggcaaggtgc

SEQ ID NO: 575373 - DNA, 75 bp, synthetic construct
  source 1..75: mol_type = other DNA
atggtgttgtactggggcaggtgaaaacggaagccaaaagtaatgagattacagccattccagagttgcttaacc

SEQ ID NO: 575374 - DNA, 75 bp, synthetic construct
  source 1..75: mol_type = other DNA
tatttggtgcggcggcaaagcagctcttaatcagcatttatttaaagtctcatctaccaagtaccctaaatggct

SEQ ID NO: 575375 - DNA, 75 bp, synthetic construct
  source 1..75: mol_type = other DNA
gatctacgtgtaacttctttaggaagtaccaatggtactcgtttagtacccgcagagaccgttcttttgttggtt

SEQ ID NO: 575376 - DNA, 75 bp, synthetic construct
  source 1..75: mol_type = other DNA
tccgaagtcgatgcgctgattaaggtattgccacgcatgacctaccccgcgcttacggcgcaggagcttaccgca

SEQ ID NO: 575377 - DNA, 75 bp, synthetic construct
  source 1..75: mol_type = other DNA
tttgtactggaaggacttcttgagcagcagacagggctgaatccagttgagatcatgacagacactgcgggtagc

SEQ ID NO: 575378 - DNA, 75 bp, synthetic construct
  source 1..75: mol_type = other DNA
gcgcgtcaacaagacgctgtaccttcttaattatattgatgatgaggattatcgtcggcggatcctgacgcagct

SEQ ID NO: 575379 - DNA, 75 bp, synthetic construct
  source 1..75: mol_type = other DNA
tatatcttattgataaggatggttatatggggcttgtgagacgtgcggatgaacaatataaaaataaagaagagg

SEQ ID NO: 575380 - DNA, 75 bp, synthetic construct
  source 1..75: mol_type = other DNA
gtgttcccggctgaactggtggggctgctggacaggctggagggggaaatccgggcaaactgcgtgagcagtgaa

SEQ ID NO: 575381 - DNA, 75 bp, synthetic construct
  source 1..75: mol_type = other DNA
gcatatgaactgaccagcacatacacccccgcaggccagttacagagccagcacctgaacagcctggtgtatgac

SEQ ID NO: 575382 - DNA, 75 bp, synthetic construct
  source 1..75: mol_type = other DNA
gcgaggtggcagccttccagtaacaaaaatgcgtaagtacgaagaagtgacggggcttcctcgcgaagttctata

SEQ ID NO: 575383 - DNA, 75 bp, synthetic construct
  source 1..75: mol_type = other DNA
gctgccgccgtaccgggtgcttaccgggatggcggacgctgacgtaccggcgtgaggccgccggtgacctggccg

SEQ ID NO: 575384 - DNA, 75 bp, synthetic construct
  source 1..75: mol_type = other DNA
caggccagttacagagccagcacctgaacagcctggtgtatgaccgtgactacgggtggaatgacaacggcgacc

SEQ ID NO: 575385 - DNA, 75 bp, synthetic construct
  source 1..75: mol_type = other DNA
actggaaacctgtaacgcggataaacgggccattgaattactggaacagcgcaggctgcaacgactgaacaacga

SEQ ID NO: 575386 - DNA, 75 bp, synthetic construct
  source 1..75: mol_type = other DNA
actcccacatggggaaatctcggtatatggggcgaccgccttctggatgcactggaaacctgtaacgcggataaa

SEQ ID NO: 575387 - DNA, 75 bp, synthetic construct
  source 1..75: mol_type = other DNA
ttccagacagttgtgccaacgcgaggagctgtcgtacgggcgcatttcgatacccgtgtgggttatcgagttctt

SEQ ID NO: 575388 - DNA, 75 bp, synthetic construct
  source 1..75: mol_type = other DNA
gtgaactgctggcggtatatgaccgcagcaatacgcaggtgcgcgctttcacgtatgacgcgcagcacccgggcc

SEQ ID NO: 575389 - DNA, 75 bp, synthetic construct
  source 1..75: mol_type = other DNA
taatgatacaaaagaagctgctggccgttgtgacctcgttgaaaccgataatagttgtgtggagaactgtttaaa

SEQ ID NO: 575390 - DNA, 75 bp, synthetic construct
  source 1..75: mol_type = other DNA
tctcgattcacatgataaatttgattcagatacaaaaaatagcgcttggcaatacatgattagagatgcatcacg

SEQ ID NO: 575391 - DNA, 75 bp, synthetic construct
  source 1..75: mol_type = other DNA
acaacatttgcatctggcgcaataaacacgggagttacaaaatatactgcagaatatgctaacgataaggggaaa

SEQ ID NO: 575392 - DNA, 75 bp, synthetic construct
  source 1..75: mol_type = other DNA
ccaattcgcgggttatccggttataatttcaaatagcgtttttgatgccatcaacggtactgcttttgatatgga

SEQ ID NO: 575393 - DNA, 75 bp, synthetic construct
  source 1..75: mol_type = other DNA
gcaggccgttaaggatgccgacacgatagtccggaaagcggtcgataaacttgctgatgctgcaacgctgaccgg

SEQ ID NO: 575394 - DNA, 75 bp, synthetic construct
  source 1..75: mol_type = other DNA
aaagggaggcagagcttctcaacgcgcaggacgacgaagagaaagccccggtacaacccgccgttaacaagctga

SEQ ID NO: 575395 - DNA, 75 bp, synthetic construct
  source 1..75: mol_type = other DNA
gatgaaataccagcacatcactgggtcgacctttctgatcaagaaactggcattgctttaatagcaaaaaacaaa

SEQ ID NO: 575396 - DNA, 75 bp, synthetic construct
  source 1..75: mol_type = other DNA
aatcgccgcaggccgctttgagttacaaggttgcttttgggtcgaatgcgatttaaatctggtaagtggtgaatc

SEQ ID NO: 575397 - DNA, 75 bp, synthetic construct
  source 1..75: mol_type = other DNA
atgtaccttactgataatattatcaaactgtcgaataaaataggtcagcgtgtttatactgttgtctctgaaatg

SEQ ID NO: 575398 - DNA, 75 bp, synthetic construct
  source 1..75: mol_type = other DNA
ggcgtgagcaaaagcggtgaccgctatgtcgaccacaccatgttcgatatggtacagtcgctgaccattgccgac

SEQ ID NO: 575399 - DNA, 75 bp, synthetic construct
  source 1..75: mol_type = other DNA
ttttcccctcgtgaagaggaaaaggaattacttaaagatgagcaacgtctttgcgatgatgttgatagcgaagat

SEQ ID NO: 575400 - DNA, 75 bp, synthetic construct
  source 1..75: mol_type = other DNA
tgatcatacagaccaatacgcgaactcgcctataccgtaactctgaagatttttatccaagccctttgacaagag

SEQ ID NO: 575401 - DNA, 75 bp, synthetic construct
  source 1..75: mol_type = other DNA
tctcggtatgtccaccgatacagccgaagaagagccagagcaacaggataacggccagagcagcacggggggaac

SEQ ID NO: 575402 - DNA, 75 bp, synthetic construct
  source 1..75: mol_type = other DNA
cagcttatgttactggacgtaagtcatacatatataagctatcgcagaagtataaagcatatacgaaacttagtg

SEQ ID NO: 575403 - DNA, 75 bp, synthetic construct
  source 1..75: mol_type = other DNA
aaaagaagcactacgagtatggaataattttcactcaagagtacgtaataacatcaattacagtactgttactat

SEQ ID NO: 575404 - DNA, 75 bp, synthetic construct
  source 1..75: mol_type = other DNA
atcagaattggcgattactttgacctcatcgcagggacatcgataggtgggatcttggctctcggccttgctaaa

SEQ ID NO: 575405 - DNA, 75 bp, synthetic construct
  source 1..75: mol_type = other DNA
ctccgatggaaatcttctggggaacgctgaaaaatgaaagcctgagccactatcgttttaagagccgggatattt

SEQ ID NO: 575406 - DNA, 75 bp, synthetic construct
  source 1..75: mol_type = other DNA
atcaagattggctccactgctgttgcatatcgtctttcagaagtgcaggcatggattcgaggtgagtgggtagtt

SEQ ID NO: 575407 - DNA, 75 bp, synthetic construct
  source 1..75: mol_type = other DNA
ttccccgaacacacaacttggcccgcgtgtgattgtagaacgtaatttacctaccggaagttattcactccggca

SEQ ID NO: 575408 - DNA, 75 bp, synthetic construct
  source 1..75: mol_type = other DNA
attcaaatttctgatagtgtcattatcgatgaaagtgcaggagatgttgttattggtgctaatacacgaatttgc

SEQ ID NO: 575409 - DNA, 75 bp, synthetic construct
  source 1..75: mol_type = other DNA
aagccaaagacagccgtcagtgaaatggtgaaggcaaataaattaccaattattgaattacgtgatccttgcaaa

SEQ ID NO: 575410 - DNA, 75 bp, synthetic construct
  source 1..75: mol_type = other DNA
gcgcgtgcggtgccggcggcggattttccacgatctctacagcgtctggggcggcagcgacaccattgtccccat

SEQ ID NO: 575411 - DNA, 75 bp, synthetic construct
  source 1..75: mol_type = other DNA
gaaagaaggaaagtttccaaagcgaattaaaataggtgccactgccgtagcatatcgcctttcggaggtgcaggc

SEQ ID NO: 575412 - DNA, 75 bp, synthetic construct
  source 1..75: mol_type = other DNA
cttgcggaaatgcagcaagtatttacgcctgctttaatggagcctgtactgaaatactggcaagagtcaccctaa

SEQ ID NO: 575413 - DNA, 75 bp, synthetic construct
  source 1..75: mol_type = other DNA
gaagcgattgctccttctgtgccacgattaacgaaccaatttgttatcaaaaatgctgtatttgaaagtatgcag

SEQ ID NO: 575414 - DNA, 75 bp, synthetic construct
  source 1..75: mol_type = other DNA
ttagcgaagaatatcttcaggtatattgtattatggctggacacaatggctttgtctttgttgaaggtctaaaag

SEQ ID NO: 575415 - DNA, 75 bp, synthetic construct
  source 1..75: mol_type = other DNA
ttgtctggagattcagggggccagtctagtaattatgcgtttattcgtcctggcacaataatcagcaatggcgta

SEQ ID NO: 575416 - DNA, 75 bp, synthetic construct
  source 1..75: mol_type = other DNA
gccattttatgctgcattgctagtagcgttgatgatgatcacttacattccgcaaatatccttgttcattccaca

SEQ ID NO: 575417 - DNA, 75 bp, synthetic construct
  source 1..75: mol_type = other DNA
tgatcaaaaatgagttgggtaaaaaaaccagacatattccaattaggcaattggttaaccgtgcatgtaatgcgc

SEQ ID NO: 575418 - DNA, 75 bp, synthetic construct
  source 1..75: mol_type = other DNA
ttttactgagctgaataaattctttcaagatagtgttgccaacagatttagtattgacatggataaatggagcaa

SEQ ID NO: 575419 - DNA, 75 bp, synthetic construct
  source 1..75: mol_type = other DNA
ggctgagtacccgggctttcgcgtcatcaggtacgtataccccatcaccagaaacaaaacggatcagggtcacaa

SEQ ID NO: 575420 - DNA, 75 bp, synthetic construct
  source 1..75: mol_type = other DNA
tggtgtttatttctgggaaaacaactatgcaagagctattcaatatgccgaagaagacaaaaaaaggaaaaactc

SEQ ID NO: 575421 - DNA, 75 bp, synthetic construct
  source 1..75: mol_type = other DNA
cttattcaggttttacaggagtggtgtccaacttttcccggatattacctttactatcccagccgtaagcagcat

SEQ ID NO: 575422 - DNA, 75 bp, synthetic construct
  source 1..75: mol_type = other DNA
gtttcactaacattaacgaagcaatggaatttcgcgccaccattgaagagccacgccgccaggaactacgcgccc

SEQ ID NO: 575423 - DNA, 75 bp, synthetic construct
  source 1..75: mol_type = other DNA
caacacacagtttgcatttatgaagccgtatttatgctttatcacaacaggccaatagctgatgataaggagctg

SEQ ID NO: 575424 - DNA, 75 bp, synthetic construct
  source 1..75: mol_type = other DNA
cccggcagaaaaaagccagtatgaagggagtagatcgttatggtcggccctggatgatgacatcatcaccacgga

SEQ ID NO: 575425 - DNA, 75 bp, synthetic construct
  source 1..75: mol_type = other DNA
aagttcctgcaccaatcgttactttgcaacaattcgcagagcttgagggtgtttctgaacgtaccgcctaccgct

SEQ ID NO: 575426 - DNA, 75 bp, synthetic construct
  source 1..75: mol_type = other DNA
tcagatcatgataaagtgaccacaaaggatagagaccctaacggcgaatttatatcattgccgtatcatttaacc

SEQ ID NO: 575427 - DNA, 75 bp, synthetic construct
  source 1..75: mol_type = other DNA
atactatttttagttgcttatatcttgctggtcggtgcatttcatcaaagatattcattgagattggagcaactt

SEQ ID NO: 575428 - DNA, 75 bp, synthetic construct
  source 1..75: mol_type = other DNA
acaggttgaggataccgccgcagaggtcaggcaggatgctgaagccgcgaaaaaggccgcatctgatgcagagca

SEQ ID NO: 575429 - DNA, 75 bp, synthetic construct
  source 1..75: mol_type = other DNA
gcgtatatctgaaacagggctggcgcgacgagtactgtgttggcgatattgctgtatacgacgactcaaagcccg

SEQ ID NO: 575430 - DNA, 75 bp, synthetic construct
  source 1..75: mol_type = other DNA
ctactggacaacaggtaatggttatctgactggctgggaaaatctgaagattacctcacaggacattatctctct

SEQ ID NO: 575431 - DNA, 75 bp, synthetic construct
  source 1..75: mol_type = other DNA
gtaacgatagtgaccgagactacttagagcggatatttcagtcagctaacattaactttctcatcggatcaggtg

SEQ ID NO: 575432 - DNA, 75 bp, synthetic construct
  source 1..75: mol_type = other DNA
accggagaagctgcaagcgttaataatcctttccagacaatagaacgacgtgacgtagggatttctctgcaggta

SEQ ID NO: 575433 - DNA, 75 bp, synthetic construct
  source 1..75: mol_type = other DNA
aatggtggcgcaggcgcagcagagcgcggaagcggcagcggaaagcgaacgacaggccgggcaacatgtcgctga

SEQ ID NO: 575434 - DNA, 75 bp, synthetic construct
  source 1..75: mol_type = other DNA
gactgttgcgatcgtgaagccatagactggaccgcaagcacgggaggttacgataaagcgacagtgcaggatgtg

SEQ ID NO: 575435 - DNA, 75 bp, synthetic construct
  source 1..75: mol_type = other DNA
ccagcgttggtgttccgatggctttgagttcggttgcgatgatggcgaaaaactgcgtgttacgttcgtcctgga

SEQ ID NO: 575436 - DNA, 75 bp, synthetic construct
  source 1..75: mol_type = other DNA
atcattggcgatatgccagcatacgggtatcgccgtgtctgggcgatactcaggcggcagtcccgaaatgaagga

SEQ ID NO: 575437 - DNA, 75 bp, synthetic construct
  source 1..75: mol_type = other DNA
gacgtggtgaaacgttttgaggaaatggtggcgcaggcgcagcagagcgcggaaactgcaacagaaagcgaacga

SEQ ID NO: 575438 - DNA, 75 bp, synthetic construct
  source 1..75: mol_type = other DNA
gcaggcccgcgaaattgcgatccgctgtcatgaacggcagattcagcatcaacaacgctgggttatccggaccag

SEQ ID NO: 575439 - DNA, 75 bp, synthetic construct
  source 1..75: mol_type = other DNA
catgtgtcaggctgttgcgcagaccattcctgacgggtatgtgcaggtggcccgtgcacacggtattccggcaga

SEQ ID NO: 575440 - DNA, 75 bp, synthetic construct
  source 1..75: mol_type = other DNA
gttggtggtcggttcgaaaaactcctccaactccaaccgtctggcggagctggcccagcgtatgggcaaacgtcg

SEQ ID NO: 575441 - DNA, 75 bp, synthetic construct
  source 1..75: mol_type = other DNA
ttttcaaaattggaaagaaaatggcgaagatgttgcattattaatgcccgaatttagtgctaaatggctaccgat

SEQ ID NO: 575442 - DNA, 75 bp, synthetic construct
  source 1..75: mol_type = other DNA
gaaaggttaatagtggaatggctcagtttatctagtaccccgttaaatctaaagtatcctgaactaaaatataat

SEQ ID NO: 575443 - DNA, 75 bp, synthetic construct
  source 1..75: mol_type = other DNA
aaatagacgaactctgtgcaaaaagaataatatctctgcttcctgaatctgagaaaaatatagaaatacgtgtaa

SEQ ID NO: 575444 - DNA, 75 bp, synthetic construct
  source 1..75: mol_type = other DNA
cggctggtggcacaatcagacgttagcgttttgattaacggccagagcggcaccgggaaagagattttcgcccag

SEQ ID NO: 575445 - DNA, 75 bp, synthetic construct
  source 1..75: mol_type = other DNA
agattagcgaagtgccggacggcgcaatcctgattttctccgcacacggtgtttctcaggccgtacgtaacgaag

SEQ ID NO: 575446 - DNA, 75 bp, synthetic construct
  source 1..75: mol_type = other DNA
tgaccttgaagtcattggtaagcattatcctaaaactgatgccgcgaaaatggtgcaggcgaaaccctgctatgt

SEQ ID NO: 575447 - DNA, 75 bp, synthetic construct
  source 1..75: mol_type = other DNA
cggccccggctggaaaatgcctgcccggctggaaaatgcctgcggatatccgcatcccgtatgccacagacccgg

SEQ ID NO: 575448 - DNA, 75 bp, synthetic construct
  source 1..75: mol_type = other DNA
taaatgtaaaaaaaataattgatcaattagcaaccggaatgaaagttttcggtatttcaaaaaataatcttttgt

SEQ ID NO: 575449 - DNA, 75 bp, synthetic construct
  source 1..75: mol_type = other DNA
cacgctgtcggtggatgacacgtctgatgtgatcgacgcgctgcgtaaacgcttcccgaaaattgtcggtccgcg

SEQ ID NO: 575450 - DNA, 75 bp, synthetic construct
  source 1..75: mol_type = other DNA
atgcgctacaaagccacactattcttgctgataatgattctcagcttaacgggtctctattcctgcaacaaaaac

SEQ ID NO: 575451 - DNA, 75 bp, synthetic construct
  source 1..75: mol_type = other DNA
cccctgcaaggcgattaacggagaacgaatatctacccgttctccgtcaaaaaccattattccggcattgcctca

SEQ ID NO: 575452 - DNA, 75 bp, synthetic construct
  source 1..75: mol_type = other DNA
aagcaatgcttttgtcattatgggagccggagaacaattaaaacgtattaaatatgatgttaatgaagataaatt

SEQ ID NO: 575453 - DNA, 75 bp, synthetic construct
  source 1..75: mol_type = other DNA
ggacggtgacaggctgacgacggtacagaccggcaccacgcgtatccagacggtataccagccggggagcttcac

SEQ ID NO: 575454 - DNA, 75 bp, synthetic construct
  source 1..75: mol_type = other DNA
gcagtgcgggctgacggtggagcggctggcggcacagatagagccggtttatttgcctgagcgaaaaatacatct

SEQ ID NO: 575455 - DNA, 75 bp, synthetic construct
  source 1..75: mol_type = other DNA
gaaacattgcgtggagcggggagtatgatgagtggggcaaccagctgaatgaagagaacccgcatcacctgcccc

SEQ ID NO: 575456 - DNA, 75 bp, synthetic construct
  source 1..75: mol_type = other DNA
aatacgcgggcgcgttacggttgatacactgttcgataagacaatagtgccgcgcggtcctcaagacccgattta

SEQ ID NO: 575457 - DNA, 75 bp, synthetic construct
  source 1..75: mol_type = other DNA
cggcaagatacttacgctcggccttagacaaggcccccgttggcgctgtgaacggagaatggttctttataaccg

SEQ ID NO: 575458 - DNA, 75 bp, synthetic construct
  source 1..75: mol_type = other DNA
ctcaacccgcgtcattactcgcttcatgaaggatctgagcagaaaaaggattctttacgtatttggttttacccg

SEQ ID NO: 575459 - DNA, 75 bp, synthetic construct
  source 1..75: mol_type = other DNA
accaaatagataaggtttcacctgtaactaaaaactctcagcaagttaaaggccactatggagataaattgaaag

SEQ ID NO: 575460 - DNA, 75 bp, synthetic construct
  source 1..75: mol_type = other DNA
gcctgccgtggtttgccttgattaacatcggtttttcatcgatgattttgctgcgaagcattttattcaatgaga

SEQ ID NO: 575461 - DNA, 75 bp, synthetic construct
  source 1..75: mol_type = other DNA
tatgacgagtggggaaacctgctgggcgaggaaagcgcgcagcaccttcagcagtcactccgtctgccgggacag

SEQ ID NO: 575462 - DNA, 75 bp, synthetic construct
  source 1..75: mol_type = other DNA
aggcaacgcctttgtcattatgggatctggagagcaattaaaacgtattaaatatgatgttgatgaaaataactt

SEQ ID NO: 575463 - DNA, 75 bp, synthetic construct
  source 1..75: mol_type = other DNA
agagtaatgaaaaatcattaaaacctgtgagcgaaaacggtttaagtggagtcttgactgatcgtaataataaaa

SEQ ID NO: 575464 - DNA, 75 bp, synthetic construct
  source 1..75: mol_type = other DNA
atctactttgaataataatgatgtagggtttaatttcaaattattcccagaagtcaagctgagcttgcttctggg

SEQ ID NO: 575465 - DNA, 75 bp, synthetic construct
  source 1..75: mol_type = other DNA
gttgcccgataatccggttttttatccctttggtgattttcatcaggtttacagccaacaactggcacgccttgt

SEQ ID NO: 575466 - DNA, 75 bp, synthetic construct
  source 1..75: mol_type = other DNA
ttaagttctcttttttcgctttggtattgtaggataaagtataaaattagattaaatcttcctaatttgaaagat

SEQ ID NO: 575467 - DNA, 75 bp, synthetic construct
  source 1..75: mol_type = other DNA
acataatcgctgattacttagacaaagagtatattgaattattatcacaattagcaacgaagtatcaaacagtaa

SEQ ID NO: 575468 - DNA, 75 bp, synthetic construct
  source 1..75: mol_type = other DNA
aaatcatgagtttatattgattgaaagtagtgttttaatattattcgaagatgatataaaacaagaaatatttat

SEQ ID NO: 575469 - DNA, 75 bp, synthetic construct
  source 1..75: mol_type = other DNA
gtgagcctgacgtaatatgtttaagcaagcaggtctgggaaaatcttctcattaaactaaagctggagaacaatg

SEQ ID NO: 575470 - DNA, 75 bp, synthetic construct
  source 1..75: mol_type = other DNA
aaaatgcggcttctgaagttcataaatcagcgaataaaggtgagattgagcaattagttgaatgctctaaaagaa

SEQ ID NO: 575471 - DNA, 75 bp, synthetic construct
  source 1..75: mol_type = other DNA
tcacttaagccaggtagtatgaatggtgttattttagaaatgccaccaaatgtctgtatggaaccacgtaattca

SEQ ID NO: 575472 - DNA, 75 bp, synthetic construct
  source 1..75: mol_type = other DNA
gttttggagttttctgattcaagaattaaacttttaacaaatgaatacgcaaaaggtgcagcaggtgctagaaat

SEQ ID NO: 575473 - DNA, 75 bp, synthetic construct
  source 1..75: mol_type = other DNA
gctggttcgctggcttccagctacgctggatgtaacggtcgataatttgctcgaacaggtcgcccgacaattgcc

SEQ ID NO: 575474 - DNA, 75 bp, synthetic construct
  source 1..75: mol_type = other DNA
tgcagtgggcgctgggagcaaccgaatccccgatgctcagaattgacggggattaccgctgttgcgtgcagggta

SEQ ID NO: 575475 - DNA, 75 bp, synthetic construct
  source 1..75: mol_type = other DNA
gtgatgttaaatatttcacctatcagtccagtgatattcctagtttaactctttggatacaggagggtattgagg

SEQ ID NO: 575476 - DNA, 75 bp, synthetic construct
  source 1..75: mol_type = other DNA
ctgactccggcggatgtaccggcggtgacggatcaggacggtaacggcaaggcggatgcagcagaagcggcagtg

SEQ ID NO: 575477 - DNA, 75 bp, synthetic construct
  source 1..75: mol_type = other DNA
gatatgtttttgatgtgcatcacattatgtcgattcttgaatacatccttgatcataacgctaaaccagatattt

SEQ ID NO: 575478 - DNA, 75 bp, synthetic construct
  source 1..75: mol_type = other DNA
cagcggcacgcgggatatcaccattgatgccaacctgccggggctgcgggtggataccgtggcgggcgatgatat

SEQ ID NO: 575479 - DNA, 75 bp, synthetic construct
  source 1..75: mol_type = other DNA
cctgcctggggtgatcattaatacggtggcgggcgatgacattatcaatgccgctgaaatcgctgtggcgcagac

SEQ ID NO: 575480 - DNA, 75 bp, synthetic construct
  source 1..75: mol_type = other DNA
aaccatcagcggtaccaccacggcacaggccggacagacgctgaccgtcacgctcaataacaacacgtaccagac

SEQ ID NO: 575481 - DNA, 75 bp, synthetic construct
  source 1..75: mol_type = other DNA
tctggcagggaatatcacctcctccagcgattttatcctgactgtcgatacctctattccgaccacgcttgcgca

SEQ ID NO: 575482 - DNA, 75 bp, synthetic construct
  source 1..75: mol_type = other DNA
ctccggcaccacctccgatgtggaagcggggcaaaccatcaccgttatcttcggcggcaaaagctacaccaccac

SEQ ID NO: 575483 - DNA, 75 bp, synthetic construct
  source 1..75: mol_type = other DNA
gcggcagacgttgcggcgcttgccgatggcaccagctacacggtcagcgcttccgcccaggacagcgccggaaac

SEQ ID NO: 575484 - DNA, 75 bp, synthetic construct
  source 1..75: mol_type = other DNA
gaccatcagcggccaggtcacgggtgcagcggcgggcagtaccgtcaccgttgaactgggcggtaaaacttacac

SEQ ID NO: 575485 - DNA, 75 bp, synthetic construct
  source 1..75: mol_type = other DNA
tcaggccgatttaagctggagcgtcaccgttccgacagacgatttacaggcattgggcaatggtgatttgaccat

SEQ ID NO: 575486 - DNA, 75 bp, synthetic construct
  source 1..75: mol_type = other DNA
cggatctcagcaatctgaccgccagccagtacacggttagcgcctcggtaaacgacaaagcgggtaacccggcgt

SEQ ID NO: 575487 - DNA, 75 bp, synthetic construct
  source 1..75: mol_type = other DNA
cgagcaacaatggcaagttcgtcggcacgggctataacgacaccttctttgccaccgcaggcaccgacacttacg

SEQ ID NO: 575488 - DNA, 75 bp, synthetic construct
  source 1..75: mol_type = other DNA
ccagcggtgaagtggtttacctctaccgtaacgggctgctgttaggtgcggtgacgatggtcggcgctctgaact

SEQ ID NO: 575489 - DNA, 75 bp, synthetic construct
  source 1..75: mol_type = other DNA
ggcggcggtcgccatcaccattaacactctctccggcgatgatgtgatcaacgccgtggagaaaggcgaaacgct

SEQ ID NO: 575490 - DNA, 75 bp, synthetic construct
  source 1..75: mol_type = other DNA
gacatccttaacgccgcagaggcaggaagcccgctgaccatcagcggtaccagcactgccgaaacaggacaggcg

SEQ ID NO: 575491 - DNA, 75 bp, synthetic construct
  source 1..75: mol_type = other DNA
tttccgcactggcgcagggggatgtgaccattaccgccacggtcaccgactccgcaggcaacagcggcacggcct

SEQ ID NO: 575492 - DNA, 75 bp, synthetic construct
  source 1..75: mol_type = other DNA
gcgggtggataccgtcgcgggcgatgatgtggtgaatattatcgaacacgcccaggcgcaggtgattactggcag

SEQ ID NO: 575493 - DNA, 75 bp, synthetic construct
  source 1..75: mol_type = other DNA
cagcgcctccgcgcaggccagcgtcagcaatattaacggcaatagcgcctcggcggtgcacagctacagtgtgga

SEQ ID NO: 575494 - DNA, 75 bp, synthetic construct
  source 1..75: mol_type = other DNA
ctggtaggcaactccaccacgtcgaacagcggcggtagcgctacggtgggcggggcggtgacggggtatctttcg

SEQ ID NO: 575495 - DNA, 75 bp, synthetic construct
  source 1..75: mol_type = other DNA
gcggcgtattgggggcggcgctcggcgctaacgagttcgcgcaaatcagtaccgacaacggcgcaacctgggtga

SEQ ID NO: 575496 - DNA, 75 bp, synthetic construct
  source 1..75: mol_type = other DNA
ggcgatgatatcgtcaacagcattgaacacgggcaggcgctggtgatcactggtggcagtagtggcctgaatgca

SEQ ID NO: 575497 - DNA, 75 bp, synthetic construct
  source 1..75: mol_type = other DNA
cagcggcaccagcaccgccgaaaccgggcagacggtcaccgtaaccctcaacggcgcaacctacagcggtaatgt

SEQ ID NO: 575498 - DNA, 75 bp, synthetic construct
  source 1..75: mol_type = other DNA
ctggcggcgggcgcggcgttgacggtggttatcaatagcgtcacctacggcgcaacggtactcgccgatggcagc

SEQ ID NO: 575499 - DNA, 75 bp, synthetic construct
  source 1..75: mol_type = other DNA
agatcccgcggtgaaaaccatcgccatcagcgcgatcactaccgatacgggcctgatcgctaacgattttgtcac

SEQ ID NO: 575500 - DNA, 75 bp, synthetic construct
  source 1..75: mol_type = other DNA
ccgcgctgcctggcgtcaccattaatccggtggcgagcgacgatattattaatgccgccgaatcgggcgtggcgc

SEQ ID NO: 575501 - DNA, 75 bp, synthetic construct
  source 1..75: mol_type = other DNA
accggcagcagcaatcacaccattaccgtcgatctcagcgctccggcgatgggcattaatatcgattccctgcaa

SEQ ID NO: 575502 - DNA, 75 bp, synthetic construct
  source 1..75: mol_type = other DNA
ggcacctggaactacacggtacgggtggtggatctggcggggaatgtcgggcagaccgcgacgcaaaacgtggtg

SEQ ID NO: 575503 - DNA, 75 bp, synthetic construct
  source 1..75: mol_type = other DNA
ctgtcacctttggcggtaaaaattacaccgccagcgtggcgggcgatggtagctggactgccaccgttcccgccg

SEQ ID NO: 575504 - DNA, 75 bp, synthetic construct
  source 1..75: mol_type = other DNA
agctggagcgtgggcgttacagcggcgcaggttagcgcctggcctgcggggacggtgacggttgccgtgtccggg

SEQ ID NO: 575505 - DNA, 75 bp, synthetic construct
  source 1..75: mol_type = other DNA
tgatttaacggttaatgcctcggtcaccaatcaaaacggcaacattggcagcggctcgcgtgatatcaccatcga

SEQ ID NO: 575506 - DNA, 75 bp, synthetic construct
  source 1..75: mol_type = other DNA
gaaagtagcgccgaaaatccggtgagcattacgcatccggttatggtcgatctcacgccggcggcgattaccatc

SEQ ID NO: 575507 - DNA, 75 bp, synthetic construct
  source 1..75: mol_type = other DNA
tccgccggcaacagcggcacagcctcgcacaccgtcagcgtggcgctcggcgcgccggtgctcggtatcaacacc

SEQ ID NO: 575508 - DNA, 75 bp, synthetic construct
  source 1..75: mol_type = other DNA
tgggggctgacggttccggcggcggatctcacggctttaccggacggcgcagcaaacgtacaagccagcgtcagc

SEQ ID NO: 575509 - DNA, 75 bp, synthetic construct
  source 1..75: mol_type = other DNA
acatcattaacgccgccgaaagcgggcaggatctgcccatcaccggcaccaccgacgctcagccagggcagacgg

SEQ ID NO: 575510 - DNA, 75 bp, synthetic construct
  source 1..75: mol_type = other DNA
ggcaacactggcagcggtacgcgggatatcaccattgatgccaacctgcctgggctgcgggtggataccgtcgcg

SEQ ID NO: 575511 - DNA, 75 bp, synthetic construct
  source 1..75: mol_type = other DNA
gaagcgggcgatgtggtgagcgttgtgctcaacggcaaaacctacaccaccacgctggatgcctccggtaactgg

SEQ ID NO: 575512 - DNA, 75 bp, synthetic construct
  source 1..75: mol_type = other DNA
atccggtgactgtcgatctctcggcggtggcggtcagcatcaacgccattaccgccgatgatgtgattaacgccg

SEQ ID NO: 575513 - DNA, 75 bp, synthetic construct
  source 1..75: mol_type = other DNA
cgatgttcaaattaccggcaccagcgatcagcctgttaataccgccatcaccgtaacgctgaacgggcaaaatta

SEQ ID NO: 575514 - DNA, 75 bp, synthetic construct
  source 1..75: mol_type = other DNA
acggtaggcacctgggaaggcaccgccgacaccgatcgcattgatatccgcgagctgttgcagggcagcggctac

SEQ ID NO: 575515 - DNA, 75 bp, synthetic construct
  source 1..75: mol_type = other DNA
gcgtcgatagcgccgcgccaacggtcaccatcaacaccattgccagcgataacatcatcaacgccagcgaagcgg

SEQ ID NO: 575516 - DNA, 75 bp, synthetic construct
  source 1..75: mol_type = other DNA
tccggcaactggagcgtcggcgttccggcggcggatgtcacggcgctgggtagcggcccgcaaaccatcactgcc

SEQ ID NO: 575517 - DNA, 75 bp, synthetic construct
  source 1..75: mol_type = other DNA
tggcgctataacgacagccgcacgctgactgatggcaattatctctatcaggtgcgggtgattgatgcggcgggc

SEQ ID NO: 575518 - DNA, 75 bp, synthetic construct
  source 1..75: mol_type = other DNA
ttgcgggcattagcgatgacaccgggttaagcagcagcgattttgttactcgcgacactacgcttactgtgcgcg

SEQ ID NO: 575519 - DNA, 75 bp, synthetic construct
  source 1..75: mol_type = other DNA
cacctccggcgtcgaagcggggcaaaccgtcaccgtgacctttggcggcaaaacctacagagccacggtggcggc

SEQ ID NO: 575520 - DNA, 75 bp, synthetic construct
  source 1..75: mol_type = other DNA
ggagccgccgttggcgacacggtaaccgtcacgcttggcggtaatacctacaccaccaccgtgcaggccggttta

SEQ ID NO: 575521 - DNA, 75 bp, synthetic construct
  source 1..75: mol_type = other DNA
cctcgacatttaccaatatcgaaggcatttccggctcgaattttaacgacactctgaccggcagcagcggcgata

SEQ ID NO: 575522 - DNA, 75 bp, synthetic construct
  source 1..75: mol_type = other DNA
agatccagcggtgaaaaccatcgccatcagcgcgatcaccaccgatacgggcttgatcactaacgattttgtcac

SEQ ID NO: 575523 - DNA, 75 bp, synthetic construct
  source 1..75: mol_type = other DNA
ggcgataacgtgctgaatgccgatgaaaaaggtcagccgttgaccattagcggtagcagtacggagctggcgaca

SEQ ID NO: 575524 - DNA, 75 bp, synthetic construct
  source 1..75: mol_type = other DNA
cgctacaaccgattcttccggcaactggagcgccacggtgccagcctcggcggtcagtgcattgggtgaggccaa

SEQ ID NO: 575525 - DNA, 75 bp, synthetic construct
  source 1..75: mol_type = other DNA
cttttggcggtaaaacctacactgcaagcgtcgccgccaacggtagctggagtgtgaacgttccagcggcagatc

SEQ ID NO: 575526 - DNA, 75 bp, synthetic construct
  source 1..75: mol_type = other DNA
cagctccggctttgcggcaggcacggcgctgacggtggtgattaataaccaaacttacgctgcaacggtgctggc

SEQ ID NO: 575527 - DNA, 75 bp, synthetic construct
  source 1..75: mol_type = other DNA
gacattatcaatgccgccgaagcaggcagcgcgcaaaccatcagcggtcaggtgaccggcgcggcggcgggcagc

SEQ ID NO: 575528 - DNA, 75 bp, synthetic construct
  source 1..75: mol_type = other DNA
gccgcggcgggagataccgttaccatcacgctgggcggcaacacctacaccgccacggtgcaggctaatttaagc

SEQ ID NO: 575529 - DNA, 75 bp, synthetic construct
  source 1..75: mol_type = other DNA
cagttccaaggggttccagtacctccacacccgcgacttcgttaccgcgcttcgccggcgtggcatccatttttc

SEQ ID NO: 575530 - DNA, 75 bp, synthetic construct
  source 1..75: mol_type = other DNA
gcactgaaagatcttgcgaaacggggaaggacgcccacagcatcacaaagaaggatggcagcaaggcgacgtaag

SEQ ID NO: 575531 - DNA, 75 bp, synthetic construct
  source 1..75: mol_type = other DNA
ggatatggcttatgatatctatccggatgatgaaacagatacccatcacccagtttctccttctctctatttgca

SEQ ID NO: 575532 - DNA, 75 bp, synthetic construct
  source 1..75: mol_type = other DNA
gcacgcgagcaaacgtatttcgtcgacaagacggctgatcatagagaaaaccggctgtggatgatggccaacatg

SEQ ID NO: 575533 - DNA, 75 bp, synthetic construct
  source 1..75: mol_type = other DNA
gcacgcgagcaaacgtatttcgtcgacaatacggccgatcatagagaaaaccgactgtggatgatggccaacatg

SEQ ID NO: 575534 - DNA, 75 bp, synthetic construct
  source 1..75: mol_type = other DNA
gcacgcgagcaaacgtatttcgtcgacaaaacggccgatcatagagaaaaccgtctgtggatgatggccaacatg

SEQ ID NO: 575535 - DNA, 75 bp, synthetic construct
  source 1..75: mol_type = other DNA
caggcagttcgattactgaaaatatgtctggcttttcaagagccagccctcaatttaagtttactcagattacgc

SEQ ID NO: 575536 - DNA, 75 bp, synthetic construct
  source 1..75: mol_type = other DNA
cttaagttcggaagaggagcgcttatttgaagaagttaaacccggtatcaggcttagaagttttaccgaatggct

SEQ ID NO: 575537 - DNA, 75 bp, synthetic construct
  source 1..75: mol_type = other DNA
gccggagttaatctcacttgctggcttaaagttccacggtatcgggcagcctacaattgtatatcccgacccacc

SEQ ID NO: 575538 - DNA, 75 bp, synthetic construct
  source 1..75: mol_type = other DNA
accctaagaaagttgaaaataaagatatgcgaactacaagatattatttttgctgaaaaaacctttaccgaaacg

SEQ ID NO: 575539 - DNA, 75 bp, synthetic construct
  source 1..75: mol_type = other DNA
taggaaaagaaaaaacaatagttctttttagaagaataattgaggaaaagaaaaacatattccaagaaataataa

SEQ ID NO: 575540 - DNA, 75 bp, synthetic construct
  source 1..75: mol_type = other DNA
ctcgcagagaaacttcagctctccactgccgtgaaggaaatgcgtttctatggcgtgtcgggagtgacagcaaat

SEQ ID NO: 575541 - DNA, 75 bp, synthetic construct
  source 1..75: mol_type = other DNA
atgcacatcgtggatttttctccgggcatgagccagctggccgaaaatgaaggagtgaagttctggctcaatgtg

SEQ ID NO: 575542 - DNA, 75 bp, synthetic construct
  source 1..75: mol_type = other DNA
ttcttaaagatgcccagggtaactttattaccgatggtgtcgttcagcttaatgaggaaaacgtacaagtcagga

SEQ ID NO: 575543 - DNA, 75 bp, synthetic construct
  source 1..75: mol_type = other DNA
cagtgcggtcaccgtcagcatcaacaacagcgccctgagccagaacgtgacatttatcgctgatgtcaggacggc

SEQ ID NO: 575544 - DNA, 75 bp, synthetic construct
  source 1..75: mol_type = other DNA
cagggtattcaggtcgatagtaatggtatggtgactttagaatatattctaaagaacgaaattactattacagga

SEQ ID NO: 575545 - DNA, 75 bp, synthetic construct
  source 1..75: mol_type = other DNA
cggcgcagatcgctgatctggtggtcacccgggataactcggtggcggacggttcgacggcgaatacgctgcggg

SEQ ID NO: 575546 - DNA, 75 bp, synthetic construct
  source 1..75: mol_type = other DNA
cagaccgccggaatcagtgcagtcaccgccagcatcaacaacagcagccagagccagaacgtgacgtttatcgcc

SEQ ID NO: 575547 - DNA, 75 bp, synthetic construct
  source 1..75: mol_type = other DNA
acggtgccacgactgcttcgacggtcaccacgcagccggacggcacggtggagatctcagtcaccagccagaccg

SEQ ID NO: 575548 - DNA, 75 bp, synthetic construct
  source 1..75: mol_type = other DNA
atgtcagatgcgttttacggggctgaagcggggctaccgtctgacagagctggtcctgatgcatgagccactggc

SEQ ID NO: 575549 - DNA, 75 bp, synthetic construct
  source 1..75: mol_type = other DNA
gttggtgcggtttgtcaccagacaaggtgacacccgaagctggatcgtcgttcatcggactgtgaagacatactt

SEQ ID NO: 575550 - DNA, 75 bp, synthetic construct
  source 1..75: mol_type = other DNA
atatcgtggaaagacgacattgttggcccttatatcactgatggttcatcatcggagtggctgagcacgagcacg

SEQ ID NO: 575551 - DNA, 75 bp, synthetic construct
  source 1..75: mol_type = other DNA
tgaatgacggtctggatttgctgacagatgatgcagtgtacttacaaaatgtggaaaagaaacattggtccagtt

SEQ ID NO: 575552 - DNA, 75 bp, synthetic construct
  source 1..75: mol_type = other DNA
gcagccagagccggaacgtgacgtttatcgccgatgtcagcacggcgcagatcgcgaatctggaggtgacgcagg

SEQ ID NO: 575553 - DNA, 75 bp, synthetic construct
  source 1..75: mol_type = other DNA
cttctggcgcatcgctcggcggctgtttttcatgacggcatccgcccgatcctgccgcaactgattgaaggctaa

SEQ ID NO: 575554 - DNA, 75 bp, synthetic construct
  source 1..75: mol_type = other DNA
gtattaaaatcccacctatggaatactttaagctcgacagggcagctagtattttacaatgtgatacagatgatt

SEQ ID NO: 575555 - DNA, 75 bp, synthetic construct
  source 1..75: mol_type = other DNA
aagcgatgttagggcagattgagcgtaatgagtccagcccgacggtcgcgacattatggaaaattgccaccgggt

SEQ ID NO: 575556 - DNA, 75 bp, synthetic construct
  source 1..75: mol_type = other DNA
aacggtgcctggagcgtgcaggtgccgaccgccgatgcacaggcgttaggcgaagggaatcaggcagtgctggtc

SEQ ID NO: 575557 - DNA, 75 bp, synthetic construct
  source 1..75: mol_type = other DNA
cagcacggcgcaaaccgggcagacgctcaccgtcacgcttaacggcactaactaccagaccacggtgcaggcaga

SEQ ID NO: 575558 - DNA, 75 bp, synthetic construct
  source 1..75: mol_type = other DNA
ccagcttccgctacccgccccggtccggcgtggtcatgcaaaggcaacccccggtcaggcagcggtgccacagag

SEQ ID NO: 575559 - DNA, 75 bp, synthetic construct
  source 1..75: mol_type = other DNA
atgcagcgcattggtcgttgcatggggtatctgcaggtagccgctgagattgaagcgctggccagtggtgcggac

SEQ ID NO: 575560 - DNA, 75 bp, synthetic construct
  source 1..75: mol_type = other DNA
ttcttcgtgattttaatactccaccctttaaaaaagtgccggcttactggcttcatccggggctgacttatctta

SEQ ID NO: 575561 - DNA, 75 bp, synthetic construct
  source 1..75: mol_type = other DNA
gcggcagacgtcgccgcactagccgatggcaccagctacacggtcagtgcctccgcccaggacagcgccggaaac

SEQ ID NO: 575562 - DNA, 75 bp, synthetic construct
  source 1..75: mol_type = other DNA
ggtgagcggcaccagtacgggcgcggcggcgggcgatgtggtcacggttaatctgaacggtaaaaactacaccac

SEQ ID NO: 575563 - DNA, 75 bp, synthetic construct
  source 1..75: mol_type = other DNA
cactgggcaatggcgatttgaccattaacgcttcggtcaccaacgccagtggcaacaccggcagcggcacgcggg

SEQ ID NO: 575564 - DNA, 75 bp, synthetic construct
  source 1..75: mol_type = other DNA
cgtaccttgacgggcgcacgctgaccgacggcaactacaactaccaggtgcgggttatcgacaccgccggaaata

SEQ ID NO: 575565 - DNA, 75 bp, synthetic construct
  source 1..75: mol_type = other DNA
agcgccagccgtggcgtcacgttgaacggcgacgtccccacggtcgccatcaacaccttcgcgggtgatgatgtg

SEQ ID NO: 575566 - DNA, 75 bp, synthetic construct
  source 1..75: mol_type = other DNA
catcgccacggtggcgggcgacgatattatcaacaacgccgagcagcttgcaggacaaaccatcagcggcaccac

SEQ ID NO: 575567 - DNA, 75 bp, synthetic construct
  source 1..75: mol_type = other DNA
aaccgacggatggggttgatgaaatattacgggatgatggattgtggtttttgcaaaaagcccagcgcggcgcaa

SEQ ID NO: 575568 - DNA, 75 bp, synthetic construct
  source 1..75: mol_type = other DNA
cggtcaagcggaacacatttatcctaacaatcgatattctttttatacagaatatgagtcggcgacaaactctga

SEQ ID NO: 575569 - DNA, 75 bp, synthetic construct
  source 1..75: mol_type = other DNA
acgaatggcaatcagagtaaagctgcatctctccttggattaaacagaatgacgattgccagaattataaagaag

SEQ ID NO: 575570 - DNA, 75 bp, synthetic construct
  source 1..75: mol_type = other DNA
cctctatgaggccattcatattgcctcgatggtggtcggtgcttttcaccgaatatggatttccttattgcctgc

SEQ ID NO: 575571 - DNA, 75 bp, synthetic construct
  source 1..75: mol_type = other DNA
tccgatctatttattgccagagataccattttaaaactcaaagacgcaatagacacaggcgagccgattaaaagc

SEQ ID NO: 575572 - DNA, 75 bp, synthetic construct
  source 1..75: mol_type = other DNA
gctgtatatgaggactcaaagcccggcacgctgaatgactggatttgcccctatatttccagacatctgttatca

SEQ ID NO: 575573 - DNA, 75 bp, synthetic construct
  source 1..75: mol_type = other DNA
tctgcgccgatcgtcgctcacttcacgctgccagccgtcgtcgcgcgaatcttcatagtctcacccacggtcagg

SEQ ID NO: 575574 - DNA, 75 bp, synthetic construct
  source 1..75: mol_type = other DNA
accgcaatcaggtctatagcagtagttttcgcgtagccaactatatcaagccacatttcgagattggtttagccc

SEQ ID NO: 575575 - DNA, 75 bp, synthetic construct
  source 1..75: mol_type = other DNA
taaagtgatcggccgcgagttccacgatccgttgcattcatcccccatcgtcagcgccccggcgaagctttcggt

SEQ ID NO: 575576 - DNA, 75 bp, synthetic construct
  source 1..75: mol_type = other DNA
atgacccgcggtgtgaccgatgacagcggtaccttgcagttacaacatatatcgccagaacgctcatacattctg

SEQ ID NO: 575577 - DNA, 75 bp, synthetic construct
  source 1..75: mol_type = other DNA
atctggctgaacgcctgaaagagccttctgtccgttttatctctgtcacacggcaactggagaacggtcgtttcc

SEQ ID NO: 575578 - DNA, 75 bp, synthetic construct
  source 1..75: mol_type = other DNA
tgacaggactcgtgggtattccaggtttgcctgataaagagtttgcactgagcactcctgaatttatgaagtcta

SEQ ID NO: 575579 - DNA, 75 bp, synthetic construct
  source 1..75: mol_type = other DNA
ccgcctgccagaaaatgccgtagccggaggttatgagttacgtcttgcttaccgcaatcaggtctatagcagcag

SEQ ID NO: 575580 - DNA, 75 bp, synthetic construct
  source 1..75: mol_type = other DNA
gttttgatcaatacaccatcctatacgccttttaagcaggctggagactatagctatcgtcgagtgatctgttct

SEQ ID NO: 575581 - DNA, 75 bp, synthetic construct
  source 1..75: mol_type = other DNA
tttaaaattcccgacgcaacttatctggcatggataaatattgagaaatacctgccaccgcaggtagacagacaa

SEQ ID NO: 575582 - DNA, 75 bp, synthetic construct
  source 1..75: mol_type = other DNA
agggtgtgtaacggaaaacaaaaaccttattactcggtaagcagtttgggggcaaggtggaatgcagcagtaaaa

SEQ ID NO: 575583 - DNA, 75 bp, synthetic construct
  source 1..75: mol_type = other DNA
acgggacaaaattcatgactacctgcccggcaccatcgacccgtggggagacctgggcgttaatcttccgaccac

SEQ ID NO: 575584 - DNA, 75 bp, synthetic construct
  source 1..75: mol_type = other DNA
agcattatgaaactcatgaaaaggttgcatatttatatagtcgcgaccatatttcctggggggagtttttgatca

SEQ ID NO: 575585 - DNA, 75 bp, synthetic construct
  source 1..75: mol_type = other DNA
tatgttcagagcctggggcaaagtcaggaaaacatacttagccacgggagaatttccccaggaaacatgttacgc

SEQ ID NO: 575586 - DNA, 75 bp, synthetic construct
  source 1..75: mol_type = other DNA
aagaatatctgttgtatatcgatttgatgcttttttaaatatccttggaaaaagcacaggaataactattgatag

SEQ ID NO: 575587 - DNA, 75 bp, synthetic construct
  source 1..75: mol_type = other DNA
tgattatatgagtggtcatttctcattgaaagggctctctattttagagcacttaaatggaaagagttttaaaga

SEQ ID NO: 575588 - DNA, 75 bp, synthetic construct
  source 1..75: mol_type = other DNA
ggtagccaccattattgcagaatctaacttgtgtttaaattggattccgaatatttatccatataacatgcagac

SEQ ID NO: 575589 - DNA, 75 bp, synthetic construct
  source 1..75: mol_type = other DNA
ggacttcgtcacggggaactggcagctctggcgtgggaggatgtggatctcgaaaagggaatagtgaatgtcaga

SEQ ID NO: 575590 - DNA, 75 bp, synthetic construct
  source 1..75: mol_type = other DNA
aatacgcttatttcgcgatatgcaaatgctacctgattctatgcaaagctttacacctttagtacaaggtgttgc

SEQ ID NO: 575591 - DNA, 75 bp, synthetic construct
  source 1..75: mol_type = other DNA
acttacgccagacaagcgttcgttccttgaacttaacatggcaagaatatcagagattaaagcaattcttgggag

SEQ ID NO: 575592 - DNA, 75 bp, synthetic construct
  source 1..75: mol_type = other DNA
gcagtgggtagaacagcaaaaaactgaaggcgtggataatgccggggaagtcatgcaaaaagttgccaatatact

SEQ ID NO: 575593 - DNA, 75 bp, synthetic construct
  source 1..75: mol_type = other DNA
ggtagcagccccggcaacaatgccgctccccataccgcttctcctggacctgtatccaccacttaatggccaaat

SEQ ID NO: 575594 - DNA, 75 bp, synthetic construct
  source 1..75: mol_type = other DNA
cgtaccgcccagagtgaaggcaaagcagcactagccgcagcgaaagcccaggcccaacgcctttcacttgctcaa

SEQ ID NO: 575595 - DNA, 75 bp, synthetic construct
  source 1..75: mol_type = other DNA
gccttgcagatcatttctcagcctcgtttgttgaaggcctggggcagtacgctgccaatactgaaactctacgtc

SEQ ID NO: 575596 - DNA, 75 bp, synthetic construct
  source 1..75: mol_type = other DNA
gatttcgttttacgaagaaagtgatcagagccttgaacgtgttctgaatatctttatccgcatgaatagcggcgg

SEQ ID NO: 575597 - DNA, 75 bp, synthetic construct
  source 1..75: mol_type = other DNA
tcattacctgaacaactaaaccagtttatggacttttaccgcgagcgtcaggaaacactgcttgcccgcattaga

SEQ ID NO: 575598 - DNA, 75 bp, synthetic construct
  source 1..75: mol_type = other DNA
aacgcttggttcaggccagaaacgacgcgggaatgagtgcaagcgccgtcgcagatgcgatcggtgttgttcgtc

SEQ ID NO: 575599 - DNA, 75 bp, synthetic construct
  source 1..75: mol_type = other DNA
atgaagaagatatttgtagcggctttatttgcttttgtttctgttaatgcaatggcagctgattgtgcaaaaggt

SEQ ID NO: 575600 - DNA, 75 bp, synthetic construct
  source 1..75: mol_type = other DNA
aaaccgccgaaaccattcgcttcggcaccggtattccgcaaatctttaacgatgaagtggtggtgccagcgttcc

SEQ ID NO: 575601 - DNA, 75 bp, synthetic construct
  source 1..75: mol_type = other DNA
tagatataaaattgaaagtggcatccagttttgtatgggcaggacatatgtcagctattgaaacagcggcaagaa

SEQ ID NO: 575602 - DNA, 75 bp, synthetic construct
  source 1..75: mol_type = other DNA
gctgctgacatcgcagccaccaaaaaggcgatggccctggaagagaagcgccagcgtgagaaagaagccagcctc

SEQ ID NO: 575603 - DNA, 75 bp, synthetic construct
  source 1..75: mol_type = other DNA
aaagacgtaaacataagcgtgtaccgatctccctggtcgccgtatgtgaaaacagatgcaccctgacagcattac

SEQ ID NO: 575604 - DNA, 75 bp, synthetic construct
  source 1..75: mol_type = other DNA
caaggtgttaaagacgctcaaagggaacttgaacttgcaaaggagtggaggcgtgtcggtctcttgtttcaagat

SEQ ID NO: 575605 - DNA, 75 bp, synthetic construct
  source 1..75: mol_type = other DNA
atgatagagttcctttttgttaccgagatatgggcgtcaattataaaccagtagttgaaagaaataataaaaaat

SEQ ID NO: 575606 - DNA, 75 bp, synthetic construct
  source 1..75: mol_type = other DNA
gtggaaacgattggacttgttcgtgcgctgaccgtgggcgtggcgtaccagacgacggtaggtggcattatgaac

SEQ ID NO: 575607 - DNA, 75 bp, synthetic construct
  source 1..75: mol_type = other DNA
aggcttcatacgacaacgcattgatttatttggggatagttacccttttactttatcagaagacaacgatactgt

SEQ ID NO: 575608 - DNA, 75 bp, synthetic construct
  source 1..75: mol_type = other DNA
ttgatgttataactctttgcgacaatacagtctataatattgactctgaaccgccccgggtttcctggagagtat

SEQ ID NO: 575609 - DNA, 75 bp, synthetic construct
  source 1..75: mol_type = other DNA
ccagtgtgctaccgacgccgtagtagcgctgcaaaaccggcagcatgaagggccgaacataattaaccgtgatta

SEQ ID NO: 575610 - DNA, 75 bp, synthetic construct
  source 1..75: mol_type = other DNA
ccactacgcttaaacatcttcgtcagcagcgaggctggagtctttcgcgactggcagacgccacgggcgtttcta

SEQ ID NO: 575611 - DNA, 75 bp, synthetic construct
  source 1..75: mol_type = other DNA
atggaaaatctcgctcgctttttatccaccacacttaaacaactacgccagcagtcgcggctggagtactttcga

SEQ ID NO: 575612 - DNA, 75 bp, synthetic construct
  source 1..75: mol_type = other DNA
atccgggacaatacgtattactactagtagaacatgcagcaaaaacgatattgttaccagcaatgcgcacattcc

SEQ ID NO: 575613 - DNA, 75 bp, synthetic construct
  source 1..75: mol_type = other DNA
aaatgaagtttattgcacgctatgttgctaccaatgcgaccgtaacggcgggtacggcgaacgcggattcacaat

SEQ ID NO: 575614 - DNA, 75 bp, synthetic construct
  source 1..75: mol_type = other DNA
caattacgctggcatctttaatgttagccggaaatgcacttgcagaagatggcgttgttcactttgtcggtgaaa

SEQ ID NO: 575615 - DNA, 75 bp, synthetic construct
  source 1..75: mol_type = other DNA
ttaattctcgttggcgtgatgtcaaagcggcagcacaggaaaaatatcctcatctgcaaatagacttcacatttc

SEQ ID NO: 575616 - DNA, 75 bp, synthetic construct
  source 1..75: mol_type = other DNA
gatacagatatttcgagtactatctgccaatcgaagataaagatcttgactttaagccggaaagaaaggagttgg

SEQ ID NO: 575617 - DNA, 75 bp, synthetic construct
  source 1..75: mol_type = other DNA
acggcagaacattaccgtaataaaattgctgtctacctgcgctggtatcagacgcggggcttcccggatgacatc

SEQ ID NO: 575618 - DNA, 75 bp, synthetic construct
  source 1..75: mol_type = other DNA
aggcatcgtgacgctgatggaatttacctggacgcacggctgtgtgattgagagcggtgagttccgtcacggccc

SEQ ID NO: 575619 - DNA, 75 bp, synthetic construct
  source 1..75: mol_type = other DNA
ccagggagaactgtctattgcctgcctgccggtcttttcgcaatctttttttaccgcagctcctgcaaccctttc

SEQ ID NO: 575620 - DNA, 75 bp, synthetic construct
  source 1..75: mol_type = other DNA
tcccggtctaattttgatgtcgcttttgacgatgatggtcatcaggttaaacccactgacggcccaactgacggg

SEQ ID NO: 575621 - DNA, 75 bp, synthetic construct
  source 1..75: mol_type = other DNA
ttgacgatgatggtcatcagattaaacccactgatggcccaactgacggggtatgttgcaggtataatcaagctg

SEQ ID NO: 575622 - DNA, 75 bp, synthetic construct
  source 1..75: mol_type = other DNA
cagcctgtccgcagacggggacggtgactggtgtcagatcatgcctgccggtcgggtaaaagcccgtgacggtcg

SEQ ID NO: 575623 - DNA, 75 bp, synthetic construct
  source 1..75: mol_type = other DNA
ttgcttatgccattctgaatgccatcagcctgtccgcagacggggacggtgactggtgtcagatcatgcctgccg

SEQ ID NO: 575624 - DNA, 75 bp, synthetic construct
  source 1..75: mol_type = other DNA
cgtaataaaccgattctggtgattaaaagcggacgtagcccggcggcacagcgactgctcaacacgacggcagga

SEQ ID NO: 575625 - DNA, 75 bp, synthetic construct
  source 1..75: mol_type = other DNA
gaatcccatacaagtgatagacccaatggggttagatgcgattgagaatatgacatcaggtggactaatttatgc

SEQ ID NO: 575626 - DNA, 75 bp, synthetic construct
  source 1..75: mol_type = other DNA
cggcaatacggcgtggagcgcggaatatgatgaatggggcaaccagcttaatgaggagaacccgcatcacctgca

SEQ ID NO: 575627 - DNA, 75 bp, synthetic construct
  source 1..75: mol_type = other DNA
gcggttgtggggcgtgtcatgcgccattgaaactgccggagacgcgccagccagctattaccactggcgaaattg

SEQ ID NO: 575628 - DNA, 75 bp, synthetic construct
  source 1..75: mol_type = other DNA
gatgttcacctcagagaattcggcagaacagagaaacaaaaatgtacctttgtttttcaacctgaagtgtcagcg

SEQ ID NO: 575629 - DNA, 75 bp, synthetic construct
  source 1..75: mol_type = other DNA
gcaagggcactcaccgttattactatgatcctgacggcaatattctgcgggaagaagcgccggacggcagcacca

SEQ ID NO: 575630 - DNA, 75 bp, synthetic construct
  source 1..75: mol_type = other DNA
tataaacagttccgctatatccgctttttggataaacgtgcgcgtcagcatcttaacagtaagttgttccgagtt

SEQ ID NO: 575631 - DNA, 75 bp, synthetic construct
  source 1..75: mol_type = other DNA
accgcaacgcacgatatcgtgatagatgccaacctgcctggtctgcgcgtcgataccgtggcaggcgatgatgtg

SEQ ID NO: 575632 - DNA, 75 bp, synthetic construct
  source 1..75: mol_type = other DNA
taaaacctacaccaccagcgtaggcgctaacggtggatggagcgtgcaggtgccgaccgccgatgcgcaggcgtt

SEQ ID NO: 575633 - DNA, 75 bp, synthetic construct
  source 1..75: mol_type = other DNA
ccgtcgaaaaaggcgaaacgctggtggtgagcggcagtaccagcggtgtagaagccgggcagacggtgaccgtca

SEQ ID NO: 575634 - DNA, 75 bp, synthetic construct
  source 1..75: mol_type = other DNA
cagacggtgaccgtcacgctcaatggcgcaaactatactggcacggtacaaacggacggcagctggagtatcagc

SEQ ID NO: 575635 - DNA, 75 bp, synthetic construct
  source 1..75: mol_type = other DNA
ggcaacagtgccaccactacccacgcttacagcgtcgatgccaccgcgccaacggtgaccattaacaccattgcg

SEQ ID NO: 575636 - DNA, 75 bp, synthetic construct
  source 1..75: mol_type = other DNA
acaccaccacggttgccgcggataatacctgggggctgacgatccctgccgccgatgttgcaaccttgccagacg

SEQ ID NO: 575637 - DNA, 75 bp, synthetic construct
  source 1..75: mol_type = other DNA
cgagtggtggatctggcggggaatatcacctcctccagtgattttgtcctgacggtcgatacctctattccgacc

SEQ ID NO: 575638 - DNA, 75 bp, synthetic construct
  source 1..75: mol_type = other DNA
caccagcgaccagcctgcgggcacgcagattaccgttacgctcaacgggcaaaattacaccaccacagccgatgc

SEQ ID NO: 575639 - DNA, 75 bp, synthetic construct
  source 1..75: mol_type = other DNA
gatgacatcatcaacgccacggagaaaggcgcggatctggcgatttccggcaccagcgaccagcctgcgggcacg

SEQ ID NO: 575640 - DNA, 75 bp, synthetic construct
  source 1..75: mol_type = other DNA
ccagtacaccgtcagcgcctcggtaaacgataaagcgggtaacccggtgtccgccactcacgggctggcggtgga

SEQ ID NO: 575641 - DNA, 75 bp, synthetic construct
  source 1..75: mol_type = other DNA
tggaagggcgcggcggcaacgacacgctcaacatcggcaacggcggtcacgacaccttgctctataaactgctca

SEQ ID NO: 575642 - DNA, 75 bp, synthetic construct
  source 1..75: mol_type = other DNA
cggctcgaattttaacgacactctgaccggcagcagcggcgataaccaactggaagggcgcggcggcaacgacac

SEQ ID NO: 575643 - DNA, 75 bp, synthetic construct
  source 1..75: mol_type = other DNA
gcgaatttattggtcgacagcggcctgcctggcgtcaccatcgacaccgtggcgggcgacgatattatcaacgcc

SEQ ID NO: 575644 - DNA, 75 bp, synthetic construct
  source 1..75: mol_type = other DNA
gctggtgatctccggttccagcactggcggcgaagcgggtgatgtcatcaccgtcacactaaacagtaaaaccta

SEQ ID NO: 575645 - DNA, 75 bp, synthetic construct
  source 1..75: mol_type = other DNA
tgacggtagtcattaacacggtcacttacgctgcaacagtattagccgatggcacatggagcgttggcgtgccgg

SEQ ID NO: 575646 - DNA, 75 bp, synthetic construct
  source 1..75: mol_type = other DNA
gcagcggttcgcgagatattactatcgacgccaatttgcctggcctgcgcgtcgataccgtggcgggcgatgatg

SEQ ID NO: 575647 - DNA, 75 bp, synthetic construct
  source 1..75: mol_type = other DNA
ccacggaacacggacaggcgcagattatcagcggctcggcaacgggcgcgactaccggtaatacggtttccgtga

SEQ ID NO: 575648 - DNA, 75 bp, synthetic construct
  source 1..75: mol_type = other DNA
gcggcgttaacgctctccggcagcacctctggcgtcgaagccgggcaaacggttaccgtcacctttggcggcaaa

SEQ ID NO: 575649 - DNA, 75 bp, synthetic construct
  source 1..75: mol_type = other DNA
aattacaccaccactgccgatgcttccggtaactggagcgtgaccgttccggcgtcacgggtgagcgccctcggt

SEQ ID NO: 575650 - DNA, 75 bp, synthetic construct
  source 1..75: mol_type = other DNA
cagcctggccgtcgactgggatcatgacgggttaatggacatcgcccgtatcgcccagaccgggcagtcgtatct

SEQ ID NO: 575651 - DNA, 75 bp, synthetic construct
  source 1..75: mol_type = other DNA
gcgggcgatacggtgaccgtgacgctcggtggggcgacttacaccgctacggtacaggcagacttaagctggagt

SEQ ID NO: 575652 - DNA, 75 bp, synthetic construct
  source 1..75: mol_type = other DNA
agccgttaacccttaacggctcgaccagcgcggaagtggggcagacggtcactgtcacctttggcggcaaaacct

SEQ ID NO: 575653 - DNA, 75 bp, synthetic construct
  source 1..75: mol_type = other DNA
caacaccggcagcggctcgcgcgatatcacgatcgacgccaatctgcctggcctgcgggtcgataccgtggcggg

SEQ ID NO: 575654 - DNA, 75 bp, synthetic construct
  source 1..75: mol_type = other DNA
ttatcaacgctgccgaatcgggcgtggcgcagaccatcagcggccaggtcacgggcgcggcggcgggcgatacgg

SEQ ID NO: 575655 - DNA, 75 bp, synthetic construct
  source 1..75: mol_type = other DNA
ggcgatgatatcgtcaacagcatcgaacatgggcaggcgctgataatcactggcggcagtagcggcctgaatgca

SEQ ID NO: 575656 - DNA, 75 bp, synthetic construct
  source 1..75: mol_type = other DNA
accatcgccagcgacgatattcttaacgccgccgaagcgggatcggcgctgaccatcagcggcaccagcacggcg

SEQ ID NO: 575657 - DNA, 75 bp, synthetic construct
  source 1..75: mol_type = other DNA
acacctttgcgggcgatgatgtggtgaatgcagcggaacacggctcgtctttggtgatcagcggcaccaccaccg

SEQ ID NO: 575658 - DNA, 75 bp, synthetic construct
  source 1..75: mol_type = other DNA
tggaagatcgttgtccgctggaagcattaattattcggcgattattaattcagtcggcgaattttgccgggcaga

SEQ ID NO: 575659 - DNA, 75 bp, synthetic construct
  source 1..75: mol_type = other DNA
ccgcgtaaaccgtcagttcgtggcagtacgtcctgaccagctgtgggaggctgattttacttacgtcagcacatg

SEQ ID NO: 575660 - DNA, 75 bp, synthetic construct
  source 1..75: mol_type = other DNA
cggtgactgtcgatctcactgcggtggcggtcagcatcaacgccattactgccgatgacgtgattaacgctgccg

SEQ ID NO: 575661 - DNA, 75 bp, synthetic construct
  source 1..75: mol_type = other DNA
acgtgcaggttaatactgcgctgcctggcgtaaccattaacgttgtggcaacggacgatattattaacgctgccg

SEQ ID NO: 575662 - DNA, 75 bp, synthetic construct
  source 1..75: mol_type = other DNA
ccgccgaagcgggatcggcgctgaccatcagcggcaccagcacggcagaagccgggcagacggtgaccgtgacgc

SEQ ID NO: 575663 - DNA, 75 bp, synthetic construct
  source 1..75: mol_type = other DNA
tcagctaccgggcctgacggactggaaatgcgccggaaatatgatgagtacgggcgtctcacgcaggaaaccgcc

SEQ ID NO: 575664 - DNA, 75 bp, synthetic construct
  source 1..75: mol_type = other DNA
tatgaccgcagcggtacgcagatgcgccactttacttacgatgataaataccggggccggatggtggcgcaccgt

SEQ ID NO: 575665 - DNA, 75 bp, synthetic construct
  source 1..75: mol_type = other DNA
tttgtaatgtcagagaaatgaaaattaaaaccgctaaacctaccttgaatgaagctgttatcaaggaatggtttt

SEQ ID NO: 575666 - DNA, 75 bp, synthetic construct
  source 1..75: mol_type = other DNA
gcgtaaagtctggcgtcagttgttacgggaaggaatcaggggggccagatgtacagtggcgcgcctcatggcggt

SEQ ID NO: 575667 - DNA, 75 bp, synthetic construct
  source 1..75: mol_type = other DNA
gcttatcaccctctggcactacgatgcatcggaccgtatcacacaccgcacggcgaaccggcagagcagtggcgg

SEQ ID NO: 575668 - DNA, 75 bp, synthetic construct
  source 1..75: mol_type = other DNA
aggcatcagcacgtacaatacctataatccgcgcggccagctggtcagttggaaggacacgcagggccgtgaaac

SEQ ID NO: 575669 - DNA, 75 bp, synthetic construct
  source 1..75: mol_type = other DNA
tgggcaatggcgatttgaccattaccgcctcggtcaccaacgcgaatggcaacaccggcagcggcacgcgggata

SEQ ID NO: 575670 - DNA, 75 bp, synthetic construct
  source 1..75: mol_type = other DNA
tggagcgccacggtgccagcctcggcggttagcgcgctgggggaagccaactacacggtaaccgcgaacgtcacc

SEQ ID NO: 575671 - DNA, 75 bp, synthetic construct
  source 1..75: mol_type = other DNA
aatgtagaagccgggcaaacggtcaccgtcacctttggcgggaaaaattacactgccagcgtggcgagcgatggt

SEQ ID NO: 575672 - DNA, 75 bp, synthetic construct
  source 1..75: mol_type = other DNA
taaacggcaaaacctacaccaccacggtacagaccggcggtagctggagctacaccctcggcagcgccgatgtca

SEQ ID NO: 575673 - DNA, 75 bp, synthetic construct
  source 1..75: mol_type = other DNA
cgctgaacggtaaaaactacaccaccacgctggacgcctccggtaactggagcgtgggcattccggcggcggatg

SEQ ID NO: 575674 - DNA, 75 bp, synthetic construct
  source 1..75: mol_type = other DNA
agcgacgacgtaattaacgccgccgagaaaggcactggtctgaccctttccggcagcaccagcggaattgaaagc

SEQ ID NO: 575675 - DNA, 75 bp, synthetic construct
  source 1..75: mol_type = other DNA
gcaggcaacagcgatgatgccagccgcacggtcaccgtgaatctgaccgcgccaaccattggcatcaacactatc

SEQ ID NO: 575676 - DNA, 75 bp, synthetic construct
  source 1..75: mol_type = other DNA
accttaaacggcaaaacctacaccaccacggtacagaccggcggtagctggagctacaccctcggcagcgccgat

SEQ ID NO: 575677 - DNA, 75 bp, synthetic construct
  source 1..75: mol_type = other DNA
cggtagacaccaccgcgccggttctcaccattaacactgtggtgggcgatgacattatcaacgatgccgaacatg

SEQ ID NO: 575678 - DNA, 75 bp, synthetic construct
  source 1..75: mol_type = other DNA
gttgcggggaatacggtgattgtcactattggcggcaatcaatacaccgccaccgtgcagccagatttaagctgg

SEQ ID NO: 575679 - DNA, 75 bp, synthetic construct
  source 1..75: mol_type = other DNA
accgtggcgggtgatgacgttattaacagccttgaacacaatcaggcgctggtgatcaccggcagtagcagtgga

SEQ ID NO: 575680 - DNA, 75 bp, synthetic construct
  source 1..75: mol_type = other DNA
ggcgctggtgatctccggcaccagcacgggcggggaagcgggcgatgtggtgagcgttgtgctcaacggcaaaac

SEQ ID NO: 575681 - DNA, 75 bp, synthetic construct
  source 1..75: mol_type = other DNA
accgatgatgtcgggcagcggcaggggacattaagcagttcgcaggccaccgacgacactacgccgttgctgaac

SEQ ID NO: 575682 - DNA, 75 bp, synthetic construct
  source 1..75: mol_type = other DNA
gtgttggcggataacggcgcaacggtcactccgactgtcatcacagggcaggacgggacggtggagatcagtatc

SEQ ID NO: 575683 - DNA, 75 bp, synthetic construct
  source 1..75: mol_type = other DNA
gagatcccggtgctgaccattaccgatttaggcatggtgcgtaatgtgacacagatgggagaaggatgggtgatc

SEQ ID NO: 575684 - DNA, 75 bp, synthetic construct
  source 1..75: mol_type = other DNA
tactttgtgaagcacgaagccgccagtctgctcggctccacgccaatgatgtctaacagttcattcaagccgacg

SEQ ID NO: 575685 - DNA, 75 bp, synthetic construct
  source 1..75: mol_type = other DNA
tacattaagggctgcatattttacgggaatcaaaatcagcaaactctgtgtttggactaataagtcacctaattc

SEQ ID NO: 575686 - DNA, 75 bp, synthetic construct
  source 1..75: mol_type = other DNA
taattcactaaaagcaattattaaaagaattcgacttataaagtccggatggtataggaatgaaataataaagat

SEQ ID NO: 575687 - DNA, 75 bp, synthetic construct
  source 1..75: mol_type = other DNA
gacatggtacggctgggacggcgacaggctgacgacggtacagaccgacaccacgcgtatccagacggtatacca

SEQ ID NO: 575688 - DNA, 75 bp, synthetic construct
  source 1..75: mol_type = other DNA
ctgcattttcatataaaataaatagaaggtttcagtttttgtctgttcaatttgttgattcaggaggcactgaga

SEQ ID NO: 575689 - DNA, 75 bp, synthetic construct
  source 1..75: mol_type = other DNA
ccagaaacaacccatccctttgaacgaaataaaattcgttgggcgaatgaatatatatcaaactatcatgttaaa

SEQ ID NO: 575690 - DNA, 75 bp, synthetic construct
  source 1..75: mol_type = other DNA
ggttcatgttaaaagccataaagaaaaactcagcttcgcagcacaattgggtgagaaaattaatggttcgacccc

SEQ ID NO: 575691 - DNA, 75 bp, synthetic construct
  source 1..75: mol_type = other DNA
ggtggaaaacatgccagtatggctgcaaaacctgacgtggattaaccctattcgccactttacggacattaccaa

SEQ ID NO: 575692 - DNA, 75 bp, synthetic construct
  source 1..75: mol_type = other DNA
caactgggtgaactggcgctctttctctgttcggatgcggcagcacaagtgcgcggtgtagcgtggaatatggat

SEQ ID NO: 575693 - DNA, 75 bp, synthetic construct
  source 1..75: mol_type = other DNA
tgccgggcctaaaggcgctgcgcaacgtctggggctgaaacgcacgaccctgctgtcacggatgaagcggctggg

SEQ ID NO: 575694 - DNA, 75 bp, synthetic construct
  source 1..75: mol_type = other DNA
cgtcagccatgccatcaaattaccgcctcaatggcaaaagctattgcgcttaaacttggtgccgaactgaataac

SEQ ID NO: 575695 - DNA, 75 bp, synthetic construct
  source 1..75: mol_type = other DNA
tggccgcttataatggcaataaatggattgttgaacaaattgagtcaattttaaaccaagaagatgtggacgttt

SEQ ID NO: 575696 - DNA, 75 bp, synthetic construct
  source 1..75: mol_type = other DNA
gatttatttctgtccttatccctgtgatgatgattgctgtcgtgatttataaagaaatgagctatgtctcaacag

SEQ ID NO: 575697 - DNA, 75 bp, synthetic construct
  source 1..75: mol_type = other DNA
ccctcgggggaaaatacttcgaagctaagaaagtcaggggcatctgtccttggatttcttgtcggagccgggtta

SEQ ID NO: 575698 - DNA, 75 bp, synthetic construct
  source 1..75: mol_type = other DNA
atgggaccgcagtggcgttcgcgtctcgatcgtgaagccagcctgctgggtcacagtggttgtcgtattggcggt

SEQ ID NO: 575699 - DNA, 75 bp, synthetic construct
  source 1..75: mol_type = other DNA
tgcatgggggctggtgcaggtgatggtgtcagaaacaaaagtggcttccatcgccgggattcaaaactttggcag

SEQ ID NO: 575700 - DNA, 75 bp, synthetic construct
  source 1..75: mol_type = other DNA
ccacacactcgtttaatctggcgttggttatcgcggcctgtgtgacgttcaccggggcgctgtgttacttcttta

SEQ ID NO: 575701 - DNA, 75 bp, synthetic construct
  source 1..75: mol_type = other DNA
acgctatggacgcagtatcaagccactagcgatctatccgtcggcggcggtgtgcgctatgtcgggggcctgcgc

SEQ ID NO: 575702 - DNA, 75 bp, synthetic construct
  source 1..75: mol_type = other DNA
gcgtgaaagtactggcgtccgacagctccatgaaaattcaggttggtgcgaacgacggcgaaaccatcaccatcg

SEQ ID NO: 575703 - DNA, 75 bp, synthetic construct
  source 1..75: mol_type = other DNA
ttttattgggtagtttattaccaaatgtttctcattcatatttattgtcatggtatggtatactaagaggggagt

SEQ ID NO: 575704 - DNA, 75 bp, synthetic construct
  source 1..75: mol_type = other DNA
tgctgatcaagatgatatttggttagaagataagctacaacgagcttctttatttcttgaaaaatatgatgtcta

SEQ ID NO: 575705 - DNA, 75 bp, synthetic construct
  source 1..75: mol_type = other DNA
agaatgaacttgatgatattagcagaaaaatgagagatgctattataaatttaaaagaaattgagagtgaaattg

SEQ ID NO: 575706 - DNA, 75 bp, synthetic construct
  source 1..75: mol_type = other DNA
ggcggtacagaaccgtttcgattctaccatcaccaacctgggcaacactgttaacaacctgacttctgcccgtag

SEQ ID NO: 575707 - DNA, 75 bp, synthetic construct
  source 1..75: mol_type = other DNA
aacggtaaaggcgaagtggataacaaagtggctactgccgacagcctgaccctggctggctttactaaggggggg

SEQ ID NO: 575708 - DNA, 75 bp, synthetic construct
  source 1..75: mol_type = other DNA
tcctccttagatgttctcatgttagaatatgatcagcagtctattatatttgaatcactcaaatcagatagtttg

SEQ ID NO: 575709 - DNA, 75 bp, synthetic construct
  source 1..75: mol_type = other DNA
tgatgatcctctttatgcgacattcagacaggggagacatcgataaacatcatctgcgggcaaatagttacatag

SEQ ID NO: 575710 - DNA, 75 bp, synthetic construct
  source 1..75: mol_type = other DNA
atgcgacataattacctgatcatgacagccatgcttctgccggatccatatgtggtccggcgttttgttctgcgg

SEQ ID NO: 575711 - DNA, 75 bp, synthetic construct
  source 1..75: mol_type = other DNA
ctggaaggtatggctgaactgaccgccaccatgcagatcgccatgaaaaacggggccagcgccagtgcggcggcg

SEQ ID NO: 575712 - DNA, 75 bp, synthetic construct
  source 1..75: mol_type = other DNA
cgtgaagtgctccggcacagtaaccggggttttgcctgtgaacagggctggaatgcagccggtcagcttaccagc

SEQ ID NO: 575713 - DNA, 75 bp, synthetic construct
  source 1..75: mol_type = other DNA
aaaatagattatgttggaataagtagaaatgtgcttaatcgttatccgcaaggtaaatatgatttggagttactc

SEQ ID NO: 575714 - DNA, 75 bp, synthetic construct
  source 1..75: mol_type = other DNA
gaccggaacggccaggtcacggcggtgacagcctcaggcaccgggctgggctatggcgaaggcgacgagtcctat

SEQ ID NO: 575715 - DNA, 75 bp, synthetic construct
  source 1..75: mol_type = other DNA
tgttttattaaattctcgattgtttttgttattgtccgaaacgcgctgggacttcagcaagtgccatcaaatatg

SEQ ID NO: 575716 - DNA, 75 bp, synthetic construct
  source 1..75: mol_type = other DNA
agtcgtgtgcgggctgtgccgtgcctccatcttagccgggctggcgttgatgcaagcaactgtcttaatgggagg

SEQ ID NO: 575717 - DNA, 75 bp, synthetic construct
  source 1..75: mol_type = other DNA
gtgagcagtgggaatactgccacgacgccagtggcagacggacagagaaacgctgcaaacaaaaagccctccgca

SEQ ID NO: 575718 - DNA, 75 bp, synthetic construct
  source 1..75: mol_type = other DNA
atattggctttctaaacttaatgtcatcacccatgctgttagaattcgtttatgggatgtttctgtatataatac

SEQ ID NO: 575719 - DNA, 75 bp, synthetic construct
  source 1..75: mol_type = other DNA
accggagttggttaacttttttgaaaagattcagaaggtgaatagctctgaagacaatgaagagatattcgatga

SEQ ID NO: 575720 - DNA, 75 bp, synthetic construct
  source 1..75: mol_type = other DNA
gattcagaaggtgaatagttctgaagacaatgaagagataatcgatgatgataatatttcaattttctcgttact

SEQ ID NO: 575721 - DNA, 75 bp, synthetic construct
  source 1..75: mol_type = other DNA
ttgccccctgttgttgcagcaagctcccgtccggtcgtggaggccgcacgtgcgccagttgcgcccgtttccgca

SEQ ID NO: 575722 - DNA, 75 bp, synthetic construct
  source 1..75: mol_type = other DNA
tgaattagatattcaacagttgtctcaaggtgagaaaactatatttactttagttggtgatttggctcgacgttt

SEQ ID NO: 575723 - DNA, 75 bp, synthetic construct
  source 1..75: mol_type = other DNA
accattaatggggtttcatttgacggttctgcgaatatttcactgtcaccagcaaatattggttgcccggcatct

SEQ ID NO: 575724 - DNA, 75 bp, synthetic construct
  source 1..75: mol_type = other DNA
atcctacggcttacgggaacattcttcacctgaagggagccacatcaagaggtgaaggcgagttactcattggct

SEQ ID NO: 575725 - DNA, 75 bp, synthetic construct
  source 1..75: mol_type = other DNA
tgtaatctatgctcatatacctccaagtacttcaaaagaggaaaataaaccggataagtgtagtgtcgcaactag

SEQ ID NO: 575726 - DNA, 75 bp, synthetic construct
  source 1..75: mol_type = other DNA
tcaagagtgtgatgatcttatatctgttttggagttcaaaaataagataaatcagcacttttctggaagtaagga

SEQ ID NO: 575727 - DNA, 75 bp, synthetic construct
  source 1..75: mol_type = other DNA
tgacagaaatgattttaccgatttttttcaatggcttgtatttcttcataacagagcttcacaagagaaattgag

SEQ ID NO: 575728 - DNA, 75 bp, synthetic construct
  source 1..75: mol_type = other DNA
tgctgccgggcgttttttgcagcctgcgatcgggttcgggaaagagatgtcccgtgttcaggcactgacgcgaat

SEQ ID NO: 575729 - DNA, 75 bp, synthetic construct
  source 1..75: mol_type = other DNA
aaatcactcggcagtgcatgggaaggtctgcgtattcgcatcagtgatctggttgacggtccgctgcgttctgtc

SEQ ID NO: 575730 - DNA, 75 bp, synthetic construct
  source 1..75: mol_type = other DNA
gtttttctctcctgaccggatcaatgaatgtcgtcagggtgctgccagcactatggggaatggtaacaggttcca

SEQ ID NO: 575731 - DNA, 75 bp, synthetic construct
  source 1..75: mol_type = other DNA
ccagaagcaagtactacttcatggagagaagttcttaatcaaaatggtgtttctggcttcagcgtagatcaaggt

SEQ ID NO: 575732 - DNA, 75 bp, synthetic construct
  source 1..75: mol_type = other DNA
ttaactggtttaaatcgctgttgtcaccgatggagtccagcaaggaaacgctggataaatgtaccagtgctggcg

SEQ ID NO: 575733 - DNA, 75 bp, synthetic construct
  source 1..75: mol_type = other DNA
ccttcagtgctgttgacaggctgacccggccagccgaaaacgcccgccgcctgatggggcggcttggtgactcca

SEQ ID NO: 575734 - DNA, 75 bp, synthetic construct
  source 1..75: mol_type = other DNA
tggcaagatcgcgagaaggtgaactggcttttacgccattacgtatgcatgggtttatcagaacactggcgggtc

SEQ ID NO: 575735 - DNA, 75 bp, synthetic construct
  source 1..75: mol_type = other DNA
gaacatcgagccggatgcgctgacaacgggcgataaaaatgaatttgtgattaatcaaggcgaggggacaggtgg

SEQ ID NO: 575736 - DNA, 75 bp, synthetic construct
  source 1..75: mol_type = other DNA
actaaagtcccacaaacctattatggcgttgatcagttagaggactgtgtagagaaaaccacgcatgggtttgtg

SEQ ID NO: 575737 - DNA, 75 bp, synthetic construct
  source 1..75: mol_type = other DNA
agggggattcaccatgcctgttccttttaacaaacgccccgcaaaacagacaactgtcaaccgtctgaattgtga

SEQ ID NO: 575738 - DNA, 75 bp, synthetic construct
  source 1..75: mol_type = other DNA
catgatgaggaatcagggctgtactataaccggaaccggtactatgacccgctacaggggaggtatattacacaa

SEQ ID NO: 575739 - DNA, 75 bp, synthetic construct
  source 1..75: mol_type = other DNA
aagtactaagcacaaaattaattttgaatcgctgccatcagcaaaagttgtcgatgctattctttcatcagcagt

SEQ ID NO: 575740 - DNA, 75 bp, synthetic construct
  source 1..75: mol_type = other DNA
attttgtgaaagaagaacttagatactacatatcttttgaatccagctttgaagactactatattccgctgatta

SEQ ID NO: 575741 - DNA, 75 bp, synthetic construct
  source 1..75: mol_type = other DNA
tgtcagatgaagaaaaagaaaaaatgctgcaaataacttacttttcatatgcaagaactattgcaacttatgtgg

SEQ ID NO: 575742 - DNA, 75 bp, synthetic construct
  source 1..75: mol_type = other DNA
caacttaacctggacttatgtacaacattgcaactattcctactttaagctgaatgtaactttacctatatcatt

SEQ ID NO: 575743 - DNA, 75 bp, synthetic construct
  source 1..75: mol_type = other DNA
gcgtagcaggcgccttgagcgtgatacctcagattctcatttctttggtattgaagatgccttcatttgtctatg

SEQ ID NO: 575744 - DNA, 75 bp, synthetic construct
  source 1..75: mol_type = other DNA
attaatttaataaacaaaagcgccctgtcagatgaagaaaaagaaaaaatgttgcaaataacttacttttcatat

SEQ ID NO: 575745 - DNA, 75 bp, synthetic construct
  source 1..75: mol_type = other DNA
tatatcctgaaaaaactgcgcaaaactgaaaaagttccagaaaacatatgtcgtatatttagggaagatttaaaa

SEQ ID NO: 575746 - DNA, 75 bp, synthetic construct
  source 1..75: mol_type = other DNA
atcttcttttatgaggagcacgcgcaaaaaagtaccgaccagagcctggtcctgtgcgataccgtgcgttatctg

SEQ ID NO: 575747 - DNA, 75 bp, synthetic construct
  source 1..75: mol_type = other DNA
cggcgaagatcgcggatctggtggtcattaaggatggttcagaggcggacggttcgacggcgaacacgctgcggg

SEQ ID NO: 575748 - DNA, 75 bp, synthetic construct
  source 1..75: mol_type = other DNA
agattaaaggttggcgtatatacggacaaccatcctataccatccttccttttgtggaagtcgagttgctgagtg

SEQ ID NO: 575749 - DNA, 75 bp, synthetic construct
  source 1..75: mol_type = other DNA
caacagcgcaacggttgctccgacgatgaccacaaagccggatggcacggtggagatcagtgtcaccagccagac

SEQ ID NO: 575750 - DNA, 75 bp, synthetic construct
  source 1..75: mol_type = other DNA
cacagggccggacggtacggtggagatcagtgtcaccagccagacggcggggatcagtattgtcactgcatccat

SEQ ID NO: 575751 - DNA, 75 bp, synthetic construct
  source 1..75: mol_type = other DNA
ggccaagcggtggggtagtaccgcgaaaagtaggtacgttgtggggcgaatatggtaatttaaaaacttatggga

SEQ ID NO: 575752 - DNA, 75 bp, synthetic construct
  source 1..75: mol_type = other DNA
ggctatattcaagatacatacgtgaacaactgcacttttttgctcagcggttctcaagataaacctgcagtgcac

SEQ ID NO: 575753 - DNA, 75 bp, synthetic construct
  source 1..75: mol_type = other DNA
atgccgcctgggtacgtgctacaggaaataccggcacacagttcgtgaagcaggctgcgacgttctttggccccg

SEQ ID NO: 575754 - DNA, 75 bp, synthetic construct
  source 1..75: mol_type = other DNA
attcaggcacttaaaattattgagccgatggtgagttccttaagcccggatcatgctgaagcgatgcaaatactt

SEQ ID NO: 575755 - DNA, 75 bp, synthetic construct
  source 1..75: mol_type = other DNA
aacaaaatattattatcgataaagtttatcgatttctgtacgccataattatgccaactgctttccttttcttgt

SEQ ID NO: 575756 - DNA, 75 bp, synthetic construct
  source 1..75: mol_type = other DNA
cgtcatcagcttaccgcaaaaattcttcaatggggtgacggtcaggactcaccaatacttcaaaaaatgattgat

SEQ ID NO: 575757 - DNA, 75 bp, synthetic construct
  source 1..75: mol_type = other DNA
gcccattacccggacagcctccggcacagtagtgttcgtgctcaccgtttgtcactgatcgctggtacgaaaacg

SEQ ID NO: 575758 - DNA, 75 bp, synthetic construct
  source 1..75: mol_type = other DNA
ttcgcggaggagggaaagccttcaccgcggacacgggaaaccactcgccgcggagaagggaaaaccaatttcgat

SEQ ID NO: 575759 - DNA, 75 bp, synthetic construct
  source 1..75: mol_type = other DNA
gagagcaaaaccacgggataaaaatgccaatcagtggtttcaggaactttatgcgcaaaaaaaatgggatatcgt

SEQ ID NO: 575760 - DNA, 75 bp, synthetic construct
  source 1..75: mol_type = other DNA
acgcggtcatggaacgtacggcagatgccgttgtggtgccgatggatgcgggctggagcgatgtcggttcctggt

SEQ ID NO: 575761 - DNA, 75 bp, synthetic construct
  source 1..75: mol_type = other DNA
gcctgcccggaagagtcggtggattacgcggtcatggaacgtacggcagatgccgttgtggtgccgatggatgcg

SEQ ID NO: 575762 - DNA, 75 bp, synthetic construct
  source 1..75: mol_type = other DNA
attccgctcgacttaattgaggtgcgctctggctcctatctggaagaggacgacatcatccgcttccaggatcgc

SEQ ID NO: 575763 - DNA, 75 bp, synthetic construct
  source 1..75: mol_type = other DNA
tatcgcattggttaaagatgctaaaaaatttggtatcgatatcattcctgattatacctttaactttatgggaat

SEQ ID NO: 575764 - DNA, 75 bp, synthetic construct
  source 1..75: mol_type = other DNA
atgttttctataaaaccaggaccaagaaaattacctatcgacaacccctcattgttatcatggaacattactgac

SEQ ID NO: 575765 - DNA, 75 bp, synthetic construct
  source 1..75: mol_type = other DNA
cgataaaagccttttcatttggtggcgatctccaaacccttgcatcaaaaccgggttccacaatctcaagcatcc

SEQ ID NO: 575766 - DNA, 75 bp, synthetic construct
  source 1..75: mol_type = other DNA
acaccgcaggaaactgctggaaagcatcccgggtatcggagagaaaacatctgcggtattgctggcttatatcgg

SEQ ID NO: 575767 - DNA, 75 bp, synthetic construct
  source 1..75: mol_type = other DNA
gcgcggcggcgtggcgaaactggatgaaggtcccggctggccgcactctggcaggcgctgccggaagaactccgc

SEQ ID NO: 575768 - DNA, 75 bp, synthetic construct
  source 1..75: mol_type = other DNA
ggagaaacgtggtctgaagttcgtgcggtacgcagacgactgtaatgtctacgtgaaaagcgaacgggcagacaa

SEQ ID NO: 575769 - DNA, 75 bp, synthetic construct
  source 1..75: mol_type = other DNA
gcctttgctgtaaaaacatttatagaaaagcctaatcttgaaactgcgatcgattacgtctcaagtggtgagtat

SEQ ID NO: 575770 - DNA, 75 bp, synthetic construct
  source 1..75: mol_type = other DNA
ccgtgccgctgtgcaagacgttaaaaaagtggtggagaagatcaagactgatggtcgccatgaacaccatattca

SEQ ID NO: 575771 - DNA, 75 bp, synthetic construct
  source 1..75: mol_type = other DNA
atcgtattttgatagctactatgaaaatcatgctaagtctattgtggcaaaatatacctatattaacaatgacag

SEQ ID NO: 575772 - DNA, 75 bp, synthetic construct
  source 1..75: mol_type = other DNA
atccagtaacaaaagaacgtaaacaaatccatccagaagatatacatctcactgcaaaagacttcgaagcaagta

SEQ ID NO: 575773 - DNA, 75 bp, synthetic construct
  source 1..75: mol_type = other DNA
cagcagtgtgtctgctgtaacaaacaagcagatgatccccatcacctgataggccacggacaaggtggaatggga

SEQ ID NO: 575774 - DNA, 75 bp, synthetic construct
  source 1..75: mol_type = other DNA
gatcagtacacagagacgctggcaggcattgcgcgtgagaacctggtatcctggctgataaaggtcatccgctca

SEQ ID NO: 575775 - DNA, 75 bp, synthetic construct
  source 1..75: mol_type = other DNA
tcttggtccggtatatccggcaggtgtggaaatcgtgttaccggactggatatatgaaccggaggaaaaggagac

SEQ ID NO: 575776 - DNA, 75 bp, synthetic construct
  source 1..75: mol_type = other DNA
aagcccgccagcaatccccggctggctgcgtgatggtattcgctgcccgtattcgccaggaggtgcaccatgcat

SEQ ID NO: 575777 - DNA, 75 bp, synthetic construct
  source 1..75: mol_type = other DNA
ctcgataccgcgctgttgtaattctttgcggagtattcgtttaatccaagtagctaatgaggtgtcgccgtctgc

SEQ ID NO: 575778 - DNA, 75 bp, synthetic construct
  source 1..75: mol_type = other DNA
aaaccagattagctgtcgttactcattatcttgccggacacgatggcgcacgtcgtaccgctgaacgttttggtg

SEQ ID NO: 575779 - DNA, 75 bp, synthetic construct
  source 1..75: mol_type = other DNA
tggcgcactggcgggcctcgcccgtgcggcgggcaccagagtgagttatgtcaaaccccatggagcgttatacaa

SEQ ID NO: 575780 - DNA, 75 bp, synthetic construct
  source 1..75: mol_type = other DNA
aacgttctggcctttagtcgtggggattctgtgaatattaatcactctcctcatgatggactagttataataaat

SEQ ID NO: 575781 - DNA, 75 bp, synthetic construct
  source 1..75: mol_type = other DNA
actccaccgcttaaaaattataatgagcggttacacaatactaatttatttaacccaaaatatcaaaaaaaagcc

SEQ ID NO: 575782 - DNA, 75 bp, synthetic construct
  source 1..75: mol_type = other DNA
gtacggagcatggacgagaactgacagtcaccttcagcgatggcagtcagcattatgtcctgctcgacatggggc

SEQ ID NO: 575783 - DNA, 75 bp, synthetic construct
  source 1..75: mol_type = other DNA
acggacccggcaggaaaccggctgccggacccggagctgcacccggacagtacactcacagtgtggccggataac

SEQ ID NO: 575784 - DNA, 75 bp, synthetic construct
  source 1..75: mol_type = other DNA
ggagtggctgacctacggcagcggttatctggcgggcatgaagcttggcgacacgccgctgctggagtacacgcg

SEQ ID NO: 575785 - DNA, 75 bp, synthetic construct
  source 1..75: mol_type = other DNA
cagactaaaacggagtttttccgcgacggtatgccgcgcaggattgagttcaccctgtcgctaaaacgggtggat

SEQ ID NO: 575786 - DNA, 75 bp, synthetic construct
  source 1..75: mol_type = other DNA
tgatggcaatgttaaggatctcgttaatgtggcgattgatgagcgggaacttcaaaccctcaatatgatgatgag

SEQ ID NO: 575787 - DNA, 75 bp, synthetic construct
  source 1..75: mol_type = other DNA
tttcctcccgcaggagtacggcggcaaatcaccaaatgcgccaaaacctctacaggtcccggataacttcccggc

SEQ ID NO: 575788 - DNA, 75 bp, synthetic construct
  source 1..75: mol_type = other DNA
ttaccgatctgactgaagattcaacgctagtagatggttttctggctcagattcactgcctgccatgtgtaccga

SEQ ID NO: 575789 - DNA, 75 bp, synthetic construct
  source 1..75: mol_type = other DNA
ctggtaattggtgtctatccggacatatcactggctcaggcgcgtcagaaacgggatgaagcgcgtaaactcctg

SEQ ID NO: 575790 - DNA, 75 bp, synthetic construct
  source 1..75: mol_type = other DNA
aagcgatgttagggcagattgaacgtaatgaatccagcccgacggtcgcgacattatggaaaatcgccaccggaa

SEQ ID NO: 575791 - DNA, 75 bp, synthetic construct
  source 1..75: mol_type = other DNA
gcacgacaaatattgtcgattttgaggtttcaaaggaatcattcgaccgggccaaaaagaaaattcaggacgtag

SEQ ID NO: 575792 - DNA, 75 bp, synthetic construct
  source 1..75: mol_type = other DNA
attatacgatgaaataataaaagagtataatgataaaaaaatagtaataagacagcatcctcgcgaattgacgga

SEQ ID NO: 575793 - DNA, 75 bp, synthetic construct
  source 1..75: mol_type = other DNA
aacatcatttagtcctttattatcaaaacattttggtaatatatcaaataaatttgaagttaaaggtaagaaatg

SEQ ID NO: 575794 - DNA, 75 bp, synthetic construct
  source 1..75: mol_type = other DNA
gtgggcggtgaccgtaccggggcaggggtcaaagagtcttacacaggctcccgtgatatgactcccaagtcagaa

SEQ ID NO: 575795 - DNA, 75 bp, synthetic construct
  source 1..75: mol_type = other DNA
gatgcgccgtgttgcggaccaacagcagcgtgaagccctgaacgctcaagaaacacgattcgagctacgcaagat

SEQ ID NO: 575796 - DNA, 75 bp, synthetic construct
  source 1..75: mol_type = other DNA
ctacaaatcaatgtgaaggtccaagatggacaggtgaaagaccttatccggtccgagattgaacataacgatcag

SEQ ID NO: 575797 - DNA, 75 bp, synthetic construct
  source 1..75: mol_type = other DNA
aaaccgccattcagcagcatcgtggctgggtgaaggcagaagacagcccgctgggcggtttacggctggtgattt

SEQ ID NO: 575798 - DNA, 75 bp, synthetic construct
  source 1..75: mol_type = other DNA
gttggttgaaaggcgtgatgccaagaatggataaactggaaaaattagcagagctctcacaacatcccgtccatt

SEQ ID NO: 575799 - DNA, 75 bp, synthetic construct
  source 1..75: mol_type = other DNA
gttgttcagtgcagaacgtgaaggtggtgcactgacagaagttgcgtgctgggcccatgcccggcgaaaaatcca

SEQ ID NO: 575800 - DNA, 75 bp, synthetic construct
  source 1..75: mol_type = other DNA
gggttacatgtggtttgagcgaggcataaatgcgattaaaagccgattaacgcttggagaatcttatacgtcgtc

SEQ ID NO: 575801 - DNA, 75 bp, synthetic construct
  source 1..75: mol_type = other DNA
gaaacgaacgcaaggggcttcactcttggcatccatactatgcgggctattcagagtcatttgtggcttctgttt

SEQ ID NO: 575802 - DNA, 75 bp, synthetic construct
  source 1..75: mol_type = other DNA
gcaggcgacctgacagcaacgatatcaccggacggtaaacgcagcaccatcgaatatgataaacgcgggcgtccg

SEQ ID NO: 575803 - DNA, 75 bp, synthetic construct
  source 1..75: mol_type = other DNA
accaccgtgggctgccgcaggcgcttatcagcccggaaggggaaacggcgtggcgcggggagtatgacgagtggg

SEQ ID NO: 575804 - DNA, 75 bp, synthetic construct
  source 1..75: mol_type = other DNA
cagaagaatttgctgccgcgccggtattaaccccgcagcaggagagccactacttgcaggcctatttaccactgg

SEQ ID NO: 575805 - DNA, 75 bp, synthetic construct
  source 1..75: mol_type = other DNA
catccgggcaaaacaacctgcaatttttgttctggaaaacgtaaaaaatctgaagagtcacgataagggtaatac

SEQ ID NO: 575806 - DNA, 75 bp, synthetic construct
  source 1..75: mol_type = other DNA
gagagaacggattgcatgcacgttttgtacacttgcagaagagttattcacacatatggctcgacgttggactgt

SEQ ID NO: 575807 - DNA, 75 bp, synthetic construct
  source 1..75: mol_type = other DNA
agtatgatgaggcggggaggctgaaggcgcagacggatgcggcggggcggcggacggagtacagcctgcatatgg

SEQ ID NO: 575808 - DNA, 75 bp, synthetic construct
  source 1..75: mol_type = other DNA
cgggtgacggagcaggtcaacccggaggggctggactaccgctttgagtacggagagcgccgggtaatcatcacg

SEQ ID NO: 575809 - DNA, 75 bp, synthetic construct
  source 1..75: mol_type = other DNA
ggcagggtgacatgacccgcaagggactggatattgtgcagggttcagcgggggtgctgataggtgcgccaacgg

SEQ ID NO: 575810 - DNA, 75 bp, synthetic construct
  source 1..75: mol_type = other DNA
aaaagccccgtaagcaacactcgcctgaatttcgcaatgaagccctgaagcttgcaaaacgcatcggtgccgctg

SEQ ID NO: 575811 - DNA, 75 bp, synthetic construct
  source 1..75: mol_type = other DNA
ggtcaccctgaacatccctgctcaacaggtggtgacgaataacagcgacagcgtgcagctgacggcgacggtgaa

SEQ ID NO: 575812 - DNA, 75 bp, synthetic construct
  source 1..75: mol_type = other DNA
aacggagcacaaaaccgccatccataacctgactcactcagcgccatccagtttaatcgtcagtgccgtgcatat

SEQ ID NO: 575813 - DNA, 75 bp, synthetic construct
  source 1..75: mol_type = other DNA
aacctgtctgcaccagcaaaagataccaccggtcataagcgcgttactgctgccaacagggcacccagacggcct

SEQ ID NO: 575814 - DNA, 75 bp, synthetic construct
  source 1..75: mol_type = other DNA
gacgaagatggctttttggttgaagaaacaatagatgtgttgaaccgcataggttttccttcacctctttccttt

SEQ ID NO: 575815 - DNA, 75 bp, synthetic construct
  source 1..75: mol_type = other DNA
cgtgaacaattatggtgtcagtgatacgaaacaggtgactttgattgccgatgctggtaccgcaacactagcctc

SEQ ID NO: 575816 - DNA, 75 bp, synthetic construct
  source 1..75: mol_type = other DNA
actgcgcaggttaatcttaacgttaccgaggacaattatatcgctaataacgtcgggatgaccaggctgcaggca

SEQ ID NO: 575817 - DNA, 75 bp, synthetic construct
  source 1..75: mol_type = other DNA
actacaggcgtactactgtgccttctatatggtctgattgtaatgggtattgctaccttacgtgagcatcaagat

SEQ ID NO: 575818 - DNA, 75 bp, synthetic construct
  source 1..75: mol_type = other DNA
tctcgcgacggatatctacaaaaccggtcttatcagtctggaacaagctagagtggaagcgtatcgcaaacttaa

SEQ ID NO: 575819 - DNA, 75 bp, synthetic construct
  source 1..75: mol_type = other DNA
gcaaagtatgcggtgaatacttcgtgccgaaattccacgacatccggatccgctggtgctgtccggagcacggcg

SEQ ID NO: 575820 - DNA, 75 bp, synthetic construct
  source 1..75: mol_type = other DNA
actacaggagtactgctgtgtcttctgtatggcctgattgtgatgggtatagcaaccctgcgtgagcatcaggac

SEQ ID NO: 575821 - DNA, 75 bp, synthetic construct
  source 1..75: mol_type = other DNA
cgatcgcgcctatcagcgtgtacagacggaaaaagccaaagtactggacttccagaataaccatcatttgatcag

SEQ ID NO: 575822 - DNA, 75 bp, synthetic construct
  source 1..75: mol_type = other DNA
cagtgggtagtggcgtgtttcgctattgctgtcatttactttggactgattgcctcggaccgctatgtgagccgg

SEQ ID NO: 575823 - DNA, 75 bp, synthetic construct
  source 1..75: mol_type = other DNA
cgatttcaataaatctcgcattcatcctgatatatacatgaacgagatccttactggtatgagaataattcacca

SEQ ID NO: 575824 - DNA, 75 bp, synthetic construct
  source 1..75: mol_type = other DNA
cggggagctggagcgactcgaccagacgctgaacctgccactggtggggtacacctggacccgcgatattcagtt

SEQ ID NO: 575825 - DNA, 75 bp, synthetic construct
  source 1..75: mol_type = other DNA
atagctgatttttcgcaggcggcccatcaacgcatgctgacttacgccgcttcatgttgtgcgtcgatattatcg

SEQ ID NO: 575826 - DNA, 75 bp, synthetic construct
  source 1..75: mol_type = other DNA
atgatctttgttcggtagtatcgttaatgcaaaataaagtgaactggcgcatcactccatctaggagcttgcttt

SEQ ID NO: 575827 - DNA, 75 bp, synthetic construct
  source 1..75: mol_type = other DNA
gcgtgaactggatgctcgcccggcatattttcagggaaaaaccatgaatatgcctcccaaaggaggggagtcatg

SEQ ID NO: 575828 - DNA, 75 bp, synthetic construct
  source 1..75: mol_type = other DNA
agtcaaaggttttcacaatttttgagtctgggatttttcaatttattcatggtgtaattagtttgtttgttagca

SEQ ID NO: 575829 - DNA, 75 bp, synthetic construct
  source 1..75: mol_type = other DNA
tatagcaagtttatggttattttatcagtcaatagtcattacgtaaaggatgatgtagttcccccacttcatttg

SEQ ID NO: 575830 - DNA, 75 bp, synthetic construct
  source 1..75: mol_type = other DNA
cgtctgctcaaacaggcgcttgacctgatcaacaatgcggacgaagcgcgggaaaagtctcaacccccggcgtaa

SEQ ID NO: 575831 - DNA, 75 bp, synthetic construct
  source 1..75: mol_type = other DNA
tgggaaggtgtcaaagtggttctccgtgagccgtcaggtgaagcctggctgcgctggcaggaggtggtgaaaggg

SEQ ID NO: 575832 - DNA, 75 bp, synthetic construct
  source 1..75: mol_type = other DNA
gtagaggatgtctgcaatgcttacaaaaaaaaatatgggcaggatcttacaggacattatcttgaggtactgaaa

SEQ ID NO: 575833 - DNA, 75 bp, synthetic construct
  source 1..75: mol_type = other DNA
tgttatattaataaattaaaggtgaataaaaagatattcttaattattttttcaactctatttgttttgattctt

SEQ ID NO: 575834 - DNA, 75 bp, synthetic construct
  source 1..75: mol_type = other DNA
ttgtattgggtgataatgacacgggctttaaacaaaaaggcgatggtaatctggatgtttatgctaataacgtcc

SEQ ID NO: 575835 - DNA, 75 bp, synthetic construct
  source 1..75: mol_type = other DNA
tcaggctaacccgtaatttcattggtcaagacagttgcttttttattctgaaaagaatatatcatcatgccaaac

SEQ ID NO: 575836 - DNA, 75 bp, synthetic construct
  source 1..75: mol_type = other DNA
gttaaaaaatgaagttgacagaaataagaaacgtgccgatgcaggtatcgctggtgcgatggcaatgacggcaat

SEQ ID NO: 575837 - DNA, 75 bp, synthetic construct
  source 1..75: mol_type = other DNA
tattactttacccccggacagatgaacatcaccattggttcgtggcagaacaaagtatatctcggcgcagacaag

SEQ ID NO: 575838 - DNA, 75 bp, synthetic construct
  source 1..75: mol_type = other DNA
atttaatccgaaagacttacctgatggtgattttataataaatattgtatactataccaatgattgtcatgtcat

SEQ ID NO: 575839 - DNA, 75 bp, synthetic construct
  source 1..75: mol_type = other DNA
ggtgtttgcgctgaaaaacgttaataacagtatcgatagagatctgcaaaacaggctccacccttattaccttgt

SEQ ID NO: 575840 - DNA, 75 bp, synthetic construct
  source 1..75: mol_type = other DNA
tgtcgttccactgtccgctcacgcagcgaacggatgtgatgagtttcaacgaaatcttcgagcaactgtctttgc

SEQ ID NO: 575841 - DNA, 75 bp, synthetic construct
  source 1..75: mol_type = other DNA
accgtagtgaaggcgctgtagctgcgggtgttcatataaacacaagcgaaaatagtgcagtaaaagtcaatgcag

SEQ ID NO: 575842 - DNA, 75 bp, synthetic construct
  source 1..75: mol_type = other DNA
aaaatttaattttagtcaagaagacttggaaactctactcctcgctaaagataaccgtggtgtgagcgcgatttt

SEQ ID NO: 575843 - DNA, 75 bp, synthetic construct
  source 1..75: mol_type = other DNA
ggctttagaaaataatcaaaaagaaattatcaaagcgtggttgttggcgatagatgactttgagaaagagtttgg

SEQ ID NO: 575844 - DNA, 75 bp, synthetic construct
  source 1..75: mol_type = other DNA
gcaaccaatactgcagtacgctataaagcaaacaactacgattcttttggcacattgcaatcctttatgaacatt

SEQ ID NO: 575845 - DNA, 75 bp, synthetic construct
  source 1..75: mol_type = other DNA
aaagcatggttgttggcgatagatgactttgagaaagaatttgaggtaaataaaaatgaaatgcttcttagtata

SEQ ID NO: 575846 - DNA, 75 bp, synthetic construct
  source 1..75: mol_type = other DNA
aatgcaaccaatactgcagtacgctataaagcaaacaactgtgattcttttggatcattgcgatcctttatgaat

SEQ ID NO: 575847 - DNA, 75 bp, synthetic construct
  source 1..75: mol_type = other DNA
tcgctctcatacgaacgcaaagtataggagttttacaaaagagcagataaaagctaatactaaatatgaggttat

SEQ ID NO: 575848 - DNA, 75 bp, synthetic construct
  source 1..75: mol_type = other DNA
agcaaaattaattagaaattgtgatgagagagtatttacagtaagaaaaattgctagtttactttcaatttcagc

SEQ ID NO: 575849 - DNA, 75 bp, synthetic construct
  source 1..75: mol_type = other DNA
gttgccacgatggttggcacgggttccagtatgggcgcagtgggctttggctacagcaatggctgggccggaatg

SEQ ID NO: 575850 - DNA, 75 bp, synthetic construct
  source 1..75: mol_type = other DNA
gctttattatttatgccatcgccatgatttggcttggttggtttgtttctcgtaatcagaaaagcggagaagatt

SEQ ID NO: 575851 - DNA, 75 bp, synthetic construct
  source 1..75: mol_type = other DNA
aaaacaggttgccccacgcagtcagaaaatgatcggaaggcgtgtgctgcgtgattttgtcattcgtagaaacgg

SEQ ID NO: 575852 - DNA, 75 bp, synthetic construct
  source 1..75: mol_type = other DNA
gaatcggattcgcacccaacgcgaaacctgcggcttaacaaccgccgaactcgctaggctgctcgatctcgatga

SEQ ID NO: 575853 - DNA, 75 bp, synthetic construct
  source 1..75: mol_type = other DNA
aaggaatttaataacttctgtcgtcaggagtactacggttgggaggacaacttcacggaaaccccagccaccgac

SEQ ID NO: 575854 - DNA, 75 bp, synthetic construct
  source 1..75: mol_type = other DNA
gtgtaattgcctgattttgatatgttcaattcaacatcaaatgaaggttaaattatggattgaaccgccccgggt

SEQ ID NO: 575855 - DNA, 75 bp, synthetic construct
  source 1..75: mol_type = other DNA
gcagcaatcaggctggtgaagcactaacagcgcgtggtcaggacatccagatatcggaaagattagaaatcagct

SEQ ID NO: 575856 - DNA, 75 bp, synthetic construct
  source 1..75: mol_type = other DNA
cagtttgattatcaggagccggtgcagaatatgccagggcaacaatctactactggcagtaacttttcttcgcta

SEQ ID NO: 575857 - DNA, 75 bp, synthetic construct
  source 1..75: mol_type = other DNA
gctcaaccgcccggaacgcctgaacagttttaatgatgagatgcacgcacaactggcagagtgcctgaaacaggt

SEQ ID NO: 575858 - DNA, 75 bp, synthetic construct
  source 1..75: mol_type = other DNA
tgcgtgatctgcgcggacgcatcagtggggggcgacgcggtgaacgccatcagctgcgtgatgaacgggggcgtt

SEQ ID NO: 575859 - DNA, 75 bp, synthetic construct
  source 1..75: mol_type = other DNA
gcagtgcccggcagcgacggctggcacgaaacctcgtcgtcgatattgatgaagatgaggtgctgaaaattatcg

SEQ ID NO: 575860 - DNA, 75 bp, synthetic construct
  source 1..75: mol_type = other DNA
gttcggtctgaacgccatcaaagtacgcgatctgcgcggacgcatcagtgggggacgacgcggcgaacgccatca

SEQ ID NO: 575861 - DNA, 75 bp, synthetic construct
  source 1..75: mol_type = other DNA
aataaaactgaattgttcgttgacgatattgttgcatatcttaaaagtccttcagtttattcacttgaaaaagcg

SEQ ID NO: 575862 - DNA, 75 bp, synthetic construct
  source 1..75: mol_type = other DNA
taggatagttataggtaaagcatgtaaaaataaaatcttatcaaccgtaagaaatcttctttatgatacaaataa

SEQ ID NO: 575863 - DNA, 75 bp, synthetic construct
  source 1..75: mol_type = other DNA
taagataaccacaggaaaaatcagtaaaaataaaatattgtcaatagtaaatgatgttatttataaaaagaacaa

SEQ ID NO: 575864 - DNA, 75 bp, synthetic construct
  source 1..75: mol_type = other DNA
ggcggttatattactatatccagattaaaaacaatcgtttatgacatgaagaatacttttctggagtatgataca

SEQ ID NO: 575865 - DNA, 75 bp, synthetic construct
  source 1..75: mol_type = other DNA
acccaaaaaaatgttatatggtgcaatattttctattttgcttttcttatttgttcttttgttccgtcaagcata

SEQ ID NO: 575866 - DNA, 75 bp, synthetic construct
  source 1..75: mol_type = other DNA
gtactcagtcaatctaaaggaaaggagtttttctactctcattttggaactccatatcgtgttaccgtaattaat

SEQ ID NO: 575867 - DNA, 75 bp, synthetic construct
  source 1..75: mol_type = other DNA
tattgacgtggttaatactaataacaacgcaatattagttaacggttactccattgacatcattgggtgccggtt

SEQ ID NO: 575868 - DNA, 75 bp, synthetic construct
  source 1..75: mol_type = other DNA
caattcatcttcacttcatccctgaaatgtttgcaataaagagtacattccggcttttcaacagctgttgcagtc

SEQ ID NO: 575869 - DNA, 75 bp, synthetic construct
  source 1..75: mol_type = other DNA
cttattgcccggggatggggactaagcttagtcagccgctgtctccgggggtcgcgtgcgcagttgcacgtcatt

SEQ ID NO: 575870 - DNA, 75 bp, synthetic construct
  source 1..75: mol_type = other DNA
tcttcaacaagttggctggcatacattcactacagctcatggttttcggcatactttcagtaccattctggcttt

SEQ ID NO: 575871 - DNA, 75 bp, synthetic construct
  source 1..75: mol_type = other DNA
agtcggctaaacctgctgacagggattacaaactttctgacggtcagggcctttatcttcttgtcaaaaaatccg

SEQ ID NO: 575872 - DNA, 75 bp, synthetic construct
  source 1..75: mol_type = other DNA
aggaaattataatggcgagtaaaaatgtaaatttattacaggggtatttatactcgccaccaattcctccagaga

SEQ ID NO: 575873 - DNA, 75 bp, synthetic construct
  source 1..75: mol_type = other DNA
ggggagtatattcagaaaaaaaatattcttgtcagcatcaatgatgtttatactatcatttacacttctggcatt

SEQ ID NO: 575874 - DNA, 75 bp, synthetic construct
  source 1..75: mol_type = other DNA
ggtacgctgaatgtcagtgtggaggccgaaagtgccggtcgtgcgggaaatgccccggcagggacgaaactgacg

SEQ ID NO: 575875 - DNA, 75 bp, synthetic construct
  source 1..75: mol_type = other DNA
acccaaggagatagcggcattttctcatggtgtaaatcaactggttaccgtacggatttttgctcgacatgtggt

SEQ ID NO: 575876 - DNA, 75 bp, synthetic construct
  source 1..75: mol_type = other DNA
gagacaccagattggtagctggtgtaactataaatctggacggattcggttcattttctggaaaatatcttatat

SEQ ID NO: 575877 - DNA, 75 bp, synthetic construct
  source 1..75: mol_type = other DNA
aaatgttgaatgatctgacgttattattaataatgtattattgtaaaatgaactacgccgaaagaagtcaacaaa

SEQ ID NO: 575878 - DNA, 75 bp, synthetic construct
  source 1..75: mol_type = other DNA
tgatgaatctgatcccgaccgactggcaggaagaagctgcgcggcaatccaacgatggcggcagcagtcagggct

SEQ ID NO: 575879 - DNA, 75 bp, synthetic construct
  source 1..75: mol_type = other DNA
cagaaagagcggaagcgggttaccgacgaacgggacatattaaaaaaagccgctgtagattcaatctgtcggtga

SEQ ID NO: 575880 - DNA, 75 bp, synthetic construct
  source 1..75: mol_type = other DNA
ccattcaacaggccatacggcgaacacagcaatacaacgaccagctggaacgcgaacggcaggcgctggcacgtg

SEQ ID NO: 575881 - DNA, 75 bp, synthetic construct
  source 1..75: mol_type = other DNA
ttatatccaaaaaagatattaaaattgacataaaatatatagataagcaagagagtttaggcctaaacaatgaag

SEQ ID NO: 575882 - DNA, 75 bp, synthetic construct
  source 1..75: mol_type = other DNA
aatacgctgtcaacttccgggctggggcgctttctggtgtttctctatatctggctgccgttcatgatcctgccc

SEQ ID NO: 575883 - DNA, 75 bp, synthetic construct
  source 1..75: mol_type = other DNA
caatatcagtaccaataaaacttgtattatttgttgcgcttgatgggtggggtatcctgtctaaggccttgattg

SEQ ID NO: 575884 - DNA, 75 bp, synthetic construct
  source 1..75: mol_type = other DNA
taccaatactgtgtctgtccagcttcgcacaggccatcaccacgccagaaatcgccgcttccgcgctgtcgccgg

SEQ ID NO: 575885 - DNA, 75 bp, synthetic construct
  source 1..75: mol_type = other DNA
acgcatgactataaggccggggcggtcatcgcccaacgcgctgccgatctggtgacgcgtagcggcctgtcacat

SEQ ID NO: 575886 - DNA, 75 bp, synthetic construct
  source 1..75: mol_type = other DNA
taatacagataatatctctccatataaatgagaaggcgtttatgaaaactgaattacattttaaagagatactca

SEQ ID NO: 575887 - DNA, 75 bp, synthetic construct
  source 1..75: mol_type = other DNA
gattcgctgttctccggcgacccaatctgggcgacggaagtgatcggcgggatggggctggacggtcgtacgctg

SEQ ID NO: 575888 - DNA, 75 bp, synthetic construct
  source 1..75: mol_type = other DNA
atgtcgctgggccgcacggcatcgttcctcgatatctacattgagcgcgactttaaagctggcgtactcaatgag

SEQ ID NO: 575889 - DNA, 75 bp, synthetic construct
  source 1..75: mol_type = other DNA
tttaaaagacaaatacagcctgccggatgagtttatcttgtcgctggcgatgatcgagccgcggaaaaatattga

SEQ ID NO: 575890 - DNA, 75 bp, synthetic construct
  source 1..75: mol_type = other DNA
ccaggtgatcaaacgtgtggcgaagcagctctcgcaggaaggcggctcgttgaagatgtacaacatcgccgatcg

SEQ ID NO: 575891 - DNA, 75 bp, synthetic construct
  source 1..75: mol_type = other DNA
cactgggcgctctgtctgtggatatgacgcaggctaattccacacttcccgatgacagtcagcatgacggactga

SEQ ID NO: 575892 - DNA, 75 bp, synthetic construct
  source 1..75: mol_type = other DNA
tagtatctctttttggaatatctcaattttatgtgtcatttttcggggaaggatatagagatttaagcaagcatt

SEQ ID NO: 575893 - DNA, 75 bp, synthetic construct
  source 1..75: mol_type = other DNA
cagccagagaactagtcgatcgctcgcgagtcctggtgcatgtgatgctcgagcatcctgacgatatcggcccga

SEQ ID NO: 575894 - DNA, 75 bp, synthetic construct
  source 1..75: mol_type = other DNA
ataacagtgacggagtacatacacttaacttttccgataactatatcgtttatgacaccaaaaaaaatgtcttta

SEQ ID NO: 575895 - DNA, 75 bp, synthetic construct
  source 1..75: mol_type = other DNA
gacaaaaagttgaattcactccgcagccggtgaaattaggtcaatcgtctggggatagccagtggattgaagtgg

SEQ ID NO: 575896 - DNA, 75 bp, synthetic construct
  source 1..75: mol_type = other DNA
tttgtaagtacattaatgttctatatttttgccggatgtatagttgcaagacttgaaagccatatcataaaatta

SEQ ID NO: 575897 - DNA, 75 bp, synthetic construct
  source 1..75: mol_type = other DNA
gttgcaactatattttatgtctttgcgtccatgttgatagctgtgatactttcaaaaactcctttgttaaatagg

SEQ ID NO: 575898 - DNA, 75 bp, synthetic construct
  source 1..75: mol_type = other DNA
tgacgcgaagaccgggatccagcgcgtctcgcgcagtatcctcagcgaattactgaaatctggcgtgccgggtta

SEQ ID NO: 575899 - DNA, 75 bp, synthetic construct
  source 1..75: mol_type = other DNA
gacattcagcggtggtctttcaggcgaactatccggcaatgctgctacagcaacaaagctgaaaacggcaaggac

SEQ ID NO: 575900 - DNA, 75 bp, synthetic construct
  source 1..75: mol_type = other DNA
cttaaaggccgcacctttgagcgcgtctttaccggcagctcatggagcgaatggcgggaagtctacacctcgtat

SEQ ID NO: 575901 - DNA, 75 bp, synthetic construct
  source 1..75: mol_type = other DNA
attctggaagtgttgaggcggtttgatggtgttaatgtatggcagcgttatacaactgccggaacaggtacaacc

SEQ ID NO: 575902 - DNA, 75 bp, synthetic construct
  source 1..75: mol_type = other DNA
tcactaaaagcggcgcagcaaaaatcgccgcagcgaccagcgcatcaggaaaaaaagtcaacatcacgcacatgg

SEQ ID NO: 575903 - DNA, 75 bp, synthetic construct
  source 1..75: mol_type = other DNA
ataaatggaatcgataattctggttttacaactgaaacaaatgaagctgttttggctgcactatctgcggaggta

SEQ ID NO: 575904 - DNA, 75 bp, synthetic construct
  source 1..75: mol_type = other DNA
agaaaccgctacgtcagcaaaaccgcccgattattagctatgttcctcgcacggaacctgcgccgccagaacatg

SEQ ID NO: 575905 - DNA, 75 bp, synthetic construct
  source 1..75: mol_type = other DNA
agacgctatatcaaccgactgtcagacgcgctgttctcgatggcgagaattgaagaaactagtccagatgcttgc

SEQ ID NO: 575906 - DNA, 75 bp, synthetic construct
  source 1..75: mol_type = other DNA
atggtccgttttaacttactagaaaatgcgttggattcagtggaaaccgggctggactactttaacaaagcgcta

SEQ ID NO: 575907 - DNA, 75 bp, synthetic construct
  source 1..75: mol_type = other DNA
agtcggccaaattctcctgggccaacaccgcccatctggcgatcgatggtttcacccgcctgcttcagtcgtcca

SEQ ID NO: 575908 - DNA, 75 bp, synthetic construct
  source 1..75: mol_type = other DNA
tggtctgtatgatgatgccggaacactgattgcggtatccaacatggcagaaagctataagccagaactggctga

SEQ ID NO: 575909 - DNA, 75 bp, synthetic construct
  source 1..75: mol_type = other DNA
acctttcatgcgaacgctgccagttaatactgacccagctggttatggcgggtctggcagactatcagttcggtt

SEQ ID NO: 575910 - DNA, 75 bp, synthetic construct
  source 1..75: mol_type = other DNA
agggtctattacttacgaccgttatgctaaagaggttgaggttgataggctggtcaatgtgatggctgatgttta

SEQ ID NO: 575911 - DNA, 75 bp, synthetic construct
  source 1..75: mol_type = other DNA
aggtcaaatatttcgaagtttggaatgaatggtgctataaaaagaatccaaaagataagagttataatcctctaa

SEQ ID NO: 575912 - DNA, 75 bp, synthetic construct
  source 1..75: mol_type = other DNA
attcatggagcagaataaaaaaattatggtaggtaatgaaaaatcaatgctgcatcttattgttcgtaactcatc

SEQ ID NO: 575913 - DNA, 75 bp, synthetic construct
  source 1..75: mol_type = other DNA
atggtgaaattagcgataaatactttgaccctgaatctcgcccctggaataaattgccgaaatggacttattcaa

SEQ ID NO: 575914 - DNA, 75 bp, synthetic construct
  source 1..75: mol_type = other DNA
aacaataatttaaataattttttttctaaaattgaaaaagaagctgatgcgttaaaagatgctatttatctgtta

SEQ ID NO: 575915 - DNA, 75 bp, synthetic construct
  source 1..75: mol_type = other DNA
ggcggattatctggatgcaaaccggttcaggcatgttgtgccgtatggcttcaaaaagtcgccgggaggcgcact

SEQ ID NO: 575916 - DNA, 75 bp, synthetic construct
  source 1..75: mol_type = other DNA
aactaacagggttgtgtgttttatatctagtcttgcacgagaagaaaatatgccagtgatcgctgaaggtgttga

SEQ ID NO: 575917 - DNA, 75 bp, synthetic construct
  source 1..75: mol_type = other DNA
tcattgaaactaataataaaacctattcagcagttggtatgctttgtatctatggattagagtttgtagaggcta

SEQ ID NO: 575918 - DNA, 75 bp, synthetic construct
  source 1..75: mol_type = other DNA
ttacttaagccaagtagtacgcgtagtgttattttagaaacgccgccaaatgtctgtatggaatcacgtaattca

SEQ ID NO: 575919 - DNA, 75 bp, synthetic construct
  source 1..75: mol_type = other DNA
gacgtagttgatcgaaggctagaccacaatgtggccgatcaactctccattgctctctttgcgaaccttgcgttc

SEQ ID NO: 575920 - DNA, 75 bp, synthetic construct
  source 1..75: mol_type = other DNA
agcaacattcacggcgtggaagcgccgttcagctgacggcaccgatgtgctctctgcaaacgcaaagggattccc

SEQ ID NO: 575921 - DNA, 75 bp, synthetic construct
  source 1..75: mol_type = other DNA
attaaaaggaatggatgagtatacgaaattccaaaagctacttgtagatgatttcttcatttatatgatttcgat

SEQ ID NO: 575922 - DNA, 75 bp, synthetic construct
  source 1..75: mol_type = other DNA
tctatggacgttggggagttgccgaagtcattgctgaccgttacggatcaggacgtgctgatcgttttctcctac

SEQ ID NO: 575923 - DNA, 75 bp, synthetic construct
  source 1..75: mol_type = other DNA
aatgcaatggtgagtaaagcaacggttgggcgttttttaaataagctgggatttatcggctacgctgacttccgt

SEQ ID NO: 575924 - DNA, 75 bp, synthetic construct
  source 1..75: mol_type = other DNA
ggccgaaagacctgctgatttcgaagtcagagttggttctgatggcggcgcaggaggaggtggagtcgggggagt

SEQ ID NO: 575925 - DNA, 75 bp, synthetic construct
  source 1..75: mol_type = other DNA
aattgaagaaagcaaaagcattaaaacaccacttcatttcatgcgtggagttatcccaacgacggaaatgaaaaa

SEQ ID NO: 575926 - DNA, 75 bp, synthetic construct
  source 1..75: mol_type = other DNA
aggctgcgcaggataaatatgggcctgttccggcggatacgacggaagaacagcggcaggcatatctggcaaaac

SEQ ID NO: 575927 - DNA, 75 bp, synthetic construct
  source 1..75: mol_type = other DNA
cacagcggacatgcggaaggaacgactcaggccgcagtggcagaaggcactatcaccatccgggacagggacaat

SEQ ID NO: 575928 - DNA, 75 bp, synthetic construct
  source 1..75: mol_type = other DNA
tcgccggagatatggccgggacggcgaattgcgctgacggggcatccgcaggcgaacctgaaccgggaatggcag

SEQ ID NO: 575929 - DNA, 75 bp, synthetic construct
  source 1..75: mol_type = other DNA
aaggtatgtgctgattttgaagctgaactggttgaaatggatggcgaaccagatcacgtccatttgttaattaac

SEQ ID NO: 575930 - DNA, 75 bp, synthetic construct
  source 1..75: mol_type = other DNA
agacaagtaagccctgataaggcttacactgctgaacttatttacatgcacggaaccatgatgaggaaaaagaaa

SEQ ID NO: 575931 - DNA, 75 bp, synthetic construct
  source 1..75: mol_type = other DNA
gccttgattgaatccggtttgtggtcgaaagatgctgttgaacggcaaatgagccatcaggagcggaactcagtt

SEQ ID NO: 575932 - DNA, 75 bp, synthetic construct
  source 1..75: mol_type = other DNA
tgctgtttatccgctccagcgaactgcgctttgcccgctgggatgaaattgacctgcataacgccatgtggacca

SEQ ID NO: 575933 - DNA, 75 bp, synthetic construct
  source 1..75: mol_type = other DNA
ggcatgccaggccgcttggcaaggcatacaggctctctgactgtcacggtctttacattcaggttaaccccagcg

SEQ ID NO: 575934 - DNA, 75 bp, synthetic construct
  source 1..75: mol_type = other DNA
ttacccttctggctccagcgtcttgatgacagactaccactggctgcaacgggtctgtcacgcacgctaacgaga

SEQ ID NO: 575935 - DNA, 75 bp, synthetic construct
  source 1..75: mol_type = other DNA
aaaagttttcagaaacagtatttcagcaacactactatcagagcttaagattattaagctatgaattagagaaac

SEQ ID NO: 575936 - DNA, 75 bp, synthetic construct
  source 1..75: mol_type = other DNA
cttgaaataataaaaagatctttaagtaatccaacactaaaagtatttgttttttgctacaacaatcaaagcaag

SEQ ID NO: 575937 - DNA, 75 bp, synthetic construct
  source 1..75: mol_type = other DNA
tggcgctgattgttgcaaccggcgcacaagctgccagtgaaaaagtcgagatgaacctcgtcacgtcgcaagggg

SEQ ID NO: 575938 - DNA, 75 bp, synthetic construct
  source 1..75: mol_type = other DNA
tgcagaattcacgtagcgtcgtttcggtgcataacgttccccctgccgtgccggtgggaatggattacacgctgg

SEQ ID NO: 575939 - DNA, 75 bp, synthetic construct
  source 1..75: mol_type = other DNA
acgcttaaagaaatagctgctgcgatcaataacgacccgaatttcagcacaactatcaacaatgccctagccctc

SEQ ID NO: 575940 - DNA, 75 bp, synthetic construct
  source 1..75: mol_type = other DNA
atgggaatcatatttcgagcgcagacaggactatattctggaaaacgcaatatggggaaagaaacggttgaaccg

SEQ ID NO: 575941 - DNA, 75 bp, synthetic construct
  source 1..75: mol_type = other DNA
gccaatagttatcgactttctggcaaaacggggattgatgttgtcaccagaaaagacgcgaatcgttaatatcaa

SEQ ID NO: 575942 - DNA, 75 bp, synthetic construct
  source 1..75: mol_type = other DNA
ttgaccttgcttatgaaggttccggtagtggcgactggcgaacggatgcatttattgttggtatcggataccgtt

SEQ ID NO: 575943 - DNA, 75 bp, synthetic construct
  source 1..75: mol_type = other DNA
tggtgaaggcgagttgctcattggctggagtggcacaaatggcgctcatgcacctgctttcattcgatccaaaag

SEQ ID NO: 575944 - DNA, 75 bp, synthetic construct
  source 1..75: mol_type = other DNA
tcgctgcccttgcgactggtgcaaacaaactgccttatttcactggtaaggatacggtagctcagactgatttaa

SEQ ID NO: 575945 - DNA, 75 bp, synthetic construct
  source 1..75: mol_type = other DNA
tgatagttttggttttacctatggaaagtttgtctgtaacgattctctgattgggcaaacgtcagccattaatat

SEQ ID NO: 575946 - DNA, 75 bp, synthetic construct
  source 1..75: mol_type = other DNA
gcaaaagggattagttcagctcagtagcgaaactaacagcgacagcgaaacaatggcggctacccctaaagccgt

SEQ ID NO: 575947 - DNA, 75 bp, synthetic construct
  source 1..75: mol_type = other DNA
tcggtggatattggtgaattttaccaggtaactattcagcaacgtaaggatatttctcttgcacttagtgcaggc

SEQ ID NO: 575948 - DNA, 75 bp, synthetic construct
  source 1..75: mol_type = other DNA
gctacggcgaccagattgcagacggcgcgcactattaacggtgtttcgtttgatggttctaaaaatattgagcta

SEQ ID NO: 575949 - DNA, 75 bp, synthetic construct
  source 1..75: mol_type = other DNA
cattcgcccccgccattcccccatcttccgttaacacaggcgtacgacgcccgccagggcggctcttcctgtcgg

SEQ ID NO: 575950 - DNA, 75 bp, synthetic construct
  source 1..75: mol_type = other DNA
ccgtgggtacgctcaatggtagcgccgattcgctgttgaacttaaacggcggaactctgactcttgccaacgggg

SEQ ID NO: 575951 - DNA, 75 bp, synthetic construct
  source 1..75: mol_type = other DNA
gcggcagtgattctcctgaactgcagccggagcccagacccgatgccgaatccggagccaaacccgaatccagag

SEQ ID NO: 575952 - DNA, 75 bp, synthetic construct
  source 1..75: mol_type = other DNA
ggtgcacaggaagggagtgatgcgaaagcagcagggattattgatgccgaaaaaattgagtttgtgtgggcttcg

SEQ ID NO: 575953 - DNA, 75 bp, synthetic construct
  source 1..75: mol_type = other DNA
ctgcgacgatcaccagtctggagatgcctgaaggtcaggtaataatcagagaacccatagcggttaaagcacacg

SEQ ID NO: 575954 - DNA, 75 bp, synthetic construct
  source 1..75: mol_type = other DNA
ccccagcgtgatatgcgggccgggcagtatggcgcagggccacaaaccggatgagttcatcacaatcgaacaact

SEQ ID NO: 575955 - DNA, 75 bp, synthetic construct
  source 1..75: mol_type = other DNA
acggtgaataacgctggcggtacaggcgctaaaacccttaacggtatcgaacttatccatgtaggtggtaagtcc

SEQ ID NO: 575956 - DNA, 75 bp, synthetic construct
  source 1..75: mol_type = other DNA
gggacagtggcactgaccggcaataactatgcattcagcggatatattgatgtcgcttctggtgctgtcgcggtt

SEQ ID NO: 575957 - DNA, 75 bp, synthetic construct
  source 1..75: mol_type = other DNA
actttgcttgcaatgctaccttgccccagcgcaatcgcattttgttcgctggcttcactggtgttacctaatgca

SEQ ID NO: 575958 - DNA, 75 bp, synthetic construct
  source 1..75: mol_type = other DNA
agcgggttacagggaaaaggggcagttattccctgtaaattcaggaactcctcaggggggaataatttctcctgt

SEQ ID NO: 575959 - DNA, 75 bp, synthetic construct
  source 1..75: mol_type = other DNA
ttacgactatcgtctgacgagtggggtaaacaatgacggtctgtatatcggttacggcctgacccagcttgaatt

SEQ ID NO: 575960 - DNA, 75 bp, synthetic construct
  source 1..75: mol_type = other DNA
gacaatgccaatctggtaatcgatgcgacagattcttctcgtccacgtctgactctcgcgtctggtggtgggctg

SEQ ID NO: 575961 - DNA, 75 bp, synthetic construct
  source 1..75: mol_type = other DNA
gtgctgagctctaacggtaaaagcgagaatgccgccgatctcagcgcaaagattaccggcagtggtgacctggca

SEQ ID NO: 575962 - DNA, 75 bp, synthetic construct
  source 1..75: mol_type = other DNA
gcgggggatgttggtgcatataccaaagctgaatcggattctcgctatgtacgagatattcgcctgggcacacgt

SEQ ID NO: 575963 - DNA, 75 bp, synthetic construct
  source 1..75: mol_type = other DNA
tgagcgacctgacgggccgtccgctgatgctctttaacagtgaaggtaaaaccgtctggcgaccggggcagacca

SEQ ID NO: 575964 - DNA, 75 bp, synthetic construct
  source 1..75: mol_type = other DNA
tatctgtgggacggcgacagtattgcggaaatccgggaataccgcgatgataaactgtacagcgtacggcacctg

SEQ ID NO: 575965 - DNA, 75 bp, synthetic construct
  source 1..75: mol_type = other DNA
cagaagctagagatctagcaaaatggttcaatagtagctggggaaaggctgatgtatatcttcgttcagcaatag

SEQ ID NO: 575966 - DNA, 75 bp, synthetic construct
  source 1..75: mol_type = other DNA
gttgccaggtgttaagcagaaacgcgcggcacttgtggcgttctctcgcgagatgaaagacgcaacggtcgaagt

SEQ ID NO: 575967 - DNA, 75 bp, synthetic construct
  source 1..75: mol_type = other DNA
tcggtggcggcaaatctggcggttatcgcacaatcattttctatcgcgtcggcacaagggcctttttcgtatatg

SEQ ID NO: 575968 - DNA, 75 bp, synthetic construct
  source 1..75: mol_type = other DNA
agaatgcagaagacattgcaaaaattaactgacaaggctgttgctgatattatcgctaaccccagactcgctgaa

SEQ ID NO: 575969 - DNA, 75 bp, synthetic construct
  source 1..75: mol_type = other DNA
attacctgccacagacaaattggccaacaactcaattaccaccaggatatacttgtgcagaaccctatttattcc

SEQ ID NO: 575970 - DNA, 75 bp, synthetic construct
  source 1..75: mol_type = other DNA
catttctgcgctcaccggcgtttactgtgcctgaatccgcccagcgttgggcaaatcagattcgtcaggaaaatg

SEQ ID NO: 575971 - DNA, 75 bp, synthetic construct
  source 1..75: mol_type = other DNA
ggatcatttaacggaacgcaaaggtacacctgccgcagcgggaatatttatgttcggaccctgaccgccagatgg

SEQ ID NO: 575972 - DNA, 75 bp, synthetic construct
  source 1..75: mol_type = other DNA
ggaacggaatttgttcagcgagcgacgacgttttttggaccggaccggaattttgagaacccctggttgctcccg

SEQ ID NO: 575973 - DNA, 75 bp, synthetic construct
  source 1..75: mol_type = other DNA
agttcatggctgctaattcagaattgctggctcttgttgaggaatacaacgagatagccagccgtgtcggtatgg

SEQ ID NO: 575974 - DNA, 75 bp, synthetic construct
  source 1..75: mol_type = other DNA
atccatgatgcaggccatacggtgttcaatgcagggaatacttatagcggtaaaacgctggtcaatgacggcctc

SEQ ID NO: 575975 - DNA, 75 bp, synthetic construct
  source 1..75: mol_type = other DNA
gcgatcaaaggcagggctggcgtagaggatgatccttctatcgcggcgttcctgagcattgtcgaactgcctgaa

SEQ ID NO: 575976 - DNA, 75 bp, synthetic construct
  source 1..75: mol_type = other DNA
gcaaccgaacacctggatgatcaccctgtcgcccgcgcattccagcgtcacggagtgtatgctggagctggcaga

SEQ ID NO: 575977 - DNA, 75 bp, synthetic construct
  source 1..75: mol_type = other DNA
ctatcgccagcaggaggcgcgttgtggcgcagtcagtctgtaccgtcgtaaagaagtccatcaggaggggaaagc

SEQ ID NO: 575978 - DNA, 75 bp, synthetic construct
  source 1..75: mol_type = other DNA
aatggcgttatgacctggaatataaagtttcttccgattacgcgctggcagccaaaatgtataaagccggttatg

SEQ ID NO: 575979 - DNA, 75 bp, synthetic construct
  source 1..75: mol_type = other DNA
atccggtcataaatgtagatccgcaaggtttggttgatataaatttataccccgaaagtgatcttatccattctg

SEQ ID NO: 575980 - DNA, 75 bp, synthetic construct
  source 1..75: mol_type = other DNA
gcaaaagtcattggtgaaattgagtctattgctacgcttaccgcagcgattgccagcggcatgggcgttgcagta

SEQ ID NO: 575981 - DNA, 75 bp, synthetic construct
  source 1..75: mol_type = other DNA
accaagattgcccggggcaaagcgttgatgttaatgctattgcacaaatgaacctttttctccccagtgattaca

SEQ ID NO: 575982 - DNA, 75 bp, synthetic construct
  source 1..75: mol_type = other DNA
aacagttgcggtttatactaagcctataaaaaagcttcgtgtttttggaatagctttttctaatgaacacattga

SEQ ID NO: 575983 - DNA, 75 bp, synthetic construct
  source 1..75: mol_type = other DNA
ggtggctctgatgcagtcctcgcagatcggtttgcataaatcgttgagggtcgggctgggttatgacgtcaaagt

SEQ ID NO: 575984 - DNA, 75 bp, synthetic construct
  source 1..75: mol_type = other DNA
tgataaacttgattatatagagggagctattaattcaaataatggtaatatagattacatttttcatccttttat

SEQ ID NO: 575985 - DNA, 75 bp, synthetic construct
  source 1..75: mol_type = other DNA
ttctgggctgaattatcctggcatttacgccaacgtactacctcaaagacgaaagccttatataacaaaagctga

SEQ ID NO: 575986 - DNA, 75 bp, synthetic construct
  source 1..75: mol_type = other DNA
tctaccaccaataatatggaattgtgtgctgacgcgaaaaaagtccaacggcaaatattacatgtgcctggcttc

SEQ ID NO: 575987 - DNA, 75 bp, synthetic construct
  source 1..75: mol_type = other DNA
tgggatggaaaaatacagtgtcaggtaaatgtaccggagacagcaatatctgaccagcagttattgcttccctgt

SEQ ID NO: 575988 - DNA, 75 bp, synthetic construct
  source 1..75: mol_type = other DNA
tcaacttgctggctttttcgacaagagttattggtatgtcacgttaaccggaaaatggaaaaaggcatgctaaaa

SEQ ID NO: 575989 - DNA, 75 bp, synthetic construct
  source 1..75: mol_type = other DNA
tcaattctgcaacagaaaatacgcctgtgccatataatcccccctcctacaccggggaagagaacttaaatcgca

SEQ ID NO: 575990 - DNA, 75 bp, synthetic construct
  source 1..75: mol_type = other DNA
tcagtaacggcttattggtcgggattttactggctgttcttatggataaccttattccgtgggaacgtatcgaat

SEQ ID NO: 575991 - DNA, 75 bp, synthetic construct
  source 1..75: mol_type = other DNA
atcagtgatgatcagaaatttgaccggcaggtcatgataccgccagtgttattccgcggtggtaagcatgagaat

SEQ ID NO: 575992 - DNA, 75 bp, synthetic construct
  source 1..75: mol_type = other DNA
cgtgcagaaggacacaaatgatgacctggctgcgctgtacatgctgaaggttcaaaaaacgaaagacggcattcc

SEQ ID NO: 575993 - DNA, 75 bp, synthetic construct
  source 1..75: mol_type = other DNA
ccggtattggagcggggattgaggatactgatggccagcccctgagcaacatactgctgctggctgaccgtattg

SEQ ID NO: 575994 - DNA, 75 bp, synthetic construct
  source 1..75: mol_type = other DNA
caacaacaccaatggtgatttcgatcagtcctttaacggcgataccgttaacgggacaatctcaacctattattt

SEQ ID NO: 575995 - DNA, 75 bp, synthetic construct
  source 1..75: mol_type = other DNA
ttactatagctgtactactgttggctgtgggatgtatggctggttatatatacggcggtatcccgtggtctacct

SEQ ID NO: 575996 - DNA, 75 bp, synthetic construct
  source 1..75: mol_type = other DNA
aagataaacctcttccgggaacctttaaaactacggggctgcacgaagcattgactgacctgagctggcaggact

SEQ ID NO: 575997 - DNA, 75 bp, synthetic construct
  source 1..75: mol_type = other DNA
caatggtacaataagtatcgacagtgggacagtggcactgaccggcaataactatgcattcagcggatatattga

SEQ ID NO: 575998 - DNA, 75 bp, synthetic construct
  source 1..75: mol_type = other DNA
atgacactatatgacatcaagcctcaatttcagactatgttacgcccgttagctcgatttatgtattcccaggga

SEQ ID NO: 575999 - DNA, 75 bp, synthetic construct
  source 1..75: mol_type = other DNA
atgacactatatgacatcaagcctcaatttcagactatgttacgtccgttagctcgatttatgtattccctagga

SEQ ID NO: 576000 - DNA, 75 bp, synthetic construct
  source 1..75: mol_type = other DNA
caggagcgaataactggacaccaacaaccagtatcagcgatctgctggttgtggtgatgaaaaaatccacagcag

SEQ ID NO: 576001 - DNA, 75 bp, synthetic construct
  source 1..75: mol_type = other DNA
tttgattccagtccactcgatgtaagcattgatgacctgtttattaccgccgaagaaatcgaaatccttaaggat

SEQ ID NO: 576002 - DNA, 75 bp, synthetic construct
  source 1..75: mol_type = other DNA
ctataaaataaacttgttggataaagatgacgatttctatgacaacaatggcatcgcaacagatgacgttgttgg

SEQ ID NO: 576003 - DNA, 75 bp, synthetic construct
  source 1..75: mol_type = other DNA
agcattgagcccaatcacatagctgagctcccagttcctcgtctgggagatgttgagaaagtagcacatgattta

SEQ ID NO: 576004 - DNA, 75 bp, synthetic construct
  source 1..75: mol_type = other DNA
ccgtgggaagtcaaagtagctaatgcagttagcggtttgactggggaactaaaagcaggtgagaccgaagcaacc

SEQ ID NO: 576005 - DNA, 75 bp, synthetic construct
  source 1..75: mol_type = other DNA
gtaataaaatcggtactatgacgaccgagctttttgctggcgcagtatattctttgagcgatgcagtcggtaatg

SEQ ID NO: 576006 - DNA, 75 bp, synthetic construct
  source 1..75: mol_type = other DNA
aagaaggttgctgataactatttaagtgatgcgatcttactgcccacagtatcaaaaaaaattaggattacagat

SEQ ID NO: 576007 - DNA, 75 bp, synthetic construct
  source 1..75: mol_type = other DNA
atgttaaagcagaggcattgaagcttggtatcgaagcgtatcattataagagtattaaaggaaaactcatacaac

SEQ ID NO: 576008 - DNA, 75 bp, synthetic construct
  source 1..75: mol_type = other DNA
tgtttatgatgaaattgggatgtatgattgtttgattaccgattattcaagtataatgtttgattttgcactgag

SEQ ID NO: 576009 - DNA, 75 bp, synthetic construct
  source 1..75: mol_type = other DNA
gaagaggcccgcaccgatcgcccttcccaacagttgcgcagcctgaatggcgaatggcgctttgcctggtttccc

SEQ ID NO: 576010 - DNA, 75 bp, synthetic construct
  source 1..75: mol_type = other DNA
ggttttgcggttcaacagatgatggttaatcattccatcgcagaaataacttctatgatcgaaaaactatgtgca

SEQ ID NO: 576011 - DNA, 75 bp, synthetic construct
  source 1..75: mol_type = other DNA
agcccgcaccgatcgcccttcccaacagttgcgcagcctgaatggcgaatggcgctttgcctggtttcccgcccc

SEQ ID NO: 576012 - DNA, 75 bp, synthetic construct
  source 1..75: mol_type = other DNA
atgaagaatatcgttaaaataccggttaaatttgtggctgtatgcgctcggatgctatcaataactttggcatgt

SEQ ID NO: 576013 - DNA, 75 bp, synthetic construct
  source 1..75: mol_type = other DNA
gtaaagataacaatatcaagtcattttatttaggtacgcccagtggtaattttaaagcaatagataaccacggga

SEQ ID NO: 576014 - DNA, 75 bp, synthetic construct
  source 1..75: mol_type = other DNA
atgattgctggtgagttgtatcgctcggcagatgagacgttatctcgcgatcgcctgcgcgctcgtcagcttatt

SEQ ID NO: 576015 - DNA, 75 bp, synthetic construct
  source 1..75: mol_type = other DNA
tcgcagtaggaagacttgttgaagcaaaagactatccgaacttattaaatgcaataaatcatttgattctttcaa

SEQ ID NO: 576016 - DNA, 75 bp, synthetic construct
  source 1..75: mol_type = other DNA
tggatctgacggccttcatccggcaaacctcaagcagtaataagattactcccggaagtttccaggccaaggcca

SEQ ID NO: 576017 - DNA, 75 bp, synthetic construct
  source 1..75: mol_type = other DNA
tccctgtacgcccgcgaaacggggggaaagtccaaatcataaatctgcaatcgctatactgcagtagagatcagt

SEQ ID NO: 576018 - DNA, 75 bp, synthetic construct
  source 1..75: mol_type = other DNA
gccagatttgtgtttaatgagttaagcgtcagcgaacccccgacggtcggggatagtgcgcagaatgcttacctt

SEQ ID NO: 576019 - DNA, 75 bp, synthetic construct
  source 1..75: mol_type = other DNA
aatgcctctcaggttggtgttccttcaattgctcggccttcaacacatttgaaaaatatatcattcctaaatccc

SEQ ID NO: 576020 - DNA, 75 bp, synthetic construct
  source 1..75: mol_type = other DNA
agaaaattaagaacggtgataagtcattagcgacagccaatgagcttatcaggctggaaaatgccgataagcgta

SEQ ID NO: 576021 - DNA, 75 bp, synthetic construct
  source 1..75: mol_type = other DNA
aggatagcggcatagtccagagtatgtcttgccggggaaattgtcttgataatgcagttatagagagctttttgg

SEQ ID NO: 576022 - DNA, 75 bp, synthetic construct
  source 1..75: mol_type = other DNA
gatacgttgggttatccaatgcactacttcttgcacgttatcataatgtgacggcatttgatattgatgccatta

SEQ ID NO: 576023 - DNA, 75 bp, synthetic construct
  source 1..75: mol_type = other DNA
tgctgctgctgacgtcgctttgtctccgccctgcactggcaaccgatctttcggtcaactttaccgcaacaatca

SEQ ID NO: 576024 - DNA, 75 bp, synthetic construct
  source 1..75: mol_type = other DNA
gccacgctgactgaaaaatttgtcagtgccgggctgagctatggggctaatggtgcggtacaaattggtacggga

SEQ ID NO: 576025 - DNA, 75 bp, synthetic construct
  source 1..75: mol_type = other DNA
aattgtccattgaaatatatttacaatgaaatcaggaggttgaacgtaatctttagttgtggaactggagatatc

SEQ ID NO: 576026 - DNA, 75 bp, synthetic construct
  source 1..75: mol_type = other DNA
ggcatttaacatttcactgtccggtgtctttcctgtaataaaaagcccgcaaaagagagtcagggcagataagtg

SEQ ID NO: 576027 - DNA, 75 bp, synthetic construct
  source 1..75: mol_type = other DNA
atcagagttgaaactgccaccggtgaactggccagaacgcagcgccgcagcctggcggatgcgcttcagcagtcc

SEQ ID NO: 576028 - DNA, 75 bp, synthetic construct
  source 1..75: mol_type = other DNA
gagaaacaaatggtgggcagttactgacgatggggaagaaccggcatcgaaagtaacccactggatgccgctacc

SEQ ID NO: 576029 - DNA, 75 bp, synthetic construct
  source 1..75: mol_type = other DNA
aaacttgctccaatggctacaccggttcgacgcttgaggaagataccttgaaaagtattaactttctcaagagaa

SEQ ID NO: 576030 - DNA, 75 bp, synthetic construct
  source 1..75: mol_type = other DNA
tttgtgagaaatcagggcagagctttacaggggtataccgccgaacctcccctggctggaacgcaatcgcgctcc

SEQ ID NO: 576031 - DNA, 75 bp, synthetic construct
  source 1..75: mol_type = other DNA
ataacgcattgctgccggatacccactcaaaagctgatgccgagtggatcaagcagcagttacttagcctgacac

SEQ ID NO: 576032 - DNA, 75 bp, synthetic construct
  source 1..75: mol_type = other DNA
ctatttgcgaagataaagagttcgctggtttaatatgtaagaataatagtggcagatatttctcaacagcaccta

SEQ ID NO: 576033 - DNA, 75 bp, synthetic construct
  source 1..75: mol_type = other DNA
tcatcccgttgccttctcaaatgctcggcgcgggttcgcatgctcaagcgcgctgctgcgatcatgagtttgatc

SEQ ID NO: 576034 - DNA, 75 bp, synthetic construct
  source 1..75: mol_type = other DNA
cactggtgccacgaatttctgtatcctggcagaaagttaaattagatgactatcgttatgatgatttaaacgtta

SEQ ID NO: 576035 - DNA, 75 bp, synthetic construct
  source 1..75: mol_type = other DNA
taatttttgtcgaaggtgaaacagaaaactctctttttctgaagatgaaacaacagagagttattgatgccaaat

SEQ ID NO: 576036 - DNA, 75 bp, synthetic construct
  source 1..75: mol_type = other DNA
cggcctgccgctggcgctcatcagcacggaaggggcaacagcgtggtgcgcagaatatgatgaatggggcaacct

SEQ ID NO: 576037 - DNA, 75 bp, synthetic construct
  source 1..75: mol_type = other DNA
cagttccgccaccctgttcatccgggtctggtgacggttccgcaccctaaaaaagatattaagcccggtacgctg

SEQ ID NO: 576038 - DNA, 75 bp, synthetic construct
  source 1..75: mol_type = other DNA
tccagaaaatttcgatacaaagcgttatgctggcgctttgtcgaaagtaatgcagttttggtatgcaaacttaca

SEQ ID NO: 576039 - DNA, 75 bp, synthetic construct
  source 1..75: mol_type = other DNA
acagatgtagagttggatggcgataatagccgctttgtggggcaattcaacattgatacaggcagcgcgctcagc

SEQ ID NO: 576040 - DNA, 75 bp, synthetic construct
  source 1..75: mol_type = other DNA
aggtgtttttgagcctgctgtaggaacgctaaacattggtgctgctcacggtgaggcggcggcagatgccggatt

SEQ ID NO: 576041 - DNA, 75 bp, synthetic construct
  source 1..75: mol_type = other DNA
gtcgccgagggtgattatggattccgcctcacgaccgcaccaggtgatggtttgtacgttaactatgggctgaaa

SEQ ID NO: 576042 - DNA, 75 bp, synthetic construct
  source 1..75: mol_type = other DNA
gcttatatcagtacacatctgttgatgattgcactcgctacagagtcctgaggctctactctcgtcgcacggcgg

SEQ ID NO: 576043 - DNA, 75 bp, synthetic construct
  source 1..75: mol_type = other DNA
tagttagagatagtcttttcacgattggttgtcctccatcaattattacagatttagacagccattcagcgatta

SEQ ID NO: 576044 - DNA, 75 bp, synthetic construct
  source 1..75: mol_type = other DNA
aaatactattaaatctatttgtgaagatcttcaaaaagaaggcgatataactaatataaattacaccgagaatgg

SEQ ID NO: 576045 - DNA, 75 bp, synthetic construct
  source 1..75: mol_type = other DNA
atgataaggcaatgtttgacgcattgaatcaaactaaagtcactcatgaagatatgaaaagtctcttttttaaaa

SEQ ID NO: 576046 - DNA, 75 bp, synthetic construct
  source 1..75: mol_type = other DNA
gagccgcctaaaccaaaggttgaagcaccacctgcgccgaagccagaaccgaagccggtcgtggaagaaaaagct

SEQ ID NO: 576047 - DNA, 75 bp, synthetic construct
  source 1..75: mol_type = other DNA
ctttcgaccagacagaaatcaagttcatcggcgacggcagtaagggaacatttgaagggtatgcctcggttttta

SEQ ID NO: 576048 - DNA, 75 bp, synthetic construct
  source 1..75: mol_type = other DNA
tctttatcgagacatatggttttattaattctattttattcagctattggaatattgtgggtattatatggtgca

SEQ ID NO: 576049 - DNA, 75 bp, synthetic construct
  source 1..75: mol_type = other DNA
cattagtaagtttaagtaaaaaactgctaatgaaatatcgtaaacaaaggaagggaaccggaaagattgggttag

SEQ ID NO: 576050 - DNA, 75 bp, synthetic construct
  source 1..75: mol_type = other DNA
ctggcggatgtcatggcgaccgcactgcagccaaatcagatggctaaactgccggataatccagacatgcctagg

SEQ ID NO: 576051 - DNA, 75 bp, synthetic construct
  source 1..75: mol_type = other DNA
agtacgtgaactgggcgacgacacgctcagaaagctggcgattgaggtcacgcggcaactgcgtaaatccaccac

SEQ ID NO: 576052 - DNA, 75 bp, synthetic construct
  source 1..75: mol_type = other DNA
tggaaaaactgctcaatgacgggattcatgcacgttccggtaataacgtagtacagcagaagaaatattctgacc

SEQ ID NO: 576053 - DNA, 75 bp, synthetic construct
  source 1..75: mol_type = other DNA
cgcgaccggcgttgaagatgtgtttgctttggctggattggataagccgaacataggtttgctgtcggatgagtt

SEQ ID NO: 576054 - DNA, 75 bp, synthetic construct
  source 1..75: mol_type = other DNA
atggttatgaggccttcatcgggttatgcgaataatctggttcggggagcagttgctgtaaacacagaacctgat

SEQ ID NO: 576055 - DNA, 75 bp, synthetic construct
  source 1..75: mol_type = other DNA
tataaccaccacagccagttaacgtcagccaccgggcctgacgggctggaaatacgccgggaatacgatgaatgg

SEQ ID NO: 576056 - DNA, 75 bp, synthetic construct
  source 1..75: mol_type = other DNA
aaatgtgcatttgaaaaatgaaaataaaaaacccatacgattcttttatctactaaaggatgatatttttatttc

SEQ ID NO: 576057 - DNA, 75 bp, synthetic construct
  source 1..75: mol_type = other DNA
ttaatactgacccagctggttatggcgggtctggcagactatcagttcggttgttacagacgccttccgcagtga

SEQ ID NO: 576058 - DNA, 75 bp, synthetic construct
  source 1..75: mol_type = other DNA
aatatgccttcgagggattttttactttgacaaaatattcttgaaagatattgttaatttaaatattgttggtgt

SEQ ID NO: 576059 - DNA, 75 bp, synthetic construct
  source 1..75: mol_type = other DNA
cagcggaacggtgatatttttaaataaattactgaaccaactgccagaagagcagttggctgtgattcgtggaaa

SEQ ID NO: 576060 - DNA, 75 bp, synthetic construct
  source 1..75: mol_type = other DNA
ccttcttgcgtgatgccgtgaactacattctgggactggatgacggtaaaaaacgttacctcgatgtctcgctgg

SEQ ID NO: 576061 - DNA, 75 bp, synthetic construct
  source 1..75: mol_type = other DNA
tggccgccggtgaaaaaattaattattcggcgcaggacaatgacattttaacggccatcggattcaggcctgacg

SEQ ID NO: 576062 - DNA, 75 bp, synthetic construct
  source 1..75: mol_type = other DNA
gatttgcgcgacaatatcgacgtgaaaaaatgggagattaatcaggccgccggtcgttatatccgctcacatgag

SEQ ID NO: 576063 - DNA, 75 bp, synthetic construct
  source 1..75: mol_type = other DNA
gggcggaagaactgactcttcgcggggaccgacagtgctggcgaacatgcggcggtgctgtactcgctgatcggc

SEQ ID NO: 576064 - DNA, 75 bp, synthetic construct
  source 1..75: mol_type = other DNA
tggaggccgtaccggtaaaagcgaatgacgcagtgttaagcgatacgaatttttcggcttacgcaacattacggg

SEQ ID NO: 576065 - DNA, 75 bp, synthetic construct
  source 1..75: mol_type = other DNA
atgaaaaaacgcttgttacttttactctgcacctgcggtggcgttgcgctggcggctgacgatgacatcaccttc

SEQ ID NO: 576066 - DNA, 75 bp, synthetic construct
  source 1..75: mol_type = other DNA
gcacaatatgagcgtacaagtaccgatcctgtaacaaaaggctccgtggagtcaaccgtgacgattaaaatcagt

SEQ ID NO: 576067 - DNA, 75 bp, synthetic construct
  source 1..75: mol_type = other DNA
tgatgctgcaatcgaaactgatgtaacaggattagggattaaacttcggcaaaatggtcagccatttagagtaaa

SEQ ID NO: 576068 - DNA, 75 bp, synthetic construct
  source 1..75: mol_type = other DNA
ggtaagtgacaacgttgatctgatcacctccatccataccgattttatccacgatatcggcgaagcggttttcgc

SEQ ID NO: 576069 - DNA, 75 bp, synthetic construct
  source 1..75: mol_type = other DNA
cctgtgataacagccgttcccgtaaaaaagagtggtgtcgatttaccagaggcggactttgaggcgtgggctacg

SEQ ID NO: 576070 - DNA, 75 bp, synthetic construct
  source 1..75: mol_type = other DNA
gttaacgtttaagtgcaaagaggatttttctcctgataatgtgattcagcaggtagattgtcttaaaaaattatc

SEQ ID NO: 576071 - DNA, 75 bp, synthetic construct
  source 1..75: mol_type = other DNA
agagaacgaaaatttattagcatagacaaagagaattttgatgaagttatggcatcaatgaatccgaaggctcat

SEQ ID NO: 576072 - DNA, 75 bp, synthetic construct
  source 1..75: mol_type = other DNA
gaacaagagaaaacaaaagtaaaaatagattttaggaatgcattaaagaaattaaagacagctctattatttatg

SEQ ID NO: 576073 - DNA, 75 bp, synthetic construct
  source 1..75: mol_type = other DNA
tggacaatattttcttaatttaaatgcacaatatgagcgtacaagtaccgatcctgtaacaaaaggctccgtgga

SEQ ID NO: 576074 - DNA, 75 bp, synthetic construct
  source 1..75: mol_type = other DNA
tttgcggttggtgcggtcttgccctggcagccgacgacgacattacctttcatggcacgctggtatcgccacccg

SEQ ID NO: 576075 - DNA, 75 bp, synthetic construct
  source 1..75: mol_type = other DNA
atgaaacgactcgcacttttgctgatttgtggtgtatgcaggggcgttcaggcttcaccggatatcacctttcac

SEQ ID NO: 576076 - DNA, 75 bp, synthetic construct
  source 1..75: mol_type = other DNA
ccagacggttcaggctgtacgcttacgtaacaacacataaaattactaaaacggtcactattgagtgtgaaaacc

SEQ ID NO: 576077 - DNA, 75 bp, synthetic construct
  source 1..75: mol_type = other DNA
tggaacaaaaactattagcacagaaagaagctgaacggctggcgctggaaaacaaggaattagcgccaaaagcgg

SEQ ID NO: 576078 - DNA, 75 bp, synthetic construct
  source 1..75: mol_type = other DNA
ttcaagtgactcccggatgttcctgaataaacagaatattcttaatgtagcgatcagtcgcgcacgcgataactt

SEQ ID NO: 576079 - DNA, 75 bp, synthetic construct
  source 1..75: mol_type = other DNA
tcgctggcaggaacttgaaaaacgggtacagcaaaactctcctgcaattcctcaaacattaagcgaagcgttgcg

SEQ ID NO: 576080 - DNA, 75 bp, synthetic construct
  source 1..75: mol_type = other DNA
cggacagtcacgcgaagctgccgatttgttgctgcaacgctaccccttccagggagatacaaccgtcagtcatac

SEQ ID NO: 576081 - DNA, 75 bp, synthetic construct
  source 1..75: mol_type = other DNA
ttcaaacaaaagatgctattctcgtgtccaaaaaaactgaggttcaggatgtgaaaaaaatagtagaaatgctta

SEQ ID NO: 576082 - DNA, 75 bp, synthetic construct
  source 1..75: mol_type = other DNA
atgcttttcccgaaagcggcaacgtgcgtatgcggcaggtagtccagtttctggcgatgagtgaatcgtcggttt

SEQ ID NO: 576083 - DNA, 75 bp, synthetic construct
  source 1..75: mol_type = other DNA
gcttacccgcgtggccatccacggatcgttcaaagagaacccgtacctagacccgcagtacatcgcgaccctgat

SEQ ID NO: 576084 - DNA, 75 bp, synthetic construct
  source 1..75: mol_type = other DNA
gggtgaagaagcgcttcattgagccagcgccgcgcggaaccgtacagcgcgaccggcaaatggtattcaaccctc

SEQ ID NO: 576085 - DNA, 75 bp, synthetic construct
  source 1..75: mol_type = other DNA
caacgatgcggccatcgagacagacgtgccgggcttcggaattgagcttcagcacgacggtcagcgttttaagct

SEQ ID NO: 576086 - DNA, 75 bp, synthetic construct
  source 1..75: mol_type = other DNA
acaaacgtcgccaagggtgtggcctggattgataagcggctgatgggcgaagagctgcctgaacctgaagagata

SEQ ID NO: 576087 - DNA, 75 bp, synthetic construct
  source 1..75: mol_type = other DNA
tgaactgcgctgggtgtggccgactggagaggagctgctgttccgcttcgggaaagaagagggtgactactggga

SEQ ID NO: 576088 - DNA, 75 bp, synthetic construct
  source 1..75: mol_type = other DNA
ccttgccgggatcgcaatcgctctccctgagctgtccatgtaacgaaattctctacgagggcacgcgcgggccgg

SEQ ID NO: 576089 - DNA, 75 bp, synthetic construct
  source 1..75: mol_type = other DNA
atggaacaaattgataatgcagtcgatgtcacggcaggtgaagtaaccgctaacgcaacctacgtgctggattat

SEQ ID NO: 576090 - DNA, 75 bp, synthetic construct
  source 1..75: mol_type = other DNA
accacgcttcaactgaccggccagaaccggttgagtcagcgaatttttcccggttttccgcccttttagttggcc

SEQ ID NO: 576091 - DNA, 75 bp, synthetic construct
  source 1..75: mol_type = other DNA
ccagtctgcgtggcaagttactgttcaacccggccggccttcgcgacctcactactaaactgaccgttaaccact

SEQ ID NO: 576092 - DNA, 75 bp, synthetic construct
  source 1..75: mol_type = other DNA
ggggagatagcacaaaacacatacctttcacgcgaacgctgtcagttaatactgacccagctggttatggcgggg

SEQ ID NO: 576093 - DNA, 75 bp, synthetic construct
  source 1..75: mol_type = other DNA
ttaaaaaataagatcaacactcaggcaactgtcgctgctgtaaactctttgtccagaaaacctattgaattcttt

SEQ ID NO: 576094 - DNA, 75 bp, synthetic construct
  source 1..75: mol_type = other DNA
gtgaaaagagtcacggcagagaagaaatccgtcttcatattgtttgcgatgtccctgatgaacttattgatttca

SEQ ID NO: 576095 - DNA, 75 bp, synthetic construct
  source 1..75: mol_type = other DNA
ctctctaaaatttatggaatcgctgttaaatataacctcagcaaaattaacatcatagatttattaaaaggcgca

SEQ ID NO: 576096 - DNA, 75 bp, synthetic construct
  source 1..75: mol_type = other DNA
atggcgatttgggcgatttcactggtcgggatcggtccaatctttgactacattccgagcggtattcagaaagca

SEQ ID NO: 576097 - DNA, 75 bp, synthetic construct
  source 1..75: mol_type = other DNA
ctataaaaacggcgtactgattgccagtattatcagcctgctgatctgcccgtggaaattaatggaaaatcagga

SEQ ID NO: 576098 - DNA, 75 bp, synthetic construct
  source 1..75: mol_type = other DNA
ggaacgtgctggatattgttcagcgttgggacagcctgtttgcctcgttctttgcggtactggttattctgatga

SEQ ID NO: 576099 - DNA, 75 bp, synthetic construct
  source 1..75: mol_type = other DNA
aaacaaaccggatacggtcagccagcgggatgccagtacgacgcagaaaggtgtggtgcagttaagcagtgatac

SEQ ID NO: 576100 - DNA, 75 bp, synthetic construct
  source 1..75: mol_type = other DNA
acctttcacgcgaacgttgccagttaatactgacccagcttgttatggcgggcctggctgattatcagttcggtt

SEQ ID NO: 576101 - DNA, 75 bp, synthetic construct
  source 1..75: mol_type = other DNA
gtcggggagattgcgcagaatacttacctttcacgcgagcgctgccagttaatactgacccagcttgttatggcg

SEQ ID NO: 576102 - DNA, 75 bp, synthetic construct
  source 1..75: mol_type = other DNA
gtcagtccagagtccaagcctgaagtcgtcacggaggtacagcctgaggttcagaaagaaacggactcgcaggcg

SEQ ID NO: 576103 - DNA, 75 bp, synthetic construct
  source 1..75: mol_type = other DNA
ctgttggtgatgcgggtaaagagcgtcagattgttaacgtgggggcgggtgctgtatctgagaaaagtacagatg

SEQ ID NO: 576104 - DNA, 75 bp, synthetic construct
  source 1..75: mol_type = other DNA
gagtggatgaagggtaatcgtgtttcacacatcactcgcacggcttccggtgctaatgctggcggcggaaacctc

SEQ ID NO: 576105 - DNA, 75 bp, synthetic construct
  source 1..75: mol_type = other DNA
accggcgttcacaccaccgcagcgaaccttgatatccgcatcccgtatgccacagacccggcaggtaaccgcctg

SEQ ID NO: 576106 - DNA, 75 bp, synthetic construct
  source 1..75: mol_type = other DNA
catccactgcattgacagcaagcagcacgactgtcctcccgccggtaacatacagcttgacactggatgtgaata

SEQ ID NO: 576107 - DNA, 75 bp, synthetic construct
  source 1..75: mol_type = other DNA
cccgggagcgggaacggacgctcaccatccactgcattgacagcaagcagcacgactgtcctcccgccggtaaca

SEQ ID NO: 576108 - DNA, 75 bp, synthetic construct
  source 1..75: mol_type = other DNA
tcaggtataagtgacttcaaaatacatagctacattattaaaacaagtgaatatcctgaagagtttttttccaat

SEQ ID NO: 576109 - DNA, 75 bp, synthetic construct
  source 1..75: mol_type = other DNA
caggctcacaggcacttatagcaactcattcggcgtattttgtccgtgaagtatcaaatgaacaggtagctgttc

SEQ ID NO: 576110 - DNA, 75 bp, synthetic construct
  source 1..75: mol_type = other DNA
tgcggaacaccggatggtggaagtgacgacagcgcgggagacataccggtatgtgtacgatgcgctggggaggcg

SEQ ID NO: 576111 - DNA, 75 bp, synthetic construct
  source 1..75: mol_type = other DNA
caagaaaatcaaggaaaagacgggagggggaggcttcggaaaaggctggctcgatgaaatcaaggcaaagctgtc

SEQ ID NO: 576112 - DNA, 75 bp, synthetic construct
  source 1..75: mol_type = other DNA
cgccttatgggcgctggacgctggatgtctggtcacaaaatgcctcacgtaatcaacggatgcataccacggaaa

SEQ ID NO: 576113 - DNA, 75 bp, synthetic construct
  source 1..75: mol_type = other DNA
tccctcaggtggcactgcgtccgcagctgagggggattgcgccggaggcgttatgggatgatggcattccggctt

SEQ ID NO: 576114 - DNA, 75 bp, synthetic construct
  source 1..75: mol_type = other DNA
ctgatatccctgatttcgatctctattccagtaataccgtccggaccattcagtcggcgacctggttttcagcgg

SEQ ID NO: 576115 - DNA, 75 bp, synthetic construct
  source 1..75: mol_type = other DNA
tgggcgatttcgctcgtcgggattggtcccatctttgactacatcccgagcggtattcagaaagcagaaaacagt

SEQ ID NO: 576116 - DNA, 75 bp, synthetic construct
  source 1..75: mol_type = other DNA
gacctgcgccagtatctggccaaccaatatcaagctgaggggatcacagaaggggagatttctcacatcctccgt

SEQ ID NO: 576117 - DNA, 75 bp, synthetic construct
  source 1..75: mol_type = other DNA
ttttttgtctttttatatcgatgagctctttggctgaggatataaccaacattaattttggtgatatatctccaa

SEQ ID NO: 576118 - DNA, 75 bp, synthetic construct
  source 1..75: mol_type = other DNA
ttgctgaaacactggttgtcaaatcaggcggtagtggagggtttgctatatgggatattggcacaactactagcg

SEQ ID NO: 576119 - DNA, 75 bp, synthetic construct
  source 1..75: mol_type = other DNA
gactttcaactggtccgggatgtggacttttggcgcggtgatgattgccattatcgccgtgctgttcatgatttt

SEQ ID NO: 576120 - DNA, 75 bp, synthetic construct
  source 1..75: mol_type = other DNA
aaaagcaatccagcggtatatacctcaggcgcaagatggggaagactttaggaatcatttacaatataagttgac

SEQ ID NO: 576121 - DNA, 75 bp, synthetic construct
  source 1..75: mol_type = other DNA
tacaggggcaactggacgtcaaggttgaagaagaggacgggcaagtcacgcaatggcaagttgcatctaatagta

SEQ ID NO: 576122 - DNA, 75 bp, synthetic construct
  source 1..75: mol_type = other DNA
attattcacccgagctgaccggtatcggcaaatacaccggcgaaatggtcgagtggatggcgagccaggggcatg

SEQ ID NO: 576123 - DNA, 75 bp, synthetic construct
  source 1..75: mol_type = other DNA
gaggaacaaaaagttattctttactcaggcaatataggtgaaaagcaggggcttgaaatcgttatcagtgctgca

SEQ ID NO: 576124 - DNA, 75 bp, synthetic construct
  source 1..75: mol_type = other DNA
tcattcacatacaggatttcgaggtcgacgctatgctcggcttgggtatggctaaaaaaggtgtgtttgctacat

SEQ ID NO: 576125 - DNA, 75 bp, synthetic construct
  source 1..75: mol_type = other DNA
tgctgcatattcaggattatgaagtcgacgccatgctggggttgggcatggcaggcaacggtcgcgccggcaagg

SEQ ID NO: 576126 - DNA, 75 bp, synthetic construct
  source 1..75: mol_type = other DNA
gaccgagctgggccagctatgtctggacaatccgggcattgcggtgtgcgtgacgcctgaatcggttccgtcgct

SEQ ID NO: 576127 - DNA, 75 bp, synthetic construct
  source 1..75: mol_type = other DNA
cagcagcttcttcccgctgctggcccagcgtcgctggaagccggatcgcatcatcggtgtggtgccgacactctt

SEQ ID NO: 576128 - DNA, 75 bp, synthetic construct
  source 1..75: mol_type = other DNA
tttccgcgaatccgacaacgaaattacggctatcaaggtcgatgatcgcgatattgcgttgacacaaggggaagt

SEQ ID NO: 576129 - DNA, 75 bp, synthetic construct
  source 1..75: mol_type = other DNA
acattcgtaccgcccgggccagcggcttgcccggctggtatatcgttttatgttatgcgctacccaatgcgttga

SEQ ID NO: 576130 - DNA, 75 bp, synthetic construct
  source 1..75: mol_type = other DNA
atcgaattttaattagttttgatgtggtgattgcaggcaaagaaaatcccgccggagaaagcgggaaagagagac

SEQ ID NO: 576131 - DNA, 75 bp, synthetic construct
  source 1..75: mol_type = other DNA
aaaagaataactataagaaatcgctcatttatccggtgttacaggcggatgaaacgccactacagatacagggca

SEQ ID NO: 576132 - DNA, 75 bp, synthetic construct
  source 1..75: mol_type = other DNA
tcgtcgcctttgcggcctacgctttattaaagaaacgcacagcagtagaaaaaacaggagagcaaaaagtcacag

SEQ ID NO: 576133 - DNA, 75 bp, synthetic construct
  source 1..75: mol_type = other DNA
gtaattggtgtcatgatggcgcattattttgtggtgatgcgcggacaaattaatcttgatgaactgtataccgca

SEQ ID NO: 576134 - DNA, 75 bp, synthetic construct
  source 1..75: mol_type = other DNA
ttaaagagaggattttgctgaataagaaaaaatatcaatgggaatattcatctactatacttaaagagatttttg

SEQ ID NO: 576135 - DNA, 75 bp, synthetic construct
  source 1..75: mol_type = other DNA
cttcagaagatcgccgctaatgcaaaaaatactcaagtcaattatcctactggtctctacgtcccctactccacc

SEQ ID NO: 576136 - DNA, 75 bp, synthetic construct
  source 1..75: mol_type = other DNA
cattttactgctcgatgaacccacgcgcggcgtggacgtcggcgcaaaaagcgagatctaccggatcatgaacga

SEQ ID NO: 576137 - DNA, 75 bp, synthetic construct
  source 1..75: mol_type = other DNA
gcggaatgattgaagtggatggcgaaccggtggtgatccactccccgcgcgaagccatcgatcttggcattggtt

SEQ ID NO: 576138 - DNA, 75 bp, synthetic construct
  source 1..75: mol_type = other DNA
atggttgacggggataccggtaatgcggggctggtttttcttcacctgttgcagtcggaagaaacccttacgctg

SEQ ID NO: 576139 - DNA, 75 bp, synthetic construct
  source 1..75: mol_type = other DNA
cttaaaaagatagccgcaaatgcaaaaaatactcaagtcaattatcctactgatttctacctccccaattccaac

SEQ ID NO: 576140 - DNA, 75 bp, synthetic construct
  source 1..75: mol_type = other DNA
atggccgaaagcagtccagttattccccataaatactggcggacactggatattagtttcgctacagaaaatagt

SEQ ID NO: 576141 - DNA, 75 bp, synthetic construct
  source 1..75: mol_type = other DNA
aacactgtattagttctgattcagaaataacggggaaaaagacagtcggtgaaaattcgtattcgtggctgggga

SEQ ID NO: 576142 - DNA, 75 bp, synthetic construct
  source 1..75: mol_type = other DNA
ataaaagttgtggccgggacgtcctggtgtacaaaaactgtagcgtgattgaaggagaagatgcctggcaggttc

SEQ ID NO: 576143 - DNA, 75 bp, synthetic construct
  source 1..75: mol_type = other DNA
aagagttactgactggataccagatccccaaaagtaactatattgttacacaacccgggagatcggctgttaccg

SEQ ID NO: 576144 - DNA, 75 bp, synthetic construct
  source 1..75: mol_type = other DNA
gagctgaagtccagagggtttgatggtagcgagaaagaggtcgatttactccttcgcggcggcagtatttcgtca

SEQ ID NO: 576145 - DNA, 75 bp, synthetic construct
  source 1..75: mol_type = other DNA
ccatcagcgacagcagctcgtgtatgagctgaagtccagagggtttgatggtagcgagaaagaggtcgatttact

SEQ ID NO: 576146 - DNA, 75 bp, synthetic construct
  source 1..75: mol_type = other DNA
acctttcacgcgaacgttgccagttaatactgacccagctggttatggcgggtctggcagactatcagttcggtt

SEQ ID NO: 576147 - DNA, 75 bp, synthetic construct
  source 1..75: mol_type = other DNA
agcaatgacagttcatggtccggaggaggcattattgtcaattatggtacaactgtaaaatggggtataaacggg

SEQ ID NO: 576148 - DNA, 75 bp, synthetic construct
  source 1..75: mol_type = other DNA
tccaataaatcagattataaaagtaagcgactcgtcagaaccgtattgatatttactgagagctcagatcaactt

SEQ ID NO: 576149 - DNA, 75 bp, synthetic construct
  source 1..75: mol_type = other DNA
gaagaaatcaaatcaaaagtagagttcaacaccgagctgtacaaactgaccctgacctccattgaaaagacccgt

SEQ ID NO: 576150 - DNA, 75 bp, synthetic construct
  source 1..75: mol_type = other DNA
tctgattggtacaaatatggggttaagggctcgtttgcttcgcctcaaaaagattattcaaggacaatatcgctc

SEQ ID NO: 576151 - DNA, 75 bp, synthetic construct
  source 1..75: mol_type = other DNA
cgggtattgagccgcgagcagttgctggcgttcacccacagcgacagcgtggaggtgtttgatcgcaccatcgac

SEQ ID NO: 576152 - DNA, 75 bp, synthetic construct
  source 1..75: mol_type = other DNA
gtggtgctggatatgatgttgcctgataccaacggcctgatggtattacaacaactacagaaaatgcgtcctgca

SEQ ID NO: 576153 - DNA, 75 bp, synthetic construct
  source 1..75: mol_type = other DNA
atggatgacaaggagttgcacgattacctgcatagtatgagcaaaaaagagcgccaggaactggcagcaagatta

SEQ ID NO: 576154 - DNA, 75 bp, synthetic construct
  source 1..75: mol_type = other DNA
aacagcgattttttccgaaaagcctctgatcgaatagagtcgatagagtatacgttggaaaccttgcgtgtaatg

SEQ ID NO: 576155 - DNA, 75 bp, synthetic construct
  source 1..75: mol_type = other DNA
tttgtttatgttccgtatgatgcaaaagcaggtcaagttagtggtgttgtaacttttcttttacattatccggca

SEQ ID NO: 576156 - DNA, 75 bp, synthetic construct
  source 1..75: mol_type = other DNA
gttaaagccgggtagcgaactgatgtctctgtttcaacaggggcgtgtgctggtggagcctcagccaaaaagcat

SEQ ID NO: 576157 - DNA, 75 bp, synthetic construct
  source 1..75: mol_type = other DNA
gccagcgcaatggactccgactcccaccgcaaagaggccgcgcgtcgccgggtcgccagacgccagaggcgatct

SEQ ID NO: 576158 - DNA, 75 bp, synthetic construct
  source 1..75: mol_type = other DNA
gttaccgataagaacggtacgcgcaatgttatccgtacgccggcaaataacaagttgcggatggaggacaaacgc

SEQ ID NO: 576159 - DNA, 75 bp, synthetic construct
  source 1..75: mol_type = other DNA
acattctgctcaaggctacaaatgtagatcaaacaggtcctgcatctttaaatacgcctccggtttcatttcctg

SEQ ID NO: 576160 - DNA, 75 bp, synthetic construct
  source 1..75: mol_type = other DNA
tgggtgaaaaaaatattcgggtaaatggcattgcgccgggggcaatattaaccgatgccctgaaatccgttatta

SEQ ID NO: 576161 - DNA, 75 bp, synthetic construct
  source 1..75: mol_type = other DNA
aacatcgtattatggccgctgcatttcgggagctactttctgaaatagaagagctaaggacaattattgactttg

SEQ ID NO: 576162 - DNA, 75 bp, synthetic construct
  source 1..75: mol_type = other DNA
cgtccagaacttactaaatggctaaaacagtctctggatgaaaaaatgccaatgcacgaaactttgaaagagctt

SEQ ID NO: 576163 - DNA, 75 bp, synthetic construct
  source 1..75: mol_type = other DNA
aggtatgagtgggacaggcgctcccccttagcaatttggttgccactaaagaaaaatgaaaagaaaaaaataaat

SEQ ID NO: 576164 - DNA, 75 bp, synthetic construct
  source 1..75: mol_type = other DNA
aagatgaatcagaccccctgggtgatgaaattcgctcaatccttgatggccatatctatctaagtcgcaaactcg

SEQ ID NO: 576165 - DNA, 75 bp, synthetic construct
  source 1..75: mol_type = other DNA
agatgttctaaaaagtgtgagtcgagtatttggtcaggtcactgatgaaaaacacagagataatgctgcacgggt

SEQ ID NO: 576166 - DNA, 75 bp, synthetic construct
  source 1..75: mol_type = other DNA
gctgacgtatctgcgtgaggacgccccgcaagttgtgagtgcgcgtaatgcgattcagtcattgcaggcacaaat

SEQ ID NO: 576167 - DNA, 75 bp, synthetic construct
  source 1..75: mol_type = other DNA
ttttaacatggtcattagtcaggatacggtttctacgaataggcagggtatagctgaggtcaccatgacgcctgg

SEQ ID NO: 576168 - DNA, 75 bp, synthetic construct
  source 1..75: mol_type = other DNA
agatgttaattctgcgacgattaccagtctggagataccggaagtgatcttacccagcaatagtggacacgcggc

SEQ ID NO: 576169 - DNA, 75 bp, synthetic construct
  source 1..75: mol_type = other DNA
gctgagcgatggcggtaaagcggttactgatgctgaaggcaaagcgaaagtcacgctgaaaggtacaaaagcagg

SEQ ID NO: 576170 - DNA, 75 bp, synthetic construct
  source 1..75: mol_type = other DNA
attaccagtctggagatacctgaaggtcagctaatggtcgcacaagacgtagcagttaaagctcacgtcaacgac

SEQ ID NO: 576171 - DNA, 75 bp, synthetic construct
  source 1..75: mol_type = other DNA
tgacattcacgctaccggcagatgtgagcgcaagcttcactctcggacaaggcggttccgccattactgatatca

SEQ ID NO: 576172 - DNA, 75 bp, synthetic construct
  source 1..75: mol_type = other DNA
ttttgatacagtctccgcaggcgagacaaccagtctgtatattgaggtgaaggataattacggcaacggtgtccc

SEQ ID NO: 576173 - DNA, 75 bp, synthetic construct
  source 1..75: mol_type = other DNA
atgtctcagttagacagcggcaccttcaagcaggtcaaagacctggtcctttccggttatcacctgaatgatatt

SEQ ID NO: 576174 - DNA, 75 bp, synthetic construct
  source 1..75: mol_type = other DNA
tgaacgccgctttagcttgcgtaacagcttgctgaccagcgatgaaccctgctttgttctgcgcatcgtccaact

SEQ ID NO: 576175 - DNA, 75 bp, synthetic construct
  source 1..75: mol_type = other DNA
aaaatctggatcatattatttccgctaaggaaggtgcgaataagcaggtcatttcttcccaagctgactcgctga

SEQ ID NO: 576176 - DNA, 75 bp, synthetic construct
  source 1..75: mol_type = other DNA
tcggaagcagctcatgaagacgaagattttggcggcagaaagtccctgatgcagagcgttgaagccagcagtaaa

SEQ ID NO: 576177 - DNA, 75 bp, synthetic construct
  source 1..75: mol_type = other DNA
atgaacgcataccgcgcatacgacgctatcgaagaacggaaatgggctgagcagtcgctcaccgaagagaagcaa

SEQ ID NO: 576178 - DNA, 75 bp, synthetic construct
  source 1..75: mol_type = other DNA
acgttattctaaaggttatgccagcgccagcgagccagctcgttgcttcattgacgctgacaacatgaccgcccg

SEQ ID NO: 576179 - DNA, 75 bp, synthetic construct
  source 1..75: mol_type = other DNA
catagtcgttcccgaggcatcgggtcactgtacagtgaatggggagatatggggcattacacgactgacgctggt

SEQ ID NO: 576180 - DNA, 75 bp, synthetic construct
  source 1..75: mol_type = other DNA
ctataacgactatgtcacacgcatctgttacgaccgcgccgaagaagagtgggatcgccttcatccaacctgccc

SEQ ID NO: 576181 - DNA, 75 bp, synthetic construct
  source 1..75: mol_type = other DNA
agtaaaaaaatgagcggtacagtgtcagtcaatggtgttgacctaccgacagactcattcccttctcagggattc

SEQ ID NO: 576182 - DNA, 75 bp, synthetic construct
  source 1..75: mol_type = other DNA
cttaacgttaccgaggacaattttatcgctaataacgtcgggatgaccaggctgcaggcaacagtgactgatgga

SEQ ID NO: 576183 - DNA, 75 bp, synthetic construct
  source 1..75: mol_type = other DNA
cgccgcgcatggctgcgtttataaactgccccgtgctttcaccttcttctttcacgttctccatgccttcaataa

SEQ ID NO: 576184 - DNA, 75 bp, synthetic construct
  source 1..75: mol_type = other DNA
cgccccggaaacggaataatccgtttcatggttccgtcttgtgcactcatcctggcggtcggtttttgccggatt

SEQ ID NO: 576185 - DNA, 75 bp, synthetic construct
  source 1..75: mol_type = other DNA
atgcagtcctcgcagatcggtttgcataaatcgttgagggtcgggctgggttatgacgtcaaagtcggaaataac

SEQ ID NO: 576186 - DNA, 75 bp, synthetic construct
  source 1..75: mol_type = other DNA
gagtctggcatcgcgcaggccactctcgcaggcgttgcctttggtgagcagacggtcactgcatcactggctaat

SEQ ID NO: 576187 - DNA, 75 bp, synthetic construct
  source 1..75: mol_type = other DNA
tccctgctcaacaggtggtgacgaataacagtgacagcgtgcagctgacggcgacggtgaaagatccgtcgaatc

SEQ ID NO: 576188 - DNA, 75 bp, synthetic construct
  source 1..75: mol_type = other DNA
gaaggataattacggcaacggtgtcccccagcatcaggtaaccctcagcgtttcaccaagtgaaggcgtgacccc

SEQ ID NO: 576189 - DNA, 75 bp, synthetic construct
  source 1..75: mol_type = other DNA
ctgacggcaacgctaacttctgcaaatggcactccagtggagggtcaggtcatcaactttagcgtaacgccagaa

SEQ ID NO: 576190 - DNA, 75 bp, synthetic construct
  source 1..75: mol_type = other DNA
gtatggtgagtggggagatatgggaaattacatgaacgaagctgatttttattcaatggtatattggtcatctaa

SEQ ID NO: 576191 - DNA, 75 bp, synthetic construct
  source 1..75: mol_type = other DNA
agatattctggttaccctgccgggttaccggttcaccagtacgccagaaaccgataacacctggccgattgaagt

SEQ ID NO: 576192 - DNA, 75 bp, synthetic construct
  source 1..75: mol_type = other DNA
gatactctcgtcgttactgctaaccgttttgaacagccgcgcagcactgtgcttgcaccaaccaccgttgtgacc

SEQ ID NO: 576193 - DNA, 75 bp, synthetic construct
  source 1..75: mol_type = other DNA
gaaaacgccgctggcgtgggacttcgtcaataaccaggtgaccaccgcagccgcggcggcttttgccggtgctga

SEQ ID NO: 576194 - DNA, 75 bp, synthetic construct
  source 1..75: mol_type = other DNA
caatcatcaaccctgaccttgtggctcaggaagcacagaaaccggcaccactgaaagtgtccggtaccaaagcag

SEQ ID NO: 576195 - DNA, 75 bp, synthetic construct
  source 1..75: mol_type = other DNA
aatcagttacaacgcacgggtacagtgctcagacgaaaaacaacaaaagctgatgcagcagttaagcacccggct

SEQ ID NO: 576196 - DNA, 75 bp, synthetic construct
  source 1..75: mol_type = other DNA
aagcggatgcgggtatcgtgaaagcacgacgccagcttaacgcccttaatcagttacaacgcacgggtacagtgc

SEQ ID NO: 576197 - DNA, 75 bp, synthetic construct
  source 1..75: mol_type = other DNA
agctcgacgccagcttaacgcccttaatcagttacaacacacgggtacagtgctcagcgaaaaacaacaaaagac

SEQ ID NO: 576198 - DNA, 75 bp, synthetic construct
  source 1..75: mol_type = other DNA
atggaattgacctgtctatctggcaggaaatcattctggtgctgacgctgatggtgacctcgaaagggattgctg

SEQ ID NO: 576199 - DNA, 75 bp, synthetic construct
  source 1..75: mol_type = other DNA
ctattggtgaactgaactcaaagcttgcatctattcagcgcgaatgcgtgtctctcgttgagctggtgggcactt

SEQ ID NO: 576200 - DNA, 75 bp, synthetic construct
  source 1..75: mol_type = other DNA
ttgccgagagcattgccagtaggccatccatatcctgaggaacataaggcttctggtttctccccttttatgatg

SEQ ID NO: 576201 - DNA, 75 bp, synthetic construct
  source 1..75: mol_type = other DNA
ctgtctgccgacgacatcaaggtgttactggaagagtacaacgccaccctgccgccgcaggttccgcttggcgct

SEQ ID NO: 576202 - DNA, 75 bp, synthetic construct
  source 1..75: mol_type = other DNA
gaaaattcgcccggaactggtgacactggaggactggcaaaaatgccagcaagaagaaaacgccgggaaaacgtt

SEQ ID NO: 576203 - DNA, 75 bp, synthetic construct
  source 1..75: mol_type = other DNA
cggtgattggattcctgccggatgtcttcgtttacccaattatcggccactggcaagacaccctgcccgctgcag

SEQ ID NO: 576204 - DNA, 75 bp, synthetic construct
  source 1..75: mol_type = other DNA
gaccttttggacatccggatggtgatatcgtgatttatcatttcttgatgctcatcaggctgtctacgttcagca

SEQ ID NO: 576205 - DNA, 75 bp, synthetic construct
  source 1..75: mol_type = other DNA
aaatgtgtcatgaagcattcttaaactcaaagaattatcatatcgagaatataggttctcagtggattaatatct

SEQ ID NO: 576206 - DNA, 75 bp, synthetic construct
  source 1..75: mol_type = other DNA
tggatattctgaaaaaagcggaggaaatcataaaaaaagacccgggcatcagtatcagtcatctgaacatgctgg

SEQ ID NO: 576207 - DNA, 75 bp, synthetic construct
  source 1..75: mol_type = other DNA
cttgcagccggaaacgccaaaaaagtggcactggttgcctgtatgcgtaagttgctgaccattatgaacgcaatg

SEQ ID NO: 576208 - DNA, 75 bp, synthetic construct
  source 1..75: mol_type = other DNA
ggcacaatatgccgcggtatggtcgaaaaattatcgtattaaaaaagcagcatcggttttggtggaattagccaa

SEQ ID NO: 576209 - DNA, 75 bp, synthetic construct
  source 1..75: mol_type = other DNA
cattcacgctggcatctttaatgctggctgggcatgcactcgcagaggatggcgttgttcactttgttggtgaaa

SEQ ID NO: 576210 - DNA, 75 bp, synthetic construct
  source 1..75: mol_type = other DNA
ttgcaacatgccaggcatcggatcctcagaaggcgctattaaattatgagcccgttggcggcgatatatatagtg

SEQ ID NO: 576211 - DNA, 75 bp, synthetic construct
  source 1..75: mol_type = other DNA
tggcaaaagtggagccagaaacccgtgatgcggtaaccattacctttgcggtaccccagcctttgcaggaggcgt

SEQ ID NO: 576212 - DNA, 75 bp, synthetic construct
  source 1..75: mol_type = other DNA
aggcactggcagacctgaaagacaaatatcctcagcgtttacagttgttgtgcattttcagtcaggaaaccctcg

SEQ ID NO: 576213 - DNA, 75 bp, synthetic construct
  source 1..75: mol_type = other DNA
gccagttactatgtatatgatgaaaaaaaagttaaatctggcgcactggaagcaaccgcattaatcaacgtgaaa

SEQ ID NO: 576214 - DNA, 75 bp, synthetic construct
  source 1..75: mol_type = other DNA
aatgtgttttggtttatgccacctctgatttttcgtcagtagatcggtgtaatgccgccctgatggcgacaaccg

SEQ ID NO: 576215 - DNA, 75 bp, synthetic construct
  source 1..75: mol_type = other DNA
gggaatatcgcgctgggcaaaatgctgaaaatgattttgctatgaatgcccggcctaaactcacaaattggttaa

SEQ ID NO: 576216 - DNA, 75 bp, synthetic construct
  source 1..75: mol_type = other DNA
ccatacagatcaatgatgcctttcttggttcagttttgaatgcttctggtcaaattatggaaaggtttgtcccgg

SEQ ID NO: 576217 - DNA, 75 bp, synthetic construct
  source 1..75: mol_type = other DNA
taggtgataatgttgccattcatgcgaatacagtgattaaagaaggcactattattggtaatgatgttattattg

SEQ ID NO: 576218 - DNA, 75 bp, synthetic construct
  source 1..75: mol_type = other DNA
gcgggggtgctggtcgctacgcaaatcatcaacccgcagtcggggatgggggttaacgacacctcggcgctggtc

SEQ ID NO: 576219 - DNA, 75 bp, synthetic construct
  source 1..75: mol_type = other DNA
taattatctacatctacataaagttattgaatactattcatcgcagaactcatctagtcttgatttattatactt

SEQ ID NO: 576220 - DNA, 75 bp, synthetic construct
  source 1..75: mol_type = other DNA
aaaacatgctatgaaccatgggaagaaagaggaaatggtggtgtttttgatttcaccactgagaaaactctaact

SEQ ID NO: 576221 - DNA, 75 bp, synthetic construct
  source 1..75: mol_type = other DNA
cgaagtggcggcgcgtgctgcctatctaaaagctaaagccagatgccatccctcaacgccagccgatttattgca

SEQ ID NO: 576222 - DNA, 75 bp, synthetic construct
  source 1..75: mol_type = other DNA
acgccgttcttgcaggatatggagaagaagctgggcgtgaaggtcaacgccttctttgccccggactacgcgggc

SEQ ID NO: 576223 - DNA, 75 bp, synthetic construct
  source 1..75: mol_type = other DNA
cttatcacagtgatacctacctcctcatcaggtacactcctcctgatgactgtattcgttatcaatataattgaa

SEQ ID NO: 576224 - DNA, 75 bp, synthetic construct
  source 1..75: mol_type = other DNA
gcagccagtcacattcgtggcggataaggacagcgcagttgtcgttctgcaaacctcgaaagcggaaatcattgg

SEQ ID NO: 576225 - DNA, 75 bp, synthetic construct
  source 1..75: mol_type = other DNA
ggatgggcctcttctcaggcttcaggggtaatgacagactggttaagccgcttcggtaccgcaagaatcacgctg

SEQ ID NO: 576226 - DNA, 75 bp, synthetic construct
  source 1..75: mol_type = other DNA
cattcttgcgctcacctgcgtttaatgtgccggagtcggctcagcgttgggctaatcaggtgcgccaggaaaatg

SEQ ID NO: 576227 - DNA, 75 bp, synthetic construct
  source 1..75: mol_type = other DNA
ttttgtcgttatttaatcggtacaagattgcagccagtctctttttgggcgtgattggtttgtgctactccatag

SEQ ID NO: 576228 - DNA, 75 bp, synthetic construct
  source 1..75: mol_type = other DNA
ataaaatttatatgcgaggcagaacctaagtttatacctaagtttaagataaaatatttggttacaaaccgtctt

SEQ ID NO: 576229 - DNA, 75 bp, synthetic construct
  source 1..75: mol_type = other DNA
atatgagcaattaataatgttagatcttaaaacaaaagaagaaagaataagatctggacttcattccacacataa

SEQ ID NO: 576230 - DNA, 75 bp, synthetic construct
  source 1..75: mol_type = other DNA
caccatcgaagaactggaaggaatcaggcgccattacagcgcgctacgccgtgcgctcataaaacaacgggaggc

SEQ ID NO: 576231 - DNA, 75 bp, synthetic construct
  source 1..75: mol_type = other DNA
cccagatttccccagaattgcaaacttatctcgacaacattgcggcaaagtaccagccggatcaggaagctctac

SEQ ID NO: 576232 - DNA, 75 bp, synthetic construct
  source 1..75: mol_type = other DNA
gggtaaaggatattctgtatttgatattattcgagaatttgaagttgttacgggagttaaaataccatataaagt

SEQ ID NO: 576233 - DNA, 75 bp, synthetic construct
  source 1..75: mol_type = other DNA
tgttgtcataggcagaaattgtaaaattctgaatggcgtcactttaggtaataaggacacggaatcaacagaaaa

SEQ ID NO: 576234 - DNA, 75 bp, synthetic construct
  source 1..75: mol_type = other DNA
aatcatcatttaaaatatcaggcaatcattctgaatggaaagataaaaaacatgccataatgcgtactgatatta

SEQ ID NO: 576235 - DNA, 75 bp, synthetic construct
  source 1..75: mol_type = other DNA
aaaataataatgcgaaaagatgtttggaatgataatggttctgtttgtggttgcagcggtaaaggatgtggcgct

SEQ ID NO: 576236 - DNA, 75 bp, synthetic construct
  source 1..75: mol_type = other DNA
atcgaagccaaacagcagatttaccgtattgtccgcgagctggctgccgaaggaaaaagcgtggtgtttatctcc

SEQ ID NO: 576237 - DNA, 75 bp, synthetic construct
  source 1..75: mol_type = other DNA
catacttgtcctaaaggattatcatcttatagtactggcaataaagaacagcctatttactcttcatttaaggtt

SEQ ID NO: 576238 - DNA, 75 bp, synthetic construct
  source 1..75: mol_type = other DNA
tgatggatgagttagtaaaaaatggtgtggttggcaattcggggcgtgtcacggaaatagacaatgccgttgagg

SEQ ID NO: 576239 - DNA, 75 bp, synthetic construct
  source 1..75: mol_type = other DNA
ggcaacctccgcgccgttactccgcaggagaatcagcacaactaccgcaatgcgaagggatatagccgtcattct

SEQ ID NO: 576240 - DNA, 75 bp, synthetic construct
  source 1..75: mol_type = other DNA
gattttatattttagtatgtgtatttagtggtttttatatatttggattctttcctgccccatactatctttgtt

SEQ ID NO: 576241 - DNA, 75 bp, synthetic construct
  source 1..75: mol_type = other DNA
tcttgaaggacaaactcacatggctccggttgaatgtagccgacagttacggagattcctgacggaatttctcga

SEQ ID NO: 576242 - DNA, 75 bp, synthetic construct
  source 1..75: mol_type = other DNA
gcagatggcgtcgccagtgggtttgtctttgaagatagtaatgcctggtcgctgttacgggctattcgacgtgct

SEQ ID NO: 576243 - DNA, 75 bp, synthetic construct
  source 1..75: mol_type = other DNA
taaaacgaaaaaggatgataccgggcagaccgcgatttactccgccggtgagcatctggagctctgctgtggtaa

SEQ ID NO: 576244 - DNA, 75 bp, synthetic construct
  source 1..75: mol_type = other DNA
ttaatactgacccagctggttatggcgggtctggcagactatcagtttggttgttacagacgccttcagtcctga

SEQ ID NO: 576245 - DNA, 75 bp, synthetic construct
  source 1..75: mol_type = other DNA
ataatgagttgggctggtttaagcgcagaagggaaatgggccggggtatggaaagatattctcgaccggcgattc

SEQ ID NO: 576246 - DNA, 75 bp, synthetic construct
  source 1..75: mol_type = other DNA
gacgccagacgcagaaggtggccgcctggtttgttccttaccccggacacatcaccactgacgacgggcagacag

SEQ ID NO: 576247 - DNA, 75 bp, synthetic construct
  source 1..75: mol_type = other DNA
tccgctgggaacacattgacctgcgacatggtgtggctcacctgccggaaacaaagaacgggcattcgcgcgatg

SEQ ID NO: 576248 - DNA, 75 bp, synthetic construct
  source 1..75: mol_type = other DNA
acctgatgttgccgaaggatataagcaaatcctgaaagaccttgataaagctcgcgtgcaagagcctattgctga

SEQ ID NO: 576249 - DNA, 75 bp, synthetic construct
  source 1..75: mol_type = other DNA
acgagcagacagtgggccttgtcgatgatgacggcaatgtttatctggctggggtgaaacctggcgaacatatga

SEQ ID NO: 576250 - DNA, 75 bp, synthetic construct
  source 1..75: mol_type = other DNA
ggaattactcacgtaatgtgcaggtggttgtcgattctaactctgttgatattataaagtctccatcgattttta

SEQ ID NO: 576251 - DNA, 75 bp, synthetic construct
  source 1..75: mol_type = other DNA
catataatggcggacaaatctggcatagtgctgttaacagtattaaaaaaaatgctccggcaaatacgttagtgc

SEQ ID NO: 576252 - DNA, 75 bp, synthetic construct
  source 1..75: mol_type = other DNA
ttggtgccggtcatgctcatttggaggtattacgccactgggttgacgtgggcgcgccgttcggcgatgttgctt

SEQ ID NO: 576253 - DNA, 75 bp, synthetic construct
  source 1..75: mol_type = other DNA
ggcaacagccttttgccagtattgaataatggggatcatgtcgcgattgacatgtcacagtcgaaacctatcaga

SEQ ID NO: 576254 - DNA, 75 bp, synthetic construct
  source 1..75: mol_type = other DNA
gtgctctagttaaagatgtgtatgtagatagctacattgatgttctacgtgctaactctgtatttgcacaactac

SEQ ID NO: 576255 - DNA, 75 bp, synthetic construct
  source 1..75: mol_type = other DNA
cgggaggaagccctgtcccgcgccagtgaggtactgctgcggacactggccatcgccgcccagaaaggtgagcgc

SEQ ID NO: 576256 - DNA, 75 bp, synthetic construct
  source 1..75: mol_type = other DNA
cgaaaagcaaccgcgcgcgtgccatgtcattcttttatatgggatcggtaatggcctccattattggattgccga

SEQ ID NO: 576257 - DNA, 75 bp, synthetic construct
  source 1..75: mol_type = other DNA
ggtcaggcgattgaagaatctgtagtttcgatggaccagatcgtgatgcgtcctagattatttgcccggatctat

SEQ ID NO: 576258 - DNA, 75 bp, synthetic construct
  source 1..75: mol_type = other DNA
cgatgaaacagacgcgtgaaattaatattcaaagtattactaattctatcgataatgattcacgcgtagtagaaa

SEQ ID NO: 576259 - DNA, 75 bp, synthetic construct
  source 1..75: mol_type = other DNA
cttgccgattgtcatcttgtcgttcaaaagaaaggtgcagctgacgctgttctaccctctaagcttacgaatatc

SEQ ID NO: 576260 - DNA, 75 bp, synthetic construct
  source 1..75: mol_type = other DNA
cagttctttttttcctcttttaatgcaggctcgttggaaacctgattatattatctgcattgtacctactttatt

SEQ ID NO: 576261 - DNA, 75 bp, synthetic construct
  source 1..75: mol_type = other DNA
attatcgtcctgaattaactggtattggcaagtatagtggtgaaatggttaaatggtttgttgataatgatcttg

SEQ ID NO: 576262 - DNA, 75 bp, synthetic construct
  source 1..75: mol_type = other DNA
ttgtttccgggttgtgacggatgacggccaggatgatgatgccccccagcctgagagaaaagctgtcacgaatta

SEQ ID NO: 576263 - DNA, 75 bp, synthetic construct
  source 1..75: mol_type = other DNA
agagtatagttgctgcgacatcccatccggtttccgtacagctgattaatcaaggggcggggatctggggaaacg

SEQ ID NO: 576264 - DNA, 75 bp, synthetic construct
  source 1..75: mol_type = other DNA
ccttctgccgctgctgacagcctgcgggaatacgcagacagtttacgttccggccccggtggtgccgataagcgc

SEQ ID NO: 576265 - DNA, 75 bp, synthetic construct
  source 1..75: mol_type = other DNA
atgctaaaacagcaggatatgacagaaaccgccagagtggtgtttaatgaattaagcgtcaccgaaccggcgacc

SEQ ID NO: 576266 - DNA, 75 bp, synthetic construct
  source 1..75: mol_type = other DNA
gcaaaaatggatttattaaacttcgccgcgtcaatcactcctctcttttctgcagcctgtattgtggcggccggg

SEQ ID NO: 576267 - DNA, 75 bp, synthetic construct
  source 1..75: mol_type = other DNA
actggctttaagtgccatccccagattactttggctggcgcaccatcgttccgatatttaccgtcaggcatcaac

SEQ ID NO: 576268 - DNA, 75 bp, synthetic construct
  source 1..75: mol_type = other DNA
gcgggttttgatattataaatatttccggaagtgaatttaatcatggtggtactcggaatttagcagtactaaat

SEQ ID NO: 576269 - DNA, 75 bp, synthetic construct
  source 1..75: mol_type = other DNA
agccgtacctttatccagtactcgaccagcagccgctatgctgcgctgtcctcgtttgcgcgtgcgtttactgtt

SEQ ID NO: 576270 - DNA, 75 bp, synthetic construct
  source 1..75: mol_type = other DNA
ccactggcgggtttttttatgcccgaaaaacgacacagggcgttaaacgcgctggtggttgcgaatacgggtctt

SEQ ID NO: 576271 - DNA, 75 bp, synthetic construct
  source 1..75: mol_type = other DNA
ggcgtcatgtccagcggtgatttcttcgatgaacgccacgggctcgactggctgcagaattacgttcagaccaac

SEQ ID NO: 576272 - DNA, 75 bp, synthetic construct
  source 1..75: mol_type = other DNA
gacagggaagcgcgtaagtcgccggtaattcaggcggcgatcaagctggctggcgctattcattatggcgacgtg

SEQ ID NO: 576273 - DNA, 75 bp, synthetic construct
  source 1..75: mol_type = other DNA
attgaagatatcggcgatgattttggcgttgactccccggaatacgaagcagcgaccatcttcttttcacaatca

SEQ ID NO: 576274 - DNA, 75 bp, synthetic construct
  source 1..75: mol_type = other DNA
gtattaacctgtctgccgcttccaacctggctggcgtggcaactgccatcaccgccaaactgaccggcgctacgg

SEQ ID NO: 576275 - DNA, 75 bp, synthetic construct
  source 1..75: mol_type = other DNA
ggcaactgcccgcattatgggcgttggcctcaacccgattttacgtcacttaaaaacctcaggccgcagtcggta

SEQ ID NO: 576276 - DNA, 75 bp, synthetic construct
  source 1..75: mol_type = other DNA
attgcgctgcccggcccgctgccgttcatcctttcccgcgcctacagcagttaccggaccaggacgcccgcgccg

SEQ ID NO: 576277 - DNA, 75 bp, synthetic construct
  source 1..75: mol_type = other DNA
tcattctggcagcatctgcttcagcatcagcctctcaaatctcactggaaacggcgggccgctgctatgaagcca

SEQ ID NO: 576278 - DNA, 75 bp, synthetic construct
  source 1..75: mol_type = other DNA
agaattacgtccagaacaacctctggaacctgctttacacctcaaccaccaaaatcccgcagaccgaagcgggcg

SEQ ID NO: 576279 - DNA, 75 bp, synthetic construct
  source 1..75: mol_type = other DNA
ggacatcagcgctatctctgctctcattgccgtaaaacatggcaactacagttcacttataccgcctctcagccc

SEQ ID NO: 576280 - DNA, 75 bp, synthetic construct
  source 1..75: mol_type = other DNA
tcttcgtctccagtctgaatgtcctggatgagagcaaacgcgatcgactaatgaataagtttttttatctcagat

SEQ ID NO: 576281 - DNA, 75 bp, synthetic construct
  source 1..75: mol_type = other DNA
cttataatggcggagatatttggaagttaacagcggcgaatataaggaaatattcgccacctgatgtatgtgtaa

SEQ ID NO: 576282 - DNA, 75 bp, synthetic construct
  source 1..75: mol_type = other DNA
ccagacaatacaattcttagcgaggatatgtattatgcagcgaaagccataaacgcgggatataaagttgcttat

SEQ ID NO: 576283 - DNA, 75 bp, synthetic construct
  source 1..75: mol_type = other DNA
gacgttgccgaaaatgtaaaatggcagaaggttggtaataggttgaaaggagtaaacccaacaccattctatata

SEQ ID NO: 576284 - DNA, 75 bp, synthetic construct
  source 1..75: mol_type = other DNA
atccacattggatacctgtcgcattcataaataactttatgaaaattttagggtacaaactgggacagcgttata

SEQ ID NO: 576285 - DNA, 75 bp, synthetic construct
  source 1..75: mol_type = other DNA
gcaggttttaatatcgtaactattggagggcatcaatttaaccatggtggaacaaggaatcttgcagtatcgaac

SEQ ID NO: 576286 - DNA, 75 bp, synthetic construct
  source 1..75: mol_type = other DNA
tcaaatacaatattatgcgaagatatgcattttgctgcaagagccctcttatctggttataaagttgcctatgtt

SEQ ID NO: 576287 - DNA, 75 bp, synthetic construct
  source 1..75: mol_type = other DNA
ataaaggccgtctgaccagtgagcgccagacggtgaagaacccggagacgggggaactgctgtggcagcatgaga

SEQ ID NO: 576288 - DNA, 75 bp, synthetic construct
  source 1..75: mol_type = other DNA
taaaaccctaaaaagccaattagcgggcaatggggttgagcattttgaccctgagcaatatctaatagaggtgaa

SEQ ID NO: 576289 - DNA, 75 bp, synthetic construct
  source 1..75: mol_type = other DNA
gcctttcgagtggcacttatgctcattggcttgcgaccagttgcagccagtcaatgttttcgacattccttcgct

SEQ ID NO: 576290 - DNA, 75 bp, synthetic construct
  source 1..75: mol_type = other DNA
acctggtggcttcggtcagcatgagtactgcatcgatagttaccctgatattcatgacaaggttccactaatcga

SEQ ID NO: 576291 - DNA, 75 bp, synthetic construct
  source 1..75: mol_type = other DNA
agccgcatccagacgatttatcagccggggagcttcacgccactcatcagagttgaaaccgccaccggtgagctg

SEQ ID NO: 576292 - DNA, 75 bp, synthetic construct
  source 1..75: mol_type = other DNA
tcgctgtcacggaaaccgcaagtgacctggtacggctgggacggcgaccggctgaccacgatacagaacgacagg

SEQ ID NO: 576293 - DNA, 75 bp, synthetic construct
  source 1..75: mol_type = other DNA
accacctttaatggtgacactgttaacgggactatctctacatattacctgaatcatgacttgatcttacccagc

SEQ ID NO: 576294 - DNA, 75 bp, synthetic construct
  source 1..75: mol_type = other DNA
caaaaaaagtggctggcgtgttgagtttggcggtgaaaagcgcaatgtcagaatggaagataatgagttcatcaa

SEQ ID NO: 576295 - DNA, 75 bp, synthetic construct
  source 1..75: mol_type = other DNA
attgaagttaacgttgacgctgaattgatagccggttcctttgggtttgatattgaggttgtacaacatctagct

SEQ ID NO: 576296 - DNA, 75 bp, synthetic construct
  source 1..75: mol_type = other DNA
tcgacatggaaacagcaaaccggcatgtgctccgctggttgcatgaggtggccaatcaaagaaaacatgaaacta

SEQ ID NO: 576297 - DNA, 75 bp, synthetic construct
  source 1..75: mol_type = other DNA
tgccgatccagagctggaatttgacattgtcgcagttagccatttattttgaagggcggctgaataatgtgatga

SEQ ID NO: 576298 - DNA, 75 bp, synthetic construct
  source 1..75: mol_type = other DNA
gacagagcactaattttaggaaaaaaataggaatgagtatgttttatttttattataaccctagcgcctttttca

SEQ ID NO: 576299 - DNA, 75 bp, synthetic construct
  source 1..75: mol_type = other DNA
aagaatatgaagttcaactttatttacaatgattctggtaatgagagtgagtatttagagtgttttaataaaagc

SEQ ID NO: 576300 - DNA, 75 bp, synthetic construct
  source 1..75: mol_type = other DNA
gccacgctgctgggcgacctgcaactactgaaagcccgtcgcgggctgagcgccagtgacctgattaatcttaat

SEQ ID NO: 576301 - DNA, 75 bp, synthetic construct
  source 1..75: mol_type = other DNA
agcgaagaaagggctagagacgatgaaacgcttaaagaaagcgaatccctctaatcctcttgatatgggtaatcc

SEQ ID NO: 576302 - DNA, 75 bp, synthetic construct
  source 1..75: mol_type = other DNA
gcaaacgtctgtctggcgtggcgcatttgcgccagtctgtccgggacattctgaccacgcccgtcgggagtcgtg

SEQ ID NO: 576303 - DNA, 75 bp, synthetic construct
  source 1..75: mol_type = other DNA
aaatgaagaagtcgatgcgattcgtaataacggacatgcgaacgggaagtgggccgcagcagcaataagtcagaa

SEQ ID NO: 576304 - DNA, 75 bp, synthetic construct
  source 1..75: mol_type = other DNA
ctagtttttttcctgtcttattgaatcaacgagaaaaggtaaggggggagctaatgaaaagaggaatctatcttg

SEQ ID NO: 576305 - DNA, 75 bp, synthetic construct
  source 1..75: mol_type = other DNA
aaggttatgtatacatctcaggaaaataacaaagtcaattcgtctattagttattaacaatccggttctgctctc

SEQ ID NO: 576306 - DNA, 75 bp, synthetic construct
  source 1..75: mol_type = other DNA
ctgcgaatggtcaagaatctttaactgcaagtaaaattctaaatacctgtactgcgacggttaactcaattactt

SEQ ID NO: 576307 - DNA, 75 bp, synthetic construct
  source 1..75: mol_type = other DNA
tcctatttcacttactgcagatacaattaaaaatcctggcacaaacttaccagcgatcgcacaattagttcaact

SEQ ID NO: 576308 - DNA, 75 bp, synthetic construct
  source 1..75: mol_type = other DNA
gatattctgcgcagtttaggaactaatggtcaggaaacattgaccgcagagaaaatcttgggaacttgtaacgct

SEQ ID NO: 576309 - DNA, 75 bp, synthetic construct
  source 1..75: mol_type = other DNA
caaatcgtgtttacgaagtgctaaatgggacacgaaatttgacgttacctatgattcgccgtttacattcccagt

SEQ ID NO: 576310 - DNA, 75 bp, synthetic construct
  source 1..75: mol_type = other DNA
ccccctgtgtcaccgaaggcagaggctgaacaaacagcaggcagtacggctgaaacaccgcatccggaagcgccg

SEQ ID NO: 576311 - DNA, 75 bp, synthetic construct
  source 1..75: mol_type = other DNA
gggctaaaatacgatgctaacaatatttacctggcaaccatgtattcagaaacgcgtaatatgaccccgtttggc

SEQ ID NO: 576312 - DNA, 75 bp, synthetic construct
  source 1..75: mol_type = other DNA
attctccgtgcccctgagcaatacctgtggatgcatcgcaggttcaaaacgcgtcctgaaggtgaggcctcttta

SEQ ID NO: 576313 - DNA, 75 bp, synthetic construct
  source 1..75: mol_type = other DNA
agtcatttgatagcattttagatacctaccagcaaattactgattgctatattgaacgttgtttaattccgtatg

SEQ ID NO: 576314 - DNA, 75 bp, synthetic construct
  source 1..75: mol_type = other DNA
caaacttaccgctgatgagggacgaaataatatctctggtgattttatggggattgggggagctcgtacatctgc

SEQ ID NO: 576315 - DNA, 75 bp, synthetic construct
  source 1..75: mol_type = other DNA
ctattggtggagctttgacctcagatggtgctactgttaagaaagggtttgctattgaacttaatggcctaagtc

SEQ ID NO: 576316 - DNA, 75 bp, synthetic construct
  source 1..75: mol_type = other DNA
gtaattctggctcagcgtgctttcgattcacgagcagtaactgaccttgtaacgaatactaatactgtgcgcgtt

SEQ ID NO: 576317 - DNA, 75 bp, synthetic construct
  source 1..75: mol_type = other DNA
atctgaagcgaagaaagggctagagacaatgaaacgcttaaagaaagcgaatccctctaatcctcttgatatggg

SEQ ID NO: 576318 - DNA, 75 bp, synthetic construct
  source 1..75: mol_type = other DNA
caaaatcagcagacgtcttctgaacgtgaactggagatgtctaccgagattgcacgtctcaaacgccagctggca

SEQ ID NO: 576319 - DNA, 75 bp, synthetic construct
  source 1..75: mol_type = other DNA
cagctggattatatcgaatgtgattacaatcggtggcggcggcacagttggtgtggcggcctcagtccggaacaa

SEQ ID NO: 576320 - DNA, 75 bp, synthetic construct
  source 1..75: mol_type = other DNA
gagttctcagatgtcactattgatgataaattaattgtgattgcacatgctgatgctagatatttaagagcccaa

SEQ ID NO: 576321 - DNA, 75 bp, synthetic construct
  source 1..75: mol_type = other DNA
ttcggttccggaccgacgctggatgaaaccttcggtttaatcgacaccgcagaaaaatcagcggaagtgttagtg

SEQ ID NO: 576322 - DNA, 75 bp, synthetic construct
  source 1..75: mol_type = other DNA
gattggtattatgattaaaatcggtcttttagaagaggtcggagaacgaattccaaaacgtcctttaaaattacg

SEQ ID NO: 576323 - DNA, 75 bp, synthetic construct
  source 1..75: mol_type = other DNA
gatgtcaaaaagcaccgtttatcgctttttacagaccatgaaaaccttagggaaggtgcgaataagcggggaaat

SEQ ID NO: 576324 - DNA, 75 bp, synthetic construct
  source 1..75: mol_type = other DNA
taaccgtccgattgtggtgacgccgctgggaactcgcctatgccgcccctcggaagtggtgctggaaattctgcc

SEQ ID NO: 576325 - DNA, 75 bp, synthetic construct
  source 1..75: mol_type = other DNA
tcattgacatgaagttcatgatcgaggatgctggctacacggccaaatacttctatgaccaaatcaaggccggca

SEQ ID NO: 576326 - DNA, 75 bp, synthetic construct
  source 1..75: mol_type = other DNA
tgcctgtgaacagggctggaatgcagccggtcagcctgtcagtcagcgcgccggttttttcccggaagaagccac

SEQ ID NO: 576327 - DNA, 75 bp, synthetic construct
  source 1..75: mol_type = other DNA
tgttttccaacaggcatagtattctttattgctctaatatttataggggctgtatcagacattattggcgtaagg

SEQ ID NO: 576328 - DNA, 75 bp, synthetic construct
  source 1..75: mol_type = other DNA
gcaactgaaagattatactgggaatgagatagctaaaaataataccgtaattaatcaaaacatcaataatgccaa

SEQ ID NO: 576329 - DNA, 75 bp, synthetic construct
  source 1..75: mol_type = other DNA
tagaaactgcatcaattcatatcgaaaaagatataatattgataaaaagagagaggtgaatattagagtgattat

SEQ ID NO: 576330 - DNA, 75 bp, synthetic construct
  source 1..75: mol_type = other DNA
tcgaaagttaaacgcgtgcagaaagccggacgccagatgacgataacgctgccctgcaggcctgcactgctaaaa

SEQ ID NO: 576331 - DNA, 75 bp, synthetic construct
  source 1..75: mol_type = other DNA
ccgtgggtgatgcagtcatcagaatctgatgctgccctcttatcccgcattgcaggtatgtacggcgccaccagt

SEQ ID NO: 576332 - DNA, 75 bp, synthetic construct
  source 1..75: mol_type = other DNA
gtcagcaagccatccggcggatactggctttttcttgagcagggtggagggacgaccgtctcaggaaaacccgta

SEQ ID NO: 576333 - DNA, 75 bp, synthetic construct
  source 1..75: mol_type = other DNA
aaaaaagggatttatatcattaacttatctctatcgaaaggaacccaagcgcatgcaatggcttatataaaaagg

SEQ ID NO: 576334 - DNA, 75 bp, synthetic construct
  source 1..75: mol_type = other DNA
gtgagtaaactttcagtcaaaggtgactcacatgacaaaaacagtataaaccagcaaaaaacacgtaaacagcat

SEQ ID NO: 576335 - DNA, 75 bp, synthetic construct
  source 1..75: mol_type = other DNA
atggtatcagactgggattaccgggagggggagcggcagggagcatccggaggcggaaaaggaacaacaaaaaaa

SEQ ID NO: 576336 - DNA, 75 bp, synthetic construct
  source 1..75: mol_type = other DNA
caactggcgatcggcagttatccgtccatttcattggctcaggccagggagcgtcgccagcagtttagagactgg

SEQ ID NO: 576337 - DNA, 75 bp, synthetic construct
  source 1..75: mol_type = other DNA
ttactggaagatgtggtgtacgccataacggagacagtgagaaaaacggcgaggcaaatcacaaggagagggatg

SEQ ID NO: 576338 - DNA, 75 bp, synthetic construct
  source 1..75: mol_type = other DNA
cgacatgaccaacttctacacaatcaactatgaaagcgagcttttagatgaagtcaaagtgaccgaatcgaagag

SEQ ID NO: 576339 - DNA, 75 bp, synthetic construct
  source 1..75: mol_type = other DNA
aaacacctactactgatagtatgccgccattattacgacaagctatcgaattatttgatcaccaaggtgcagagc

SEQ ID NO: 576340 - DNA, 75 bp, synthetic construct
  source 1..75: mol_type = other DNA
ccagaagatgacaggccgccacagcagcccaatattgctttattgtccgctcagatagttgccaaaacggggatg

SEQ ID NO: 576341 - DNA, 75 bp, synthetic construct
  source 1..75: mol_type = other DNA
ctgtttatctgcaattattaaatcgtcaacaagagctcaatatagccaagtctagtgcgattggtaacgttcgag

SEQ ID NO: 576342 - DNA, 75 bp, synthetic construct
  source 1..75: mol_type = other DNA
tcttcagtctaggatgattttaggtaaaactgttgatgatatggatcttcaatatagtgtcaaacctaaaagtat

SEQ ID NO: 576343 - DNA, 75 bp, synthetic construct
  source 1..75: mol_type = other DNA
tcaaggtaaagatacgggtatgttaaccatctccttaacaggggataatccagaccaaattgagaaaatagtaaa

SEQ ID NO: 576344 - DNA, 75 bp, synthetic construct
  source 1..75: mol_type = other DNA
tgcaagtattccagtatctgagtggttaactaataaaaggtcaaaaacaaacaaaaagaaaaatgagtctgaaat

SEQ ID NO: 576345 - DNA, 75 bp, synthetic construct
  source 1..75: mol_type = other DNA
tttattatagttggtgcagtaattatcggtttgattttatcaataatactagttttgttgaaagtatttttacgt

SEQ ID NO: 576346 - DNA, 75 bp, synthetic construct
  source 1..75: mol_type = other DNA
agcattaatggaaaaaaggcaaacactccaaaatgaaaaaacaaagttaaataaaaaagtaagttcgatgccatc

SEQ ID NO: 576347 - DNA, 75 bp, synthetic construct
  source 1..75: mol_type = other DNA
taatgtgcctgtttctgaatggttgaaaaaaaaatctttcaaaaatacaacatctattgatgggaattcgaaaaa

SEQ ID NO: 576348 - DNA, 75 bp, synthetic construct
  source 1..75: mol_type = other DNA
actaaatggagttgtaagaagagcaagtagtcaatatgggtatggttataaccactatggttattcatatactga

SEQ ID NO: 576349 - DNA, 75 bp, synthetic construct
  source 1..75: mol_type = other DNA
acgccaatttatcaggccgatgcacttatacaagttgagcaaaaacaagcaaatgcgatactcagcaatttaagt

SEQ ID NO: 576350 - DNA, 75 bp, synthetic construct
  source 1..75: mol_type = other DNA
tttgatggaaaagaaacaaacgctacaggctgagaaaaataagttaaacaagaaggtcagtacaatgccttctac

SEQ ID NO: 576351 - DNA, 75 bp, synthetic construct
  source 1..75: mol_type = other DNA
tacgaaccagcctccattttgcaatgatggaagcaagaaacaggattttgatgatttctggggccagccctaatg

SEQ ID NO: 576352 - DNA, 75 bp, synthetic construct
  source 1..75: mol_type = other DNA
attatgaattagttatcgtagatacaccaccaatactcgctgtaacggatgctgcaataattggtcgtcatgtcg

SEQ ID NO: 576353 - DNA, 75 bp, synthetic construct
  source 1..75: mol_type = other DNA
acagtcgcgcatggtactgggcaagacagtagacgatttaaatttacaagcgcgaataacaccaaaatattttcc

SEQ ID NO: 576354 - DNA, 75 bp, synthetic construct
  source 1..75: mol_type = other DNA
tgaaaaatgtattaaagctatatcagcaggttttgattttatatccagaggcgcagttccacctaatccagctga

SEQ ID NO: 576355 - DNA, 75 bp, synthetic construct
  source 1..75: mol_type = other DNA
ccaacgcagctatcatccgaatggggttcggaggcgagcttgtagctcacggtatgcgttctattgcacgaacag

SEQ ID NO: 576356 - DNA, 75 bp, synthetic construct
  source 1..75: mol_type = other DNA
gatttggaggtgagcttgtagctcacggtatgcgttctattgcaagaacagcggcagaagaatccggtaagttca

SEQ ID NO: 576357 - DNA, 75 bp, synthetic construct
  source 1..75: mol_type = other DNA
tatatatgcaacttcttaacagacagcaagagttaaatatcgctaagtctagtgctataggtaacgttagaatta

SEQ ID NO: 576358 - DNA, 75 bp, synthetic construct
  source 1..75: mol_type = other DNA
tgttactactgttaaaaatgcaggttttgattatataagtcgtggtaatatcccacctaatccggccgaactact

SEQ ID NO: 576359 - DNA, 75 bp, synthetic construct
  source 1..75: mol_type = other DNA
ttcagtagcagatcaaggaaaagatactggaatattaagcctatctttaactggcccagatccacttttgctaga

SEQ ID NO: 576360 - DNA, 75 bp, synthetic construct
  source 1..75: mol_type = other DNA
ggggttttgctcgattcaaatggcatttcgcttaaagttgatagtattgaggctaaacctggaactgagtttgtt

SEQ ID NO: 576361 - DNA, 75 bp, synthetic construct
  source 1..75: mol_type = other DNA
gtaggtgaattagtagatggtaaagcgatctcaataaaaattgataaaataaatgctgatgttggtactgaattc

SEQ ID NO: 576362 - DNA, 75 bp, synthetic construct
  source 1..75: mol_type = other DNA
ataatcgcacaaagcaataagagagtattgtttattgatgccgatttacgtaaaggatatacgcacaagcttttt

SEQ ID NO: 576363 - DNA, 75 bp, synthetic construct
  source 1..75: mol_type = other DNA
tcaatcaagaatgataattggaaaaacagtagatgatttaaatctacaggcgagagtacgacaaaactacttccc

SEQ ID NO: 576364 - DNA, 75 bp, synthetic construct
  source 1..75: mol_type = other DNA
attacagtcaagaatgatacttggtaaaactgttgatgatttgaatctgcagttaattgtaaaaaggaaatactt

SEQ ID NO: 576365 - DNA, 75 bp, synthetic construct
  source 1..75: mol_type = other DNA
tcctaacaaaccttacgaacgacaagctcctgccacttataaaggaaagaaaaaagtgggtcatggggatagtta

SEQ ID NO: 576366 - DNA, 75 bp, synthetic construct
  source 1..75: mol_type = other DNA
cgtgaagagaatgaatttatggactggttctccctctggggaccatggcatgctgtactgaagcgtacggaagct

SEQ ID NO: 576367 - DNA, 75 bp, synthetic construct
  source 1..75: mol_type = other DNA
tggccttccagaccatgctcgcagagaaacttcagctctccactgccgtgaaggaaatgcgtttctatggcgtgt

SEQ ID NO: 576368 - DNA, 75 bp, synthetic construct
  source 1..75: mol_type = other DNA
tatctttcagagagaaaacaacctttactataaaataaacacttcaatcatgtcattattactgattgttatgat

SEQ ID NO: 576369 - DNA, 75 bp, synthetic construct
  source 1..75: mol_type = other DNA
cttgatcacactatatattatacatacaccgccagttatttttcaagccatacatttttctgaaagcaatctttt

SEQ ID NO: 576370 - DNA, 75 bp, synthetic construct
  source 1..75: mol_type = other DNA
aatcgttaaatacagccattatggatgctgatgctgcgatcggccaaagtatggaaatttttgacgaaattcaac

SEQ ID NO: 576371 - DNA, 75 bp, synthetic construct
  source 1..75: mol_type = other DNA
taaatgggcattgttcttcaaagacatgtgttcaaaatcgcaaaatgaatttaagaatatattccttcgcgagca

SEQ ID NO: 576372 - DNA, 75 bp, synthetic construct
  source 1..75: mol_type = other DNA
gatgccgaggcattttatgattctttgagaaatcttcttgatgatcaacgtggtcttaaagaattacaaagaatg

SEQ ID NO: 576373 - DNA, 75 bp, synthetic construct
  source 1..75: mol_type = other DNA
aacgtaaaagaaaagagtatcttacactttttctggcgtgactatctcatggaagtgatgaacttcactcagcgg

SEQ ID NO: 576374 - DNA, 75 bp, synthetic construct
  source 1..75: mol_type = other DNA
aacatgaagagcatgccaacaccttttccgcgttccttgaccgcctttccgataccgtctctgcacgcaatacct

SEQ ID NO: 576375 - DNA, 75 bp, synthetic construct
  source 1..75: mol_type = other DNA
ggcagagaccaaccctacaacatattctgatgcattagaacgctacggtatagtcacttctgacggttcaaaaaa

SEQ ID NO: 576376 - DNA, 75 bp, synthetic construct
  source 1..75: mol_type = other DNA
gtctatctaaacaggttggttgaaaaacttgctgcttcgaagacactaaaaagtgtgatcatgagcggtggaaca

SEQ ID NO: 576377 - DNA, 75 bp, synthetic construct
  source 1..75: mol_type = other DNA
atatatggcgtagtcttgaacggaacatttttcccggcttgggcgacgttcctgtcaaagagatccgccccaaaa

SEQ ID NO: 576378 - DNA, 75 bp, synthetic construct
  source 1..75: mol_type = other DNA
acaatctaggatgattttggggaaaacggtagatgatctaaacttacaggcagttattaagcaagattacttccc

SEQ ID NO: 576379 - DNA, 75 bp, synthetic construct
  source 1..75: mol_type = other DNA
cattgagcgatcttttcgtccatgcggaaaacgcccctttcgtccagagtctgcttgaaaacgcggcacgggcca

SEQ ID NO: 576380 - DNA, 75 bp, synthetic construct
  source 1..75: mol_type = other DNA
tgcttaaacagcatttagaccccatagaaaaacgaggtgtccttgaaacacttcgccgcgtcatatcccgcctga

SEQ ID NO: 576381 - DNA, 75 bp, synthetic construct
  source 1..75: mol_type = other DNA
ctgtattttgaatggtatggtaaagaaaactagcagttattatggctatggatatagtcattatggttactctta

SEQ ID NO: 576382 - DNA, 75 bp, synthetic construct
  source 1..75: mol_type = other DNA
tttatatgcaactgttaaatagacaacaagagctcaatatttcaaaatcaagtgctattgggaatgtacggatta

SEQ ID NO: 576383 - DNA, 75 bp, synthetic construct
  source 1..75: mol_type = other DNA
ttgtctcttgaggctaagtccgtactagaccagatcgtaaatgtggataatcaacttaacgagttaacatttaga

SEQ ID NO: 576384 - DNA, 75 bp, synthetic construct
  source 1..75: mol_type = other DNA
cgacgtggtgcaccgtctggcgtcccaggattacgcggttgaaacgcccaatttcaaccagattgatgagattgg

SEQ ID NO: 576385 - DNA, 75 bp, synthetic construct
  source 1..75: mol_type = other DNA
acgcgcaggccgttgcgctgctctacggtgcgccctatgagcaggagctggagcgcgcgcagagccagctcgatc

SEQ ID NO: 576386 - DNA, 75 bp, synthetic construct
  source 1..75: mol_type = other DNA
cagcgtatcaacgaaataatgatttatgcggttaacactggcttgattgatgccaaccccgcgtcaggtattggt

SEQ ID NO: 576387 - DNA, 75 bp, synthetic construct
  source 1..75: mol_type = other DNA
tcaccttacacttgcgaaggcacgagctttacgtgatgaatacttgtcgttgcttgcaaatggtatagaccccca

SEQ ID NO: 576388 - DNA, 75 bp, synthetic construct
  source 1..75: mol_type = other DNA
ctaaggtgagcttaggaacctatcctcaccttacacttgcgaaggcacgagctttacgtgatgagtacttgtcgt

SEQ ID NO: 576389 - DNA, 75 bp, synthetic construct
  source 1..75: mol_type = other DNA
ggtttaacggaaccgcaggcgcgcgagcagtatggcgacgatcaggtgaaagtgtataaatcctctttcaccgcg

SEQ ID NO: 576390 - DNA, 75 bp, synthetic construct
  source 1..75: mol_type = other DNA
tgaggtgacgttgccgccgccagaagcggcggcggtgcccgttgttaagcaaaacctgcgtgaagcgacagaagc

SEQ ID NO: 576391 - DNA, 75 bp, synthetic construct
  source 1..75: mol_type = other DNA
gtaagtcgtgtagcaggtggttctggccaacaacttaaaataagaaaaatgccaaacaatttgcctcacaataaa

SEQ ID NO: 576392 - DNA, 75 bp, synthetic construct
  source 1..75: mol_type = other DNA
gggtttctaaaagataaaatatctgagactgattttctaatagcgaatgctgaattggagaaccaccatgttaat

SEQ ID NO: 576393 - DNA, 75 bp, synthetic construct
  source 1..75: mol_type = other DNA
aacacccgtaccgaggtgagcaccctctgcatcagccagttccgctacagcgcacaaaggcggtcagcaccacgc

SEQ ID NO: 576394 - DNA, 75 bp, synthetic construct
  source 1..75: mol_type = other DNA
tcacgaacagcgtggatattcagatcctcgaaggtttaaatgtcggagaaaatgtcgtgctgtcgctgccggata

SEQ ID NO: 576395 - DNA, 75 bp, synthetic construct
  source 1..75: mol_type = other DNA
caaactacacaaagcctaatacttgaggatatattaaatacacatttctcaccacaaaaattatctagtttaaga

SEQ ID NO: 576396 - DNA, 75 bp, synthetic construct
  source 1..75: mol_type = other DNA
tcgtggtattattgtcgaaaaaacaggtccatataacattttgttcctgttcagcattgggattgatgatactaa

SEQ ID NO: 576397 - DNA, 75 bp, synthetic construct
  source 1..75: mol_type = other DNA
aggaaatccaggcccgctttgaaaacagtgacacttggttttttaaagtatggcaacctgagaacattaatgagg

SEQ ID NO: 576398 - DNA, 75 bp, synthetic construct
  source 1..75: mol_type = other DNA
ctggttttgaaaccgatattcatggtctgtatcgaaaggcggataacaggtatactgcaaaagtcattaaaaaat

SEQ ID NO: 576399 - DNA, 75 bp, synthetic construct
  source 1..75: mol_type = other DNA
cacttggattagctattcaaatcgggaagctagcatctgatcaaagtgtattgaaattctttgagcttattgatt

SEQ ID NO: 576400 - DNA, 75 bp, synthetic construct
  source 1..75: mol_type = other DNA
ttcttgcctgtggagagatggtgcagtcaggccgctcgttgaagcaggaacccaccgaaatgattcaggcgacag

SEQ ID NO: 576401 - DNA, 75 bp, synthetic construct
  source 1..75: mol_type = other DNA
tgaaacctacacgaaatgcatatggcattctgggggggatccccagaacggaattctcttctgattcgattaagc

SEQ ID NO: 576402 - DNA, 75 bp, synthetic construct
  source 1..75: mol_type = other DNA
tgatatcgaaagtcaccgatgccgtaatcgaccaggttgttgaaggcaaaaccgtcctctggatgcgatttatcc

SEQ ID NO: 576403 - DNA, 75 bp, synthetic construct
  source 1..75: mol_type = other DNA
cagtctgtatgctgtcaaatcaggcgatgcattctatggtggtgtaggtaaaaatagtgacggagttgtgtctgg

SEQ ID NO: 576404 - DNA, 75 bp, synthetic construct
  source 1..75: mol_type = other DNA
acggagttatgtctggttccctagttaaggatatgctggacgggctagatcctgaaatcgcaaattccgcttggg

SEQ ID NO: 576405 - DNA, 75 bp, synthetic construct
  source 1..75: mol_type = other DNA
gtaaaaattccagttaaagatcaagatcaaaacgatattggttatatggaagctgattttactgctggtgcaatc

SEQ ID NO: 576406 - DNA, 75 bp, synthetic construct
  source 1..75: mol_type = other DNA
ttcctcaacggcgatccggaccagccgatcattatggggcgtacctaccaccaggaaaaccgcacacccggtagc

SEQ ID NO: 576407 - DNA, 75 bp, synthetic construct
  source 1..75: mol_type = other DNA
aaaggtggcgtacgcatgaccggcggcggatttggcggctgtatcgtcgcgctaatcccggaagagctggtgcct

SEQ ID NO: 576408 - DNA, 75 bp, synthetic construct
  source 1..75: mol_type = other DNA
tgcagtcctcgcagatcggtttgcataaatcgttgagggtcgggctgggttatgacgtcaaagtcggaaataacg

SEQ ID NO: 576409 - DNA, 75 bp, synthetic construct
  source 1..75: mol_type = other DNA
aagttgtcatcaccgtttttgcatactcctttcatcattcgaaatatcttcgtaacaaatgagcagtatgtaaat

SEQ ID NO: 576410 - DNA, 75 bp, synthetic construct
  source 1..75: mol_type = other DNA
tgagggttgtaacattggccattgatggtgatcataaaaaactcgctgaattactcgatactgcttttgagattg

SEQ ID NO: 576411 - DNA, 75 bp, synthetic construct
  source 1..75: mol_type = other DNA
ctggaaaagcaagttcgccgtctggaggaacaaaatacgatattaaaaaaggctaccgcgctcttaatgtccgac

SEQ ID NO: 576412 - DNA, 75 bp, synthetic construct
  source 1..75: mol_type = other DNA
gctgaagtagctaaagctatgggctgtaaagttgaagatgtcgataaggagtttgtattggggatattattacaa

SEQ ID NO: 576413 - DNA, 75 bp, synthetic construct
  source 1..75: mol_type = other DNA
cctttcaattatctctttcggtgttttgaactgaaccgccccgggtttcctggagagtgttttatctgtgaactc

SEQ ID NO: 576414 - DNA, 75 bp, synthetic construct
  source 1..75: mol_type = other DNA
acttcgaacattaatgcggatgctaaagcaagagttaaattacgagggaaaagattccttgagaatatggttgga

SEQ ID NO: 576415 - DNA, 75 bp, synthetic construct
  source 1..75: mol_type = other DNA
tgagcagggaatcaatcgtggacgcattggcgctgcggcatctaacactaacgctgactggtactgccgcatggc

SEQ ID NO: 576416 - DNA, 75 bp, synthetic construct
  source 1..75: mol_type = other DNA
ctgccacacctattactccagaccagcaacgtatccgcgaactggaaaagcaggttcgccgcctggaggaacaca

SEQ ID NO: 576417 - DNA, 75 bp, synthetic construct
  source 1..75: mol_type = other DNA
caggttcgccgcctggaggaacacaatacgatattaaaaaaggctacaaccgctcttgatgtccgactcgctgaa

SEQ ID NO: 576418 - DNA, 75 bp, synthetic construct
  source 1..75: mol_type = other DNA
gaccagcaacgtatccgcgaactggaaaagcaggttcgccgcctggaggaacacaatacgatattaaaaaaggct

SEQ ID NO: 576419 - DNA, 75 bp, synthetic construct
  source 1..75: mol_type = other DNA
cgtgccagtctgcggcgtagcacaacggttaatgatgtttgcttgtcagaagggtttcgttctctgctgatgcag

SEQ ID NO: 576420 - DNA, 75 bp, synthetic construct
  source 1..75: mol_type = other DNA
gtcagccgttcaatgccagaaattcaaggttttctgaaagagctattgatcaaacactttcatataaaccgtttg

SEQ ID NO: 576421 - DNA, 75 bp, synthetic construct
  source 1..75: mol_type = other DNA
gtcgtatatccttgcatcgggcgaaaatgtgtgtgctgggatatagaaaaagtcatcgcgatattgtaatttgtt

SEQ ID NO: 576422 - DNA, 75 bp, synthetic construct
  source 1..75: mol_type = other DNA
gaaggcaagcacggacagcggctttatcggctgaccgattacggcatgaaatacgcaccagaaacaatcccggct

SEQ ID NO: 576423 - DNA, 75 bp, synthetic construct
  source 1..75: mol_type = other DNA
ttcttgcagccctgcgtaacaacccgggcctgaacagtgctcgtattgccagcatgatcggcatgaccaccaaaa

SEQ ID NO: 576424 - DNA, 75 bp, synthetic construct
  source 1..75: mol_type = other DNA
ctaaataaagagcagatcgatttattattaaaaacaattcaaattaattcagatattaatccgttcatcactgat

SEQ ID NO: 576425 - DNA, 75 bp, synthetic construct
  source 1..75: mol_type = other DNA
tgatagctcaggagtggactattcgcctatagctgctgggtttaagggacttcttccctataccagtaaggcacg

SEQ ID NO: 576426 - DNA, 75 bp, synthetic construct
  source 1..75: mol_type = other DNA
atataacaataaacttgtgaagaggtttgtgagccagtttttattatttaggaaggaagaaaaagaaaaaatgaa

SEQ ID NO: 576427 - DNA, 75 bp, synthetic construct
  source 1..75: mol_type = other DNA
atgacggcggtccaccgcgaggaaggcatcagcctttaccgccgctatgacaaccgtggccggttaacctcggtg

SEQ ID NO: 576428 - DNA, 75 bp, synthetic construct
  source 1..75: mol_type = other DNA
tccaaaacatatatcagacttaattagtaagaaaaatgtaacccaagccaagagatatattttctcaactgaaaa

SEQ ID NO: 576429 - DNA, 75 bp, synthetic construct
  source 1..75: mol_type = other DNA
taaagctttcgctgaaggaacatggagttccgctattggcgccatgacccatgcaattggtccggcttcaatggc

SEQ ID NO: 576430 - DNA, 75 bp, synthetic construct
  source 1..75: mol_type = other DNA
tgagtgatccgctggggttgctggggggtgagcagacttaccggtatgtgcctaatcctctgggttggattgacc

SEQ ID NO: 576431 - DNA, 75 bp, synthetic construct
  source 1..75: mol_type = other DNA
tttatacccaaaattgagatccccatttttaatgccggacgcaaccaggccaatctggatatcgccgaaattcgc

SEQ ID NO: 576432 - DNA, 75 bp, synthetic construct
  source 1..75: mol_type = other DNA
caggttcaccgcctggaggaacacaatacgatattaaaaaaggctaccgcgctcttgatgtccgactcactgaac

SEQ ID NO: 576433 - DNA, 75 bp, synthetic construct
  source 1..75: mol_type = other DNA
tactcatatcgacaagccagtgaagcgatgaatgtcggttctaccacgcttgagagttgggtgcgccagctcagg

SEQ ID NO: 576434 - DNA, 75 bp, synthetic construct
  source 1..75: mol_type = other DNA
atcgatcgccctcaccgatggcctgctgcgcagcctgagcccacgcgagctggcgggtgtgctcgtgcacgaggt

SEQ ID NO: 576435 - DNA, 75 bp, synthetic construct
  source 1..75: mol_type = other DNA
catcaacggcggccgcgtttatttcggcgtccgcacatccaaatccagcaagcgttacatggtcgatgtgatcga

SEQ ID NO: 576436 - DNA, 75 bp, synthetic construct
  source 1..75: mol_type = other DNA
ggaacgatcctcgcaagccaattagtaaggaaagcattaaccaagtcattgaattactgggatataagggaagac

SEQ ID NO: 576437 - DNA, 75 bp, synthetic construct
  source 1..75: mol_type = other DNA
atgaaggcaatacaatgttgttatttccttgctttagtctccagtcatttaatggctggagttatgagtgatgat

SEQ ID NO: 576438 - DNA, 75 bp, synthetic construct
  source 1..75: mol_type = other DNA
tgcccgggtaatgaatgggcgtgacattcatactgataataaaggatttgcactggtcccatatgtagcaatcta

SEQ ID NO: 576439 - DNA, 75 bp, synthetic construct
  source 1..75: mol_type = other DNA
tcctgaatgtcttggcagtttctattttcagttctcttgtttcagttagtcactcagaggagtactttgatccag

SEQ ID NO: 576440 - DNA, 75 bp, synthetic construct
  source 1..75: mol_type = other DNA
tgttgatgtgagcgagaaagagagcgaagccttgttaagttttttgtttgcccatatcaccaaaccggagtttca

SEQ ID NO: 576441 - DNA, 75 bp, synthetic construct
  source 1..75: mol_type = other DNA
gccggagggcagcgacagcgaacatattacccgttacagcgacggcacagagatccggtatgaccgggcagctca

SEQ ID NO: 576442 - DNA, 75 bp, synthetic construct
  source 1..75: mol_type = other DNA
ctgaaatttgctataaccgggagacgcactcactgaccattattctggcggaagggggcacctatgccattaccg

SEQ ID NO: 576443 - DNA, 75 bp, synthetic construct
  source 1..75: mol_type = other DNA
gcttcccaatgaaaaaaagaaatttcagcgcagagtttaaacgcgaatccgctcaactggttgttgaccagaact

SEQ ID NO: 576444 - DNA, 75 bp, synthetic construct
  source 1..75: mol_type = other DNA
gcggaagatgcgcactatgtctaccgccacgatgaatacggcaggctggcggagaagacggaccgcatcccggaa

SEQ ID NO: 576445 - DNA, 75 bp, synthetic construct
  source 1..75: mol_type = other DNA
ccattattggaaacaaaacactctgttatgcgggcttatgatcccggtatcaaacaatttttactagatgattat

SEQ ID NO: 576446 - DNA, 75 bp, synthetic construct
  source 1..75: mol_type = other DNA
gaagagctatttgtagaatgcatgtcttcagaaactgaacagtatataaaaagcatgactattgaaactgcgggg

SEQ ID NO: 576447 - DNA, 75 bp, synthetic construct
  source 1..75: mol_type = other DNA
gcgatgaccgtaaagttcgcgtaatggcagccgattatgaaaatcagcttgacgagttttcccttgatgcgccca

SEQ ID NO: 576448 - DNA, 75 bp, synthetic construct
  source 1..75: mol_type = other DNA
ctcactggggaccaaagcagtttccatgcccaaaggtgtggctgtcgtcatcatcaacagtaacttcaaacgtac

SEQ ID NO: 576449 - DNA, 75 bp, synthetic construct
  source 1..75: mol_type = other DNA
gaacgcagcgccgcagcctggcggatgcgcttcagcagtccggcggcgaagacggtggcagtgtggtgttcccgc

SEQ ID NO: 576450 - DNA, 75 bp, synthetic construct
  source 1..75: mol_type = other DNA
gttccgcttgttcacgatatcgttcatgagctctttgccgatctcggacatatacctaaggaatacaaaaacagc

SEQ ID NO: 576451 - DNA, 75 bp, synthetic construct
  source 1..75: mol_type = other DNA
ttctgtcatcttctctggttgtaggtctgttgagtgttagttcttttacaagtgcaagtgaatatagctacactg

SEQ ID NO: 576452 - DNA, 75 bp, synthetic construct
  source 1..75: mol_type = other DNA
aacggtggttgagtttttttctttttattgtcctccctgttatgccttttctcaggattacggcattgataaagc

SEQ ID NO: 576453 - DNA, 75 bp, synthetic construct
  source 1..75: mol_type = other DNA
gccggaaactattggctcgcgtcctgatcttgctaaactaacagacagtgagttgttagagtctgttattaatcc

SEQ ID NO: 576454 - DNA, 75 bp, synthetic construct
  source 1..75: mol_type = other DNA
ctcccagatcgtaataatacagcgatagcaggtagttctatgggggcgtacatcagtttgtttgccgcaattctt

SEQ ID NO: 576455 - DNA, 75 bp, synthetic construct
  source 1..75: mol_type = other DNA
gcgttttttcgccggcactatggtttaatgacagcgcaatgctgaattttattcaggacaataatatagttgaaa

SEQ ID NO: 576456 - DNA, 75 bp, synthetic construct
  source 1..75: mol_type = other DNA
atagattatcatctatggggaggtgatacccactctgagtctgcatgggcaaaacgttttccagaaatgttgaaa

SEQ ID NO: 576457 - DNA, 75 bp, synthetic construct
  source 1..75: mol_type = other DNA
gcaatatattcgtaaccgtcgtctcgatttttgtgcagatgcgattcgccatgccgcagatgatgaaaaactggc

SEQ ID NO: 576458 - DNA, 75 bp, synthetic construct
  source 1..75: mol_type = other DNA
atggtgcaactcagtcatcgcctgttacaggagagcatgaataatccggcactttctgaaacagaaagtgaagct

SEQ ID NO: 576459 - DNA, 75 bp, synthetic construct
  source 1..75: mol_type = other DNA
agatttcattacttttgccacgcactctgctggaacaatattttccccatcaaaaacctgtctgcgcagagagac

SEQ ID NO: 576460 - DNA, 75 bp, synthetic construct
  source 1..75: mol_type = other DNA
gctgtttctcgcgccggataacgtgctgtggctcctatggaccgcacaaatatccggtaatcaggacaccgccat

SEQ ID NO: 576461 - DNA, 75 bp, synthetic construct
  source 1..75: mol_type = other DNA
gaagaatcagaagaggaaatcgtcgattttgaaaatatggaccagccaacgcggcgcaaattgatacggcgacta

SEQ ID NO: 576462 - DNA, 75 bp, synthetic construct
  source 1..75: mol_type = other DNA
tgatgccacgcacctgcggtttgatccggtcggggaatatcaaaaaatgctggcgggtgcggaaggtcgctaccc

SEQ ID NO: 576463 - DNA, 75 bp, synthetic construct
  source 1..75: mol_type = other DNA
gttgctggcaatgcggatagaggagaacgaaaaagcgaggttctggctgagcgtgctgacagaactgagaaattt

SEQ ID NO: 576464 - DNA, 75 bp, synthetic construct
  source 1..75: mol_type = other DNA
acggggcaaagagggcgactttaactcgcaggagagggcgcaactggcgtatcgcaaaaatctgctctatgtcca

SEQ ID NO: 576465 - DNA, 75 bp, synthetic construct
  source 1..75: mol_type = other DNA
agatgcgcaacaaggcgcgttcaccaaggaagatggcgagaaagtggttgatgaagcgggtaaacgcctgaaata

SEQ ID NO: 576466 - DNA, 75 bp, synthetic construct
  source 1..75: mol_type = other DNA
gggctctatcctcggcgttgcgccgtttacgctgattttaccctacgccagcctgcactggacgggggttttaac

SEQ ID NO: 576467 - DNA, 75 bp, synthetic construct
  source 1..75: mol_type = other DNA
tctttcaagttcccatgcagtggcgaagggggttctcacaggcccagatcagttacatataagttatattcattc

SEQ ID NO: 576468 - DNA, 75 bp, synthetic construct
  source 1..75: mol_type = other DNA
cttacaaaagactgtgaacttattgtaaagatcttaaaagagttttttgatactggtaacgtatcaaaggaactt

SEQ ID NO: 576469 - DNA, 75 bp, synthetic construct
  source 1..75: mol_type = other DNA
ctgcggcagggacagcaattattctggtgtcctctgaactgccagaagtcatggcacttagcgatcgtctggtgg

SEQ ID NO: 576470 - DNA, 75 bp, synthetic construct
  source 1..75: mol_type = other DNA
atcccacgatgtggttatatctagtagccacgctgttgcaaagggagtattaactggcccagatcaattgcatat

SEQ ID NO: 576471 - DNA, 75 bp, synthetic construct
  source 1..75: mol_type = other DNA
attaaaaaagtttatggtcgtaatgctgatgttatatatccaccagtagatgttgaaagatttacactcaatgag

SEQ ID NO: 576472 - DNA, 75 bp, synthetic construct
  source 1..75: mol_type = other DNA
gatttaaagaagagattaaagaatatgttatgaatcggcatgctgaatttttagcctctaaatctgtcgtatatt

SEQ ID NO: 576473 - DNA, 75 bp, synthetic construct
  source 1..75: mol_type = other DNA
gacagaaaggcatgggaggagaagaacggcagccagctactgtgggtgttaaagacgctggacagggcagcaggt

SEQ ID NO: 576474 - DNA, 75 bp, synthetic construct
  source 1..75: mol_type = other DNA
atggctgatggattttatcaggatgaatctgggactgggggaagatcatcaggtatccattcctgagttgttttg

SEQ ID NO: 576475 - DNA, 75 bp, synthetic construct
  source 1..75: mol_type = other DNA
aacggtgatgcgccagtgattaactggaactgtggtgccacacaacctgtaccggatgcgcctgtgccgaaagat

SEQ ID NO: 576476 - DNA, 75 bp, synthetic construct
  source 1..75: mol_type = other DNA
acccactgggccatggacagatggcggcaatacaggccattaataaggatgagcgcctgattgccgttcagggcg

SEQ ID NO: 576477 - DNA, 75 bp, synthetic construct
  source 1..75: mol_type = other DNA
gcgatcccgttgttataaacaggtatatcagcgtggatgcgccacgcctggaccgtctccgccgtcttgttcccc

SEQ ID NO: 576478 - DNA, 75 bp, synthetic construct
  source 1..75: mol_type = other DNA
gcaccacgcctggaccgtctccgccgtctggttccccgtactgctcaacgtcgaatcccgtcaccggaaaatgtc

SEQ ID NO: 576479 - DNA, 75 bp, synthetic construct
  source 1..75: mol_type = other DNA
ttgtagctgattggctagtaacttatgctggcgcagagcgagttattaaagaattcattgaactctatccgagtt

SEQ ID NO: 576480 - DNA, 75 bp, synthetic construct
  source 1..75: mol_type = other DNA
ctggcgaaaatgcgcaccgggctgccgttacaggcggttgggctaatcggtcaggacagcgacggcgattacatc

SEQ ID NO: 576481 - DNA, 75 bp, synthetic construct
  source 1..75: mol_type = other DNA
gcacctgcaagtaaagagacacgcgcagcattaatggtagaacggattgaggcacacaatagccctggttctctt

SEQ ID NO: 576482 - DNA, 75 bp, synthetic construct
  source 1..75: mol_type = other DNA
atgtaccgcaagctgggcggcgggctgctcggaattttgatggtaccggtgctcgcggcctataccgcctattct

SEQ ID NO: 576483 - DNA, 75 bp, synthetic construct
  source 1..75: mol_type = other DNA
attatctatccagaatgctcagcttcatctgtttgccttcctgtttgccgttgcggcaggtacggtgatcggcgg

SEQ ID NO: 576484 - DNA, 75 bp, synthetic construct
  source 1..75: mol_type = other DNA
gcacatttttccattcaccgggcgctaaccggctgctggatcttccggcgttcgaccagcttgatagcagcatga

SEQ ID NO: 576485 - DNA, 75 bp, synthetic construct
  source 1..75: mol_type = other DNA
agtttagcgggctggaaattcggttacccaacggcgaaccgcatatcgcgcatattgctgccgccgcgcgtgaac

SEQ ID NO: 576486 - DNA, 75 bp, synthetic construct
  source 1..75: mol_type = other DNA
agaattaataaagtttatggaagaaccgctgatgttatatatccccctgttgatgtgaaaagattcactttaaat

SEQ ID NO: 576487 - DNA, 75 bp, synthetic construct
  source 1..75: mol_type = other DNA
ttggatatcaagataaccaaagtatggaagaatatatgcgcaatgcaaaagctttcgtattcgctgctgaggagg

SEQ ID NO: 576488 - DNA, 75 bp, synthetic construct
  source 1..75: mol_type = other DNA
cgatatagtcctttcgagtagccatgcagttgcaaaaggcgtcttgactggtcctgatcaattgcatataagtta

SEQ ID NO: 576489 - DNA, 75 bp, synthetic construct
  source 1..75: mol_type = other DNA
gcataacttttacggcacggattccgattacgacgattcgaccaccgacaccgctaccatgcgttttgagcacga

SEQ ID NO: 576490 - DNA, 75 bp, synthetic construct
  source 1..75: mol_type = other DNA
gttgtcgatcgggcgttcaggtgtataagcggaagtgttgctgtttcggcctatgaattgaattcaatcccgttg

SEQ ID NO: 576491 - DNA, 75 bp, synthetic construct
  source 1..75: mol_type = other DNA
gtgccaatatcgatgaatttacggaaaccacttcccgagccattgaagtggtgggcggcgcggcaaaagggaagg

SEQ ID NO: 576492 - DNA, 75 bp, synthetic construct
  source 1..75: mol_type = other DNA
atcctgactttccagaaccatacgaatcgcccgctgacggacttcgggggaaaaacgagtatttttagtcatcct

SEQ ID NO: 576493 - DNA, 75 bp, synthetic construct
  source 1..75: mol_type = other DNA
atgaagccatacattctggcagccgtcctgatctcatcggcaccggcactatctgctatccattgtgggggcttt

SEQ ID NO: 576494 - DNA, 75 bp, synthetic construct
  source 1..75: mol_type = other DNA
acttctatgcgtaacatgatgtgttgtgccgttaccggtgaggccgcaggtactgccgccgtggtttcgctacag

SEQ ID NO: 576495 - DNA, 75 bp, synthetic construct
  source 1..75: mol_type = other DNA
acaggcggggctctcatacagaatcaaagagacatatccaggacagaataaagatgatttcgtcgaagaatttca

SEQ ID NO: 576496 - DNA, 75 bp, synthetic construct
  source 1..75: mol_type = other DNA
gcgacctgggaacggtagccagggaactcgatgagctgggtatatcaggcaattcactgagcgaagtgctcaaca

SEQ ID NO: 576497 - DNA, 75 bp, synthetic construct
  source 1..75: mol_type = other DNA
agtataccgttgatgcaaaaaccgaacggttactcgtggcccaacgccaagcggacgaatcgtttaaccgaattg

SEQ ID NO: 576498 - DNA, 75 bp, synthetic construct
  source 1..75: mol_type = other DNA
accgccacgcgtgcttaatcgtgagcgctgcgatgccgggctaacaggcttttactggtactcgtctgtgccgtg

SEQ ID NO: 576499 - DNA, 75 bp, synthetic construct
  source 1..75: mol_type = other DNA
gaaggctttaaccgcgattgggatcctgatgtgtttgtggaaggagctaaagaacgtattctgagcattgatttg

SEQ ID NO: 576500 - DNA, 75 bp, synthetic construct
  source 1..75: mol_type = other DNA
gtaacccggcctcccgttctcaccgtttcggctggcaggctgaagaagcggtagatatcgcccgtaatcagattg

SEQ ID NO: 576501 - DNA, 75 bp, synthetic construct
  source 1..75: mol_type = other DNA
ttctgcatattggctatggaataataatcaaccgaagccatttttcaaggattacaagactgttgcggaaattaa

SEQ ID NO: 576502 - DNA, 75 bp, synthetic construct
  source 1..75: mol_type = other DNA
accagttatgatgttatgacgcttgatgatgtgatgaaaacaatcgcattacagacgggaatttcatacagaatc

SEQ ID NO: 576503 - DNA, 75 bp, synthetic construct
  source 1..75: mol_type = other DNA
tagataactttgaatctgttcagctacctaatgtcagtacgacagaaatgtttaatacctctgttcttaaaccag

SEQ ID NO: 576504 - DNA, 75 bp, synthetic construct
  source 1..75: mol_type = other DNA
gacgacgacgcggaagaagacgaacgcgacgatgatgctgaagatgacggcgatgatccggatgcgtcagaagat

SEQ ID NO: 576505 - DNA, 75 bp, synthetic construct
  source 1..75: mol_type = other DNA
gcatacctggctaacgtagcaactatgggcggtgctggtacggcaggacttaccgggctaactactggcgtagcc

SEQ ID NO: 576506 - DNA, 75 bp, synthetic construct
  source 1..75: mol_type = other DNA
ctgtttataattcgtcaagttgcttagaggacgcattgaaatcagtggtcatccagaatttggattcatatgaga

SEQ ID NO: 576507 - DNA, 75 bp, synthetic construct
  source 1..75: mol_type = other DNA
aaataaagaaacgtggacgaaaaccgaaagaacacgataatgcagaattacaagatcatctaaggggagtacgct

SEQ ID NO: 576508 - DNA, 75 bp, synthetic construct
  source 1..75: mol_type = other DNA
tatgctacttctggttacatcgactcgatacatcacagatgaagcgataaagaacaatatcgagtactttgatgc

SEQ ID NO: 576509 - DNA, 75 bp, synthetic construct
  source 1..75: mol_type = other DNA
gggcaggcagtaatgccgcatatgaactgaccagcacatacacccccgcaggccagttacagagccagcacctga

SEQ ID NO: 576510 - DNA, 75 bp, synthetic construct
  source 1..75: mol_type = other DNA
tgtccactacggctacgacgataagggccgcctgacgggcgaacggcagacggtggagaacccggagacggggga

SEQ ID NO: 576511 - DNA, 75 bp, synthetic construct
  source 1..75: mol_type = other DNA
tataccgtggttgaaccgatgactaaaccactacatgaatgtcgaccggaagttcatcgtaaatatcttgatgtc

SEQ ID NO: 576512 - DNA, 75 bp, synthetic construct
  source 1..75: mol_type = other DNA
cgctacagcagaccatcgagaatacagccatgcggttgatggcaagggaatcgcaacgacccggcggtatgctcc

SEQ ID NO: 576513 - DNA, 75 bp, synthetic construct
  source 1..75: mol_type = other DNA
ggtggaaaaatacgatccagaactggcggcgctcaataaacgtaaaaaagccgttgaagacctggatgcggcaga

SEQ ID NO: 576514 - DNA, 75 bp, synthetic construct
  source 1..75: mol_type = other DNA
cgcaaggaagaagagaacgccagggagaaaaaacgcgcagccaaagaagcagaaaacgccgctaagcaggcagcg

SEQ ID NO: 576515 - DNA, 75 bp, synthetic construct
  source 1..75: mol_type = other DNA
actatgaggtggacgcccgcacgggtaagctactgatggcacaagaagaagcgaataaggcttttgatgccattg

SEQ ID NO: 576516 - DNA, 75 bp, synthetic construct
  source 1..75: mol_type = other DNA
taacggtggcaatctttatagggttggcgaacatggtaaaatggaaatgtttaccactactagcggaaaacaata

SEQ ID NO: 576517 - DNA, 75 bp, synthetic construct
  source 1..75: mol_type = other DNA
tcgataaagctgaggctattcgcaagcagaaagcgaaatgggacagccttgtcagcgagcaggataagcagaagg

SEQ ID NO: 576518 - DNA, 75 bp, synthetic construct
  source 1..75: mol_type = other DNA
tccctgtcattaaggactatacaaacaacggcattgatgggtctcttacgaaaaattcatttttatctggcacca

SEQ ID NO: 576519 - DNA, 75 bp, synthetic construct
  source 1..75: mol_type = other DNA
ggaataccactactaacccgaagacgcgcgggctgctggctcactctgtcctgatgtatgcccccgacagcgccc

SEQ ID NO: 576520 - DNA, 75 bp, synthetic construct
  source 1..75: mol_type = other DNA
ggaagaacaggcgcaggaaaaagtgctttgttgcacatggtggcaaacaaagcacataaatataaaaaacttgac

SEQ ID NO: 576521 - DNA, 75 bp, synthetic construct
  source 1..75: mol_type = other DNA
aaaagaattagatgcagtagatataatttcacctcgggaacttattgatcttgataaagatgttaactatctggt

SEQ ID NO: 576522 - DNA, 75 bp, synthetic construct
  source 1..75: mol_type = other DNA
ctatgttgtaaaaagtcttttcacgattttggagcttttcagacaatggaataatcagccgagcgatagaatcag

SEQ ID NO: 576523 - DNA, 75 bp, synthetic construct
  source 1..75: mol_type = other DNA
caatacagagctcgtagcctcaaaacagtttcatcacaaaaacatcaagtatataaaaaacttgggatccgtaat

SEQ ID NO: 576524 - DNA, 75 bp, synthetic construct
  source 1..75: mol_type = other DNA
aattaaaaagatacaaagttttgatagttttactcgttcttctccagttaattttgcctttataccaattataag

SEQ ID NO: 576525 - DNA, 75 bp, synthetic construct
  source 1..75: mol_type = other DNA
actgacctttcttgaccccaaagatgccacacgggttcaggggttttttcagcatttgcaggtcaggtttggtga

SEQ ID NO: 576526 - DNA, 75 bp, synthetic construct
  source 1..75: mol_type = other DNA
ggtgacaccggccctgtcggggcaaccggcgaacggggaccggcaggggatgctggtccggcaggtccgcagggg

SEQ ID NO: 576527 - DNA, 75 bp, synthetic construct
  source 1..75: mol_type = other DNA
accttgccactattcgtcgcctgaatgaagacacggcgacaaaaaacgctcaggccacacagtcaaaagaaagtg

SEQ ID NO: 576528 - DNA, 75 bp, synthetic construct
  source 1..75: mol_type = other DNA
cttgcagaagataaatttactgacgaccagttaatcgatttaatgctgcaatatccgattctgattaaccgtccg

SEQ ID NO: 576529 - DNA, 75 bp, synthetic construct
  source 1..75: mol_type = other DNA
gcgaaggcagccaccccgaaagcggtgaaagcggcaatggatgtggcaaatgaagcgaaaacaaaggcagaagag

SEQ ID NO: 576530 - DNA, 75 bp, synthetic construct
  source 1..75: mol_type = other DNA
tttcgattaaattataatggtgttattgcactgttagttgaaggaataaaaaatctgcgtaaagagattagcgac

SEQ ID NO: 576531 - DNA, 75 bp, synthetic construct
  source 1..75: mol_type = other DNA
tctctagataaattagtatcgtttgcatggataaatgaatataattttgtatccccgcagatcatctataagaat

SEQ ID NO: 576532 - DNA, 75 bp, synthetic construct
  source 1..75: mol_type = other DNA
acgatgtttatcggtcttttggcttattcagtaaagggaacaggcgggctgctatacggggggctgcgacctttt

SEQ ID NO: 576533 - DNA, 75 bp, synthetic construct
  source 1..75: mol_type = other DNA
gcacgtgagagaagatgatgagataactaagtacgtttatttgtgcgtaaaaaaagatcctgttgagaggtttga

SEQ ID NO: 576534 - DNA, 75 bp, synthetic construct
  source 1..75: mol_type = other DNA
ggaaatgagcaagtttatattccacagaaagagttaggtgtattaatagtggatttgcccctatatttccagaca

SEQ ID NO: 576535 - DNA, 75 bp, synthetic construct
  source 1..75: mol_type = other DNA
gtctatgctatgcaggtatctttatgaaccccaaagtaatgacatcttctgtcacagtaacatcattaattcaat

SEQ ID NO: 576536 - DNA, 75 bp, synthetic construct
  source 1..75: mol_type = other DNA
aaaataaaaaagttctggctcggggtgaactgaatgatagccttatcggcatactgattaactgtcctcttttga

SEQ ID NO: 576537 - DNA, 75 bp, synthetic construct
  source 1..75: mol_type = other DNA
gacaccttgatgaggagggggtgttcagtacggagcaaagaagggagatttttcataaatatgagcaactttata

SEQ ID NO: 576538 - DNA, 75 bp, synthetic construct
  source 1..75: mol_type = other DNA
cccgacgtgctggcggattatttgcgccgctttcagccagagtgggtggaaagatattgcgtggtggccgacttg

SEQ ID NO: 576539 - DNA, 75 bp, synthetic construct
  source 1..75: mol_type = other DNA
ttaacctcgccgctaactggcgctacagcgacgtgttgctggcatttagtcagttaacgaagccgattgatcatt

SEQ ID NO: 576540 - DNA, 75 bp, synthetic construct
  source 1..75: mol_type = other DNA
ttggatgaattgctggaagataaacaggtcattgatgacgttgtcagcgaacaggtgaaatcgcgcatgttgcca

SEQ ID NO: 576541 - DNA, 75 bp, synthetic construct
  source 1..75: mol_type = other DNA
atgcaataagctaaaggttaatttcaatgccaagagccgaatagaggttattgaacaaaatcttctattaaaaat

SEQ ID NO: 576542 - DNA, 75 bp, synthetic construct
  source 1..75: mol_type = other DNA
gcaccaagacatagcgtatattggagagaaattgctgctgaaattcaatgttatggtggaaataccatagcaact

SEQ ID NO: 576543 - DNA, 75 bp, synthetic construct
  source 1..75: mol_type = other DNA
ctcacaaaaacatgttgcagcggtgagagatggattcgtttttacgtttccaattatcatggcaagttcattaat

SEQ ID NO: 576544 - DNA, 75 bp, synthetic construct
  source 1..75: mol_type = other DNA
ggcgaaatattgaatacacatggattgaaaactatgacacagcccatttgacctgctccccgttgattagtacac

SEQ ID NO: 576545 - DNA, 75 bp, synthetic construct
  source 1..75: mol_type = other DNA
tatttattttagtttttatcagtgggtttattctcttcattgtttactcttatactgcagaaaaaatgatatata

SEQ ID NO: 576546 - DNA, 75 bp, synthetic construct
  source 1..75: mol_type = other DNA
cgatagttgtgaaactatacttcagaaaggtgtgtatggtcttgcttgtgtatcagcaaggaataatattatgaa

SEQ ID NO: 576547 - DNA, 75 bp, synthetic construct
  source 1..75: mol_type = other DNA
gtggcggcgattccactcattaaagcgaataccaaaaaagtcggccatgctgcgtctatcgttgggatgacggta

SEQ ID NO: 576548 - DNA, 75 bp, synthetic construct
  source 1..75: mol_type = other DNA
gctcatggaacgctctgtatgattgatgtgggtgatgcagcatttagatccggtggtaatttaattacatttctg

SEQ ID NO: 576549 - DNA, 75 bp, synthetic construct
  source 1..75: mol_type = other DNA
aaaggcggtaacttcatcgcaaaactctattgtggttttgccaactggttgggacatttattctcggatatggct

SEQ ID NO: 576550 - DNA, 75 bp, synthetic construct
  source 1..75: mol_type = other DNA
atcgaacgccctgaaaaccatgcgtaatcagccgcagctgcaggggaaattgctggcgaaaggctcctgggatta

SEQ ID NO: 576551 - DNA, 75 bp, synthetic construct
  source 1..75: mol_type = other DNA
tagatcaacaaggcgatcttgtatcctttgatggtacaccaggaaaagcaactacagttcaacctggtgataata

SEQ ID NO: 576552 - DNA, 75 bp, synthetic construct
  source 1..75: mol_type = other DNA
ttatcgttattcctctttcttttatcgtgttcttaatttcattagccatcgtagtttttttaagaaaatttgggt

SEQ ID NO: 576553 - DNA, 75 bp, synthetic construct
  source 1..75: mol_type = other DNA
gtcgccagtggctggcgcagtgcggactgacggtggagcaactggccagacaggtggagccggaatacacaccgg

SEQ ID NO: 576554 - DNA, 75 bp, synthetic construct
  source 1..75: mol_type = other DNA
gcccgggatgcgcatactctggcactctccgtgctggcagaaatcgcctctgtacgtctccatcatgaggaggat

SEQ ID NO: 576555 - DNA, 75 bp, synthetic construct
  source 1..75: mol_type = other DNA
gctctcgcatgcgtgatgatatcgggaatgaaaagaaaagatgcctgtgaattacatggtgtatcacagagtcat

SEQ ID NO: 576556 - DNA, 75 bp, synthetic construct
  source 1..75: mol_type = other DNA
attccagatgaggccgcgcccggtaaacaaaccgttcttcactctgcttacgcagaaccggaccaatgtcatcgc

SEQ ID NO: 576557 - DNA, 75 bp, synthetic construct
  source 1..75: mol_type = other DNA
ttgtcctgaacgcactgctgatggctgtatggcggcgtaatccccaaaaacaggtgctggttcattcggatcagg

SEQ ID NO: 576558 - DNA, 75 bp, synthetic construct
  source 1..75: mol_type = other DNA
ttgtatgggattcaagaatccctcagtattattctccctataatgtttgggcatattcattgctaaaagctgttg

SEQ ID NO: 576559 - DNA, 75 bp, synthetic construct
  source 1..75: mol_type = other DNA
tcgtgtaacgaataaaatattgaaaaataaaaaggaatcgatagctgcgagtgatatcattaaagcatatgaagt

SEQ ID NO: 576560 - DNA, 75 bp, synthetic construct
  source 1..75: mol_type = other DNA
ggggggatgttgcagcgtcggcggcacgcacatcgtcgcgtggcggcggcagatcttgcgctgttcacgcgccaa

SEQ ID NO: 576561 - DNA, 75 bp, synthetic construct
  source 1..75: mol_type = other DNA
ccgcgcacagctcaatgagcaggatttaccgatttcactaactgtggtcggcattgcaccggaagaactgtctgc

SEQ ID NO: 576562 - DNA, 75 bp, synthetic construct
  source 1..75: mol_type = other DNA
atatacgtggccagctgacgtaaaacgaattgacgttattctgactgcggggggcggcggtggcggtggatgtaa

SEQ ID NO: 576563 - DNA, 75 bp, synthetic construct
  source 1..75: mol_type = other DNA
acctgttccgacggtaaccgctggcacgtcaaaacgcccgggcgggaacgggcatgctctcgggattgttgaggc

SEQ ID NO: 576564 - DNA, 75 bp, synthetic construct
  source 1..75: mol_type = other DNA
cgttggcgaggtccggacattcctcgaaacctactgcggtgatagcgaggatgaatggctggtgacgatcgaggg

SEQ ID NO: 576565 - DNA, 75 bp, synthetic construct
  source 1..75: mol_type = other DNA
agaaatccgcggtctggcgtggatcgtcattcgttgggcgctggcggttcgtcctcgcgtgatgatgctcgagaa

SEQ ID NO: 576566 - DNA, 75 bp, synthetic construct
  source 1..75: mol_type = other DNA
cgatattcgaccgcaaaaagccactggctgaaaatacgctcaaacgcatcgctcgtggcatccagcggtttgtga

SEQ ID NO: 576567 - DNA, 75 bp, synthetic construct
  source 1..75: mol_type = other DNA
aaagcatggctacgcactggcggtaccgcatcttactaaattccgcaccggggccaccgggcagccagtgaccga

SEQ ID NO: 576568 - DNA, 75 bp, synthetic construct
  source 1..75: mol_type = other DNA
aaccgcgcccgctgaataaacctgctcataccattctgaagcaatcccgagcctgtcttgttgcgccagtgatag

SEQ ID NO: 576569 - DNA, 75 bp, synthetic construct
  source 1..75: mol_type = other DNA
gtgaacgccttatccggcccaccgatccggcacaggtttgtaggcatgataagacgcgccagcgtcgcatcaggc

SEQ ID NO: 576570 - DNA, 75 bp, synthetic construct
  source 1..75: mol_type = other DNA
gactccagcggcaggcttgataacaacgtttcgtatggcataaccctgacacagctggtgtatgactttggtaaa

SEQ ID NO: 576571 - DNA, 75 bp, synthetic construct
  source 1..75: mol_type = other DNA
cgactgatgtacctggacctcgaatgtcatcagggatgctatcgcctgcggaccggtgcaggtccgcagggtgaa

SEQ ID NO: 576572 - DNA, 75 bp, synthetic construct
  source 1..75: mol_type = other DNA
ctgtgcgccggacgttgctgcgacaacaggtgtgacattaaccagcataaatcaggctgcggcaaaaatggcgcg

SEQ ID NO: 576573 - DNA, 75 bp, synthetic construct
  source 1..75: mol_type = other DNA
attccgttgagggtattagcccggacggtcagtatttagcgttggtgtcatatggcctgcaaggttatgtcattc

SEQ ID NO: 576574 - DNA, 75 bp, synthetic construct
  source 1..75: mol_type = other DNA
atggcactttccccggatgaaaaaacattgttgatacccggtatggtcagaggtgacattgtacgcatcaatacc

SEQ ID NO: 576575 - DNA, 75 bp, synthetic construct
  source 1..75: mol_type = other DNA
agaggctgggttagcgcaatctgaaagtgcgcacagaacgcgagatgtgtaccaaaatgaatataaattgggtaa

SEQ ID NO: 576576 - DNA, 75 bp, synthetic construct
  source 1..75: mol_type = other DNA
accagccctgatgcaatttttggcgttatcacctacatcatcaacgatgcgcgttctggtgagtttgatgactac

SEQ ID NO: 576577 - DNA, 75 bp, synthetic construct
  source 1..75: mol_type = other DNA
ggtaaatcagcgaaagcaatgggtggaaatggtagtgatttattttctttagctgttgggcaaaattcttatgca

SEQ ID NO: 576578 - DNA, 75 bp, synthetic construct
  source 1..75: mol_type = other DNA
agcactaatgctatgatgtttcttgaaaatggtgagaatgagataagcttggaaattggtgcgttagggtggttt

SEQ ID NO: 576579 - DNA, 75 bp, synthetic construct
  source 1..75: mol_type = other DNA
cagtattccgtatcgataatccatctacgcctcaggaaaatgaagttgagattaaatccggggtaatgctgccaa

SEQ ID NO: 576580 - DNA, 75 bp, synthetic construct
  source 1..75: mol_type = other DNA
gtttctatcacattattaacaattgtgaggatgatagtgttaagagtaaagcgcaggcatatattgaactcttaa

SEQ ID NO: 576581 - DNA, 75 bp, synthetic construct
  source 1..75: mol_type = other DNA
actacgttgagcgccacatatcgctagatgagaaatttattgagcatccatcagctacatacttcatgagagcag

SEQ ID NO: 576582 - DNA, 75 bp, synthetic construct
  source 1..75: mol_type = other DNA
atggtagaaagatatttgttatggcgaagaacgggttaatccaaatggacaggacgcgctcgcttgatccgcagg

SEQ ID NO: 576583 - DNA, 75 bp, synthetic construct
  source 1..75: mol_type = other DNA
aagggtaatccgtcagtggcgacgttgaaacaggtggacgatagcgcattggacctgctgtctcagttgatcgac

SEQ ID NO: 576584 - DNA, 75 bp, synthetic construct
  source 1..75: mol_type = other DNA
atgaggcaaatagcaaatacaaaactgcggaaaagaaagaattctataacaagttattggcaccactacgctata

SEQ ID NO: 576585 - DNA, 75 bp, synthetic construct
  source 1..75: mol_type = other DNA
cgcgaacgtctgcgcgaaaaatatacgcttcaaaagcatatggaaacgctaactgcgttgtataaggaaattctg

SEQ ID NO: 576586 - DNA, 75 bp, synthetic construct
  source 1..75: mol_type = other DNA
aatgcagaaattcggcgtatcgtcgatgatatgttcgagacgatgtacgcagaaaaaggtattggcctggcggca

SEQ ID NO: 576587 - DNA, 75 bp, synthetic construct
  source 1..75: mol_type = other DNA
tccacacggcaacggttcggcagtgagcgataacgcggaagccaaagccatcaccatgttcgcaggggagcggca

SEQ ID NO: 576588 - DNA, 75 bp, synthetic construct
  source 1..75: mol_type = other DNA
ttgtgctgaactgttcgaaaattaaaacccaggacatctggttcctggaaacgcaatcgatgctggacagcgaac

SEQ ID NO: 576589 - DNA, 75 bp, synthetic construct
  source 1..75: mol_type = other DNA
atgtactaatcagtaaagtacttaaaccaatttatatcgcctggttaaagaacgaaatgctaaataacaataagt

SEQ ID NO: 576590 - DNA, 75 bp, synthetic construct
  source 1..75: mol_type = other DNA
tgatggcctgtacgttaaaccttcagtagagattgacggtactgaagaagaaatcaacggaatcaatctaacctt

SEQ ID NO: 576591 - DNA, 75 bp, synthetic construct
  source 1..75: mol_type = other DNA
cagaaaccaatcagccttgatccagtgaaggatattcaggctgaagtaatgcaactcgatgcaggtcttaaatcc

SEQ ID NO: 576592 - DNA, 75 bp, synthetic construct
  source 1..75: mol_type = other DNA
cggagttctgtttgaacccgggaatgtgcaggatctcgccaatgcaatggattacatgattgattccccggaaaa

SEQ ID NO: 576593 - DNA, 75 bp, synthetic construct
  source 1..75: mol_type = other DNA
aaagaaaataaaaacaaggaagtaatccaggatggaaatgaaaaaccagaagagggaactaacgaaacccctaca

SEQ ID NO: 576594 - DNA, 75 bp, synthetic construct
  source 1..75: mol_type = other DNA
agcagaggtacaggcagaaaaggataaagaaaataaaaacaaggaagtaatccaggatggaaatgaaaaaccaga

SEQ ID NO: 576595 - DNA, 75 bp, synthetic construct
  source 1..75: mol_type = other DNA
aggctagcacagaaaccagcaaccaggttaatctgaaatttgaaggggctaaacctcttctggaaatacaactga

SEQ ID NO: 576596 - DNA, 75 bp, synthetic construct
  source 1..75: mol_type = other DNA
acaaaattactgctgtaacttatggctttcttcaggttcacaatggaagccagtgggtaacgattaaaacgcaat

SEQ ID NO: 576597 - DNA, 75 bp, synthetic construct
  source 1..75: mol_type = other DNA
gatacggtcagccagcgggatgccagcacgacgcagaaaggtgtggtgcagttaagcagtgatactggcagtaat

SEQ ID NO: 576598 - DNA, 75 bp, synthetic construct
  source 1..75: mol_type = other DNA
taaaagaaaaactgaatacatccacatggcatctggtattactgggagccgccacatatggtgtttatccactga

SEQ ID NO: 576599 - DNA, 75 bp, synthetic construct
  source 1..75: mol_type = other DNA
gatgccttatgctggcgttattgcacaggaagtaatggaggcgataccagaagctgtgggatcgtttactcatta

SEQ ID NO: 576600 - DNA, 75 bp, synthetic construct
  source 1..75: mol_type = other DNA
tgatagcaccggtaattctctcgcgtgggcgttgggttcatcagccggcgtaagtaagatgctgtcgctaaaaaa

SEQ ID NO: 576601 - DNA, 75 bp, synthetic construct
  source 1..75: mol_type = other DNA
gtgggtcaggaggtgattgtggacttcctcaacggcgatccggaccagccgattattatggggcgtacctaccac

SEQ ID NO: 576602 - DNA, 75 bp, synthetic construct
  source 1..75: mol_type = other DNA
cgattattacaatcaggcaataagagaggaaccgatagaccttctggacagatcgttttcctccagttcatggcc

SEQ ID NO: 576603 - DNA, 75 bp, synthetic construct
  source 1..75: mol_type = other DNA
gtaagcattacacatatatctatgaataataattgtctcagaaatattgatatagataggctttcatcaattact

SEQ ID NO: 576604 - DNA, 75 bp, synthetic construct
  source 1..75: mol_type = other DNA
ctgttccggtcccggagagggttcatcttccggaaggccgtattgtgggacgaccactgacgttttccggccgta

SEQ ID NO: 576605 - DNA, 75 bp, synthetic construct
  source 1..75: mol_type = other DNA
ccggagcacagggtccgaaaggtgaaacgggagcaacaggtcccgctggtccgcggggagcgcagggaccgaaag

SEQ ID NO: 576606 - DNA, 75 bp, synthetic construct
  source 1..75: mol_type = other DNA
gattacggggattggcggttacaacgacggaaacaaaacccttattgacagggtatcttacaggccgcttcaggt

SEQ ID NO: 576607 - DNA, 75 bp, synthetic construct
  source 1..75: mol_type = other DNA
ttaaataaaccaaggtatcttttttttaaaactcatctaattactatcatcttctcttctctattttttattttt

SEQ ID NO: 576608 - DNA, 75 bp, synthetic construct
  source 1..75: mol_type = other DNA
acagttctctgaatttattgaggacattggtaaaagatggtggatattggcacacaaagtcgaagaacaactatt

SEQ ID NO: 576609 - DNA, 75 bp, synthetic construct
  source 1..75: mol_type = other DNA
atgaaaaggtatgttgtagataaccctgaggggcagttacatatttttagtggaatgggacgatattcttatgat

SEQ ID NO: 576610 - DNA, 75 bp, synthetic construct
  source 1..75: mol_type = other DNA
aactttcagaagtatggacactttttagcaacatgcctgatgacaccaccttaggtgttgatttagcagcgctat

SEQ ID NO: 576611 - DNA, 75 bp, synthetic construct
  source 1..75: mol_type = other DNA
acgcggttggccgtcctgctgatgctgcatgtgttcattcgctccagtgaactgcgtttcgcccgctggtcagag

SEQ ID NO: 576612 - DNA, 75 bp, synthetic construct
  source 1..75: mol_type = other DNA
actgtttctattctgttgcgataacaaaacaacacgcaatagaaatggttaataacttaacgaaatttatagaat

SEQ ID NO: 576613 - DNA, 75 bp, synthetic construct
  source 1..75: mol_type = other DNA
tctattctgttgcgataaccaaagaatacgcagaagaaatgattaagaatttatcaaaatttatagaatcacaag

SEQ ID NO: 576614 - DNA, 75 bp, synthetic construct
  source 1..75: mol_type = other DNA
agatgttatttccataaagcatgagttgtatgatattgagtatctacttagcgctcataattcaagctgtaaagt

SEQ ID NO: 576615 - DNA, 75 bp, synthetic construct
  source 1..75: mol_type = other DNA
actttcagatggaaaatataaatacacaggaggaaataattatgtttatttccatcgcccaatcaatgcggatga

SEQ ID NO: 576616 - DNA, 75 bp, synthetic construct
  source 1..75: mol_type = other DNA
acgaccgtcgccactatgcgactcacttcgttaaacacaaagtggatcacgatgaaaccgcagcattcatcgctc

SEQ ID NO: 576617 - DNA, 75 bp, synthetic construct
  source 1..75: mol_type = other DNA
tcaagttcggggattagcatttacatgcctatctgatttcaccgagcctcaacctttctggcgaatcaccaacaa

SEQ ID NO: 576618 - DNA, 75 bp, synthetic construct
  source 1..75: mol_type = other DNA
aattgaagaagctttaaagaaacattgggaacataacgatgataaaaatatatttttaaaatgttttaagttgtg

SEQ ID NO: 576619 - DNA, 75 bp, synthetic construct
  source 1..75: mol_type = other DNA
gtgaccgacgatggggcggggctaaaccgtgagcgaattctggcaaaagcggcctcgcaaggtttgactgtcagc

SEQ ID NO: 576620 - DNA, 75 bp, synthetic construct
  source 1..75: mol_type = other DNA
atctatcccataataaactaacaagtttacacaatgccttatttcccaacttgaatacgttacttatcaacaaca

SEQ ID NO: 576621 - DNA, 75 bp, synthetic construct
  source 1..75: mol_type = other DNA
actacgatattgttattctcgatacaccaccgattctagcggttactgatgcagcagtgattggtcattatgtag

SEQ ID NO: 576622 - DNA, 75 bp, synthetic construct
  source 1..75: mol_type = other DNA
taaagggataaaaaaaatcgcatcagctgattttgacttcatatcccgaggaatggccccaccaaaccccgctga

SEQ ID NO: 576623 - DNA, 75 bp, synthetic construct
  source 1..75: mol_type = other DNA
tttacagtcaagaatgatccttgggaaaacgattgatgatctaaacttgcaatataaaatagagcaaaaacattt

SEQ ID NO: 576624 - DNA, 75 bp, synthetic construct
  source 1..75: mol_type = other DNA
tctttatttcggtatttctcattaagataatcacatccaatagttatagaggaactgtaaccttagaaactctag

SEQ ID NO: 576625 - DNA, 75 bp, synthetic construct
  source 1..75: mol_type = other DNA
aaaaaaggcttcaaaatcgccagacggaatatcaaaatgaaattaatcaactatctgcgccaggtgttaattttg

SEQ ID NO: 576626 - DNA, 75 bp, synthetic construct
  source 1..75: mol_type = other DNA
actcaccgacagaagcagaagagatagatttagggcgtctcatcggtgagctaattgatcatcgcaagttgataa

SEQ ID NO: 576627 - DNA, 75 bp, synthetic construct
  source 1..75: mol_type = other DNA
tggctccgcaagatggcaatgaaatagattttggtcgattagttggagaagtcattgaccatcgaaaattgatag

SEQ ID NO: 576628 - DNA, 75 bp, synthetic construct
  source 1..75: mol_type = other DNA
ctgatcggattagtctttgggttgtttgtttcagtcggcatagtcttagctagaatgttcttacgccgtggaata

SEQ ID NO: 576629 - DNA, 75 bp, synthetic construct
  source 1..75: mol_type = other DNA
ccattcgtggtttacgcacaagtttgcattttgcaatgatggaagcaaaaaataatgtcctaatgatatcgggtg

SEQ ID NO: 576630 - DNA, 75 bp, synthetic construct
  source 1..75: mol_type = other DNA
ctgtatacttaacggtgttgtaaagaaagctagcagctactatagatatggccataatcattatggctattctta

SEQ ID NO: 576631 - DNA, 75 bp, synthetic construct
  source 1..75: mol_type = other DNA
agtgtttcaagatttgagcagagtggaattgtagttaaaggttgtatattgaatggagtggtcaaaaaagccagt

SEQ ID NO: 576632 - DNA, 75 bp, synthetic construct
  source 1..75: mol_type = other DNA
acaataactctgctcgcatctacggatgtgatttttccctgttggtggccgtttttgttcaggcgatgctttatc

SEQ ID NO: 576633 - DNA, 75 bp, synthetic construct
  source 1..75: mol_type = other DNA
cttttttgtcgaaacagaatgacattgatttatcaggacttaatttaactactcaaccaccagggctgcaaaact

SEQ ID NO: 576634 - DNA, 75 bp, synthetic construct
  source 1..75: mol_type = other DNA
atgaaaacaatcactttaaacgacaaccatattgcacatttaaacgccaaaaacactacaaaactggaatattta

SEQ ID NO: 576635 - DNA, 75 bp, synthetic construct
  source 1..75: mol_type = other DNA
tgagaccattggcaacaatcagatgattgcggttaccaacaatcagatacagacggtgggcgttaaccagataga

SEQ ID NO: 576636 - DNA, 75 bp, synthetic construct
  source 1..75: mol_type = other DNA
tgtggataacgaattgtttcactatcctattaaaaagcatataccccatataatatacacacttacaagacagag

SEQ ID NO: 576637 - DNA, 75 bp, synthetic construct
  source 1..75: mol_type = other DNA
aagtagaacgtacacttacaggtgaaatccatcgtccggaatgccgaaaagaagccgctgaaaggataaactgtg

SEQ ID NO: 576638 - DNA, 75 bp, synthetic construct
  source 1..75: mol_type = other DNA
aaacaaagcagtccctacagcgactcccagaacagaatttatatagctggatgcatgaattgaataaatggaaag

SEQ ID NO: 576639 - DNA, 75 bp, synthetic construct
  source 1..75: mol_type = other DNA
aaccgtgctgcggtcagccgtaaccgtcaggtgggtgaacgcaacagtcgcgccattgcttttcaggcacgtacc

SEQ ID NO: 576640 - DNA, 75 bp, synthetic construct
  source 1..75: mol_type = other DNA
tggattgtaaaccagaacgaccagaaaaaacaaaacccgccgaagcgggttaagtgcgggtgcgttgaggatgcc

SEQ ID NO: 576641 - DNA, 75 bp, synthetic construct
  source 1..75: mol_type = other DNA
tataattttcaagtggacgatgcaaaatttagacgcgataatgtaaaagaaataatttctactttattcgctaac

SEQ ID NO: 576642 - DNA, 75 bp, synthetic construct
  source 1..75: mol_type = other DNA
aatagtggtaactggtatctgaccagcggcagtgattctcctgaactgcagccggagccagacccgatgccgaat

SEQ ID NO: 576643 - DNA, 75 bp, synthetic construct
  source 1..75: mol_type = other DNA
cgattcactgctgagcttaaatggcggcagtctgacggttaccaacgggggcacttcaaccggttcgttaacggg

SEQ ID NO: 576644 - DNA, 75 bp, synthetic construct
  source 1..75: mol_type = other DNA
ttgtgaaattggtggttatgctccaattatttctgacaacgactttgattctacatatctagtatcaacttcggg

SEQ ID NO: 576645 - DNA, 75 bp, synthetic construct
  source 1..75: mol_type = other DNA
tgaatgtggataatcgcctgccggaaggcgttaccggtgctctggtgatggacggctctgcggatatctccggta

SEQ ID NO: 576646 - DNA, 75 bp, synthetic construct
  source 1..75: mol_type = other DNA
ggtgatatcagcggtcatgtcggctcgcatgtggagttgtcgcgccggagtcactggaatatgacgaaaagctcc

SEQ ID NO: 576647 - DNA, 75 bp, synthetic construct
  source 1..75: mol_type = other DNA
atgcgtccatatgtggaacgcggcacggtgatagaatttggcctgtgggatgtggttcagcaaggcaaaatttca

SEQ ID NO: 576648 - DNA, 75 bp, synthetic construct
  source 1..75: mol_type = other DNA
ggatctattacagtgcgggcagtattgcgacctttactattccgttgattacggctcatctgtcccaaagaagta

SEQ ID NO: 576649 - DNA, 75 bp, synthetic construct
  source 1..75: mol_type = other DNA
ttacgatgatagtggcaggcgactggctcgcgaaaccctgatacgtaattacccaaagcccaaaataaagacgcc

SEQ ID NO: 576650 - DNA, 75 bp, synthetic construct
  source 1..75: mol_type = other DNA
gaaaatcaagagagcaccttcaatggacgccccccgtctcgttacaagaaacgatggtaaaaacagcgaagtatt

SEQ ID NO: 576651 - DNA, 75 bp, synthetic construct
  source 1..75: mol_type = other DNA
atatctcttcgtcgtaagtttaatctctcggcccgtggagcaaaccttgcaggaatcaatggaatagcggagcag

SEQ ID NO: 576652 - DNA, 75 bp, synthetic construct
  source 1..75: mol_type = other DNA
cgatattgcacttaatgaaacggaaagcaaaaagccggacattccctgtcatgtcggtatgaaaccggtatcgct

SEQ ID NO: 576653 - DNA, 75 bp, synthetic construct
  source 1..75: mol_type = other DNA
tctgaaaaagccctgtatactccactgggactttaatcattttgtggtgctggtgagtactaggagacagcggtt

SEQ ID NO: 576654 - DNA, 75 bp, synthetic construct
  source 1..75: mol_type = other DNA
attcaacgattgttaaaactagtgtcgcgaaatctgccactgccttttaaatcggtaaaaaataagcgtgctctt

SEQ ID NO: 576655 - DNA, 75 bp, synthetic construct
  source 1..75: mol_type = other DNA
atttagctaaaaatgtgttcgctgtgcatggtgttaatgctgcaggaaaagctgttttagttaagcctcttgtgc

SEQ ID NO: 576656 - DNA, 75 bp, synthetic construct
  source 1..75: mol_type = other DNA
cggttcgttatgctttacaggttcgcaatttttgcgcccgggagctgatgattgatcgtgtccccgccaccatcg

SEQ ID NO: 576657 - DNA, 75 bp, synthetic construct
  source 1..75: mol_type = other DNA
gcagggcccccgcggggagcctggtccggcgggcagcgcagcaaatgtggtggacgcgacgacggcacagaaggg

SEQ ID NO: 576658 - DNA, 75 bp, synthetic construct
  source 1..75: mol_type = other DNA
ccaccgtgggggctaccgggcatggcgtcgcagagcgggatattcagtcactcgttaaagggcgggccgacgaac

SEQ ID NO: 576659 - DNA, 75 bp, synthetic construct
  source 1..75: mol_type = other DNA
tttactgacgatcatttaatcgattttatgcttcagcatccgatcctgattaaccgcccgattgtggtgacaccg

SEQ ID NO: 576660 - DNA, 75 bp, synthetic construct
  source 1..75: mol_type = other DNA
taaattataatggtgttattgcgctgttagttgaaggaataaaaaatctgcgtaaagagattagcgaccttaaag

SEQ ID NO: 576661 - DNA, 75 bp, synthetic construct
  source 1..75: mol_type = other DNA
tgattattttaaatatcttaatttcatcatctgcaaggttgctccatattttttagatagtatccatatatgctt

SEQ ID NO: 576662 - DNA, 75 bp, synthetic construct
  source 1..75: mol_type = other DNA
tcttaaaagggcataagtcctcccaaaaagaaatagcgtctattgtggacgtattgcttccaaatagtccaacgg

SEQ ID NO: 576663 - DNA, 75 bp, synthetic construct
  source 1..75: mol_type = other DNA
ccggatcatctggaaacggcgctccgtttcaatcctctggcaacgctgccaagtggcgacaaagtggcggcagcg

SEQ ID NO: 576664 - DNA, 75 bp, synthetic construct
  source 1..75: mol_type = other DNA
ccctatcagtaaagagctttatgaagagatcatggcgcttgatggattcaatttcttcacagactgctattttca

SEQ ID NO: 576665 - DNA, 75 bp, synthetic construct
  source 1..75: mol_type = other DNA
ggacgaccggggcacgacgactgaattacgggttggcccggcagatgcttatctccccgagcctgttaccgccag

SEQ ID NO: 576666 - DNA, 75 bp, synthetic construct
  source 1..75: mol_type = other DNA
tgttggttttcatccgttcaagcgagctgcgttttgctcgctggtcagaagtggattttgatactgccatgtgga

SEQ ID NO: 576667 - DNA, 75 bp, synthetic construct
  source 1..75: mol_type = other DNA
tatactggccatattttaatgcagagaacgaaagttatgaagactatccggaaggaagggactatgtaagaggtt

SEQ ID NO: 576668 - DNA, 75 bp, synthetic construct
  source 1..75: mol_type = other DNA
ggtaataaaattaagagaaaagataagtcgggaaatgttgttaaatggactgagtctaattcgtcattaagaata

SEQ ID NO: 576669 - DNA, 75 bp, synthetic construct
  source 1..75: mol_type = other DNA
cgacctgctcttcagttgaagctaatcccagaactattacggcgcatagatagttataccggtagacctcttact

SEQ ID NO: 576670 - DNA, 75 bp, synthetic construct
  source 1..75: mol_type = other DNA
gcaacgccaagccactcgataaaccttacaaactcagcgacgcactgggcctttacctgctgattaaacccaacg

SEQ ID NO: 576671 - DNA, 75 bp, synthetic construct
  source 1..75: mol_type = other DNA
tcatggattcaggacaatggcctgtagcgccctgaatgaatccggtttatggtcaaaggatgccattgagcgtca

SEQ ID NO: 576672 - DNA, 75 bp, synthetic construct
  source 1..75: mol_type = other DNA
cttcagggcaatggcatgcagttcattgattgagtcaggattgtggtcaaaagatgctgtggagcgacaaatgag

SEQ ID NO: 576673 - DNA, 75 bp, synthetic construct
  source 1..75: mol_type = other DNA
ttctgcaacgtgacgcatatcagaccggtcagggccgttataaagcgacgcttcagcgtggagtaatggcccccg

SEQ ID NO: 576674 - DNA, 75 bp, synthetic construct
  source 1..75: mol_type = other DNA
tgggttgattgattacaatccagcccaggaaatggctggtgctgttgcttccagtaatcgtatccatcggccagc

SEQ ID NO: 576675 - DNA, 75 bp, synthetic construct
  source 1..75: mol_type = other DNA
catcgccctgcacttgagctgaaacgtctacctgaactgctccaccgaattgacggttacacgggacgccctttg

SEQ ID NO: 576676 - DNA, 75 bp, synthetic construct
  source 1..75: mol_type = other DNA
gcacaccgacgcagaaatcatccgcctcagtgactgcgtgattgacgtccttctggacggtcacggcaaccctct

SEQ ID NO: 576677 - DNA, 75 bp, synthetic construct
  source 1..75: mol_type = other DNA
agagtgcggaacatgagtctggcctgcaattgccctccggccgggcaagacagaaagggaccaaaaggcccacat

SEQ ID NO: 576678 - DNA, 75 bp, synthetic construct
  source 1..75: mol_type = other DNA
aataaatttaatcaacgcggatacggacgaggttaacgaactggtagttgccatgacgaacgcgctgtttctgta

SEQ ID NO: 576679 - DNA, 75 bp, synthetic construct
  source 1..75: mol_type = other DNA
atggaatttttaaaaatgaagaacgttcttcttgttggattactcacgctttcctgtccagtcattgctcaggac

SEQ ID NO: 576680 - DNA, 75 bp, synthetic construct
  source 1..75: mol_type = other DNA
cggcggtggattcagccagaaagtgtcagtctgtagggttgaaaatgatagccggagatcagaaacaacacgttg

SEQ ID NO: 576681 - DNA, 75 bp, synthetic construct
  source 1..75: mol_type = other DNA
aactacgccggagccacgctcaccgatggtctactgacagttcgctttttaagtgatgataatctgcgttgctag

SEQ ID NO: 576682 - DNA, 75 bp, synthetic construct
  source 1..75: mol_type = other DNA
gcacgtggccaatggagaacttacctgcgttgcccggaaaccatgggtgggaacgatgctgttctacctggggaa

SEQ ID NO: 576683 - DNA, 75 bp, synthetic construct
  source 1..75: mol_type = other DNA
ttaactggattggtaagcataagcgtcctcgtctggagccgcgtattctgctcgaagataaggagttatcttatg

SEQ ID NO: 576684 - DNA, 75 bp, synthetic construct
  source 1..75: mol_type = other DNA
cggaaatcatgatcaacctttccgggaacctgaccgccaaagcccggcagtacggcgcaaatatgtcgcagttcg

SEQ ID NO: 576685 - DNA, 75 bp, synthetic construct
  source 1..75: mol_type = other DNA
ctaagtgactgcgtgattgacgtacttctcgatggcacaggtcttccaattcagcgcggaggtgagcatgcaatg

SEQ ID NO: 576686 - DNA, 75 bp, synthetic construct
  source 1..75: mol_type = other DNA
ataaagcagaacatctggaagaacgccgcttgatgctacaatggtgggccgattttctggatgcaaacagagaaa

SEQ ID NO: 576687 - DNA, 75 bp, synthetic construct
  source 1..75: mol_type = other DNA
caaccctggatatctgtgggcatggattcaggacgatggcatgtagcgcgttaatagaatcaggattgtggtccc

SEQ ID NO: 576688 - DNA, 75 bp, synthetic construct
  source 1..75: mol_type = other DNA
agttaggcaaaagggttcattttgaagatgaagcgagttttattgaaacattatactcggatatagaagtcataa

SEQ ID NO: 576689 - DNA, 75 bp, synthetic construct
  source 1..75: mol_type = other DNA
gcgaaatcggcgcaggtcaccggtaactttaatacgctggtgatgttgcgtgtccgtgaactgatgaccgcgaaa

SEQ ID NO: 576690 - DNA, 75 bp, synthetic construct
  source 1..75: mol_type = other DNA
cgtacctatttcgataaaatcgtggcctccctgctgccgttgctggaaaaactgaccacaggaaagacggcagag

SEQ ID NO: 576691 - DNA, 75 bp, synthetic construct
  source 1..75: mol_type = other DNA
gatgcgcagctcgcggcggtgaccaaacgcgctgaagatgcagaggccgcactggcagaagcaatcaagaaggcg

SEQ ID NO: 576692 - DNA, 75 bp, synthetic construct
  source 1..75: mol_type = other DNA
cgcgcccaaagcaggccaggtggtcggcaatttcaacaacctgattatgctgcgggtgcgcgaaaccaccaccgc

SEQ ID NO: 576693 - DNA, 75 bp, synthetic construct
  source 1..75: mol_type = other DNA
tgcccgcttgctcagcgccgatcgctggctgaacccggtgcgcccgctgctgcccgttggcggcaatccttggtt

SEQ ID NO: 576694 - DNA, 75 bp, synthetic construct
  source 1..75: mol_type = other DNA
gtttctcgggcgcgggtttcgctggacgcaaaaacacacccagcgactgcaggatacgctacgtccggaagtggc

SEQ ID NO: 576695 - DNA, 75 bp, synthetic construct
  source 1..75: mol_type = other DNA
atggacagccagggattcaacagcttatttcccatcctttcaatggcaggcgcgggccaggtgggcgcggcgctg

SEQ ID NO: 576696 - DNA, 75 bp, synthetic construct
  source 1..75: mol_type = other DNA
taattggcaacatgattcgtcagtacttcagccaggaacgaccagaagaagagaccatacaggcccttggtaatg

SEQ ID NO: 576697 - DNA, 75 bp, synthetic construct
  source 1..75: mol_type = other DNA
atatagtgaagactcagcatttaggcatctaatcgattgggcatggggcagaacagataaaagcttcgtttcgga

SEQ ID NO: 576698 - DNA, 75 bp, synthetic construct
  source 1..75: mol_type = other DNA
gcactggcgctaccattgcctgaaggtagcccactggtggtaaagcgcattacgccggttgttgaacgccagttg

SEQ ID NO: 576699 - DNA, 75 bp, synthetic construct
  source 1..75: mol_type = other DNA
atgacgcggcatctaatggataacgtagccgggcaatgtggcgcaacatggcaattcgtagacggtcagcgccag

SEQ ID NO: 576700 - DNA, 75 bp, synthetic construct
  source 1..75: mol_type = other DNA
tgtgctcaacagcgctaccgggcttattggaatgccgcagcagactatcggtaacggcgtaaacgtccgcgcgct

SEQ ID NO: 576701 - DNA, 75 bp, synthetic construct
  source 1..75: mol_type = other DNA
caggcctttgccctgctcgaaggcgggcagttgtggaaaattcgtctgccgctgcccatcgacgacaaacactgg

SEQ ID NO: 576702 - DNA, 75 bp, synthetic construct
  source 1..75: mol_type = other DNA
attttctggagggaatgaaggagtatattaatcccggtaaattcattatcagcggcatgcagacagataatgtgg

SEQ ID NO: 576703 - DNA, 75 bp, synthetic construct
  source 1..75: mol_type = other DNA
tccattcggtgcaattgtcacacacggagagaataaaaatggcagcattgtcgcggaaaatggtcaggtttatct

SEQ ID NO: 576704 - DNA, 75 bp, synthetic construct
  source 1..75: mol_type = other DNA
caattgctgggacgtatggtacgaactccactggcaaggcgtattccgggtaatgagcgcttaaactcagtagaa

SEQ ID NO: 576705 - DNA, 75 bp, synthetic construct
  source 1..75: mol_type = other DNA
cgctgtctatttttgtcgtcttactcctgctggtagcgggagagttacaggcgggggttgtggttgggggaacgc

SEQ ID NO: 576706 - DNA, 75 bp, synthetic construct
  source 1..75: mol_type = other DNA
agaaattaaaaagtaatcagggatgtaaaagtcaaactaggattgaagagcaaataatgattatgatgaagggta

SEQ ID NO: 576707 - DNA, 75 bp, synthetic construct
  source 1..75: mol_type = other DNA
ttacaacagaagaggttgtacacttaaatgctgtggatgctatacgtctgaaagtgtttttagcaaagtatttaa

SEQ ID NO: 576708 - DNA, 75 bp, synthetic construct
  source 1..75: mol_type = other DNA
cggcggcgtggcgaaactggatgaaggtcaccggctggccgcactctggcaggcgctgccggaagaactccgctt

SEQ ID NO: 576709 - DNA, 75 bp, synthetic construct
  source 1..75: mol_type = other DNA
aaatcagactcaccgaagcggagcatcagcggctacttgaacgctgtgaccgtaagcatttggccgagtggttac

SEQ ID NO: 576710 - DNA, 75 bp, synthetic construct
  source 1..75: mol_type = other DNA
aaatgcggctggtgagcatgaagtcgtgatcgtcttcgatccgaaatgcgacgccgacttgctcaagcgcatgta

SEQ ID NO: 576711 - DNA, 75 bp, synthetic construct
  source 1..75: mol_type = other DNA
atcaatggttcagctggagtgaagggtattccagttgtgtgggggatttccgccacagttgaacgtttcgaccaa

SEQ ID NO: 576712 - DNA, 75 bp, synthetic construct
  source 1..75: mol_type = other DNA
attgaaccgcagcgggtgcaggaatcaacctgggtgcgagtactgattgctaaagatgccatcagcactggctgg

SEQ ID NO: 576713 - DNA, 75 bp, synthetic construct
  source 1..75: mol_type = other DNA
cggcctacgttttaatgccagcaaaaatggtgaattacctgggttatcagttcgcgggtgggcttgataaaccgt

SEQ ID NO: 576714 - DNA, 75 bp, synthetic construct
  source 1..75: mol_type = other DNA
aattactagaagcctttattgatagcttgatatggcgagatattaaggctattgatttcgaaaaaatcagacctt

SEQ ID NO: 576715 - DNA, 75 bp, synthetic construct
  source 1..75: mol_type = other DNA
gaaaaatcttaaatcgttcgttgcgtggtattactttaaattcatatgctgatgaagaatctagatttgaccttt

SEQ ID NO: 576716 - DNA, 75 bp, synthetic construct
  source 1..75: mol_type = other DNA
ggatggttcccaacgattgagaactataagggattttctctataacgattttgtcttgcaaaatcttgagaaaat

SEQ ID NO: 576717 - DNA, 75 bp, synthetic construct
  source 1..75: mol_type = other DNA
cgcgggacaggctgcaccgtgagacggtgcgcagcttcggcagcatggcaggcagtaatgccgcatatgaactga

SEQ ID NO: 576718 - DNA, 75 bp, synthetic construct
  source 1..75: mol_type = other DNA
acagtatattaaagaacgctcaggtaaacagactcatatcccgggaacatttttaactggtggaacagtaggcac

SEQ ID NO: 576719 - DNA, 75 bp, synthetic construct
  source 1..75: mol_type = other DNA
agagaagataacgagtagtgttaccttggtcagcctccttaaggctatcgggatggagtgctttgtaaactacta

SEQ ID NO: 576720 - DNA, 75 bp, synthetic construct
  source 1..75: mol_type = other DNA
ctccgatggtcttgacggatatagagatgatgtatcagcatttatatttagatatataaagcgaatgaatgagtt

SEQ ID NO: 576721 - DNA, 75 bp, synthetic construct
  source 1..75: mol_type = other DNA
ctgcaggtaacgacctgagtctgaatgcagtcagggaaagcaaaaacagtcgcaacggcaggtcagaaagtcatg

SEQ ID NO: 576722 - DNA, 75 bp, synthetic construct
  source 1..75: mol_type = other DNA
cagttcatcatccaccacctcacagggcagcagcatcagcgccggcggtaacctggcgatggctgcaggccataa

SEQ ID NO: 576723 - DNA, 75 bp, synthetic construct
  source 1..75: mol_type = other DNA
gccagtgaccatcgactatcccacagcactggccttacggcagatggcgctcgttcatcgacaggaatttaaacc

SEQ ID NO: 576724 - DNA, 75 bp, synthetic construct
  source 1..75: mol_type = other DNA
tgcggtcttaccggaaacagcaccgcatcagcagcagtgggagcacaaagcgggaagaatgctgttgagaataac

SEQ ID NO: 576725 - DNA, 75 bp, synthetic construct
  source 1..75: mol_type = other DNA
tccggggttatactttaagcggaactatagatgacaatcatatttcagttaatcaaggggatatttatagtatag

SEQ ID NO: 576726 - DNA, 75 bp, synthetic construct
  source 1..75: mol_type = other DNA
tgtgccagcgcaagactgaaagttattgcgtcgaaagaagggtacgaagatggcccttataactcgaaatacagc

SEQ ID NO: 576727 - DNA, 75 bp, synthetic construct
  source 1..75: mol_type = other DNA
caaagtacctatggcagattttagttcagtagatgtaaatcttggtgttgcaaccttggtgtctcctcaatatat

SEQ ID NO: 576728 - DNA, 75 bp, synthetic construct
  source 1..75: mol_type = other DNA
caagggccatgggagccttacgtaagagatatagatcccactatcttacttaaagaaactggaacgaaaaaaata

SEQ ID NO: 576729 - DNA, 75 bp, synthetic construct
  source 1..75: mol_type = other DNA
gcgttctcaacaatgcacagtctggtcatcgggcagatcaagacggataagaaatccaatgagatcacagctatc

SEQ ID NO: 576730 - DNA, 75 bp, synthetic construct
  source 1..75: mol_type = other DNA
acggttctacagcaactaaagaggatgcaatagaagtctttaaggattggaatatttcaggtgactctgcatttt

SEQ ID NO: 576731 - DNA, 75 bp, synthetic construct
  source 1..75: mol_type = other DNA
aactagagtccctttatgataaagaaccttatcgggaactctggagctctattatggaaggtggtgacttttcac

SEQ ID NO: 576732 - DNA, 75 bp, synthetic construct
  source 1..75: mol_type = other DNA
cctaaccttaatccagagtttaaaaatcctctatttcttaagttattgtgtgaaggcattaagaaaaatggttta

SEQ ID NO: 576733 - DNA, 75 bp, synthetic construct
  source 1..75: mol_type = other DNA
gctattggcggagcggtatcaatattgtgggaactccgagaaaagtcagagcaagtaggtgaaaccaagcattac

SEQ ID NO: 576734 - DNA, 75 bp, synthetic construct
  source 1..75: mol_type = other DNA
caacctttgccggactcggaacccgtgattacagcacgcattcacggtatgccggtgctgaagcaggctaccgct

SEQ ID NO: 576735 - DNA, 75 bp, synthetic construct
  source 1..75: mol_type = other DNA
cctcatattctcaggagatgatgccgggatccgcctgaaaaactctgttgaccagggcgccggtgccctgacatt

SEQ ID NO: 576736 - DNA, 75 bp, synthetic construct
  source 1..75: mol_type = other DNA
aataatacaggaggccacatagaatggacctttgactctgctaaagggactggtttgctcaaacagggagagcag

SEQ ID NO: 576737 - DNA, 75 bp, synthetic construct
  source 1..75: mol_type = other DNA
aatcgccattctttcatggctatcatatatctgccttagtaactcaaaaaagtacacacatgaatcgatcaggcg

SEQ ID NO: 576738 - DNA, 75 bp, synthetic construct
  source 1..75: mol_type = other DNA
gtcaaatgccaccctgacggcaggtaattatgcaatgttcagcggtgagatcactgccgatgacgccactgctgt

SEQ ID NO: 576739 - DNA, 75 bp, synthetic construct
  source 1..75: mol_type = other DNA
atcaatgtttccgttagtgatgttcatgtgcttggcggaaaaggaaaacctggtgatttattttatgacagaggg

SEQ ID NO: 576740 - DNA, 75 bp, synthetic construct
  source 1..75: mol_type = other DNA
gccacgaaagcttcagaggcggcgacctcagcccgggatgcggaggcctcaaaagacgcggcaaaatcatcagaa

SEQ ID NO: 576741 - DNA, 75 bp, synthetic construct
  source 1..75: mol_type = other DNA
gtgcagcttcctcggcaacggcggcaggaaattccgcgacggcggcaaaaacgtccgagacgaaagccaggtcat

SEQ ID NO: 576742 - DNA, 75 bp, synthetic construct
  source 1..75: mol_type = other DNA
gtgcagcttcctcggcaacggcggcagcaaattccgccacggcggcaaaaacgtccgagacgaaagccaggtcat

SEQ ID NO: 576743 - DNA, 75 bp, synthetic construct
  source 1..75: mol_type = other DNA
gccacgaaggcttcagaggcggcgacctcagcccgagatgcggaggcctcaaaagacgcggcaaaatcatcagaa

SEQ ID NO: 576744 - DNA, 75 bp, synthetic construct
  source 1..75: mol_type = other DNA
gccacgaaggcttcagaggcggctacctcagcccgtgatgcggaggcctcaaaagacgcggcaaaatcatcagaa

SEQ ID NO: 576745 - DNA, 75 bp, synthetic construct
  source 1..75: mol_type = other DNA
gccacgaaggcttcagaggcggcaacctcagcccgggatgcggaggcctcaaaagacgcggcaaaatcatcagaa

SEQ ID NO: 576746 - DNA, 75 bp, synthetic construct
  source 1..75: mol_type = other DNA
cgttcttcctgctgtttgtctttattctgtggatgattggcggctggctggtgctggtggttttgctggcgctgc

SEQ ID NO: 576747 - DNA, 75 bp, synthetic construct
  source 1..75: mol_type = other DNA
tgctggataacatcagcatcgggcagcttgatccggcggatctgcgccgcgacatggggctgctcagccagaccg

SEQ ID NO: 576748 - DNA, 75 bp, synthetic construct
  source 1..75: mol_type = other DNA
gcgggaagagttgcttaccgatatggcacggcagttgggaatggggttacggttggtggagttttccgcagactc

SEQ ID NO: 576749 - DNA, 75 bp, synthetic construct
  source 1..75: mol_type = other DNA
gaacaggggcgaacttgtaataatttactgaagagacaattttatgctgaccgcccaaatcaaaagtgggtaaca

SEQ ID NO: 576750 - DNA, 75 bp, synthetic construct
  source 1..75: mol_type = other DNA
atccattatcacaattactggttatcgcggatttgccacgtagtacattttactatcacgtgaaacgccttaatg

SEQ ID NO: 576751 - DNA, 75 bp, synthetic construct
  source 1..75: mol_type = other DNA
gggatttggcctctctggtggtcagcggcaaacgctgctgctggcgcggctactcatctctcaacccaatatcgt

SEQ ID NO: 576752 - DNA, 75 bp, synthetic construct
  source 1..75: mol_type = other DNA
gcgcggcagttggggatggggctgcggttggtggagttttccgccgactcgcttaacccctggcggctgccgctg

SEQ ID NO: 576753 - DNA, 75 bp, synthetic construct
  source 1..75: mol_type = other DNA
taatgttgaataccgcagagcgttttcatggcatcggtacagccaaaaatcttgaaagacatttagtttttcgtt

SEQ ID NO: 576754 - DNA, 75 bp, synthetic construct
  source 1..75: mol_type = other DNA
aaattctgaaatatactttccactccctgacgttaaattggttgctacacctaacaatgtatacgcgtatgcaaa

SEQ ID NO: 576755 - DNA, 75 bp, synthetic construct
  source 1..75: mol_type = other DNA
aagcgggcggatctgcgtatttcggatcgcgtttttggccacgcattacggctcaaaaacaacgtgcgctcgaaa

SEQ ID NO: 576756 - DNA, 75 bp, synthetic construct
  source 1..75: mol_type = other DNA
ctcgtccatcagcatgaagcaacgttttctcaccgggctactgctcacctggacgcaggaagtgcaatccatcgt

SEQ ID NO: 576757 - DNA, 75 bp, synthetic construct
  source 1..75: mol_type = other DNA
ttggcgtgatcacccgccgcgacaatcacgacaatatcagcgttcagttcagcggtgacgaagggctggaaacca

SEQ ID NO: 576758 - DNA, 75 bp, synthetic construct
  source 1..75: mol_type = other DNA
aggaactacttcaccaggcgttatgcacattaaaaatgttgaggttgatggtgcatggtgggccatatatgatga

SEQ ID NO: 576759 - DNA, 75 bp, synthetic construct
  source 1..75: mol_type = other DNA
gcggcggcatcattggccggcgaggcattcggtaaggcggaagaggctgcaggtagtgcagcggtggcagtgcag

SEQ ID NO: 576760 - DNA, 75 bp, synthetic construct
  source 1..75: mol_type = other DNA
ttaaagacggtgcaggtaaaccggtacagaactgcacaattcagctgaaagcaaaacgtaacagcaccacggtgg

SEQ ID NO: 576761 - DNA, 75 bp, synthetic construct
  source 1..75: mol_type = other DNA
gaaagatgccgaaggcaatatcaccaccatcttctgtacctacgatgccgatactttaagcaaagatccggcaga

SEQ ID NO: 576762 - DNA, 75 bp, synthetic construct
  source 1..75: mol_type = other DNA
agccgccacctcagcatccaccgcgaccgcgaaagcgtcagaagctgccacctcagcccgtgaggcggaggcctc

SEQ ID NO: 576763 - DNA, 75 bp, synthetic construct
  source 1..75: mol_type = other DNA
gtgattcgacattctccactcatactaaacacactgtcacttgacgcagggctgaaagttctacagcaacggtat

SEQ ID NO: 576764 - DNA, 75 bp, synthetic construct
  source 1..75: mol_type = other DNA
acgctcacgcgaccaggcggccattctgtttaacctggcctcgaagatgtgccggatgaacccggtactaatgca

SEQ ID NO: 576765 - DNA, 75 bp, synthetic construct
  source 1..75: mol_type = other DNA
atgaatgataacatatataaatacagtaaagataatgcgatagcgtttcttctacttgttgttatatcaacagtt

SEQ ID NO: 576766 - DNA, 75 bp, synthetic construct
  source 1..75: mol_type = other DNA
cagagcgttatctggttcgggtggtgtactgatggctgacaacaacactattgtggggttatttgtgcgggtacg

SEQ ID NO: 576767 - DNA, 75 bp, synthetic construct
  source 1..75: mol_type = other DNA
aattctcgggaggggtggcgacaggcgccggcgtaaaaggaatcacaccaacttgttatgtcagtggacggtcat

SEQ ID NO: 576768 - DNA, 75 bp, synthetic construct
  source 1..75: mol_type = other DNA
ctcagctgcagcagattcagaaactgctgcagagacgtccgccaacgctgcggctacgaaggcgacagaggcggc

SEQ ID NO: 576769 - DNA, 75 bp, synthetic construct
  source 1..75: mol_type = other DNA
tcggcagtaccatcactgacgccggttcgataacgttaaccatcgacaatagtcaggccagcgtgcaggttgcca

SEQ ID NO: 576770 - DNA, 75 bp, synthetic construct
  source 1..75: mol_type = other DNA
agtcgcggtcagtctctgccaaaagaaaaacaggcgaaggcgatgatcaccatgtggtcgtcactgaaatctcat

SEQ ID NO: 576771 - DNA, 75 bp, synthetic construct
  source 1..75: mol_type = other DNA
gtgcaggcggtcgtgttgtggctgtcggtctgccgccggagtctatgagcctggacatcccacgccttgtgctgg

SEQ ID NO: 576772 - DNA, 75 bp, synthetic construct
  source 1..75: mol_type = other DNA
accagtagccatctggcgcagggaacagaactcaccgttacgctaaacggcaaaacctacaacaccagcgtaggc

SEQ ID NO: 576773 - DNA, 75 bp, synthetic construct
  source 1..75: mol_type = other DNA
gccagcgtgaacgatgtcgccggtaacccgaccagcgtttcacgcgtggcgctggtggatgccacgcctccgtgg

SEQ ID NO: 576774 - DNA, 75 bp, synthetic construct
  source 1..75: mol_type = other DNA
accgtcggtagcgacggaacctggcaagtgacgctgcctgccacggaagtccaggcactggcggagggtaattac

SEQ ID NO: 576775 - DNA, 75 bp, synthetic construct
  source 1..75: mol_type = other DNA
ttgagttcggttgtgatgatggcgcaaaactgcgtatcacgttcgcactggactgttgcgatcgtgaagccatag

SEQ ID NO: 576776 - DNA, 75 bp, synthetic construct
  source 1..75: mol_type = other DNA
acacggcggtgcggagtccggagagtaacggcataacagagagcttcgtgaaaacgataaagcgtgactacatca

SEQ ID NO: 576777 - DNA, 75 bp, synthetic construct
  source 1..75: mol_type = other DNA
gatacggatgtgcttctccgtatacaccatgttatcggagagctgcccacgtatggttatcgtcgggtatgggcg

SEQ ID NO: 576778 - DNA, 75 bp, synthetic construct
  source 1..75: mol_type = other DNA
tccaattctcgtcgttactcaatatgatacgtttggtgccggagatgattcctttccgttgaaaatattagataa

SEQ ID NO: 576779 - DNA, 75 bp, synthetic construct
  source 1..75: mol_type = other DNA
cgccggtggagtggctgacgtatggcagcggttacctggcgggaatgaagctgggcgggacgccgctggtcgagt

SEQ ID NO: 576780 - DNA, 75 bp, synthetic construct
  source 1..75: mol_type = other DNA
agagttgaatctggagccctgcacaacggcaatcagcagccctcagagtaatggaatggcagaaaggttcgtgaa

SEQ ID NO: 576781 - DNA, 75 bp, synthetic construct
  source 1..75: mol_type = other DNA
aatgacctgctgatctatatgcaggacggcacggtgatccgctgcaacggttatttcctgcaagcggcgaatacg

SEQ ID NO: 576782 - DNA, 75 bp, synthetic construct
  source 1..75: mol_type = other DNA
tgattgacaaaagctccccgttacttattaacgctattaacaataacgagcagttgttcatggagtttgacttct

SEQ ID NO: 576783 - DNA, 75 bp, synthetic construct
  source 1..75: mol_type = other DNA
gtgctgcgtttgctacaacaacagcagattatcgatggtgaactgtatgaaatgctcagcgcgcgtcctctgggc

SEQ ID NO: 576784 - DNA, 75 bp, synthetic construct
  source 1..75: mol_type = other DNA
tgaaatttattccagcaggctggcggaaattgcccgtacctgggaactggaaaaagatgaagtgataagcccatt

SEQ ID NO: 576785 - DNA, 75 bp, synthetic construct
  source 1..75: mol_type = other DNA
cttttgaactgctgatgccgaccgaagatcaaggccaatatcttttacctgcgccctcaaataacctttactgga

SEQ ID NO: 576786 - DNA, 75 bp, synthetic construct
  source 1..75: mol_type = other DNA
aacataactttgctcagttcttcaaattattcatctaccgctgccagtcagggataccccaatgttagtcatggg

SEQ ID NO: 576787 - DNA, 75 bp, synthetic construct
  source 1..75: mol_type = other DNA
gaaaatacaatttagcatggctaagttgtattttatggcaagatggttacattatgagaattaaatttttagcaa

SEQ ID NO: 576788 - DNA, 75 bp, synthetic construct
  source 1..75: mol_type = other DNA
ctctcatcattttccaccgtcccgctggaagcgctaggtgacgagtatttcgttacaatgccgcccgtgtacact

SEQ ID NO: 576789 - DNA, 75 bp, synthetic construct
  source 1..75: mol_type = other DNA
tttggcgaacgtatgggggaggccagccgttcgcactatatggcacgaatgcaaaccctgcgcctcgacggtttt

SEQ ID NO: 576790 - DNA, 75 bp, synthetic construct
  source 1..75: mol_type = other DNA
atgcgtagttttagccaactgtggccgactctcaagcgcctgttagcgtacggttcgccgtggcgtaaaccgctg

SEQ ID NO: 576791 - DNA, 75 bp, synthetic construct
  source 1..75: mol_type = other DNA
ggctgggactcccctgaacgtagtaccttcccactgcaactgtttggtttccattacaaatcccgtactcactcg

SEQ ID NO: 576792 - DNA, 75 bp, synthetic construct
  source 1..75: mol_type = other DNA
tccttggaagcctgcgcggcaacggcagagggcgatttgtcttacaggacggcagccaggtgacaggggggggag

SEQ ID NO: 576793 - DNA, 75 bp, synthetic construct
  source 1..75: mol_type = other DNA
tattggtatcacattgatagcggacagctacgcacaaatgaactggccaggtgtcattttccgtccgctcaaaca

SEQ ID NO: 576794 - DNA, 75 bp, synthetic construct
  source 1..75: mol_type = other DNA
gggcgtgatatctccgaagaacgcgtctggcaggcgctggaaaccgtgcaactggcggagctggcgcgcagcatg

SEQ ID NO: 576795 - DNA, 75 bp, synthetic construct
  source 1..75: mol_type = other DNA
ctatctgctaagtccaatcaagtcatcttcctatgcggaagtagtggtgatggcaagtctgagatcttgacgcag

SEQ ID NO: 576796 - DNA, 75 bp, synthetic construct
  source 1..75: mol_type = other DNA
ggaacattctgtcgaacttcgactatttcagccaagctaagtttgccttttttgaatcgttttttagaaatgtac

SEQ ID NO: 576797 - DNA, 75 bp, synthetic construct
  source 1..75: mol_type = other DNA
tgaggcctgtcatgttgctagaattaaatgtagtaaagaaatgaaaattatggatcttacagatccatatgaggt

SEQ ID NO: 576798 - DNA, 75 bp, synthetic construct
  source 1..75: mol_type = other DNA
tttccaggaggagatgcaaaacagctttatcattctattcgcaagatcttaagttttccggctaaaacccagtta

SEQ ID NO: 576799 - DNA, 75 bp, synthetic construct
  source 1..75: mol_type = other DNA
aaattaatagattacatagataatcaacatctgactgttaaatggttattggaaactcacgctcatgccgatcat

SEQ ID NO: 576800 - DNA, 75 bp, synthetic construct
  source 1..75: mol_type = other DNA
cggaggcaacctgccgcaggacagggagtcggtgttctggctgaacgtgaaatcgatccccgctaccgacgacag

SEQ ID NO: 576801 - DNA, 75 bp, synthetic construct
  source 1..75: mol_type = other DNA
acaccgccactgtttgttagtgaacccaaaagcgaaaatactttgcgtattatttacaccggtccaccgctggca

SEQ ID NO: 576802 - DNA, 75 bp, synthetic construct
  source 1..75: mol_type = other DNA
cataccaatgagcgttttctggtcaattcgtggattgaaaacagcagcggtgtaaaagaaaagtcattcatcatt

SEQ ID NO: 576803 - DNA, 75 bp, synthetic construct
  source 1..75: mol_type = other DNA
gcaaaaggctttgtccagctcagtagcgccaccaacagcacgtctgaaacattggccgcgacatcgaaagcggtt

SEQ ID NO: 576804 - DNA, 75 bp, synthetic construct
  source 1..75: mol_type = other DNA
gcatactccgcagaaaactgtaagttccaaacaaatagtatgcctttagattgtttttattctggtactcattta

SEQ ID NO: 576805 - DNA, 75 bp, synthetic construct
  source 1..75: mol_type = other DNA
catcaaaagcggttaaggcggtaatggatgaaacgaacaagaaagcgcccttaaacagtcctgcgctgaccggaa

SEQ ID NO: 576806 - DNA, 75 bp, synthetic construct
  source 1..75: mol_type = other DNA
tatttacaccggtccaccgctggcagcagatcgtgagtctctgttctggatgaatgttaagacgatcccggtgat

SEQ ID NO: 576807 - DNA, 75 bp, synthetic construct
  source 1..75: mol_type = other DNA
tacatatcaaaataacgctatgacatttaatgattatgaaatcaatattgaaaaactaattcgcgcaactaatct

SEQ ID NO: 576808 - DNA, 75 bp, synthetic construct
  source 1..75: mol_type = other DNA
gtattaaatgaaaccagtattcgccggaggcttgccggaaaggtggcaaataagatcggccacggcatgagtttt

SEQ ID NO: 576809 - DNA, 75 bp, synthetic construct
  source 1..75: mol_type = other DNA
atatgtggtgataattgaagagggtaatgactctaacttattgatagtgttttatgttcagataatgcccgatga

SEQ ID NO: 576810 - DNA, 75 bp, synthetic construct
  source 1..75: mol_type = other DNA
gctgtagtggacaaagttacctgagtcttatgcgggcgctgaacgaggtctttacccaaccaaactatccggttc

SEQ ID NO: 576811 - DNA, 75 bp, synthetic construct
  source 1..75: mol_type = other DNA
gctgcccgcctggctgatttggtaccggaagtattgcgtaagccggatccggtcactcgcgaccttttcgatgaa

SEQ ID NO: 576812 - DNA, 75 bp, synthetic construct
  source 1..75: mol_type = other DNA
gtattaaatgaaacccatattcgccgcatgcttgccggaaaggtggcaaacaaaatcggccacggtttgagtttt

SEQ ID NO: 576813 - DNA, 75 bp, synthetic construct
  source 1..75: mol_type = other DNA
gtattaaatgaatcccatattcgccggatgcttgccggaaaggtggcgaacaggatcggccacggtatgagtttt

SEQ ID NO: 576814 - DNA, 75 bp, synthetic construct
  source 1..75: mol_type = other DNA
ggcgaataggtggaagacgtccaaaattaactcccgagcaatgggcacaggctgggagattaatattaaacggcg

SEQ ID NO: 576815 - DNA, 75 bp, synthetic construct
  source 1..75: mol_type = other DNA
cagcattgatacatcaagtccaatggggcgttttatatttcacatcatgtcagcgctggcggaaatggaaagaga

SEQ ID NO: 576816 - DNA, 75 bp, synthetic construct
  source 1..75: mol_type = other DNA
caacaaatgaccaaaatacagatctccagcgccaagctctcgaacgcgcaggatgtgaacaggtttttgaagaaa

SEQ ID NO: 576817 - DNA, 75 bp, synthetic construct
  source 1..75: mol_type = other DNA
caggcgaccgtcatagctacccaagccttcaacttcaaccggtttaacctggtagcagagaacaccaaccgtctt

SEQ ID NO: 576818 - DNA, 75 bp, synthetic construct
  source 1..75: mol_type = other DNA
acgctgggccgatcttctgagtagcgaaagctggcaggaagtgctcgataaaaccgccgcttaccagcaggaggt

SEQ ID NO: 576819 - DNA, 75 bp, synthetic construct
  source 1..75: mol_type = other DNA
tggatagaaaacaagtggcaataatttatgatgtcgctgtatgcacgctttataaaaaatttccggtgggacagg

SEQ ID NO: 576820 - DNA, 75 bp, synthetic construct
  source 1..75: mol_type = other DNA
gatgatatgacctttatatactcactatggcattggtgggatattccagaggaggtcatcatgcattcggaaaat

SEQ ID NO: 576821 - DNA, 75 bp, synthetic construct
  source 1..75: mol_type = other DNA
tcaatgatagagcaacatataaagaacgatatccatatatgcctgaaagaattatagataacttgatgagtgaaa

SEQ ID NO: 576822 - DNA, 75 bp, synthetic construct
  source 1..75: mol_type = other DNA
gataaacccggcaaattcaaggctggctttgctatttgtcgtaatgaagatctgaacggctgggagtatgttgaa

SEQ ID NO: 576823 - DNA, 75 bp, synthetic construct
  source 1..75: mol_type = other DNA
ggtggcgatcttcagctgcagggcgacaggcttacgacagcggcgagcgcacagcttcagagcggcaataacctc

SEQ ID NO: 576824 - DNA, 75 bp, synthetic construct
  source 1..75: mol_type = other DNA
attggtgcaggtaaaggtgccggtatcagcgtgtttgccaacgtcaatgcggcaaaaggcaaggacaacggcaac

SEQ ID NO: 576825 - DNA, 75 bp, synthetic construct
  source 1..75: mol_type = other DNA
gtgaaaaaaggcagcatcaccatcgaggggcaaggccttgatgccagcagcagcgatgcgctgtcgatcatttcc

SEQ ID NO: 576826 - DNA, 75 bp, synthetic construct
  source 1..75: mol_type = other DNA
atggcggtgatacacccgtcccgccagatgatggcggcgacacacctgtcccgccggatgatggcggcgatacac

SEQ ID NO: 576827 - DNA, 75 bp, synthetic construct
  source 1..75: mol_type = other DNA
tggcagtacagcagccaagattatcgagaaccatgaggatggccgaagagtctggcatgtccctcctggaaacgc

SEQ ID NO: 576828 - DNA, 75 bp, synthetic construct
  source 1..75: mol_type = other DNA
tcgtttggtggagccccgatcgcaaagatcatagaaaaccataatgggaatgctatgatttggaatatgcaatcg

SEQ ID NO: 576829 - DNA, 75 bp, synthetic construct
  source 1..75: mol_type = other DNA
atggagtatgttatttttctggcagtaatactgcttatcctgatccttcccggaagaacgaaaaaatatccggaa

SEQ ID NO: 576830 - DNA, 75 bp, synthetic construct
  source 1..75: mol_type = other DNA
ccccatcaatcacgccaactgatttacgccacaacgttggtcactcactggctatgcaaggagtaagtgccgaag

SEQ ID NO: 576831 - DNA, 75 bp, synthetic construct
  source 1..75: mol_type = other DNA
gcatgggcggacgaaagagcagggttaccgcgcggagcatattgactggcaggcgattggcgagattcgccagcg

SEQ ID NO: 576832 - DNA, 75 bp, synthetic construct
  source 1..75: mol_type = other DNA
agtcgcaaaccctcaccaacagcggcctgatgcagggcgacagcgtattgctgattggtacacaaaagctggata

SEQ ID NO: 576833 - DNA, 75 bp, synthetic construct
  source 1..75: mol_type = other DNA
cgatcaataatggagtgctacaggtttatggcgcggcgactgatcccacgattaaaggagggcgcttaattgttg

SEQ ID NO: 576834 - DNA, 75 bp, synthetic construct
  source 1..75: mol_type = other DNA
aaaggtatctgtacccctgataatggagtgtttcatagtacgcttgatttctcagggtatctcattaccgcgaat

SEQ ID NO: 576835 - DNA, 75 bp, synthetic construct
  source 1..75: mol_type = other DNA
gatgaagataaatttatccgaaaaaatgccagaacgatgaccggtaagcaaataggagaatatctggggcgagac

SEQ ID NO: 576836 - DNA, 75 bp, synthetic construct
  source 1..75: mol_type = other DNA
ctaccctgtgcgcgagcatcgtgatccttgcgggaatgacgataagcacaacggcgttcgcccactgcgacggca

SEQ ID NO: 576837 - DNA, 75 bp, synthetic construct
  source 1..75: mol_type = other DNA
tcctgacggccaggctgttcatgcgctgcgccacaccttcgccagtcatttcatgatgaacggcggcaatattct

SEQ ID NO: 576838 - DNA, 75 bp, synthetic construct
  source 1..75: mol_type = other DNA
ctcaggccaaaacgcgcagagacgatgctaaagttgttcttgaaggaaatattgttcgtcaggtcggtaatgagt

SEQ ID NO: 576839 - DNA, 75 bp, synthetic construct
  source 1..75: mol_type = other DNA
atacttattgaacaagccaacgattatatgaacagtaaacaatggcctggtaaagcggctattggccggctgaaa

SEQ ID NO: 576840 - DNA, 75 bp, synthetic construct
  source 1..75: mol_type = other DNA
ctcagccagaatgcattaagcctcaccacacccgtactgaccagtgacggcactattcagggcaacggcaaaacc

SEQ ID NO: 576841 - DNA, 75 bp, synthetic construct
  source 1..75: mol_type = other DNA
ccggacatccgcaacagcgggcttatcaccagcgacaagggtttaacgctaagcacggactctctcagcaacccg

SEQ ID NO: 576842 - DNA, 75 bp, synthetic construct
  source 1..75: mol_type = other DNA
ccaccccggttaaggatattgctgtcagggtaaaaagaagtttctggggtgtacataaccggattgttttattac

SEQ ID NO: 576843 - DNA, 75 bp, synthetic construct
  source 1..75: mol_type = other DNA
aaatattattgcatccatctgttttactgtcagttgttgagtccttacaaagtaatactatagctgagtatatcg

SEQ ID NO: 576844 - DNA, 75 bp, synthetic construct
  source 1..75: mol_type = other DNA
aaacggtgcttaatgataggtatttctttgataatccaattaaaatatataactcaattaatgatgatatgttgt

SEQ ID NO: 576845 - DNA, 75 bp, synthetic construct
  source 1..75: mol_type = other DNA
tcttacgaacgtgaaaacctggctttttacttttgttggtattggtgctcttgtttatatgctttattgcatcct

SEQ ID NO: 576846 - DNA, 75 bp, synthetic construct
  source 1..75: mol_type = other DNA
gattttagtactattccagcctcagatttttcatctgttgtcgggagtgctgtgtcagcgagtaagatcaccaga

SEQ ID NO: 576847 - DNA, 75 bp, synthetic construct
  source 1..75: mol_type = other DNA
cagaataaagcggggaccatatttaataaaatagtcactaatggtcagtcttatccgggacgctgttactgtgat

SEQ ID NO: 576848 - DNA, 75 bp, synthetic construct
  source 1..75: mol_type = other DNA
attcccacaacgcttgttgcgaagttgtacggaactatcagccgtgacacaccgattgattattcgcagccgatg

SEQ ID NO: 576849 - DNA, 75 bp, synthetic construct
  source 1..75: mol_type = other DNA
cgggcagagttcggagaaaagccgcaataaactggaaaataaaatccgccaggcagagaagcggctggctgagct

SEQ ID NO: 576850 - DNA, 75 bp, synthetic construct
  source 1..75: mol_type = other DNA
ctggcctgcagcggtgtgcttgttggttccgccctgaatacacagtcacagaccctgaccaacagtggtctgttg

SEQ ID NO: 576851 - DNA, 75 bp, synthetic construct
  source 1..75: mol_type = other DNA
gtgactttttctgctgctcctgcgagcctcactggtgcacgacccgcgcctggaacatttactgctacggcaaca

SEQ ID NO: 576852 - DNA, 75 bp, synthetic construct
  source 1..75: mol_type = other DNA
tgatgccttaagctttgctggtgttcactcaggcttgaattattataatcttaatccgaatctcgatgtgggtat

SEQ ID NO: 576853 - DNA, 75 bp, synthetic construct
  source 1..75: mol_type = other DNA
tgacggcgcaggcttgccgccacggtttttacgttaaaggggtaaccctgagcacgcagttcatccgtcaggcgt

SEQ ID NO: 576854 - DNA, 75 bp, synthetic construct
  source 1..75: mol_type = other DNA
ttgtcactcagggacataagatccattttgctacagtagatatgacggtagatgctaaagcaattaaaaacaatt

SEQ ID NO: 576855 - DNA, 75 bp, synthetic construct
  source 1..75: mol_type = other DNA
atgctaatgatcctgatgtaactacagtatataattgtggaagagaggagccattagatatttctagtggtgcca

SEQ ID NO: 576856 - DNA, 75 bp, synthetic construct
  source 1..75: mol_type = other DNA
ggctggctgttcttattatctcttttagtggcgtaacactagctgctcccagaggaatatgtactccagataatg

SEQ ID NO: 576857 - DNA, 75 bp, synthetic construct
  source 1..75: mol_type = other DNA
cggcacaaacttgcgaaattaataatttacaaccggtttattttgattttaaagaaatccccgccgcagattttt

SEQ ID NO: 576858 - DNA, 75 bp, synthetic construct
  source 1..75: mol_type = other DNA
gcccccggtggcggtcgccccacaggaccggcctgcacgccgctcccgtcgtcagaaactgccggcagacctgtc

SEQ ID NO: 576859 - DNA, 75 bp, synthetic construct
  source 1..75: mol_type = other DNA
caacaaagatattcaggaaaaagttgatgataataggaaaaagatcacccggttagatacaaagataagtgaact

SEQ ID NO: 576860 - DNA, 75 bp, synthetic construct
  source 1..75: mol_type = other DNA
tcagaagttacggtgctgacaaagatgtgcgtatcgacctgagcaataaggttacgctcatttatggccagaatg

SEQ ID NO: 576861 - DNA, 75 bp, synthetic construct
  source 1..75: mol_type = other DNA
tcggtattatgatgttaccggctgccagcgcgcgtttctggagtcaacgtctgtccatcatgttgttagcggcag

SEQ ID NO: 576862 - DNA, 75 bp, synthetic construct
  source 1..75: mol_type = other DNA
ctgcgtggattactttgtaaaaaaatagaaaagtacaattaccaagattttactgcggattgcaaaaacaactta

SEQ ID NO: 576863 - DNA, 75 bp, synthetic construct
  source 1..75: mol_type = other DNA
cgataaaggccggtttgccacaaacggtagctgataagttccaaaataagaatacgttgagcagttacattccca

SEQ ID NO: 576864 - DNA, 75 bp, synthetic construct
  source 1..75: mol_type = other DNA
ttcaccgcttcagcccgcgtcaggtacacaatttgccggatttattgcaaatctgggaaatgccgactgggtcag

SEQ ID NO: 576865 - DNA, 75 bp, synthetic construct
  source 1..75: mol_type = other DNA
gaccaacgtaagccttgggaaggtgcgaataagcggggaaattcttctcggctgactcagtcatttcatttcttc

SEQ ID NO: 576866 - DNA, 75 bp, synthetic construct
  source 1..75: mol_type = other DNA
tatgatgaaaataataaagaagaggagcgttttaatctgtttatctccattcctttctactggggggatgatatt

SEQ ID NO: 576867 - DNA, 75 bp, synthetic construct
  source 1..75: mol_type = other DNA
ccatcgccataatagatggcagctatagtcattctaaaaacgcctggcaaagtggtggaagtattagtagtggat

SEQ ID NO: 576868 - DNA, 75 bp, synthetic construct
  source 1..75: mol_type = other DNA
ctccatgttgcatgggttcgctcaggagatgacgggaagacctggacaacgccggaatggcttacagatttacat

SEQ ID NO: 576869 - DNA, 75 bp, synthetic construct
  source 1..75: mol_type = other DNA
ctggcgagtggaggcaataacagtttgctttctggattattacttacagggcttaatggtggtcctgaagcgctc

SEQ ID NO: 576870 - DNA, 75 bp, synthetic construct
  source 1..75: mol_type = other DNA
gaaatgtatcattaagtgcactttggcggaattactgggggcgaagtggaaatgctaaagattaccaattcagtt

SEQ ID NO: 576871 - DNA, 75 bp, synthetic construct
  source 1..75: mol_type = other DNA
gatggaggtaaacaggggatctcggtacaagtcgaaaaggggacatttgcatcggcagttgatttgatgcgcatg

SEQ ID NO: 576872 - DNA, 75 bp, synthetic construct
  source 1..75: mol_type = other DNA
aagaaaaggataactccactagttaaaattaataaatctgatttctatatattcacaccggcgattacattttta

SEQ ID NO: 576873 - DNA, 75 bp, synthetic construct
  source 1..75: mol_type = other DNA
cgggaccttttacccgacagcaggccgaagcggttgcccgccggtatcaaaacatcgctattgaagatgaccagc

SEQ ID NO: 576874 - DNA, 75 bp, synthetic construct
  source 1..75: mol_type = other DNA
tggtaaaacttggcgatgcaaccggattctccggtaagttctcatcagttgtaacttataccgttaattataaat

SEQ ID NO: 576875 - DNA, 75 bp, synthetic construct
  source 1..75: mol_type = other DNA
ggagctaaccatggtaactggtatctaaccagcagtaaaaacacatcgatgccagaacaggacgtccataacaat

SEQ ID NO: 576876 - DNA, 75 bp, synthetic construct
  source 1..75: mol_type = other DNA
ttactgaatttggccacctgaacagaggtgatatgctcacctcagaacaacacaggtgccataatgaaaaaaaga

SEQ ID NO: 576877 - DNA, 75 bp, synthetic construct
  source 1..75: mol_type = other DNA
atcaatactatcaggaacgactagtgttactacaggaagcactcttaacatactcctgtctgatggtgcttcttg

SEQ ID NO: 576878 - DNA, 75 bp, synthetic construct
  source 1..75: mol_type = other DNA
tagtagccatacaagccgtcatatccgctttacatatacgaaaaatgacggcacaacactaactgatgggtacat

SEQ ID NO: 576879 - DNA, 75 bp, synthetic construct
  source 1..75: mol_type = other DNA
agcacggctaacacatggagttcacgccagactttcaacggcgggatcaccggggcgctggcagggaatgccgat

SEQ ID NO: 576880 - DNA, 75 bp, synthetic construct
  source 1..75: mol_type = other DNA
ttatcctgacgatattccggatgagcaggaaaatgacatgggaggccgtgatatcccctcctggcgcagaatctg

SEQ ID NO: 576881 - DNA, 75 bp, synthetic construct
  source 1..75: mol_type = other DNA
ccggaaaagatgcggcggttaatcagttgttagaggtttatttgttaccgtggggatatcgctatcttgaacggc

SEQ ID NO: 576882 - DNA, 75 bp, synthetic construct
  source 1..75: mol_type = other DNA
tttatagataaggtatcagataaagctatttttgatggtaagatattaggaattatggggttgataactggtctt

SEQ ID NO: 576883 - DNA, 75 bp, synthetic construct
  source 1..75: mol_type = other DNA
tggtaataaaaaaaagcattaatgcatatatttctgcaacacagaataaaaaatgcacactcgtttatcaaggaa

SEQ ID NO: 576884 - DNA, 75 bp, synthetic construct
  source 1..75: mol_type = other DNA
aaagggaacatcgctggctgaggtttcccgcagggccgggctggcgtcttccacgctggcaaatgcgctgacacg

SEQ ID NO: 576885 - DNA, 75 bp, synthetic construct
  source 1..75: mol_type = other DNA
tcgcgcagtatcaggacaagctgtacgtcatcgaaacaacgccatttgacgagctcaagctgaatattgttacgc

SEQ ID NO: 576886 - DNA, 75 bp, synthetic construct
  source 1..75: mol_type = other DNA
atgcactttcgcaatgtggtttgtttgttgtcttgttcgttgttcttatcgcctgcctggggatgtaagctttca

SEQ ID NO: 576887 - DNA, 75 bp, synthetic construct
  source 1..75: mol_type = other DNA
aggacggtcacggtgtggtgttcccggctgaactggtggggctgctggacaggctggagggggaaatccgggcaa

SEQ ID NO: 576888 - DNA, 75 bp, synthetic construct
  source 1..75: mol_type = other DNA
ttctccggtaagattgatgtgttcccaggggataggagaagtcgcttgatatctagtatgacgtctgtcgcacct

SEQ ID NO: 576889 - DNA, 75 bp, synthetic construct
  source 1..75: mol_type = other DNA
atggaggctatttaagattaggtactcaagctgtaggcgtcgggatggttaatgttgagggagaggactcggttc

SEQ ID NO: 576890 - DNA, 75 bp, synthetic construct
  source 1..75: mol_type = other DNA
ggatccgattgggctgaaggggggatggaatttttatcagtatccgctgaatccggttcagtatatagattcaat

SEQ ID NO: 576891 - DNA, 75 bp, synthetic construct
  source 1..75: mol_type = other DNA
gaacttttacggttacttgatgatgctgcacctggtgacattattctcatcgagcaggttgatcgcctttcgcgc

SEQ ID NO: 576892 - DNA, 75 bp, synthetic construct
  source 1..75: mol_type = other DNA
ccgccgtcgtcaggctgaaggaataaagaaagccaaagaggaagggaaatacagagggcgacaagccgattcaga

SEQ ID NO: 576893 - DNA, 75 bp, synthetic construct
  source 1..75: mol_type = other DNA
ccaactagtcatatcgcattctctccccaaatcaccgatgaatttactggatcgatgatcaaagcgataaatagc

SEQ ID NO: 576894 - DNA, 75 bp, synthetic construct
  source 1..75: mol_type = other DNA
cgacttgctcaaagcacaccacctgcgcgaaatgcacgatgagtccgctgctatgaaagtggctgtcgttgaggc

SEQ ID NO: 576895 - DNA, 75 bp, synthetic construct
  source 1..75: mol_type = other DNA
cgcaaacttccaatagcaagtcagccatacaacgataaccacgaaaaggaactcgttgcttttatcaaggggctg

SEQ ID NO: 576896 - DNA, 75 bp, synthetic construct
  source 1..75: mol_type = other DNA
cctggcctgaatctcaggccatctttttgtcaaaaacctacctttacatgaacatggatgagctgtgcaaaaggt

SEQ ID NO: 576897 - DNA, 75 bp, synthetic construct
  source 1..75: mol_type = other DNA
gtcggcgtgctgcaacatggcatgagcatgggacacgcggcggaaagttatacgctattgaccattggcgacggt

SEQ ID NO: 576898 - DNA, 75 bp, synthetic construct
  source 1..75: mol_type = other DNA
accgttgagtgaagccaagaaatttaaatcggcgcataccgaacttctgagattagacaggaagagaaaatcact

SEQ ID NO: 576899 - DNA, 75 bp, synthetic construct
  source 1..75: mol_type = other DNA
aaaaaacacgtaaacagcattcgcctgaatttcgcagtgaagccctgaagtattcaggtcacttacagtaccact

SEQ ID NO: 576900 - DNA, 75 bp, synthetic construct
  source 1..75: mol_type = other DNA
cctttagtattatgttggcaattatcctcagcgcctttttcattgccgcggtaggtgatgctgccaacttactga

SEQ ID NO: 576901 - DNA, 75 bp, synthetic construct
  source 1..75: mol_type = other DNA
actgcactaatcaatacctgatccactatctggctgctgatggccgggctgtagatgcctggtttgatgagggtg

SEQ ID NO: 576902 - DNA, 75 bp, synthetic construct
  source 1..75: mol_type = other DNA
ccggagaaattcgcggaaagggtatggcagttgtgggaggcgcgcagccatcgtcaggaggagggtgccgaatga

SEQ ID NO: 576903 - DNA, 75 bp, synthetic construct
  source 1..75: mol_type = other DNA
tcagaaaccggtgctggcggtggtgctggagtggtttacctgtcagcacagcatttaccggacccactccacctc

SEQ ID NO: 576904 - DNA, 75 bp, synthetic construct
  source 1..75: mol_type = other DNA
tcactgataaaaaaatgcttactaaaatgagagtaatgcatgatgcgcatcttgattttggcaataatgcgattc

SEQ ID NO: 576905 - DNA, 75 bp, synthetic construct
  source 1..75: mol_type = other DNA
taaatcgccatcagctatataaatgcttacgtgatggcgcaacccttatagtagatcgatgccagtcattctttg

SEQ ID NO: 576906 - DNA, 75 bp, synthetic construct
  source 1..75: mol_type = other DNA
ggccagcgtcagcaacgtcgcaggtaacagcgcccaggcaacgcatgcttacagcgtcgatgccaccgcgccatc

SEQ ID NO: 576907 - DNA, 75 bp, synthetic construct
  source 1..75: mol_type = other DNA
tgcatgttgtcactgatctccgcgttttatcaggccgataaagttgccgtcacgttgacattggtcaacgtgggg

SEQ ID NO: 576908 - DNA, 75 bp, synthetic construct
  source 1..75: mol_type = other DNA
atgtcacttaaggcgattgccactgcactcggagtttctgtcaccactgtcagtcgggctcttggaggctatgca

SEQ ID NO: 576909 - DNA, 75 bp, synthetic construct
  source 1..75: mol_type = other DNA
cctaacaaaccccggcactatgaacgttacctgcagcgtatgaaggaaaggaggaaggaatgggggattctgtga

SEQ ID NO: 576910 - DNA, 75 bp, synthetic construct
  source 1..75: mol_type = other DNA
attaatcattgaacaaatggctctcctcgagcaaaaacagtgggataagcgttaccgcgaagagctgattaatca

SEQ ID NO: 576911 - DNA, 75 bp, synthetic construct
  source 1..75: mol_type = other DNA
taactaaagatggccgtcaggttgaggaagtgcatgtcctgggggatatgtatcgtctggagttctatccgcgtg

SEQ ID NO: 576912 - DNA, 75 bp, synthetic construct
  source 1..75: mol_type = other DNA
cggaacgggaatatttcatgtttgcaggtagagaaaacggatgaggcttatatcactacgctgaacggcgatacg

SEQ ID NO: 576913 - DNA, 75 bp, synthetic construct
  source 1..75: mol_type = other DNA
ggcctccagttcgcacaccttgattggcgcgattatcggcatcggtttaaccaacgcgctgttaaccggctcatc

SEQ ID NO: 576914 - DNA, 75 bp, synthetic construct
  source 1..75: mol_type = other DNA
ttaatggcaagaccagcaggttctttaaacaaacgaacaatatcaacaaatacgacaactcccggagaggtaaaa

SEQ ID NO: 576915 - DNA, 75 bp, synthetic construct
  source 1..75: mol_type = other DNA
agtacattctgcgccgccgcgatgattatctggagctgttcgacagggatgcactgagcagccgcttcttttatg

SEQ ID NO: 576916 - DNA, 75 bp, synthetic construct
  source 1..75: mol_type = other DNA
gccatcgacgggatgccgtcacggcaggaactccaccagttgcaactggatatgagcaacctgcgcggcgaaata

SEQ ID NO: 576917 - DNA, 75 bp, synthetic construct
  source 1..75: mol_type = other DNA
tggttcgctaaaccaattaatgaaaaaaaataatcttacaagcagggagataatacggtattccattcaattttt

SEQ ID NO: 576918 - DNA, 75 bp, synthetic construct
  source 1..75: mol_type = other DNA
tcagagctggcattccattacggaacatgcgtgtctgtgaaccctttggccctgaacagcgtaagggattatggc

SEQ ID NO: 576919 - DNA, 75 bp, synthetic construct
  source 1..75: mol_type = other DNA
attgctggccgaagcctgtaatattggaatggaaccatttatccgaccgaatgttccggcgctgacccgtcatcg

SEQ ID NO: 576920 - DNA, 75 bp, synthetic construct
  source 1..75: mol_type = other DNA
ctccaacttcgaacactatctgcaacagcatcctgaactgccgcagaagttgattgcgatggaacctccattgcc

SEQ ID NO: 576921 - DNA, 75 bp, synthetic construct
  source 1..75: mol_type = other DNA
ccaagaacgctatcgatctggagcgggccaggaagattgtgcgcgtgagcaaggtctggcgaacggtgacttacc

SEQ ID NO: 576922 - DNA, 75 bp, synthetic construct
  source 1..75: mol_type = other DNA
tggatatgataattttgaaagagaaagatctgcatttagaacgattgaacaactcagagagtcgataattaatgg

SEQ ID NO: 576923 - DNA, 75 bp, synthetic construct
  source 1..75: mol_type = other DNA
gctttttatgagtacgtttggcgacgatttggtatggaggtaggcccgaacgcgctctatcaaagtatatccatg

SEQ ID NO: 576924 - DNA, 75 bp, synthetic construct
  source 1..75: mol_type = other DNA
catgcgactgaccgggatgctgtaccggaatccggatcttgctgagcggaagacctcgtgcagggggaactgccg

SEQ ID NO: 576925 - DNA, 75 bp, synthetic construct
  source 1..75: mol_type = other DNA
tgtatgcgctgaacgcttaattacaggctataaattccagaagtcaattggctgcatacagattgccaaatctaa

SEQ ID NO: 576926 - DNA, 75 bp, synthetic construct
  source 1..75: mol_type = other DNA
gaacgttatcgcgcaaacgcttcccgttaaaattcagtctattacgcggtactggataaacatttcaccactgta

SEQ ID NO: 576927 - DNA, 75 bp, synthetic construct
  source 1..75: mol_type = other DNA
tacttcaatgatgtactttcacacatgcttgtaattgataataaacgtggcggtggagatgtaatatatgaaatg

SEQ ID NO: 576928 - DNA, 75 bp, synthetic construct
  source 1..75: mol_type = other DNA
ataatcatgttagaacgaaatatgtgatttgtcgaaatcgagaagaaaggaagatctgtgatgcaaaatccatac

SEQ ID NO: 576929 - DNA, 75 bp, synthetic construct
  source 1..75: mol_type = other DNA
taaataaggtcgttgataattatttttcatatactgttcaaggggtgattttatttgataattatgtaattggaa

SEQ ID NO: 576930 - DNA, 75 bp, synthetic construct
  source 1..75: mol_type = other DNA
tcaacttgttattaacaagcaagcaataaccctactaaagattcttatttttacgctattgttatatttcccaat

SEQ ID NO: 576931 - DNA, 75 bp, synthetic construct
  source 1..75: mol_type = other DNA
attaataaaataacaagctcaaacatattcaaaactgactcgaaattcagtgaattcagtcattttgcaaaagat

SEQ ID NO: 576932 - DNA, 75 bp, synthetic construct
  source 1..75: mol_type = other DNA
gaaaccacaaaaagtggtatgcaaacaaccgatctgtcacgtttttcaaaaaatacgcacaactaccaggaactt

SEQ ID NO: 576933 - DNA, 75 bp, synthetic construct
  source 1..75: mol_type = other DNA
gacggcaggacggtacggtatggctataacagccagcggcaggtgacgtcggtgacgtacccggacgggcttcgc

SEQ ID NO: 576934 - DNA, 75 bp, synthetic construct
  source 1..75: mol_type = other DNA
ggcagtatgacgaccacggctggctgacagaaatcagccacctgagtgaaggccaccgtgtggcggtccactacg

SEQ ID NO: 576935 - DNA, 75 bp, synthetic construct
  source 1..75: mol_type = other DNA
gatgagttatttcgacaaactgggcgataaactgcgtcatctgcatattgtcgacagcgacggtgccagcgacac

SEQ ID NO: 576936 - DNA, 75 bp, synthetic construct
  source 1..75: mol_type = other DNA
atgaaagcggtttttgatggtcttttcacccgcgtcatgctggataaaagttttattcagcaacaaatcacgcac

SEQ ID NO: 576937 - DNA, 75 bp, synthetic construct
  source 1..75: mol_type = other DNA
cattccaggctcgttatattgctctcgggcagtcagtagctggtactgcaaacgctgatgcgaccttcaaagttc

SEQ ID NO: 576938 - DNA, 75 bp, synthetic construct
  source 1..75: mol_type = other DNA
attacggctttgtgatgctcaggattcaatagcatcgttggagaatgccaaaacaccagccaccgatgttttcct

SEQ ID NO: 576939 - DNA, 75 bp, synthetic construct
  source 1..75: mol_type = other DNA
actgataatgtccgtgtggcaatgccatgtaagtcagcgatgaatatggcgcaaaaaaagcgcggctgtcggatt

SEQ ID NO: 576940 - DNA, 75 bp, synthetic construct
  source 1..75: mol_type = other DNA
cgtgtggcaatgccatgtaagttagcgatgaatatggcgcaaaaaaagcgcggccgtcggattaacgccgcggga

SEQ ID NO: 576941 - DNA, 75 bp, synthetic construct
  source 1..75: mol_type = other DNA
agattacccccttcgatttccatgctctccagggatgcctgtggcctgccgttcctgtaaatcagataacgacgt

SEQ ID NO: 576942 - DNA, 75 bp, synthetic construct
  source 1..75: mol_type = other DNA
agcctaaaagaaggggcgttaggcaaactaatagcctcatatccttcacatggatttgttatcgacagaaaagaa

SEQ ID NO: 576943 - DNA, 75 bp, synthetic construct
  source 1..75: mol_type = other DNA
tttatgctcgtgatggacataaaggtgttgatgctgaccgcgtaaattatatcgaagttggtacctggtactact

SEQ ID NO: 576944 - DNA, 75 bp, synthetic construct
  source 1..75: mol_type = other DNA
gctgggcgcttttatgggttattcccattcacatatcggttttgatcgcggaggtcatggcagtgtgggcagtta

SEQ ID NO: 576945 - DNA, 75 bp, synthetic construct
  source 1..75: mol_type = other DNA
tagctgccgggcatgcgttggcttcggaactgaaagcagaatgtggtgccgttgatatgcgcagtgtggcaaagc

SEQ ID NO: 576946 - DNA, 75 bp, synthetic construct
  source 1..75: mol_type = other DNA
agctttcggacgatctcgccctgagtttatttacggtagccttccagcagagtattcaggataccagcgccagca

SEQ ID NO: 576947 - DNA, 75 bp, synthetic construct
  source 1..75: mol_type = other DNA
tcaacaaagcctcgctgaaagtggaatgtctccacggggaacactttatcagccgggaaataatgcgggcaacag

SEQ ID NO: 576948 - DNA, 75 bp, synthetic construct
  source 1..75: mol_type = other DNA
ttcatttctaaccttgttgaaaaaaatgttggacataagataaatatccacacgatgctctggctggaaaaaggg

SEQ ID NO: 576949 - DNA, 75 bp, synthetic construct
  source 1..75: mol_type = other DNA
tgattaaaagcattttgataatgcaaagggcgcatgaggaatcattacgtaaggctgagcgtatacaggctgcat

SEQ ID NO: 576950 - DNA, 75 bp, synthetic construct
  source 1..75: mol_type = other DNA
attgcccgtctgcaccaggaactgaaaaccaccatggtgtatgtcacacatgatcaggtggaagcgatgaccctg

SEQ ID NO: 576951 - DNA, 75 bp, synthetic construct
  source 1..75: mol_type = other DNA
tctccggaggacagcggcagcgcgtggccattggccgcgcgatcgtgcgtaatccccgggtgtttatgttcgatg

SEQ ID NO: 576952 - DNA, 75 bp, synthetic construct
  source 1..75: mol_type = other DNA
gaatacttcatggagcgagttcgttactaccgagagcaaagcctgactctaccgaaatcatccgacccgcgatac

SEQ ID NO: 576953 - DNA, 75 bp, synthetic construct
  source 1..75: mol_type = other DNA
cagttgtaagaagtttatccaaataaaaaacaagactattttatctaaatttttcagaaaaaatgaagttgcacc

SEQ ID NO: 576954 - DNA, 75 bp, synthetic construct
  source 1..75: mol_type = other DNA
tgccttaaaacgttttgggatgtacagatgccctaatcgttcagctaacaggtgtagtgcaaaggctatcagtcg

SEQ ID NO: 576955 - DNA, 75 bp, synthetic construct
  source 1..75: mol_type = other DNA
gattatcggtggcaatgctaccggtatcggaaccctgaatgtgcaggatcaagactctgtcatcacgcaacctgg

SEQ ID NO: 576956 - DNA, 75 bp, synthetic construct
  source 1..75: mol_type = other DNA
atcatcgttcgatactgtgggtatcaatgtcggtaattttggtagcggtatcgtaaatgtggatttgcccctata

SEQ ID NO: 576957 - DNA, 75 bp, synthetic construct
  source 1..75: mol_type = other DNA
ttgggcgataaagcaagcggtatcggcacactgaacctgatggatgcgacatcatcgttcgatactgtgtggatt

SEQ ID NO: 576958 - DNA, 75 bp, synthetic construct
  source 1..75: mol_type = other DNA
aactgtgaagtggttgagcgtctgggcaacaacacctacctctttggtcagtgctacggccacgacaatgtgaag

SEQ ID NO: 576959 - DNA, 75 bp, synthetic construct
  source 1..75: mol_type = other DNA
aacgctaaacattggtgcagctcacggtgaggcggcggcagatgccgggtatataaccaacgcgacgaaagtaga

SEQ ID NO: 576960 - DNA, 75 bp, synthetic construct
  source 1..75: mol_type = other DNA
ggtatcgtaaatgtcagtaatggtgccacccttaattcaacgggctatggatttatcggaggaaatgcctccggt

SEQ ID NO: 576961 - DNA, 75 bp, synthetic construct
  source 1..75: mol_type = other DNA
gttttcctccgattgctcagcaattactggcagtaaagataatgaaatatctttacctacattaattttatttgc

SEQ ID NO: 576962 - DNA, 75 bp, synthetic construct
  source 1..75: mol_type = other DNA
aagcgtgctgggttaggaggtgttctcgtttctcatggcttgcgttctatcgcaagtacagctctcaatgagcaa

SEQ ID NO: 576963 - DNA, 75 bp, synthetic construct
  source 1..75: mol_type = other DNA
atcgctctggacagtattttttcaacggtcgccgctaactggttccagctcaaaagcaaaagcgttacacccgat

SEQ ID NO: 576964 - DNA, 75 bp, synthetic construct
  source 1..75: mol_type = other DNA
catgcttttacaacctggaagaaattgatcgctggattgagcgccaggcatcagcaagaccaagacgtcatctta

SEQ ID NO: 576965 - DNA, 75 bp, synthetic construct
  source 1..75: mol_type = other DNA
caaatactgcgtttccggctcccagactctatgtatttcagaaacgagatatttatgctgagcattttatatgtt

SEQ ID NO: 576966 - DNA, 75 bp, synthetic construct
  source 1..75: mol_type = other DNA
tcgatggtgaaagtgggcgtttacatttttgcccgcgccattatcgacggcggcaatatcccgcatgtgattggc

SEQ ID NO: 576967 - DNA, 75 bp, synthetic construct
  source 1..75: mol_type = other DNA
tgcgagcacttacctgaatgaatcagaatttaattcagatattattgaggcagcattggctcacgtcgataaaga

SEQ ID NO: 576968 - DNA, 75 bp, synthetic construct
  source 1..75: mol_type = other DNA
gaaaaatgctttggataagagatatccgaaagcggagaaaatcattgcagatgcactgggaatgacaccgcaaga

SEQ ID NO: 576969 - DNA, 75 bp, synthetic construct
  source 1..75: mol_type = other DNA
aacactcgatgaactgaaccagtcgggaaaagggaaagtgtggtttgcggggcgaggaaccgcccctgaatggca

SEQ ID NO: 576970 - DNA, 75 bp, synthetic construct
  source 1..75: mol_type = other DNA
aggcaacgcctttgtcattatgggagctggagaacaattaaaacgtattaaatatgaagttggtgaaaataactt

SEQ ID NO: 576971 - DNA, 75 bp, synthetic construct
  source 1..75: mol_type = other DNA
ctacgtattgcaccaggctgcacttggttcagtgcctcgttcaattaatgatcctataacaactaatgaagttaa

SEQ ID NO: 576972 - DNA, 75 bp, synthetic construct
  source 1..75: mol_type = other DNA
gttcgtcattctcaagcaaacatagataaagcaaagcgcttattagggtatgtgccaacacatgatatattggat

SEQ ID NO: 576973 - DNA, 75 bp, synthetic construct
  source 1..75: mol_type = other DNA
acccggaagacatcaaagcagcgattaggaaacgtgggatgactaccagtcagctctccagaagcaacggattag

SEQ ID NO: 576974 - DNA, 75 bp, synthetic construct
  source 1..75: mol_type = other DNA
cgtttatggacttcgatgttccggcaattctcggcgaccacgttacgctggatgccggtaccggtgccgttcata

SEQ ID NO: 576975 - DNA, 75 bp, synthetic construct
  source 1..75: mol_type = other DNA
agcggcagacatcttccgtggccgtggacgctcaatatcagcgggaccggctaccgctatgccagccgggagcag

SEQ ID NO: 576976 - DNA, 75 bp, synthetic construct
  source 1..75: mol_type = other DNA
tcaatatcaaaggtaccggctaccgctatgccagccaggagcaggcctgccaggcgctgctggccgcgatccgcc

SEQ ID NO: 576977 - DNA, 75 bp, synthetic construct
  source 1..75: mol_type = other DNA
aaaaattgttaacacttagtgcccttaaaggagtgggtactaagtcgttatctagtttaggcatgctcaaagact

SEQ ID NO: 576978 - DNA, 75 bp, synthetic construct
  source 1..75: mol_type = other DNA
cgccgccgcccgctaccaccatcccgccggaggtaaacccgcagccatttatcgccagaagatcagccagcaaat

SEQ ID NO: 576979 - DNA, 75 bp, synthetic construct
  source 1..75: mol_type = other DNA
ctggcgcaggggctacatccatggccgtggacgctgaatattgccggaaccggctaccgttaccccagccgttct

SEQ ID NO: 576980 - DNA, 75 bp, synthetic construct
  source 1..75: mol_type = other DNA
gtagtaataatagtggcactactgaaatcagtcatcggggctttatcaagtttaccgaccagatggccctgcttg

SEQ ID NO: 576981 - DNA, 75 bp, synthetic construct
  source 1..75: mol_type = other DNA
cattcagttgaccagtgagaaacgagtattcaaaggtggtcgctatgtatgggagaaaaagagtaagagcaatct

SEQ ID NO: 576982 - DNA, 75 bp, synthetic construct
  source 1..75: mol_type = other DNA
agtgcctgaagaccttccagctcgactaccgctacaacggggcgaaacccatcaaactttccaactattatcaca

SEQ ID NO: 576983 - DNA, 75 bp, synthetic construct
  source 1..75: mol_type = other DNA
cgctgaaggccaaaggcgttcatgccaaactgctctactcgcgaatgggggaagtgactgcggatgacggtacgg

SEQ ID NO: 576984 - DNA, 75 bp, synthetic construct
  source 1..75: mol_type = other DNA
aggataaatcatccgaggataaaaatacggatatttattcaaaatttaaagaaaaagttataggaaaaacattcc

SEQ ID NO: 576985 - DNA, 75 bp, synthetic construct
  source 1..75: mol_type = other DNA
aaaaatgagaaaggctttttcctgcaagttgaaggtgcatcaatcgataaacaggatcacgctgcgaatccttgt

SEQ ID NO: 576986 - DNA, 75 bp, synthetic construct
  source 1..75: mol_type = other DNA
agatcgaggttatgttcttgtctttgcagtctactcatttttaaccttgttttttgtgttcaaagttattttgga

SEQ ID NO: 576987 - DNA, 75 bp, synthetic construct
  source 1..75: mol_type = other DNA
cgctcaaccaggtacagccgctcacccccttaaaagcaggggataacacactcaagtatcaactgcgttacaagt

SEQ ID NO: 576988 - DNA, 75 bp, synthetic construct
  source 1..75: mol_type = other DNA
caatatcaacataagcgaccggctaatccttaatcattaccgggggctgttttgtgatgacattgtcaccctggc

SEQ ID NO: 576989 - DNA, 75 bp, synthetic construct
  source 1..75: mol_type = other DNA
aaaagcaggaaagatagctggtaacaataacgagctgttgatggaaataaaaaggaatcccaaagcgaccatcaa

SEQ ID NO: 576990 - DNA, 75 bp, synthetic construct
  source 1..75: mol_type = other DNA
atgaataaaaaaacaatatttcagtgcgttatcttgttctttagccttgttaatgcacaaatcggaatggctggg

SEQ ID NO: 576991 - DNA, 75 bp, synthetic construct
  source 1..75: mol_type = other DNA
ttgccggtcagtccaatagcatgtcatacggtgaaggtcttccgttgccggagacatatgaccgtccggacccgc

SEQ ID NO: 576992 - DNA, 75 bp, synthetic construct
  source 1..75: mol_type = other DNA
gtgttcacacttccctgccagtactggtccctggtgttccacaaccggtggttactggcagagatgagccgcata

SEQ ID NO: 576993 - DNA, 75 bp, synthetic construct
  source 1..75: mol_type = other DNA
catttatctgcattaatgttaatgcctgtttatttttataatcgatttaaatttgaaccattaactttaataatc

SEQ ID NO: 576994 - DNA, 75 bp, synthetic construct
  source 1..75: mol_type = other DNA
ggagcgggctttcgtaatctttccctgggttcccatgtcaatgcctggaatgaggcagagggtattttaagtaat

SEQ ID NO: 576995 - DNA, 75 bp, synthetic construct
  source 1..75: mol_type = other DNA
agttattgagttcagtaaaaatgccccggactggcgtaatccgctctggcgtcatgaagataacagcgtagcaga

SEQ ID NO: 576996 - DNA, 75 bp, synthetic construct
  source 1..75: mol_type = other DNA
gggatcttgatgcgaaagagatcctcggcgacgaagctgatcagtacgtgaaagtgccggatacgctggacgtat

SEQ ID NO: 576997 - DNA, 75 bp, synthetic construct
  source 1..75: mol_type = other DNA
caatgacccctgttacctccaacggcgtcgatgaaaagggattcaataatattttggcccgccttacgacggcac

SEQ ID NO: 576998 - DNA, 75 bp, synthetic construct
  source 1..75: mol_type = other DNA
agtacgccattcctgctggcgcgcgttgctgaactgaccggcggtgacagcctgaaatccaacatccagctggtg

SEQ ID NO: 576999 - DNA, 75 bp, synthetic construct
  source 1..75: mol_type = other DNA
tgtagacaaacttgaaagtatgcaggaagcgcacattaaaagcggtaaatcagcgagtggacttgttgagtatcg

SEQ ID NO: 577000 - DNA, 75 bp, synthetic construct
  source 1..75: mol_type = other DNA
cggcgatgaagctgatcagtatgtgaaagtgccggacacattggatgtatggtttgactccggctctacccactc

SEQ ID NO: 577001 - DNA, 75 bp, synthetic construct
  source 1..75: mol_type = other DNA
aatcattacctgttgctttgcatatgccatatattaaaaaacatcattctttaccggaaattgaggtgaatgggg

SEQ ID NO: 577002 - DNA, 75 bp, synthetic construct
  source 1..75: mol_type = other DNA
accgatatgaatcatattccttccggcgtccggcattttaccgccagacagctcgggattcgtgatatcaccgtt

SEQ ID NO: 577003 - DNA, 75 bp, synthetic construct
  source 1..75: mol_type = other DNA
ggcggttttgttgcagattaattcataaagaaatgcatttgggtcttggtttgaagagtagctggttgatgttat

SEQ ID NO: 577004 - DNA, 75 bp, synthetic construct
  source 1..75: mol_type = other DNA
agcattctcgcgcttcttgaggctggcgattggtcagaacattgcactaaaacggagttaggcggtcggcttgaa

SEQ ID NO: 577005 - DNA, 75 bp, synthetic construct
  source 1..75: mol_type = other DNA
catattcgccctgactttccagaaccatacgaatcgccctctgacggacttcgggggaaaaacgagtatttttag

SEQ ID NO: 577006 - DNA, 75 bp, synthetic construct
  source 1..75: mol_type = other DNA
tggcggatgtcgtcaagctctcggaagaagaatggcgacttatcagtggaaaaacacagaacgatcaggatatat

SEQ ID NO: 577007 - DNA, 75 bp, synthetic construct
  source 1..75: mol_type = other DNA
ttggtggcaatgaatctgccgcgcgactggcaggcgtccccatcgtaaaagttaaagtgttcgtctatgcgttct

SEQ ID NO: 577008 - DNA, 75 bp, synthetic construct
  source 1..75: mol_type = other DNA
tataatgcttgcgcatgttaatccgcctaatcttattttccagataagaacatttgatgttcctatgatgatttt

SEQ ID NO: 577009 - DNA, 75 bp, synthetic construct
  source 1..75: mol_type = other DNA
aggatttttgaaatctgaacaatgcgtatcttctccgcagcaaagattcgatattccgaaagtgtgtacatataa

SEQ ID NO: 577010 - DNA, 75 bp, synthetic construct
  source 1..75: mol_type = other DNA
atgagtagcacaacgattcgggagttttctttggctgtaggttcgccagcaatcacttcgattctttgtgtaaga

SEQ ID NO: 577011 - DNA, 75 bp, synthetic construct
  source 1..75: mol_type = other DNA
ggcagcctgagttcacagataaaacactctccaggaaacccggggcggttcagggcgatgttattaaggttaatt

SEQ ID NO: 577012 - DNA, 75 bp, synthetic construct
  source 1..75: mol_type = other DNA
aaaagaagctcaggccaatgatattaaatcaatcggtgacgctatcaggaatcaggtattaggaaagaagaatgg

SEQ ID NO: 577013 - DNA, 75 bp, synthetic construct
  source 1..75: mol_type = other DNA
ctgatcgctgcagtcccaacggctgatgtgctggtcaataatctgggcattttcaacgataaagatttctttagc

SEQ ID NO: 577014 - DNA, 75 bp, synthetic construct
  source 1..75: mol_type = other DNA
aatggtgggcagttactgacgatggggaagagccggcatcgaaagtaacccactggatgccgctgccagaaccgc

SEQ ID NO: 577015 - DNA, 75 bp, synthetic construct
  source 1..75: mol_type = other DNA
gcaaaaggatgccggagccttatgaatacgttcttgtaactgatggttttgatggctgtgaggttatgcgtgtta

SEQ ID NO: 577016 - DNA, 75 bp, synthetic construct
  source 1..75: mol_type = other DNA
atgatcactattaccaaagaacgtattgaattgttcattaaaaatccgcttgaaaacgggcttacccgtggtgaa

SEQ ID NO: 577017 - DNA, 75 bp, synthetic construct
  source 1..75: mol_type = other DNA
ccggtatacgaaggaaaaatactttgagtactcccatgacggaaaactgatgggtcgattgctgataccctcaaa

SEQ ID NO: 577018 - DNA, 75 bp, synthetic construct
  source 1..75: mol_type = other DNA
ttccttgaatattcccatgacggcaaactgatgggacggctgctgatcccctcaaaccctgataaccgggaataa

SEQ ID NO: 577019 - DNA, 75 bp, synthetic construct
  source 1..75: mol_type = other DNA
atgaaacgtaaaacactacctctgctggcgctggttgccacctctctgtttctgagcgcctgcgatgacaggagt

SEQ ID NO: 577020 - DNA, 75 bp, synthetic construct
  source 1..75: mol_type = other DNA
atgccatttgttatttatgttttcactatcagtgcctttgcgctcggactcgcggaatttgtccccattgggctg

SEQ ID NO: 577021 - DNA, 75 bp, synthetic construct
  source 1..75: mol_type = other DNA
ccctttcacgaaggaaaaatacttcgaatattcccatgacggcaaactgatgggacgactgttgataccctcaaa

SEQ ID NO: 577022 - DNA, 75 bp, synthetic construct
  source 1..75: mol_type = other DNA
cgtaaatctcaccgtgccaaccattggcatcaacactatcgccagcgatgacgtgattaacgccacggaaaaagg

SEQ ID NO: 577023 - DNA, 75 bp, synthetic construct
  source 1..75: mol_type = other DNA
tcggtggcggcatcggcaagggcgatcacgccagcgcacgctgggacgacaaggccgaacgcgtggtgttcgaac

SEQ ID NO: 577024 - DNA, 75 bp, synthetic construct
  source 1..75: mol_type = other DNA
caaggaagtgaccgagcaccagggcgagatgattctcttcatcgatgaggtgcacaccatcgtcggtgccggcca

SEQ ID NO: 577025 - DNA, 75 bp, synthetic construct
  source 1..75: mol_type = other DNA
cagtgtgccgacggcagatcttagcaatctgaccgccagccagtacaccgttagcgcctcggtaagcgataaagc

SEQ ID NO: 577026 - DNA, 75 bp, synthetic construct
  source 1..75: mol_type = other DNA
ttaagctggagcgtcagcgtacctgcgaacgttttgcaggcgctgggcaacggtgaactgaccatcagcgcctcg

SEQ ID NO: 577027 - DNA, 75 bp, synthetic construct
  source 1..75: mol_type = other DNA
agcgatcgcgcgggcaacagcgacagcactacccataatgtgaccgttgatctcagcggcccgacgctgaccatc

SEQ ID NO: 577028 - DNA, 75 bp, synthetic construct
  source 1..75: mol_type = other DNA
gaattggcattaactgcctctgatcgtttgctaatcccattctcagcagatggctcatcgaaacgtgcggtaaga

SEQ ID NO: 577029 - DNA, 75 bp, synthetic construct
  source 1..75: mol_type = other DNA
catattgcggataaccatcgctaccagccgggcagcggcaccctggatttccacgcgctgtttgaacagctgcgc

SEQ ID NO: 577030 - DNA, 75 bp, synthetic construct
  source 1..75: mol_type = other DNA
cgggagtggatgatgatgagatttatacggaaaatgattttttaaaatattacacacttactgatcctgacatat

SEQ ID NO: 577031 - DNA, 75 bp, synthetic construct
  source 1..75: mol_type = other DNA
ggcgctcgccgacagcgacgtggtcaagaccattctggggcaattcaagatcaaggtcgatgatctcaagcggca

SEQ ID NO: 577032 - DNA, 75 bp, synthetic construct
  source 1..75: mol_type = other DNA
tgggtggcggtatcggcaagggtgatcacgccaacgcccgctgggacgacaaggccgaacgggtggtcttcgagc

SEQ ID NO: 577033 - DNA, 75 bp, synthetic construct
  source 1..75: mol_type = other DNA
ccgcgccgtcgcggcagtgggctggccagccgcatcagcgaacagtcggaagccttgttgcaggaggccgccaaa

SEQ ID NO: 577034 - DNA, 75 bp, synthetic construct
  source 1..75: mol_type = other DNA
ggcaacacctacaccgccacggtgcaggccaatttaagctggagtgtcagcgttccggcggcggatattcaggcg

SEQ ID NO: 577035 - DNA, 75 bp, synthetic construct
  source 1..75: mol_type = other DNA
cggcaggcaacagcgatgacgccagccgcacggtcaccgtgaatctcgccgcgccaaccattggtatcaacacca

SEQ ID NO: 577036 - DNA, 75 bp, synthetic construct
  source 1..75: mol_type = other DNA
taacgccgccgaaagcgggcaggatctgcccatcaccggcaccaccgacgctcagccggggcagacggtgaccgt

SEQ ID NO: 577037 - DNA, 75 bp, synthetic construct
  source 1..75: mol_type = other DNA
gtagcgggcgatgatgttattaacagcattgagcacaatcaggcgctggtgataacaggtagcagcaccgggctg

SEQ ID NO: 577038 - DNA, 75 bp, synthetic construct
  source 1..75: mol_type = other DNA
acgctgaccgtcacgctcaataacaacacgtaccagaccaccgttcaggcggatggcacctggagcgtgaatgtt

SEQ ID NO: 577039 - DNA, 75 bp, synthetic construct
  source 1..75: mol_type = other DNA
ccgcttgtgaccatcaacaccatcgccagcgacgatatccttaacgtgagcgaagctggcgcggggatcaccatc

SEQ ID NO: 577040 - DNA, 75 bp, synthetic construct
  source 1..75: mol_type = other DNA
gacgcggcaggcaacagcgatgacgccagccgcacggtcaccgtgaatctgaccgcgccaaccattggtatcaac

SEQ ID NO: 577041 - DNA, 75 bp, synthetic construct
  source 1..75: mol_type = other DNA
gatacggtggcgggcgatgatgtggtcaatattattgagcatgggcaggcgctggtgattaccggcagcagctcg

SEQ ID NO: 577042 - DNA, 75 bp, synthetic construct
  source 1..75: mol_type = other DNA
agccagatttaagctggagcgtcagcgtaccggcgaacgttttgcaggcgctgggcaacggagaactgaccatca

SEQ ID NO: 577043 - DNA, 75 bp, synthetic construct
  source 1..75: mol_type = other DNA
aaaggcgaaacgctggtcgtaagcggcagcaccagcggtgtggaagctgggcagacggtgaccgtcacctttggc

SEQ ID NO: 577044 - DNA, 75 bp, synthetic construct
  source 1..75: mol_type = other DNA
tcacgcttaatggtgtggcttacatcggcaccgttcaggcgggcggtagctggagcgtcagcgtgccgacaacag

SEQ ID NO: 577045 - DNA, 75 bp, synthetic construct
  source 1..75: mol_type = other DNA
gcaggatctgcaaatcaccggcaccaccgacgcccagccggggcagacggtgaccgttacgttgaatgggcagac

SEQ ID NO: 577046 - DNA, 75 bp, synthetic construct
  source 1..75: mol_type = other DNA
ccaacgttggcgtactggctgacggcaacgccacggtgaccgccagcgtgaacgatgtcgcgggtaatccgacca

SEQ ID NO: 577047 - DNA, 75 bp, synthetic construct
  source 1..75: mol_type = other DNA
gcaactataccgttagcgcggcagtgagcgacaaagccggaaacccggcctcggttaatcacaacctgacggtgg

SEQ ID NO: 577048 - DNA, 75 bp, synthetic construct
  source 1..75: mol_type = other DNA
aagctgagacagaaaaaaacactgcattttatgaatgggccgattcacactgtgaaaaaattgaaaaaaatttaa

SEQ ID NO: 577049 - DNA, 75 bp, synthetic construct
  source 1..75: mol_type = other DNA
gggagcgggctttcgtaatcttgccctggctttattatcgaattcggtgaccgccttgacggtcacttctgagaa

SEQ ID NO: 577050 - DNA, 75 bp, synthetic construct
  source 1..75: mol_type = other DNA
attatatactatataaacataaaaactcatggataaaaatttttggaaatgaaatgacctttttttatcgtgtct

SEQ ID NO: 577051 - DNA, 75 bp, synthetic construct
  source 1..75: mol_type = other DNA
gtgacctgggttcgccagccaccggaagaggccattacagacatgacgtattttcccttttaccggtatgccatg

SEQ ID NO: 577052 - DNA, 75 bp, synthetic construct
  source 1..75: mol_type = other DNA
agattgcccgtgccctttctaaagatacccgggtactgattatggatgaaccgacatcggccctcagccagtcgg

SEQ ID NO: 577053 - DNA, 75 bp, synthetic construct
  source 1..75: mol_type = other DNA
ggcgaaggcgtcgttcagatgatgtcgattcagtccaatatgacgctatccgatttcagcctgcaaggttttcgc

SEQ ID NO: 577054 - DNA, 75 bp, synthetic construct
  source 1..75: mol_type = other DNA
gaacgggtgaagatgttctgtccgcagccattcatcgcattgaatggctgtttgatacattctcttcggtttgcc

SEQ ID NO: 577055 - DNA, 75 bp, synthetic construct
  source 1..75: mol_type = other DNA
atgagtaatacgtttttaaccgataaaatatttaccggagaaaatattctgcgtgcatcaaccgcccgcattgag

SEQ ID NO: 577056 - DNA, 75 bp, synthetic construct
  source 1..75: mol_type = other DNA
taggcagtcaggtggcggatatcgcgcggacgcagggggaactgaatgcgttgaaggccgcgaaggaagcaaccg

SEQ ID NO: 577057 - DNA, 75 bp, synthetic construct
  source 1..75: mol_type = other DNA
gaaataaccttcttttatcgtgtctcccgaaaaatggtatttttacttagaccatataaaatgtatctttttgta

SEQ ID NO: 577058 - DNA, 75 bp, synthetic construct
  source 1..75: mol_type = other DNA
caggtcgcgacgaccgggcattctaaagtgatgatcccattgaagccggaagtggatatcgacgctctttcgcct

SEQ ID NO: 577059 - DNA, 75 bp, synthetic construct
  source 1..75: mol_type = other DNA
ggaagtcactggtatacatttaaatctttaacctatcgtattgtaaataataagtggttctttcagaggagtgtc

SEQ ID NO: 577060 - DNA, 75 bp, synthetic construct
  source 1..75: mol_type = other DNA
gagccatcaggaacgaaatacagttcgggccgcttacatttataaggctgagcatttggatgaaagacggctcat

SEQ ID NO: 577061 - DNA, 75 bp, synthetic construct
  source 1..75: mol_type = other DNA
gcggcagatgtcagcgcctggcctgcggggacggtcacgattacggcgagcggtagcaccaccgccggaaatccg

SEQ ID NO: 577062 - DNA, 75 bp, synthetic construct
  source 1..75: mol_type = other DNA
aggcgctggtgattaccggcagcagttccggtctggcgacgggcagtaacgtcacgctgaccattaacgggcaaa

SEQ ID NO: 577063 - DNA, 75 bp, synthetic construct
  source 1..75: mol_type = other DNA
tcatctgatggtaagaaaattggtactctggcgttcgtaatgcgagttgcctgtcaggcaagcgaacaggcgggt

SEQ ID NO: 577064 - DNA, 75 bp, synthetic construct
  source 1..75: mol_type = other DNA
cacggcggaagcggggcagacggtgaccgtcaccctcaatggcgaaaactatactagcacggttcaaacggacgg

SEQ ID NO: 577065 - DNA, 75 bp, synthetic construct
  source 1..75: mol_type = other DNA
gccaccactacccacgcttacagcgtcgatgctaccgcgccaacggtgaccattaacaccattgcgggcgacgac

SEQ ID NO: 577066 - DNA, 75 bp, synthetic construct
  source 1..75: mol_type = other DNA
cgcaggtacggcgttgacggtggtgattaataaccaaacttacgccgccacggtgctggcaaacggcagctggag

SEQ ID NO: 577067 - DNA, 75 bp, synthetic construct
  source 1..75: mol_type = other DNA
agctaatatacaagctaatgaaactgttaactataatgcattaattatcgaaggtacattattacccgataatga

SEQ ID NO: 577068 - DNA, 75 bp, synthetic construct
  source 1..75: mol_type = other DNA
accgttgtatgctttatttgccgggcaaaaggggatgcccgccatagcacgatattttatggatgagttaaccac

SEQ ID NO: 577069 - DNA, 75 bp, synthetic construct
  source 1..75: mol_type = other DNA
tttcgttggcagaggctcgtaagaggcgcgatgcagcaaagaaactgatatctgatggtattgatccctctcaaa

SEQ ID NO: 577070 - DNA, 75 bp, synthetic construct
  source 1..75: mol_type = other DNA
cataggggaaaagggtattgccccacaaatcgattataataaagccgctgatgtggattatatggataaggggag

SEQ ID NO: 577071 - DNA, 75 bp, synthetic construct
  source 1..75: mol_type = other DNA
atgcacgtgcattttgcgtgtatatttttgtctttttctggtccgctcactgtctggtcagtgtccataagtgac

SEQ ID NO: 577072 - DNA, 75 bp, synthetic construct
  source 1..75: mol_type = other DNA
ccatttatattataatgaaaacaataatttgttttcaaaaacagttggttggtattgttttgtgtttatccgttt

SEQ ID NO: 577073 - DNA, 75 bp, synthetic construct
  source 1..75: mol_type = other DNA
tttttatactggctttgctggccttttgcggtgtttttattgtatattttttatggtttaaagcttggcttaatt

SEQ ID NO: 577074 - DNA, 75 bp, synthetic construct
  source 1..75: mol_type = other DNA
aacaaaaatattattctgtaattaatttagaaaaattgcgttcgagcaatgagtcacagaagcaaacgctattaa

SEQ ID NO: 577075 - DNA, 75 bp, synthetic construct
  source 1..75: mol_type = other DNA
attaatgtgcaggaaaccggaagtaattcggcagataacatcggcggcgtgtattaccgtccgcttcagaaactg

SEQ ID NO: 577076 - DNA, 75 bp, synthetic construct
  source 1..75: mol_type = other DNA
aaacgctggcaggtccctacggtataaaaaggtacgagaaagataactaccagtcagccaatttttggtttaaca

SEQ ID NO: 577077 - DNA, 75 bp, synthetic construct
  source 1..75: mol_type = other DNA
actggcacttactgataagccatggggaacgtttatccttgcgtcgacatttgaagatgataaaacggctgaaga

SEQ ID NO: 577078 - DNA, 75 bp, synthetic construct
  source 1..75: mol_type = other DNA
aatatttggtcatgtatatttttatactattggctttatgggtatgccaagcaagtataaattataaaataaatt

SEQ ID NO: 577079 - DNA, 75 bp, synthetic construct
  source 1..75: mol_type = other DNA
ggtaggcacaattttaggtgtggcactgtttcgcggtgtaccggtcggcccgcttattgccgcgggactggtctc

SEQ ID NO: 577080 - DNA, 75 bp, synthetic construct
  source 1..75: mol_type = other DNA
tgctcggattagctgcgctaggctttatcagccataacacgactgtcgccgtttcaattctggtattaatcattg

SEQ ID NO: 577081 - DNA, 75 bp, synthetic construct
  source 1..75: mol_type = other DNA
aaaattgtttcatgatattattgatcttgcgaatttaacatgtcataaaaacactgtcgcacctaaattaatatc

SEQ ID NO: 577082 - DNA, 75 bp, synthetic construct
  source 1..75: mol_type = other DNA
attcggacggggcgtcttgccacctggctgaacagtgccatgtgggatgccattcaggaagaattgtgtggtgtc

SEQ ID NO: 577083 - DNA, 75 bp, synthetic construct
  source 1..75: mol_type = other DNA
ggtgccgccgtttacccgcgtggaaagtctcgatttcgacgatcacccgttcaccgttcagcagtgggatgagcc

SEQ ID NO: 577084 - DNA, 75 bp, synthetic construct
  source 1..75: mol_type = other DNA
accgcagcgacacgccggtgatcaaaatcagcgccaaatggctgagagaagcgggatttgagatcggcacgggcg

SEQ ID NO: 577085 - DNA, 75 bp, synthetic construct
  source 1..75: mol_type = other DNA
gttgtaccttgatattcttattcaggctgttgatacggggataattaaagctgaagactgggaaaaaggggaccg

SEQ ID NO: 577086 - DNA, 75 bp, synthetic construct
  source 1..75: mol_type = other DNA
gcctgctctgaatactgacaagatcactttctatgaggcactgcagaaaacgaaagcgtcgtttgggcgtcgggg

SEQ ID NO: 577087 - DNA, 75 bp, synthetic construct
  source 1..75: mol_type = other DNA
ccggaggtgaccggcatgttcacgagaccggaggccgagcgtctcgcgcttcgttccgcgctgcgtgacggtgaa

SEQ ID NO: 577088 - DNA, 75 bp, synthetic construct
  source 1..75: mol_type = other DNA
gtgcaattgcgccagggtgggcagtcgcacgcgccagaaacaaaatgctgttgcaggcatacgatgcggcacagc

SEQ ID NO: 577089 - DNA, 75 bp, synthetic construct
  source 1..75: mol_type = other DNA
cattgcattaaataatgatgtagatgttaaatttggagcatccaaagatatctataccactaaaaaaagaaatcc

SEQ ID NO: 577090 - DNA, 75 bp, synthetic construct
  source 1..75: mol_type = other DNA
cgaaagcgtcgtttgggcgtcgggggaaaagtaatggcagaagtcaccctgaagttgaggtaatcaactactgtt

SEQ ID NO: 577091 - DNA, 75 bp, synthetic construct
  source 1..75: mol_type = other DNA
atgactgaagtatcggagggttttcagcctgttatggtgcgtgatgatgtgcctgctttgaatattgacaagatc

SEQ ID NO: 577092 - DNA, 75 bp, synthetic construct
  source 1..75: mol_type = other DNA
tcttggtccggtgatgccgtggattgatccggtgaaggaggctgcagcatggcgggccattcttcgcggtggtgc

SEQ ID NO: 577093 - DNA, 75 bp, synthetic construct
  source 1..75: mol_type = other DNA
gtaatacaacccgtagttttattaatgattgtggtcatgttaaaaataaactttataatggagttctttgctttg

SEQ ID NO: 577094 - DNA, 75 bp, synthetic construct
  source 1..75: mol_type = other DNA
tattaccccaaaaaaaacaccatagagattgctgaagaaaaccttttctatggtataaagatggacgatgtcgta

SEQ ID NO: 577095 - DNA, 75 bp, synthetic construct
  source 1..75: mol_type = other DNA
gaccccgtcaaagaggctgcagcatggcgggccattcttcgtggtggtgcaggaacggaagccgagtggatccgt

SEQ ID NO: 577096 - DNA, 75 bp, synthetic construct
  source 1..75: mol_type = other DNA
aagctggatctggtatttgataccgatccggccagtgataaaggaggcagcagtgccgcaacgaaacgacagtag

SEQ ID NO: 577097 - DNA, 75 bp, synthetic construct
  source 1..75: mol_type = other DNA
gtgcaattgcgccagggtgggcagtttcgcgcgccagaaacaaaatgctgctgagagcttatgaggcggcgcagc

SEQ ID NO: 577098 - DNA, 75 bp, synthetic construct
  source 1..75: mol_type = other DNA
caggtgattctacggattatttaattccgcagattaaagccccgtcaggtggtttccttgttggttctcttgccg

SEQ ID NO: 577099 - DNA, 75 bp, synthetic construct
  source 1..75: mol_type = other DNA
cctgcttcagctggacagatgctatcgatcatggtccgcaaatgacggcaatccgcgacggcgtccgcggcaaag

SEQ ID NO: 577100 - DNA, 75 bp, synthetic construct
  source 1..75: mol_type = other DNA
atattctggcactgaatgctgccgttgaagccgcgcgagcgggtgagcaagggcgtggatttgccgttgtcgcca

SEQ ID NO: 577101 - DNA, 75 bp, synthetic construct
  source 1..75: mol_type = other DNA
ttgaggcctgattattatttagaaccttcaacattagttcattatgagcaacagttcaccagagtccttcgaagt

SEQ ID NO: 577102 - DNA, 75 bp, synthetic construct
  source 1..75: mol_type = other DNA
gatttatgaatgggcgcagcggattttgcaggatgtcggtcagatgatggacgaactttctgacgtgcgtcaggt

SEQ ID NO: 577103 - DNA, 75 bp, synthetic construct
  source 1..75: mol_type = other DNA
cggaaatgaccgcgacccgtgatggtgttcgtggaaaagaaaaactggatgtccccatcaagtttttatggtgct

SEQ ID NO: 577104 - DNA, 75 bp, synthetic construct
  source 1..75: mol_type = other DNA
tcctgagtgaagtcgcgaaacgtcttggacctgacgtctatcaaaagttcacagaaggtcgcacgcaggaacaat

SEQ ID NO: 577105 - DNA, 75 bp, synthetic construct
  source 1..75: mol_type = other DNA
aatcactaataaaactaaagctattatgtgtgtccatttatacggacatccatgtgatatggaacaaattgtaga

SEQ ID NO: 577106 - DNA, 75 bp, synthetic construct
  source 1..75: mol_type = other DNA
accggacaattaccatctataacctgcgtgctgatacaaatgaatttatcgggaaaagtgatgggtttatccctg

SEQ ID NO: 577107 - DNA, 75 bp, synthetic construct
  source 1..75: mol_type = other DNA
accggacaattattctttataaccttcgttcagatacaaatgaatttattgggaaatctgatgggtttatccctg

SEQ ID NO: 577108 - DNA, 75 bp, synthetic construct
  source 1..75: mol_type = other DNA
ggtggtgctgtctctgagtttaccaatggaattatcaaggatttcaataatcctcaagctcctgaaaaaaaggaa

SEQ ID NO: 577109 - DNA, 75 bp, synthetic construct
  source 1..75: mol_type = other DNA
actacaacaacacccaggagatctgggatgagttgcgtcatctgtgcccggatttctacggtgcgacttacgaga

SEQ ID NO: 577110 - DNA, 75 bp, synthetic construct
  source 1..75: mol_type = other DNA
agcttggcggtggtgctgtctctgagtttaccaatggaattatcaaggatttcaataatcctcaagctcctgaaa

SEQ ID NO: 577111 - DNA, 75 bp, synthetic construct
  source 1..75: mol_type = other DNA
cggtgaatggcatggatccattaggattatatgaatttaaatcaaaaaatatagatgatattggaatatttgcat

SEQ ID NO: 577112 - DNA, 75 bp, synthetic construct
  source 1..75: mol_type = other DNA
gagtactaatgcactttccaatttaaagaaagagtatacagatacaaatatgaatcaaaaagtaattaagattta

SEQ ID NO: 577113 - DNA, 75 bp, synthetic construct
  source 1..75: mol_type = other DNA
ggtgtttatggagcaggggcgtatcgaaattgatgcgccgccggaagaaattcgccaaatgcgcaatcaccggat

SEQ ID NO: 577114 - DNA, 75 bp, synthetic construct
  source 1..75: mol_type = other DNA
agaaatttgtcccgattaaatgaaggtatgcaatatgcaaaaaggcactttaccggtatccagacatcatgccta

SEQ ID NO: 577115 - DNA, 75 bp, synthetic construct
  source 1..75: mol_type = other DNA
gcagataacggttgcgcctggtaatggtattgagcaagcaactcactggatgccgctaccggaaccgccgcagga

SEQ ID NO: 577116 - DNA, 75 bp, synthetic construct
  source 1..75: mol_type = other DNA
cggagcatggaaagacgctgttgactgggtgctcaaagaggcttgccagtctgtaaacattggcatcaaaggaga

SEQ ID NO: 577117 - DNA, 75 bp, synthetic construct
  source 1..75: mol_type = other DNA
ggcgagttaagcgaattaacgtggtgcagccacaatcagcaccatgatgacacgctatatgttcgagctgacttg

SEQ ID NO: 577118 - DNA, 75 bp, synthetic construct
  source 1..75: mol_type = other DNA
attgttaaatctgatatgcagaaagctgagttcaagactaagagaggcgagtattacgtttctcgtgacaaatca

SEQ ID NO: 577119 - DNA, 75 bp, synthetic construct
  source 1..75: mol_type = other DNA
cgacggtgacagtgatacggcggttaacccgtatcacgcccagtacattctgcgccgcctcgacgattacctgga

SEQ ID NO: 577120 - DNA, 75 bp, synthetic construct
  source 1..75: mol_type = other DNA
attgcgttggctacgatgagaaaaccctgccagccagtgcgccgaaaaatggccactataaagcttatattctgg

SEQ ID NO: 577121 - DNA, 75 bp, synthetic construct
  source 1..75: mol_type = other DNA
ggggaatgccggcagagcagcggcttgctgaacgtcagcgaaaaacgaaaccgctgttgaaatccctggaaagct

SEQ ID NO: 577122 - DNA, 75 bp, synthetic construct
  source 1..75: mol_type = other DNA
tccaatgtcagacgtattgccgctgactcctcagaggatgaaattttttcattgatacatcaagcgtttagggag

SEQ ID NO: 577123 - DNA, 75 bp, synthetic construct
  source 1..75: mol_type = other DNA
tgtacatgcagtctgccgttttataaactatctgatcaatacttacgtttctcctcgttatatggatggcacccc

SEQ ID NO: 577124 - DNA, 75 bp, synthetic construct
  source 1..75: mol_type = other DNA
cggacgggctggagagccgccgggcatatgatgaaccgggcaggctggtatcggagacatcgcgcagtggggacg

SEQ ID NO: 577125 - DNA, 75 bp, synthetic construct
  source 1..75: mol_type = other DNA
gaaaaactgtcgacacgtctggctgaggagtctgtttccctgtggctggctacctgtattgacggtgtggtgaag

SEQ ID NO: 577126 - DNA, 75 bp, synthetic construct
  source 1..75: mol_type = other DNA
cggaaggatttgcccgcagcgagcaggagcaagtgggcaaatattactgtgatcgcgcaatggctaaaaagtttg

SEQ ID NO: 577127 - DNA, 75 bp, synthetic construct
  source 1..75: mol_type = other DNA
cccgctgctgaaacagcatcgacccagcagtgatgatgtgaaccttgaagaactctgggcactgcctcccgctta

SEQ ID NO: 577128 - DNA, 75 bp, synthetic construct
  source 1..75: mol_type = other DNA
attccatctgaaggtgatccgtactttcgacatggtaaccagcgcaccggaaaaattatccggacaggctgctga

SEQ ID NO: 577129 - DNA, 75 bp, synthetic construct
  source 1..75: mol_type = other DNA
aaagaacttgggttgaatgtgccggacgcagaaatcattaaagcgggaaatgtgcgcgcgttagcggtcgaacgt

SEQ ID NO: 577130 - DNA, 75 bp, synthetic construct
  source 1..75: mol_type = other DNA
gtggacatagctcagcagcagccgctgctgcctgtcccgcatgtcgtaatcgcagcggttatcgccgtagtagct

SEQ ID NO: 577131 - DNA, 75 bp, synthetic construct
  source 1..75: mol_type = other DNA
tctacttacgcctttctgtgccgtggggaacaggcacggccagttacagcggcagtatgagcaatgaccgttaca

SEQ ID NO: 577132 - DNA, 75 bp, synthetic construct
  source 1..75: mol_type = other DNA
cacattatcgctgaaccgttatttcgatgcgtttggtttaaagaacatttctgcaggggtaagtgcctcccgttc

SEQ ID NO: 577133 - DNA, 75 bp, synthetic construct
  source 1..75: mol_type = other DNA
aatggtcagttaaagcgtgacggaaaggacgagcgttccccccctgaattgctgattctggctcccgtctgggac

SEQ ID NO: 577134 - DNA, 75 bp, synthetic construct
  source 1..75: mol_type = other DNA
aagaagctccgttcctggaaaaggatgattacccctggctgacgcatgtcacgaaatccgatgtgaactcacacc

SEQ ID NO: 577135 - DNA, 75 bp, synthetic construct
  source 1..75: mol_type = other DNA
atgacagagacgtttcgctcacttctgccgccttccgctgtcaggccggagcggtcacaggagcaggccacaaca

SEQ ID NO: 577136 - DNA, 75 bp, synthetic construct
  source 1..75: mol_type = other DNA
tgcgctggggattgattacacccgcgcgaacaaaggggcattatcccgcgccatccgccgtcgcctgatgggaac

SEQ ID NO: 577137 - DNA, 75 bp, synthetic construct
  source 1..75: mol_type = other DNA
tgccagatatgatcttattagagatattcttcgatattctttaaatatacgacagggaattaaacatgatgatgt

SEQ ID NO: 577138 - DNA, 75 bp, synthetic construct
  source 1..75: mol_type = other DNA
attataaagaaaggattgactaattgtttgcttaaaaaggatgttcttaatgccagatatgatcttattagagat

SEQ ID NO: 577139 - DNA, 75 bp, synthetic construct
  source 1..75: mol_type = other DNA
ttgataagatcaatgttttgattaaagagtatttcattagaactggtaaaaattctcataccccatttgaagttt

SEQ ID NO: 577140 - DNA, 75 bp, synthetic construct
  source 1..75: mol_type = other DNA
caacaactgcatttgagtttccccggttttaacggcgacgttcacgcgctcaacaatgtgtccttgcagattaac

SEQ ID NO: 577141 - DNA, 75 bp, synthetic construct
  source 1..75: mol_type = other DNA
gaaaacgtcccggcgctaacagcgtgtggtgacaacaaccaccgctgcgcctgttggtatcctcagcaggaggtc

SEQ ID NO: 577142 - DNA, 75 bp, synthetic construct
  source 1..75: mol_type = other DNA
gttggatatatacgatgattctccggtgcttgaagacacgttgcctgctttatcttctgaaatagtaccaactcc

SEQ ID NO: 577143 - DNA, 75 bp, synthetic construct
  source 1..75: mol_type = other DNA
gaaagaaggcttggacgtaaggattacatggttctgtttgaggagcctgagctatttctctatcctagaatggtg

SEQ ID NO: 577144 - DNA, 75 bp, synthetic construct
  source 1..75: mol_type = other DNA
cccatgtctgtgaactggggatccgctataagggagattaccggatattccatgcacatgaaacagcatttgtgg

SEQ ID NO: 577145 - DNA, 75 bp, synthetic construct
  source 1..75: mol_type = other DNA
tatggggtgtatcagcgttctggttggtgtgccgggggtaggaaaaaccgttgcagcccgtgaatacagtaatcg

SEQ ID NO: 577146 - DNA, 75 bp, synthetic construct
  source 1..75: mol_type = other DNA
tctgaactgtggtacagtcaataacattccattttatcagaagatattttcccagtttaatattaaatatcatat

SEQ ID NO: 577147 - DNA, 75 bp, synthetic construct
  source 1..75: mol_type = other DNA
ttgtgcatcacattcttcagccatgatagatctttctaaacctaaatcatcaataatacgtttagttaacaattc

SEQ ID NO: 577148 - DNA, 75 bp, synthetic construct
  source 1..75: mol_type = other DNA
tcaagtactttgtgcctcacattcatcttccatgatagatctttcaaagcctaaatcttcgataatacgattagt

SEQ ID NO: 577149 - DNA, 75 bp, synthetic construct
  source 1..75: mol_type = other DNA
ttgttcagtagcaataagtgaacttgtaaaggcactctcaaaaactgccgccgaagaaatcacaaaagaaataac

SEQ ID NO: 577150 - DNA, 75 bp, synthetic construct
  source 1..75: mol_type = other DNA
atgacagcattggacaaagcaataaagattgctggtggtattcgtccgctagggcgtgcaataggggcttggccg

SEQ ID NO: 577151 - DNA, 75 bp, synthetic construct
  source 1..75: mol_type = other DNA
gctggagagtacttgtttgcctattggatttctcgttatttcagatggccttgtcgattgctagatattgatatg

SEQ ID NO: 577152 - DNA, 75 bp, synthetic construct
  source 1..75: mol_type = other DNA
caaatttaagggaaaacgctttgattgcggaagtgtagagggctttgtagaggctacaaattatttttatgagaa

SEQ ID NO: 577153 - DNA, 75 bp, synthetic construct
  source 1..75: mol_type = other DNA
cgctctgtgcaggcgcgctgctggccgcagcaccgttcgcccaggcgaaagaactgaaatcaataggcgtaacgg

SEQ ID NO: 577154 - DNA, 75 bp, synthetic construct
  source 1..75: mol_type = other DNA
tatttttgctggagtagttttttatattttatacagagccgagaaggcaggttttctttttacaattggctcggt

SEQ ID NO: 577155 - DNA, 75 bp, synthetic construct
  source 1..75: mol_type = other DNA
tttattttaattaggcagtcaatttccgttggtttttttattttggcaatatcatttttcaaaaataataaaaaa

SEQ ID NO: 577156 - DNA, 75 bp, synthetic construct
  source 1..75: mol_type = other DNA
gtctaaacgaagataataagcatgaagagccagatatttactggcggcatttagacaaacaaaccatcgtatcgt

SEQ ID NO: 577157 - DNA, 75 bp, synthetic construct
  source 1..75: mol_type = other DNA
gcttatcgagatatttcttttgccagagaaataaaacaaattgatgtggatttaccgggattgatcgctaaagaa

SEQ ID NO: 577158 - DNA, 75 bp, synthetic construct
  source 1..75: mol_type = other DNA
tgcagggcaaagcagaagttacattattccattcgcgctgctgtgctcacttgttttttctttgggcggtagcca

SEQ ID NO: 577159 - DNA, 75 bp, synthetic construct
  source 1..75: mol_type = other DNA
tttagaaaaacaactaatgagtaatgaatcaccgaagcaaacgctattaaatgatttttcacatcgccttaaaat

SEQ ID NO: 577160 - DNA, 75 bp, synthetic construct
  source 1..75: mol_type = other DNA
tgtttaaccacaccacaaaaacagctgataatatagagcataatttgcagctaagttttctcgtggattcacggc

SEQ ID NO: 577161 - DNA, 75 bp, synthetic construct
  source 1..75: mol_type = other DNA
tgttgccgttgtgatggggtgtaaatctgcgaaagatcgcacgatatccattgtccttggcaactcgatgttgca

SEQ ID NO: 577162 - DNA, 75 bp, synthetic construct
  source 1..75: mol_type = other DNA
gatctggcagcaaaacaggcacaacgtaacgagttctttattgtcggtgtggacggaagcccggacgccgaagag

SEQ ID NO: 577163 - DNA, 75 bp, synthetic construct
  source 1..75: mol_type = other DNA
cagccaggtgcgatcgctctatcagggtgcaggcacagcagatacccctgccgccctcacctgggatcagaaaca

SEQ ID NO: 577164 - DNA, 75 bp, synthetic construct
  source 1..75: mol_type = other DNA
atgcccgttcgagcacaaaggatccaacacgtcatacaagacaccatcataaatttctacagcaccagcgatgac

SEQ ID NO: 577165 - DNA, 75 bp, synthetic construct
  source 1..75: mol_type = other DNA
ggaactgtcggtgtgatgattgccagcagtgacctgattaatcccattccggaagaatcaacggaaacggcggca

SEQ ID NO: 577166 - DNA, 75 bp, synthetic construct
  source 1..75: mol_type = other DNA
ggctgaaaaaacactcacgctgtcattacaaaaaaaatcgttagctgagaaatcgttaaatacagccattatgga

SEQ ID NO: 577167 - DNA, 75 bp, synthetic construct
  source 1..75: mol_type = other DNA
ccacatttatccttttgattacctcagtaatggaagttattggtgataccaattgcgaatctattaaaaatcaat

SEQ ID NO: 577168 - DNA, 75 bp, synthetic construct
  source 1..75: mol_type = other DNA
cgatcacgtttgaacaaatcagcgaaacattgcgcacacagtatagcgatgcggaaaaaagactgcaggacagca

SEQ ID NO: 577169 - DNA, 75 bp, synthetic construct
  source 1..75: mol_type = other DNA
ccatcaacgcggaaccgtctggcacaaaaagggatttgatttcctgcttaacgacaatacctacctgaaagttcg

SEQ ID NO: 577170 - DNA, 75 bp, synthetic construct
  source 1..75: mol_type = other DNA
cgcatgaaattcgataagttcctgaccgaaaagctctacatcgaagtgcgcgagggggatcgtgatgaccgctga

SEQ ID NO: 577171 - DNA, 75 bp, synthetic construct
  source 1..75: mol_type = other DNA
tgggaaaaaacgtggcctatcaggtaacgaaaaatttcttgaacgattttttgataaaaataaaattcttaaact

SEQ ID NO: 577172 - DNA, 75 bp, synthetic construct
  source 1..75: mol_type = other DNA
aaagaagtgcccggcattacccgcgcatggacataccgtcactggatgggaacggggactgtcggtgtgatgatt

SEQ ID NO: 577173 - DNA, 75 bp, synthetic construct
  source 1..75: mol_type = other DNA
tgtcaacgccaagattattggccgtttttcgccatttttaatgtccgctattggtcattaatgttgtccgctttc

SEQ ID NO: 577174 - DNA, 75 bp, synthetic construct
  source 1..75: mol_type = other DNA
cggaggacggttgtggcgcacgtcttcggtgaacgcactctggccacactggaacgtcttctgagcctgctgtcg

SEQ ID NO: 577175 - DNA, 75 bp, synthetic construct
  source 1..75: mol_type = other DNA
gacctcccctgcgcaacggacgatgccaccggcagccggaaaaccatgacgtggagccgttacggtcagttgctg

SEQ ID NO: 577176 - DNA, 75 bp, synthetic construct
  source 1..75: mol_type = other DNA
tttatcagtatccgttgaatccggtcataaatatagatccgcaaggtttggttgatataaatttataccccgaaa

SEQ ID NO: 577177 - DNA, 75 bp, synthetic construct
  source 1..75: mol_type = other DNA
ctggtgctgggaacgtaccgcgcacttccgtcagaaaaagggatgaaaggcggggagatagcccataagcgctaa

SEQ ID NO: 577178 - DNA, 75 bp, synthetic construct
  source 1..75: mol_type = other DNA
gaatcgaacgagtacaccaatacccgtgttgatacattgaaaaacaccgtagacgggaacacggcaagtatcggt

SEQ ID NO: 577179 - DNA, 75 bp, synthetic construct
  source 1..75: mol_type = other DNA
ttcactacctcaaccaatatgcaccaggcgaagctgtgtcacatgcattatccgagctactattcattgatcatg

SEQ ID NO: 577180 - DNA, 75 bp, synthetic construct
  source 1..75: mol_type = other DNA
gatgaagataagtttatccgaaaaaatgccagaacgatgaccagcaggcgaatgggggaatgtctcgggcgacat

SEQ ID NO: 577181 - DNA, 75 bp, synthetic construct
  source 1..75: mol_type = other DNA
gtcaacggttcggcagagacgtgtccgtggatggtggggatgacggcgaacagtactgatactgtatattataat

SEQ ID NO: 577182 - DNA, 75 bp, synthetic construct
  source 1..75: mol_type = other DNA
gtctggaaagacaacaggactcgcagcctgttaatcaacattctgaacatgaacccgaatctgcatcaagggtga

SEQ ID NO: 577183 - DNA, 75 bp, synthetic construct
  source 1..75: mol_type = other DNA
gggtgaaccattaacaaactatgatatctcctggagtgacagccgggttgaacacagtcaacttttgaatctgca

SEQ ID NO: 577184 - DNA, 75 bp, synthetic construct
  source 1..75: mol_type = other DNA
attctgcggtcaccaacctgaacaacaccaccaccaacctgtctgaagcgcagtcccgtattcaggacgccgact

SEQ ID NO: 577185 - DNA, 75 bp, synthetic construct
  source 1..75: mol_type = other DNA
caaagccgcagaggaaggcgcacctggatgtggaggaggaagagcattacgacaacaccgcagcggaaatcgtca

SEQ ID NO: 577186 - DNA, 75 bp, synthetic construct
  source 1..75: mol_type = other DNA
caaacagggggctttattacttgagcaggatggaataataaaaccctggatgggcggtgaaatatccctgcgtag

SEQ ID NO: 577187 - DNA, 75 bp, synthetic construct
  source 1..75: mol_type = other DNA
aacggtactggcggtactggtcgtatggtgattagtaataacatcattcagatctatgattctaacggaacatta

SEQ ID NO: 577188 - DNA, 75 bp, synthetic construct
  source 1..75: mol_type = other DNA
tgcatcaggaactttacctaattataagtttaataaaagaccgtattttattttagagaaaacagcgcatgcaac

SEQ ID NO: 577189 - DNA, 75 bp, synthetic construct
  source 1..75: mol_type = other DNA
ggggcgcacacattaacatttaatgcggttactccatgccatttagctgtactcccacttcttgcatcaggaaca

SEQ ID NO: 577190 - DNA, 75 bp, synthetic construct
  source 1..75: mol_type = other DNA
gtcatttatcatatgacccagaaaccggggtttttacccgaaaaatatcaaatacagcgagcgtcaccgttggtg

SEQ ID NO: 577191 - DNA, 75 bp, synthetic construct
  source 1..75: mol_type = other DNA
ccagaacgtgatgctctatcaccagagccctaactggatggcgctgcttccggtcacagtggtgtcggtcattct

SEQ ID NO: 577192 - DNA, 75 bp, synthetic construct
  source 1..75: mol_type = other DNA
ggccaaatcccgcaccgggtatgtcggcaccaatggccttgtgcgcacgcttatctggccttttatttttaaaaa

SEQ ID NO: 577193 - DNA, 75 bp, synthetic construct
  source 1..75: mol_type = other DNA
tgatgaataaagctatcgaaaaaggcgtggcggcggaaaacgtcatcttcttccccaactggtcggaaatcgccc

SEQ ID NO: 577194 - DNA, 75 bp, synthetic construct
  source 1..75: mol_type = other DNA
aagcaacctggtggatctggccttcagggagtatggcgaaaacaaccccagactgtaccgtgcaggaacagagcc

SEQ ID NO: 577195 - DNA, 75 bp, synthetic construct
  source 1..75: mol_type = other DNA
acagaacaagcacacggaactgacgcccggcgcacccggtctgggcaaatcggtactcatcaacgcactgtcgga

SEQ ID NO: 577196 - DNA, 75 bp, synthetic construct
  source 1..75: mol_type = other DNA
ggtttgcctgatgaccaaaaaatcattctttattcaggcaatatcggcgaaaagcaggggctggagaacgttatc

SEQ ID NO: 577197 - DNA, 75 bp, synthetic construct
  source 1..75: mol_type = other DNA
ttactacccgcaatggcaggtgggcgagaactattccgcctggcgctacaaacgagaagagggggccgccacggt

SEQ ID NO: 577198 - DNA, 75 bp, synthetic construct
  source 1..75: mol_type = other DNA
gccggaaaaggcaaaggcggcaaagtggcacagctggcaacggcgttcgaacgtagcggactgcataacgtcgat

SEQ ID NO: 577199 - DNA, 75 bp, synthetic construct
  source 1..75: mol_type = other DNA
gttgatggctcggcagagacatgtccgtggttggtgggttttacggctaacagttctgtaaatttagttctttca

SEQ ID NO: 577200 - DNA, 75 bp, synthetic construct
  source 1..75: mol_type = other DNA
acaggtaaaggtctggtaatgacgatgggtaaaggcggtgtcggcaaaacggctgttgcagcatcggtggcggta

SEQ ID NO: 577201 - DNA, 75 bp, synthetic construct
  source 1..75: mol_type = other DNA
ctcgcgaaatatgcaggcctatttacactcaatgtttatcatcgacgggaagatcctgaaaatgatggtcagttc

SEQ ID NO: 577202 - DNA, 75 bp, synthetic construct
  source 1..75: mol_type = other DNA
gaaaatgatatgcgggagttagctcgtatttttttaagctatacaaattatgtactggaaaataataatctcaag

SEQ ID NO: 577203 - DNA, 75 bp, synthetic construct
  source 1..75: mol_type = other DNA
ggaggaagatctccgctcaccatgtactgaagagatcgcggtattccaggcattctcgcggatcatcaaagaggc

SEQ ID NO: 577204 - DNA, 75 bp, synthetic construct
  source 1..75: mol_type = other DNA
ttctcttacgcacgatgagctgtctgctatcggtttgcggcatcagcaccttgccattaatggtgtgctgccgcc

SEQ ID NO: 577205 - DNA, 75 bp, synthetic construct
  source 1..75: mol_type = other DNA
agatctccgctcgccatgtactgaagagatcgccgtcttccaggcattctcgcgaatcatcaaagaggccgacga

SEQ ID NO: 577206 - DNA, 75 bp, synthetic construct
  source 1..75: mol_type = other DNA
tcctaagttaaatcgcttggatgattatctctctcaaaactataaaatagctatgagtcccgatatgcctgaagg

SEQ ID NO: 577207 - DNA, 75 bp, synthetic construct
  source 1..75: mol_type = other DNA
ccttaaaacttactttaaagggaacattgcatcgcttcataaattcatcaggcaagtgtattttgttatattacc

SEQ ID NO: 577208 - DNA, 75 bp, synthetic construct
  source 1..75: mol_type = other DNA
aacttgacgaagaatatgaagatgaagatgaagatgaagatgaagatgaagatgaagatgaagattcgaatataa

SEQ ID NO: 577209 - DNA, 75 bp, synthetic construct
  source 1..75: mol_type = other DNA
gaaaatgacatgcgagagcttgctcgcatattattgagctatacaaactatgtactggataataataacgttagg

SEQ ID NO: 577210 - DNA, 75 bp, synthetic construct
  source 1..75: mol_type = other DNA
ctatggggcctgatatgcctgaagaagaaaaatctaaaattagaaaatcgcaaatagattggcttaataagagaa

SEQ ID NO: 577211 - DNA, 75 bp, synthetic construct
  source 1..75: mol_type = other DNA
caaatagattggcttaataagagaaacaattgtactgatgctcaatgcattgaaagaatgtattctaagcagatg

SEQ ID NO: 577212 - DNA, 75 bp, synthetic construct
  source 1..75: mol_type = other DNA
tggtcggtctggaagccctgcgagagttattaacagagagcaaagcgccactgtcgctctccaatacaacgctaa

SEQ ID NO: 577213 - DNA, 75 bp, synthetic construct
  source 1..75: mol_type = other DNA
gatggtgtgttatttcttgatgaagtagatgcggttgctaagcttcgtgatgacaatcaggaagttggagagtta

SEQ ID NO: 577214 - DNA, 75 bp, synthetic construct
  source 1..75: mol_type = other DNA
agagttctgaaaataaacaagaggagaatttagcgttattgttaactaattacatttcatatcagaatatagtta

SEQ ID NO: 577215 - DNA, 75 bp, synthetic construct
  source 1..75: mol_type = other DNA
ggccgtgcggatctggctggaggataatggcgagcctgttgtactccaacatcctgcccggcagttcactctgac

SEQ ID NO: 577216 - DNA, 75 bp, synthetic construct
  source 1..75: mol_type = other DNA
cgccgggttaattccttatacatcacttaaagatggctctgtcgatttgtacgacattgctctcttgaatgacca

SEQ ID NO: 577217 - DNA, 75 bp, synthetic construct
  source 1..75: mol_type = other DNA
cagaatggtgacattgactacctagcgcttgaatccgtcttgatcgttccaaaacggcttataaactgcccattg

SEQ ID NO: 577218 - DNA, 75 bp, synthetic construct
  source 1..75: mol_type = other DNA
tgctattgtcattgctgcaactaatcattcgaagctattggatccagcaatttggagacgtttcccatataaaat

SEQ ID NO: 577219 - DNA, 75 bp, synthetic construct
  source 1..75: mol_type = other DNA
atgccattgatttctctcgctgaagggctggcacatgcccgcgaacatcactattcgttaggtgcgtttaatgtg

SEQ ID NO: 577220 - DNA, 75 bp, synthetic construct
  source 1..75: mol_type = other DNA
ctctcatacgcacgacgagctgtatgcaatcggtttgcagcatcaacaccttgccatcaatggcgtgctgccgcc

SEQ ID NO: 577221 - DNA, 75 bp, synthetic construct
  source 1..75: mol_type = other DNA
gaaaatcaggggaaagggctggatgcggaagggctggcggtactggaggaagatctccgttcgccctgtactgaa

SEQ ID NO: 577222 - DNA, 75 bp, synthetic construct
  source 1..75: mol_type = other DNA
agacccgcctgggcgtgaaagcatacatcaacggtcacagtaagctggatgagggcagagaccgtaccttccagc

SEQ ID NO: 577223 - DNA, 75 bp, synthetic construct
  source 1..75: mol_type = other DNA
aagggggccatacccgttcacgcgacagcagcggtcagctcagtacccaggccaaccgttacgttgcccagctcg

SEQ ID NO: 577224 - DNA, 75 bp, synthetic construct
  source 1..75: mol_type = other DNA
gaaaaatctgccggcactggtgacaatggtgtatctggaggacggggatatccgggagagctttttccggcgact

SEQ ID NO: 577225 - DNA, 75 bp, synthetic construct
  source 1..75: mol_type = other DNA
aaaaaattctggtcgctgaccgcgaaaggctgcatgttcggcaagaacatcaccagtcctgcaaatccgcgcgag

SEQ ID NO: 577226 - DNA, 75 bp, synthetic construct
  source 1..75: mol_type = other DNA
cgtctgcttcaaaagatgaggcgactaaacaggcgtcagcagcgaagggaagtgccacgacggcatccacgaaag

SEQ ID NO: 577227 - DNA, 75 bp, synthetic construct
  source 1..75: mol_type = other DNA
ggcgcaagaatctgtaggcctgataagcgtagcgcatcaggcatttgtcaccattgccggatgcggcgtgaacgc

SEQ ID NO: 577228 - DNA, 75 bp, synthetic construct
  source 1..75: mol_type = other DNA
cgtgaatgacgagggcgtggtggatgcctccaaacagggctatcaacacttctttgctctgctgggtgccgccag

SEQ ID NO: 577229 - DNA, 75 bp, synthetic construct
  source 1..75: mol_type = other DNA
cctggtggcaggagctggatgcggacaataaagtcaccacgaaagtctgggacggcaaacaggatatttatcacc

SEQ ID NO: 577230 - DNA, 75 bp, synthetic construct
  source 1..75: mol_type = other DNA
ttcagtgcttggggcctgtcagaaactccaggaggctgttggcttaccgaatctggcaccgcgctatgccattga

SEQ ID NO: 577231 - DNA, 75 bp, synthetic construct
  source 1..75: mol_type = other DNA
cagctggacttcgtaaaagaaggcctgaacgaagggtttaaattcaccaacccgaacgtcaaagatgagtgtggt

SEQ ID NO: 577232 - DNA, 75 bp, synthetic construct
  source 1..75: mol_type = other DNA
atccagacccgcgattctgtgaaccagaaccagcaagaaacggaacagaacgaccagaaagcggaacaaaacagc

SEQ ID NO: 577233 - DNA, 75 bp, synthetic construct
  source 1..75: mol_type = other DNA
cagaagtttgttgctaaactcagcgcagcactgattaataaaaattataaaattgtttctggttttggcttaggt

SEQ ID NO: 577234 - DNA, 75 bp, synthetic construct
  source 1..75: mol_type = other DNA
taaagagcaggcgatccagttcctgtgcggcaacctcggcgttaacgggcgcactgaacatccgtttgagctgga

SEQ ID NO: 577235 - DNA, 75 bp, synthetic construct
  source 1..75: mol_type = other DNA
gctggaacactatcagtagttatttacaacgtgatatcaaggcgttgaagtctcagttgcttctgggagaaagcg

SEQ ID NO: 577236 - DNA, 75 bp, synthetic construct
  source 1..75: mol_type = other DNA
tatcgcggttttgtcactggtaacggcttcaaacggctgggcgacacgctgcgatatttgcaggcgattgaaaaa

SEQ ID NO: 577237 - DNA, 75 bp, synthetic construct
  source 1..75: mol_type = other DNA
accctgctcaccgcttccgcgcgttcggtggtacgccgggacactggattgagtggggccgcttgatgctgcata

SEQ ID NO: 577238 - DNA, 75 bp, synthetic construct
  source 1..75: mol_type = other DNA
gcgtcgtccgggaaaacagtttcagcacaactgcctgacggcgcatctgacggtaataaggcaatcagtgaaaca

SEQ ID NO: 577239 - DNA, 75 bp, synthetic construct
  source 1..75: mol_type = other DNA
acgctgtcgctgagtgcactgctgaaacagtatggtatccgcctgacggctaatcaggcatatcaccagatggtg

SEQ ID NO: 577240 - DNA, 75 bp, synthetic construct
  source 1..75: mol_type = other DNA
cggatacccttcagcagtccggcggcgaagacggtggcagtgtggtgttcccgccggtgctggtgcagatgctcg

SEQ ID NO: 577241 - DNA, 75 bp, synthetic construct
  source 1..75: mol_type = other DNA
ggcagacgaacagagaaacgctgcgaccggaagaaaatccgcttcacgtatctgtgggacggcgacagtattgcg

SEQ ID NO: 577242 - DNA, 75 bp, synthetic construct
  source 1..75: mol_type = other DNA
aaaagtaagagaagcattagatgttcattatgaggatcttgtacgaagaaagcttggtggtatatctcaagaaat

SEQ ID NO: 577243 - DNA, 75 bp, synthetic construct
  source 1..75: mol_type = other DNA
cgatgagtcctatggctatgacagttgtggctacctgaaggcgcagtctgcgggcaggcaccggataagtgaaga

SEQ ID NO: 577244 - DNA, 75 bp, synthetic construct
  source 1..75: mol_type = other DNA
cttgttatcggcaggttggtaatgctgtccctgttttatttgctgagttattagctaagagtttaaaaaatacac

SEQ ID NO: 577245 - DNA, 75 bp, synthetic construct
  source 1..75: mol_type = other DNA
atgactaatccaatcaatatgaataatttttctcaaagtttaaatatagcaaccgcaacgggtgatgaagtcgtt

SEQ ID NO: 577246 - DNA, 75 bp, synthetic construct
  source 1..75: mol_type = other DNA
accagccagtatacgtgctaaatgcgcaactggaggaatgtccggtcggggtggaaggagagatttgcattggcg

SEQ ID NO: 577247 - DNA, 75 bp, synthetic construct
  source 1..75: mol_type = other DNA
tatctttacgacccgctgggccgcagggtggcaaaacgggtatggcgacgtgaacgggacctgacgggctggatg

SEQ ID NO: 577248 - DNA, 75 bp, synthetic construct
  source 1..75: mol_type = other DNA
agctacagcaccaccggcaggctgaccagcgttcacaccaccgcagcgaatctggatatccgcatcccgtatgcc

SEQ ID NO: 577249 - DNA, 75 bp, synthetic construct
  source 1..75: mol_type = other DNA
ggcagtgtggtgttcccgccggtgctggcgcagatgctcgaccggctggaaagtgaaatcctggctgaccgggtg

SEQ ID NO: 577250 - DNA, 75 bp, synthetic construct
  source 1..75: mol_type = other DNA
cctgtttatcctgcttgccggttatcgcggtgtttatgtgaagacagctgcaccttctgagcgtattgtcagggc

SEQ ID NO: 577251 - DNA, 75 bp, synthetic construct
  source 1..75: mol_type = other DNA
gttgtttcactcagaaaagacgccggacactgggtgatccgctgcgcttctgaaggaaaagacacggaagacatt

SEQ ID NO: 577252 - DNA, 75 bp, synthetic construct
  source 1..75: mol_type = other DNA
cagtttgaacagcaccaaatccagaaacgttaccatgcgattgtgcgcggctggttgatggaagaagcagttctg

SEQ ID NO: 577253 - DNA, 75 bp, synthetic construct
  source 1..75: mol_type = other DNA
tcagcacaaacagcagcgcctgccacaactaacggtatatacaatacgctgacaaccaatgaactttccggtagc

SEQ ID NO: 577254 - DNA, 75 bp, synthetic construct
  source 1..75: mol_type = other DNA
aagcctgcaatttctggacggtacgcagctggacttcgtaaaagaaggcctgaatgaagggtttaaattcaccaa

SEQ ID NO: 577255 - DNA, 75 bp, synthetic construct
  source 1..75: mol_type = other DNA
gttattacgtggatggggttatcaaattcaaccgtttcagcaataagcttcgcacctggatgagcgacggtgtgg

SEQ ID NO: 577256 - DNA, 75 bp, synthetic construct
  source 1..75: mol_type = other DNA
tctcccttgatgctctgatgaaaggaacgaaaaaatgggatgaactgacaaatgatgatttttactatgacatca

SEQ ID NO: 577257 - DNA, 75 bp, synthetic construct
  source 1..75: mol_type = other DNA
cgcatcagcagcccgcgccagacccggagttacagctacagcaccaccggcaggctgaccggcgttcacaccacc

SEQ ID NO: 577258 - DNA, 75 bp, synthetic construct
  source 1..75: mol_type = other DNA
taccctcacggcgtggccggataaccgcatcgcggaagatgcgcactatgtctaccgctacgatgaatacggcag

SEQ ID NO: 577259 - DNA, 75 bp, synthetic construct
  source 1..75: mol_type = other DNA
aactagatttcgtgaaatcacgaaaaatcttaataatacacaaattgaagatgcattagcatttctaagacataa

SEQ ID NO: 577260 - DNA, 75 bp, synthetic construct
  source 1..75: mol_type = other DNA
agtcacccctcaggccgtaaacggctggttcaaaaaaggcgtgattagtaagaaatcggcactggccatagccga

SEQ ID NO: 577261 - DNA, 75 bp, synthetic construct
  source 1..75: mol_type = other DNA
aacgctgagacttggttgtttccccagcgtctgcgcctgtatcttaccggctgtgattcgctactttgaaattca

SEQ ID NO: 577262 - DNA, 75 bp, synthetic construct
  source 1..75: mol_type = other DNA
aattcaacaactgggtggtcaggcatttgcctgccgttgtgatattacttccgaacaggaactctctgcactggc

SEQ ID NO: 577263 - DNA, 75 bp, synthetic construct
  source 1..75: mol_type = other DNA
catggagtcaggaaaaactcagtcgtgcctgccgtgagcttgaactgaagcatggttttgctccggataacggtt

SEQ ID NO: 577264 - DNA, 75 bp, synthetic construct
  source 1..75: mol_type = other DNA
tatttatactcgtgccatgcaaccacaacttgctgtggtgatggcggcatttttaactttttggcgtgttattgg

SEQ ID NO: 577265 - DNA, 75 bp, synthetic construct
  source 1..75: mol_type = other DNA
gggcggacttagcgttgcctatgccattgtcggtaatgactccaacttattgatagtgttttatgttcagataat

SEQ ID NO: 577266 - DNA, 75 bp, synthetic construct
  source 1..75: mol_type = other DNA
tgtcgatgacctaattgacttgattgttcgaagcgacaaagcgtacgaagaaccagccaaatttgctgatgaaat

SEQ ID NO: 577267 - DNA, 75 bp, synthetic construct
  source 1..75: mol_type = other DNA
tgccggaacaggtgagccccgggaggatgatatcctgggatttcttgctgatgttgaacacttacaggatcaatg

SEQ ID NO: 577268 - DNA, 75 bp, synthetic construct
  source 1..75: mol_type = other DNA
acggggggtcagggttaaagtgtattacggttattgtcataagcgcctggagcgtgtggatgataatgatgagat

SEQ ID NO: 577269 - DNA, 75 bp, synthetic construct
  source 1..75: mol_type = other DNA
acgcgttatcggcgggcgttatcattacacggcggtagggcagttggctcagcatgaagacacttctacggtgca

SEQ ID NO: 577270 - DNA, 75 bp, synthetic construct
  source 1..75: mol_type = other DNA
aatcagaacaaagacaaaacccaggactcttacttaccaaagaattaacgatttcggtggcgtaacattggagaa

SEQ ID NO: 577271 - DNA, 75 bp, synthetic construct
  source 1..75: mol_type = other DNA
ggtgttaaaaataactcaaaagagtcagtttatttaattagaagttggattactgattatcacactaataaagtg

SEQ ID NO: 577272 - DNA, 75 bp, synthetic construct
  source 1..75: mol_type = other DNA
tcacattgcagaagttcagcgaatgcaggcattgatcaggctgaaagaagacatcagggatgagcgacagaaact

SEQ ID NO: 577273 - DNA, 75 bp, synthetic construct
  source 1..75: mol_type = other DNA
attgttttatcaatttatttgatgacaatttacaccatgtgttcaaggtattgattatggaattacagacaaggc

SEQ ID NO: 577274 - DNA, 75 bp, synthetic construct
  source 1..75: mol_type = other DNA
ccgatcgggtgattatcatgcgcgatcgcaaacaggtggcggagatcccgctggcagagctttccgttccggcga

SEQ ID NO: 577275 - DNA, 75 bp, synthetic construct
  source 1..75: mol_type = other DNA
ttttttcctgcgtgtcttttggcgtttttgcacaacagggaggttttctggggtctgaagcagagcgttcaacaa

SEQ ID NO: 577276 - DNA, 75 bp, synthetic construct
  source 1..75: mol_type = other DNA
cgggtgatatcaccctgggccagtgccggatacctgcagcgaaactgcaggatactgagaaactacaggagatta

SEQ ID NO: 577277 - DNA, 75 bp, synthetic construct
  source 1..75: mol_type = other DNA
tcactggggaaatcagtgcgctaccgccgcggtagaactgctgccaggctgcgccattgatgttgtgaaaacgga

SEQ ID NO: 577278 - DNA, 75 bp, synthetic construct
  source 1..75: mol_type = other DNA
acgctgatccgccctggtcttacggcaacaccatcagcaacggcaccgctgccgaccactactccaccatgaagc

SEQ ID NO: 577279 - DNA, 75 bp, synthetic construct
  source 1..75: mol_type = other DNA
atgatcgtaaccatagcaacagaaatgctggtggtgaaaccgctgaagcatggactgttggtgcaaaatatgatg

SEQ ID NO: 577280 - DNA, 75 bp, synthetic construct
  source 1..75: mol_type = other DNA
aatccactctggaaaaattcgccccatcaactgcgcaaaaaaacatcaacattgatatattaagtcaattgtttt

SEQ ID NO: 577281 - DNA, 75 bp, synthetic construct
  source 1..75: mol_type = other DNA
aggggctgcctgacggtccttttacccgcaaacatgccgaagctgttgccgcacagtaccggaacgtctttatcg

SEQ ID NO: 577282 - DNA, 75 bp, synthetic construct
  source 1..75: mol_type = other DNA
atgtcggactgccaccctgttttattgcccgaaggccctttctcacgcgaacaggcggttgtcatcacaacagct

SEQ ID NO: 577283 - DNA, 75 bp, synthetic construct
  source 1..75: mol_type = other DNA
attgctgggcgcagctaatgtcgatgtgcagactatggagttaagtaacctagtagttatagctgaatttcgtga

SEQ ID NO: 577284 - DNA, 75 bp, synthetic construct
  source 1..75: mol_type = other DNA
gcggataagttgaaaacgccaacctcaacgtggatgagaatctctcacaatgcagaaacaggtggaacaaatctg

SEQ ID NO: 577285 - DNA, 75 bp, synthetic construct
  source 1..75: mol_type = other DNA
agagcgtgaaaattgtgttgcagtatttccaatacgcgactcaggacttgaaatgaactggggattaacctcttc

SEQ ID NO: 577286 - DNA, 75 bp, synthetic construct
  source 1..75: mol_type = other DNA
attttcgtaaactcattgagcgctctgtcgaggaggatttatttaacggggtagttatacgtcatagaagaggaa

SEQ ID NO: 577287 - DNA, 75 bp, synthetic construct
  source 1..75: mol_type = other DNA
ttagtcgagtcgacgaatacatttattatgttttctttggtgacgctaaggtcgttccttggcgcactgacatgc

SEQ ID NO: 577288 - DNA, 75 bp, synthetic construct
  source 1..75: mol_type = other DNA
ttccaggctgtcactaggcgtctgccaaaaggtgttgagtcagtacgtttgtacgaatcatacctgactaatttc

SEQ ID NO: 577289 - DNA, 75 bp, synthetic construct
  source 1..75: mol_type = other DNA
cgttgccgaggggtccggacgtgcacaaacatttcgcaccattctgaccgtatccagcactgccaccgtggcgct

SEQ ID NO: 577290 - DNA, 75 bp, synthetic construct
  source 1..75: mol_type = other DNA
ctctggggaaaatttccagtactgagcaatttctggaagaagtgtatcgccgtgaaagccttggccgaccgcctt

SEQ ID NO: 577291 - DNA, 75 bp, synthetic construct
  source 1..75: mol_type = other DNA
atggaaacaattaacatgtttcttgaaagcacgggcgtacaaccttttcttgaggctgaagggcttacggaaatt

SEQ ID NO: 577292 - DNA, 75 bp, synthetic construct
  source 1..75: mol_type = other DNA
gtgctgacgaaggacggaagcatatttctcaatggtacgcacattcatctggaaggggagtcggatgtgaacggt

SEQ ID NO: 577293 - DNA, 75 bp, synthetic construct
  source 1..75: mol_type = other DNA
atagcagagggggcatgcatgtctgaaaaaataaaaaatcgcaacgcattgatttttatgttgtttacatttcgc

SEQ ID NO: 577294 - DNA, 75 bp, synthetic construct
  source 1..75: mol_type = other DNA
tcgactgaaattccagtacgaccctgcacaacctcaattaggtccattgagtccctttgttatcgatttggatcc

SEQ ID NO: 577295 - DNA, 75 bp, synthetic construct
  source 1..75: mol_type = other DNA
atgcttaatacagaatttccatttttgcatgtagatttaccatcaccgaacacagacttgtctattatgtcgcgt

SEQ ID NO: 577296 - DNA, 75 bp, synthetic construct
  source 1..75: mol_type = other DNA
ttgatcctgagtataataaaaagccgatacgggaagatgctccagagtggcttcgctctttattttttgtaactg

SEQ ID NO: 577297 - DNA, 75 bp, synthetic construct
  source 1..75: mol_type = other DNA
gctatgtctggagcaacaacagggaaattagggtttaataaaacaaaaagcacgttccttctaaatcaacgagtc

SEQ ID NO: 577298 - DNA, 75 bp, synthetic construct
  source 1..75: mol_type = other DNA
gatattaaagacggaaaattatcatatgaacatgctcgccagatagataaatctcaattcgaagaagttcatcaa

SEQ ID NO: 577299 - DNA, 75 bp, synthetic construct
  source 1..75: mol_type = other DNA
ctgtggcaatgctgcatggctgtcattcgcaacctgcttacccattccggcgtcagcggagaacaaattgtcggt

SEQ ID NO: 577300 - DNA, 75 bp, synthetic construct
  source 1..75: mol_type = other DNA
taacctgccccgcattctggaagactacctgatggaaacaaccggaaacgtgccggagaaattacggcaacagaa

SEQ ID NO: 577301 - DNA, 75 bp, synthetic construct
  source 1..75: mol_type = other DNA
gcttcgtgggctggcgagccagatttcttcgatcatggatagtttaccgctcacaatgcaaaggcagttccccgc

SEQ ID NO: 577302 - DNA, 75 bp, synthetic construct
  source 1..75: mol_type = other DNA
ctaaagcgaaggccaaagacccacagttgggcgctgacctggatcgagaaatcaagatcctatcatcacgacttc

SEQ ID NO: 577303 - DNA, 75 bp, synthetic construct
  source 1..75: mol_type = other DNA
ttatgataatttaagatatgtaacagaaaaccataaaagacaaatcactcaaaacttgcatcacaataatggcct

SEQ ID NO: 577304 - DNA, 75 bp, synthetic construct
  source 1..75: mol_type = other DNA
ggcaaaatgaagcgtgactttacctatatcgatgatatcgcagaagcaatcattctgaaccgccccggaaatcct

SEQ ID NO: 577305 - DNA, 75 bp, synthetic construct
  source 1..75: mol_type = other DNA
aaggcagcacgttcgcccgtcatgctggataatttcgggagcttgagagaggcagcacaccgtacacaggcggat

SEQ ID NO: 577306 - DNA, 75 bp, synthetic construct
  source 1..75: mol_type = other DNA
tgattatggaggaacatatagcatacaaggtcaattttcgacatcttcaggagtttacagtggttttagtatcga

SEQ ID NO: 577307 - DNA, 75 bp, synthetic construct
  source 1..75: mol_type = other DNA
agggggacatcaggaatgggcgcaaaaaatattaaaatcgcttaatattaataatgtttctattttacctgttct

SEQ ID NO: 577308 - DNA, 75 bp, synthetic construct
  source 1..75: mol_type = other DNA
atggatttgcaccagatgttgttgatacatgatattttacattgcaaggtgatatctaaaatgaaagatgttgat

SEQ ID NO: 577309 - DNA, 75 bp, synthetic construct
  source 1..75: mol_type = other DNA
aaatatataataaattctctaatgatgtcgagttggaaaaatataacaacgtattaggcacttataatacagatg

SEQ ID NO: 577310 - DNA, 75 bp, synthetic construct
  source 1..75: mol_type = other DNA
tactattttatacattcctgtgatgagcatgttatggtttttgcggatcataaatcagcacattctggtactaaa

SEQ ID NO: 577311 - DNA, 75 bp, synthetic construct
  source 1..75: mol_type = other DNA
atgcattatttcgatagacattataaaaaccaggataaacactttattaagatacatggtcaactagctgaaatt

SEQ ID NO: 577312 - DNA, 75 bp, synthetic construct
  source 1..75: mol_type = other DNA
tcgctcaaccaccaccgcgatcaatgcggtcataatcgcgttcggtgccttctacttattgtttgtttctgactc

SEQ ID NO: 577313 - DNA, 75 bp, synthetic construct
  source 1..75: mol_type = other DNA
tatttaataccagatgggaatggtcattggaagaagacagatccacgaattgacaagcaaaaagttactgatctt

SEQ ID NO: 577314 - DNA, 75 bp, synthetic construct
  source 1..75: mol_type = other DNA
gactatttcaaaacttaaataacatactcaacaatttttacgacttgaaatattatacatatttagtaattaacc

SEQ ID NO: 577315 - DNA, 75 bp, synthetic construct
  source 1..75: mol_type = other DNA
aataaaaactgggatatccctcccagcaaatcaccattaatctttaatgttaaagattatcaggaaaatggtctg

SEQ ID NO: 577316 - DNA, 75 bp, synthetic construct
  source 1..75: mol_type = other DNA
ctaggaagatgattgattggatagcaaattctcaaggagtttctatcgaaactcttgctgaccaagtcatgccca

SEQ ID NO: 577317 - DNA, 75 bp, synthetic construct
  source 1..75: mol_type = other DNA
acattcttaattccacgggggaagcaacagataaaagttatttatcgttaaatccagataagtatcctaattatc

SEQ ID NO: 577318 - DNA, 75 bp, synthetic construct
  source 1..75: mol_type = other DNA
gtgaccgattaaaatcggttgcgctgctgattgcttatctggataaagccaatttctatgttatggaagattccg

SEQ ID NO: 577319 - DNA, 75 bp, synthetic construct
  source 1..75: mol_type = other DNA
ccgggccggatggtggcgcaccgttacgcgggaaggccggagatgcgctaccgctacgacgatacggggcgggtg

SEQ ID NO: 577320 - DNA, 75 bp, synthetic construct
  source 1..75: mol_type = other DNA
gtggctcatctttggcttggagtcgatggagtctctgggtgggacacagaaaaaaacatagaatctttttgtaat

SEQ ID NO: 577321 - DNA, 75 bp, synthetic construct
  source 1..75: mol_type = other DNA
aaactggcaaaaattggaggaatccctttcggttttttatttcttgaaacgccaccaactccagccaaacccaag

SEQ ID NO: 577322 - DNA, 75 bp, synthetic construct
  source 1..75: mol_type = other DNA
aaaagccggtactcgtaaagttgaactgacagaagaggcaatgttggcgctgataaatcagaagccatttacatt

SEQ ID NO: 577323 - DNA, 75 bp, synthetic construct
  source 1..75: mol_type = other DNA
aaacaacatggacttcaattgttccacgggcagtattgcgaattggagggcagggcactaatggggagtatcatc

SEQ ID NO: 577324 - DNA, 75 bp, synthetic construct
  source 1..75: mol_type = other DNA
aaagtccagccagacggcagcgaaaaccagcgaaacgaatgccaaagccagtgaaactgcggcgaaaaatagcca

SEQ ID NO: 577325 - DNA, 75 bp, synthetic construct
  source 1..75: mol_type = other DNA
taccagaaatggcacttcccgaaagctataactatatccacaagtcgggaactttgaatcgccacgggtttaaca

SEQ ID NO: 577326 - DNA, 75 bp, synthetic construct
  source 1..75: mol_type = other DNA
gccataaggggccagagatgctattccggcactatggtcgatatcttaaagactatgatggtaatacatctttac

SEQ ID NO: 577327 - DNA, 75 bp, synthetic construct
  source 1..75: mol_type = other DNA
gatccaaagacaaacaaaccgtgggccagcgccgatgcgataaggaaaaaagcgtggataccaaccttacgtaaa

SEQ ID NO: 577328 - DNA, 75 bp, synthetic construct
  source 1..75: mol_type = other DNA
cgctttacgatgagcgtatccacctgcctatcagcgaggcaatggtgctgaacatcatggatcagggcgttcttg

SEQ ID NO: 577329 - DNA, 75 bp, synthetic construct
  source 1..75: mol_type = other DNA
atggaaaaaatgtctacaaaataattcaagagcatagtattaattatgatttcttagagaaagagcatcatcgaa

SEQ ID NO: 577330 - DNA, 75 bp, synthetic construct
  source 1..75: mol_type = other DNA
gaggttatccataaaaacaagataaaaacatattctctggatgatgaattgagtaatatctttggtcaagataat

SEQ ID NO: 577331 - DNA, 75 bp, synthetic construct
  source 1..75: mol_type = other DNA
tcatgtctaacttggaacaatatttcgacgtaaaccagactcgaaccgtactggaagaaattctgaagctgtcag

SEQ ID NO: 577332 - DNA, 75 bp, synthetic construct
  source 1..75: mol_type = other DNA
agaaaatggctgatgcgctggaccgcgggcacgacgaggacgatttatcgctgatgtttggcgtgagtgttcaga

SEQ ID NO: 577333 - DNA, 75 bp, synthetic construct
  source 1..75: mol_type = other DNA
agaaaatggctgatgcgctggagcgcgggcacgacgaggacgatttagcgctgatgtttggcgtgagtgtccaga

SEQ ID NO: 577334 - DNA, 75 bp, synthetic construct
  source 1..75: mol_type = other DNA
ctggctgaccgggtgagtgaggaaagccgccgctggctggcatcgtgcggcctgacggtggcgcagatgcaaagc

SEQ ID NO: 577335 - DNA, 75 bp, synthetic construct
  source 1..75: mol_type = other DNA
atcctggcggcaaaggacattcagaacatgaccggaatgccggtacggctgatcatcctcgatacgctggcccgc

SEQ ID NO: 577336 - DNA, 75 bp, synthetic construct
  source 1..75: mol_type = other DNA
tttctggccgtttcactggcctgttatgttgccagcggaaaaccatggagtggcagacgtgtcagtcagggcgca

SEQ ID NO: 577337 - DNA, 75 bp, synthetic construct
  source 1..75: mol_type = other DNA
agatccaggacgctgtaatgaattatgcctataccagagggatattaaatttcagcgatcaagatcgaatttcat

SEQ ID NO: 577338 - DNA, 75 bp, synthetic construct
  source 1..75: mol_type = other DNA
tatgcaaaagcatataaagcagcttatcctgatttttcttttaatttgtggatagaccctaacgcatttgcagct

SEQ ID NO: 577339 - DNA, 75 bp, synthetic construct
  source 1..75: mol_type = other DNA
ttcaggataatatatctgaaataattagttcattgcatagcgaatataaatcacttaaggtggaaatagataaaa

SEQ ID NO: 577340 - DNA, 75 bp, synthetic construct
  source 1..75: mol_type = other DNA
taaccaggcgcaatggcgcgcccttgaagttgagcgaaacgccagcgcacaggctgcggctgattttctggcgcg

SEQ ID NO: 577341 - DNA, 75 bp, synthetic construct
  source 1..75: mol_type = other DNA
gcttaagaataaaaaatacacacctttcgcaatgggataccctatgtaccatgacaatggtcatttaagcatcaa

SEQ ID NO: 577342 - DNA, 75 bp, synthetic construct
  source 1..75: mol_type = other DNA
tggccgttgattgcatattcaacatatatgggagtgatagactcacttgaagtcaaattgacaatagtactcctg

SEQ ID NO: 577343 - DNA, 75 bp, synthetic construct
  source 1..75: mol_type = other DNA
agaggaacatgtgatgctgaaactaattttgatctagcaccaggattggatgagtcgcgtaaaaaaatagaaagc

SEQ ID NO: 577344 - DNA, 75 bp, synthetic construct
  source 1..75: mol_type = other DNA
gcgcggggaactcattaacccgccgtgcgcgggtttttttgtgcccggtttatccccgctggcgcggggaactct

SEQ ID NO: 577345 - DNA, 75 bp, synthetic construct
  source 1..75: mol_type = other DNA
gaatcatcgacagaatctgttggtatcggtgcaggtgttgacgcttcagttatgactctggcttgtagaacgtgg

SEQ ID NO: 577346 - DNA, 75 bp, synthetic construct
  source 1..75: mol_type = other DNA
ctttgggtttgtataatttatatcaattattatatgatgtttggcatgatgattcatatggaacatcatcaattg

SEQ ID NO: 577347 - DNA, 75 bp, synthetic construct
  source 1..75: mol_type = other DNA
accgccactgattttctgatggaaatcattgctggctgggcacttcccgatgcattcaacgcggaaaacctgtcg

SEQ ID NO: 577348 - DNA, 75 bp, synthetic construct
  source 1..75: mol_type = other DNA
ccacgactcgggctttaagttcgaatggcgtgatccaatcttcaatagcccgcaggcattgcagtcgcagtcgga

SEQ ID NO: 577349 - DNA, 75 bp, synthetic construct
  source 1..75: mol_type = other DNA
actctgttgcgcttaaagtcaggtatattatctgttccagtccatcacgggcatggagagttaaagatatcagta

SEQ ID NO: 577350 - DNA, 75 bp, synthetic construct
  source 1..75: mol_type = other DNA
gtatttttcaggaatgtctctttgattgttttttcctttgttattttaacgttctttatttcctggttgaatatt

SEQ ID NO: 577351 - DNA, 75 bp, synthetic construct
  source 1..75: mol_type = other DNA
tttgcttatatttatggcagcaaaaggactgcgttatcaggccttgatgaccagtctcaacggcgtaagatttag

SEQ ID NO: 577352 - DNA, 75 bp, synthetic construct
  source 1..75: mol_type = other DNA
ccagcaatacatcaaacgccgtgaccaggagaacgaggagattgcgttaacggtagggaagctgcgtgttgagct

SEQ ID NO: 577353 - DNA, 75 bp, synthetic construct
  source 1..75: mol_type = other DNA
aatgttggacagggtggacaagcatttgttcgtggtattgagcagcagggaaatatcagcattaaatggctcgaa

SEQ ID NO: 577354 - DNA, 75 bp, synthetic construct
  source 1..75: mol_type = other DNA
aaaccgttatcaccgatacgggtgcccaaaaattagctcaggcagccgcgccagatggtaagcctgtccgcctga

SEQ ID NO: 577355 - DNA, 75 bp, synthetic construct
  source 1..75: mol_type = other DNA
aatgttacgaaaggaaaatattcaatatcaaaagcatgacaattttagtttccagttgtttgagtatgacaccga

SEQ ID NO: 577356 - DNA, 75 bp, synthetic construct
  source 1..75: mol_type = other DNA
attaaaatataggcttaatattaaagctttagcttttttcctattcccaagttctgttcttaaaagattgtttaa

SEQ ID NO: 577357 - DNA, 75 bp, synthetic construct
  source 1..75: mol_type = other DNA
gctgagagccatcattgaaggattgggtaacgcgaaggttatccatgctggatatggtagttatgcttttgtaga

SEQ ID NO: 577358 - DNA, 75 bp, synthetic construct
  source 1..75: mol_type = other DNA
ggcaccgacaacgctgaaagcggggccgctgttgagttctgaaaaactgattgcgattggtgcttcaacgggggg

SEQ ID NO: 577359 - DNA, 75 bp, synthetic construct
  source 1..75: mol_type = other DNA
aggaacagacgaaccggaagatctgaacaaatccgctgaagaagcattggcggaggcggtgcagagttacctgtc

SEQ ID NO: 577360 - DNA, 75 bp, synthetic construct
  source 1..75: mol_type = other DNA
ccgatattctcgccgcaatgcaggccgctgccgaaccggagagcggagatctgaataaaagcgccgagcaggtgt

SEQ ID NO: 577361 - DNA, 75 bp, synthetic construct
  source 1..75: mol_type = other DNA
tttacggggaatgatgtcgccagcctggcaaccctgacagaagtcgggcgggatattcttgcgaaatcgaccgtt

SEQ ID NO: 577362 - DNA, 75 bp, synthetic construct
  source 1..75: mol_type = other DNA
caggggaatcctgcggtgcagcaagatacagaaatgtaagcaaactaacaataagcaagcacagcatattcggaa

SEQ ID NO: 577363 - DNA, 75 bp, synthetic construct
  source 1..75: mol_type = other DNA
ttagcattcaaattaataaagccgctcttgataatgccgctcctgagattatcgccgcactcaagcgtctgggct

SEQ ID NO: 577364 - DNA, 75 bp, synthetic construct
  source 1..75: mol_type = other DNA
atcaaacatcacctaaatgctgtaaaaaaggatgatatcattatatttaatgacagtgtcattaataaaagcatt

SEQ ID NO: 577365 - DNA, 75 bp, synthetic construct
  source 1..75: mol_type = other DNA
tatgcaagtaggaaaattgttaataaataaatatgattcacttcttaataaaaatacaattaatgcttttaagtc

SEQ ID NO: 577366 - DNA, 75 bp, synthetic construct
  source 1..75: mol_type = other DNA
ctctcccttgaatttgcgcaggtgctggacaaaatggcctacctgacgatatggcagggcgatgaattacagcgc

SEQ ID NO: 577367 - DNA, 75 bp, synthetic construct
  source 1..75: mol_type = other DNA
aaaaggccttgtccagcttagtagcgccaccaacagcacgtctgaaacgctcgccgcaacaccaaaagccgttaa

SEQ ID NO: 577368 - DNA, 75 bp, synthetic construct
  source 1..75: mol_type = other DNA
gcggctttcgcaccagctcttaactgtcatacgcgggaatcttttttttcgtgcatcgcagctccacaaaggagg

SEQ ID NO: 577369 - DNA, 75 bp, synthetic construct
  source 1..75: mol_type = other DNA
tcgctcaaattgctgagtatatcccgcgtacgtgccggggtatgcagttgcaggaagccaaagcgcgcctggaga

SEQ ID NO: 577370 - DNA, 75 bp, synthetic construct
  source 1..75: mol_type = other DNA
cttggaaaacaatgcgccgaatgggagcgaaaagcattaagcaactttgaagagtgtgctgcgatggctgaacgt

SEQ ID NO: 577371 - DNA, 75 bp, synthetic construct
  source 1..75: mol_type = other DNA
attatctgaaaataaactagttaagtggtcaggaatatcattggcagaaaaattaaatgactacttaaataagtt

SEQ ID NO: 577372 - DNA, 75 bp, synthetic construct
  source 1..75: mol_type = other DNA
attaagtcaaatatataaaaacttacaggtaaatgaagataacaaacttttgttgagcaatataaaaagtattat

SEQ ID NO: 577373 - DNA, 75 bp, synthetic construct
  source 1..75: mol_type = other DNA
attatatagagagccaggccttcttcttcaaaaagcagtcgtagcagttccatctggagagttagttgatatcat

SEQ ID NO: 577374 - DNA, 75 bp, synthetic construct
  source 1..75: mol_type = other DNA
ttagcaacgctcaaaccattgaaataacttttcaggatgtgcttattgatgacattaatggcagcaattatgagc

SEQ ID NO: 577375 - DNA, 75 bp, synthetic construct
  source 1..75: mol_type = other DNA
agccaggtaaaaattgttttcagtgatgaaaaatataccgactcaatctttgagatactaacctcaacacttaag

SEQ ID NO: 577376 - DNA, 75 bp, synthetic construct
  source 1..75: mol_type = other DNA
gtcgcctggtcgggtggcgttaatctggcgaaccgtctttccgaaacgtttgctgtgatgaatgcgccaggaatt

SEQ ID NO: 577377 - DNA, 75 bp, synthetic construct
  source 1..75: mol_type = other DNA
tttttgttagccatcatcataaagacgacgcgagtgttgatggagtttctcgtttagctgcagcaaaaggttatc

SEQ ID NO: 577378 - DNA, 75 bp, synthetic construct
  source 1..75: mol_type = other DNA
gtgggctacagtcgggcgcgagtgatgaacggtggcgttgatgctgaaaaagtgattggtatttccggacatctg

SEQ ID NO: 577379 - DNA, 75 bp, synthetic construct
  source 1..75: mol_type = other DNA
aagttatcccatcacgaggagctattgttaaagtaaaatttgatgctaaaaaaggcaataacattttgtttaagc

SEQ ID NO: 577380 - DNA, 75 bp, synthetic construct
  source 1..75: mol_type = other DNA
atggctggaataatggcgtgggagtcagtgcacagtataacaaacagcacacattctacctcgaagcggattaca

SEQ ID NO: 577381 - DNA, 75 bp, synthetic construct
  source 1..75: mol_type = other DNA
aggatgtcggcaaggtagcggaacacgcagaaatctgcggccgctgtgtcagcaacgtcgccggtgacggtgaaa

SEQ ID NO: 577382 - DNA, 75 bp, synthetic construct
  source 1..75: mol_type = other DNA
ccagaatccatcgatcacctggcctgcacggtttgaagcgcagggtgctatacgggtgaaagattatgaagatat

SEQ ID NO: 577383 - DNA, 75 bp, synthetic construct
  source 1..75: mol_type = other DNA
gtgtatattaaaggttatatggatgaggtgttaagtgaaatgtctcctgaggcgataggattcggtttgagtgag

SEQ ID NO: 577384 - DNA, 75 bp, synthetic construct
  source 1..75: mol_type = other DNA
tgggctgcatccaactctttacgatcgtgatgaagaaaccatggactatatcagccaacgttcagcaccgacttt

SEQ ID NO: 577385 - DNA, 75 bp, synthetic construct
  source 1..75: mol_type = other DNA
cccgtgtcggggatattgatgtggcaccgactgatgcaccggggacactgaacgcgtttctgaatgcaccaaaga

SEQ ID NO: 577386 - DNA, 75 bp, synthetic construct
  source 1..75: mol_type = other DNA
cagacgttgagcgcggattcccattcaagcgccacactgacttttattgctcatgatgcagcaggtaatcctgtt

SEQ ID NO: 577387 - DNA, 75 bp, synthetic construct
  source 1..75: mol_type = other DNA
tcaacttctttttcgaccacgaccttagccgttaccactcccgcgccggcattggcgcggagtactggcgtgact

SEQ ID NO: 577388 - DNA, 75 bp, synthetic construct
  source 1..75: mol_type = other DNA
atcctatcgaggtgacggtagaactgagagatgaaaatgacagacctgttaaggagcaaaaacagcaactgaata

SEQ ID NO: 577389 - DNA, 75 bp, synthetic construct
  source 1..75: mol_type = other DNA
atttctattagccccgattacagacaagcctggaaagtggtgcataaattgtcagatattctactgttgactatt

SEQ ID NO: 577390 - DNA, 75 bp, synthetic construct
  source 1..75: mol_type = other DNA
tggattttgggtctcacgcacagtttgtgatcgggttgctcggttttgatactattgcttaccagccctctcagg

SEQ ID NO: 577391 - DNA, 75 bp, synthetic construct
  source 1..75: mol_type = other DNA
atgggagataaagacgactttctggtatcgacttggcgtatggacgcgcatcagaagtctaaaatcgtcaacgca

SEQ ID NO: 577392 - DNA, 75 bp, synthetic construct
  source 1..75: mol_type = other DNA
tcatatccctggcgctgggactgcccagtctgcctgcggaggctcttgatagtcaaatcgtttataacgcccaag

SEQ ID NO: 577393 - DNA, 75 bp, synthetic construct
  source 1..75: mol_type = other DNA
ctaaatgaaccagaagatatacagcttaaaaaagaatggagtggctatattaaagcctatgaagatggactaaat

SEQ ID NO: 577394 - DNA, 75 bp, synthetic construct
  source 1..75: mol_type = other DNA
aaaaaatatgaacataattggcttcgtaaataataattgcgaagttttccaaccatcgaaatcattgaatgatgt

SEQ ID NO: 577395 - DNA, 75 bp, synthetic construct
  source 1..75: mol_type = other DNA
tgcaacaacgattaaagacgctgtaggagatacttattctcctaaaggtatgtcaattaaatcaagtttgagcga

SEQ ID NO: 577396 - DNA, 75 bp, synthetic construct
  source 1..75: mol_type = other DNA
aatgttaatggtctgaacagtaccgggctacaggtaatcaatgcagggcaattaaattctgacggtacgataaat

SEQ ID NO: 577397 - DNA, 75 bp, synthetic construct
  source 1..75: mol_type = other DNA
gcgtgaaggtgaaagtgagccgtgttcctgacggcgttgctgaatacagcgtgtgggggctgaagctgccgacgc

SEQ ID NO: 577398 - DNA, 75 bp, synthetic construct
  source 1..75: mol_type = other DNA
gtggcaattgatgattttggtattggctactctaacttgcataaccttaaatcattgaatgtcgatattttgaaa

SEQ ID NO: 577399 - DNA, 75 bp, synthetic construct
  source 1..75: mol_type = other DNA
gcctgctggctaaacagggaagaaggggaaagtatctgggccgtaagcgactcaagaatcacccagcatgaaagt

SEQ ID NO: 577400 - DNA, 75 bp, synthetic construct
  source 1..75: mol_type = other DNA
cgtggagccgttacggtcagttgctgaccttcactgactgttccggctaccagacccgttatgaccatgaccgct

SEQ ID NO: 577401 - DNA, 75 bp, synthetic construct
  source 1..75: mol_type = other DNA
aagcctgagcaggaatggtggggcaacgagtccaatgattttgccgagcgagtggagaacgaattcgcctggaag

SEQ ID NO: 577402 - DNA, 75 bp, synthetic construct
  source 1..75: mol_type = other DNA
atacgtgcgtgagaaaggatgactgctttatcgatattggcttgctgggagatatgcagcccacaattattaacg

SEQ ID NO: 577403 - DNA, 75 bp, synthetic construct
  source 1..75: mol_type = other DNA
cgtatatttacattgtaacaccaatagtaaatttaactaatgctattcatatgggacaaacagatacaaacctta

SEQ ID NO: 577404 - DNA, 75 bp, synthetic construct
  source 1..75: mol_type = other DNA
aattcgcatttgggattccatcattgcatggttttgttcttgcatttggttgtcttttggttgcatctaattatt

SEQ ID NO: 577405 - DNA, 75 bp, synthetic construct
  source 1..75: mol_type = other DNA
acatggcctaatctcatcttatgtatttaatcgtgtaaaaaagaaaaaatcagcaattttgcttttctctgttat

SEQ ID NO: 577406 - DNA, 75 bp, synthetic construct
  source 1..75: mol_type = other DNA
cttgatgggacacagtttattgcaacaatacaggcacttgcacaaaaagaagagccgccgttgttgctcgtcccg

SEQ ID NO: 577407 - DNA, 75 bp, synthetic construct
  source 1..75: mol_type = other DNA
tgcgaatctggagaagctgttaaacctgtttatagtacagaaaaaccaattgacgttaaggtaagttctgatcgg

SEQ ID NO: 577408 - DNA, 75 bp, synthetic construct
  source 1..75: mol_type = other DNA
aagacgaaaattctccggacaatggctttgaggtcggggaatataacacatatgaagcatataactcagagaagc

SEQ ID NO: 577409 - DNA, 75 bp, synthetic construct
  source 1..75: mol_type = other DNA
aaagaggttgaactcggtcaggtgacccccagccacattaatcagtcacatcacagcgatgccgttgctgtcgac

SEQ ID NO: 577410 - DNA, 75 bp, synthetic construct
  source 1..75: mol_type = other DNA
atggaacactacgaagtattgaaacttaaaggtcgtatgaaacgactactatctatatctgacaaaaaagcagaa

SEQ ID NO: 577411 - DNA, 75 bp, synthetic construct
  source 1..75: mol_type = other DNA
gaaatccttgttaaaaccacgggcaccatgcagatgttgggacgtgccgcaggtgctcagactcagccggaagag

SEQ ID NO: 577412 - DNA, 75 bp, synthetic construct
  source 1..75: mol_type = other DNA
accgtacgccggaactgatgcagaaaaccatcgacaagctggcagagctgcaggaacgcttcaagcgcgtgcgca

SEQ ID NO: 577413 - DNA, 75 bp, synthetic construct
  source 1..75: mol_type = other DNA
atgggcggtatcgaaaccgatcagaactgtgaaacccgcattaaaggtctgttcgccgtgggtgaatgttcctct

SEQ ID NO: 577414 - DNA, 75 bp, synthetic construct
  source 1..75: mol_type = other DNA
gatggcgtacgcctgaatctggcgggggtgagtggttctgccgaccttagccagttccctattgcgtgcgcttgt

SEQ ID NO: 577415 - DNA, 75 bp, synthetic construct
  source 1..75: mol_type = other DNA
ctttctgaaatttcaagtcgtcaacaactaaaaaacgtatcacgtatgcctccttttcctggtgctgaagaagat

SEQ ID NO: 577416 - DNA, 75 bp, synthetic construct
  source 1..75: mol_type = other DNA
atttttctctgggcgagtgggtaatgtgtctgagttttgttacgttgggaataatggcgtgggctttgcggtaat

SEQ ID NO: 577417 - DNA, 75 bp, synthetic construct
  source 1..75: mol_type = other DNA
tcggacttgccggtattattgaagtttgtaatatccttatcacgccaacaatttaccttctgctcaaaattttta

SEQ ID NO: 577418 - DNA, 75 bp, synthetic construct
  source 1..75: mol_type = other DNA
atggcagcagcttattgaagagatcgacagcctgccgaaggcaaagcagaagatgatttcggagatgttaagtgc

SEQ ID NO: 577419 - DNA, 75 bp, synthetic construct
  source 1..75: mol_type = other DNA
gctatgtgcaaaaaccactggacatgttctcgatgacagcaggcaaactaactgggcttgatcaatctgggccta

SEQ ID NO: 577420 - DNA, 75 bp, synthetic construct
  source 1..75: mol_type = other DNA
agcaagtttccagcagtggtagtgctgtaggcaccaccattaatgggggactgcagactgttttcggtggtggaa

SEQ ID NO: 577421 - DNA, 75 bp, synthetic construct
  source 1..75: mol_type = other DNA
ccaccattaatgggggactgcagactgttttcggtggtggaagtgtctccggaactctcattaataccggggaac

SEQ ID NO: 577422 - DNA, 75 bp, synthetic construct
  source 1..75: mol_type = other DNA
ctttaaaacctatagatttaaacaagagcagttacggttattatatttcgccagatatcattcccacggatgtta

SEQ ID NO: 577423 - DNA, 75 bp, synthetic construct
  source 1..75: mol_type = other DNA
gctgtatataaccagggagaaaaatttaccactgctggagtcggttattaatgattctctggttcagcaactggt

SEQ ID NO: 577424 - DNA, 75 bp, synthetic construct
  source 1..75: mol_type = other DNA
attattcaggagctaaggattttcatcagggaaaatacgatagcccttactttcagcaattattagccttgccga

SEQ ID NO: 577425 - DNA, 75 bp, synthetic construct
  source 1..75: mol_type = other DNA
ttgcagagaagatacaaaaacagggaggtgattatttattcgctgtaaaaggaaaccaggggcggctaaataaag

SEQ ID NO: 577426 - DNA, 75 bp, synthetic construct
  source 1..75: mol_type = other DNA
ttaataatggcttccagctcatttccagtggtggctctgccatcaacaccaccattaaagggggattccaggagg

SEQ ID NO: 577427 - DNA, 75 bp, synthetic construct
  source 1..75: mol_type = other DNA
tccagacgatttacgatggaggctcagcgtcggagattacaatcaacagtggttaccaggtcatctcaagcggtg

SEQ ID NO: 577428 - DNA, 75 bp, synthetic construct
  source 1..75: mol_type = other DNA
aacaccactcaggaatactgatcccggctacgcccgagaccagcgatattctgcaatccaaaacccggctcggcg

SEQ ID NO: 577429 - DNA, 75 bp, synthetic construct
  source 1..75: mol_type = other DNA
ttcagttaacggaaaccgtgatgaattaattgatacaacacaggcaaggccaattcagtattgcattaatgggac

SEQ ID NO: 577430 - DNA, 75 bp, synthetic construct
  source 1..75: mol_type = other DNA
atttattttttatgtgacgatgattctttaaatgaaaaattcggtggggcaattaaattcaaacgaaaatgcgat

SEQ ID NO: 577431 - DNA, 75 bp, synthetic construct
  source 1..75: mol_type = other DNA
gcccgtagatgggcgtctctggtgtctgtggtcactggcgcgaggtctgctgaagtctgccacctgactaaacgt

SEQ ID NO: 577432 - DNA, 75 bp, synthetic construct
  source 1..75: mol_type = other DNA
tattcacgcaggagcgtcaagtcactactgctatctgtagtttttctgagcttgtgtcctcactgctggctgaga

SEQ ID NO: 577433 - DNA, 75 bp, synthetic construct
  source 1..75: mol_type = other DNA
cgctttttcgcgcttctcaatctcggttttgaatactgggaaccaaccggcggggctatttctagcaacgagcga

SEQ ID NO: 577434 - DNA, 75 bp, synthetic construct
  source 1..75: mol_type = other DNA
ccggaaaaatgtgttaaatcaggaagtctatatcttcagtcctgacggctatgcacgagaaatcggcggtgaaac

SEQ ID NO: 577435 - DNA, 75 bp, synthetic construct
  source 1..75: mol_type = other DNA
ccccagcactacccgcaataaagttattgaaaaacgtgctgttatgctaccgcaagaaattattgatttacggga

SEQ ID NO: 577436 - DNA, 75 bp, synthetic construct
  source 1..75: mol_type = other DNA
gagggaaaaattttggttcattaaaagaaattgacaatagaaagatcgaattaacaactgaagagaatgaacctg

SEQ ID NO: 577437 - DNA, 75 bp, synthetic construct
  source 1..75: mol_type = other DNA
gaagatgctgaacgtgaagcggctgaacgagctgagcgtgaacggaaacgtcaggaactgcttcagttaatcgcc

SEQ ID NO: 577438 - DNA, 75 bp, synthetic construct
  source 1..75: mol_type = other DNA
agcctcagccctgatagcagataaactccatgccgaattactgctgatatccactggggttgaacaggttgctgt

SEQ ID NO: 577439 - DNA, 75 bp, synthetic construct
  source 1..75: mol_type = other DNA
gagaagtgcgaagggacttattaccagtccgaatgccattcacgcggctttgcagcataaaaccggcacctggat

SEQ ID NO: 577440 - DNA, 75 bp, synthetic construct
  source 1..75: mol_type = other DNA
tcactcaggacccgatagggctggagggggggatggagtctgtatgcgtacccgctgaatccggtgaatggtatt

SEQ ID NO: 577441 - DNA, 75 bp, synthetic construct
  source 1..75: mol_type = other DNA
ctggtacagtcaaggtgctttttgatggagtaactgagagcactctgaatgccaaaatatccttggatacagtgc

SEQ ID NO: 577442 - DNA, 75 bp, synthetic construct
  source 1..75: mol_type = other DNA
cttcatattgtttgcgatgtccctgatgaacttattgatttcacgtttgaatggaaagggcagctatggttagaa

SEQ ID NO: 577443 - DNA, 75 bp, synthetic construct
  source 1..75: mol_type = other DNA
agtggaaggaggttatctccgccgccaccatagccaatgcctccacagctctggattgggggatggttcacgagg

SEQ ID NO: 577444 - DNA, 75 bp, synthetic construct
  source 1..75: mol_type = other DNA
atgaatgatcctctattacatctaatccgaagcaatattatgaaacccacagctgtatatgctgattatattaat

SEQ ID NO: 577445 - DNA, 75 bp, synthetic construct
  source 1..75: mol_type = other DNA
ctgaaggaagcacgtgataaaaataataaaataatttattcctcaggcttagttgttttcaaccacattaaaact

SEQ ID NO: 577446 - DNA, 75 bp, synthetic construct
  source 1..75: mol_type = other DNA
gggcagggatttagacattacgaaatgaaaagttatcttgaaagactgtcactctcatggaaaaagacaagtaca

SEQ ID NO: 577447 - DNA, 75 bp, synthetic construct
  source 1..75: mol_type = other DNA
tcgggctctggctgtttttcactgcggtgttcgcctggagcctatacagctacagggccagcaagatgaaatcaa

SEQ ID NO: 577448 - DNA, 75 bp, synthetic construct
  source 1..75: mol_type = other DNA
ctgcaccagccgtaccggctgccggggcagcagtatgataaggagtcggggctgtactataaccgtcaccggtac

SEQ ID NO: 577449 - DNA, 75 bp, synthetic construct
  source 1..75: mol_type = other DNA
attgggggatggttcacgaggttgccgccgccacttacccgcaggcacccggcacatactggtggattaactgtt

SEQ ID NO: 577450 - DNA, 75 bp, synthetic construct
  source 1..75: mol_type = other DNA
tataaaatactttcaagttcttttcctgtacattcggaagaggtttttttttcaaaagaacatctcaagtgtcca

SEQ ID NO: 577451 - DNA, 75 bp, synthetic construct
  source 1..75: mol_type = other DNA
gtgtgtttataaagaattctgtgatttcaaatatttgtaacctgtatgataagaattcaatgttaaaattagtta

SEQ ID NO: 577452 - DNA, 75 bp, synthetic construct
  source 1..75: mol_type = other DNA
atgagaactcaggccataaaaaaatatttagtcatatcttttctcacaattctcaccgtaatttcatacataatc

SEQ ID NO: 577453 - DNA, 75 bp, synthetic construct
  source 1..75: mol_type = other DNA
gcggaggtgttgcaggaggacacgggtgtgacgctaccggcggagctggcggtgatgctgggaaggctggagcgg

SEQ ID NO: 577454 - DNA, 75 bp, synthetic construct
  source 1..75: mol_type = other DNA
cccaaatattcttttctggaatatctattaactatacaggaagaataccacacaaatacgacaacgcaaaaaaaa

SEQ ID NO: 577455 - DNA, 75 bp, synthetic construct
  source 1..75: mol_type = other DNA
ccatactgagatatattgatgaacacatagaaaaaaaaaacataaacattcatatacttgttcaatactcaggtt

SEQ ID NO: 577456 - DNA, 75 bp, synthetic construct
  source 1..75: mol_type = other DNA
gctttgcttccggtaacgtgcggatcattcattattcctggtggtgcacaaattgcttgcgtggcgtttgacaga

SEQ ID NO: 577457 - DNA, 75 bp, synthetic construct
  source 1..75: mol_type = other DNA
ggaataaatctatacacgtatccactggcaccaatacgttacactgatccactggggttagaacgagttataagt

SEQ ID NO: 577458 - DNA, 75 bp, synthetic construct
  source 1..75: mol_type = other DNA
gtgtgacgctaccggcggagctggcggtgatgctgggaaggctggagcgggaactgcgcgcgggagcggtgagtg

SEQ ID NO: 577459 - DNA, 75 bp, synthetic construct
  source 1..75: mol_type = other DNA
aatatacaacaaagtttgaattattcaatttatagcagcacaaccaaaggccaaaaaataataaccaagagctat

SEQ ID NO: 577460 - DNA, 75 bp, synthetic construct
  source 1..75: mol_type = other DNA
agttataggtgataggcaatttccgactatgcatccttctaaggttgagaaagctatgagggaattttgtcagga

SEQ ID NO: 577461 - DNA, 75 bp, synthetic construct
  source 1..75: mol_type = other DNA
acagtttttgtttttgatatattcataatgctattaggaatgatcggtcttttgttttttaggaaggattttgat

SEQ ID NO: 577462 - DNA, 75 bp, synthetic construct
  source 1..75: mol_type = other DNA
ctcccggctgaaaacatcgttcaccgtcttctctgccggacagaacacatcatgcaggcacatgatgtctgcgta

SEQ ID NO: 577463 - DNA, 75 bp, synthetic construct
  source 1..75: mol_type = other DNA
aacctgaactcaccgcacaggcgttctacataaaacgcttacgcttcattgttgactcgaactcgacttcagata

SEQ ID NO: 577464 - DNA, 75 bp, synthetic construct
  source 1..75: mol_type = other DNA
gcgctgattggcgcggcgattaccggctgcggctgttcgctgatgttcccatcgctgggcgtagaggttgtgcgc

SEQ ID NO: 577465 - DNA, 75 bp, synthetic construct
  source 1..75: mol_type = other DNA
tgcttttacaaatggtgccactctctgaaagtacgatttatgcgttggagcaaaaaggcctgtttcccaaacgtt

SEQ ID NO: 577466 - DNA, 75 bp, synthetic construct
  source 1..75: mol_type = other DNA
gcagcaagtgggaccgagagcgtcttatcttcctacgtgcgcaccccttgtgcgtcatgtgccaggagcaaggca

SEQ ID NO: 577467 - DNA, 75 bp, synthetic construct
  source 1..75: mol_type = other DNA
gtgaatggttgtgcgatcttcgccctaatggggtgaaaggtaagcgtattcgtaaaaaattcgccacgaaaggtg

SEQ ID NO: 577468 - DNA, 75 bp, synthetic construct
  source 1..75: mol_type = other DNA
ctgtattttcagctctgaccttgggtgttgcgacaagtgcgtctgccgcacctgctactgtcaatggtggtacag

SEQ ID NO: 577469 - DNA, 75 bp, synthetic construct
  source 1..75: mol_type = other DNA
atcatacggtctctattccacagataccctaagaaccgtacagactgccacttatttttcaggtggcaaaacacc

SEQ ID NO: 577470 - DNA, 75 bp, synthetic construct
  source 1..75: mol_type = other DNA
ggcacccgtcacagcgggcaatcgattaaatccgtctacagcaaatccttctaccagacgggaaccaatatccag

SEQ ID NO: 577471 - DNA, 75 bp, synthetic construct
  source 1..75: mol_type = other DNA
cgatattcatgcctggggtggaaatcaaccattttttagttatccacgtgttttaggccatgaaatatgtgggga

SEQ ID NO: 577472 - DNA, 75 bp, synthetic construct
  source 1..75: mol_type = other DNA
atagcggcgaagaacgtgaaacatgctgacatgacggtaagtgttgatattccgataccaacctgttctgtaaat

SEQ ID NO: 577473 - DNA, 75 bp, synthetic construct
  source 1..75: mol_type = other DNA
gtttttgctgtcagtaaacaagaagaagatcagcctgcgtaccgttggcgcggcgttagtgttacaggtcgtgat

SEQ ID NO: 577474 - DNA, 75 bp, synthetic construct
  source 1..75: mol_type = other DNA
gcgtacgcgactattcgtcagaaatgctcgatgaattactggcaaccggtgcggttatctggtcggggcaaaaaa

SEQ ID NO: 577475 - DNA, 75 bp, synthetic construct
  source 1..75: mol_type = other DNA
cgaaacgacgtcaggaaaccaatgagcgaagccagtatcaacaaagtgataaagctgcttggctatcatggtcgg

SEQ ID NO: 577476 - DNA, 75 bp, synthetic construct
  source 1..75: mol_type = other DNA
gatccggatgaagttgtcaaaatgctggggatgtatatcccttatctatgtgcctttgcttttttatcccttctt

SEQ ID NO: 577477 - DNA, 75 bp, synthetic construct
  source 1..75: mol_type = other DNA
gtggctacagcgttatattcacccatagcattggcatcaacagttgagtatggtgagacagttgatggtgttgtc

SEQ ID NO: 577478 - DNA, 75 bp, synthetic construct
  source 1..75: mol_type = other DNA
tgcggcagagctgcaacgtctgaacccgcagctgcgtgacccgaacaacataaccgccgggatggtgattaatgc

SEQ ID NO: 577479 - DNA, 75 bp, synthetic construct
  source 1..75: mol_type = other DNA
gacgctgttacgtcccctttaaagaccattaacagcgtgattaaaaaaatccagactgtgcgtgccacgctggta

SEQ ID NO: 577480 - DNA, 75 bp, synthetic construct
  source 1..75: mol_type = other DNA
agaacagcttataccggcggatatcgggcgactggtcggggatgtgcgcacccgcttacaggcagccattacgct

SEQ ID NO: 577481 - DNA, 75 bp, synthetic construct
  source 1..75: mol_type = other DNA
catctgatataatagcagcttatctttatgcgcaattggaaagtgtagatgttatacaaaataagcgaaaggaat

SEQ ID NO: 577482 - DNA, 75 bp, synthetic construct
  source 1..75: mol_type = other DNA
tgtcaatctggctcgcagccaggacatcaaccgctacaccttccctgaacaaatggctggctttgctaatgccat

SEQ ID NO: 577483 - DNA, 75 bp, synthetic construct
  source 1..75: mol_type = other DNA
gattcagcatctatttcgctgacgtccatttcgagaaacaagtctacgcattcggctcaggacttggcttcacct

SEQ ID NO: 577484 - DNA, 75 bp, synthetic construct
  source 1..75: mol_type = other DNA
aacggcggtattgatgcgctggttgaagattattatcgcagacacccggagaaaacgccgccgtggaaagagtaa

SEQ ID NO: 577485 - DNA, 75 bp, synthetic construct
  source 1..75: mol_type = other DNA
ctgattggaagcaaggaaaatgccgctgggttaggtttacaatgttcctatctgaccgccagaggcaccagcacg

SEQ ID NO: 577486 - DNA, 75 bp, synthetic construct
  source 1..75: mol_type = other DNA
gacggccagatggtggctctgatggcactggcgattcatgatgccaataatacggcgataactgtctacaactgt

SEQ ID NO: 577487 - DNA, 75 bp, synthetic construct
  source 1..75: mol_type = other DNA
gccacgctggtgaataccctgctgacgttcaaaagcgattttctctcatccatcgacaatatgatgtcgctggcc

SEQ ID NO: 577488 - DNA, 75 bp, synthetic construct
  source 1..75: mol_type = other DNA
tgttcgcgcaacagttgtttgatgaactggacactttacaggcgcggttaagtgacttttttgatgccgttactg

SEQ ID NO: 577489 - DNA, 75 bp, synthetic construct
  source 1..75: mol_type = other DNA
atgggctgggctgaaaacctgcaaaacgcttcctttcgtggcgtgcagtttgaggtgctgaatactgacgaacaa

SEQ ID NO: 577490 - DNA, 75 bp, synthetic construct
  source 1..75: mol_type = other DNA
ttcagggaaatgaattgacatatattgcggaagcagtgtctaatggtaaaatatcaggtgatgggattttcacca

SEQ ID NO: 577491 - DNA, 75 bp, synthetic construct
  source 1..75: mol_type = other DNA
aaaacagtctctatgccgggcactggatgtttaccagcggcaaaggactgaccgcagaagggttgtataaaaccg

SEQ ID NO: 577492 - DNA, 75 bp, synthetic construct
  source 1..75: mol_type = other DNA
cggacagtacaacaaaagtcagtccatcactttaagcccgcagggcagcgaaaacagtctctatgccgggcactg

SEQ ID NO: 577493 - DNA, 75 bp, synthetic construct
  source 1..75: mol_type = other DNA
tcctcctggaaatgctcgcacaattgggctttgtgaccgttgagaaagtcgttgagcgtctgggaatttcgcctg

SEQ ID NO: 577494 - DNA, 75 bp, synthetic construct
  source 1..75: mol_type = other DNA
aaagtgcgcaacggcgcagaagccattactcaacagcgcccgcgctggacgccaatgaatctacaccaggcgcaa

SEQ ID NO: 577495 - DNA, 75 bp, synthetic construct
  source 1..75: mol_type = other DNA
acagcagaagggttgtataaaaccgatatgctgacggcaatggcagagcagaagatgctgagcgtggtagggaaa

SEQ ID NO: 577496 - DNA, 75 bp, synthetic construct
  source 1..75: mol_type = other DNA
atcactttaagcccgcagggcagcgaaaatagtctttatgccgggcactggatgtttaccagcggcaaaggactg

SEQ ID NO: 577497 - DNA, 75 bp, synthetic construct
  source 1..75: mol_type = other DNA
atgcgcttacggggaagcgtatttctcacgcgggagaggacatggcacagattgatttaccgaaaaaaaataaac

SEQ ID NO: 577498 - DNA, 75 bp, synthetic construct
  source 1..75: mol_type = other DNA
gagtctctaccccgggtagcagcccggtttaacattcccagccacaacacggttaaaaactggataaaaggctac

SEQ ID NO: 577499 - DNA, 75 bp, synthetic construct
  source 1..75: mol_type = other DNA
aggccggggcaatactggctttcctattcatcggtattgctggtgctgtcaaccgggtctattgggttaacagcc

SEQ ID NO: 577500 - DNA, 75 bp, synthetic construct
  source 1..75: mol_type = other DNA
tacttaccgccgtgatgggtacggctatgactgcgtgatgcctgtttatcagttccggcgtgatttttcactgat

SEQ ID NO: 577501 - DNA, 75 bp, synthetic construct
  source 1..75: mol_type = other DNA
accagcagggaaaaagcgcggggaaacatccagaaaatgaaaagcatgattaacgcattcaggggcaaaaaatga

SEQ ID NO: 577502 - DNA, 75 bp, synthetic construct
  source 1..75: mol_type = other DNA
ctcgggcattctgagtctctaccccgggtagcagcccggtttaacattcccagccacaacacggttaaaaactgg

SEQ ID NO: 577503 - DNA, 75 bp, synthetic construct
  source 1..75: mol_type = other DNA
ctttcagacggctggacggtgatttcagacggtctgcatgatgtacaggccatgaccgacaccatcagcgataaa

SEQ ID NO: 577504 - DNA, 75 bp, synthetic construct
  source 1..75: mol_type = other DNA
caacagtcaacggttacggtacagccggggggcgtgatgatcctcgatggcagtacggtaaaaggtgacaatgtc

SEQ ID NO: 577505 - DNA, 75 bp, synthetic construct
  source 1..75: mol_type = other DNA
tgagcgacgggaaagtgcaaattgttaagaccggcgaggtcattggcgcgactcaacttactgacggtgagttgc

SEQ ID NO: 577506 - DNA, 75 bp, synthetic construct
  source 1..75: mol_type = other DNA
ggtgaagactctgacactattgttgagaatggatccatttatcgtctggggacggatggccttcagctctacagt

SEQ ID NO: 577507 - DNA, 75 bp, synthetic construct
  source 1..75: mol_type = other DNA
gaacggtaatgcattaacagcaacaaagctgcaaacgccaagacgggtttctggtgttgagtttgatggttccag

SEQ ID NO: 577508 - DNA, 75 bp, synthetic construct
  source 1..75: mol_type = other DNA
atggtgcattatggcgtaatgatggcgctaaaacttacctgctgcttaccaatcaaggtgatgtttatggtggct

SEQ ID NO: 577509 - DNA, 75 bp, synthetic construct
  source 1..75: mol_type = other DNA
cagcagtcaacggttacggtacagcagggtggcgtgttaatcctcgatggtagcacggtgaaaggtgacagtgtc

SEQ ID NO: 577510 - DNA, 75 bp, synthetic construct
  source 1..75: mol_type = other DNA
ggtcagcttgacaccaactttaaaattggtcgtcgagcggcgttgcgtgaaattgaagatgtaaaacacgatacg

SEQ ID NO: 577511 - DNA, 75 bp, synthetic construct
  source 1..75: mol_type = other DNA
acggcgaaatagagccggaagagcgcaaggtgctggaagagattgccggtgttctgggccttcgtctggagaatc

SEQ ID NO: 577512 - DNA, 75 bp, synthetic construct
  source 1..75: mol_type = other DNA
taatgcgattagcgcaaccattatcggtcagctggatacgaactttaaaactggtcgtcgtgcggcgttacgtga

SEQ ID NO: 577513 - DNA, 75 bp, synthetic construct
  source 1..75: mol_type = other DNA
cagggcggcgtttttatgctggcggggaaagccagtgatacgttgcttgctggtggcaccatgaataatctcggt

SEQ ID NO: 577514 - DNA, 75 bp, synthetic construct
  source 1..75: mol_type = other DNA
gtttgaaaaacgcgatctggcacaggcggtgattaacgctgcatacctggtggcctgtgcagatggtgaatgtga

SEQ ID NO: 577515 - DNA, 75 bp, synthetic construct
  source 1..75: mol_type = other DNA
gcggaggcagacggcgaaattgagccggaagagcgcaaggtgctggaagagattgccggtgttctgggtcttcgt

SEQ ID NO: 577516 - DNA, 75 bp, synthetic construct
  source 1..75: mol_type = other DNA
actatcaccctgattaccctggtcggttattccgcaatgggtggcgcagtcggtgccggtggtttaggtcagatt

SEQ ID NO: 577517 - DNA, 75 bp, synthetic construct
  source 1..75: mol_type = other DNA
cacaagctctacgagaatgataccggcacgaccgacagtaatgggctgccgccacactctatctctgccatcgtg

SEQ ID NO: 577518 - DNA, 75 bp, synthetic construct
  source 1..75: mol_type = other DNA
cgatcgaatgatgctcgatttagccaatggtatgttatttcgctcgcgttttgctcgtaaaatgctcacaccaga

SEQ ID NO: 577519 - DNA, 75 bp, synthetic construct
  source 1..75: mol_type = other DNA
taacggcatcgctcgccgggctgcgacaaactctacggtcgatgagctgatcgagggtgaggccggaacgttaat

SEQ ID NO: 577520 - DNA, 75 bp, synthetic construct
  source 1..75: mol_type = other DNA
cggggcggacgtaacattgtgcgccgtgaatacccactgcgtgaaagcggcggtgcggatgatctggggccaaaa

SEQ ID NO: 577521 - DNA, 75 bp, synthetic construct
  source 1..75: mol_type = other DNA
gctgataaacagctttgaaagtcgttataacgctgctgaacagggcgtggttgagttcaccattaatgtcacgcc

SEQ ID NO: 577522 - DNA, 75 bp, synthetic construct
  source 1..75: mol_type = other DNA
tgcctacctcgaaccggacagtaaagacggtcagatggtggctctgatagcgctggcgattcatgatgccaataa

SEQ ID NO: 577523 - DNA, 75 bp, synthetic construct
  source 1..75: mol_type = other DNA
gacaatgagcaacgttggcttacttatgcggttatggggcgtcgtgctgctgggtaatattctcgggacaggtat

SEQ ID NO: 577524 - DNA, 75 bp, synthetic construct
  source 1..75: mol_type = other DNA
gttatgccctgatgcaggggcagacttttgacaaatctgcttatccgaaacttgcggccgcttatccgtcaggcg

SEQ ID NO: 577525 - DNA, 75 bp, synthetic construct
  source 1..75: mol_type = other DNA
aatgaacgagccatccactcaataatgatgagtaataagggcgatgatttgcgctctgtgttctatgttgatggc

SEQ ID NO: 577526 - DNA, 75 bp, synthetic construct
  source 1..75: mol_type = other DNA
atggctctggacctcgacacactcggcttatcggcaacggtaaccgctgaggggataagtgcgcctgattatcag

SEQ ID NO: 577527 - DNA, 75 bp, synthetic construct
  source 1..75: mol_type = other DNA
tcaaacattgatattgcctatgatgcttctgcgtcctgtagcaccgcgaatatcagtatcacggtgacctcatga

SEQ ID NO: 577528 - DNA, 75 bp, synthetic construct
  source 1..75: mol_type = other DNA
tactgtgctggtgacggccacatgtgcgaatagcggttcggttgcggcgctggccgggactattaccactatcaa

SEQ ID NO: 577529 - DNA, 75 bp, synthetic construct
  source 1..75: mol_type = other DNA
accttcctgaaaaccaaaaacggtaaaaagcgaaccgtgccgatttctgaggaactggagaaaaaagttaaagag

SEQ ID NO: 577530 - DNA, 75 bp, synthetic construct
  source 1..75: mol_type = other DNA
atgtcagaccgcaggggggcggaaggaaagcggattcgaaaaatctttgccctgaaatcaaaggctcaggagttt

SEQ ID NO: 577531 - DNA, 75 bp, synthetic construct
  source 1..75: mol_type = other DNA
aaacagggcgtcacggtgcagggcagcccccaccaggggcggtcgtgattgtcgtcgggaagtgttgtcgtcgtg

SEQ ID NO: 577532 - DNA, 75 bp, synthetic construct
  source 1..75: mol_type = other DNA
tcaagaccagcgacaccgggccactgttcaaagttgactatgaaaacttctgcgaacggctcaggttggttaagc

SEQ ID NO: 577533 - DNA, 75 bp, synthetic construct
  source 1..75: mol_type = other DNA
aaacgggaaaaagcgtactgttccaatttctgccgaactggaaaagctcatcaaaaaggaggcaagcgcgaaact

SEQ ID NO: 577534 - DNA, 75 bp, synthetic construct
  source 1..75: mol_type = other DNA
aggcaggctttttaatgccagttactacaaagtgcgtaacgctctcagggaagtaaaacccgatttacctgacgg

SEQ ID NO: 577535 - DNA, 75 bp, synthetic construct
  source 1..75: mol_type = other DNA
tatgattgcgtgatgcctgtttatcaattccggcgtgatttcacgctggtaggccatcgtaaagccgttaatcag

SEQ ID NO: 577536 - DNA, 75 bp, synthetic construct
  source 1..75: mol_type = other DNA
gataactacggcggcacggtaacgattaaaagcgtggcgggacggtgcgttacttaccgccgtgatgggtacagc

SEQ ID NO: 577537 - DNA, 75 bp, synthetic construct
  source 1..75: mol_type = other DNA
gataactacggcggcacggtaacgattaaaagtattgccggacggtgcgttacttaccgccgtgatgggtacagc

SEQ ID NO: 577538 - DNA, 75 bp, synthetic construct
  source 1..75: mol_type = other DNA
cgatgatctggcagcctgagttcacagataaaacactctccaggaaacccggggcggttcactatcaggggcatg

SEQ ID NO: 577539 - DNA, 75 bp, synthetic construct
  source 1..75: mol_type = other DNA
cgacctgctggaaatagtggatctgatgtaccaacgaggctcaatcatcgtagtgagccagttgccggtggaaaa

SEQ ID NO: 577540 - DNA, 75 bp, synthetic construct
  source 1..75: mol_type = other DNA
ctgcttctggatgactgggggctggaacctctctcatcagaacagcgtagcgacctgctggaaatagtggatctg

SEQ ID NO: 577541 - DNA, 75 bp, synthetic construct
  source 1..75: mol_type = other DNA
gctttgactgatgatgaccgcagagttgtagtcctcagcctgaatacaggtgcgaggtggggggaagccagcaat

SEQ ID NO: 577542 - DNA, 75 bp, synthetic construct
  source 1..75: mol_type = other DNA
cgatagcggtactaacaatattggcttagaacaaagcggtcaaatctctctgaatactggatctactaaagtagt

SEQ ID NO: 577543 - DNA, 75 bp, synthetic construct
  source 1..75: mol_type = other DNA
ccgaaaggtgtaaacgttgtagcttatcgtcgaaatactaataatgaatttgaaacctttgcgatcaatacttct

SEQ ID NO: 577544 - DNA, 75 bp, synthetic construct
  source 1..75: mol_type = other DNA
cacagacggcgggtaaaaaaccaacgccggaacaattatcacagggtgaaatcgccttacagttggcggatcatg

SEQ ID NO: 577545 - DNA, 75 bp, synthetic construct
  source 1..75: mol_type = other DNA
cgctcagaaacctataacgaattcgatctccgactgcgtaagcatctctctctggcagaggaaagcagctggtag

SEQ ID NO: 577546 - DNA, 75 bp, synthetic construct
  source 1..75: mol_type = other DNA
ctctgatgtaactcgtgaccgtgctccattcttggttaacatggatagtattaaggggtctggtgcatatttccc

SEQ ID NO: 577547 - DNA, 75 bp, synthetic construct
  source 1..75: mol_type = other DNA
tggacaatcccgcgactatttccgttttaaccattggggtgatagcaataacgctcgcgacaacattctatatct

SEQ ID NO: 577548 - DNA, 75 bp, synthetic construct
  source 1..75: mol_type = other DNA
atgcagtcgatccaatttaaacgcacacaaacggctggtaaaaaaccaacgccggaacaattatcacagggtgaa

SEQ ID NO: 577549 - DNA, 75 bp, synthetic construct
  source 1..75: mol_type = other DNA
tttttccgtattcatggtggtaatggttacagcgttacggcatatgatcaggttgacgtagtagaaattcttctg

SEQ ID NO: 577550 - DNA, 75 bp, synthetic construct
  source 1..75: mol_type = other DNA
aaagttaataccactaacaccaacgttagcaacttaactaaaactgttactgcaaataaaaccgatgcagataac

SEQ ID NO: 577551 - DNA, 75 bp, synthetic construct
  source 1..75: mol_type = other DNA
aaactaaattcttcggtgatttggaatctgctggtctgattcgctggggtaagggtacagctacttctagtttca

SEQ ID NO: 577552 - DNA, 75 bp, synthetic construct
  source 1..75: mol_type = other DNA
agaactttagctataagatgtatcacgaaggtgataagccgactcctggcgaaatcggtgcatacactaaagcag

SEQ ID NO: 577553 - DNA, 75 bp, synthetic construct
  source 1..75: mol_type = other DNA
ctcaatgcttcaatcactgctggcgacaccgcagccaacaaacgaattgatgctttgactaccacagtaggtaac

SEQ ID NO: 577554 - DNA, 75 bp, synthetic construct
  source 1..75: mol_type = other DNA
ctgccagcggcaaaactcgcactaaattcatgcgcggtgatatttaccgcgaccagtacggcggcacggtaatga

SEQ ID NO: 577555 - DNA, 75 bp, synthetic construct
  source 1..75: mol_type = other DNA
tggcgaaagccctgttcaccaaagggttgaagatgaccaagcaagagctaaaagaagagtacaaaaatcaggaag

SEQ ID NO: 577556 - DNA, 75 bp, synthetic construct
  source 1..75: mol_type = other DNA
ggctgttttccagtgaacatctggcggaaacgggaaagatgacggtgaagtctgtggtggtgctggtgatgctgt

SEQ ID NO: 577557 - DNA, 75 bp, synthetic construct
  source 1..75: mol_type = other DNA
cgaagccgaatggcgggatttacggcggattttgttgcaacacagagacgcaaagataaagatgacggcaaagca

SEQ ID NO: 577558 - DNA, 75 bp, synthetic construct
  source 1..75: mol_type = other DNA
agtttggtcatcggccggtagcggtggtggagtatgaccagcaaaccgttgatcttggcgaatgggtgaaagata

SEQ ID NO: 577559 - DNA, 75 bp, synthetic construct
  source 1..75: mol_type = other DNA
ctgtactcacgcttcgctggtgccgacgcagctctggcgtttgctggttaaccgtagttcagtttccctgaaagc

SEQ ID NO: 577560 - DNA, 75 bp, synthetic construct
  source 1..75: mol_type = other DNA
caatttgcgctggtgccggatggggaaaacacgtttccggcattaacgtcgctgcacattcagctggttgaaggc

SEQ ID NO: 577561 - DNA, 75 bp, synthetic construct
  source 1..75: mol_type = other DNA
gcgtctcctggcgcgcacagtggctttccttgctgattcatgggctggttgccgctgttattttactcatgccct

SEQ ID NO: 577562 - DNA, 75 bp, synthetic construct
  source 1..75: mol_type = other DNA
gcaggcagcgcaacgaagcaagcccaccagcagggagaaagcacgcaccaatattcagaagatgaaaaacatgat

SEQ ID NO: 577563 - DNA, 75 bp, synthetic construct
  source 1..75: mol_type = other DNA
atatgctgacggcgatggcagaacagaagatgctgagcgtggtaggaaaactggtcgtactggtcgatagcagca

SEQ ID NO: 577564 - DNA, 75 bp, synthetic construct
  source 1..75: mol_type = other DNA
cgttggcaagggcaggagtggagcatcgtcaaagcgccgtggatgattaagagcggcatgatgctgcgtttacgt

SEQ ID NO: 577565 - DNA, 75 bp, synthetic construct
  source 1..75: mol_type = other DNA
tctgatggcggtaaacggcaacatttatggctggcagccgacagcatggacgaagccgaatggcgggatttacgg

SEQ ID NO: 577566 - DNA, 75 bp, synthetic construct
  source 1..75: mol_type = other DNA
tgtggctggcagccgacagtatggatgaagctgaatggcgggatttgcggcgaattttgttacaacaagagatac

SEQ ID NO: 577567 - DNA, 75 bp, synthetic construct
  source 1..75: mol_type = other DNA
ttgtacccacgcgtcgttggtaccgacgcagctttggcgtttgctggttaaccacagttctgtgtccctgaaagc

SEQ ID NO: 577568 - DNA, 75 bp, synthetic construct
  source 1..75: mol_type = other DNA
gttaaaaacgcgcaaatagcctcagtaaaagtgcagtatcttgataaacagaaaaaagctggctgtaatgaacat

SEQ ID NO: 577569 - DNA, 75 bp, synthetic construct
  source 1..75: mol_type = other DNA
atgttcagaccttttttaaactctcttatgctcggcagtttgttttttccttttattgccattgcaggaagcacc

SEQ ID NO: 577570 - DNA, 75 bp, synthetic construct
  source 1..75: mol_type = other DNA
gtagaaatgaactgcccacagaatggttctgttccgggcaaaacctattccagcaaagcgttaatgagcggcaat

SEQ ID NO: 577571 - DNA, 75 bp, synthetic construct
  source 1..75: mol_type = other DNA
acaggcagcgccccgcagtaagccaaccagcagggagaaagcacgcgccaatattcaggaaataagaaagatgtt

SEQ ID NO: 577572 - DNA, 75 bp, synthetic construct
  source 1..75: mol_type = other DNA
ctgccagtggcaacactcaccctaaatttatgcgcggtgatatttaccgcgaccagtacggcggcacggtaatga

SEQ ID NO: 577573 - DNA, 75 bp, synthetic construct
  source 1..75: mol_type = other DNA
agttccggcgtgatttttcactgatacaggccacaccacgcaaacagcccaccagcaacgcaaaggcacgggcaa

SEQ ID NO: 577574 - DNA, 75 bp, synthetic construct
  source 1..75: mol_type = other DNA
gatgactggttgctctctttgccgctgtttcatgtttccggtcaggggattttgtggcgctggttatacgctggc

SEQ ID NO: 577575 - DNA, 75 bp, synthetic construct
  source 1..75: mol_type = other DNA
atgatcttctctgactggccgtggcgtcactggcggcaagtgcggggagaagccatcgccttacgtctcaatgat

SEQ ID NO: 577576 - DNA, 75 bp, synthetic construct
  source 1..75: mol_type = other DNA
aaaacacgtttccggcgttaacgtcgctgcatattcagcaggttgaaggcgtacatgccgctgcgtggcagccga

SEQ ID NO: 577577 - DNA, 75 bp, synthetic construct
  source 1..75: mol_type = other DNA
ttatgctcggcagcctggtttttcctttctttgcaacagcggaaagcaatgcgcaaggtggcgtgattcattttt

SEQ ID NO: 577578 - DNA, 75 bp, synthetic construct
  source 1..75: mol_type = other DNA
acagaacgtaacacgcggtaagcccaccagcagggaaaaagcacgggaaaatattaagaaaataaaaagcatgct

SEQ ID NO: 577579 - DNA, 75 bp, synthetic construct
  source 1..75: mol_type = other DNA
gcgggcagggcattcgttgcttttgcggctatggcctgacagagttcgcctctacggtgtgtgcgaaagaagccg

SEQ ID NO: 577580 - DNA, 75 bp, synthetic construct
  source 1..75: mol_type = other DNA
agcgtattgccgtgggttacaggtttgacgttggcagggatcttaccgctgttgtttacgcgtgtcctgaatcag

SEQ ID NO: 577581 - DNA, 75 bp, synthetic construct
  source 1..75: mol_type = other DNA
caggcgcggcttggcgtgaacggctgtattatctcgggaatcgttctgggttctttgtatggtctgatgccgctg

SEQ ID NO: 577582 - DNA, 75 bp, synthetic construct
  source 1..75: mol_type = other DNA
agagaacagcttgatattttatttgagatagtcagacctggctctgaacttaatccttttgctgatgaagttcag

SEQ ID NO: 577583 - DNA, 75 bp, synthetic construct
  source 1..75: mol_type = other DNA
atgcagcaaacgatgagttttctgacccacgatctgacccaaatgatgccgcgtccggtaagaggcgatcagggc

SEQ ID NO: 577584 - DNA, 75 bp, synthetic construct
  source 1..75: mol_type = other DNA
ctcgaacggttagcctggccgctgaccgatgccgcaggcagcgtgaagccgacaatgcaaaagttgattccggcg

SEQ ID NO: 577585 - DNA, 75 bp, synthetic construct
  source 1..75: mol_type = other DNA
cttatatgatggtttattatgtggggacgtttttaggccagttactggtcagcaaagtgtcgactgagctgatga

SEQ ID NO: 577586 - DNA, 75 bp, synthetic construct
  source 1..75: mol_type = other DNA
ctggcgggcgtcaccgggcgcgcggaagtgatggacgccgtcgcaccgggcggactgggtggcacctatgccggt

SEQ ID NO: 577587 - DNA, 75 bp, synthetic construct
  source 1..75: mol_type = other DNA
tgtttgcgatggagcaaatgggcgttgcgccggatcttaccacctttgcgaaatcgatcgcgggcggcttcccgc

SEQ ID NO: 577588 - DNA, 75 bp, synthetic construct
  source 1..75: mol_type = other DNA
ctggcgggtgtcaccgggcgcgcggaagtgatggatgccgtcgctccaggcggcctgggcggcacctatgcgggt

SEQ ID NO: 577589 - DNA, 75 bp, synthetic construct
  source 1..75: mol_type = other DNA
gtgataaaccggacagtatcatggaccggttttcccggtaatctgtatttgcaaggttggtttcactatggacat

SEQ ID NO: 577590 - DNA, 75 bp, synthetic construct
  source 1..75: mol_type = other DNA
cgagcattgatgctcaccttctgtggcttgaagcagagctgaagcgtcttgagaagcagataaaagacctgacag

SEQ ID NO: 577591 - DNA, 75 bp, synthetic construct
  source 1..75: mol_type = other DNA
ccacgggttctgaagcggtggaaaacgcagtgaaaatcgcccgcgccgccaccaaacgcagcgggaccatcgcct

SEQ ID NO: 577592 - DNA, 75 bp, synthetic construct
  source 1..75: mol_type = other DNA
atggcgcagcaggtgactaacggcgtcacacgcgtgaatagtgccgtcgccgatcacgatcaaaaactaaacctc

SEQ ID NO: 577593 - DNA, 75 bp, synthetic construct
  source 1..75: mol_type = other DNA
ctggaaaacactcgatccgcgtgtagtaaaaggcgactggtttaacgttggcggtaaagtatatggtacgccgta

SEQ ID NO: 577594 - DNA, 75 bp, synthetic construct
  source 1..75: mol_type = other DNA
gtaccaggcggtgctgaaagtgctgcgcgctcaacacagtttgatccatcgctactggcatgacactaccgtgca

SEQ ID NO: 577595 - DNA, 75 bp, synthetic construct
  source 1..75: mol_type = other DNA
ggcgtccggtgatgcttcactgcgtttgattatgggtaaacgtgtgcagccgattaataccgcactgatccccaa

SEQ ID NO: 577596 - DNA, 75 bp, synthetic construct
  source 1..75: mol_type = other DNA
tgaacggcggtgaaaaactgcttgtgagtcaggccaatatgacaggcgaagaactgcctgccacgctcacgcccg

SEQ ID NO: 577597 - DNA, 75 bp, synthetic construct
  source 1..75: mol_type = other DNA
gtggttgcttctagtgcctggccgtatcaggccaacgcgttgaaagccgaaggccaaccaatcgccacagtattc

SEQ ID NO: 577598 - DNA, 75 bp, synthetic construct
  source 1..75: mol_type = other DNA
aaaagcaataaaggtcgcgtacaagcctatgatggccctatttatattgccgatgcagcattgttcgtcaaagct

SEQ ID NO: 577599 - DNA, 75 bp, synthetic construct
  source 1..75: mol_type = other DNA
accagctttgatagctggcttgacgagcacgggtatgacaaaacgaatgccagaaataaccgtaccatctgggcg

SEQ ID NO: 577600 - DNA, 75 bp, synthetic construct
  source 1..75: mol_type = other DNA
ttatttttaaaaatggtgagaggttctgtcatgtgattgataagaaaacaggagaaccaatttattatcctaatc

SEQ ID NO: 577601 - DNA, 75 bp, synthetic construct
  source 1..75: mol_type = other DNA
aatttgacctcaatttactggtcatatttgaatgtatttatcaacatctcagcattagtaaagcggcagaatcat

SEQ ID NO: 577602 - DNA, 75 bp, synthetic construct
  source 1..75: mol_type = other DNA
atatcaggcggtgctgaaagtacttcgcgatcaacatggtttgatccatcgctactggcatgacacctctgtaca

SEQ ID NO: 577603 - DNA, 75 bp, synthetic construct
  source 1..75: mol_type = other DNA
gcgaaccaaagcggaaacctgacgtagatggggtcgtctcagaaaacggaatctatggtcactcccgtttttgca

SEQ ID NO: 577604 - DNA, 75 bp, synthetic construct
  source 1..75: mol_type = other DNA
ccgtaaaatcacaccgctggtgtacgatctggacttagagcggctggccgtacgctgggcagaataccagggcct

SEQ ID NO: 577605 - DNA, 75 bp, synthetic construct
  source 1..75: mol_type = other DNA
agccgtatctggagttgtgcgagattatgaatcagaaggtgccgggcgatttcgccaaaaaaacgctgttggtca

SEQ ID NO: 577606 - DNA, 75 bp, synthetic construct
  source 1..75: mol_type = other DNA
ggcatttcaacacaggactccctcgacgccatcgaacgcttgtttaaatcagacatcgaagcgaagcaggtcgcg

SEQ ID NO: 577607 - DNA, 75 bp, synthetic construct
  source 1..75: mol_type = other DNA
taacgcccttgccccagtgagcgggcaggctaaaaccgcattcttcactaccggtgcggaagcggtggaaaacgc

SEQ ID NO: 577608 - DNA, 75 bp, synthetic construct
  source 1..75: mol_type = other DNA
gcgacgatcaaattgcgcaactgggattatgattcactggatgcgattacccgtggcgaagtggatattggtttt

SEQ ID NO: 577609 - DNA, 75 bp, synthetic construct
  source 1..75: mol_type = other DNA
gaaccggacgtgatgtccgccctgcaccgacggaggcgcacgcgatggcacagcacgccatgaaactgtacaacg

SEQ ID NO: 577610 - DNA, 75 bp, synthetic construct
  source 1..75: mol_type = other DNA
cgcgacggggagaatgcggaggatgacgaggatcgtcgcgaaagccgtaaggcgcgctcccgtgcggatgacgac

SEQ ID NO: 577611 - DNA, 75 bp, synthetic construct
  source 1..75: mol_type = other DNA
aaaagagctggttgccgccattcgccgcctgtgcgacgagcacggtattgtgatgattgccgatgaagtgcaaag

SEQ ID NO: 577612 - DNA, 75 bp, synthetic construct
  source 1..75: mol_type = other DNA
agacgttctatcacaacagccagtctgccagccagattatccgtcagaatgtcaccatcaatgccctgagaagtg

SEQ ID NO: 577613 - DNA, 75 bp, synthetic construct
  source 1..75: mol_type = other DNA
gcaggtatcaaaaatgatgttcaccaatcggttgaacacatgtttagcgaaaaccagcaagctcataaggatagg

SEQ ID NO: 577614 - DNA, 75 bp, synthetic construct
  source 1..75: mol_type = other DNA
agatgagcgagaatctctctcagcagtttgctaactttgttcagcgtcgcgctccacaggatgccgaggctattc

SEQ ID NO: 577615 - DNA, 75 bp, synthetic construct
  source 1..75: mol_type = other DNA
ggtgccattcctgaccctgaaacgattatttggtggatgcagcaaagcgaagaggcccgaaaggccatttgcgat

SEQ ID NO: 577616 - DNA, 75 bp, synthetic construct
  source 1..75: mol_type = other DNA
atacagcgctttttgacagaatttttactcttgagttacaggtcggttttcttctcccaaaaataatcaaagcca

SEQ ID NO: 577617 - DNA, 75 bp, synthetic construct
  source 1..75: mol_type = other DNA
ctatggtcagcattccggaagtattgacaatatgaccgcacatgcaggcattaaacaggatgttggtaagagcgt

SEQ ID NO: 577618 - DNA, 75 bp, synthetic construct
  source 1..75: mol_type = other DNA
ttatgcgggacggctatccgcatccctgcatgcgaccgatgtacaactttctgggaaaattcaaacccgaacccc

SEQ ID NO: 577619 - DNA, 75 bp, synthetic construct
  source 1..75: mol_type = other DNA
tcacacgcgtgaatagcgccgtcgccggacacgatcaaaaactaaacctcatgcagcaaacgatgagttttctga

SEQ ID NO: 577620 - DNA, 75 bp, synthetic construct
  source 1..75: mol_type = other DNA
cggacgcagcggacagtgtggagccgacaatacaaaaacttttccaggcggatttgctccgtttgcagttccacg

SEQ ID NO: 577621 - DNA, 75 bp, synthetic construct
  source 1..75: mol_type = other DNA
cgttactggaaatgctggtggcgatagccatttttacctcgctggcgttaatgacacagcaggtgacaagcggcg

SEQ ID NO: 577622 - DNA, 75 bp, synthetic construct
  source 1..75: mol_type = other DNA
gtttacggaaaaagtgcaaaaaagaaacaatctaatatttcttctattacattgctttggcctgagggcaggtga

SEQ ID NO: 577623 - DNA, 75 bp, synthetic construct
  source 1..75: mol_type = other DNA
tgaaatttcagattatattatgaatgatcgaagaaagataaaaaattctaacaaacatgatttcctgtttattac

SEQ ID NO: 577624 - DNA, 75 bp, synthetic construct
  source 1..75: mol_type = other DNA
gattcgctccgtttgcagttctatgatggtacgcgctggcaggagaactggtcgtcagtacaggcgatccctgtg

SEQ ID NO: 577625 - DNA, 75 bp, synthetic construct
  source 1..75: mol_type = other DNA
aagacaaggtgtatggtgttggttagctatagctgtgatgctagtgtatccgaacttaagaaatataacagttgt

SEQ ID NO: 577626 - DNA, 75 bp, synthetic construct
  source 1..75: mol_type = other DNA
ttggtatgatagctagttttgtattacttttgatcttaaaaatgatcccgttatataaaattctaaaaaaggttt

SEQ ID NO: 577627 - DNA, 75 bp, synthetic construct
  source 1..75: mol_type = other DNA
gattaagagggattactctacttactaaatttattttcattgttttgcttgctcgacttttaccatcaacagatt

SEQ ID NO: 577628 - DNA, 75 bp, synthetic construct
  source 1..75: mol_type = other DNA
gcagtgcgcatgaccctgcattcgccgcaatggggcgagattgaacgcatctggttgttacgcgggccgcaatta

SEQ ID NO: 577629 - DNA, 75 bp, synthetic construct
  source 1..75: mol_type = other DNA
ccgacgcagcaggcagcgtgaagccgacaatgcaaaagttgattccggcggattcgctccgcttgcagttctacg

SEQ ID NO: 577630 - DNA, 75 bp, synthetic construct
  source 1..75: mol_type = other DNA
ccttattatttggcattcatgctttcatctgaatatggtcaaaaactattgctatcattaaatgatggtggtgct

SEQ ID NO: 577631 - DNA, 75 bp, synthetic construct
  source 1..75: mol_type = other DNA
gcggcaggcagaggatatgctcgcgcttatgcgtaagtctctgggttctcttcctgttgttcccctaagtgttga

SEQ ID NO: 577632 - DNA, 75 bp, synthetic construct
  source 1..75: mol_type = other DNA
acagagaaggactccctgaaagacgaagttctgcattctcttctgccacgggctttttcaaagttttctgttatc

SEQ ID NO: 577633 - DNA, 75 bp, synthetic construct
  source 1..75: mol_type = other DNA
gctgacaggccgcgtgaataatgaaggcacgcatttcgaacagcggtatcgtgctaccgctaaacggtggctacc

SEQ ID NO: 577634 - DNA, 75 bp, synthetic construct
  source 1..75: mol_type = other DNA
caagcctgcattaaatcagatgggagccagccagagaggggaagtgttacttgaacattatggaggagcactggc

SEQ ID NO: 577635 - DNA, 75 bp, synthetic construct
  source 1..75: mol_type = other DNA
caatataaaccggcagagagcgcagccaaagtacagtgcccagttttgattgttattgccggccaggatagtgtt

SEQ ID NO: 577636 - DNA, 75 bp, synthetic construct
  source 1..75: mol_type = other DNA
gaaaaaatatcttgattaccggttcagcacagggcattggctttttactggcgaccggcctgggtaaatatggcg

SEQ ID NO: 577637 - DNA, 75 bp, synthetic construct
  source 1..75: mol_type = other DNA
atggcaggactgaaattacaggcagtaaccaaaagctgggatggtaaaacccaggtcattaaaccgctgaccctt

SEQ ID NO: 577638 - DNA, 75 bp, synthetic construct
  source 1..75: mol_type = other DNA
cagcccgaaaccgcgccagcgggttcggcggagactggcgggtgcgccagcagctgcccgtcggagtcgggcctg

SEQ ID NO: 577639 - DNA, 75 bp, synthetic construct
  source 1..75: mol_type = other DNA
ttcacagtgacagggtcattctggctatgaaggactatctggtaggtgggcactcccgtaaggaggtctgcgaga

SEQ ID NO: 577640 - DNA, 75 bp, synthetic construct
  source 1..75: mol_type = other DNA
ctaccgtcagtatgccgggcgtaaaatgactctcggcattcgcccggaacatatagcgctaagctcgcaggcaga

SEQ ID NO: 577641 - DNA, 75 bp, synthetic construct
  source 1..75: mol_type = other DNA
acgctggagatcctcggcgcagataacctggcgcacggacgctggggcgaacagaagctggtggtgcgactggcg

SEQ ID NO: 577642 - DNA, 75 bp, synthetic construct
  source 1..75: mol_type = other DNA
agcggcgcgcattctggagctggacggtctgctcaaacgtcgcccgcgcgagctttccggcggtcagcgccagcg

SEQ ID NO: 577643 - DNA, 75 bp, synthetic construct
  source 1..75: mol_type = other DNA
tcgtaaagcggatcgcgtactggcggcattattcatggtactggcgaaccggtacgactggcagttattccttga

SEQ ID NO: 577644 - DNA, 75 bp, synthetic construct
  source 1..75: mol_type = other DNA
gtgattgataacgctctggatgcaggaaatccaatcccggaagccctgcaaactcgcaccgaattgcgtcaaaaa

SEQ ID NO: 577645 - DNA, 75 bp, synthetic construct
  source 1..75: mol_type = other DNA
atattaaaaaccattaaccaaaccctggaagaaatgtcacaaaccctgttcaaatcctggtttgtggattttgat

SEQ ID NO: 577646 - DNA, 75 bp, synthetic construct
  source 1..75: mol_type = other DNA
gcgatgcagctgggcgacgccattaaaatcatgaacgacaggctgaaaccgcaggttaatgcggacagcttcagc

SEQ ID NO: 577647 - DNA, 75 bp, synthetic construct
  source 1..75: mol_type = other DNA
acagtacgcatcatcttcggtattgccactattgttgtggctggatttatcgcctggtcgcaggtaagaagacac

SEQ ID NO: 577648 - DNA, 75 bp, synthetic construct
  source 1..75: mol_type = other DNA
atgatcatcgatctgcatgattacgacatccttcgacctttggttgaggcaatcattcgccacgagaatggccga

SEQ ID NO: 577649 - DNA, 75 bp, synthetic construct
  source 1..75: mol_type = other DNA
tctatgtcggtagagagccgattaaagaagttatagatgaaataaatagtttaaagaaaagtggtaagttgattc

SEQ ID NO: 577650 - DNA, 75 bp, synthetic construct
  source 1..75: mol_type = other DNA
tactcataaacatgaaattgatgccgccgttgaacatatcgaaaaggacatcggccccattgatgtgctggtgaa

SEQ ID NO: 577651 - DNA, 75 bp, synthetic construct
  source 1..75: mol_type = other DNA
aatatagactcaggtgttgcagaaaaattcactcctaatgtgattagaattaacaaagatggtgtagctgaaaag

SEQ ID NO: 577652 - DNA, 75 bp, synthetic construct
  source 1..75: mol_type = other DNA
ccagtgaattaccgttcagcccaccagcagagggggaaacgctggcaacacatgcgccgaatttctggaagtggc

SEQ ID NO: 577653 - DNA, 75 bp, synthetic construct
  source 1..75: mol_type = other DNA
ggtaagcatcaccgcccaccagcgggttcgcgttagtgtcaggatctcccgttcatttcaggtaagtctgctgtc

SEQ ID NO: 577654 - DNA, 75 bp, synthetic construct
  source 1..75: mol_type = other DNA
ttcggattaattcgcaaaagaaggtgctggacgtgtggagtatctataaatgcacacactgtgattacacctgga

SEQ ID NO: 577655 - DNA, 75 bp, synthetic construct
  source 1..75: mol_type = other DNA
cgcgcaacaggtgaaaccgaccattctggcgcatcaggagtttaaggattttgccacccgcagcctgctaccgtt

SEQ ID NO: 577656 - DNA, 75 bp, synthetic construct
  source 1..75: mol_type = other DNA
ggctctatgtctgaaatgcatttttttttactgataggtatttcttctattcacagtgacagggtcattctggct

SEQ ID NO: 577657 - DNA, 75 bp, synthetic construct
  source 1..75: mol_type = other DNA
atgaatgtaaaaaaatcccatatcattttctttttacttttatcacaaccattaggtttattatatgcctgtata

SEQ ID NO: 577658 - DNA, 75 bp, synthetic construct
  source 1..75: mol_type = other DNA
aatttgtatgacaacatgcaaagcaatggattagagcctgactggtatttgaaacctgaattattaatgatgctt

SEQ ID NO: 577659 - DNA, 75 bp, synthetic construct
  source 1..75: mol_type = other DNA
acattggctacgaccagagttggcctgtcgattttatgtgtggtgtgctgacatgtgctcgccgttttcgtacat

SEQ ID NO: 577660 - DNA, 75 bp, synthetic construct
  source 1..75: mol_type = other DNA
gatgatccgctctttgtgaactccccgttgggtctgacgcccacaccgctgatggtcagcatggagcaaaatctg

SEQ ID NO: 577661 - DNA, 75 bp, synthetic construct
  source 1..75: mol_type = other DNA
gttacgactcactggatgccattatccgtggcgaagtggatattggtttttctggtcgggaaagtcatccacatt

SEQ ID NO: 577662 - DNA, 75 bp, synthetic construct
  source 1..75: mol_type = other DNA
tcggatatatcagcgcatggggctgtaagaccatttccgaggtgaaagcctaccgccagaatttcagccagcgtg

SEQ ID NO: 577663 - DNA, 75 bp, synthetic construct
  source 1..75: mol_type = other DNA
tttatcagaacgataaaactaccaaagttgattatctgcactccatcggtgcgaagtacgacttcaaaaataact

SEQ ID NO: 577664 - DNA, 75 bp, synthetic construct
  source 1..75: mol_type = other DNA
tatcaggccaacgccctgaaagccgaaggccagcctgtcgctaccgttttcccgaaggagggcgttaccggttgg

SEQ ID NO: 577665 - DNA, 75 bp, synthetic construct
  source 1..75: mol_type = other DNA
ccaccatgctgcatagcgaagcgaaacatccggtttgcgcctacaaatggatgaactggtcattaacgccaaaag

SEQ ID NO: 577666 - DNA, 75 bp, synthetic construct
  source 1..75: mol_type = other DNA
cggcggtatctattactggcagcgtgaacgcgaccgtaaagatgttaccgacggcgacaaatataaaaccaacct

SEQ ID NO: 577667 - DNA, 75 bp, synthetic construct
  source 1..75: mol_type = other DNA
ccgtggcatctggaaatggatgagttttatcagaacgataaaactaccaaagttgattatctgcactccctcggg

SEQ ID NO: 577668 - DNA, 75 bp, synthetic construct
  source 1..75: mol_type = other DNA
cagctaccagttctacggtacacgcgacaaagttgacgatcgcagcgtcaacgatctttatgacggtacagcatg

SEQ ID NO: 577669 - DNA, 75 bp, synthetic construct
  source 1..75: mol_type = other DNA
tttagcgatttaccctgcgtctggctgcgtaaagatcatccggtgctgaatgaagcgtggaacctggactcgttt

SEQ ID NO: 577670 - DNA, 75 bp, synthetic construct
  source 1..75: mol_type = other DNA
atcggcgcagtgaccgccgagggtaaaaaaacaggcatgaaagccctgctatctgcccagtcacagctcggcgtt

SEQ ID NO: 577671 - DNA, 75 bp, synthetic construct
  source 1..75: mol_type = other DNA
tttttactgataggtatttcctctattcacagtgacagagttattctcgctatgaaggattatctggtcagtggt

SEQ ID NO: 577672 - DNA, 75 bp, synthetic construct
  source 1..75: mol_type = other DNA
agatgtgaaggtgaacttgcctgcttctaccagcacgccgcagccgcgcccggaaaaaccggtttatctgtcggt

SEQ ID NO: 577673 - DNA, 75 bp, synthetic construct
  source 1..75: mol_type = other DNA
gcaggacccggcaaccgatgcatgtctgcttaaccagaacgacgttaccacgcttatccgcaaagacggtttccg

SEQ ID NO: 577674 - DNA, 75 bp, synthetic construct
  source 1..75: mol_type = other DNA
actacacccgcacggcgcaggtgctgacggacacaatggcagaagcgcacatgtgggcagtggataaaccgctta

SEQ ID NO: 577675 - DNA, 75 bp, synthetic construct
  source 1..75: mol_type = other DNA
gacacgacacacaggcggttgccactgagctgctgagcgtggcgcagagcctgcgcggatttgcatatctgtccg

SEQ ID NO: 577676 - DNA, 75 bp, synthetic construct
  source 1..75: mol_type = other DNA
atctgcccagtcacagctcggggttaaaccgcgcattctcggcgtgccaggtcatgataacaaagccgttgctac

SEQ ID NO: 577677 - DNA, 75 bp, synthetic construct
  source 1..75: mol_type = other DNA
cgtatggctgcaagacagtgcaggaggcgatcacttaccgcgaaaacttcagtcagcgcgaagggatgctgatct

SEQ ID NO: 577678 - DNA, 75 bp, synthetic construct
  source 1..75: mol_type = other DNA
agtgcttacctaccgcgaaaacttcagtcagcgtgaagggatgctgatctggccggattttatcagctgggacac

SEQ ID NO: 577679 - DNA, 75 bp, synthetic construct
  source 1..75: mol_type = other DNA
ttatggtggcggcaccgttagcgacggtagatgtgaaggtgaacttgcctgcttctaccagcacgccgcagccgc

SEQ ID NO: 577680 - DNA, 75 bp, synthetic construct
  source 1..75: mol_type = other DNA
ttacccagcagcgaccgcgctggacgccgatgaatctgcatcaggcgcaaaatcacgatgaaaaggtacgtatcg

SEQ ID NO: 577681 - DNA, 75 bp, synthetic construct
  source 1..75: mol_type = other DNA
tgatgcaagcaactgtcttaatgggaggcggttatctgaaaaaagtacgggataatattatggaatcgcccatct

SEQ ID NO: 577682 - DNA, 75 bp, synthetic construct
  source 1..75: mol_type = other DNA
tttctgaattatatactccccggaaaactggatgctgcacgcaattcactcattgttcagtggcattactactag

SEQ ID NO: 577683 - DNA, 75 bp, synthetic construct
  source 1..75: mol_type = other DNA
aaaatccaacagctgtttgctatgaagtaagaaacgcagaagtagctgtccgccgtcttacccctgtcgaatgtg

SEQ ID NO: 577684 - DNA, 75 bp, synthetic construct
  source 1..75: mol_type = other DNA
accaatagaagatgtttgccctggcgattacgtagtcagtcatctcgggcggttacaacaagtaaaaagagttgg

SEQ ID NO: 577685 - DNA, 75 bp, synthetic construct
  source 1..75: mol_type = other DNA
aaataaaccatcgataaaaactgtaagatttggtgatggttatgagcaacgaagtccaaatggacttaatcattc

SEQ ID NO: 577686 - DNA, 75 bp, synthetic construct
  source 1..75: mol_type = other DNA
tgcaaacttatccgttcattaaatcactggtgctcgggatcagcggcggtcaggactccacgcttgccggaaagc

SEQ ID NO: 577687 - DNA, 75 bp, synthetic construct
  source 1..75: mol_type = other DNA
gactgtgaagtattaatgtcaggtattgccgacggtattaactcggaaaatgcattcttatccgtaaatggggga

SEQ ID NO: 577688 - DNA, 75 bp, synthetic construct
  source 1..75: mol_type = other DNA
taccggattctttactaaatacggtgacggtggtactgacattaacccgctataccgtctgaacaagcgtcaggg

SEQ ID NO: 577689 - DNA, 75 bp, synthetic construct
  source 1..75: mol_type = other DNA
gagcaggcagcggtacatatggccgatggcctggcgcgcgcgaccggagaagtgggcgttgtgctggtgacatcg

SEQ ID NO: 577690 - DNA, 75 bp, synthetic construct
  source 1..75: mol_type = other DNA
cgctatctggggatggtgaagcagtggcaggacatgatctattccggccgtcattcacaatcttatatgcaatca

SEQ ID NO: 577691 - DNA, 75 bp, synthetic construct
  source 1..75: mol_type = other DNA
ctggcattgccaccgcttatatggattccattccattagttgtcctttccgggcaggtagcgacctcgttgatag

SEQ ID NO: 577692 - DNA, 75 bp, synthetic construct
  source 1..75: mol_type = other DNA
ttagcccggcatgaaggctataaatcttttttttgggtaagcgtacagcctgaaccgtctggtcagaatctgacg

SEQ ID NO: 577693 - DNA, 75 bp, synthetic construct
  source 1..75: mol_type = other DNA
tccagatctctcatccgcatgagctggaaagcaaacttagcgaggcgctggaacaggtgcgcaataatcgcctgg

SEQ ID NO: 577694 - DNA, 75 bp, synthetic construct
  source 1..75: mol_type = other DNA
ggtcaggttgcaacctcactgataggctatgacgcttttcaggagtgtgacatggtggggatttcccgcccggtg

SEQ ID NO: 577695 - DNA, 75 bp, synthetic construct
  source 1..75: mol_type = other DNA
agaggcctgttcagcgatgcagatgcgtaccctctggaccaggcatttcccctgctgatgaaacaactggaactc

SEQ ID NO: 577696 - DNA, 75 bp, synthetic construct
  source 1..75: mol_type = other DNA
ggccttatgtctgatgaggcggggactgtctttaatggttatgccctgaaggaattaccttttctgaacaaaatt

SEQ ID NO: 577697 - DNA, 75 bp, synthetic construct
  source 1..75: mol_type = other DNA
aattacagatgccagaatgacaatttcattgatggttcagccatcggtctttgaaagttacaaagcacgaaaagg

SEQ ID NO: 577698 - DNA, 75 bp, synthetic construct
  source 1..75: mol_type = other DNA
ggatgcgtaccatctggaccaggcctttccgctgctgatgaaacaactggagctcatgctcaccagcggtgaact

SEQ ID NO: 577699 - DNA, 75 bp, synthetic construct
  source 1..75: mol_type = other DNA
gtgacgccctgtttcggggcctgtctggtgcaggagggtaaccggttgcattaccttgccgaccgcgccggtatc

SEQ ID NO: 577700 - DNA, 75 bp, synthetic construct
  source 1..75: mol_type = other DNA
gccgatacccttggcagttgtggttacgtttatctgactgtttatccgacaccggcaaccgcaaccacctcataa

SEQ ID NO: 577701 - DNA, 75 bp, synthetic construct
  source 1..75: mol_type = other DNA
atttccctgatttcatcaaaaacgcaatatatgaagtacaacagcgtacacaggcgccactgtcattaatcagtg

SEQ ID NO: 577702 - DNA, 75 bp, synthetic construct
  source 1..75: mol_type = other DNA
agaggcctgttcagcgatgcagatgcgtaccctctggaccaggcgtttcctctgctgatgaaacaactgtaactc

SEQ ID NO: 577703 - DNA, 75 bp, synthetic construct
  source 1..75: mol_type = other DNA
agaggcctgttcagcgatgcagatgcgtaccctctggaccaggcttttcctctgctgatgaaacaactgaaactc

SEQ ID NO: 577704 - DNA, 75 bp, synthetic construct
  source 1..75: mol_type = other DNA
agaggcctgttcagcgatgcagatgcgtaccctctggaccaggcatttccgctgctgatgaaacaactgcaactc

SEQ ID NO: 577705 - DNA, 75 bp, synthetic construct
  source 1..75: mol_type = other DNA
agaggccggttcagcaatgcagatgcataccacctggaccaggcctttgcactgctgatgaaacaactggaactc

SEQ ID NO: 577706 - DNA, 75 bp, synthetic construct
  source 1..75: mol_type = other DNA
acattcccgcactttatccgccagatggaatcgatgctgaccaccggtgaagtcagcccccaacatgcccactgc

SEQ ID NO: 577707 - DNA, 75 bp, synthetic construct
  source 1..75: mol_type = other DNA
acaacgacagcccctggtggggactgccctgcaccgtgatgccctgtttcggcgcccgtctggtgcaggagggta

SEQ ID NO: 577708 - DNA, 75 bp, synthetic construct
  source 1..75: mol_type = other DNA
gagcaggcggcggtgcatatggccgatggtctggcgcgcgcgaccggggaagtcggcgtcgtgctggtaacgtcg

SEQ ID NO: 577709 - DNA, 75 bp, synthetic construct
  source 1..75: mol_type = other DNA
gaggatatagattttgagacaaaattatgggagatcccggcagaagtgatgaagatgaagcgacctcatattgat

SEQ ID NO: 577710 - DNA, 75 bp, synthetic construct
  source 1..75: mol_type = other DNA
cattattgagtttaatctccctgtggtcatcgcaaatctggatggtgataggaaggtggatcggaattttattcc

SEQ ID NO: 577711 - DNA, 75 bp, synthetic construct
  source 1..75: mol_type = other DNA
taaaccattactggatgcagaccactatactgtctctgtttcgttccagccaaaaattatcaaatatgctttaga

SEQ ID NO: 577712 - DNA, 75 bp, synthetic construct
  source 1..75: mol_type = other DNA
caaccatgccatctggcacggcttcgtgctcggcggcagcgtgtgccactttctggcgatctatttgtatattgg

SEQ ID NO: 577713 - DNA, 75 bp, synthetic construct
  source 1..75: mol_type = other DNA
catcaacgggcaaaaatgtggctgaagaaatttgaccactgcgccatttatctgttgattgccggaacctacacg

SEQ ID NO: 577714 - DNA, 75 bp, synthetic construct
  source 1..75: mol_type = other DNA
cgcaccgattcaaaattttatctctggtgacctatctggcgatgggctggctgtcgctggtggtaatttatgaaa

SEQ ID NO: 577715 - DNA, 75 bp, synthetic construct
  source 1..75: mol_type = other DNA
ttttcgccggaacgtttaatcatgcattattggaagatgccagcgaatgcagcgatcttcttaagctatataaaa

SEQ ID NO: 577716 - DNA, 75 bp, synthetic construct
  source 1..75: mol_type = other DNA
gaaagggcctgtcgagtggggggcattggggcaatgggctggcttttttgcgatgagtgaacgcaatcttgcccg

SEQ ID NO: 577717 - DNA, 75 bp, synthetic construct
  source 1..75: mol_type = other DNA
ccagagagggtatgcaccgacaattcacggtatttcccggggaacatcccggattagtatccgccagaacgggta

SEQ ID NO: 577718 - DNA, 75 bp, synthetic construct
  source 1..75: mol_type = other DNA
gtgacggatatttcaccgacagagcggcaggtatttccgctgacggcaggacggaatatgtttctggccggtctg

SEQ ID NO: 577719 - DNA, 75 bp, synthetic construct
  source 1..75: mol_type = other DNA
gttgcccgacaggccacagaggaacgaatcactcccccctggcccggactccctgaaacagacgcgttcatccgg

SEQ ID NO: 577720 - DNA, 75 bp, synthetic construct
  source 1..75: mol_type = other DNA
ggccgtttattgttatgcctgaagggaactctggcggcgttgcactgccggtcacattccggctcccggataatc

SEQ ID NO: 577721 - DNA, 75 bp, synthetic construct
  source 1..75: mol_type = other DNA
actctacaacgatgcgggtatcagcaacgatcgtattctgatcaaactggcgtctacctggcagggtatccgtgc

SEQ ID NO: 577722 - DNA, 75 bp, synthetic construct
  source 1..75: mol_type = other DNA
ccctgtcgaatgtgaaaggctgcaaggttttcctgatgggcatacgttgatccctacggaaaagcgtaaaacaat

SEQ ID NO: 577723 - DNA, 75 bp, synthetic construct
  source 1..75: mol_type = other DNA
tgagcatcttgttacattagcttttcctgagcatatgagcggtacacaacatgctgcaactaagaatacttcacc

SEQ ID NO: 577724 - DNA, 75 bp, synthetic construct
  source 1..75: mol_type = other DNA
cagtgactgagcagtccggtcagctgctggggttgggtgttggcagcaccattgccggaactactgataccaccg

SEQ ID NO: 577725 - DNA, 75 bp, synthetic construct
  source 1..75: mol_type = other DNA
cgtatgaaccgcttccaaatacagagggattcacgaactattccggtcatgactttaagtttgaagagcaaaaac

SEQ ID NO: 577726 - DNA, 75 bp, synthetic construct
  source 1..75: mol_type = other DNA
aatgtgaaaggctgcaaggttttcctgatggacatacattgatccctacggaaaagcgtaaaaaagtttcttcag

SEQ ID NO: 577727 - DNA, 75 bp, synthetic construct
  source 1..75: mol_type = other DNA
agtacgtcgcttaacgcctgtcgagtgcgaacgcctgcagggctttcctgacgggcacacgttgatccctacgga

SEQ ID NO: 577728 - DNA, 75 bp, synthetic construct
  source 1..75: mol_type = other DNA
tgaaatcgtctttacctctggtgcaaccgaatctgacaacctggcgatcaaaggtgctgccaacttttatcagaa

SEQ ID NO: 577729 - DNA, 75 bp, synthetic construct
  source 1..75: mol_type = other DNA
cgaaagagcgtgaacccgtcgatccgaccctgatggtcgatgtggaatataaatgcgagcagaccaactttgaca

SEQ ID NO: 577730 - DNA, 75 bp, synthetic construct
  source 1..75: mol_type = other DNA
ttcaccgcagggtgttaaaaccgaacatgagatcttgcggatcttcgaaagcgatcgcggacgtattattaactc

SEQ ID NO: 577731 - DNA, 75 bp, synthetic construct
  source 1..75: mol_type = other DNA
catgggtggcctgcaggccgtgcgtgcgccattcttcccgccgaatgcgctgttgatcacccgtctggataacct

SEQ ID NO: 577732 - DNA, 75 bp, synthetic construct
  source 1..75: mol_type = other DNA
cggtgctgacctacgcaaaactggacctgtgggcgaaattccaggacttccaggtgcgtatccgcaacgccatcg

SEQ ID NO: 577733 - DNA, 75 bp, synthetic construct
  source 1..75: mol_type = other DNA
ccgatatgatcatcagtcagaaacgcatgggtggcctgcaggccgtgcgtgcgccgttctttccgccgaatgcgc

SEQ ID NO: 577734 - DNA, 75 bp, synthetic construct
  source 1..75: mol_type = other DNA
actcatgctcaccagcggtgaactgaatccccgccatcagcataccgtgaccctgtatgcgaacggactgacctg

SEQ ID NO: 577735 - DNA, 75 bp, synthetic construct
  source 1..75: mol_type = other DNA
actcatgctcaccagcggtgaactgaatccccgccatcagcataccgtcacgctgtatgcgaacggactgacctg

SEQ ID NO: 577736 - DNA, 75 bp, synthetic construct
  source 1..75: mol_type = other DNA
actcatgctcaccagcggtgaactgaatccccgccatcagcataccgtcaccctgtatgcgaagggactgacctg

SEQ ID NO: 577737 - DNA, 75 bp, synthetic construct
  source 1..75: mol_type = other DNA
ggacgctgtcggcaccggtgtgggaaatccgcctcgatgagataaaattcaccgacaacacgctgggctttggga

SEQ ID NO: 577738 - DNA, 75 bp, synthetic construct
  source 1..75: mol_type = other DNA
ggaaagtgacctcgcacgtcaggcctataatcgccgcttcccggttgcccggacgctgtcggcaccggtgtggga

SEQ ID NO: 577739 - DNA, 75 bp, synthetic construct
  source 1..75: mol_type = other DNA
aggcctgttcagcgatgcagatgcgtaccacctggaccaggcctttccgctgctgatgaaacaactggaactcat

SEQ ID NO: 577740 - DNA, 75 bp, synthetic construct
  source 1..75: mol_type = other DNA
ccgtcacactgtatgcgaaagggctgacctgcgaagccgacaccctcggctcctgtggttacgtttatctggctg

SEQ ID NO: 577741 - DNA, 75 bp, synthetic construct
  source 1..75: mol_type = other DNA
gtgtcagacacactccccgggacaacgcttcccgacgataacaaagaccgcccctggtgggggctgccctgcacc

SEQ ID NO: 577742 - DNA, 75 bp, synthetic construct
  source 1..75: mol_type = other DNA
atgagccaaattatcgccaccatcgaactattcttaactgatttaagtgaggactttatcgtgtcagacacactc

SEQ ID NO: 577743 - DNA, 75 bp, synthetic construct
  source 1..75: mol_type = other DNA
ataaccccaacaacaatcacgaccgcccctggtgggggctaccctgcaccgcgacaccctgttttggcgcccgtc

SEQ ID NO: 577744 - DNA, 75 bp, synthetic construct
  source 1..75: mol_type = other DNA
agataacatggcaagaattgctgctatcctccactacttcaatggtgacaaaggtgatatctcattgcatatcac

SEQ ID NO: 577745 - DNA, 75 bp, synthetic construct
  source 1..75: mol_type = other DNA
gacctgtgaagccgacaccctcggctcctgtggttacgtttatatggctgtttatccgacgcccgaaacgaaaaa

SEQ ID NO: 577746 - DNA, 75 bp, synthetic construct
  source 1..75: mol_type = other DNA
tacaatcgtcgctttccggttgccagaatgctgtcggccccggtgtgggaaatccggcttgatgaaatcaaattc

SEQ ID NO: 577747 - DNA, 75 bp, synthetic construct
  source 1..75: mol_type = other DNA
cgcttcccgacgacaacaaagaccgcccctggtggggactgccctgcaccgtgacgccctgtttcggcgcacgtc

SEQ ID NO: 577748 - DNA, 75 bp, synthetic construct
  source 1..75: mol_type = other DNA
gtgtcagacacacttcccgacggcaatcacgaccgcccctggtgggggctgccctgcaccgtgacgccctgtttc

SEQ ID NO: 577749 - DNA, 75 bp, synthetic construct
  source 1..75: mol_type = other DNA
gcagaatgtcttaagctggatgtggcattcccacattttatcagccagatggagtcgatgttgactactggtgaa

SEQ ID NO: 577750 - DNA, 75 bp, synthetic construct
  source 1..75: mol_type = other DNA
cagcataccgtcacgctgtatgccaaagggctgacctgcaaagccgacaccctcggtagttgtggttacgtttat

SEQ ID NO: 577751 - DNA, 75 bp, synthetic construct
  source 1..75: mol_type = other DNA
tcagcataccgtcacgctgtatgcaaaagggctgacctgcaaagccgataccctcagcagttgtggttacgttta

SEQ ID NO: 577752 - DNA, 75 bp, synthetic construct
  source 1..75: mol_type = other DNA
agaggcctgtacagcaatgcagatgcgtaccacctggaccaggcctttccgctgctgatgaaacaactggaactc

SEQ ID NO: 577753 - DNA, 75 bp, synthetic construct
  source 1..75: mol_type = other DNA
cccctggtgggggctgccctgcaccgtgacgccctgtttcggggcacgtctggtgcaggagggtaaccgcctgca

SEQ ID NO: 577754 - DNA, 75 bp, synthetic construct
  source 1..75: mol_type = other DNA
aaacggtcagccgaaaacggtagcgttaattcgcggcgtgcaatttaaaggcgagatccgcaggcttgaaggtga

SEQ ID NO: 577755 - DNA, 75 bp, synthetic construct
  source 1..75: mol_type = other DNA
gaatgctgtcggccccggtgtgggaaatccggctcgatgaaatcaaattcaccgacaacacgctgggctttggta

SEQ ID NO: 577756 - DNA, 75 bp, synthetic construct
  source 1..75: mol_type = other DNA
atgagccgaattatcgctgccaccggaccattcttaactgatttctgtgaggactttatcgtgtcagacacactc

SEQ ID NO: 577757 - DNA, 75 bp, synthetic construct
  source 1..75: mol_type = other DNA
aactgaatccccgaaatcagcataccgtcacgctgtatgcaaaaggtctgacctgcaaagctgacaccctcggta

SEQ ID NO: 577758 - DNA, 75 bp, synthetic construct
  source 1..75: mol_type = other DNA
atgaaacaactggaactcatgctcaccggcggtgaactgaatccccgccatcagcataccgtcacactgtatgcg

SEQ ID NO: 577759 - DNA, 75 bp, synthetic construct
  source 1..75: mol_type = other DNA
atgagccgaattatcgctgccaccgaaccattcttaactgatttctgtgagaactttatcgtgtcagacacactc

SEQ ID NO: 577760 - DNA, 75 bp, synthetic construct
  source 1..75: mol_type = other DNA
cagaaagaacactatattgcagtatgggcctaatcgactgcggaacaacgccagagtgaatgagatacttgagat

SEQ ID NO: 577761 - DNA, 75 bp, synthetic construct
  source 1..75: mol_type = other DNA
tcacaatggacttacttgtgaagctgacactcttggctcttatggatacgtttatatcgccatttatccccatca

SEQ ID NO: 577762 - DNA, 75 bp, synthetic construct
  source 1..75: mol_type = other DNA
gtgtcagacacactctccgggacaacgcatcccgatgacaatcacgaccgcccctggtgggggctgccctgtacc

SEQ ID NO: 577763 - DNA, 75 bp, synthetic construct
  source 1..75: mol_type = other DNA
ttgtctcgggcggacaaacaactgtggctaacttgttctataacatgagctcgcgccaagttgggttggttggta

SEQ ID NO: 577764 - DNA, 75 bp, synthetic construct
  source 1..75: mol_type = other DNA
atgatcccattcgttgaaaacaactacaacgtttgtgagctcggaccaagagggacaggtaaaagccatgtctac

SEQ ID NO: 577765 - DNA, 75 bp, synthetic construct
  source 1..75: mol_type = other DNA
gtgtcagacacactccccgggacaacgcttcccgacgacgacaacgaccgctcctggtgggggctaccctgcacc

SEQ ID NO: 577766 - DNA, 75 bp, synthetic construct
  source 1..75: mol_type = other DNA
gagcgtaaagcgcaagggaatttcaggcgagaagaggtgagatgcgccagtggcgtcgtttgctggggagtgatg

SEQ ID NO: 577767 - DNA, 75 bp, synthetic construct
  source 1..75: mol_type = other DNA
atttgcgaactgattccgatcgcggactaccggacgattaacgccttgccgcggatcctgtctgccaataatgcc

SEQ ID NO: 577768 - DNA, 75 bp, synthetic construct
  source 1..75: mol_type = other DNA
gtgtcagacacactccccgacgacaatcacgaccgcccctggtggggaccaccctgcaccgtgacgccctgtttc

SEQ ID NO: 577769 - DNA, 75 bp, synthetic construct
  source 1..75: mol_type = other DNA
ttctgcgatgcggatttgcgccatcttgaccaggccttcccggtactgatgaaacagctggagttaatgctcacc

SEQ ID NO: 577770 - DNA, 75 bp, synthetic construct
  source 1..75: mol_type = other DNA
tacgcggcgggaaacagcttccggcgatgttgcgtctgttaaccagcgatttagtgctcgacgaacctgacgatt

SEQ ID NO: 577771 - DNA, 75 bp, synthetic construct
  source 1..75: mol_type = other DNA
gaagtgagagtaccggccagtgaagaagatgcggtcgatgactggcgttatcacccttggcttggggtatttcgc

SEQ ID NO: 577772 - DNA, 75 bp, synthetic construct
  source 1..75: mol_type = other DNA
gcgcagattgttcagcaacagggccggaatggccagctgcatatcagttttggtggcgccagcagtccgaattgc

SEQ ID NO: 577773 - DNA, 75 bp, synthetic construct
  source 1..75: mol_type = other DNA
tacggattatctcgctgaatatatgcgcgaaatgcgcaaacgcagtttctctgatgcgattgataaattctttaa

SEQ ID NO: 577774 - DNA, 75 bp, synthetic construct
  source 1..75: mol_type = other DNA
tctttaccaaccgttacgggctgattacggattatctcgctgaatatatgcgcgaaatgcgcaaacgcagtttct

SEQ ID NO: 577775 - DNA, 75 bp, synthetic construct
  source 1..75: mol_type = other DNA
gtcccggtgtatgtgctggagtatctgctcggcatgtactgcgcctctgacgatgacgacgtggtcgagcaaggg

SEQ ID NO: 577776 - DNA, 75 bp, synthetic construct
  source 1..75: mol_type = other DNA
attaccttgccgaccgcgccggtatcagaggcctgttcagcgatgcagatgcgtaccacctggaccaggcctttc

SEQ ID NO: 577777 - DNA, 75 bp, synthetic construct
  source 1..75: mol_type = other DNA
tgccatgcggacaccctcggcagctgtggttacgtttatctggctgtttatccgacgcccgaaatgaaaaattaa

SEQ ID NO: 577778 - DNA, 75 bp, synthetic construct
  source 1..75: mol_type = other DNA
agaacaactataacgtttgcgagctggggccgcgcggcaccggtaaaagccatgtgtataaagagtgttctccta

SEQ ID NO: 577779 - DNA, 75 bp, synthetic construct
  source 1..75: mol_type = other DNA
aatgtgttcaggcggtcagaacacgcattgtacgaaatatacctatgacgggaaggggaagattcatcagtcgtt

SEQ ID NO: 577780 - DNA, 75 bp, synthetic construct
  source 1..75: mol_type = other DNA
agtggcaacctgacgatcccgaccaatggtcgtctgctgaacgcctcggtggatggtgagcctctggtgatcccc

SEQ ID NO: 577781 - DNA, 75 bp, synthetic construct
  source 1..75: mol_type = other DNA
accataattgtacgctggcatcccggcaatgcgcattcacttctgatgacggaacctgtcttcatgaatatgcca

SEQ ID NO: 577782 - DNA, 75 bp, synthetic construct
  source 1..75: mol_type = other DNA
atgtcggacacactccccggaacaacgcttcccgacgacaacaaagacctcccctggtgggggctgccctgcgcc

SEQ ID NO: 577783 - DNA, 75 bp, synthetic construct
  source 1..75: mol_type = other DNA
gccgacacccttggctcctgtggttacgtttatctggctgtttatcctgcgaccgaaacggaaaatgtagtggtc

SEQ ID NO: 577784 - DNA, 75 bp, synthetic construct
  source 1..75: mol_type = other DNA
tgcatatcggttttggcggcgccagcagtcctgactgtcgggggattacggttgaagagctccagagaatcgact

SEQ ID NO: 577785 - DNA, 75 bp, synthetic construct
  source 1..75: mol_type = other DNA
cgaaaacccggaatcagatgtggatattgacctgcttaaaaacgccatgctggcagcacagcgtctggaatccac

SEQ ID NO: 577786 - DNA, 75 bp, synthetic construct
  source 1..75: mol_type = other DNA
tgtaccgccgtctgcgtgctgccaccgaatccctgaacagcgacagcgatgtggatatgcgccttattaaggaca

SEQ ID NO: 577787 - DNA, 75 bp, synthetic construct
  source 1..75: mol_type = other DNA
tcaacctcgccaaagccactgctcacgccaaattacttaacgcaacgtcaaacattggcggtctgctgctgttta

SEQ ID NO: 577788 - DNA, 75 bp, synthetic construct
  source 1..75: mol_type = other DNA
tgacctgaaatatggccgcaccgttcactccctgactcaggcgttagcgaagttcgacggcaaccgtttttactt

SEQ ID NO: 577789 - DNA, 75 bp, synthetic construct
  source 1..75: mol_type = other DNA
tttaagttgggatacaagttagacatgaacttcaatccatcgtccgatgtaattctggagatggatatgaaaaag

SEQ ID NO: 577790 - DNA, 75 bp, synthetic construct
  source 1..75: mol_type = other DNA
aagaagcggcaaacgctgtcagcgaagaactgcgcgggcaggatggcatcagcgaagaactggagcagcgtatcc

SEQ ID NO: 577791 - DNA, 75 bp, synthetic construct
  source 1..75: mol_type = other DNA
tttttgggctctgtaatactattctttctcgctcctgtaattattaagtatggtttgggagatagttataataat

SEQ ID NO: 577792 - DNA, 75 bp, synthetic construct
  source 1..75: mol_type = other DNA
gtgtttatttcaacatcagctataagtctttatacaacaagcacaacagtgattctcgggtttgtggcgggacct

SEQ ID NO: 577793 - DNA, 75 bp, synthetic construct
  source 1..75: mol_type = other DNA
cttatccaggggatggttaacttattagcaggcctactgggattatgtttgattaagaaaaaaagatgggttaat

SEQ ID NO: 577794 - DNA, 75 bp, synthetic construct
  source 1..75: mol_type = other DNA
tcacagtgttctagctcaggacgttactatttattatacgaatgacattcacgcacatgtcaatccggcaaaaat

SEQ ID NO: 577795 - DNA, 75 bp, synthetic construct
  source 1..75: mol_type = other DNA
taattcacgaaggtgttccggcgcgtcaatcaagctttggtagtaaagatgtggagcggctactacaggcagata

SEQ ID NO: 577796 - DNA, 75 bp, synthetic construct
  source 1..75: mol_type = other DNA
agccattaataaaaatgatcgtaataagttaacacatattttttggggggttatctttgcaaaaatactattaag

SEQ ID NO: 577797 - DNA, 75 bp, synthetic construct
  source 1..75: mol_type = other DNA
aacgtcgtttatttctttgtgggaaaacgcagaccgctgacactgggaaaaatcaccaaaaacatccgtatcact

SEQ ID NO: 577798 - DNA, 75 bp, synthetic construct
  source 1..75: mol_type = other DNA
tttcaatgtgtctccctttgttgccccaaacagcgaaattaaagcactgataaaaaatattcacgaaacctgggc

SEQ ID NO: 577799 - DNA, 75 bp, synthetic construct
  source 1..75: mol_type = other DNA
ttctggtatagaagttgtttctttagacggtttaagcgatctgctactggttgaaaaactaacgccattatttaa

SEQ ID NO: 577800 - DNA, 75 bp, synthetic construct
  source 1..75: mol_type = other DNA
aatagatattgattttatgaaatgtaattcgctggcagaattgcttaccagcgataagctggatgcgttatttaa

SEQ ID NO: 577801 - DNA, 75 bp, synthetic construct
  source 1..75: mol_type = other DNA
tgagcgaactggcaaaacagttttgggaaaaaacgaggataacgcttttcagtatctcgacagggataacttact

SEQ ID NO: 577802 - DNA, 75 bp, synthetic construct
  source 1..75: mol_type = other DNA
gctggtgagcaggggcgtggttttgctgttgtcgccgatgaggttcgcagtcttgctgctcgcacacagcaatcg

SEQ ID NO: 577803 - DNA, 75 bp, synthetic construct
  source 1..75: mol_type = other DNA
atcctgacttcattaaaatcagtggtttcactgaggaagaactattaggccagcctcacaacatcgtaagacacc

SEQ ID NO: 577804 - DNA, 75 bp, synthetic construct
  source 1..75: mol_type = other DNA
tatcctggaagaagagactcctccacaagaaaaacttagcgagcaggtaaaagacctggtgcagaacgttgacgc

SEQ ID NO: 577805 - DNA, 75 bp, synthetic construct
  source 1..75: mol_type = other DNA
caaatgctgttgaagagaagccaaaggacgcagcaccaaagggtgatgtaaaagtcaccaaccacggcggcgggc

SEQ ID NO: 577806 - DNA, 75 bp, synthetic construct
  source 1..75: mol_type = other DNA
tattaccctggcagaagagactcctccacaagaacaacttagcgagcaggtaaaggatctggtgcagaacgttga

SEQ ID NO: 577807 - DNA, 75 bp, synthetic construct
  source 1..75: mol_type = other DNA
ttttttagtgattttgaaaagataaactcgattttattacctcttttagtgtttgatctcaaaaccgatgttcct

SEQ ID NO: 577808 - DNA, 75 bp, synthetic construct
  source 1..75: mol_type = other DNA
atgcaagtgttgaaactttttttaaaatgattgaaaaccaagaattatggtttaccgatcttcggaatatgaatg

SEQ ID NO: 577809 - DNA, 75 bp, synthetic construct
  source 1..75: mol_type = other DNA
ctttaatgaaagtaatatccgcccagcaggcgataagcactcttaaatatatggttgatggtgagatttattttt

SEQ ID NO: 577810 - DNA, 75 bp, synthetic construct
  source 1..75: mol_type = other DNA
actatggatttaattggacggcaactcagcaagtagctaaaaataaaaatgacatcgtaaaattaactaggattt

SEQ ID NO: 577811 - DNA, 75 bp, synthetic construct
  source 1..75: mol_type = other DNA
atatcgcaaaacacctgattcaggttcacttcatcaatgagcacacaggtgaagtggtggataagcaactacgca

SEQ ID NO: 577812 - DNA, 75 bp, synthetic construct
  source 1..75: mol_type = other DNA
atatcgcaaaacatgtcattcaggttcacttcatcaatgagcacacaggggaagtggtggataagcaggttcgtc

SEQ ID NO: 577813 - DNA, 75 bp, synthetic construct
  source 1..75: mol_type = other DNA
tcgccatggcaaacaaactagcacgaacagtatgggcgatagcagctcatggaagtaaatacgacaagaatcatg

SEQ ID NO: 577814 - DNA, 75 bp, synthetic construct
  source 1..75: mol_type = other DNA
atggaggcctgtggaggctctcagcactgggcacgggaactgacaaagctggggcataaagtccggttgttgcag

SEQ ID NO: 577815 - DNA, 75 bp, synthetic construct
  source 1..75: mol_type = other DNA
atggaggcttgtgggggctctctgcactgggcacgtgagctgaaaaaactggggcacgaagttcggctgttgcag

SEQ ID NO: 577816 - DNA, 75 bp, synthetic construct
  source 1..75: mol_type = other DNA
tgcacgggctatctggatggcggttcagcaacccggtaaggaaattgcggttaaaacggaagagcagcagtcggt

SEQ ID NO: 577817 - DNA, 75 bp, synthetic construct
  source 1..75: mol_type = other DNA
tggaagtgttgaaggtgttcgagcaggaaaatctgctgcaaaaagccaacgatctggggcagaagctgaaagatg

SEQ ID NO: 577818 - DNA, 75 bp, synthetic construct
  source 1..75: mol_type = other DNA
ggaaaatctgctgcaaaaagccaacgatctggggcagaagctaaaagacggattgctggcgatcgccgaaaaaca

SEQ ID NO: 577819 - DNA, 75 bp, synthetic construct
  source 1..75: mol_type = other DNA
gggtgtgggacgttgaaggccgtgagtatcttgatttcgcgggcgggattgcggtgctcaataccgggcacctgc

SEQ ID NO: 577820 - DNA, 75 bp, synthetic construct
  source 1..75: mol_type = other DNA
ttaagtcttggtaaggcaaaagagcttgcatcagcgtgtagagaaagaaacgaaatggcagaggtgaaacgggta

SEQ ID NO: 577821 - DNA, 75 bp, synthetic construct
  source 1..75: mol_type = other DNA
cgaccggttccgaagcggtggaaaacgcggtgaaaatcgcccgcgctgccaccaaacgtagcggcaccatcgctt

SEQ ID NO: 577822 - DNA, 75 bp, synthetic construct
  source 1..75: mol_type = other DNA
aaggtgaatccgtactctgcgggcatgggcctgatgccgggccatgtttatcgcgcgctttatccttgcccgctg

SEQ ID NO: 577823 - DNA, 75 bp, synthetic construct
  source 1..75: mol_type = other DNA
gattataccagtaatgccagcgtgacgattcatacgtcaccagcatattctgctaataagccggaagggttaacg

SEQ ID NO: 577824 - DNA, 75 bp, synthetic construct
  source 1..75: mol_type = other DNA
attatggttctggaaaaccagtacaaccgactgaatgagctggactcactgatagaggatattgaaaaacagctt

SEQ ID NO: 577825 - DNA, 75 bp, synthetic construct
  source 1..75: mol_type = other DNA
cgttgaaacgcctacggttgtcgcaccgcgcgtcagcgaaccggcgcgcaatccgtttaaaacggaaagtaaccg

SEQ ID NO: 577826 - DNA, 75 bp, synthetic construct
  source 1..75: mol_type = other DNA
ggattactttatctcggtgatggggcgcagcgatgtggcacgtaagcaaaacgccaatttcctcgtgtcgattca

SEQ ID NO: 577827 - DNA, 75 bp, synthetic construct
  source 1..75: mol_type = other DNA
atggaaatagagatgatcaaggcagctaatggcgtattcgaactggcgtatgagcgcgatttaccccgcctggca

SEQ ID NO: 577828 - DNA, 75 bp, synthetic construct
  source 1..75: mol_type = other DNA
atgtggcgaacgttttgcctacgttgatatcctgcagaatccggacattcgcgcggaactgccgaaatacgctaa

SEQ ID NO: 577829 - DNA, 75 bp, synthetic construct
  source 1..75: mol_type = other DNA
tgagtgagatggactcactgatagatgatatcgaaaaacagcttaccagtgtggccaggcagaatgagacctgta

SEQ ID NO: 577830 - DNA, 75 bp, synthetic construct
  source 1..75: mol_type = other DNA
agccggacgcgaaatgtggcaacggatggaacaatcccactggctcctcgacggtaaaaaagacgcgccggtcat

SEQ ID NO: 577831 - DNA, 75 bp, synthetic construct
  source 1..75: mol_type = other DNA
tatcaggacatgggagttactatctatctgactcccgacggcaagcatgccatctccggttatatgtatgacgaa

SEQ ID NO: 577832 - DNA, 75 bp, synthetic construct
  source 1..75: mol_type = other DNA
tgcccatattgtaaacagttctggcagcaggcgcgcccgtgggtagattctggcaaagtgcagttgagaacattg

SEQ ID NO: 577833 - DNA, 75 bp, synthetic construct
  source 1..75: mol_type = other DNA
ctgtttattcatggtgcaagggcggcagcattactgaccaaagaacctggtccatggataaccgaactgaaaaag

SEQ ID NO: 577834 - DNA, 75 bp, synthetic construct
  source 1..75: mol_type = other DNA
gtagtggataccacacactcgtttaatctggcgctggttattgcggcctgtgtgacgttcaccggggcgctgtgt

SEQ ID NO: 577835 - DNA, 75 bp, synthetic construct
  source 1..75: mol_type = other DNA
cagcagcccagtaaagaaatcgccgttaaaacggaagagcagcagtcagttctggtcctgcaccgttcgcgcaga

SEQ ID NO: 577836 - DNA, 75 bp, synthetic construct
  source 1..75: mol_type = other DNA
acaatatatatggcatatgggaaagttggtttattatttaaattaggtgtgtttagttcatttttacaaatacta

SEQ ID NO: 577837 - DNA, 75 bp, synthetic construct
  source 1..75: mol_type = other DNA
gtcaaacctcggcggtttgttgctgtttattctcggcggcaaagttatttgggcgacgggatttgtgatgctggt

SEQ ID NO: 577838 - DNA, 75 bp, synthetic construct
  source 1..75: mol_type = other DNA
ttgccatgacaacaactggggcacctttatctcacaccgcagtggtgagacagtggacagctttatcgccgatat

SEQ ID NO: 577839 - DNA, 75 bp, synthetic construct
  source 1..75: mol_type = other DNA
gcaacactgcatgtaccacggcttaattggtgatggccctgaagaggtcgcaagcgatagacaggaaggtgaata

SEQ ID NO: 577840 - DNA, 75 bp, synthetic construct
  source 1..75: mol_type = other DNA
tcaggacatccggtggagacaatgacggaggaggcaaccgtatgggcagaagttaagggtatcagcgggagggag

SEQ ID NO: 577841 - DNA, 75 bp, synthetic construct
  source 1..75: mol_type = other DNA
gaaagtcagcgccgcgataaactggaaacacttcgtcagatgatgcttgatgagggtatcgacccctccgaactt

SEQ ID NO: 577842 - DNA, 75 bp, synthetic construct
  source 1..75: mol_type = other DNA
gccagggggttagccagagtgaacggcagcgatattgagcgcttttattacaatgaagatttcgtagaaaaggat

SEQ ID NO: 577843 - DNA, 75 bp, synthetic construct
  source 1..75: mol_type = other DNA
atttcgtttccacgtttgaaccgtcaacaaaatcggtcgatttgctcacggttgaaacttttgctggtacggtat

SEQ ID NO: 577844 - DNA, 75 bp, synthetic construct
  source 1..75: mol_type = other DNA
atgcaggaaattaccgctttccagatgcgctataacgcgttttttcagcctactgagggcgttcactggctgcat

SEQ ID NO: 577845 - DNA, 75 bp, synthetic construct
  source 1..75: mol_type = other DNA
ggtatgaatgattttaacgaaacttatgtttctgaggaattattcccattattcaaaaacaggcttctgtcgcca

SEQ ID NO: 577846 - DNA, 75 bp, synthetic construct
  source 1..75: mol_type = other DNA
gcgctgggcctgtcccggcgacaggtatatgtcctgatccgtcgcgcccggcagggtactggcctggtaacagac

SEQ ID NO: 577847 - DNA, 75 bp, synthetic construct
  source 1..75: mol_type = other DNA
cgatttcctgcccatcattcgccgtactctgactcgcaccggctttgtcatcgaccacattcactactacgccga

SEQ ID NO: 577848 - DNA, 75 bp, synthetic construct
  source 1..75: mol_type = other DNA
atgtagatttactccggcgggtaaattacgtttacgccctggcttgctgccaactcaggacgtcatcacgctggc

SEQ ID NO: 577849 - DNA, 75 bp, synthetic construct
  source 1..75: mol_type = other DNA
ttttcgctgcatttggtcttatgagcctgatggtgctaattatttgggcggttgatccgcaatatcgcctgaatg

SEQ ID NO: 577850 - DNA, 75 bp, synthetic construct
  source 1..75: mol_type = other DNA
gtgggtaaaaacatgggctggttgggtgctgtttcactggatgccacccgtgcgaatgcccggttaccggatgaa

SEQ ID NO: 577851 - DNA, 75 bp, synthetic construct
  source 1..75: mol_type = other DNA
gtagtggaaatgcgcaacaggaaaaaccccgctttttccagagtacattactccacggccttccggctggctgga

SEQ ID NO: 577852 - DNA, 75 bp, synthetic construct
  source 1..75: mol_type = other DNA
atgttttccggagatggcggacagctcctgtctgataaatcactgaccggctctgctggcgggggtaataacaga

SEQ ID NO: 577853 - DNA, 75 bp, synthetic construct
  source 1..75: mol_type = other DNA
atggcggacactcatcacgcacaagggcccggtaaaagcgttctgggcatcgggcagcgaattgtttctatcatg

SEQ ID NO: 577854 - DNA, 75 bp, synthetic construct
  source 1..75: mol_type = other DNA
aatccactttactgcgccatacgcgccgtgaactggcaaacgatcgacagctgctcgaggagagttcccatgagc

SEQ ID NO: 577855 - DNA, 75 bp, synthetic construct
  source 1..75: mol_type = other DNA
acggacaatggcagtggtttaaaaatgcggatggtgggttatcaaaacgtgtagcatttgacgaacgatatatgt

SEQ ID NO: 577856 - DNA, 75 bp, synthetic construct
  source 1..75: mol_type = other DNA
gaacgcacggatgataatcacggcgaaaaacaggtcgatatggattcgctgcaacaggtgggggggaggatggat

SEQ ID NO: 577857 - DNA, 75 bp, synthetic construct
  source 1..75: mol_type = other DNA
agggccgctgtacgcgctaaaacgccgccagaagcgaaaaacgagaaaagacgaccagatgccgccatagataaa

SEQ ID NO: 577858 - DNA, 75 bp, synthetic construct
  source 1..75: mol_type = other DNA
cggtgcgtggcgtttacgcgacaataccacctggagttataacagtagcgacagttcatcaggtagcaaaaataa

SEQ ID NO: 577859 - DNA, 75 bp, synthetic construct
  source 1..75: mol_type = other DNA
gagctgaccggcccctttgaaagcattgtcgagatgtcatgcctgatgcacgatatcggtaacccgccgtttggt

SEQ ID NO: 577860 - DNA, 75 bp, synthetic construct
  source 1..75: mol_type = other DNA
cgtacccaacggcactgatgataaatatgattctccggataatatcaataatgattttgtacaagtggatgctgg

SEQ ID NO: 577861 - DNA, 75 bp, synthetic construct
  source 1..75: mol_type = other DNA
atgcaggagattaatgccttccaaatgcgctataacgccctcttccagccagaagaaggcgtgttttggttgcat

SEQ ID NO: 577862 - DNA, 75 bp, synthetic construct
  source 1..75: mol_type = other DNA
caacattacctacaaagatgtggcagcgcgtaaacgcaggaagtcagatgtgatgcgacgtaaactgctgtcgca

SEQ ID NO: 577863 - DNA, 75 bp, synthetic construct
  source 1..75: mol_type = other DNA
aagacagagcagcacttacccaatggatggcatacatcagtcaggtgaagaaaatggaactacccgccattaaaa

SEQ ID NO: 577864 - DNA, 75 bp, synthetic construct
  source 1..75: mol_type = other DNA
tacgtaaattaatcccaccttctcagacgttcccacgcccagctcccatgagcgaagcggagttccgttgggagc

SEQ ID NO: 577865 - DNA, 75 bp, synthetic construct
  source 1..75: mol_type = other DNA
gaattatcaagctaaccgggtattcaaatactaaccatttatgccgggaatatgctgtttctcaacgtgttctgc

SEQ ID NO: 577866 - DNA, 75 bp, synthetic construct
  source 1..75: mol_type = other DNA
ctatgacatcaagggatgccagcttgagatactgcgacatgagctgttgagtattggcatttcggacaaatcgct

SEQ ID NO: 577867 - DNA, 75 bp, synthetic construct
  source 1..75: mol_type = other DNA
agtctaaacgcgatatccctaacgctgccttcagggagttggtagtgggggtctggaataatcttgagccgcttg

SEQ ID NO: 577868 - DNA, 75 bp, synthetic construct
  source 1..75: mol_type = other DNA
taagatctgcgactggtcggagatcaccgcccttataaccaacgatcatgccgacaaagaggggattgccgaagt

SEQ ID NO: 577869 - DNA, 75 bp, synthetic construct
  source 1..75: mol_type = other DNA
ctttaatgaaagtaatatccgcccagcaggcgataagtgctctcaaatatatggttgaaccgccccgggtttcct

SEQ ID NO: 577870 - DNA, 75 bp, synthetic construct
  source 1..75: mol_type = other DNA
ggggatgataagtttatcaccaccgactatttgcaacagtgccaaaaatcgctgtaaaaatggcgaccactattg

SEQ ID NO: 577871 - DNA, 75 bp, synthetic construct
  source 1..75: mol_type = other DNA
aaaactgtctgaaggcattcgtctgttcgccgttgatcaacgcaaactggaagatcttcttgccgccaaactata

SEQ ID NO: 577872 - DNA, 75 bp, synthetic construct
  source 1..75: mol_type = other DNA
cgggctggtgcacccatattggctgtattgcgctgaaaggggcagggctgaaggtgtgtaaattccccgcccgcg

SEQ ID NO: 577873 - DNA, 75 bp, synthetic construct
  source 1..75: mol_type = other DNA
accgcccttataaccaacgatcatgccgacaaagaggggattgccgaagtcgcaaaatacacgtcagtaataacc

SEQ ID NO: 577874 - DNA, 75 bp, synthetic construct
  source 1..75: mol_type = other DNA
agttccggtttatttttccagtgacccgacattacaaccaggtactaccggagtgtactttggaccgaaaccgaa

SEQ ID NO: 577875 - DNA, 75 bp, synthetic construct
  source 1..75: mol_type = other DNA
gcaccagaggcttatttatacggcctgccgtggaaatattatgaagagttaggtgtgcgccgttatggtttccac

SEQ ID NO: 577876 - DNA, 75 bp, synthetic construct
  source 1..75: mol_type = other DNA
gccaccgcatcgctcacggcggcagtatttttaccgagtccgccattattaccgatgaagtcattgataatatcc

SEQ ID NO: 577877 - DNA, 75 bp, synthetic construct
  source 1..75: mol_type = other DNA
aggtttacccggcaagcagccgcgtggacgtacgcggccagttgaagacctggataggcgactcgaaaccgtatc

SEQ ID NO: 577878 - DNA, 75 bp, synthetic construct
  source 1..75: mol_type = other DNA
tgcggcgagcggtactgactcacacaaaaacggtaacacagttatccacagaatcaggggataacgccaaaaaaa

SEQ ID NO: 577879 - DNA, 75 bp, synthetic construct
  source 1..75: mol_type = other DNA
gtgcctacccggtagaaaaccgtgttgaaattcgaggggagctgaagacctggattggggattccaggccttatt

SEQ ID NO: 577880 - DNA, 75 bp, synthetic construct
  source 1..75: mol_type = other DNA
ggaataggagagaactcaagtttaattcgtcgtttggtcatggagcatttggctgtattaggcgtagagattgat

SEQ ID NO: 577881 - DNA, 75 bp, synthetic construct
  source 1..75: mol_type = other DNA
actttctttaatttctaggtttttaagaaaaaatgggaaggccgaatttgctgatgatatttttaaaacatatat

SEQ ID NO: 577882 - DNA, 75 bp, synthetic construct
  source 1..75: mol_type = other DNA
atattaaaaatatactttctgttaaacagcgttatgtgattccacggaatcaacgagaatttagttgggaaaagt

SEQ ID NO: 577883 - DNA, 75 bp, synthetic construct
  source 1..75: mol_type = other DNA
aagaggccggacgcttagataaacaggtgtccggcaaagatatcagcgttatcgctggcgtactggactttattc

SEQ ID NO: 577884 - DNA, 75 bp, synthetic construct
  source 1..75: mol_type = other DNA
ccactcgcgttatcgctgtgggatttatcagtctggggacactcctgaccctcagtcttgcgaccaatattatcc

SEQ ID NO: 577885 - DNA, 75 bp, synthetic construct
  source 1..75: mol_type = other DNA
aacacatatcatctcaaagcaaaactaacgagtcagtcgtgggtatgattggtaatttactaccactctgttttt

SEQ ID NO: 577886 - DNA, 75 bp, synthetic construct
  source 1..75: mol_type = other DNA
tataattatattggagaagatcaactttatcgtgcttttaaacgtgagattcaagatgagaatactttattgtca

SEQ ID NO: 577887 - DNA, 75 bp, synthetic construct
  source 1..75: mol_type = other DNA
gtcatcaggagctggtggtatggcgcacactcggtgcggggaaaaaactgctgcgcacgacattgtggtgtgagt

SEQ ID NO: 577888 - DNA, 75 bp, synthetic construct
  source 1..75: mol_type = other DNA
accccttccagatggctccgcgtctgatgatgaatctggcggatgtcgataaaaccggagccgtgcagccgggga

SEQ ID NO: 577889 - DNA, 75 bp, synthetic construct
  source 1..75: mol_type = other DNA
tcgcagtcgctacgatctggtggcgatcctcaaaacgctgggggcagggcgagcgcaactgcgtaagctaatcgt

SEQ ID NO: 577890 - DNA, 75 bp, synthetic construct
  source 1..75: mol_type = other DNA
gaacaagctgccgcacaggagagtgcaaatctttccagtaaggcaattgatgttaatggtgttaagctgttggtt

SEQ ID NO: 577891 - DNA, 75 bp, synthetic construct
  source 1..75: mol_type = other DNA
tgtctggctggcgctaagcctggcggtggcctgcgtgctggcgctgggtaatatcagcgatcgcatggagaaagg

SEQ ID NO: 577892 - DNA, 75 bp, synthetic construct
  source 1..75: mol_type = other DNA
aggagctggtggtgtggcgcacactcggtgcggggaaaaaactgctgcgcacgacattgtggtgcgagttcgcca

SEQ ID NO: 577893 - DNA, 75 bp, synthetic construct
  source 1..75: mol_type = other DNA
tgtatccttccgaaaaggaaccgagttttggaatatttgttgaaacaattgcaaatcagttatctgatattggct

SEQ ID NO: 577894 - DNA, 75 bp, synthetic construct
  source 1..75: mol_type = other DNA
cgtcaccggcaaaatcgacctacgcaactggaccgcccccatccccgaagcggaaacacccacggaggtcagcgc

SEQ ID NO: 577895 - DNA, 75 bp, synthetic construct
  source 1..75: mol_type = other DNA
tttgcactttactctgctataagatcacaaatggcaccatcaagtgttgtaattattttggctggtgtatatgcc

SEQ ID NO: 577896 - DNA, 75 bp, synthetic construct
  source 1..75: mol_type = other DNA
tggcctgaaaccgcaggcgggcagcgtattgctggccccacgcctgatggcactgcttaacctgaaaacgggcga

SEQ ID NO: 577897 - DNA, 75 bp, synthetic construct
  source 1..75: mol_type = other DNA
attatggcgcttcatgaatctgacgactatcagccgctgttacgtgcaatggcaaacgtgccttgtattgatgtt

SEQ ID NO: 577898 - DNA, 75 bp, synthetic construct
  source 1..75: mol_type = other DNA
ggcaaacgtgccatgtattagcgtcgataatgctcgtgaaatcctgaacatgaccatagagcaggagcgcccaaa

SEQ ID NO: 577899 - DNA, 75 bp, synthetic construct
  source 1..75: mol_type = other DNA
ccctgaccctgggtgttgcgacaagtgcgtctgctgctaccacggttaatggtggtactgttcattttaaggggg

SEQ ID NO: 577900 - DNA, 75 bp, synthetic construct
  source 1..75: mol_type = other DNA
acattcctcggggcatggaagttttacaccagctatacgttgaagacattcgacggtaagcgttatctggaagat

SEQ ID NO: 577901 - DNA, 75 bp, synthetic construct
  source 1..75: mol_type = other DNA
cgcctttatggcgacgcatgtgcgtccgaacagtgtgaccttcagtagccagcagcagcgcctgaactggctggt

SEQ ID NO: 577902 - DNA, 75 bp, synthetic construct
  source 1..75: mol_type = other DNA
attgatggcactcatcctaacgtattagctttgcagagttcagctgcgggtagcgcaacaaaagttggtgtgcag

SEQ ID NO: 577903 - DNA, 75 bp, synthetic construct
  source 1..75: mol_type = other DNA
agtattcatccgattgtggcgaaagtagagatacgcaaagagggcaaaacaggacgcgtttactaccctgccccg

SEQ ID NO: 577904 - DNA, 75 bp, synthetic construct
  source 1..75: mol_type = other DNA
caggccatgatatttcctgcaatttaggttcgttgaatattgcccacaccatggattcccccaactttgcccgca

SEQ ID NO: 577905 - DNA, 75 bp, synthetic construct
  source 1..75: mol_type = other DNA
cgggcgcgtttactaccctgctccgtttatgaccaacgaaaatctggcgctgtatcaggatgcttacgaaattgg

SEQ ID NO: 577906 - DNA, 75 bp, synthetic construct
  source 1..75: mol_type = other DNA
tgacgctggatggtgcgacatttagttcagaaacaaccctgaataacggaaccaataccattccgttccaggcgc

SEQ ID NO: 577907 - DNA, 75 bp, synthetic construct
  source 1..75: mol_type = other DNA
ttgttctgtcggctctgtccctcagttctacagcggctctggccgctgccacgacggttaatggtgggaccgttc

SEQ ID NO: 577908 - DNA, 75 bp, synthetic construct
  source 1..75: mol_type = other DNA
gttagtttgggccaagtgcgtacagctaaactagccaatgatgccgacaaaagtgcaccggttggatttgatatt

SEQ ID NO: 577909 - DNA, 75 bp, synthetic construct
  source 1..75: mol_type = other DNA
attgatgctacgcgtactgatgtactggctctgcagagttctgctgcaggtagtgcaacaaacgttggcgtgcag

SEQ ID NO: 577910 - DNA, 75 bp, synthetic construct
  source 1..75: mol_type = other DNA
attgatgcgggtcataccaacgttctggctctgcagagttcagctgcgggtagcgcaacaaacgttggtgtgcag

SEQ ID NO: 577911 - DNA, 75 bp, synthetic construct
  source 1..75: mol_type = other DNA
actaacaccattccgttccaggcgcgttattttgcaaccggtgccgcaacccctggcgcagctaatgcggatgcg

SEQ ID NO: 577912 - DNA, 75 bp, synthetic construct
  source 1..75: mol_type = other DNA
gcggctggcttaccggctacctgcgtgaatacctgctggccacggtatggataagcattatcaccctggtccgtg

SEQ ID NO: 577913 - DNA, 75 bp, synthetic construct
  source 1..75: mol_type = other DNA
tccgaatgccatgatgggaagaagctatcgagatggtcaactgacgcttgtcacatgggcaatctcaaatgacgg

SEQ ID NO: 577914 - DNA, 75 bp, synthetic construct
  source 1..75: mol_type = other DNA
gttaatcgcctcgccatcccacattgctggagcgaacaggagcgacgttttcgtggattttttattaccctcgcc

SEQ ID NO: 577915 - DNA, 75 bp, synthetic construct
  source 1..75: mol_type = other DNA
gtccgtactggacttcttgagaaagttgatcgtggcatagggagagagcataagtatcgggccacacagcagttt

SEQ ID NO: 577916 - DNA, 75 bp, synthetic construct
  source 1..75: mol_type = other DNA
gatggggttagggattggccttacgccatcagccgacgattatttaacaggtctggcgcttattttatttattcc

SEQ ID NO: 577917 - DNA, 75 bp, synthetic construct
  source 1..75: mol_type = other DNA
tcagcacctgggggaaaatgaaaccctgtttaattatcgcggcgataatccgttttatcaggcgttaaataaaga

SEQ ID NO: 577918 - DNA, 75 bp, synthetic construct
  source 1..75: mol_type = other DNA
actctgcattttggggtgttatggttatagccggtacagtaattggcggtgggatgtttgctttacctgttgacc

SEQ ID NO: 577919 - DNA, 75 bp, synthetic construct
  source 1..75: mol_type = other DNA
gtattaaacagggcggagacggtgtccttttattctattcaaatggacaactggcatttgggcttcaacccgcat

SEQ ID NO: 577920 - DNA, 75 bp, synthetic construct
  source 1..75: mol_type = other DNA
ggtattattagcttctattcaaatggttcgcgcatcggacatattgatgagttaggattacatctttataaagat

SEQ ID NO: 577921 - DNA, 75 bp, synthetic construct
  source 1..75: mol_type = other DNA
cgcgccagactttcaacggcgggatcaccggggcgctgacagggaacgccgacaccgcgacgaaattgaaaatag

SEQ ID NO: 577922 - DNA, 75 bp, synthetic construct
  source 1..75: mol_type = other DNA
gaactggctggggaatgtctctgatgttcttcgggattcttatcgtcggatacggtctgctttattggtggcaca

SEQ ID NO: 577923 - DNA, 75 bp, synthetic construct
  source 1..75: mol_type = other DNA
cctctccttcagtccgaacaaaccccggcactatgaacgttatctgcagcgtatgaaagaaaggaggaaggaatg

SEQ ID NO: 577924 - DNA, 75 bp, synthetic construct
  source 1..75: mol_type = other DNA
taaaattgctgtctacctgcgctggtatcagacgcggggcttcccggatgacatcccggatgaacaggagaatga

SEQ ID NO: 577925 - DNA, 75 bp, synthetic construct
  source 1..75: mol_type = other DNA
tctgacaacgcgtatgcggctcggccgcaacatctacgcactgggcggcaacaaaaactcggcgttctattccgg

SEQ ID NO: 577926 - DNA, 75 bp, synthetic construct
  source 1..75: mol_type = other DNA
gtggtgacgctggtccgggtgacgattctggcactgtcagtgcctctgtttgtgatggtggctctgctggctgtg

SEQ ID NO: 577927 - DNA, 75 bp, synthetic construct
  source 1..75: mol_type = other DNA
acattccctgtattctttatatgtcctggcccacggcagtatacccgaacctgctgatatggccggcggccatgc

SEQ ID NO: 577928 - DNA, 75 bp, synthetic construct
  source 1..75: mol_type = other DNA
acgccggcacgggctgctgtataacctgctgtgggggtggccgtgggcactggccgggatggtgctctcctccct

SEQ ID NO: 577929 - DNA, 75 bp, synthetic construct
  source 1..75: mol_type = other DNA
ccccggtacagtcgtcaacgccaccaaagccgcacggtttttttaccgtactgctgtgggatacgccgatgaaca

SEQ ID NO: 577930 - DNA, 75 bp, synthetic construct
  source 1..75: mol_type = other DNA
ggatttggttggtgtcggaactgagggactatctgctggcgacggtgtatgtgacgctgaccttttttatccggg

SEQ ID NO: 577931 - DNA, 75 bp, synthetic construct
  source 1..75: mol_type = other DNA
tggacagctggcagaacgtctacccggtgtcatcggccaatgggaatgcgatcgcccgtgaactggataactggc

SEQ ID NO: 577932 - DNA, 75 bp, synthetic construct
  source 1..75: mol_type = other DNA
agaaaccagcgcctttatcgaacgcgtggcagatatcagccgcgctggcgctggaacaggaaaaaagccgtcagc

SEQ ID NO: 577933 - DNA, 75 bp, synthetic construct
  source 1..75: mol_type = other DNA
ggtgaggaactggcacaatataatttgtggctggattacctggacgcactggaactggtcgatatttccggtgcg

SEQ ID NO: 577934 - DNA, 75 bp, synthetic construct
  source 1..75: mol_type = other DNA
cctatgccattgccagcgccatcattggcggcaccagtttcttcggcggcaaggggcgcattttctctgtggtga

SEQ ID NO: 577935 - DNA, 75 bp, synthetic construct
  source 1..75: mol_type = other DNA
tacccgaatctgctgatatggccggcggccatgctgctgggtatggctgtcaccgtgacaatggcatccttcaag

SEQ ID NO: 577936 - DNA, 75 bp, synthetic construct
  source 1..75: mol_type = other DNA
tatccgaacctgctgatatggccggcggccatgctgctgggggtggccatcaccgtgaccatggcatccttcaag

SEQ ID NO: 577937 - DNA, 75 bp, synthetic construct
  source 1..75: mol_type = other DNA
ttacctgtcctggccgacgtcggtgtatccgaacctgctgatatggccggcggccatgctgctgggggtggccat

SEQ ID NO: 577938 - DNA, 75 bp, synthetic construct
  source 1..75: mol_type = other DNA
gaaaggtcagtggctggaagccgccggttttgccactggcacggcggtagatgtcaaagtgatggaaggctgtat

SEQ ID NO: 577939 - DNA, 75 bp, synthetic construct
  source 1..75: mol_type = other DNA
cgaaccgatcccgccgcacctgatcgaccgctttactgtggatgttcttcctgatgttttaccggaatttacccc

SEQ ID NO: 577940 - DNA, 75 bp, synthetic construct
  source 1..75: mol_type = other DNA
tccgttccaggcgcgttattttgcaaccggtgccgcaaccccgggtgctgctaatgcggatgcgaccttcaaggt

SEQ ID NO: 577941 - DNA, 75 bp, synthetic construct
  source 1..75: mol_type = other DNA
cgctgcgccaggtgtgcaaactgtcggcgcgtaaacaaaagcaggtgcaggcgtttattggagtgattgccggta

SEQ ID NO: 577942 - DNA, 75 bp, synthetic construct
  source 1..75: mol_type = other DNA
gcgctgctggacgaagagctggcgaaactttctggcgatacgctggatggcgaaactgctttccgtctgtacgac

SEQ ID NO: 577943 - DNA, 75 bp, synthetic construct
  source 1..75: mol_type = other DNA
gatattggtctgttccgcatcatctctgaatcgggtactgctgcaggcgttcgtcgtatcgaagcggtaaccgga

SEQ ID NO: 577944 - DNA, 75 bp, synthetic construct
  source 1..75: mol_type = other DNA
aacgcgaccagtttcaggaacgcataaagtgggtgtatgaactgttcccacgtctgcatgagcgtcgtattcagc

SEQ ID NO: 577945 - DNA, 75 bp, synthetic construct
  source 1..75: mol_type = other DNA
acaaagtcagcgcccactacggcaaaatccaggcgctgcatgaggtgagcctgcatatcaatcagggcgagattg

SEQ ID NO: 577946 - DNA, 75 bp, synthetic construct
  source 1..75: mol_type = other DNA
ggtggttttaaaaatcacatactggaggctgccactatggctatgatccccactcaaacacacccgttgcttgct

SEQ ID NO: 577947 - DNA, 75 bp, synthetic construct
  source 1..75: mol_type = other DNA
actaacaccattccgttccaggcgcgttattatgcaatcggcgaggcaaccccgggtgctgctaatgcggatgcg

SEQ ID NO: 577948 - DNA, 75 bp, synthetic construct
  source 1..75: mol_type = other DNA
aggttcgtaccgcatcgctggaccaggatggagcgaccagctctgctgtcggttttaacattcaactgaatgatt

SEQ ID NO: 577949 - DNA, 75 bp, synthetic construct
  source 1..75: mol_type = other DNA
gtctggtattttgccgccgaaatgaaagccccgcgctggctccgcaccgccgatggcgtgaagtttatcgacgag

SEQ ID NO: 577950 - DNA, 75 bp, synthetic construct
  source 1..75: mol_type = other DNA
gcagttcaaccgccaggccgatggcacgatggaaccgctgccgaagccgtctgtagataccggtatgggtctgga

SEQ ID NO: 577951 - DNA, 75 bp, synthetic construct
  source 1..75: mol_type = other DNA
aaaagcaatccagagctttatacaacaaagtactaaagatatcagtagttacgaaaaaacgattgaaaatctatt

SEQ ID NO: 577952 - DNA, 75 bp, synthetic construct
  source 1..75: mol_type = other DNA
aacagccagctcgaagtcgcgctgaaaaacctgggcgatgtcgttagctttaagggctattacggcgacacggcg

SEQ ID NO: 577953 - DNA, 75 bp, synthetic construct
  source 1..75: mol_type = other DNA
gctcgacgaggagctaagcatcagtcagctcgaagagttccaggcagtgcaggcggttctgtacggtaaatacac

SEQ ID NO: 577954 - DNA, 75 bp, synthetic construct
  source 1..75: mol_type = other DNA
tgagtcacgcgaacccatcgaaaacacaatatcgtttaatgctggctatcgcgtcagctataccaaccagcctga

SEQ ID NO: 577955 - DNA, 75 bp, synthetic construct
  source 1..75: mol_type = other DNA
atgatttcagagcatgattctgtattggaaagatacccacgtattcagaaagtgctcaatagcactgtgccggca

SEQ ID NO: 577956 - DNA, 75 bp, synthetic construct
  source 1..75: mol_type = other DNA
gcagagttcttccgggatcagggcaaaaatgtattattaatgatggattccgtaactcgttatgcccgagccgcg

SEQ ID NO: 577957 - DNA, 75 bp, synthetic construct
  source 1..75: mol_type = other DNA
cgctgcgccaggtgtgcaagctgtcggcacgtaaacaaaagcaggtgcaggcgtttattggagtgattgccggta

SEQ ID NO: 577958 - DNA, 75 bp, synthetic construct
  source 1..75: mol_type = other DNA
aaacggtggaaatacgctgcgacggtgatgatgaaaacgaggccatacagactctcaccgacttatttcgcgacc

SEQ ID NO: 577959 - DNA, 75 bp, synthetic construct
  source 1..75: mol_type = other DNA
gacggtgatgatgaaaacgaggccatacagactctcaccgccttatttcgcgaccgcttcggtgaagctgaataa

SEQ ID NO: 577960 - DNA, 75 bp, synthetic construct
  source 1..75: mol_type = other DNA
ctgtttgtctacaaagggcaatacctcgacccggtaacagacactgaaacgcgttatatgccggataacacgatg

SEQ ID NO: 577961 - DNA, 75 bp, synthetic construct
  source 1..75: mol_type = other DNA
tctcttcttatcttttcccacgtcgtaaacgctcctttctgacggttgccggcatcggctgggcgcccgttgcgc

SEQ ID NO: 577962 - DNA, 75 bp, synthetic construct
  source 1..75: mol_type = other DNA
gaaaggtcagtggctggaagccgccggttttgccaccggcacggtggtagatgtcaaagtgatggaaggctgtat

SEQ ID NO: 577963 - DNA, 75 bp, synthetic construct
  source 1..75: mol_type = other DNA
atcaactacttcgctgcggaaatgaaagccccgcgttggctgcgtactgccggtggcgtgaagtttatcgacggt

SEQ ID NO: 577964 - DNA, 75 bp, synthetic construct
  source 1..75: mol_type = other DNA
tggcgggattgcttagcgtctctacactcgcgattgccgcagagtcgtctccagatgcgttacgtattggctatc

SEQ ID NO: 577965 - DNA, 75 bp, synthetic construct
  source 1..75: mol_type = other DNA
tacttgcctgccaatgtgaaatctggcgtcctgcttattaacccaaataccggcatcagcatcgatcatgagcta

SEQ ID NO: 577966 - DNA, 75 bp, synthetic construct
  source 1..75: mol_type = other DNA
tcgataccaccgttcaggaacatcgcgatcgcggtgatacctataacggtcaattctttaccagcggaccattaa

SEQ ID NO: 577967 - DNA, 75 bp, synthetic construct
  source 1..75: mol_type = other DNA
cgttccgcgtatctgggtagatctggattacgttgtaacccagccggaagcgctgaaagttcttcacatctccgc

SEQ ID NO: 577968 - DNA, 75 bp, synthetic construct
  source 1..75: mol_type = other DNA
cattccgcactaaggcactaaataaaatcgctactgctcaacgtaacaacgaacaaattaataaggaacaaatca

SEQ ID NO: 577969 - DNA, 75 bp, synthetic construct
  source 1..75: mol_type = other DNA
ggtgtgaccgttctgtctggtctgaatagcccgatcgctgttccgaaaatgaccgcttccagcgttgacgctttc

SEQ ID NO: 577970 - DNA, 75 bp, synthetic construct
  source 1..75: mol_type = other DNA
cgtggtgatcccggatatcactttccatctggcaaaagagaatgcgcagatggcgctgttttcgccctatgacgt

SEQ ID NO: 577971 - DNA, 75 bp, synthetic construct
  source 1..75: mol_type = other DNA
gtttcctgttttctgctgcgtattgaagacaatatggagtcgattggtcgggcggtaaattccgcactgcaactg

SEQ ID NO: 577972 - DNA, 75 bp, synthetic construct
  source 1..75: mol_type = other DNA
tgcacgcacaccatcccgatattctgcgttttctcgacacaaaacgggaaaatgccgatgaaaaaatccgcatta

SEQ ID NO: 577973 - DNA, 75 bp, synthetic construct
  source 1..75: mol_type = other DNA
aatcggtcagaaatggtcgggtaccgttaccgtcgataccaccattcaggaacatcgcgatcgcggtgataccta

SEQ ID NO: 577974 - DNA, 75 bp, synthetic construct
  source 1..75: mol_type = other DNA
accttgctgatgggggtatggtttggtccggcatgggggatctgtatgtggttttttacttggaaggacgaaggg

SEQ ID NO: 577975 - DNA, 75 bp, synthetic construct
  source 1..75: mol_type = other DNA
acgctgtttttccccgataccgccaccactcgcgatatcaacaaagcgcagatttacgcctggcgcaaaggtatc

SEQ ID NO: 577976 - DNA, 75 bp, synthetic construct
  source 1..75: mol_type = other DNA
tcgttccgcgtatctgggtagatctggactatgttgtaacccagccggaagctctgaaagttcttcacatctccg

SEQ ID NO: 577977 - DNA, 75 bp, synthetic construct
  source 1..75: mol_type = other DNA
acagggcggcgtgcgggtgctgaaagacggcaccgatctcaatcaaaccggatcgttttatctggcagctcgccc

SEQ ID NO: 577978 - DNA, 75 bp, synthetic construct
  source 1..75: mol_type = other DNA
ctctgttgcacgcacggttctgcgggccgtccgtgactctgtggtctctgttgcccgcgctgtatggaactggat

SEQ ID NO: 577979 - DNA, 75 bp, synthetic construct
  source 1..75: mol_type = other DNA
ctctgttgcacgcacggttctgcgcgccgtccgtgactccgtggtctctgttgcccgcgcagtatggaactggat

SEQ ID NO: 577980 - DNA, 75 bp, synthetic construct
  source 1..75: mol_type = other DNA
agacttaatacctgccttgcactgttgcggcccacgctgaacgagccgatcccgccgcatctgatcgacggtttt

SEQ ID NO: 577981 - DNA, 75 bp, synthetic construct
  source 1..75: mol_type = other DNA
acagatgctggaggcgttaaacgttggcagtatcgatctcggcagtaccggagatattccgccaatctttgccca

SEQ ID NO: 577982 - DNA, 75 bp, synthetic construct
  source 1..75: mol_type = other DNA
ccagcgcgaacaaagcatcgctttactggcaaaaacgatgggcttaccggcaccggttattgcctcgtatctgga

SEQ ID NO: 577983 - DNA, 75 bp, synthetic construct
  source 1..75: mol_type = other DNA
gggaggtcaccccggtcagtgcactcatgacagtgcttcccggacatgccgccatccctctgatgacacgcctgc

SEQ ID NO: 577984 - DNA, 75 bp, synthetic construct
  source 1..75: mol_type = other DNA
cgttccgcgtatctgggtagacctggacttcaccgtagttcagccggaagctctgaaagttctgaaaatgggcga

SEQ ID NO: 577985 - DNA, 75 bp, synthetic construct
  source 1..75: mol_type = other DNA
cttgagctagatctggacgattcaacctacagagcacagggcgcgatcgttccgcgtatctgggtagatctggat

SEQ ID NO: 577986 - DNA, 75 bp, synthetic construct
  source 1..75: mol_type = other DNA
ctctgttgcacgcacggttctgcgcgccgtccgtgactcagtggtctctgttgcccgcgccgtatggaactggat

SEQ ID NO: 577987 - DNA, 75 bp, synthetic construct
  source 1..75: mol_type = other DNA
ctctgttgcacgcacggttctgcgtgccgtccgtgactctgtggtctctgttgcccgcgcggtatggaactggat

SEQ ID NO: 577988 - DNA, 75 bp, synthetic construct
  source 1..75: mol_type = other DNA
ctctgttgcacgcacggttctgcgagccgtccgtgactccgtggtctctgttgcccgcgccgtatggaactggat

SEQ ID NO: 577989 - DNA, 75 bp, synthetic construct
  source 1..75: mol_type = other DNA
aggactggcctgaccagtggaaacaaaaaacagacagaaacgggattcacaaatcccgtaaatgagcaaaaaacg

SEQ ID NO: 577990 - DNA, 75 bp, synthetic construct
  source 1..75: mol_type = other DNA
taccgtgctttctgacatgctgcgcgccatccgcgacgcagagcacgcacagagaatcagtgaaaccactgaacg

SEQ ID NO: 577991 - DNA, 75 bp, synthetic construct
  source 1..75: mol_type = other DNA
tgcattcactgaaacggcacgaacgccgggcgctgatgcgttcgcttcgtgacaaacaggcaaaaaacagcagtg

SEQ ID NO: 577992 - DNA, 75 bp, synthetic construct
  source 1..75: mol_type = other DNA
cgccctgaatcgcgcgttgcgtgatgccccctggtctgcgctttgttatttacgcatccctggcatggaaatgct

SEQ ID NO: 577993 - DNA, 75 bp, synthetic construct
  source 1..75: mol_type = other DNA
cgctgtttctgatacttttccagtttgctgcatttgtaggattactggcgagcagagaaaatctggtcggtgtca

SEQ ID NO: 577994 - DNA, 75 bp, synthetic construct
  source 1..75: mol_type = other DNA
cgtttatggactatcaacctggcgtagaacaaacaccacaggcgttgtgggggatctgcctgttaatgacgatca

SEQ ID NO: 577995 - DNA, 75 bp, synthetic construct
  source 1..75: mol_type = other DNA
cacgcggcgagaatggcggggcgcaaccggacagaattttataaactgctttcccgacacgagctggatgcaaac

SEQ ID NO: 577996 - DNA, 75 bp, synthetic construct
  source 1..75: mol_type = other DNA
actcaccgtgatctgccaaaagcgatggcgcgcgggaattccgcgaagatctctattaccgcctcaacgttgtca

SEQ ID NO: 577997 - DNA, 75 bp, synthetic construct
  source 1..75: mol_type = other DNA
cgcgtggcgcgtttactggcgctgtcagcaatcgcgaaggtttattccaggcggcggaaggcggtacgctatttc

SEQ ID NO: 577998 - DNA, 75 bp, synthetic construct
  source 1..75: mol_type = other DNA
tattaagaatgagctggaacctaaaatgggcatggacctcaatctggtacagctgattgcctataccgactggaa

SEQ ID NO: 577999 - DNA, 75 bp, synthetic construct
  source 1..75: mol_type = other DNA
atgaaaaaagctggcctgtcaattagccgtgtattgtgcggcgacgaaaacgagatccgcatagaaattaaattt

SEQ ID NO: 578000 - DNA, 75 bp, synthetic construct
  source 1..75: mol_type = other DNA
cgtttccgcgacacagcaaggcgtgtttagtttcctcaccaaacccgtcgataaagacgcgttgtatcaggcaat

SEQ ID NO: 578001 - DNA, 75 bp, synthetic construct
  source 1..75: mol_type = other DNA
tccagaaggagctctcgaagatggggcacgggtacaacctgacagagatcaaggaggcaattcaggtttgtcgtg

SEQ ID NO: 578002 - DNA, 75 bp, synthetic construct
  source 1..75: mol_type = other DNA
tcgtgggaactcaaactggcggcggtatggggtggtcatgaaggttcgctgttgctttgggtgctgttgctttcc

SEQ ID NO: 578003 - DNA, 75 bp, synthetic construct
  source 1..75: mol_type = other DNA
aggatgcattacttgccgcattgcgcttaagcgccggttcgcctggtgcggcactggcgttgtttcagggagata

SEQ ID NO: 578004 - DNA, 75 bp, synthetic construct
  source 1..75: mol_type = other DNA
atcatggcgcttcgcaagttaccaatgttgatgttccgggtgtcgttatctcgctggcaaatcgtctttctccct

SEQ ID NO: 578005 - DNA, 75 bp, synthetic construct
  source 1..75: mol_type = other DNA
ccgtcagcaaatgatggaaccgtcaattcgctggaacggcatccatgactggtatgcggtcatgggggagaaaac

SEQ ID NO: 578006 - DNA, 75 bp, synthetic construct
  source 1..75: mol_type = other DNA
tatgtttctggcaaacgcgcacagcttccggcgctactggcgcattccggtgtgttgctgtttgccgccggtatc

SEQ ID NO: 578007 - DNA, 75 bp, synthetic construct
  source 1..75: mol_type = other DNA
cgtattttaaccgcgcgacgttaccgtttggtctgttgatgctggtggtgattgtgctggcgacgtttgtctctg

SEQ ID NO: 578008 - DNA, 75 bp, synthetic construct
  source 1..75: mol_type = other DNA
ggaaaaatgtaccagattgacccgctgttactggaggccatcgcccggcacgaaagtggcctgaatccccgggca

SEQ ID NO: 578009 - DNA, 75 bp, synthetic construct
  source 1..75: mol_type = other DNA
ccttatccccctggcgtgctttgcgtggtgcccggggaagtctggggtggggcggttcaacgttatttccttgcg

SEQ ID NO: 578010 - DNA, 75 bp, synthetic construct
  source 1..75: mol_type = other DNA
gcgattcttgcgcgctgtaagctgttccgcccgtttatcccgcccgttgttgatggcaaattgtggcaggattat

SEQ ID NO: 578011 - DNA, 75 bp, synthetic construct
  source 1..75: mol_type = other DNA
tgtttgccacattcgtgaacagttaatgtctgtcacaggcatcaaccgcgagcttctcatcaccgatcttttact

SEQ ID NO: 578012 - DNA, 75 bp, synthetic construct
  source 1..75: mol_type = other DNA
ttactggcaacactgcgcagccgttgtcgcttgcattaccttgcaccgccaccggaacagtacgcagtgagctgg

SEQ ID NO: 578013 - DNA, 75 bp, synthetic construct
  source 1..75: mol_type = other DNA
gaacatattgaccatcaggaatttcgccagatacagacagaactggagcaggaagctcacctgaaaaaattacgt

SEQ ID NO: 578014 - DNA, 75 bp, synthetic construct
  source 1..75: mol_type = other DNA
agcgatggcgcgcggggaattccgtgaagatctctattaccgcctcaacgttgtcagcctgaaaattccggctct

SEQ ID NO: 578015 - DNA, 75 bp, synthetic construct
  source 1..75: mol_type = other DNA
atgtcgcgaaaagtcgcctgaagatgagtaacccgtggcacttgttggctacagggtttgggagtgggttaagcc

SEQ ID NO: 578016 - DNA, 75 bp, synthetic construct
  source 1..75: mol_type = other DNA
atgtcgcgaaaagccgcctgaaaatgagtaacccgtggcacctgttggcgacgggatttggtagcggattaagtc

SEQ ID NO: 578017 - DNA, 75 bp, synthetic construct
  source 1..75: mol_type = other DNA
gcgaaaacacgtccgctcgaggcatttattcaactgctggatgtgcctgactcggcaagacagggatatcaatga

SEQ ID NO: 578018 - DNA, 75 bp, synthetic construct
  source 1..75: mol_type = other DNA
ggggatcatgatcgatgatatcgtcgccggggtgatttccgctggaatactctattttatcggccatcactggcc

SEQ ID NO: 578019 - DNA, 75 bp, synthetic construct
  source 1..75: mol_type = other DNA
ggggatcatgatcgatgatattgtcgccggggtgatttccgcaggcatcctgtactttatcggtcatcactggcc

SEQ ID NO: 578020 - DNA, 75 bp, synthetic construct
  source 1..75: mol_type = other DNA
ctgatgacttttttgccctggcaactctactcactggtggtaatgctggggatctgcatcggcgtctatctttgc

SEQ ID NO: 578021 - DNA, 75 bp, synthetic construct
  source 1..75: mol_type = other DNA
gccgcaaggacatgcgccagtaacccgcgccagtcaggttaatggttacaacatctatgcctttcgcgccaattg

SEQ ID NO: 578022 - DNA, 75 bp, synthetic construct
  source 1..75: mol_type = other DNA
ttaacgccgttgccgaggctggcagcattactcaggctgcggcaaaagtgcatcgcgtaccgtcgaacctcacaa

SEQ ID NO: 578023 - DNA, 75 bp, synthetic construct
  source 1..75: mol_type = other DNA
cagtaaggggcatcaggtagttgccagcagttccctggttccccataacgacccaactttgttgtttaccaacgc

SEQ ID NO: 578024 - DNA, 75 bp, synthetic construct
  source 1..75: mol_type = other DNA
cacgccacaagggcatatgccagtaacccgcgccagtcaggttaatggctgtaacatttatgccttccgtgccaa

SEQ ID NO: 578025 - DNA, 75 bp, synthetic construct
  source 1..75: mol_type = other DNA
accgcgaggagctgatgatcgtcacgccacaaggacatgcgccagtaacccgcgccagtcaggttaatgggtttt

SEQ ID NO: 578026 - DNA, 75 bp, synthetic construct
  source 1..75: mol_type = other DNA
gcagtgcgcattccggccacgctggcggaatttaaccgtcgttatcccaaaattcagttttcactttccaccggc

SEQ ID NO: 578027 - DNA, 75 bp, synthetic construct
  source 1..75: mol_type = other DNA
ggacgaatttattggcatgtggatcaccctgatggcgctgccgaccaatgactggcagtgggttgccgccgggtt

SEQ ID NO: 578028 - DNA, 75 bp, synthetic construct
  source 1..75: mol_type = other DNA
tggtggtgctggtcaccgcctgcggtatgttgctgttgctggcacaggtgcaggtgggaatgcgtcagcgtcatc

SEQ ID NO: 578029 - DNA, 75 bp, synthetic construct
  source 1..75: mol_type = other DNA
gcgatgaatcattactgtcgcagtcgctacgatctggtggcgatcctcaaaacgctgggggcagggcgagcgcaa

SEQ ID NO: 578030 - DNA, 75 bp, synthetic construct
  source 1..75: mol_type = other DNA
caccatcgacgtgggcgatgccaccttgcggattgccggagaagtgattcaggaaccggattccggttttaaccc

SEQ ID NO: 578031 - DNA, 75 bp, synthetic construct
  source 1..75: mol_type = other DNA
tttatcggtggtattgatgcgcactgcttcgaagaaagttatctgcgtgaactgattacagaagttgcaccgcac

SEQ ID NO: 578032 - DNA, 75 bp, synthetic construct
  source 1..75: mol_type = other DNA
caccatgacggtcatctcgctgctggtggggctgcgaccataccgcctgttgttggcaacgcagcctttacgcgt

SEQ ID NO: 578033 - DNA, 75 bp, synthetic construct
  source 1..75: mol_type = other DNA
tactggccacgcagcctttacgcgtattacgtaatgatgtggtagcgaacgtctggccgctgaagttttatctgc

SEQ ID NO: 578034 - DNA, 75 bp, synthetic construct
  source 1..75: mol_type = other DNA
atcgctggccgatttcctcgacccacatgatccgggtaaaacggtggaaggttatccgccaccaaaccgggcggt

SEQ ID NO: 578035 - DNA, 75 bp, synthetic construct
  source 1..75: mol_type = other DNA
gtcgcactgaatggatggttaccgagtctctgtccgatttcctcgacccgcataatccgggtaaaacggtagaag

SEQ ID NO: 578036 - DNA, 75 bp, synthetic construct
  source 1..75: mol_type = other DNA
ggggatcatgatcgatgatattgtcgctggggtgatttccgctggaatactctattttatcggtcatcattggcc

SEQ ID NO: 578037 - DNA, 75 bp, synthetic construct
  source 1..75: mol_type = other DNA
aagtggactgggaaagtctgcggcctaatttctattttatttttcctgaaggggcgctggacgggcagccgcaga

SEQ ID NO: 578038 - DNA, 75 bp, synthetic construct
  source 1..75: mol_type = other DNA
aaaactggctgaaaaagtgtggttttgttgatatccgcattgtggacgtgagcgttaccacaacagaagagcagc

SEQ ID NO: 578039 - DNA, 75 bp, synthetic construct
  source 1..75: mol_type = other DNA
attaaacgcattgaaacgctgatgcgcaacctgatgccatggcgcaaagggccgttctcactgtatggcgtcaac

SEQ ID NO: 578040 - DNA, 75 bp, synthetic construct
  source 1..75: mol_type = other DNA
ttttattcgtaccattgcagtggcgcggatcatgatgccgacctcatatgtgcgtctttctgccggacgcgagca

SEQ ID NO: 578041 - DNA, 75 bp, synthetic construct
  source 1..75: mol_type = other DNA
ctgccgataatatagcgggcgtttattacagacccgttcaaaagtatataaatggcacctggtataatgtagcga

SEQ ID NO: 578042 - DNA, 75 bp, synthetic construct
  source 1..75: mol_type = other DNA
atgcgttaggtggtagctctattgttcttggtgataatgataccggatttaaacagaatggagacggtattcttg

SEQ ID NO: 578043 - DNA, 75 bp, synthetic construct
  source 1..75: mol_type = other DNA
gctggcaggggataacgaacaacagcagcgtctggagcaggcgctgatgaccccggacactgacgaatattacaa

SEQ ID NO: 578044 - DNA, 75 bp, synthetic construct
  source 1..75: mol_type = other DNA
cagcactttgctgtcaattaaaaccggtgcttgcccggaagattgcaaatattgcccgcaaagctcgcgctataa

SEQ ID NO: 578045 - DNA, 75 bp, synthetic construct
  source 1..75: mol_type = other DNA
cgatggggctggaggcgtgtatgacgctgggcacgttgagtgaatctcaggcgcagcgcctcgcgaacgccgggc

SEQ ID NO: 578046 - DNA, 75 bp, synthetic construct
  source 1..75: mol_type = other DNA
ttcagcccgacacccctcattactggtataaccggtattgtcgtcactcgttatgtgccgatttcagaacactga

SEQ ID NO: 578047 - DNA, 75 bp, synthetic construct
  source 1..75: mol_type = other DNA
cgggcgtggaactttgaaccggatgccggtacggccctcaaccggtatatcgggcaggatggcatttgcagagca

SEQ ID NO: 578048 - DNA, 75 bp, synthetic construct
  source 1..75: mol_type = other DNA
aactcctatgcagtgataaaccagatggatgagatgatacccatgcagcttatgaaaatagcctccggagcgaat

SEQ ID NO: 578049 - DNA, 75 bp, synthetic construct
  source 1..75: mol_type = other DNA
ggaagcggggcattatccggccattgatatcggccagtcgatcagccgctgcatgaatcaggtgaccagcctgga

SEQ ID NO: 578050 - DNA, 75 bp, synthetic construct
  source 1..75: mol_type = other DNA
acatcagcaatccgcccgtgcgatgaaacaacactacgccgcctatatggagatcaaaccgctgatcccgctcgg

SEQ ID NO: 578051 - DNA, 75 bp, synthetic construct
  source 1..75: mol_type = other DNA
tacagcgtgagcagattaaaaaaaccattgaagcgacggctcctggcagttttgaagttttcattcacaacgaca

SEQ ID NO: 578052 - DNA, 75 bp, synthetic construct
  source 1..75: mol_type = other DNA
gtgagtgatttttctgctttcgataacgcgttgcgctcgctggaatcgatcccattagcccgcgtcgccggtcgg

SEQ ID NO: 578053 - DNA, 75 bp, synthetic construct
  source 1..75: mol_type = other DNA
ccaggtggattatttgcaacacatcgaagaactggcggcgtttatcaagggactcggcgatgttccggtacgcct

SEQ ID NO: 578054 - DNA, 75 bp, synthetic construct
  source 1..75: mol_type = other DNA
atcaggcgttgcagattgttgacggcaaagtggtgtggaacgctgtggtttgcgagcagtgtgatacctgcctga

SEQ ID NO: 578055 - DNA, 75 bp, synthetic construct
  source 1..75: mol_type = other DNA
ggagttggtacgacgaatgcgttaggtggtagctctattgttcttggtgataatgataccggatttaaacagaat

SEQ ID NO: 578056 - DNA, 75 bp, synthetic construct
  source 1..75: mol_type = other DNA
tgcgagcagtgcgatacctgcctgaagatgtgtccgcaacatgccacaccaatggcgcaatccatgagcgtggat

SEQ ID NO: 578057 - DNA, 75 bp, synthetic construct
  source 1..75: mol_type = other DNA
gaacgcgtttcatgcccacggcgtgtatggcgaggcgcaaagctgggcgagcgccacgccggaagacgttgagca

SEQ ID NO: 578058 - DNA, 75 bp, synthetic construct
  source 1..75: mol_type = other DNA
atccatgagcgtggatgaggtgcttagccatatccgcaaagcagtgctgtttattgaagggataacggtgagcgg

SEQ ID NO: 578059 - DNA, 75 bp, synthetic construct
  source 1..75: mol_type = other DNA
tggttactgggatacttctggatatgttctgaccgcagccggaaacagcaacaccgatgaatttattgatacatt

SEQ ID NO: 578060 - DNA, 75 bp, synthetic construct
  source 1..75: mol_type = other DNA
tgtgcgcgcgcggtgctggacgggcatatcgtattaacccgcaaactggcggaagcggggcactatccggccatt

SEQ ID NO: 578061 - DNA, 75 bp, synthetic construct
  source 1..75: mol_type = other DNA
cgcctggtttcgcgaccgcgggcatcacgttttactgctggtggattccctgacccgctatgcgatggcgcagcg

SEQ ID NO: 578062 - DNA, 75 bp, synthetic construct
  source 1..75: mol_type = other DNA
gaggcatacaacaatggctacccttccccctatggcaatgtgcttcaccttaaaggtgccaccgctgctggcgaa

SEQ ID NO: 578063 - DNA, 75 bp, synthetic construct
  source 1..75: mol_type = other DNA
gccattatgagcaataacgcgctgctgataaaaaataacctcagcgaaattaaaattgccggggcatcagcacag

SEQ ID NO: 578064 - DNA, 75 bp, synthetic construct
  source 1..75: mol_type = other DNA
ttattaaacacgctggaagaagctggtattcaaccggataaaacaaaattaaaccagcttgcactgtccattaaa

SEQ ID NO: 578065 - DNA, 75 bp, synthetic construct
  source 1..75: mol_type = other DNA
aaatctacggccaggagatgaaccgtactacctataacctggcgcgtatgaacatgatcctacacggggttcact

SEQ ID NO: 578066 - DNA, 75 bp, synthetic construct
  source 1..75: mol_type = other DNA
ctcaacgcattgcagcgaggctctcttccagccaacgggatgaccattatctacataatgatttccacgcgctgg

SEQ ID NO: 578067 - DNA, 75 bp, synthetic construct
  source 1..75: mol_type = other DNA
aagccagcatagtaaaaattcctttgttcacagagcgatgccctgcgggttttccgtcaccggctgcggactaca

SEQ ID NO: 578068 - DNA, 75 bp, synthetic construct
  source 1..75: mol_type = other DNA
aacaacactgtgttgtacagaagaatggatgggcgaacacagtcagtaaaaataaacgatttcaatgaactgttt

SEQ ID NO: 578069 - DNA, 75 bp, synthetic construct
  source 1..75: mol_type = other DNA
ctgacgacaccatagaaagagagttgttacggctaggctttgcgcccgtggctaaagaaccgcatcgttactgga

SEQ ID NO: 578070 - DNA, 75 bp, synthetic construct
  source 1..75: mol_type = other DNA
catatcgctcagggttacctggtagtgaaagccgctatacgacgagaaaaatcgtggatgaaaaccattgagttt

SEQ ID NO: 578071 - DNA, 75 bp, synthetic construct
  source 1..75: mol_type = other DNA
tggcggatggtgttttatggtctcgccgataatgatccgtcatatcctgaccagccagtactgctggaggatgat

SEQ ID NO: 578072 - DNA, 75 bp, synthetic construct
  source 1..75: mol_type = other DNA
ggtggttctgggatccggtggaaaacgcctctttactaccctggctttctgccacagcgctgctgcacagtttat

SEQ ID NO: 578073 - DNA, 75 bp, synthetic construct
  source 1..75: mol_type = other DNA
gacacgccagcgggggattttccgtcactggtcgctgctgctggcaatagttactctgatgttgtcgctgttggg

SEQ ID NO: 578074 - DNA, 75 bp, synthetic construct
  source 1..75: mol_type = other DNA
gaacgctttatccgatgatttacggcctgctgggctggggacgcctctccgttggcgcgccgtattttaaccgcg

SEQ ID NO: 578075 - DNA, 75 bp, synthetic construct
  source 1..75: mol_type = other DNA
atgtcatcaccgttatgctgcatgaggagacattgattgacattaacgaattaaataattatctgacccgcaatg

SEQ ID NO: 578076 - DNA, 75 bp, synthetic construct
  source 1..75: mol_type = other DNA
gcagggggtaaaagcgatgggtctggaggcgtgtatgacgctgggcacgttgagtgaatctcaagcgcagcgcct

SEQ ID NO: 578077 - DNA, 75 bp, synthetic construct
  source 1..75: mol_type = other DNA
catttggggcggccctccgggaagtccggaagaagacggcgaccgctacattgagatctggaacatcgtcttcat

SEQ ID NO: 578078 - DNA, 75 bp, synthetic construct
  source 1..75: mol_type = other DNA
ttgctaccaaaagaagcagatatagcaagtacagcacttcctgctttacgggtagaagatttgaataagatgatt

SEQ ID NO: 578079 - DNA, 75 bp, synthetic construct
  source 1..75: mol_type = other DNA
gacgcatgacgttgctcggcgttctggtggcgctgattggcgtagggattgtgactcgcgccgggcagttgaaag

SEQ ID NO: 578080 - DNA, 75 bp, synthetic construct
  source 1..75: mol_type = other DNA
gcactgggcgggttgatgtggtatctgcaattctttttctatgcctggggccacgcccgcattccggcgcagtat

SEQ ID NO: 578081 - DNA, 75 bp, synthetic construct
  source 1..75: mol_type = other DNA
gctcttaaccttgagccaagtaaacgctttccacgtgcggacataatgctcaatgagtttaatgcagctactaag

SEQ ID NO: 578082 - DNA, 75 bp, synthetic construct
  source 1..75: mol_type = other DNA
atttaagtgaactgcaaggccgcctgtggaatattgccgataccctgcgcggtaaaatgaatgccgatgaattcc

SEQ ID NO: 578083 - DNA, 75 bp, synthetic construct
  source 1..75: mol_type = other DNA
ttgcagcttttgtctcatttggaaccgtgcatagcgccagcgcggaaaatggaagtgatgctctgtcactgacag

SEQ ID NO: 578084 - DNA, 75 bp, synthetic construct
  source 1..75: mol_type = other DNA
ttacgttgattgtcggtacgctgatgacgccaattatcaacggcaatttcgatgtgctgattaataccgaaggcg

SEQ ID NO: 578085 - DNA, 75 bp, synthetic construct
  source 1..75: mol_type = other DNA
tatcatcgtcattaataaaccgcgcgacctggtggtacatcctggcgcgggtaacccggatggcacggtactgaa

SEQ ID NO: 578086 - DNA, 75 bp, synthetic construct
  source 1..75: mol_type = other DNA
caacgctgagattgaagaagaagcgcgttttgaaccgcaggatatcccgctggatatcgtctatgaagatgaaga

SEQ ID NO: 578087 - DNA, 75 bp, synthetic construct
  source 1..75: mol_type = other DNA
ctacatcaatttatctgactgtatctggcagaagggttggatggctttcatatgggaaagacggcaacggtgaag

SEQ ID NO: 578088 - DNA, 75 bp, synthetic construct
  source 1..75: mol_type = other DNA
tgcgtcagtggaactttgatgccctgggtgtggcaaatgcaatgcaaacattatggtctgagatagcgctgcgtg

SEQ ID NO: 578089 - DNA, 75 bp, synthetic construct
  source 1..75: mol_type = other DNA
atccagagaaccttgaacgttttatgcagctattggaaatgagccaagagtggatggatgtattacgcggcggcg

SEQ ID NO: 578090 - DNA, 75 bp, synthetic construct
  source 1..75: mol_type = other DNA
cccaaaaattacgaaaagctggtgcaggacactaacttttctcatctttttgaggggggaaagcctcggccaaat

SEQ ID NO: 578091 - DNA, 75 bp, synthetic construct
  source 1..75: mol_type = other DNA
aagcggctcggaattactggtctgcacttgatggcgacaagaaaaacagcttccgttttcatcatatttctactg

SEQ ID NO: 578092 - DNA, 75 bp, synthetic construct
  source 1..75: mol_type = other DNA
atggcttaccccaccaataaattaccagacttacgcggtgaatttatccgtggctgggatgatgggcgcggggtg

SEQ ID NO: 578093 - DNA, 75 bp, synthetic construct
  source 1..75: mol_type = other DNA
gctttttctgctgaagaatacccagaactggcaaaggcttacccgacaaataaattgcctgatttacgtggtgag

SEQ ID NO: 578094 - DNA, 75 bp, synthetic construct
  source 1..75: mol_type = other DNA
caaggtgcaattaacggtagatttaccagtcaatacagaacggaatcctcagaggggaatgaaacccgcccacgc

SEQ ID NO: 578095 - DNA, 75 bp, synthetic construct
  source 1..75: mol_type = other DNA
taccttggtttgggagaaggctcagcattacctgttggggtgcctgttccgtggccttcagccactccgccaaca

SEQ ID NO: 578096 - DNA, 75 bp, synthetic construct
  source 1..75: mol_type = other DNA
tacccggaactggcaaaggcttacccgacaaatatattgcctgatttacgtggtgaatttattcgtggctgggat

SEQ ID NO: 578097 - DNA, 75 bp, synthetic construct
  source 1..75: mol_type = other DNA
cggtgaatttattcgtggctgggatgacgggcgtggtattgatgctgtacgtgccttgctaagtcttcagaatgg

SEQ ID NO: 578098 - DNA, 75 bp, synthetic construct
  source 1..75: mol_type = other DNA
gaggaagatgacccaggcgtcgcggttgagaatgccccctcttcttctgaagacgaagaaaatgtaatgaacgca

SEQ ID NO: 578099 - DNA, 75 bp, synthetic construct
  source 1..75: mol_type = other DNA
tcaacatgggcaagtattatctacaggtctaaaggaagccgaaattattgagggttatggcgcttataactggac

SEQ ID NO: 578100 - DNA, 75 bp, synthetic construct
  source 1..75: mol_type = other DNA
aactgtaggtactttttatgtggggctagctatcatctcgggaactttgagcggctcaggtgctaaatttaccga

SEQ ID NO: 578101 - DNA, 75 bp, synthetic construct
  source 1..75: mol_type = other DNA
tactggtgatgctgtgctttttgctggcgggttactggctgtgggtcggtattgatggctttgtactgctcgccc

SEQ ID NO: 578102 - DNA, 75 bp, synthetic construct
  source 1..75: mol_type = other DNA
cattgtgttgctctacactctctggagctactacaaaatgtgggggcgcatgacgacagaaactctccgccgtaa

SEQ ID NO: 578103 - DNA, 75 bp, synthetic construct
  source 1..75: mol_type = other DNA
ctgttcccctttgtcatgccgtcaagcgtgagtccgatctccagcctgacgttgtgggacagcacttccagtcag

SEQ ID NO: 578104 - DNA, 75 bp, synthetic construct
  source 1..75: mol_type = other DNA
attcgtaatataaccggcacatttggtaatggacaaaccgaagctaatgcggctattagctttaatacagcgagt

SEQ ID NO: 578105 - DNA, 75 bp, synthetic construct
  source 1..75: mol_type = other DNA
gtgttcaattttgaagacagtacgttcgttaaacgtttgcagaaggtaaaagggcgccgactggcagttctttca

SEQ ID NO: 578106 - DNA, 75 bp, synthetic construct
  source 1..75: mol_type = other DNA
taaatctccccagagtgggagttatggttttgaataaaaaagatcaattgggtaatgactccaacttactgatag

SEQ ID NO: 578107 - DNA, 75 bp, synthetic construct
  source 1..75: mol_type = other DNA
atcccgtcagtactggtcgaaaccggttttatcagcaacaacagcgaagaacgtttgctggcgagcgacgattac

SEQ ID NO: 578108 - DNA, 75 bp, synthetic construct
  source 1..75: mol_type = other DNA
gtggacaaagctggtcgctcccggtgcagacgctggtgttcatcacctcgttgacgtttattccggcaattttac

SEQ ID NO: 578109 - DNA, 75 bp, synthetic construct
  source 1..75: mol_type = other DNA
gccattagtacactggtggtttttctggtggtgagctggagttcgcacctggtacacggtgaacgtaaagtcata

SEQ ID NO: 578110 - DNA, 75 bp, synthetic construct
  source 1..75: mol_type = other DNA
taaccattccgggcagcatcatcgggatgctgatcctgtttgtcctgctggccttgcaaattcttccggcgaagt

SEQ ID NO: 578111 - DNA, 75 bp, synthetic construct
  source 1..75: mol_type = other DNA
taaacgttggtttgggagaaggttcggcattacccgttggcgtgcctgttccgtggccttccgccactccgccaa

SEQ ID NO: 578112 - DNA, 75 bp, synthetic construct
  source 1..75: mol_type = other DNA
atgccatttgatcgttatttctgcattttcataaacgttggtttgggagaaggttcggcattacccgttggcgtg

SEQ ID NO: 578113 - DNA, 75 bp, synthetic construct
  source 1..75: mol_type = other DNA
ggcgttccttgcttaatgcacaatcacattcggttatagatcatattcattatatggagttatggactggtgaag

SEQ ID NO: 578114 - DNA, 75 bp, synthetic construct
  source 1..75: mol_type = other DNA
tcggtcattcccagcgggtagggtatgatgtagcgaccagtatgatcagtcagttgcaacgcattggcgaaatac

SEQ ID NO: 578115 - DNA, 75 bp, synthetic construct
  source 1..75: mol_type = other DNA
tgcacaaacgctacggctggtggtcgatctcaccgaaaacggtaaaaccgaagcggtgaagcggcagaatggcag

SEQ ID NO: 578116 - DNA, 75 bp, synthetic construct
  source 1..75: mol_type = other DNA
gtatggcgtggatataataaatctaaaaaatatgcagcatttaacgcaaaaacattaactcaaaaagatggtgtt

SEQ ID NO: 578117 - DNA, 75 bp, synthetic construct
  source 1..75: mol_type = other DNA
cagctggcgaccaaacgcgctgcactgttggtgatgctgtgctttttgctggcgggttactggctgtgggtcggt

SEQ ID NO: 578118 - DNA, 75 bp, synthetic construct
  source 1..75: mol_type = other DNA
gttatcgacaatgtgctgcgtatttttccgctgctgttgtcgtggatctccttctggctgctgtacagcattgtt

SEQ ID NO: 578119 - DNA, 75 bp, synthetic construct
  source 1..75: mol_type = other DNA
ccgcttttcccatgttctcagacgttagtatccaactgcgtcactttatttttgccaactttctccctgccactg

SEQ ID NO: 578120 - DNA, 75 bp, synthetic construct
  source 1..75: mol_type = other DNA
ccgctgctgaccatcctgactgcacgtatggataaagccgcgtgggcgtttgtgttctcttccctgacgctggcc

SEQ ID NO: 578121 - DNA, 75 bp, synthetic construct
  source 1..75: mol_type = other DNA
tttctgaatcagtgttcaacggctgatcctgctgctatatcgaaaatcatgagtaagtttgtcgtgtcagaggtt

SEQ ID NO: 578122 - DNA, 75 bp, synthetic construct
  source 1..75: mol_type = other DNA
aaagacttttttaatattctgaaaaagaaaaaagggagtattcgctggagtaaaacatttgatgctcgtaaagat

SEQ ID NO: 578123 - DNA, 75 bp, synthetic construct
  source 1..75: mol_type = other DNA
atgacaaccctggcaggtaaccttgcctatgtgtcgttgctctcattagtgccgctggttgccgttgtttttgcg

SEQ ID NO: 578124 - DNA, 75 bp, synthetic construct
  source 1..75: mol_type = other DNA
tcaatgaatgaggctgtgatgcagattgagcaggaagtcctgaccacctggcctgctgatgccattgcccgggcg

SEQ ID NO: 578125 - DNA, 75 bp, synthetic construct
  source 1..75: mol_type = other DNA
caatgaatgaggccgtgatgaagatagagcaggaagtgctcaccacctggcctgccgatgccattgcccgggcgg

SEQ ID NO: 578126 - DNA, 75 bp, synthetic construct
  source 1..75: mol_type = other DNA
gacgcccgcaaaacaaccgcccggcagccaaaccacgcggtcgtgaagcgcagcctgccggtaatagcgcgatga

SEQ ID NO: 578127 - DNA, 75 bp, synthetic construct
  source 1..75: mol_type = other DNA
tcgagtcgcccgttttgtggatcttcccgctactggggttcttctgcccattgctgacggtgatggcgatttatc

SEQ ID NO: 578128 - DNA, 75 bp, synthetic construct
  source 1..75: mol_type = other DNA
tcaatgaatgaggccgtgatgcagatcgaacaggatgtgctgacgacctggccggctgatgccattgcccgggcg

SEQ ID NO: 578129 - DNA, 75 bp, synthetic construct
  source 1..75: mol_type = other DNA
atgctaaacctgcgacctggcagagcaatccggatgcgtactacgacaaaaaccggactattgaagagtctgcct

SEQ ID NO: 578130 - DNA, 75 bp, synthetic construct
  source 1..75: mol_type = other DNA
tgatccgcccaggcacatacgccgctgccttgccgctgcgtccggtgatggtcttcatccccgagcaaaaacggc

SEQ ID NO: 578131 - DNA, 75 bp, synthetic construct
  source 1..75: mol_type = other DNA
cgtgagtccaatctccagcctgacgttgtgggacagcacttccagtcagctgacgctgagcattatgttggtaat

SEQ ID NO: 578132 - DNA, 75 bp, synthetic construct
  source 1..75: mol_type = other DNA
ttgctgacggtgatggcgatttatcgtggtcgcccgggttggggatttttaatggcgtcattgatgcaatttggc

SEQ ID NO: 578133 - DNA, 75 bp, synthetic construct
  source 1..75: mol_type = other DNA
tcgaatcgcccgttttgtggatcttcccgctgctggggttcttctgcccattgctgacggtgatggcgatttatc

SEQ ID NO: 578134 - DNA, 75 bp, synthetic construct
  source 1..75: mol_type = other DNA
catttgccttcatggatttagggcaatggcgtgctcagccctgacagaatcaggcttatggtcgagggatgcagt

SEQ ID NO: 578135 - DNA, 75 bp, synthetic construct
  source 1..75: mol_type = other DNA
tgtttgcttgcatgggttcagggcgatggcctgctctgcactgaccgaatcaggactctggtcacgcgatgcagt

SEQ ID NO: 578136 - DNA, 75 bp, synthetic construct
  source 1..75: mol_type = other DNA
attccctttgttgtgcggcttcctcagtcttgggatggtgattttgcaaggtggcgtctggttacaactgaagac

SEQ ID NO: 578137 - DNA, 75 bp, synthetic construct
  source 1..75: mol_type = other DNA
atgatatcgatgccttacccgacggcatctacgcccaggtggcagtttactccgaccatttcagccatgtttcgg

SEQ ID NO: 578138 - DNA, 75 bp, synthetic construct
  source 1..75: mol_type = other DNA
ttattcaaaagggcgaagtgctttttaagctcgacccggtacgttatcaggcgcgagtagacagactccaggctg

SEQ ID NO: 578139 - DNA, 75 bp, synthetic construct
  source 1..75: mol_type = other DNA
tttgattttattgatgaactacaaccacccttacacttttaccgcgcaaaaggcagtgatagcgatccctatcac

SEQ ID NO: 578140 - DNA, 75 bp, synthetic construct
  source 1..75: mol_type = other DNA
gtttgctgccgctggtggcgcgtaatgatgatgaacgccggatagtgattaatagtgttggtgcgcactgggaag

SEQ ID NO: 578141 - DNA, 75 bp, synthetic construct
  source 1..75: mol_type = other DNA
tttactccgtaaacctggtggcgcgtaaaccggagaagcgtactccacagaccaacagctacgcgcggaagtttc

SEQ ID NO: 578142 - DNA, 75 bp, synthetic construct
  source 1..75: mol_type = other DNA
gcgcaacatccgcgcagcacacatgaatataaacacacaaccaatccgcttcacatgccagaacgccaccggcgg

SEQ ID NO: 578143 - DNA, 75 bp, synthetic construct
  source 1..75: mol_type = other DNA
cgccaacgacggtatctctctggcgcagaccactgaaggcgcactgtctgaaatcaacaacaacttgcagcgtgt

SEQ ID NO: 578144 - DNA, 75 bp, synthetic construct
  source 1..75: mol_type = other DNA
aatacactggatgcgaaaggggctgccactgcacagttcgtcgttcaatccggcagtgatttctactccgcgtcg

SEQ ID NO: 578145 - DNA, 75 bp, synthetic construct
  source 1..75: mol_type = other DNA
ctggtctgcgtattaacagcgcgaaagatgacgccgcaggtcaggcgattgctaaccgctttacctctaacatta

SEQ ID NO: 578146 - DNA, 75 bp, synthetic construct
  source 1..75: mol_type = other DNA
tcgtgagttgactgttcaggcctctaacgacactaactccaaatcggacttagactctatccaggctgaaattaa

SEQ ID NO: 578147 - DNA, 75 bp, synthetic construct
  source 1..75: mol_type = other DNA
agatgcagcaaaatcgttgcaatctaccaccaacccgctcgaaactatcgacaaagcattggctaaagttgacaa

SEQ ID NO: 578148 - DNA, 75 bp, synthetic construct
  source 1..75: mol_type = other DNA
attccaagggtaatgataccgatacatatgcgcttaaagatacaaatggcaatctttacgctgcggatgtgaatg

SEQ ID NO: 578149 - DNA, 75 bp, synthetic construct
  source 1..75: mol_type = other DNA
gtgcggccccagacggtgaacataccttggctgccatccattacctggcagagctaaacggctcgaaaaaacgga

SEQ ID NO: 578150 - DNA, 75 bp, synthetic construct
  source 1..75: mol_type = other DNA
ccagcgcatgttcgtacctgctgaaagaagaaacaccggacgaatcgattcgtgctgaggtgttcagctacatcc

SEQ ID NO: 578151 - DNA, 75 bp, synthetic construct
  source 1..75: mol_type = other DNA
gatctctatatggcctgatgccgctgtacctcaatcacaaaggggtgagcaatgccagcattggtttctggatgg

SEQ ID NO: 578152 - DNA, 75 bp, synthetic construct
  source 1..75: mol_type = other DNA
taaccttaaacaccattaatgttacttatgatgattatgcgaacggtgttgacgatgccaagcaaacaggtcagc

SEQ ID NO: 578153 - DNA, 75 bp, synthetic construct
  source 1..75: mol_type = other DNA
gcgtgagttgactgttcaggcgacgacggggactaactctgattctgacctgtcttctattcaggacgaaatcaa

SEQ ID NO: 578154 - DNA, 75 bp, synthetic construct
  source 1..75: mol_type = other DNA
tgatgcggctgctactctgccaacgactgcaaccaaagagtttactggcacagcaactaatgatccgctggccct

SEQ ID NO: 578155 - DNA, 75 bp, synthetic construct
  source 1..75: mol_type = other DNA
gttcagacttgggggcggtgcagaaccgtttcgactccacaatcaccaacttgggaaatactctaaacaacttat

SEQ ID NO: 578156 - DNA, 75 bp, synthetic construct
  source 1..75: mol_type = other DNA
tattggttatatcggtggcggctggctgtttgacctgggcaaatcggcgcaccagccagagcttccgtggatgat

SEQ ID NO: 578157 - DNA, 75 bp, synthetic construct
  source 1..75: mol_type = other DNA
aaattactatgttatattttcgaaaaaggtaagttatatagagaaatatgttcggaaattcgtagtgaggctctg

SEQ ID NO: 578158 - DNA, 75 bp, synthetic construct
  source 1..75: mol_type = other DNA
cttatcacgtagcctgattaaattacaatataatgtacacttacggaatgtaatttatattgtgtttttttgtga

SEQ ID NO: 578159 - DNA, 75 bp, synthetic construct
  source 1..75: mol_type = other DNA
aggataaataatgctggtaaaatcaatatcaaagagcaaggtgaagggattaaacaacagaatgcagattttgag

SEQ ID NO: 578160 - DNA, 75 bp, synthetic construct
  source 1..75: mol_type = other DNA
tgcagcgcagcgtgagatgctggcacgagagtttgtgaaagctcaagtagaaccacgaatcgacagttcctttga

SEQ ID NO: 578161 - DNA, 75 bp, synthetic construct
  source 1..75: mol_type = other DNA
cttaaaccctggcgttccatcggaaatctgattacgctgatcgtgggtatcctgtgcgtatcggtaatgttcttt

SEQ ID NO: 578162 - DNA, 75 bp, synthetic construct
  source 1..75: mol_type = other DNA
aagtctattgattcacgaatgcttgggctggtggagcgcatggaaaaagccgctgcgtcgcttattgccggaaag

SEQ ID NO: 578163 - DNA, 75 bp, synthetic construct
  source 1..75: mol_type = other DNA
tcagtaaattatcgtcagattctcctgaatttcctctatgggaatattattatcgctgccgcctgctacaggatt

SEQ ID NO: 578164 - DNA, 75 bp, synthetic construct
  source 1..75: mol_type = other DNA
attcaaaaaaagaagccaccaaaaagaaatttgaagaaaaaaacgaaaaaaaggattatttcaaggccatacgtg

SEQ ID NO: 578165 - DNA, 75 bp, synthetic construct
  source 1..75: mol_type = other DNA
attaggaaaaatatcgagaaaggaggtgatagtgtttctgagcaggagaaattgagaaagcattacattaataaa

SEQ ID NO: 578166 - DNA, 75 bp, synthetic construct
  source 1..75: mol_type = other DNA
atctcctgcagaaaccgatacaagactttcagaaaaagcaactgaagaattatgaggagaaaataaatgtctatg

SEQ ID NO: 578167 - DNA, 75 bp, synthetic construct
  source 1..75: mol_type = other DNA
atggaagaagaagccctgtgtctctttacagcattgtactggctgaatcaggggagaggaaaacggcagtgtgca

SEQ ID NO: 578168 - DNA, 75 bp, synthetic construct
  source 1..75: mol_type = other DNA
gtggtcattggagcttctattcgctacggtcattaccattcagcgttccaggcatttgtcaaaaagcatgccacc

SEQ ID NO: 578169 - DNA, 75 bp, synthetic construct
  source 1..75: mol_type = other DNA
cggcggcattgacctgttcacgtataaaactagacctcaagtctcgaacgaaacagcgatgtactggtactggtt

SEQ ID NO: 578170 - DNA, 75 bp, synthetic construct
  source 1..75: mol_type = other DNA
acaaccgaaaacgtcctgtccgccgtcctcaccctgagggaggtcattatctcccggacacagcagattaccgtc

SEQ ID NO: 578171 - DNA, 75 bp, synthetic construct
  source 1..75: mol_type = other DNA
tgaaagaccgtgatttaagtgcgctggaagacgctgcggaagatcaaccgcgtgttgtaagagctgcgcaacctt

SEQ ID NO: 578172 - DNA, 75 bp, synthetic construct
  source 1..75: mol_type = other DNA
gcttattcgttcactgttgagaagtagccgaccatctggtctggctcaggcgattatggaagtgggccgggtcaa

SEQ ID NO: 578173 - DNA, 75 bp, synthetic construct
  source 1..75: mol_type = other DNA
gcgccttcaagattctttgcgccgtcgtgatctctggctggagaacagtgaccggtggggggacccgcgtcaaaa

SEQ ID NO: 578174 - DNA, 75 bp, synthetic construct
  source 1..75: mol_type = other DNA
tgcttttgctgtctggcctgcttttgttgactctggcgatcgcagtgttaaatacactcgtgccgctttggctcg

SEQ ID NO: 578175 - DNA, 75 bp, synthetic construct
  source 1..75: mol_type = other DNA
tgctctgccctttaaacttatgctgtttgtgctggtggatggctggcaattgcttgtcggttcgctggcgcaaag

SEQ ID NO: 578176 - DNA, 75 bp, synthetic construct
  source 1..75: mol_type = other DNA
tacgtgagtttatgctgcgtcagacccgtgaggcagatttagggttgtttgccagactggcgaataccggcccgt

SEQ ID NO: 578177 - DNA, 75 bp, synthetic construct
  source 1..75: mol_type = other DNA
tgccgggaccggaagccgtgccgatgcgcattttgctaccggcctatgtgaccagcgagctgaaaaccgcattcc

SEQ ID NO: 578178 - DNA, 75 bp, synthetic construct
  source 1..75: mol_type = other DNA
tcgcccacgccaatgtgcgcattgccggaagcgacatcatgatgagcgatgccatgccgtcaggaaaagccagct

SEQ ID NO: 578179 - DNA, 75 bp, synthetic construct
  source 1..75: mol_type = other DNA
atgtcgccggtgatcgacaaaatttatgtcgatgcgtaccagccattcagcgaagagaaaatctcaatgcaggag

SEQ ID NO: 578180 - DNA, 75 bp, synthetic construct
  source 1..75: mol_type = other DNA
tgatgatgaccagtttcacccgtatcatcattgtttttggattattgcgaaacgcgctgggcacgccctccgcac

SEQ ID NO: 578181 - DNA, 75 bp, synthetic construct
  source 1..75: mol_type = other DNA
agactgaagcgattgctgtatactcgtgcatggctcagtaatgaacgccccggactgatgttcgattttgccacc

SEQ ID NO: 578182 - DNA, 75 bp, synthetic construct
  source 1..75: mol_type = other DNA
ggcgctggatgaggccgttgatgtgctcgatatgctgatactggatatcactcgtgcggcgaagaaaacggggca

SEQ ID NO: 578183 - DNA, 75 bp, synthetic construct
  source 1..75: mol_type = other DNA
ggactaaacccggttgaaatcatgacggacacagcaggtaccagtgacattatctttggcttgttctggctactg

SEQ ID NO: 578184 - DNA, 75 bp, synthetic construct
  source 1..75: mol_type = other DNA
ttacctggcagagctaaacggctcgaaaaaacggatcctggacgatgcacctgagcatatcatttcaggcccttg

SEQ ID NO: 578185 - DNA, 75 bp, synthetic construct
  source 1..75: mol_type = other DNA
tgatgagttcacaatggcgtcccgatcgctgtgccgtcattgccggggcgctgcgttatccacgttaccgctggt

SEQ ID NO: 578186 - DNA, 75 bp, synthetic construct
  source 1..75: mol_type = other DNA
ggaattgcgcttcagctcaccaccgcccgttttctgggcacctttctgacagacttaacccgggttctgccaggt

SEQ ID NO: 578187 - DNA, 75 bp, synthetic construct
  source 1..75: mol_type = other DNA
acaatgcgcctgaacatattattaccggcccctggaaacgcctggtatacgatgcggagggccggatacagcgtg

SEQ ID NO: 578188 - DNA, 75 bp, synthetic construct
  source 1..75: mol_type = other DNA
ggaattgcccttcagctcacgacagcccggtttctgggaacattcatcaatgacgccatgcagatccccgctggc

SEQ ID NO: 578189 - DNA, 75 bp, synthetic construct
  source 1..75: mol_type = other DNA
ggggtatcagttttccccccggcttgccgatgcaggtgaggcggtgttctggcgggtgaataaatcggcaaacta

SEQ ID NO: 578190 - DNA, 75 bp, synthetic construct
  source 1..75: mol_type = other DNA
gtgaccatcagtggtccggcgtttaatgaagcaattgaacgctggaaaactctgaacgattttggcctgcatgct

SEQ ID NO: 578191 - DNA, 75 bp, synthetic construct
  source 1..75: mol_type = other DNA
cgaggccgttgacgtgctggatatgctgatcctcaatattaccagggaggcgaagaaaaccgggcagaaaaagcg

SEQ ID NO: 578192 - DNA, 75 bp, synthetic construct
  source 1..75: mol_type = other DNA
ggtctggtcactaacgccgtggtgctgtggaactcactctatatgcaggaagcactttcgcatataaggacaacc

SEQ ID NO: 578193 - DNA, 75 bp, synthetic construct
  source 1..75: mol_type = other DNA
aaattatgacagacacggccggtgccagtgacatcatttttggcctgttctggctgctgggatatcagttttctc

SEQ ID NO: 578194 - DNA, 75 bp, synthetic construct
  source 1..75: mol_type = other DNA
ctatgcagaaaaaaacggtgcctttattcagggcgtactggagacctttagccaggccgatgcgttaacccacag

SEQ ID NO: 578195 - DNA, 75 bp, synthetic construct
  source 1..75: mol_type = other DNA
acaatatgcatcacaatataaagaattggttggtggttttggcacaaccccccatctcacactttggacatcgca

SEQ ID NO: 578196 - DNA, 75 bp, synthetic construct
  source 1..75: mol_type = other DNA
gaagatacgcagaaatacggccaggcgattggtcacatcggtaaacttgctgcgggttctctgaaagtgggcgac

SEQ ID NO: 578197 - DNA, 75 bp, synthetic construct
  source 1..75: mol_type = other DNA
aacgttgacgcctgggctatctgggatccctactactccgcggcattgctacagggcggcgtgcgggtgctgaaa

SEQ ID NO: 578198 - DNA, 75 bp, synthetic construct
  source 1..75: mol_type = other DNA
ttatgaaaaccgtctggtgccgaaaaaagtcgatattaacgcatctggcagcccactcaactggaaggaaaacaa

SEQ ID NO: 578199 - DNA, 75 bp, synthetic construct
  source 1..75: mol_type = other DNA
ttatgaaaaccgactggtgccgaaaaaagtcgatatccgccagcgcatctggcagcccactcaactggaaggaaa

SEQ ID NO: 578200 - DNA, 75 bp, synthetic construct
  source 1..75: mol_type = other DNA
aattggtaatgaacgcggtcattttttagatatcagtgaagatgcacccgttttgcatctggagcaattagtctt

SEQ ID NO: 578201 - DNA, 75 bp, synthetic construct
  source 1..75: mol_type = other DNA
cactttaccactgaagttattacgtcacggattgaaccggctaatcgttatgtggcagagaaattaagaataacg

SEQ ID NO: 578202 - DNA, 75 bp, synthetic construct
  source 1..75: mol_type = other DNA
atcaggtcttgtggagccgctcgcgattaggtgaacgccaaaaagggcagggaattacaggtgctgatcatttct

SEQ ID NO: 578203 - DNA, 75 bp, synthetic construct
  source 1..75: mol_type = other DNA
ataacaaaggtgcgccatacgcgtctgataacttctggcagatgggtgacactggtccgtgcggcccgtgtactg

SEQ ID NO: 578204 - DNA, 75 bp, synthetic construct
  source 1..75: mol_type = other DNA
ttcaaccacccgccgtcactagaggcattatggttttttactgaagcctttataaaatggattaaaatagaacag

SEQ ID NO: 578205 - DNA, 75 bp, synthetic construct
  source 1..75: mol_type = other DNA
gtaaggaaacggcaacaagcgatatctactttgggaaatctaactttgcttgtaagcgtgcagcaagaaccgtat

SEQ ID NO: 578206 - DNA, 75 bp, synthetic construct
  source 1..75: mol_type = other DNA
tagctaacatcgccgatgatgagaaagcagccatgtataatgatcttgtctcctacgtagtacgaagatccgtat

SEQ ID NO: 578207 - DNA, 75 bp, synthetic construct
  source 1..75: mol_type = other DNA
taattgctctaacaattatggtccttatcacttcccggaaaaacttattccattggttattctgaatgctctgga

SEQ ID NO: 578208 - DNA, 75 bp, synthetic construct
  source 1..75: mol_type = other DNA
ttctgcttctaaagcatccagcgatcatttagtccgcgcgtggaaacgtacctatggtttaccgaccattgtgac

SEQ ID NO: 578209 - DNA, 75 bp, synthetic construct
  source 1..75: mol_type = other DNA
aagcagcgcgcaattattggtctggtctggatgatgaaaagaaaaaaaacttccgctttcatcatatttctactg

SEQ ID NO: 578210 - DNA, 75 bp, synthetic construct
  source 1..75: mol_type = other DNA
ggcggattgagtgcgaaaacgcctgcaatgaccccactgatgctggatggcactacccgtaagctggttgtgtgg

SEQ ID NO: 578211 - DNA, 75 bp, synthetic construct
  source 1..75: mol_type = other DNA
gcgcgacaaggttgatcacgagctaaccggcaaagacggcggcgcaatccagattgaaacatcaccgatgagtac

SEQ ID NO: 578212 - DNA, 75 bp, synthetic construct
  source 1..75: mol_type = other DNA
atctggccaatacaaaatgggtcgaaaatgtgaaaagtggcgcctatcaatcgtggattgcacagaactatgagg

SEQ ID NO: 578213 - DNA, 75 bp, synthetic construct
  source 1..75: mol_type = other DNA
tacaccgacagcactggtggtcacgacctgaatatgcgcctttcgcagcagcgtgctgattccgttgccagcgca

SEQ ID NO: 578214 - DNA, 75 bp, synthetic construct
  source 1..75: mol_type = other DNA
aaatcttttacgatcacggcgaccacatttggggtgggcctccgggaagcccggaagaagacggcgaccgttaca

SEQ ID NO: 578215 - DNA, 75 bp, synthetic construct
  source 1..75: mol_type = other DNA
atatcgtgttccattctatcaacgtgcctacgtatggacgcaacgaaaccaatggtcagctttgttggaggatat

SEQ ID NO: 578216 - DNA, 75 bp, synthetic construct
  source 1..75: mol_type = other DNA
acctgaccaatacaaaatgggtggaaaatgtgaaaagtggtgcctatcagtcatggattaaacagaactatgagg

SEQ ID NO: 578217 - DNA, 75 bp, synthetic construct
  source 1..75: mol_type = other DNA
tattttcgcacagcaccagccagacgcggtgatgcacctggcggcagagagccacgttgaccgttcaataactgg

SEQ ID NO: 578218 - DNA, 75 bp, synthetic construct
  source 1..75: mol_type = other DNA
tatcactttccggaaaaattgattccactagtaattcttaatgctctggaaggtaaggcattacctatttatggc

SEQ ID NO: 578219 - DNA, 75 bp, synthetic construct
  source 1..75: mol_type = other DNA
tgaaactgtctgaaaaggtaaccaacaaaaaaatgtcagtggaagagtttatggatagagttcgccaaaaactga

SEQ ID NO: 578220 - DNA, 75 bp, synthetic construct
  source 1..75: mol_type = other DNA
ttcttgcgcgctgtaagctgttccgcccgtttatcccgcccgttgttgatggcaaattgtggcaggattatccga

SEQ ID NO: 578221 - DNA, 75 bp, synthetic construct
  source 1..75: mol_type = other DNA
gctatttgccgcgctggacgtcaatgccaaaatccatgaaggggagagtgggcgtcggctatgggctgagtgcgt

SEQ ID NO: 578222 - DNA, 75 bp, synthetic construct
  source 1..75: mol_type = other DNA
cgcctggcaattattcagttgggaacttacgacggcactgtctataacgcccgtcaggtgatcgacaccatcggt

SEQ ID NO: 578223 - DNA, 75 bp, synthetic construct
  source 1..75: mol_type = other DNA
ccctgcggcatttattgaaaccaatattgttggtacttatgtccttttggaagcggctcgcaattactggtctgc

SEQ ID NO: 578224 - DNA, 75 bp, synthetic construct
  source 1..75: mol_type = other DNA
acgaagtgtatggcgatctgccgcacccggatgaagtgagcgcaggcaccgagttaccgctgttcaccgagacca

SEQ ID NO: 578225 - DNA, 75 bp, synthetic construct
  source 1..75: mol_type = other DNA
ggcggttcagcgttattttctcgcgttggaagaaggggggaatttgctgccaggattttcgccggagctacaagg

SEQ ID NO: 578226 - DNA, 75 bp, synthetic construct
  source 1..75: mol_type = other DNA
gatcgccgatatgcgattgatgcttgcaagatgagcgctgcgttggattggcagccagaggagacttttgagtct

SEQ ID NO: 578227 - DNA, 75 bp, synthetic construct
  source 1..75: mol_type = other DNA
catctcgttcgtgcctggctgcgtacatacggtcttccaacaatggtgaccaactgttcgaataactatggccca

SEQ ID NO: 578228 - DNA, 75 bp, synthetic construct
  source 1..75: mol_type = other DNA
atctggctaatacaaattgggttgagaatgtgaaaagcggtgcttatcagtcgtggattgaacagaactatgagg

SEQ ID NO: 578229 - DNA, 75 bp, synthetic construct
  source 1..75: mol_type = other DNA
cactggatgttaacgccaaaattcatgaaggggagagtgggcgtcggctgtgggctgagtgcgttgagttgggta

SEQ ID NO: 578230 - DNA, 75 bp, synthetic construct
  source 1..75: mol_type = other DNA
ccaccgttttatgacacgctgacgcagtacgttgagatgggcaacagcacctttgcttgccctggacatcaacat

SEQ ID NO: 578231 - DNA, 75 bp, synthetic construct
  source 1..75: mol_type = other DNA
acgaagtctatggcgatctaccccatccggacgaagttgagcaggggacacctcttcctcttttcacagagaaaa

SEQ ID NO: 578232 - DNA, 75 bp, synthetic construct
  source 1..75: mol_type = other DNA
acctgtccaatacaaaatgggttgataatgtgaaaagtggtgcctatcaatcgtggattgaacagaattatgagg

SEQ ID NO: 578233 - DNA, 75 bp, synthetic construct
  source 1..75: mol_type = other DNA
gggctaccagtgcacaagttacaacgactctgtttcaggggttaggcgcagtaatttgggcagaacctgaagagc

SEQ ID NO: 578234 - DNA, 75 bp, synthetic construct
  source 1..75: mol_type = other DNA
aggcaaattcgtgattcttgaactggagcacagcaaaccacaaaatgaatggcaagaaactataacagaccacac

SEQ ID NO: 578235 - DNA, 75 bp, synthetic construct
  source 1..75: mol_type = other DNA
gccggaaattacggcgatgatgcgtgcaccggatcataaaaactttcgtgaatgcggcgatcaattcatgcgtta

SEQ ID NO: 578236 - DNA, 75 bp, synthetic construct
  source 1..75: mol_type = other DNA
gggagtgttattttatatgcatggaataatataattctttctatgttaaatggattgtcatttattaaaaattat

SEQ ID NO: 578237 - DNA, 75 bp, synthetic construct
  source 1..75: mol_type = other DNA
gtaaacccacctgggttgcaggagaaaaactaaaccaaacaattagatataaagatgcttctgctgctgttgtca

SEQ ID NO: 578238 - DNA, 75 bp, synthetic construct
  source 1..75: mol_type = other DNA
ggaagaaattttaacaacagagtttagcgtaaaaaattatcatatcaataaaatatttatcagccagtcaacagc

SEQ ID NO: 578239 - DNA, 75 bp, synthetic construct
  source 1..75: mol_type = other DNA
cgctataaatttgagtgcgcagatatctgcgatagcgcaaagatgcaagagatatttaccaatcatcaaccagat

SEQ ID NO: 578240 - DNA, 75 bp, synthetic construct
  source 1..75: mol_type = other DNA
atttgaataataatgattggtgccggcgagttcaagatggctcttatcaacgtgagcgtttgggggtaattagat

SEQ ID NO: 578241 - DNA, 75 bp, synthetic construct
  source 1..75: mol_type = other DNA
cgatgttgtacataccatctgcgacctgctggatgagatcgtacctaaagcagtgtcataccgtgaacaaatcac

SEQ ID NO: 578242 - DNA, 75 bp, synthetic construct
  source 1..75: mol_type = other DNA
ttgaaatttcattcagagataaaaaactctataaaaaatgcgaagaaattcaaaggtattttatttgttaatata

SEQ ID NO: 578243 - DNA, 75 bp, synthetic construct
  source 1..75: mol_type = other DNA
aaagttttggtgccaactcaggaagctattcagaaactggtcgcggcgcgtctggcagctgatgtgacgggcgtt

SEQ ID NO: 578244 - DNA, 75 bp, synthetic construct
  source 1..75: mol_type = other DNA
tggaaggaatacgctgtttttatatcagcaagagtaagactaaagcagggatcagacacgttccgatacattcga

SEQ ID NO: 578245 - DNA, 75 bp, synthetic construct
  source 1..75: mol_type = other DNA
atgcctcaggttacgacctaaatcctgagctcatccccgatattatttcggctattaaaaaactatcaacgccac

SEQ ID NO: 578246 - DNA, 75 bp, synthetic construct
  source 1..75: mol_type = other DNA
agggttgtggaacattcggcctccattcatctgaaaaggatcttcaatcccggctttagtggttatgcggattta

SEQ ID NO: 578247 - DNA, 75 bp, synthetic construct
  source 1..75: mol_type = other DNA
aattacgtggttcggtcaatccagaatgcacgctggcgcaactgggcgcggcgaaaatgtggcgactgctgcacg

SEQ ID NO: 578248 - DNA, 75 bp, synthetic construct
  source 1..75: mol_type = other DNA
cagcctcggcgcactgactggcggtcaggcgctgcaacaggcgaaagcgggtattgaagcggtttacctgtctgg

SEQ ID NO: 578249 - DNA, 75 bp, synthetic construct
  source 1..75: mol_type = other DNA
ctacaaatagacaatgctttcacagcttgcgcgggatgtttatcacttgtcttgatcgtgccggagtgcctgaac

SEQ ID NO: 578250 - DNA, 75 bp, synthetic construct
  source 1..75: mol_type = other DNA
caaagcagtaactggtattcggaaaatcacagaagaacttggcgcaaaccgggtagctacggttaccacagttac

SEQ ID NO: 578251 - DNA, 75 bp, synthetic construct
  source 1..75: mol_type = other DNA
gcctgttagtccttatgggtttgctcagaagcagagcttcactttttcaatgccagagtattttgctttttataa

SEQ ID NO: 578252 - DNA, 75 bp, synthetic construct
  source 1..75: mol_type = other DNA
ggtcatgaagcggcggaagtgtctgattacctgcttctgcaagttcttaatcgtttcggccccttactgatccat

SEQ ID NO: 578253 - DNA, 75 bp, synthetic construct
  source 1..75: mol_type = other DNA
ttatccgacctgttagtccctatgggtttgcacaaaaagcatcgttcacattttctatggaggaatacttcagtt

SEQ ID NO: 578254 - DNA, 75 bp, synthetic construct
  source 1..75: mol_type = other DNA
acataacgttctctgtttcgcttgatggtgaggaagttgttcacaacagtaatcgaattcttggtcatgggcttg

SEQ ID NO: 578255 - DNA, 75 bp, synthetic construct
  source 1..75: mol_type = other DNA
taaatcacccgaaactacacatgtttcaacaatgattcccaagctgtccgctattcgtgatgagtacatgacggt

SEQ ID NO: 578256 - DNA, 75 bp, synthetic construct
  source 1..75: mol_type = other DNA
acttcgaagatcagctcgcttcagtgaaaaaatgtggtcatatgggcggcaaagtgctggtgccgactcaggaag

SEQ ID NO: 578257 - DNA, 75 bp, synthetic construct
  source 1..75: mol_type = other DNA
ataagctggcggcaatgggcgtgactgaggagcaggcaggagaaactctgggtttatcgcccgggggcgatacca

SEQ ID NO: 578258 - DNA, 75 bp, synthetic construct
  source 1..75: mol_type = other DNA
ccgtttacgactatcaagtccctgtacctgaagacccattttccttccggcttgagctccataaatgtgacgaat

SEQ ID NO: 578259 - DNA, 75 bp, synthetic construct
  source 1..75: mol_type = other DNA
gatatatataagagatgaatttatagatgaaagaaaattatttggtgaatcagtagaagctgtaaaaacaaaatt

SEQ ID NO: 578260 - DNA, 75 bp, synthetic construct
  source 1..75: mol_type = other DNA
tccgagctggcagcgcaggagttcccggatctcgacgtttcgctgcgtggcgcggtgtctatcgcccgccgtttg

SEQ ID NO: 578261 - DNA, 75 bp, synthetic construct
  source 1..75: mol_type = other DNA
aattcggtgtgccgacggtaaccgacatcatcaaagagctggaaaaaccgggtcgcgatccgcgtccggaattta

SEQ ID NO: 578262 - DNA, 75 bp, synthetic construct
  source 1..75: mol_type = other DNA
tccccggaagttttatccgtagcaatagatgctggatgcaatgtcaatcaaattgatcattcagggaaaggattt

SEQ ID NO: 578263 - DNA, 75 bp, synthetic construct
  source 1..75: mol_type = other DNA
ctggcggccagcatgtatccggatcagtcgctctatccggcaaactcggtgccagcggtggtggagcggatcaac

SEQ ID NO: 578264 - DNA, 75 bp, synthetic construct
  source 1..75: mol_type = other DNA
ctcgcggccagcatgtatccggatcagtctctctacccggcaaactcggtgccagccgtggtggaacggatcaac

SEQ ID NO: 578265 - DNA, 75 bp, synthetic construct
  source 1..75: mol_type = other DNA
ccagcttccagcagcagctgtcggatatgggctacaagttccagttcatcaccctggcggggatccacagcatgt

SEQ ID NO: 578266 - DNA, 75 bp, synthetic construct
  source 1..75: mol_type = other DNA
atggcgcgtcgccacttttccagtcaggctttggtgctgatcgttatctctatcgccatcaatatgatcggcggt

SEQ ID NO: 578267 - DNA, 75 bp, synthetic construct
  source 1..75: mol_type = other DNA
tactgaccaatttactctggggattactgaccgacccgatcgctgccgcttttgcccccgtcgcgatggtcatcg

SEQ ID NO: 578268 - DNA, 75 bp, synthetic construct
  source 1..75: mol_type = other DNA
ctattcagaaactggtcgcagcgcgtctggcagccgacgtgacgggcgttccaactctgctggttgcacgtaccg

SEQ ID NO: 578269 - DNA, 75 bp, synthetic construct
  source 1..75: mol_type = other DNA
atggggcttccccctgatgaatttatatcattactagatagccaactattttcaaagcttggggagttaagggat

SEQ ID NO: 578270 - DNA, 75 bp, synthetic construct
  source 1..75: mol_type = other DNA
cccgttatttaggtgaaattgatccggatatcatttcaggaaaaaaacgcgcttcatttttacctgttttaaaaa

SEQ ID NO: 578271 - DNA, 75 bp, synthetic construct
  source 1..75: mol_type = other DNA
aggcggaagatgttacctcgttgcgggcagggccgttaaaatcacaattgtcacttacgatccatactgatgttg

SEQ ID NO: 578272 - DNA, 75 bp, synthetic construct
  source 1..75: mol_type = other DNA
ttcagatcgacggcgacaaggcggtcgtgaacaacgacggtgacagtgccatcagcaacggcggcaccggcacgc

SEQ ID NO: 578273 - DNA, 75 bp, synthetic construct
  source 1..75: mol_type = other DNA
tgccgatcgtcagcaactgcgtactctgatccgcaacgcgaagaaagagaaagaagggaataagccgccgaaatc

SEQ ID NO: 578274 - DNA, 75 bp, synthetic construct
  source 1..75: mol_type = other DNA
cgagttagcccagcgtattaagatggaaggtcgccgccgccagttgcagctcatcggtaagatgctgcgccagcg

SEQ ID NO: 578275 - DNA, 75 bp, synthetic construct
  source 1..75: mol_type = other DNA
atcgatgccttacccgacggcatctacgcccaggtggcagtttactccgaccatttcagccatgtttcggtgatg

SEQ ID NO: 578276 - DNA, 75 bp, synthetic construct
  source 1..75: mol_type = other DNA
ggccaccggcacagccatcacccagaactcagaaaaactggccaccgtcattgcccaggacgggcaggccacccg

SEQ ID NO: 578277 - DNA, 75 bp, synthetic construct
  source 1..75: mol_type = other DNA
ctgacttactacaaaaccggcacttttgctactgaagcgctgaaatggcctgcttccgtggatgaggtaaaaaag

SEQ ID NO: 578278 - DNA, 75 bp, synthetic construct
  source 1..75: mol_type = other DNA
gtggtctgggacggacagaaagccggtagtgcggttggcatactggtactgccgcttgaaggcacagagacggta

SEQ ID NO: 578279 - DNA, 75 bp, synthetic construct
  source 1..75: mol_type = other DNA
gtaccgaaatcgcgggtaataacgcggtggtgaatcaggacggtacactggatgtcagcggtggcggtcacggta

SEQ ID NO: 578280 - DNA, 75 bp, synthetic construct
  source 1..75: mol_type = other DNA
ttccgctggctggacaccctcggtagcgcaaaatacctcgatatggcacagcaatatcagcacctcggcccgctg

SEQ ID NO: 578281 - DNA, 75 bp, synthetic construct
  source 1..75: mol_type = other DNA
ctcccttcaccgctggcttcgctgatgtccgatgacacctggttatggccatccgttcccggaacgccggcactg

SEQ ID NO: 578282 - DNA, 75 bp, synthetic construct
  source 1..75: mol_type = other DNA
tgatcttgatgcccctatgttaaatatatacgatggctcatttatttcttcgaagttaatatctgagtttgggtt

SEQ ID NO: 578283 - DNA, 75 bp, synthetic construct
  source 1..75: mol_type = other DNA
atccggtaacatgccatcatgggcgaagaaaaatcccgcagagctatggaaagccgcagatgaatttgaacgaaa

SEQ ID NO: 578284 - DNA, 75 bp, synthetic construct
  source 1..75: mol_type = other DNA
aatttaatcccttcggctatcgcattacttataggatttactgacgcagtgaccagaaagtttcttacttacttt

SEQ ID NO: 578285 - DNA, 75 bp, synthetic construct
  source 1..75: mol_type = other DNA
gtgtttatctttgcggttttaataaaggcctccaaagaacagagaacaataaaatcactttctgccgcagcaatt

SEQ ID NO: 578286 - DNA, 75 bp, synthetic construct
  source 1..75: mol_type = other DNA
ctctctttccgaatggagcaggcgaatatatgcaggagcacggtatttagacaaactggagcgtaatgtttttta

SEQ ID NO: 578287 - DNA, 75 bp, synthetic construct
  source 1..75: mol_type = other DNA
gatgccgcaaatgccattcagcaggaacaggagcaaaagcaaaaaatcaaggcagttgagcctgttcgttcagcc

SEQ ID NO: 578288 - DNA, 75 bp, synthetic construct
  source 1..75: mol_type = other DNA
ttattgcttcagtaccgcaaggttatgaaaacggtcattcagggagaggaaaggcttgctcgtttaggggatgcc

SEQ ID NO: 578289 - DNA, 75 bp, synthetic construct
  source 1..75: mol_type = other DNA
tttgaagtgttcaatcctgaagaccgtgcgtacgacaaagtgaccgtcacggttggtgctgacggtaatgccacc

SEQ ID NO: 578290 - DNA, 75 bp, synthetic construct
  source 1..75: mol_type = other DNA
atggtgtacagacgctcctgagcagccgtatcagtattaacggtaacctgatccccacatcacaaatgtgtaatc

SEQ ID NO: 578291 - DNA, 75 bp, synthetic construct
  source 1..75: mol_type = other DNA
tatcatttcttattgctcatgaaggaaagccgccagttgaagcaatcgttgcattactgggaacaagtacaatta

SEQ ID NO: 578292 - DNA, 75 bp, synthetic construct
  source 1..75: mol_type = other DNA
ttcacccgcggtgatatgctgaaggtctgcccgaaatttgtcacgtcgcttgccggtttttccccgaaacagacg

SEQ ID NO: 578293 - DNA, 75 bp, synthetic construct
  source 1..75: mol_type = other DNA
acgccacttatggcttcttgtttaaggactacaccagagcgtatttcagttgaagaaattgatgaaataaaattt

SEQ ID NO: 578294 - DNA, 75 bp, synthetic construct
  source 1..75: mol_type = other DNA
gacgaggaaacaacagaaaccgctgattttggctcttacgaagtaaaaggcaataaggttgagtttgaagtattc

SEQ ID NO: 578295 - DNA, 75 bp, synthetic construct
  source 1..75: mol_type = other DNA
tggctggaaagcgtctgctggagcaactgctgagtatcattacgcatacaagatggagatgccggtattcactac

SEQ ID NO: 578296 - DNA, 75 bp, synthetic construct
  source 1..75: mol_type = other DNA
cctcggcctttggttccgcagacctgaaagccaatatcgggcgctgggtggtgagctcctcggctacggcgagtg

SEQ ID NO: 578297 - DNA, 75 bp, synthetic construct
  source 1..75: mol_type = other DNA
gtgtgcaggaaaaagggctgtcgcagaatcggtttcgttcgtgctttccgtcgggccgcacttgcgcttgccgta

SEQ ID NO: 578298 - DNA, 75 bp, synthetic construct
  source 1..75: mol_type = other DNA
ctgacggcgacggcaacttggtggtaccgctgaacagctatgactggaacacggtgacgattgatgcgggtacac

SEQ ID NO: 578299 - DNA, 75 bp, synthetic construct
  source 1..75: mol_type = other DNA
gtgtgcaggaaagaaggtggttcaaagctggtttcgttcttgtttttccgtcgggccgcgcttgctgtatcagcc

SEQ ID NO: 578300 - DNA, 75 bp, synthetic construct
  source 1..75: mol_type = other DNA
gacctgaaagccaatatcgggcgctgggtggtgagctcttctgccacggccagcggcggtgacagcggggataac

SEQ ID NO: 578301 - DNA, 75 bp, synthetic construct
  source 1..75: mol_type = other DNA
gggccgttctccatcacggatgtaccgttgtacaccagtggggatgtgaccatgaaggttaccggtgaggacggg

SEQ ID NO: 578302 - DNA, 75 bp, synthetic construct
  source 1..75: mol_type = other DNA
gttaccggtacagcgatgacaacggtaaggacacggggattaccggcaccctgagcacacagattaagggtgtca

SEQ ID NO: 578303 - DNA, 75 bp, synthetic construct
  source 1..75: mol_type = other DNA
tcaccctgggccagtgccggatacctgcggcgagactgcaggatactgagaaactacaggagattacgtgtgagt

SEQ ID NO: 578304 - DNA, 75 bp, synthetic construct
  source 1..75: mol_type = other DNA
aacatcggccggaataacacctcgacctttggctcggcagacctgaaggccaatatcgggcactgggtggtgagt

SEQ ID NO: 578305 - DNA, 75 bp, synthetic construct
  source 1..75: mol_type = other DNA
tggagtgcaggtatcagtcagcaggtcggggagttgttcagtctgtcgctttctggctggcaacggagttattac

SEQ ID NO: 578306 - DNA, 75 bp, synthetic construct
  source 1..75: mol_type = other DNA
taaggaactgtgtctgtctgaggcatggctgacgaaggccggtgtttatgtcagtgcagattactttcgtgaggg

SEQ ID NO: 578307 - DNA, 75 bp, synthetic construct
  source 1..75: mol_type = other DNA
ctacagcagcagtacgtcggtgagtacgagtaaagacggtggcacaggcttcagcaccggtgtgtccggctcgct

SEQ ID NO: 578308 - DNA, 75 bp, synthetic construct
  source 1..75: mol_type = other DNA
tattaccccgcatccatgaccgggagttatcggcaccgtgatgacaacggtaaggacacggggattaccggcact

SEQ ID NO: 578309 - DNA, 75 bp, synthetic construct
  source 1..75: mol_type = other DNA
tcgacaagggcaatattcagttcgatcgtctggttattgaatgcaccggcatggccgatcccggcccgattattc

SEQ ID NO: 578310 - DNA, 75 bp, synthetic construct
  source 1..75: mol_type = other DNA
accgcatagtacgatggtgtttatcgggattcagttgccggaagatgagattcgggcagcgtttgcggggttgag

SEQ ID NO: 578311 - DNA, 75 bp, synthetic construct
  source 1..75: mol_type = other DNA
gagttcagcaacattttcgagaaagaccgtgctctggcgcgtcgcttccagaaaattgatattactgaaccgtcg

SEQ ID NO: 578312 - DNA, 75 bp, synthetic construct
  source 1..75: mol_type = other DNA
gcgtttgtcaggcacgcaaaagttgcaggactggatgatgccgataccgtaacgcttaaggaagtgacagaagca

SEQ ID NO: 578313 - DNA, 75 bp, synthetic construct
  source 1..75: mol_type = other DNA
tacgtgctaaggcagaaaaagcaacgtgtggcgagtggtcgctcgaatatggaaagggccgatttgatggtgatg

SEQ ID NO: 578314 - DNA, 75 bp, synthetic construct
  source 1..75: mol_type = other DNA
ggggctgaataaatttatcgcacagagttgctacgtgtttgatggcgagcaggatgaactatctgatgcgtatat

SEQ ID NO: 578315 - DNA, 75 bp, synthetic construct
  source 1..75: mol_type = other DNA
gacgaacaccagtcagaaggtggtaccgacggacaaagctgtggtgtggataccgtttgatgccctgaaggtcag

SEQ ID NO: 578316 - DNA, 75 bp, synthetic construct
  source 1..75: mol_type = other DNA
tggtgccgacggacaaggcggtggtctggatgccgtttgatgccctgaaagttaagcgttacctgctgcaggtga

SEQ ID NO: 578317 - DNA, 75 bp, synthetic construct
  source 1..75: mol_type = other DNA
gtgccacaggtattgcaggtgaaaaactggatatgtcctttatccagggtggtgccggggttaatccggaagtct

SEQ ID NO: 578318 - DNA, 75 bp, synthetic construct
  source 1..75: mol_type = other DNA
aatcaaatcgaagattcagatggaagcgaaactgttgttgttctggaaaaaaccgcaaaattactaaattggatt

SEQ ID NO: 578319 - DNA, 75 bp, synthetic construct
  source 1..75: mol_type = other DNA
gtcatggcgatcgacagcctcagtccccctatcaaagtcatgattgaacgctttggtctaaccctgcatgtcttt

SEQ ID NO: 578320 - DNA, 75 bp, synthetic construct
  source 1..75: mol_type = other DNA
ggtttaagcgcaacagaaatcgttgagttaatccgcgaagaagccgcagcgatttgcagtaaaggcggtgcagca

SEQ ID NO: 578321 - DNA, 75 bp, synthetic construct
  source 1..75: mol_type = other DNA
tctttttctccgtatgaagatcttcacaacggggggtacaagacccgcgttcggcaggatgtgaaagataaactt

SEQ ID NO: 578322 - DNA, 75 bp, synthetic construct
  source 1..75: mol_type = other DNA
tatattgcgaaaactgcgacgacgacggcatggttgttaagactgaaaaaggttgcggcttctttttgtatcaag

SEQ ID NO: 578323 - DNA, 75 bp, synthetic construct
  source 1..75: mol_type = other DNA
taaaagcgaaacgtcaccggtcgatctgtgcgtgattggcattgtcgatgaggtggtgtctggcggtcaggtaat

SEQ ID NO: 578324 - DNA, 75 bp, synthetic construct
  source 1..75: mol_type = other DNA
taaaagcgaaacatcgccggtcgacttgtgcgtgattggcattgtcgatgaggtggtgtctggcggtcaggtcat

SEQ ID NO: 578325 - DNA, 75 bp, synthetic construct
  source 1..75: mol_type = other DNA
ccagaaatacacaaggaaaggataactgggctgtttctggttccgtttcgataccttttatgctgttcgacaaac

SEQ ID NO: 578326 - DNA, 75 bp, synthetic construct
  source 1..75: mol_type = other DNA
tttcagtctttctgcatctgcgtggaaaagggattaccacaattacagtgggaaagatgcgggtttatctggttc

SEQ ID NO: 578327 - DNA, 75 bp, synthetic construct
  source 1..75: mol_type = other DNA
tttagctcaggactttctggttcactgaatgataaattcagttatggtattaacggaggccgtgacagtagtggg

SEQ ID NO: 578328 - DNA, 75 bp, synthetic construct
  source 1..75: mol_type = other DNA
atggcttttggggtctatccggcagtgtcccttgcacaagccagggcactacgtgatgaagccaagaaaaagctg

SEQ ID NO: 578329 - DNA, 75 bp, synthetic construct
  source 1..75: mol_type = other DNA
tgctggctttaattctcaatatattgaattacagctcgctcacgttgatagtaatagaattcgcggtacatataa

SEQ ID NO: 578330 - DNA, 75 bp, synthetic construct
  source 1..75: mol_type = other DNA
tctgggagatacccgcttcacgtatgaaaatgcggcggcctcatattgtgccattgtctgatcaggctctttcgc

SEQ ID NO: 578331 - DNA, 75 bp, synthetic construct
  source 1..75: mol_type = other DNA
acatcggtcaaaagcctattgctgatattaagcccctcgaactgctaaatgtgctgcggcgcatggaagatcgtg

SEQ ID NO: 578332 - DNA, 75 bp, synthetic construct
  source 1..75: mol_type = other DNA
agcgggggctggagcacctgcggaacattcgccggaaatatttcagcaacagcagtgaggccgctgactggtggg

SEQ ID NO: 578333 - DNA, 75 bp, synthetic construct
  source 1..75: mol_type = other DNA
aatttatagcagtagcggggtgcagatggtaatcgcgcctcatatcgtccaaaagttgcagcaacaggggaatca

SEQ ID NO: 578334 - DNA, 75 bp, synthetic construct
  source 1..75: mol_type = other DNA
tgaagcccggcaacctgggatacagcccggtgttcagcggcatagcgaacggtccatccagggtaacgcttattc

SEQ ID NO: 578335 - DNA, 75 bp, synthetic construct
  source 1..75: mol_type = other DNA
gttgaaccgaagctggtactgacgccgggcagttatgattcgacgataaaagcgatgaaagtaaaggtgggggaa

SEQ ID NO: 578336 - DNA, 75 bp, synthetic construct
  source 1..75: mol_type = other DNA
cttacaaaaatggtgtggcagcgaaaacccgcaaccgcgccgtgactgccaggcgtgcgactggcatcggctgtg

SEQ ID NO: 578337 - DNA, 75 bp, synthetic construct
  source 1..75: mol_type = other DNA
gaaggagctggttcgccctatgagaaacgaaaagaaccttcttatccgagtcgaaaaaatcaggaggcgcagccg

SEQ ID NO: 578338 - DNA, 75 bp, synthetic construct
  source 1..75: mol_type = other DNA
atggggctatttacccgactggaaaaatttgaccaaaagcttacgcgtggttatgcccgctgggggcactgggta

SEQ ID NO: 578339 - DNA, 75 bp, synthetic construct
  source 1..75: mol_type = other DNA
tctcgattgagctttttgacgccaccttacaaaaatggtgtggcagcgaaaacccgcagccgcgccgtggctgcc

SEQ ID NO: 578340 - DNA, 75 bp, synthetic construct
  source 1..75: mol_type = other DNA
ttgccgcacatccagccaatgtcatcggcaccgaatatggctggccaacgttgcaaaaagcgtatcttagtgcgg

SEQ ID NO: 578341 - DNA, 75 bp, synthetic construct
  source 1..75: mol_type = other DNA
aacggagaaacggatcgaaaaggtaacttggtcgttcctcttaatagttatgaccagaatatcataactatagat

SEQ ID NO: 578342 - DNA, 75 bp, synthetic construct
  source 1..75: mol_type = other DNA
acggtgtcagttctggaatcgttactggcttgggacggctgggagcattatcagcagacatggcttatgcttctg

SEQ ID NO: 578343 - DNA, 75 bp, synthetic construct
  source 1..75: mol_type = other DNA
cagcattccgtaaaagtggggttgcggtcgcaatgactgccgcgctgagctgtttatcggttaatgcaacagaaa

SEQ ID NO: 578344 - DNA, 75 bp, synthetic construct
  source 1..75: mol_type = other DNA
tagtggggatacggcagaggttatctggacattaagtactactcgtacacagtataatgctggaatgcgtctgga

SEQ ID NO: 578345 - DNA, 75 bp, synthetic construct
  source 1..75: mol_type = other DNA
gaaaatgcaggggcttttgcttcaacagatctgaaagcaaacattggtcgatgggttattaactcaacggcgacg

SEQ ID NO: 578346 - DNA, 75 bp, synthetic construct
  source 1..75: mol_type = other DNA
gcagtagatgcactgggagatattacggttggaagttgccggatatctggaaaaaaaatacagcaaacagaaaag

SEQ ID NO: 578347 - DNA, 75 bp, synthetic construct
  source 1..75: mol_type = other DNA
atgaaaaacgtgaaaaccctcatcgctgctgcgattttaagctccatatcatttgccagctttgcggctgttgaa

SEQ ID NO: 578348 - DNA, 75 bp, synthetic construct
  source 1..75: mol_type = other DNA
ttccttgacgccatgtacggcgacatgccgaacaactggacgccagagttacgtggtctggcgcgactgcgtttt

SEQ ID NO: 578349 - DNA, 75 bp, synthetic construct
  source 1..75: mol_type = other DNA
tcatcatctgaaaggtaaaaaaacaggacttcttctggcggctggaaacgccggatcggctagggcgtgcgggga

SEQ ID NO: 578350 - DNA, 75 bp, synthetic construct
  source 1..75: mol_type = other DNA
ttgctggtcaccggtgaacatcaggcgaaagtagggatggattactttcgtcgccaccttcctatcctgcgtgaa

SEQ ID NO: 578351 - DNA, 75 bp, synthetic construct
  source 1..75: mol_type = other DNA
ccacgggaagtggtagcgcgcgtcaaaaccattttgcgccgttgcaaaccgcagcgcgagttgcagcaacaggat

SEQ ID NO: 578352 - DNA, 75 bp, synthetic construct
  source 1..75: mol_type = other DNA
cctgctgaaaacactctcccatgaaccgggaaaagtgttctcccgcgagcagttactcaatcatctttatgacga

SEQ ID NO: 578353 - DNA, 75 bp, synthetic construct
  source 1..75: mol_type = other DNA
gctgatcgccgagcgtcccggcagggtaaaaaccttgaagcagcatccgcgcaataacaaaacggccatcaacat

SEQ ID NO: 578354 - DNA, 75 bp, synthetic construct
  source 1..75: mol_type = other DNA
cgccagacgccgccggatctgatcctgttggatctgatgctgccaggtaccgatggactgacgttatgccgggaa

SEQ ID NO: 578355 - DNA, 75 bp, synthetic construct
  source 1..75: mol_type = other DNA
agttactgcgtagtgaaagcccacgcctgattacgttcaagattactcatggtaagggacgtaaaggcatcatca

SEQ ID NO: 578356 - DNA, 75 bp, synthetic construct
  source 1..75: mol_type = other DNA
ggataatgctgtggtggagtgtttctttggaaccttaaagtcggagtgtttttatcttgatgagttcagtaatat

SEQ ID NO: 578357 - DNA, 75 bp, synthetic construct
  source 1..75: mol_type = other DNA
atgggcgcaagctgtatttgtctccagtaatagatctcttcaacaacgaagttatttcttacagcctttcggaaa

SEQ ID NO: 578358 - DNA, 75 bp, synthetic construct
  source 1..75: mol_type = other DNA
aggaaaccgttgaagagcacgcggcaaagcatgccggacagtatgatgtggtaacctgcatggagatgctggagc

SEQ ID NO: 578359 - DNA, 75 bp, synthetic construct
  source 1..75: mol_type = other DNA
accaggtgacaaagtattggtagtcgacgatttgctggcaactgggggcaccattgaggcgacagtgaaattgat

SEQ ID NO: 578360 - DNA, 75 bp, synthetic construct
  source 1..75: mol_type = other DNA
ggaaaaaaagcgccaggagctggagaaaaaacgaaagtcatccagagcctgaggtacggacactgccagtctgac

SEQ ID NO: 578361 - DNA, 75 bp, synthetic construct
  source 1..75: mol_type = other DNA
cgcgcaagggcaactgccttgataatgcggtaatggagaacttctttggtcacctgaaagaagaaatgtactatc

SEQ ID NO: 578362 - DNA, 75 bp, synthetic construct
  source 1..75: mol_type = other DNA
ttgagaaccgtcgagatactgcaatacaccttgcacaaaggcaccggaactgcttttcacaccattatgcaggac

SEQ ID NO: 578363 - DNA, 75 bp, synthetic construct
  source 1..75: mol_type = other DNA
tcattggcaacatagaggccagcattaaaacagtgataaatctaccatcagaaagcgtagaagggctgcgggtgc

SEQ ID NO: 578364 - DNA, 75 bp, synthetic construct
  source 1..75: mol_type = other DNA
cgtaagggaatcattatccgcaccaaaaaacagagtccgttaaaaaaggctctgacctttctgaaaagccggagg

SEQ ID NO: 578365 - DNA, 75 bp, synthetic construct
  source 1..75: mol_type = other DNA
gtgacctgcatggagatgctggagcatgttcccgatccgcaatcagtcgtcagagcctgtgcgcaactggtgaag

SEQ ID NO: 578366 - DNA, 75 bp, synthetic construct
  source 1..75: mol_type = other DNA
aacccgatcactaattcttttaaactcggccccggcgtggatgtgaactatatgctgcacacgcagaataagtga

SEQ ID NO: 578367 - DNA, 75 bp, synthetic construct
  source 1..75: mol_type = other DNA
atcaggcactcgaaaatcgcctgatgaaggccggtggtgttgatgcagtggtgcctcaggaggctgccgcgccgg

SEQ ID NO: 578368 - DNA, 75 bp, synthetic construct
  source 1..75: mol_type = other DNA
ctgtacgatttactctctcgatatcggttctctgttagcgggcactaaatatcgcggcgactttgaaaaacgttt

SEQ ID NO: 578369 - DNA, 75 bp, synthetic construct
  source 1..75: mol_type = other DNA
tcgctttctggtcctggtatggcttgtaccacagttgccaaacagacttacgccctgcctgcacctcccgattta

SEQ ID NO: 578370 - DNA, 75 bp, synthetic construct
  source 1..75: mol_type = other DNA
aactaataaagatacagatacagatctaaaagaattaaaccccacacataacgcgcgcatgcgcgagagtgctcc

SEQ ID NO: 578371 - DNA, 75 bp, synthetic construct
  source 1..75: mol_type = other DNA
tcgcctccatgcgactgtttgcccgcttatccctggatagcgccctgccggagcgcaccaccatcatgaatttcc

SEQ ID NO: 578372 - DNA, 75 bp, synthetic construct
  source 1..75: mol_type = other DNA
tactggatgaacgggaagcccaaaacaaacgaattgcagagctgaaagctaatcttgtggcgctggcggcggaga

SEQ ID NO: 578373 - DNA, 75 bp, synthetic construct
  source 1..75: mol_type = other DNA
aggctttttattcccactccgcgccgcacatgcgggtaatgcgcgacttgataaagcagcatcgttctcctgtgg

SEQ ID NO: 578374 - DNA, 75 bp, synthetic construct
  source 1..75: mol_type = other DNA
tgggtgcgggcagatatcagtcgtatatcgattgagctttttgacgctaccctacaaaaaatggtgtggcagcga

SEQ ID NO: 578375 - DNA, 75 bp, synthetic construct
  source 1..75: mol_type = other DNA
ggtgcaagtcggtgctgttagcgatcaggctcgcgctcaacagtatcaacagcagttaggacagaagttcggcgt

SEQ ID NO: 578376 - DNA, 75 bp, synthetic construct
  source 1..75: mol_type = other DNA
tgaacgcctagccgaactggaggctgatttagcagggctggccgaagaccaccagaaagcgactgagtcaattaa

SEQ ID NO: 578377 - DNA, 75 bp, synthetic construct
  source 1..75: mol_type = other DNA
attgcagaatgtcacgttaactgcctggttgaaacagatgctcaggcttatgcaaacgctgaatttattgctgcc

SEQ ID NO: 578378 - DNA, 75 bp, synthetic construct
  source 1..75: mol_type = other DNA
ggcagagcgcaagagagcgcagcgggagcgcgaaaagctgcggaaatatgatgctgattgtcacgatgagtcacg

SEQ ID NO: 578379 - DNA, 75 bp, synthetic construct
  source 1..75: mol_type = other DNA
ttcagaccggcacctggcaaggcatctggcttggggaacatcgtatccacggcggatcgcgtcgcattattgcga

SEQ ID NO: 578380 - DNA, 75 bp, synthetic construct
  source 1..75: mol_type = other DNA
cttaatgagaattgcgaccccacggtacgccaggacatggagcgttttttcctccgcactgttcccgataacgga

SEQ ID NO: 578381 - DNA, 75 bp, synthetic construct
  source 1..75: mol_type = other DNA
ctggcgaagctgaagtaccagacagcgctgggtgagctgaaaaccctgacggagatacagaagcaggaactgctg

SEQ ID NO: 578382 - DNA, 75 bp, synthetic construct
  source 1..75: mol_type = other DNA
tcgcctccatgcggctgtttgcccgattatccctggatagcgccgtgccggagcgcaccaccatcatgaatttcc

SEQ ID NO: 578383 - DNA, 75 bp, synthetic construct
  source 1..75: mol_type = other DNA
atagtgaattcagcactaagcgccgtcagacccgaaaagagattttcctctcccgcatggagcagattttgccat

SEQ ID NO: 578384 - DNA, 75 bp, synthetic construct
  source 1..75: mol_type = other DNA
gatacagataaagaattaaaccccacacataacgcgcgcatgcgcgagagtgctacgaccggtgagttgaatgac

SEQ ID NO: 578385 - DNA, 75 bp, synthetic construct
  source 1..75: mol_type = other DNA
agtgctccgaccagtgaatcgaatggtacgccgtcgcagacagcggaacccgaacacctggacggcctgagtgaa

SEQ ID NO: 578386 - DNA, 75 bp, synthetic construct
  source 1..75: mol_type = other DNA
cagaattaaaccccacacataacgcgcgcatgcgcgagagtgctccaaccggtgagtcgcatggtgcgccgttgc

SEQ ID NO: 578387 - DNA, 75 bp, synthetic construct
  source 1..75: mol_type = other DNA
gggcggcggatggctcgctgggcgtacgcgcggtgggcagtatgaacggcagtgcgggtctggtgtattccccgg

SEQ ID NO: 578388 - DNA, 75 bp, synthetic construct
  source 1..75: mol_type = other DNA
tgcgttgtgggggatggctttgccggagccggaatttacacctgctgaacttgccgctttccgggactactgggc

SEQ ID NO: 578389 - DNA, 75 bp, synthetic construct
  source 1..75: mol_type = other DNA
cttgccgcattccgggattactggatggcggaggggaaggttttcacgcaggttcagtgggagcagaaatttgcc

SEQ ID NO: 578390 - DNA, 75 bp, synthetic construct
  source 1..75: mol_type = other DNA
gcatcgcaaggacagaaaatggcggcaatgttccataatcagggcaatccagtttttgattatgtctggaacacc

SEQ ID NO: 578391 - DNA, 75 bp, synthetic construct
  source 1..75: mol_type = other DNA
gcatggctgggcgtagcagcgatggcgggtatcgctttaacgccgccaaagttccgtgatcccattctggcacgg

SEQ ID NO: 578392 - DNA, 75 bp, synthetic construct
  source 1..75: mol_type = other DNA
gactgtgcgaggttaatagctaattgtgtaatctattataattcagcaatattatccaggctggtcgagaaattt

SEQ ID NO: 578393 - DNA, 75 bp, synthetic construct
  source 1..75: mol_type = other DNA
tctttatggcccctggcgataaacccggtgaagtgatgcgcgccattgaagttatcggttctatctcctgcgtgc

SEQ ID NO: 578394 - DNA, 75 bp, synthetic construct
  source 1..75: mol_type = other DNA
ccggtacttatcgttgcggtgctggtggcgctgggactgaaattcatcccggaaaaaatgatcaacggcttccag

SEQ ID NO: 578395 - DNA, 75 bp, synthetic construct
  source 1..75: mol_type = other DNA
cgtattcccggaagcagctgtgaatggaaagatgtgacattagcaccaaaatccagaaaccgcgttcagttatag

SEQ ID NO: 578396 - DNA, 75 bp, synthetic construct
  source 1..75: mol_type = other DNA
gcgccatctggaatcaacgttgctggccgtgcatttgtacggctccgcagtggatggcggcctgaagccatacag

SEQ ID NO: 578397 - DNA, 75 bp, synthetic construct
  source 1..75: mol_type = other DNA
tcgaggcgctgagggaaaccttgaagctatggaactcgcagcccgactgggccggcaatgagcgaaatgtagtgc

SEQ ID NO: 578398 - DNA, 75 bp, synthetic construct
  source 1..75: mol_type = other DNA
ggagaatggcagcgcaatgacattcttgcaggtatcttcgagccagccacgatcgacattgatctggctatctga

SEQ ID NO: 578399 - DNA, 75 bp, synthetic construct
  source 1..75: mol_type = other DNA
actatgcaactatcgtaaaacacagtacaacattcagacttaagcgacaccctaaatggcaaggaatactttatt

SEQ ID NO: 578400 - DNA, 75 bp, synthetic construct
  source 1..75: mol_type = other DNA
atggcattactcgatttctttctctcacggaagaaaaacacggccaacattgcaaaagagcggttgcaaattatt

SEQ ID NO: 578401 - DNA, 75 bp, synthetic construct
  source 1..75: mol_type = other DNA
gctcggtcttgcgcgcagataagttggaagaatttattcacttcatgaaaagcgagatcaccaaggtgctcggca

SEQ ID NO: 578402 - DNA, 75 bp, synthetic construct
  source 1..75: mol_type = other DNA
tcttcatggctccaggcgacaaacccggtgaagtgatgcgcgccattgaagttatcggttctatctcctgcgtgc

SEQ ID NO: 578403 - DNA, 75 bp, synthetic construct
  source 1..75: mol_type = other DNA
tgacatccaccgaatatgccgactggcaccgtttttaccgcacgcattattttcaggatacccagctggatatgc

SEQ ID NO: 578404 - DNA, 75 bp, synthetic construct
  source 1..75: mol_type = other DNA
atgggaattaacgaaatcatcatgtatatcatgatgttctttatgctgatagctgccgtagacaggatcctgtcg

SEQ ID NO: 578405 - DNA, 75 bp, synthetic construct
  source 1..75: mol_type = other DNA
gggatcgggcggccagtttgaagaaggctttatggcaatgggcgctctgggtctggcgatggttggtatgaccgc

SEQ ID NO: 578406 - DNA, 75 bp, synthetic construct
  source 1..75: mol_type = other DNA
gctcggcgtgctggcgggcatagtgaccattccgattggctgtatcgctggtggtctggtagcgatgtactccgg

SEQ ID NO: 578407 - DNA, 75 bp, synthetic construct
  source 1..75: mol_type = other DNA
atgaaatgctcggcgcaaacccttccatgtttgccggaacactgctggcgtgtgatatgggcggcttcttcctcg

SEQ ID NO: 578408 - DNA, 75 bp, synthetic construct
  source 1..75: mol_type = other DNA
gctggcgatgagcgaaatgtagtgcttacgttgtcccgcatttggtacagcgcagtaaccggcagaatcgcgccg

SEQ ID NO: 578409 - DNA, 75 bp, synthetic construct
  source 1..75: mol_type = other DNA
acattaacaaatctggtgtgctgacagaggctgccattgacgagccacgatttgaacgtgatggcctgcttattg

SEQ ID NO: 578410 - DNA, 75 bp, synthetic construct
  source 1..75: mol_type = other DNA
aaattaaaaaatctggtgtgctgacagaggctgccattgacgagccacgatttgaacgtgatggcctgcttattg

SEQ ID NO: 578411 - DNA, 75 bp, synthetic construct
  source 1..75: mol_type = other DNA
cgtgtctgacgaaaagtgataattcccggtgtcgtgcaaggttcggaaaaatgtctgataatggtgcgtttgttt

SEQ ID NO: 578412 - DNA, 75 bp, synthetic construct
  source 1..75: mol_type = other DNA
ctatatgttgagcttaaaaataatcttaacgttagtcgaggacatcgtttattgattccaaaaaacaaccgtata

SEQ ID NO: 578413 - DNA, 75 bp, synthetic construct
  source 1..75: mol_type = other DNA
tacacattttgcaaagaaaatcataaagaatatgaataggcagtcgaatgaatatagtggcgaatgggaaacacc

SEQ ID NO: 578414 - DNA, 75 bp, synthetic construct
  source 1..75: mol_type = other DNA
agattaagaaatctggtgtgctgacagaggctgccattgacgagccacgatttgaacgtgatggcctgcttattg

SEQ ID NO: 578415 - DNA, 75 bp, synthetic construct
  source 1..75: mol_type = other DNA
aaactgcggcaaaaaacagccaggttgcagcagccgaaagcgagagcgcggcagccgattctgcgacttcagcag

SEQ ID NO: 578416 - DNA, 75 bp, synthetic construct
  source 1..75: mol_type = other DNA
gtcccgttttcccgcgcgagttccgcgacctatatcaataagtccggcgctcttaccattgcagaaattaatgag

SEQ ID NO: 578417 - DNA, 75 bp, synthetic construct
  source 1..75: mol_type = other DNA
cttgttattggcgaaaatgttaaaacatccgttgatgtatgtctggagccagatacaggtgaggttaaggcgtac

SEQ ID NO: 578418 - DNA, 75 bp, synthetic construct
  source 1..75: mol_type = other DNA
tggagatgttcaggccgtatgtaatggtgaattatctgttgcggcaaaaacaacatggacttcaattgttccacg

SEQ ID NO: 578419 - DNA, 75 bp, synthetic construct
  source 1..75: mol_type = other DNA
tcacatacgcttttaacacaaccgagaaatattacggtcagctttatatgcaaacttataaagcgtcgacaagta

SEQ ID NO: 578420 - DNA, 75 bp, synthetic construct
  source 1..75: mol_type = other DNA
cgagagtgccgcagccagttctgcaagtgaggcggcggcttctgccactgcatcagccaacagtcaaaaagctgc

SEQ ID NO: 578421 - DNA, 75 bp, synthetic construct
  source 1..75: mol_type = other DNA
actaactcggcgaaagcatccgctgcaagccagatggctgcaaaagcaagtgaagacgcagccagggagtacgca

SEQ ID NO: 578422 - DNA, 75 bp, synthetic construct
  source 1..75: mol_type = other DNA
cggtcagcgtgttgtgacgctggcgatgattgatgaagtccaccagcgaccggaaggaacagcgcgtgcagcatt

SEQ ID NO: 578423 - DNA, 75 bp, synthetic construct
  source 1..75: mol_type = other DNA
atgaacaccgcaatttttaacggcaaagcatccatgaccagcgttgagatcgcagagttggtgggaagccgacca

SEQ ID NO: 578424 - DNA, 75 bp, synthetic construct
  source 1..75: mol_type = other DNA
atcccggtgctgatcgccggagcaaccgcactcttactgagtcgtgcgttgaatagtttaagtctgggaaacgac

SEQ ID NO: 578425 - DNA, 75 bp, synthetic construct
  source 1..75: mol_type = other DNA
gaaccacgcggcacacgctggtatcacccgaagatggggctttttcaggtaatcggatgggaggataaagcatga

SEQ ID NO: 578426 - DNA, 75 bp, synthetic construct
  source 1..75: mol_type = other DNA
ccaggtggtagccaaaagcggaatgagtgacgccaagtgtcggaatctggtcaacgcctaccacatccctaccga

SEQ ID NO: 578427 - DNA, 75 bp, synthetic construct
  source 1..75: mol_type = other DNA
aacagtttccggtaatcgaatatcgcggtcagcgtgttgtgacatttgcaataattgatgacgtccaccagcgcc

SEQ ID NO: 578428 - DNA, 75 bp, synthetic construct
  source 1..75: mol_type = other DNA
aattacaagaggttagggctttagctcaggggctggtaagttctgggcagattgagcaaaaccctggttttttac

SEQ ID NO: 578429 - DNA, 75 bp, synthetic construct
  source 1..75: mol_type = other DNA
aaactgcggcaaaaaacagccaggctgcagcagctgaaagcgagagcgcggcagccggttctgcgacttcagcag

SEQ ID NO: 578430 - DNA, 75 bp, synthetic construct
  source 1..75: mol_type = other DNA
caggcagcagagccgtataaatatgtcttacagccactgcctgatgtgtggataccgtttaacgattcactggat

SEQ ID NO: 578431 - DNA, 75 bp, synthetic construct
  source 1..75: mol_type = other DNA
gccgactgcaccatcgtgctcgacgcgcgactgccgcgcacccttgccggtttactggcaggcggtgcgcttggc

SEQ ID NO: 578432 - DNA, 75 bp, synthetic construct
  source 1..75: mol_type = other DNA
gcgtttccgtagtcagtgcctttattggcgcgccggtattgatcttcctcgtgcgacggaaaacgcgaggtggcg

SEQ ID NO: 578433 - DNA, 75 bp, synthetic construct
  source 1..75: mol_type = other DNA
gcagggtcagcgtctggcttttgatgaagcgggccatgttaagggcggttttttcctgtttagtcacagttctgt

SEQ ID NO: 578434 - DNA, 75 bp, synthetic construct
  source 1..75: mol_type = other DNA
ctatttaaacaactggaaccgatctcaaaacatcaccctctggtctttatcggcaggaacgatccccgcaaaccg

SEQ ID NO: 578435 - DNA, 75 bp, synthetic construct
  source 1..75: mol_type = other DNA
cccttatcatctcaagcggtagatttactaaatgaactcaagatcatgacagggaactatcgttatgtttttccg

SEQ ID NO: 578436 - DNA, 75 bp, synthetic construct
  source 1..75: mol_type = other DNA
aggcaattaccctcttatgtttcccgggcgcaatgatccaaggaaaacaatgagcgaggccagcataaaccaagt

SEQ ID NO: 578437 - DNA, 75 bp, synthetic construct
  source 1..75: mol_type = other DNA
atgcggtgtgggagatcccaaaagaacgtatgaaaatgcgtaggagccatattgtcccgttgtcaaaacaagcat

SEQ ID NO: 578438 - DNA, 75 bp, synthetic construct
  source 1..75: mol_type = other DNA
tgaaacgcagcttgcacacgtcgataagaacgcgattcgcgggacgtataactatatgcctttgactgctggcta

SEQ ID NO: 578439 - DNA, 75 bp, synthetic construct
  source 1..75: mol_type = other DNA
caggctgacggggcatggtttccgccacacgatgagtactattctgcatgaagaaggctttaactcagcgtggat

SEQ ID NO: 578440 - DNA, 75 bp, synthetic construct
  source 1..75: mol_type = other DNA
tattgatgatcacgggagtaagaaccatcgaattacgtaccgcattatggtcagaatttgatttggataacgcta

SEQ ID NO: 578441 - DNA, 75 bp, synthetic construct
  source 1..75: mol_type = other DNA
atgaagctaaatgcacgacaggtagacgctgcgaaacccagagagaaagcctataagctggcagatggtgctggt

SEQ ID NO: 578442 - DNA, 75 bp, synthetic construct
  source 1..75: mol_type = other DNA
aactggaagaagaacgccagaaagtcagtgaactgaccgccgcacagaaaacaaaaaaagcggacaaaaaggaga

SEQ ID NO: 578443 - DNA, 75 bp, synthetic construct
  source 1..75: mol_type = other DNA
agagtgactggtcatggctttcggcatactttttctactatccttcacgatcatgattttgatactgcttggatt

SEQ ID NO: 578444 - DNA, 75 bp, synthetic construct
  source 1..75: mol_type = other DNA
aaagttaccgggcatggttttcggcatatgttttcaacacttttacatgagcaaggatttaattcaaattggata

SEQ ID NO: 578445 - DNA, 75 bp, synthetic construct
  source 1..75: mol_type = other DNA
gggatatgcatcagacatcatggaagcgtttaagaacgacatttttccttatgtcggaacaaggccagtgggaga

SEQ ID NO: 578446 - DNA, 75 bp, synthetic construct
  source 1..75: mol_type = other DNA
tgctgatccttacgggagttcgcaccggcgagcttcgaggtgctttctggagtgagtttgaccttgagaaagcgg

SEQ ID NO: 578447 - DNA, 75 bp, synthetic construct
  source 1..75: mol_type = other DNA
ggacaaacagccgcgtttaacggtgagcacgattgaagataaacgtcaggcattactggcggggcttggcgtggc

SEQ ID NO: 578448 - DNA, 75 bp, synthetic construct
  source 1..75: mol_type = other DNA
ccgttttgctggtaaagagaaacgattgtcctttggtgtttatccaacagtcacacttgctgatgccagacaaaa

SEQ ID NO: 578449 - DNA, 75 bp, synthetic construct
  source 1..75: mol_type = other DNA
tatcgagttacgagcagcattatggcaagagtttgatctagataacgctatttgggaaattcctgctgagagaat

SEQ ID NO: 578450 - DNA, 75 bp, synthetic construct
  source 1..75: mol_type = other DNA
gaggtaaatactggcgacttaaatatcgtgtagctggtaaagagaagctattggcactaggtgtgtatcctgagg

SEQ ID NO: 578451 - DNA, 75 bp, synthetic construct
  source 1..75: mol_type = other DNA
cgatgtgcagctcaataatacgtttcaggcagttgcgcttgaatggcacggaacgaaggtgagccgatggtcaga

SEQ ID NO: 578452 - DNA, 75 bp, synthetic construct
  source 1..75: mol_type = other DNA
acgccgctaaacccagagagaaggcctacaagctggcagatggtgctggtttgtatcttgaagtcgttccctctg

SEQ ID NO: 578453 - DNA, 75 bp, synthetic construct
  source 1..75: mol_type = other DNA
ctacaagctgtttgatggaggtggcctatatcttcaggtcgaacctaatggctcgcgttactggcgtatgaaata

SEQ ID NO: 578454 - DNA, 75 bp, synthetic construct
  source 1..75: mol_type = other DNA
agggcaatatccactggtgttcccgggacgtaatgatccccgcaagacgatgagtgaagcgagtattaatcaggt

SEQ ID NO: 578455 - DNA, 75 bp, synthetic construct
  source 1..75: mol_type = other DNA
cggaatacaatcctgcggcagatctaaccagcgcgatgtcaggacatgaatcgaagcattatcccttccttaccg

SEQ ID NO: 578456 - DNA, 75 bp, synthetic construct
  source 1..75: mol_type = other DNA
acgtgatgaagctcgaaaaggtatcgctgggggtatcgatcctttagagcttaagaaagaacataaagctgaacg

SEQ ID NO: 578457 - DNA, 75 bp, synthetic construct
  source 1..75: mol_type = other DNA
ttataaccatgcccaatatctcgaagggagaagagaaatgatgcaatggtatgctaattatttatctgagctaat

SEQ ID NO: 578458 - DNA, 75 bp, synthetic construct
  source 1..75: mol_type = other DNA
catgaagcagtccactatccattcctcaaagccaacgaactaccggagttctttaatgcccttaattcttattca

SEQ ID NO: 578459 - DNA, 75 bp, synthetic construct
  source 1..75: mol_type = other DNA
actttcgtatgctcaacctgatggaggaagacaaattcacgattgaaaatctcagactgatccagtacgactcca

SEQ ID NO: 578460 - DNA, 75 bp, synthetic construct
  source 1..75: mol_type = other DNA
atggatattcccgttaatgcagcaaagccggggcgtcggcgttatctgacgctggtgatgatctttattacggtg

SEQ ID NO: 578461 - DNA, 75 bp, synthetic construct
  source 1..75: mol_type = other DNA
gataaagacgcggtagtggtgagggaatttgtgttagcagtcgatggcggtcctctagctactggtctagtagaa

SEQ ID NO: 578462 - DNA, 75 bp, synthetic construct
  source 1..75: mol_type = other DNA
gcccgggaaaggcacaggcagaagaagaacaagacagacaggaatcagggcagcagtaatcagagtcagaacagg

SEQ ID NO: 578463 - DNA, 75 bp, synthetic construct
  source 1..75: mol_type = other DNA
gcaatgatcgacggcagccacttcccgtttgccgagaacgtgaagctggtgaaatcggttgttgacttctgccac

SEQ ID NO: 578464 - DNA, 75 bp, synthetic construct
  source 1..75: mol_type = other DNA
tgaagccagagcaaaaataagagaaatggctctcaccctcgcattgaaagaatgggagctccaccaaaccatatc

SEQ ID NO: 578465 - DNA, 75 bp, synthetic construct
  source 1..75: mol_type = other DNA
cgcaagaagagaacttaaaaaatatgcattttttagggtttattgaaaatccattatctcatatatatatacatg

SEQ ID NO: 578466 - DNA, 75 bp, synthetic construct
  source 1..75: mol_type = other DNA
agaacaaggcttcagaaaagaatgaagtttatacgttcctggataaaggtggcttttttttctcttttgaaatga

SEQ ID NO: 578467 - DNA, 75 bp, synthetic construct
  source 1..75: mol_type = other DNA
gtgaaaaaagaggcgcgtcagccgttaacagccaaagactggaaactggtgttccatcgtaaactgatcggcgtc

SEQ ID NO: 578468 - DNA, 75 bp, synthetic construct
  source 1..75: mol_type = other DNA
tcagatccccggcggttggtttttagatcgcgtaggttcacgcgtgacttattttattgcgatatttggctggtc

SEQ ID NO: 578469 - DNA, 75 bp, synthetic construct
  source 1..75: mol_type = other DNA
tcttaacctggttcccgaactatttaacccaggaaaaagggatcacggcgctgaaagcgggctttatgaccacgg

SEQ ID NO: 578470 - DNA, 75 bp, synthetic construct
  source 1..75: mol_type = other DNA
tggtggatgatgccgtattaatgatggcttcagcggggatttccggaggtgtgagatatgtcccagccggttggt

SEQ ID NO: 578471 - DNA, 75 bp, synthetic construct
  source 1..75: mol_type = other DNA
aaagactggaaactggtgttccatcgtaaactgatcggcgtctatcttgggcaatttgcggtggcttctacactg

SEQ ID NO: 578472 - DNA, 75 bp, synthetic construct
  source 1..75: mol_type = other DNA
gggacaggccatggggcgatgaaaaaccgcatagcacgatggtgtttatcgggattcagttgccggaggatgaga

SEQ ID NO: 578473 - DNA, 75 bp, synthetic construct
  source 1..75: mol_type = other DNA
cgattgctggaaaggctgggccatactcctccggcagaagcagaaaaagcttattatgcttccatcggaaacgat

SEQ ID NO: 578474 - DNA, 75 bp, synthetic construct
  source 1..75: mol_type = other DNA
ctgattttacttacgtcagcacatggcagggcttcgtctatgtggcgttcatcattgatgtgtttgccggatgca

SEQ ID NO: 578475 - DNA, 75 bp, synthetic construct
  source 1..75: mol_type = other DNA
gtgaaatatcgtccgaataaccaaattggcttttaccagtccattaccgccgacggcaactggggcgatgaaaag

SEQ ID NO: 578476 - DNA, 75 bp, synthetic construct
  source 1..75: mol_type = other DNA
ttcgtgctggatgcactggagcaggcgttgtgggcccgtcggccgtccggcacaatccatcacagtgataaaggt

SEQ ID NO: 578477 - DNA, 75 bp, synthetic construct
  source 1..75: mol_type = other DNA
gactggtataacaatcgacgattgctgggaaggctgggccatactcctccggcagaagcagaaaaagcttattat

SEQ ID NO: 578478 - DNA, 75 bp, synthetic construct
  source 1..75: mol_type = other DNA
ccgtgcgcagcacgacgactggctgaagagagagatacagcgcgtatacgatgaaaatcacaaggtatacggtgt

SEQ ID NO: 578479 - DNA, 75 bp, synthetic construct
  source 1..75: mol_type = other DNA
tcggtctggcggcggcgattgccacactgatcttcttactggtgggtgcgctggcgatagtgaacctgaaagcca

SEQ ID NO: 578480 - DNA, 75 bp, synthetic construct
  source 1..75: mol_type = other DNA
gtggcgttcatcattgatgtatttgccggatatatcgtgggatggtgggtatcatcgtccatggaaacgacattc

SEQ ID NO: 578481 - DNA, 75 bp, synthetic construct
  source 1..75: mol_type = other DNA
gacatcatccggataaatgcagtgcccgtgcgcagcgcgatgactggctgaagaaagagatacagcgcgtatacg

SEQ ID NO: 578482 - DNA, 75 bp, synthetic construct
  source 1..75: mol_type = other DNA
tgctagatcgctcctggcaagcaggcaaaacctataattttggtctttacccggcgggcgatgagtggcaactgg

SEQ ID NO: 578483 - DNA, 75 bp, synthetic construct
  source 1..75: mol_type = other DNA
cgctctacacactcgacggtgacggcacgctgaccaataatcagagtggcgtaaaatatcgtccaaacgaccaga

SEQ ID NO: 578484 - DNA, 75 bp, synthetic construct
  source 1..75: mol_type = other DNA
caactacagcagcaccaaccagcttacttttgaacgcgcccaggaagttctgttggatcgttcctggcaagcggg

SEQ ID NO: 578485 - DNA, 75 bp, synthetic construct
  source 1..75: mol_type = other DNA
tggcagaacgacctgaccagctgtgggtggctgattttacttacgtcagcacatggcagggcttcgtctatgtgg

SEQ ID NO: 578486 - DNA, 75 bp, synthetic construct
  source 1..75: mol_type = other DNA
gcgcagtatgcggcatctggtcattctggttgaggagttgcgcgaacgtggcgttaattttcgcagcctgacgga

SEQ ID NO: 578487 - DNA, 75 bp, synthetic construct
  source 1..75: mol_type = other DNA
tcagtttctgtgtagtgctgacaaggaaccggggctgcagcatttaccggatgaggacgcacgggccggtacgga

SEQ ID NO: 578488 - DNA, 75 bp, synthetic construct
  source 1..75: mol_type = other DNA
caggtgctctggcatgagatgagcaggcctgatggcacattccctgtcacgcatgatacctacctgaagctgttt

SEQ ID NO: 578489 - DNA, 75 bp, synthetic construct
  source 1..75: mol_type = other DNA
gaagctgccggcgatggtggtgcacccggaaacgcgccggtgcaggggaaggaagacgatggcgtggagggagag

SEQ ID NO: 578490 - DNA, 75 bp, synthetic construct
  source 1..75: mol_type = other DNA
ctaatctgctgctgaaacgcgcaggggaaagtcgggaggtgagcggctgcggtggtgatgatgaggtgcttacca

SEQ ID NO: 578491 - DNA, 75 bp, synthetic construct
  source 1..75: mol_type = other DNA
tgtcattgataccagcacgccgatggggcgttttttctttcatgtgatgggtgccctggctgaaatggagcgaga

SEQ ID NO: 578492 - DNA, 75 bp, synthetic construct
  source 1..75: mol_type = other DNA
ggcagggaaatagtccgactacgccctgcctcttactctactcagcacatggcgggggttcggtctatgtggcgt

SEQ ID NO: 578493 - DNA, 75 bp, synthetic construct
  source 1..75: mol_type = other DNA
cagtgaactgcatattgccccgtcaacgtattaccattgtcagcaacagcgacatcatccggataaacgcagtgc

SEQ ID NO: 578494 - DNA, 75 bp, synthetic construct
  source 1..75: mol_type = other DNA
ggctgaagaaagagatactgcgcgcatacgatgggaatcatcaggtatacggtgtgcgtaaagtctggcgtcagt

SEQ ID NO: 578495 - DNA, 75 bp, synthetic construct
  source 1..75: mol_type = other DNA
cgacttcaggctggtgatacgctggttgtctggaagctcgaccggctcggtcgtagcatgcggcatcttgtctcg

SEQ ID NO: 578496 - DNA, 75 bp, synthetic construct
  source 1..75: mol_type = other DNA
caacaaatgaccagaacacggctttgcaacgtgatgcgctggagcggtcaggatgtgagcttatttttgaagata

SEQ ID NO: 578497 - DNA, 75 bp, synthetic construct
  source 1..75: mol_type = other DNA
tatgccggaaaaaatgcagtctgatgttctgcggcgggattaccgcgattttgatgaatactgccggatagccaa

SEQ ID NO: 578498 - DNA, 75 bp, synthetic construct
  source 1..75: mol_type = other DNA
attcccaacagtctttattgaatgaaatggaaaactggccaacgtattatccctatcagttgagtagcgaagaag

SEQ ID NO: 578499 - DNA, 75 bp, synthetic construct
  source 1..75: mol_type = other DNA
tctcagcctgtatcagtctggtggcaaaaagcgattttctcagcatactgcctgaagaaatgggctgcgatccct

SEQ ID NO: 578500 - DNA, 75 bp, synthetic construct
  source 1..75: mol_type = other DNA
gatatatcgtgggatggcgggtctcatcgtccatggaaacgacattggtgctggatgcacttgagcaggcgttgt

SEQ ID NO: 578501 - DNA, 75 bp, synthetic construct
  source 1..75: mol_type = other DNA
tcgtatgacaatgcgatggctgagagcatcaatggtctttacaaagcggaggtaatacaccgtaagagctggaaa

SEQ ID NO: 578502 - DNA, 75 bp, synthetic construct
  source 1..75: mol_type = other DNA
gcagaacgtcctgaccagctgtgggtggctgattttacttacggtgtgcccggagttcagggcgggcatggatgc

SEQ ID NO: 578503 - DNA, 75 bp, synthetic construct
  source 1..75: mol_type = other DNA
gttgtccgcaaggcttttacccagtccagcgttacggtgccccacgcctgacggatgaactgtgtgctctggtta

SEQ ID NO: 578504 - DNA, 75 bp, synthetic construct
  source 1..75: mol_type = other DNA
acgtattaccactgtcagcaacagcgacatcatcatgataaacgcagtgcccgtgcgcagcgcgatgactggctg

SEQ ID NO: 578505 - DNA, 75 bp, synthetic construct
  source 1..75: mol_type = other DNA
tatggaagcgacattcgtgctggatgcgctggagcaggcgttgtgggcccgtcgtccgtctgggctccatccatc

SEQ ID NO: 578506 - DNA, 75 bp, synthetic construct
  source 1..75: mol_type = other DNA
gtgctggatgcactggagcaggcgttatgggcccgtcgaccgtccggcacagtccatcacagtgataaaggttct

SEQ ID NO: 578507 - DNA, 75 bp, synthetic construct
  source 1..75: mol_type = other DNA
ccgcgtaaaccgtcagtttgtggcagaacgtcctgaccagttgtgggtggctgattttaccagggtattttgtta

SEQ ID NO: 578508 - DNA, 75 bp, synthetic construct
  source 1..75: mol_type = other DNA
cgggaaggtatcagagtggccagatgcactgtggcacgtctcatggaggttatgggacttgccggtgttctccgg

SEQ ID NO: 578509 - DNA, 75 bp, synthetic construct
  source 1..75: mol_type = other DNA
cggggcggttcaaagcgccagccccgtcccgcccgatagagcgcggcatagcgggccccggattacttgcgtgcg

SEQ ID NO: 578510 - DNA, 75 bp, synthetic construct
  source 1..75: mol_type = other DNA
gttcgtggcagaacgtccagaccagctgtggatggctgattttacttacgtcagcacatggcagggcttcgtcta

SEQ ID NO: 578511 - DNA, 75 bp, synthetic construct
  source 1..75: mol_type = other DNA
tgtgcgtaaagtctggcgtcagttgttatgggaaggaatcagggtagccagatgtacagtggcgcgcctcatggc

SEQ ID NO: 578512 - DNA, 75 bp, synthetic construct
  source 1..75: mol_type = other DNA
gcgtaaagtctggcgtcagttgttacgcgaaggtatcagggtggccagatgtacagtggcacgtctcatggcagt

SEQ ID NO: 578513 - DNA, 75 bp, synthetic construct
  source 1..75: mol_type = other DNA
aatcgacgattgctggaaaggctgggccatactcctccggcagaagcagaaaaagcttattatacttccatcgga

SEQ ID NO: 578514 - DNA, 75 bp, synthetic construct
  source 1..75: mol_type = other DNA
tggcgttcatcattgatgtgtttgccggatacatcgtggggtggcgggtctcatcgtccatggaaacgacattcg

SEQ ID NO: 578515 - DNA, 75 bp, synthetic construct
  source 1..75: mol_type = other DNA
accgaacgctcagtgactgggatggagtctggcaatccgtttatcctttactgcaaagtggcaaacttgaccccg

SEQ ID NO: 578516 - DNA, 75 bp, synthetic construct
  source 1..75: mol_type = other DNA
ggatggcgggtctcatcgtccatggaaacgacattcgtgctggatgcactggagcaggcagtatgggaccgtcgt

SEQ ID NO: 578517 - DNA, 75 bp, synthetic construct
  source 1..75: mol_type = other DNA
cagttcgtggcagaacgccccgaccagctgtgggtggctgacttcacgtatgtgagcacctggcagggcttcgct

SEQ ID NO: 578518 - DNA, 75 bp, synthetic construct
  source 1..75: mol_type = other DNA
cgacctgaccagctgtgggtggctgattttacttacggtgtgcccggagttcagggcgggcatggatgcttaaat

SEQ ID NO: 578519 - DNA, 75 bp, synthetic construct
  source 1..75: mol_type = other DNA
tggcatcaacagggagtacaggtgactcgtatgacaacgcgatggcggagagcatcaatggtctttacaaagcgg

SEQ ID NO: 578520 - DNA, 75 bp, synthetic construct
  source 1..75: mol_type = other DNA
gcactgtggcacgtctcatggcggttatgggacttgccagtgttctccggggtaaaaaggtccgtacgaccatca

SEQ ID NO: 578521 - DNA, 75 bp, synthetic construct
  source 1..75: mol_type = other DNA
gtttcgggaaggtaccagagtggtcagatgcactgtggcacgtctcatggcggttatggggcttgtcggtgttct

SEQ ID NO: 578522 - DNA, 75 bp, synthetic construct
  source 1..75: mol_type = other DNA
gccatccaacaagaaattcgcagcgggaagctcgttgtactgaatcgggacgaactggtgatcccgattcaggcc

SEQ ID NO: 578523 - DNA, 75 bp, synthetic construct
  source 1..75: mol_type = other DNA
gacgcgccacagtgagttaagtttcagcaccttttttgtctcttcgatgagcgagcttttaaagcaggttgccct

SEQ ID NO: 578524 - DNA, 75 bp, synthetic construct
  source 1..75: mol_type = other DNA
cgggattcagatcatcccgttgtcagaagtcgcggcgaaggatgagtttctgaatatcaaaaatgtcagccgcga

SEQ ID NO: 578525 - DNA, 75 bp, synthetic construct
  source 1..75: mol_type = other DNA
tcgacaatttatcgttaccaccccgcaggagaatcaagtggaacaattgagaagagtaaacaaaataaccgctaa

SEQ ID NO: 578526 - DNA, 75 bp, synthetic construct
  source 1..75: mol_type = other DNA
ggacgctttttcttccatgtgatgggtgccctggctgaaatggaacgtgaactgattgttgaacgaacaaaagca

SEQ ID NO: 578527 - DNA, 75 bp, synthetic construct
  source 1..75: mol_type = other DNA
gtgcaaacctttcaagccgatcttgccattgtaggcgccggtggcgcgggattacgtgctgcaattgctgccgcg

SEQ ID NO: 578528 - DNA, 75 bp, synthetic construct
  source 1..75: mol_type = other DNA
aagtgcgttaatagcggagacaccctggtcgtgtggaaactggacaggctgggacgcagcgttaagaacctgatc

SEQ ID NO: 578529 - DNA, 75 bp, synthetic construct
  source 1..75: mol_type = other DNA
atatgtataaaaaaatccaagcagaagccgcaactaccgacatcaaaacacttgaacagcttttgaaaaagttca

SEQ ID NO: 578530 - DNA, 75 bp, synthetic construct
  source 1..75: mol_type = other DNA
gtgccctggctgaaatggagcgtgaactgattgttgaaagaacaaaagctggactggaagctgctcgcgcacagg

SEQ ID NO: 578531 - DNA, 75 bp, synthetic construct
  source 1..75: mol_type = other DNA
ggcgcgtgggaggtcgaagacctaagttaacacctgaacagtgggcgcaggttggaagattgttagcggctggcg

SEQ ID NO: 578532 - DNA, 75 bp, synthetic construct
  source 1..75: mol_type = other DNA
gttgatattaatacccgcgacattctgggagctgaggcgctgtgccgctgggtttcagcagagcgggggataatc

SEQ ID NO: 578533 - DNA, 75 bp, synthetic construct
  source 1..75: mol_type = other DNA
gtcgtattggtggcagacgtcctaaactcaccgcgagtgagtgggagcaggtcggacgattaattgcatcaggag

SEQ ID NO: 578534 - DNA, 75 bp, synthetic construct
  source 1..75: mol_type = other DNA
ttttgatattggcctgtccacgctctataaaaaattccccgtatcaacgacaaagaataaattgtgtcatccctt

SEQ ID NO: 578535 - DNA, 75 bp, synthetic construct
  source 1..75: mol_type = other DNA
ggatgcgagctgatttttgaagacaagataagcggtacaaagtccgaaaggctgggactgaaaaaactgctcagg

SEQ ID NO: 578536 - DNA, 75 bp, synthetic construct
  source 1..75: mol_type = other DNA
ccattgtaggcgccggtggcgcaggattacgtgctgcaattgctgccgcgcaggcaaatccaaatgcaaaaatcg

SEQ ID NO: 578537 - DNA, 75 bp, synthetic construct
  source 1..75: mol_type = other DNA
cgggaatcgatccgttcgacattggcgcaatggcgggacgtcagttaccgttcctgtcggttcttgtgccattct

SEQ ID NO: 578538 - DNA, 75 bp, synthetic construct
  source 1..75: mol_type = other DNA
gccttcagaatatagtctggggcaaatcattcgtgcgtggtcaccgtttttaatcttaacggtgctggtcaccat

SEQ ID NO: 578539 - DNA, 75 bp, synthetic construct
  source 1..75: mol_type = other DNA
aaaaataccgaaacggcaatcagcatgggacaatccgcaggtgcgatggtggtgaataaaccatcttctggcggt

SEQ ID NO: 578540 - DNA, 75 bp, synthetic construct
  source 1..75: mol_type = other DNA
taaagcgttatttgctccgggcggcgcgttttattcgctggtgattaatttccagatccctcatttgcatcaaca

SEQ ID NO: 578541 - DNA, 75 bp, synthetic construct
  source 1..75: mol_type = other DNA
atacgcggcggggctgtgtctgattgccaacactgcgccggtggcgtttggtgcgttgggcgtgccgattctggt

SEQ ID NO: 578542 - DNA, 75 bp, synthetic construct
  source 1..75: mol_type = other DNA
agcacagtctgatctttgccagcgttattggcattatcacgctgctgcaggcatatgtgtttaccggaatgttgg

SEQ ID NO: 578543 - DNA, 75 bp, synthetic construct
  source 1..75: mol_type = other DNA
caaccggtctgccaggttccggtatcctgatgaccgaaggctgccgcggtgaaggtggtattctggtcaacaaaa

SEQ ID NO: 578544 - DNA, 75 bp, synthetic construct
  source 1..75: mol_type = other DNA
atgatggaaggcacgctggtacagatccgtgctaacgcagtagttatggctaccggcggtgcgggtcgcgtttat

SEQ ID NO: 578545 - DNA, 75 bp, synthetic construct
  source 1..75: mol_type = other DNA
tgggcggtatcgaaaccgatcagaactgcgaaacccgcattaaaggtctgttcgccgtgggtgaatgttcctctg

SEQ ID NO: 578546 - DNA, 75 bp, synthetic construct
  source 1..75: mol_type = other DNA
cggtgcgctgctggtgggcctgggcttcaaaccgctatacgcggcggggctgtgtctgattgccaacactgcgcc

SEQ ID NO: 578547 - DNA, 75 bp, synthetic construct
  source 1..75: mol_type = other DNA
caaccgaaatgacccaactggaactgtggggatgcccatggagccgtcgcccggatggtagcgtcaacgtacgtc

SEQ ID NO: 578548 - DNA, 75 bp, synthetic construct
  source 1..75: mol_type = other DNA
ccagctaaacgcgtttacggtggcgaagcggatgcagccgataaggcggaagcagccaataagaaggagaaggcg

SEQ ID NO: 578549 - DNA, 75 bp, synthetic construct
  source 1..75: mol_type = other DNA
aaattgtgtcagcgaattgccgagaaatatgcgcaatgctgcgatatcgtgacattcaatgccgatctctattta

SEQ ID NO: 578550 - DNA, 75 bp, synthetic construct
  source 1..75: mol_type = other DNA
caacaaatgaacaaaacactgctttacaacgaaacgctcttgaaagcgcaggatgtgagctaatttttgaggaca

SEQ ID NO: 578551 - DNA, 75 bp, synthetic construct
  source 1..75: mol_type = other DNA
ttgccgtgcttgctctctctctagccagctacgcctccgccgcagatgaaattaaccgtcaggagggtgctggtc

SEQ ID NO: 578552 - DNA, 75 bp, synthetic construct
  source 1..75: mol_type = other DNA
actaatcatcgagcgaacgatggctggacttgctgccgccagaaataaaggccgtattggtgggcgaccacctaa

SEQ ID NO: 578553 - DNA, 75 bp, synthetic construct
  source 1..75: mol_type = other DNA
gggctggctgcagctcgtgctaaaggcagagtaggtggacgctgtcctaagttgactaccgaacagtgggcacag

SEQ ID NO: 578554 - DNA, 75 bp, synthetic construct
  source 1..75: mol_type = other DNA
accggggctgaaaaagctgctcaggacactatcggcaggagacacgctggttgtctggaagctggacagactggg

SEQ ID NO: 578555 - DNA, 75 bp, synthetic construct
  source 1..75: mol_type = other DNA
accggggcttaaaaaactgcttaggacactatcggcaggagacactctggttgtctggaagctggacaggttggg

SEQ ID NO: 578556 - DNA, 75 bp, synthetic construct
  source 1..75: mol_type = other DNA
ggaattgaactttatcaggggggggagggaactggaaaccatcttatcttaggtagtgactcatccgggtatgga

SEQ ID NO: 578557 - DNA, 75 bp, synthetic construct
  source 1..75: mol_type = other DNA
tggttcttcaggatatgggtataaggatattgacgctctttccgataaaaacgttgcaaatgcaatattcacatt

SEQ ID NO: 578558 - DNA, 75 bp, synthetic construct
  source 1..75: mol_type = other DNA
cgtacactggccgggctggcagcagcacgcgcacaaggacgcattggcggacgtcgcccgaagttgacaaaagaa

SEQ ID NO: 578559 - DNA, 75 bp, synthetic construct
  source 1..75: mol_type = other DNA
gacgaattggtggacgtcgtcccaaacttacaccagaacaatgggcgcaggccgggcgactaattgcatcaggag

SEQ ID NO: 578560 - DNA, 75 bp, synthetic construct
  source 1..75: mol_type = other DNA
actagacaggcttgggcgcagcgttaagaacctgatcgcactgatatcagagttacatgaacgcggtgcccactt

SEQ ID NO: 578561 - DNA, 75 bp, synthetic construct
  source 1..75: mol_type = other DNA
atagcgaggttgatcgaaaatggctacagcaggaaacagttggcaattatttacgatatcggtgtatcgacgatt

SEQ ID NO: 578562 - DNA, 75 bp, synthetic construct
  source 1..75: mol_type = other DNA
ggatgaatatgatgatctcatatcaggaacttgttcgcaccttccctaaagcaaggcatatcaaacctgatgaca

SEQ ID NO: 578563 - DNA, 75 bp, synthetic construct
  source 1..75: mol_type = other DNA
tcttactgcatattaatgtttcgccctggcagttaaacgaaccgcactttcatgagcgttttaccaccatcatga

SEQ ID NO: 578564 - DNA, 75 bp, synthetic construct
  source 1..75: mol_type = other DNA
aagaatcaactcgctcgtgaaaaactgattatttataatagcgaaggtaattataatattattgattctgtcgat

SEQ ID NO: 578565 - DNA, 75 bp, synthetic construct
  source 1..75: mol_type = other DNA
actgatctactggagctgcgtgtaccgatgatgcaggcatgggcggattatgtgatgtctcaaattgtgaataaa

SEQ ID NO: 578566 - DNA, 75 bp, synthetic construct
  source 1..75: mol_type = other DNA
ttaatcaaattagggtgtgttcaggcccaggggtatctgtaccagaagccgttgccattctctgcctgggacaaa

SEQ ID NO: 578567 - DNA, 75 bp, synthetic construct
  source 1..75: mol_type = other DNA
caggacgcgtcatctttgccgattttaatccgtcgcagcgcccgtggtcagtagcttcggatggctctgacagta

SEQ ID NO: 578568 - DNA, 75 bp, synthetic construct
  source 1..75: mol_type = other DNA
agataaggctgataattttatttttattggcagcgctgtcatttattggtctttttttcatcattaactatcaac

SEQ ID NO: 578569 - DNA, 75 bp, synthetic construct
  source 1..75: mol_type = other DNA
gggccctggctgaaatggaacgagaactgattgttgaacgaacaaaagctggactggaagctgctcgcgcacagg

SEQ ID NO: 578570 - DNA, 75 bp, synthetic construct
  source 1..75: mol_type = other DNA
actctgtataaaaaacaccccgcgaaacgaacgcatatagaaaacgacgatcgaataaatcaaatcgatcggtaa

SEQ ID NO: 578571 - DNA, 75 bp, synthetic construct
  source 1..75: mol_type = other DNA
gtgccactacagatagaagagttgcgccagcgtggtgtgaatttcagaagcctgactgacagtattgataccagt

SEQ ID NO: 578572 - DNA, 75 bp, synthetic construct
  source 1..75: mol_type = other DNA
ttcaggagagtcgttctcactgtggctttcttcccatccaggagaactatccattaacccgcagccccatgagga

SEQ ID NO: 578573 - DNA, 75 bp, synthetic construct
  source 1..75: mol_type = other DNA
tccgggagttgattattaccggttccgacatcccgttttgccgcttctcccaattgaacgtttatgaaaatgcag

SEQ ID NO: 578574 - DNA, 75 bp, synthetic construct
  source 1..75: mol_type = other DNA
catacgctgaaaaataaggttgaggcggcatatcatcgtactgatctactggagcagcgtgtaccgatgatgcag

SEQ ID NO: 578575 - DNA, 75 bp, synthetic construct
  source 1..75: mol_type = other DNA
tatcgtccagctgcaggccgatccacgcctgtttgagctctaccagtttgaccggaaagtgctgctgcaactcaa

SEQ ID NO: 578576 - DNA, 75 bp, synthetic construct
  source 1..75: mol_type = other DNA
cgtataagcccctcactcaaacgtatcgcgggtaccgtgatctcattttcccgcacaacggaaaagcacaccaaa

SEQ ID NO: 578577 - DNA, 75 bp, synthetic construct
  source 1..75: mol_type = other DNA
accgccaggtgacgccgctgcaactctcggaacaagggaaaatcttccattcgcagatccgccatctgttgcaac

SEQ ID NO: 578578 - DNA, 75 bp, synthetic construct
  source 1..75: mol_type = other DNA
gacatcatccggataaacgcagtgcccgtgcgcagcgcgataactggttgaagaaagagatacagcgcgtatacg

SEQ ID NO: 578579 - DNA, 75 bp, synthetic construct
  source 1..75: mol_type = other DNA
acctgcggaaaaagtcagtccggagatggcggagaagcttgccctgcttgaaaaactgggcatcactctggatga

SEQ ID NO: 578580 - DNA, 75 bp, synthetic construct
  source 1..75: mol_type = other DNA
ctggcgcgaaatgtccagcctgtcaggcgcaagactcaatggcgatgtggcgcgaaaataatattgatattgttg

SEQ ID NO: 578581 - DNA, 75 bp, synthetic construct
  source 1..75: mol_type = other DNA
atttacagtcggcaaaattcgcaatgcgcgatgtggtgcgcaaagtgattgccgattgcggctgcgaaggcaggg

SEQ ID NO: 578582 - DNA, 75 bp, synthetic construct
  source 1..75: mol_type = other DNA
atggctgaaaaactgaaacttctcgagaaattgggcatcacccttgatgacttggaaaaactcttcaaatcccgc

SEQ ID NO: 578583 - DNA, 75 bp, synthetic construct
  source 1..75: mol_type = other DNA
ttctttgacgatacccaaatctttatctatcccggcttccagtacaaagtggtcgatgcgctggtgactaacttc

SEQ ID NO: 578584 - DNA, 75 bp, synthetic construct
  source 1..75: mol_type = other DNA
acctgcgaaaaaagtcagttcggagattgcggagaaacttgccctgcttgaaaaacttggcatcacgctgaatga

SEQ ID NO: 578585 - DNA, 75 bp, synthetic construct
  source 1..75: mol_type = other DNA
tgctgaacaacgcgcagcgcggcggctacgcggttccggcattcaatattcacaatctcgaaacgatgcaggtgg

SEQ ID NO: 578586 - DNA, 75 bp, synthetic construct
  source 1..75: mol_type = other DNA
caattcatctcgaccatcacacgaaatttgacgatatcgctcagaaggttcgttctggcgtgcgctcagtcatga

SEQ ID NO: 578587 - DNA, 75 bp, synthetic construct
  source 1..75: mol_type = other DNA
gcgtaaagtctggcatcagttgttacgggaaggaatcagggtggccagatgtacagtggcgcgcctcatggcggt

SEQ ID NO: 578588 - DNA, 75 bp, synthetic construct
  source 1..75: mol_type = other DNA
acgtattaccactgtcagcaacagcgacatcatcctgataaacgcggtccacatgcgcagcgcgatgactggctg

SEQ ID NO: 578589 - DNA, 75 bp, synthetic construct
  source 1..75: mol_type = other DNA
acgtattaccactgtcagcaacagcgacatcatcctgataaacgccgtccacatgcccagcgcgatgactggctg

SEQ ID NO: 578590 - DNA, 75 bp, synthetic construct
  source 1..75: mol_type = other DNA
acgtattaccactgtcagcaacagcgacatcatcctgataaacgctgtccacatgctcagcgcgatgactggctg

SEQ ID NO: 578591 - DNA, 75 bp, synthetic construct
  source 1..75: mol_type = other DNA
aaatacactgtcacgtactgatgccacggaagagctgacacgtctttccctggcccgtgcagagggattcgataa

SEQ ID NO: 578592 - DNA, 75 bp, synthetic construct
  source 1..75: mol_type = other DNA
tcttttctgttctggtgctttcaacagtattaactgcctgcaacaccacgcgtggcgttggtgaagacatttctg

SEQ ID NO: 578593 - DNA, 75 bp, synthetic construct
  source 1..75: mol_type = other DNA
acgtattaccactgtcagcaacagcgacatcatcctgataaacgcggtgcacatgcccagcgcgatgactggctg

SEQ ID NO: 578594 - DNA, 75 bp, synthetic construct
  source 1..75: mol_type = other DNA
gaaacgacattcgtgctggatgcgctggagcaggcgttgtgggtccgtcgtccgtctggcaccatccatcacagc

SEQ ID NO: 578595 - DNA, 75 bp, synthetic construct
  source 1..75: mol_type = other DNA
acaaacctgaatgccgttactttgaggttaacgtgcacgggcagttcggcggaattgtttactatcaggagattc

SEQ ID NO: 578596 - DNA, 75 bp, synthetic construct
  source 1..75: mol_type = other DNA
attgctggaaaggctgagtcatactcctccggcagaagcagaaaaagcttattatgcttccatccattggaaacg

SEQ ID NO: 578597 - DNA, 75 bp, synthetic construct
  source 1..75: mol_type = other DNA
acgtattaccactgtcagcaacagcgacatcatcctgataaacgctgttcacatgcccagcgcgatgactggctg

SEQ ID NO: 578598 - DNA, 75 bp, synthetic construct
  source 1..75: mol_type = other DNA
acgtattaccactgtcagcaacagcgacatcatcctgataaacgcagtccacatgcacagcgcgatgactggctg

SEQ ID NO: 578599 - DNA, 75 bp, synthetic construct
  source 1..75: mol_type = other DNA
acgtattaccactgtcagcaacagcgacatcatcctgataaacgcagtacacatgcccagcgcgatgactggctg

SEQ ID NO: 578600 - DNA, 75 bp, synthetic construct
  source 1..75: mol_type = other DNA
ccaaactctgtgggatcccctccagtcagtcatcacgcaagctccgggagcgtatcagcccctcgctaaaacgta

SEQ ID NO: 578601 - DNA, 75 bp, synthetic construct
  source 1..75: mol_type = other DNA
caactgtcttgataatgcggtaatggagaatttctttggtcacctgaaagaagaaatttactatcgccgggacta

SEQ ID NO: 578602 - DNA, 75 bp, synthetic construct
  source 1..75: mol_type = other DNA
cgccgatgaggtgacgcgcaactggatagcgcagcaggtcatgatgcgggaagacggcgcatggcttgcggggaa

SEQ ID NO: 578603 - DNA, 75 bp, synthetic construct
  source 1..75: mol_type = other DNA
ccctgcgctgggacacggtgcatgaactgccgccggatgtggacggcaaaacccggctggccccgccgcgcaccg

SEQ ID NO: 578604 - DNA, 75 bp, synthetic construct
  source 1..75: mol_type = other DNA
gagtccgcaggtcgatgtccgtttcgcaactttatgccacgatctcggtaaaggactgacgccgccagaactttg

SEQ ID NO: 578605 - DNA, 75 bp, synthetic construct
  source 1..75: mol_type = other DNA
gacgataacggcgagattatcgacccgtacaacggtctgggcgatctgcaaaatcgtctgttgcgccatgtttcc

SEQ ID NO: 578606 - DNA, 75 bp, synthetic construct
  source 1..75: mol_type = other DNA
gtgttgagcaactggcactgaccagcgaggcagacgtgcgcggcagagctggttttgaagcggcggactacccgc

SEQ ID NO: 578607 - DNA, 75 bp, synthetic construct
  source 1..75: mol_type = other DNA
tgcggtaatggagaatttctttggtcacctgaaagaagaaatgtactatcgccgggactacagaagtgtagaaga

SEQ ID NO: 578608 - DNA, 75 bp, synthetic construct
  source 1..75: mol_type = other DNA
tttgaggtaaaagcccgacaactgaaactgctgcgtctgcgggcgcaccgctatgcggataaagccctgctgaac

SEQ ID NO: 578609 - DNA, 75 bp, synthetic construct
  source 1..75: mol_type = other DNA
atctgggcgcgactgcaccgcgatggcgaacgcggactggctgaggggctggcgctgttagccggactggtggaa

SEQ ID NO: 578610 - DNA, 75 bp, synthetic construct
  source 1..75: mol_type = other DNA
ccgaaaaatggaaatcctgctgggaacgctggtggcaatcgatccggtacgggcagcggtactgtgtgatacgca

SEQ ID NO: 578611 - DNA, 75 bp, synthetic construct
  source 1..75: mol_type = other DNA
gaactgccgccggacgtggacggcaaaacccggctggccccgccgcgcaccgaatcacgcaaccagcttaagcgg

SEQ ID NO: 578612 - DNA, 75 bp, synthetic construct
  source 1..75: mol_type = other DNA
ttatgggtaccggcggatccattgtgagcttcagaaaagaggtcttaagttcagtggcaaaacggtgcgaaaact

SEQ ID NO: 578613 - DNA, 75 bp, synthetic construct
  source 1..75: mol_type = other DNA
ggaagtggcgcagtcagtgccgacaaaagccgtcgttgaagcaggatttaaaggtgtggagattcgcgaggagct

SEQ ID NO: 578614 - DNA, 75 bp, synthetic construct
  source 1..75: mol_type = other DNA
gtgcggagaacccgcagctgccagccacaacgggtgatgtcagcccggaaatggctgaaaaactgaagctcctcg

SEQ ID NO: 578615 - DNA, 75 bp, synthetic construct
  source 1..75: mol_type = other DNA
ttctgaaccttcaggaggttgataagacaaccggtgaagttgttaagctggatgtcaacagcaccagtaccgtgc

SEQ ID NO: 578616 - DNA, 75 bp, synthetic construct
  source 1..75: mol_type = other DNA
ggaattgtttactatcaggagattcagccgctgacctttgattgccacgccatgtacctgccagagattcgtgga

SEQ ID NO: 578617 - DNA, 75 bp, synthetic construct
  source 1..75: mol_type = other DNA
gtggataaatcctccggtgaagtcgtaaatctcactcctaatgccagtaatacagtgcagccagtggcactgatg

SEQ ID NO: 578618 - DNA, 75 bp, synthetic construct
  source 1..75: mol_type = other DNA
gagtacatcacgcacctggtgcagtcggcctactatgatacggagaaggatattgtccagttgcaggccgatccg

SEQ ID NO: 578619 - DNA, 75 bp, synthetic construct
  source 1..75: mol_type = other DNA
atggctgaaaaactgaagctcctcgagaaactgggcattacccttgatgacctggaaaaactcttcaaatcccgc

SEQ ID NO: 578620 - DNA, 75 bp, synthetic construct
  source 1..75: mol_type = other DNA
cctgtgagaaatgggtgacagatatcaccgaattcagggctggcggacaaaaactgtacctgtccccgatacttg

SEQ ID NO: 578621 - DNA, 75 bp, synthetic construct
  source 1..75: mol_type = other DNA
ggaagtggcacagtcagtgccgacaaaagccgtcgttgaagcgggatttaaaggtgtggagattcgcgaggagct

SEQ ID NO: 578622 - DNA, 75 bp, synthetic construct
  source 1..75: mol_type = other DNA
gcgtactgcgcgtggcgcgttttgctgcgcgttatgcccacctcggttttcgtattgccgatgaaactctggcgc

SEQ ID NO: 578623 - DNA, 75 bp, synthetic construct
  source 1..75: mol_type = other DNA
ggcagctcgttgtactgaatcgggacgaactggtgatcccgattcaggcctatgcataccgaatgaatacccgca

SEQ ID NO: 578624 - DNA, 75 bp, synthetic construct
  source 1..75: mol_type = other DNA
aacgaatacataacttactggaatcaaaaaagaataaaactcagtcttgggggactcagcccggtagaataccgg

SEQ ID NO: 578625 - DNA, 75 bp, synthetic construct
  source 1..75: mol_type = other DNA
ataatgcggtaatggagaacttctttggtcacctgaaagaagaaatgtactatcgccgggactacagaaatgtag

SEQ ID NO: 578626 - DNA, 75 bp, synthetic construct
  source 1..75: mol_type = other DNA
tcatcattgatgtgtttgccggatacatcgtggggtggcgggtctcatcgtccatggaaacgacattcgtgctgg

SEQ ID NO: 578627 - DNA, 75 bp, synthetic construct
  source 1..75: mol_type = other DNA
caccgtaagagctggaaaaaccgtgcagaagtggaactagccacactaacgtgggtggactggtataacaatcga

SEQ ID NO: 578628 - DNA, 75 bp, synthetic construct
  source 1..75: mol_type = other DNA
acgatatccttcgccagacttccgcttattttgcgaaggcggagttcgaccgcctctggaaaaaaataatgccac

SEQ ID NO: 578629 - DNA, 75 bp, synthetic construct
  source 1..75: mol_type = other DNA
atcgacgattactggaaaggctgggccatattcctccgacagaaacagaaaaagcttattatgcctccatcggaa

SEQ ID NO: 578630 - DNA, 75 bp, synthetic construct
  source 1..75: mol_type = other DNA
tgggaaggctgggccatactcctccggcagaagcagaaaaagcttattatgcttccatcggaaacgatgatctgg

SEQ ID NO: 578631 - DNA, 75 bp, synthetic construct
  source 1..75: mol_type = other DNA
catggagacgacattcgtgctggatgcactggagcaggcgttatgggcccgtcgaccgtccggcacggtccatca

SEQ ID NO: 578632 - DNA, 75 bp, synthetic construct
  source 1..75: mol_type = other DNA
cgcttttttagttacggtgatgcgatgtttatcacgtacaatccgcaggcaattaatgagcgcgtcggggagtaa

SEQ ID NO: 578633 - DNA, 75 bp, synthetic construct
  source 1..75: mol_type = other DNA
ggtatatagcgaaaaaccgggcgcagttgcggccccgaccgccggactgcatttcgacgaaccgctgttggaaaa

SEQ ID NO: 578634 - DNA, 75 bp, synthetic construct
  source 1..75: mol_type = other DNA
atgccactgctggataagctgcgtgagcagtacggggtcggagcggtatgcagtgaactgcatattgccccgtca

SEQ ID NO: 578635 - DNA, 75 bp, synthetic construct
  source 1..75: mol_type = other DNA
ccccaaagattggctgtacgccggagactctgcgtgtctgggttcgccagcatgagcgggataccgggggcggtg

SEQ ID NO: 578636 - DNA, 75 bp, synthetic construct
  source 1..75: mol_type = other DNA
gttcgctggaaagcgcggctcaggcggcgaaaaacgatcttatcgaaccgttctttgacgatacccaaatcttta

SEQ ID NO: 578637 - DNA, 75 bp, synthetic construct
  source 1..75: mol_type = other DNA
ttctttgacgatacccaaatctttatctatccgggtttccagtacaaagtggtcgatgcgctggtgacgaacttc

SEQ ID NO: 578638 - DNA, 75 bp, synthetic construct
  source 1..75: mol_type = other DNA
cgtccggcacagtccatcacagtgataaaggttctcagtatgtatcgctggcctacacacagcggcttaaggaag

SEQ ID NO: 578639 - DNA, 75 bp, synthetic construct
  source 1..75: mol_type = other DNA
actgctggcatcaacaggaagtactggcgactcgtatgacaacgcgatggcggagagcatcaatggcctttacaa

SEQ ID NO: 578640 - DNA, 75 bp, synthetic construct
  source 1..75: mol_type = other DNA
actcctggcatcaacaggtagtaccggcgactcgtatgacaacgcgatggcggagagcatcaatggcctttacaa

SEQ ID NO: 578641 - DNA, 75 bp, synthetic construct
  source 1..75: mol_type = other DNA
acttctggcatcaacaggcagtacaggcgactcgtatgacaacgcgatggcggagagcatcaatggcctttacaa

SEQ ID NO: 578642 - DNA, 75 bp, synthetic construct
  source 1..75: mol_type = other DNA
agttgtgggtggctgattttacttacggtgtgcccggagttcagggcgggcatggatgcttaaatgaaccgcgag

SEQ ID NO: 578643 - DNA, 75 bp, synthetic construct
  source 1..75: mol_type = other DNA
gcactgtggcacgtctcatggcggttatgggacttgccggtgttctccggggtaaaaaaggtccgtacgaccatc

SEQ ID NO: 578644 - DNA, 75 bp, synthetic construct
  source 1..75: mol_type = other DNA
aacgcgatggcggagagcatcaatggtctttacaaagcggaagtaatacaccgtaagagctggaaaaaccgtgca

SEQ ID NO: 578645 - DNA, 75 bp, synthetic construct
  source 1..75: mol_type = other DNA
ctcatcgtctatggaaacgacattcgtgctggatgcactggagcaggcgttttgggcccggcgaccgtccggcac

SEQ ID NO: 578646 - DNA, 75 bp, synthetic construct
  source 1..75: mol_type = other DNA
ctcatcgtctatggaaacgacattcgtgctggatgcactggagcaggcgttttgggcccgacggccgtccggcac

SEQ ID NO: 578647 - DNA, 75 bp, synthetic construct
  source 1..75: mol_type = other DNA
atggcggagagcatcaatggcctttacaaagcggaggtaatacaccgtaagagctggaaaaaccgtgcagaagtg

SEQ ID NO: 578648 - DNA, 75 bp, synthetic construct
  source 1..75: mol_type = other DNA
ctcatcgtctatggaaacgacattcgtgctggatgcgctggagcaggcgttttgggcccgacgaccgtccggcac

SEQ ID NO: 578649 - DNA, 75 bp, synthetic construct
  source 1..75: mol_type = other DNA
ctcatcgtctatggaaacgacattcgtgctggatgccctggagcaggcgttttgggcccgccgcccgtccggcac

SEQ ID NO: 578650 - DNA, 75 bp, synthetic construct
  source 1..75: mol_type = other DNA
ctcatcgtctatggaaacgacattcgtgctggatgctctggagcaggcgttttgggcccgtcgaccgtccggcac

SEQ ID NO: 578651 - DNA, 75 bp, synthetic construct
  source 1..75: mol_type = other DNA
gccccgtcaacgtattaccactgtcagcaacagcgacatcatccggataaacgcagtgcccgtgcgcagcgcgat

SEQ ID NO: 578652 - DNA, 75 bp, synthetic construct
  source 1..75: mol_type = other DNA
tacttcaaaggcgtggatgacgtgactttttacagcgcaacacgcgaagaactaatcgacttcctgaatcacggg

SEQ ID NO: 578653 - DNA, 75 bp, synthetic construct
  source 1..75: mol_type = other DNA
gcagtgaactacatattgccccgtcaacgtattaccactgtcagcaacagcgacatcatcctgataaacgcagtg

SEQ ID NO: 578654 - DNA, 75 bp, synthetic construct
  source 1..75: mol_type = other DNA
agtccatcacagtgataaaggttctcagtatgtatcgctggcctacacacagcggcttaaggaagccggattact

SEQ ID NO: 578655 - DNA, 75 bp, synthetic construct
  source 1..75: mol_type = other DNA
gacatcatccggagaaacgtagtgcacgtgcactgcgcgatgactggctgaagaaagagatacagcgcgtatacg

SEQ ID NO: 578656 - DNA, 75 bp, synthetic construct
  source 1..75: mol_type = other DNA
catggaaacgacattcgtgctggatgcactggagcaggcgttatgggcccgtcgaccgtccggcacgatccatca

SEQ ID NO: 578657 - DNA, 75 bp, synthetic construct
  source 1..75: mol_type = other DNA
gattaaaagaagcaaaactgctggcatcaacagggagtacaggcgactcgtatggcagcgcgatggcggagagca

SEQ ID NO: 578658 - DNA, 75 bp, synthetic construct
  source 1..75: mol_type = other DNA
cagaagtggaactggccacactcacgtgggtggactggtataacaatcgaagattgctggtaaggcggggccata

SEQ ID NO: 578659 - DNA, 75 bp, synthetic construct
  source 1..75: mol_type = other DNA
acaccgtaagagctggaaaaaccgtgcagaagtggaactggccacactaacgtgggtggactggtataacaatcg

SEQ ID NO: 578660 - DNA, 75 bp, synthetic construct
  source 1..75: mol_type = other DNA
cttctgtattcactaccggcgtccccggttaaaagcaccgaatgatgagagtaaggaaaatccgttgccaccttc

SEQ ID NO: 578661 - DNA, 75 bp, synthetic construct
  source 1..75: mol_type = other DNA
ccggatatatcgtgggatggcgggtctcatcgtccatggaaacgacattggtgctggatgcacttgagcaggcgt

SEQ ID NO: 578662 - DNA, 75 bp, synthetic construct
  source 1..75: mol_type = other DNA
cagaagtggaactggccacactcacgtgggtggactggtataacaatcgaggattgctggtaaggcagggccata

SEQ ID NO: 578663 - DNA, 75 bp, synthetic construct
  source 1..75: mol_type = other DNA
cagaagtggaactggccacactcacgtgggtggactggtataacaatcgatgattgctggtaaggctgggccata

SEQ ID NO: 578664 - DNA, 75 bp, synthetic construct
  source 1..75: mol_type = other DNA
ttacaaagcggaggtaatacaccgtaagagctggaaaaaccgtgcagaagtagaactggccacactcacgtgggt

SEQ ID NO: 578665 - DNA, 75 bp, synthetic construct
  source 1..75: mol_type = other DNA
aatacaccgtaagagctggaaaaaccggacagaagtggaacaggccacactaacgtgggtggactggtataacaa

SEQ ID NO: 578666 - DNA, 75 bp, synthetic construct
  source 1..75: mol_type = other DNA
atcctgcactgaagaatgcggaccggttgtggctgacacagagtttccgttttggtccggcggtggctcgcatgg

SEQ ID NO: 578667 - DNA, 75 bp, synthetic construct
  source 1..75: mol_type = other DNA
ctgattttacttacgtcagcacatggcagggcttcgtctatgtggcgttcatcattgatgtatttgccggataca

SEQ ID NO: 578668 - DNA, 75 bp, synthetic construct
  source 1..75: mol_type = other DNA
cagcgaactgcatattgccccgtcaacatattaccactgtcagcaacagcgacatcatccggataaacgcagtgc

SEQ ID NO: 578669 - DNA, 75 bp, synthetic construct
  source 1..75: mol_type = other DNA
ccgcgtaaaccgtcagttcgtggcagaacgtccagaccagctgtgggtggctgattttacttacgtcagcacatg

SEQ ID NO: 578670 - DNA, 75 bp, synthetic construct
  source 1..75: mol_type = other DNA
gtacagtggcacgtctcatggcggttatgggacttgccgatgttctccggggtaaaaaggtccgtacgaccatca

SEQ ID NO: 578671 - DNA, 75 bp, synthetic construct
  source 1..75: mol_type = other DNA
cagcgcgtatacgatgaaaatcatcaggtgtacggtgtgcgtaaagtctggcgtcagttgttacgggaaggaatc

SEQ ID NO: 578672 - DNA, 75 bp, synthetic construct
  source 1..75: mol_type = other DNA
ggtaaaaaggtccgtactaccgtcagccggaaagccgttgccgcaggcgaccgcgtaaaccgtcagttcgtggca

SEQ ID NO: 578673 - DNA, 75 bp, synthetic construct
  source 1..75: mol_type = other DNA
acgattgctgggaaggctgaggcatactcctccggcagaagcagaaaaagcgtattatgcttctatcggaaatga

SEQ ID NO: 578674 - DNA, 75 bp, synthetic construct
  source 1..75: mol_type = other DNA
gcgtatacgatgaaaatcatcaggtgtacggtgtgcataaagtctggcatcagttgttacgggaaggaatcaggg

SEQ ID NO: 578675 - DNA, 75 bp, synthetic construct
  source 1..75: mol_type = other DNA
aatcgacgattgctggaaaggctgggccacatccctccggcagaagcagaaaaagcttattatgcttctatcgga

SEQ ID NO: 578676 - DNA, 75 bp, synthetic construct
  source 1..75: mol_type = other DNA
ctgaccagctgtgggtggctgattttacttacgtcagcacatggcagggcttcgtctatgtggcgttcatcattg

SEQ ID NO: 578677 - DNA, 75 bp, synthetic construct
  source 1..75: mol_type = other DNA
gataacaccacactgggaaaattactggttaaggagattaacttcgtaagacaaacagcgcctgccgggcagttt

SEQ ID NO: 578678 - DNA, 75 bp, synthetic construct
  source 1..75: mol_type = other DNA
ttctgccgctggccacaatggctctgctggcgttactggttttatggaaggacaacaccacaccggggaaattgc

SEQ ID NO: 578679 - DNA, 75 bp, synthetic construct
  source 1..75: mol_type = other DNA
actttattcacaaaacagaattatggtcgataaaaaaggaaagacattatatattaaacctgttgatgcctttgg

SEQ ID NO: 578680 - DNA, 75 bp, synthetic construct
  source 1..75: mol_type = other DNA
tattaggcggcctgtttttttcctgcagcgtgatggccggagtcggtacgctggcccccaccgtggtgccaatgg

SEQ ID NO: 578681 - DNA, 75 bp, synthetic construct
  source 1..75: mol_type = other DNA
gacaataccacgccgggaaaattactggctcaggagatcgaatatgtaagagacagaacaccagccggactatat

SEQ ID NO: 578682 - DNA, 75 bp, synthetic construct
  source 1..75: mol_type = other DNA
atggcaaataatacgtcgtcccgtcaggcgggccatgccgcccggtatgttgtcgcccgggttctgcgaggactg

SEQ ID NO: 578683 - DNA, 75 bp, synthetic construct
  source 1..75: mol_type = other DNA
atggcaaataatacgtcgtcccgtcaggcgggtcatgccgcccggtatgttgtcgcctgggttctgcgaggactg

SEQ ID NO: 578684 - DNA, 75 bp, synthetic construct
  source 1..75: mol_type = other DNA
gcacttatgtatatgtcgtttgcggcaggcaccgggaaatatccgatgtggcccggaaaaatgaaatgtatccgg

SEQ ID NO: 578685 - DNA, 75 bp, synthetic construct
  source 1..75: mol_type = other DNA
cctgccgggaaaaatcagggaatgccatgtttatttcactgatgacagaacaatcagaaacaacggagataaaaa

SEQ ID NO: 578686 - DNA, 75 bp, synthetic construct
  source 1..75: mol_type = other DNA
cccattaaggtctatgccctgaacgaagacctcatcgctcgtggtttggttggtcgaatttcgaacgatatcact

SEQ ID NO: 578687 - DNA, 75 bp, synthetic construct
  source 1..75: mol_type = other DNA
tggtcaaatttcgaacgatgtcatcccaattgactatactgatttcgtcagacttacggtaaagcacaccagcca

SEQ ID NO: 578688 - DNA, 75 bp, synthetic construct
  source 1..75: mol_type = other DNA
aggataaagatgatattgaatgacgcaacctcatctgcgataaaagatgtactttgcggaacttggcgctcagtc

SEQ ID NO: 578689 - DNA, 75 bp, synthetic construct
  source 1..75: mol_type = other DNA
gctggcacttatgtatatgtcgtttgcggcaggcaccgggaaatatccgatgatgtggcccggaaaaatgaaatg

SEQ ID NO: 578690 - DNA, 75 bp, synthetic construct
  source 1..75: mol_type = other DNA
tggttccttcatctggtctgctgggcattactacagcaaatatcagcacgaaaaggagcgtgctgatgaggctgt

SEQ ID NO: 578691 - DNA, 75 bp, synthetic construct
  source 1..75: mol_type = other DNA
gctgctgagcggttgcggaagtacgcggacagtttacgtgcaagttccggcggtaccattaccggcgaatctgac

SEQ ID NO: 578692 - DNA, 75 bp, synthetic construct
  source 1..75: mol_type = other DNA
gtcaccgcgaacgtgattcgggccgtgagtatcatcaacgccatttcagaggcgaaccagaatgcaaagaacaag

SEQ ID NO: 578693 - DNA, 75 bp, synthetic construct
  source 1..75: mol_type = other DNA
tggttctttcatctggtcggccaaccactactacagcaaatatcagcacgaaaagaaacgtgctgatgaggctgt

SEQ ID NO: 578694 - DNA, 75 bp, synthetic construct
  source 1..75: mol_type = other DNA
tcacgcactgttgcataccctttatcagcagaacctgaaaaaccacaccactattttctccgagtggtatgcgct

SEQ ID NO: 578695 - DNA, 75 bp, synthetic construct
  source 1..75: mol_type = other DNA
cggttcttttatctggtctgccgagcattactacagcaaatatcagcacgaaaaggagcgtgctgatgaggctgt

SEQ ID NO: 578696 - DNA, 75 bp, synthetic construct
  source 1..75: mol_type = other DNA
atgccagcgcctctgtatggtgcggataacccgcgccgctgttccggcaaatccgtatcggaggtgctggataaa

SEQ ID NO: 578697 - DNA, 75 bp, synthetic construct
  source 1..75: mol_type = other DNA
cagcgatcaccgggaaatatccggtgcgacccggaaaaatgaaatgtatccgggtggtaaccgcagatgaacatc

SEQ ID NO: 578698 - DNA, 75 bp, synthetic construct
  source 1..75: mol_type = other DNA
gattcttcaggcagatcagaaatacaggatatctgccattaccgcgcggctgatgctgcagattatgtcagggag

SEQ ID NO: 578699 - DNA, 75 bp, synthetic construct
  source 1..75: mol_type = other DNA
gtgcctgctgcagctgctaaccggctgcgggaatacgcggacagtttacgtgcaggcgccggtggtgcccctgcc

SEQ ID NO: 578700 - DNA, 75 bp, synthetic construct
  source 1..75: mol_type = other DNA
gatgtgtgcagattgaataatctgcgcagccctgtatcgctttttttactgacactggctgattctggtgagcgc

SEQ ID NO: 578701 - DNA, 75 bp, synthetic construct
  source 1..75: mol_type = other DNA
acccacttccctgaatatatcgacccgcgcctgcgtaattaccgctcacgctatggcgctatcagtaatgactga

SEQ ID NO: 578702 - DNA, 75 bp, synthetic construct
  source 1..75: mol_type = other DNA
ggccgatcagcaaaaaagcgcggcgtatgatttcacccacgaactgttaaccaccctggaagttgacgacccggc

SEQ ID NO: 578703 - DNA, 75 bp, synthetic construct
  source 1..75: mol_type = other DNA
tcggtcagtggggtggcggggtcataacttatgacctttcgctgtctccatctgcaccccagagtcccaagttgc

SEQ ID NO: 578704 - DNA, 75 bp, synthetic construct
  source 1..75: mol_type = other DNA
gttacaaccgcacagagttgtctatcagacctgccttcttgacagtgcttcgcggtggtgccatcggtgctggcg

SEQ ID NO: 578705 - DNA, 75 bp, synthetic construct
  source 1..75: mol_type = other DNA
ggttgcgctcactgattatgcggaagcatcgaacggtgaagctcagttctcagtagacctgtctggtgtggatac

SEQ ID NO: 578706 - DNA, 75 bp, synthetic construct
  source 1..75: mol_type = other DNA
taccatttgtttatctaatgaataaagcgcatataattgtcactgattcaggagggatacaagaagaggctccat

SEQ ID NO: 578707 - DNA, 75 bp, synthetic construct
  source 1..75: mol_type = other DNA
aaaagaaaactttcaaaactatttcctttcataaatgaaagccaaaagataatattagtgacagggcatagaaga

SEQ ID NO: 578708 - DNA, 75 bp, synthetic construct
  source 1..75: mol_type = other DNA
gccaattgccttcaacggtaagctggaagagcctacctacgaatgggagttgccggaaggggccgtgattcagga

SEQ ID NO: 578709 - DNA, 75 bp, synthetic construct
  source 1..75: mol_type = other DNA
cccaccagctccgaccgttgaactagcctccgactacaacttcaaagacaacatctacttggtgccgatgacagg

SEQ ID NO: 578710 - DNA, 75 bp, synthetic construct
  source 1..75: mol_type = other DNA
atgccgctaaatgccgcatggtatccgctgcattacagccagtgtgttgagcgaccttattatccatgcgcggta

SEQ ID NO: 578711 - DNA, 75 bp, synthetic construct
  source 1..75: mol_type = other DNA
acgtactgaccgtttctatcgttaactctcaggatcaggtaacccaaaaacccctgcgtgactcggttaaacagg

SEQ ID NO: 578712 - DNA, 75 bp, synthetic construct
  source 1..75: mol_type = other DNA
gttggttacaccccgattgatgacattgctcaggtgaatcgcgtcattgaagactttgatgtgaacttcaagcag

SEQ ID NO: 578713 - DNA, 75 bp, synthetic construct
  source 1..75: mol_type = other DNA
gagcagtgaaggccccccgtccttacgtgacagggccgcgagtcattgagaccggtaagaagtatgtgttcaaag

SEQ ID NO: 578714 - DNA, 75 bp, synthetic construct
  source 1..75: mol_type = other DNA
tcgacaagggggagtaccaggttcgggccaaggtggtgaacgtcaactcaggtgcggaaaagtacaccgaagcgg

SEQ ID NO: 578715 - DNA, 75 bp, synthetic construct
  source 1..75: mol_type = other DNA
ccgtcattgggcaagcctgtgttggtgatgcgcgatactaccgagcgcccagaagcggtagcggcaggcacggtt

SEQ ID NO: 578716 - DNA, 75 bp, synthetic construct
  source 1..75: mol_type = other DNA
gaatgggtgcatcttcggattgaggaagatctggcatcagtcagggaaaaattaaccaaaaaatcagccgccgga

SEQ ID NO: 578717 - DNA, 75 bp, synthetic construct
  source 1..75: mol_type = other DNA
acacataacgcgcgcgtgcgcgagagtgctccgaccagtaattcgacaggcgcaccgtcgcagacaacggacccc

SEQ ID NO: 578718 - DNA, 75 bp, synthetic construct
  source 1..75: mol_type = other DNA
tgggggaggtgtattcgaaccgctggactcagaagaacggggctgcgccgtcgaaactctggattgctcagattg

SEQ ID NO: 578719 - DNA, 75 bp, synthetic construct
  source 1..75: mol_type = other DNA
tgtcgacaccgcactccgactggcggaagatatcctgcgcttcgcccgctgccgccagggtggtgcactgacctg

SEQ ID NO: 578720 - DNA, 75 bp, synthetic construct
  source 1..75: mol_type = other DNA
aatcgtagccaggcggatgtcgacactgcacatcggctggcggaagatatcctgcgcttcgcccgctgccgctag

SEQ ID NO: 578721 - DNA, 75 bp, synthetic construct
  source 1..75: mol_type = other DNA
gtccgcagcatgcggttttcgtcggggggatgctgcagagtatgtcagggagacagaccggtcactgatgcaact

SEQ ID NO: 578722 - DNA, 75 bp, synthetic construct
  source 1..75: mol_type = other DNA
gctgttacagctggtactgttagactagtaggtactgataaagacataatatttaatgaattgaaccttttactg

SEQ ID NO: 578723 - DNA, 75 bp, synthetic construct
  source 1..75: mol_type = other DNA
atatttcaaataaaacctgactatgacttaaatttgatgaagtctgggcagtctcttaatgatattacgtcatca

SEQ ID NO: 578724 - DNA, 75 bp, synthetic construct
  source 1..75: mol_type = other DNA
gaaatgagtttcgcccacaacccttacggtgatggtcaagcctgtcaaagaattttagatgaattaattaagtgt

SEQ ID NO: 578725 - DNA, 75 bp, synthetic construct
  source 1..75: mol_type = other DNA
accagccagcaagggggagaactatgcaggaataccatcagcaggcaccgcatcgcgggcagttcagcaaatccg

SEQ ID NO: 578726 - DNA, 75 bp, synthetic construct
  source 1..75: mol_type = other DNA
tcgttcgcgaagtaaatgagctgttggattgcaaagaagcttataatgcaatgagttttgcacataacccatatg

SEQ ID NO: 578727 - DNA, 75 bp, synthetic construct
  source 1..75: mol_type = other DNA
tgcttctaatccatacggtgatggtcaaacatctaaacgaataatagatataatggctgattggtataatttaaa

SEQ ID NO: 578728 - DNA, 75 bp, synthetic construct
  source 1..75: mol_type = other DNA
gaagccgattgggttaacccggagataccgggaccgtctgtgaagatgtgcagtcacaccaatgtgcagtcacac

SEQ ID NO: 578729 - DNA, 75 bp, synthetic construct
  source 1..75: mol_type = other DNA
ggcgtaaaaatacaaaaaaatcatatgcattaatacttaatctcatcatgttttgtgagatgtttttatcatcat

SEQ ID NO: 578730 - DNA, 75 bp, synthetic construct
  source 1..75: mol_type = other DNA
ctgcagcgtcgacgtgcattggccagggatatgctatgtgcaactcctgatttgagtagtgttgattttgaggtc

SEQ ID NO: 578731 - DNA, 75 bp, synthetic construct
  source 1..75: mol_type = other DNA
agatgccggcgacaaaaccggtgtgtgggagtccgacaatcaggagaaggctaccgttgatcagactggtctggt

SEQ ID NO: 578732 - DNA, 75 bp, synthetic construct
  source 1..75: mol_type = other DNA
gatgatgaaggcgttctgggcaaaatgagcggtcctaaaccggtaaaaaccgtgtcgatcaaacaggaatctcca

SEQ ID NO: 578733 - DNA, 75 bp, synthetic construct
  source 1..75: mol_type = other DNA
ccactgttgatcagactggtcttgtgcgtggtgtggcacaaggttctgcaaacatatcattcaccagcaatagcg

SEQ ID NO: 578734 - DNA, 75 bp, synthetic construct
  source 1..75: mol_type = other DNA
gaacttacaggttcacgatagctaccgcatcccaggagagaatggcgaactcagtcacgtcatcatccctcccga

SEQ ID NO: 578735 - DNA, 75 bp, synthetic construct
  source 1..75: mol_type = other DNA
aaaatcgtcagagtctgatcgatacatttcagtcaacgcccggttttaacgtcattattttatccaccattgcgg

SEQ ID NO: 578736 - DNA, 75 bp, synthetic construct
  source 1..75: mol_type = other DNA
attacggggcgtcgcgtggcgggggatgatgcgctctcatttgttcgcaacccctacacctggattggtgaagag

SEQ ID NO: 578737 - DNA, 75 bp, synthetic construct
  source 1..75: mol_type = other DNA
cctgattgatgattttcaggctcagcctgggtttggggtgattattctctctacggttgctgtcgggttcggcgt

SEQ ID NO: 578738 - DNA, 75 bp, synthetic construct
  source 1..75: mol_type = other DNA
attatggtgtgcgacgaggcacaaaaaataaaaaacccagctgcgttaatcacacatgcggccaacgcggtacaa

SEQ ID NO: 578739 - DNA, 75 bp, synthetic construct
  source 1..75: mol_type = other DNA
aacatgaacaggcactgtttgatgccaggattttctttcatcatttcaggttgataccgcaactgaatgcggaaa

SEQ ID NO: 578740 - DNA, 75 bp, synthetic construct
  source 1..75: mol_type = other DNA
agctttaactacatgtcgtaggcttctagaagggttggctgatgaactttatccggcatcgaaggaaaaatttaa

SEQ ID NO: 578741 - DNA, 75 bp, synthetic construct
  source 1..75: mol_type = other DNA
aacctggccggacagggcgttaatattggtgccaaaaagcttcgtcaggcagctattgagagagcaaagaaaatg

SEQ ID NO: 578742 - DNA, 75 bp, synthetic construct
  source 1..75: mol_type = other DNA
attaccctgccacgcaagcaatcgaacacatcagggaagggcgtaagatcgggccgactccagcagggatgctgc

SEQ ID NO: 578743 - DNA, 75 bp, synthetic construct
  source 1..75: mol_type = other DNA
caaccctggcgaactgtttgtttatctgggaattgccagcggtctgacgacgctgaatctgccacttggcccact

SEQ ID NO: 578744 - DNA, 75 bp, synthetic construct
  source 1..75: mol_type = other DNA
accactgtagttggtaaacagaaaaccgcagttcaagattttctatggaacttatgtcgattttggctgattctt

SEQ ID NO: 578745 - DNA, 75 bp, synthetic construct
  source 1..75: mol_type = other DNA
ggatagatcaactttggacaaaagtaattcaagttgcaaaggttatttgggataaagatacatctactgttccaa

SEQ ID NO: 578746 - DNA, 75 bp, synthetic construct
  source 1..75: mol_type = other DNA
ctggaatgtatgtaagttttatgtgatattgctcttcgtaaaaaactctggaggtatgctgatatctgcaacaaa

SEQ ID NO: 578747 - DNA, 75 bp, synthetic construct
  source 1..75: mol_type = other DNA
gagaatatcttccatctattataatagattttcagtccagactgaagttgagtataacaatacattcaaaaaatg

SEQ ID NO: 578748 - DNA, 75 bp, synthetic construct
  source 1..75: mol_type = other DNA
aaattggtaatgataggacttattatcaagatagtttaagccgccatctgagttatgttagaaaaaaagcacatg

SEQ ID NO: 578749 - DNA, 75 bp, synthetic construct
  source 1..75: mol_type = other DNA
gataggtcttaaggtaaaaattcattattccaatgaagagtttaaatttaaaagtaatgaaggcggcggtggata

SEQ ID NO: 578750 - DNA, 75 bp, synthetic construct
  source 1..75: mol_type = other DNA
ctggtcaccaacttcttccgcggctgggtgaccgatctgaccaccgccatttttgagaaaaagatgggcattcaa

SEQ ID NO: 578751 - DNA, 75 bp, synthetic construct
  source 1..75: mol_type = other DNA
gggtgaccgatctgaccaccgccatttttgagaaaaagatgggcattcaacttgaacaaaaagttcacctggcag

SEQ ID NO: 578752 - DNA, 75 bp, synthetic construct
  source 1..75: mol_type = other DNA
agtataacaatacattcaaaaaatgtattaatgagctagtaaactcatttcctgataacattgaactaatctctg

SEQ ID NO: 578753 - DNA, 75 bp, synthetic construct
  source 1..75: mol_type = other DNA
gtgttcaaaaaattgttgggtaaatttattaaagagaatacctcactacccgcttcatttgtgccgctgtatgta

SEQ ID NO: 578754 - DNA, 75 bp, synthetic construct
  source 1..75: mol_type = other DNA
gacggcggccatcgtgctatggaacacggtctatctggagcgggccgcgaacgccttgcgtggccacggtcaagc

SEQ ID NO: 578755 - DNA, 75 bp, synthetic construct
  source 1..75: mol_type = other DNA
gcgcgctgtcggagctgaagaacgcgctgcgctccggcgacatctgggtgcaaggctcgcgccagttcaaggact

SEQ ID NO: 578756 - DNA, 75 bp, synthetic construct
  source 1..75: mol_type = other DNA
ttgacagtaacccaaccaaaaattggttacctacccaaccagaatttggttacatgtaagactgaatataaaaac

SEQ ID NO: 578757 - DNA, 75 bp, synthetic construct
  source 1..75: mol_type = other DNA
ttcggcggctgccgcctgtcgctggcaacaccggttgatgaagcctgggatggcccggccgcgctgaacggcaaa

SEQ ID NO: 578758 - DNA, 75 bp, synthetic construct
  source 1..75: mol_type = other DNA
atgacagacaacactcgtttacgcatagctatgcagaaatccggccgtttaagtgatgactcacgcgaattgctg

SEQ ID NO: 578759 - DNA, 75 bp, synthetic construct
  source 1..75: mol_type = other DNA
atcctcgccatcatgattattccgtacattgcggcggtaatgcgcgatgtgttcgaacaaaccccggtgatgatg

SEQ ID NO: 578760 - DNA, 75 bp, synthetic construct
  source 1..75: mol_type = other DNA
aaaaaacgctgatggcggtagcgtgtctgagcgcagtaccggcagcccaggctgctgtctccctggaccgcacac

SEQ ID NO: 578761 - DNA, 75 bp, synthetic construct
  source 1..75: mol_type = other DNA
atgacgcgttatcaacatctggcgactctgcttgccgagcggattgagcaagggctgtatcgtcacggggagaaa

SEQ ID NO: 578762 - DNA, 75 bp, synthetic construct
  source 1..75: mol_type = other DNA
aggaagatatcaaagtggctgttgcggatgatgattgcgcttcacgccctgtgcctgatgtcgctgctgaccggt

SEQ ID NO: 578763 - DNA, 75 bp, synthetic construct
  source 1..75: mol_type = other DNA
ccaagaaagaaacaaactcagggtgacaagaagcaaaaaattaaaccgaagatgtattttgctggtggagggatt

SEQ ID NO: 578764 - DNA, 75 bp, synthetic construct
  source 1..75: mol_type = other DNA
gcagaaactcaacactgcgctggaaaaaagtgaagaaagatggcacttacgaaaccatctacaacaaatggttcc

SEQ ID NO: 578765 - DNA, 75 bp, synthetic construct
  source 1..75: mol_type = other DNA
gatcagattatcatcaactcctggaatcatggatttacctcaggatagagagtctattttttatttcaatttaag

SEQ ID NO: 578766 - DNA, 75 bp, synthetic construct
  source 1..75: mol_type = other DNA
ggaagataacggctggctggctgacgaagcctggatttatgtcgaaagcgaagtcgaaaacggtctgcccaccgt

SEQ ID NO: 578767 - DNA, 75 bp, synthetic construct
  source 1..75: mol_type = other DNA
tacgccaagctgtcctggctgcaagcctggcacatccgcgacgaaacctattcggcggccttggccgagctggtc

SEQ ID NO: 578768 - DNA, 75 bp, synthetic construct
  source 1..75: mol_type = other DNA
aggatggctgcatcatgcacggctactgcgacactgacaccattgtgggggaaaacggtcatatcggtcatggtg

SEQ ID NO: 578769 - DNA, 75 bp, synthetic construct
  source 1..75: mol_type = other DNA
gcgagaaacgccagttgttgatgggcacgccagcccgtgcggtgcgcagcgtcagcgatgacgagttgcactgga

SEQ ID NO: 578770 - DNA, 75 bp, synthetic construct
  source 1..75: mol_type = other DNA
aaggtgatactgagtcaatcatcgtgaattcaccagcgttcattgcatttctgcgcacgaataattttgaattgg

SEQ ID NO: 578771 - DNA, 75 bp, synthetic construct
  source 1..75: mol_type = other DNA
attacctcaccaaagtcgaaagcaaagtgtttggtgaaggagaccgtaacttcggctgtagccaaatcgatctgt

SEQ ID NO: 578772 - DNA, 75 bp, synthetic construct
  source 1..75: mol_type = other DNA
ggatgatcacaggagcctggtacagcgccctgagactggagagagacgatcaccctggtctggtccattttcctg

SEQ ID NO: 578773 - DNA, 75 bp, synthetic construct
  source 1..75: mol_type = other DNA
cgccgacaacctgcgcaaggtgccggccgatgcacccacggccttcatcaagccgcgctggaagccgctggtgat

SEQ ID NO: 578774 - DNA, 75 bp, synthetic construct
  source 1..75: mol_type = other DNA
cggcctgaacaaaggtgaggcgcgcaactcgctggccagggcggtgttcttcaaccgccttggggaaatcaggga

SEQ ID NO: 578775 - DNA, 75 bp, synthetic construct
  source 1..75: mol_type = other DNA
aagtcgaaaacggtctgcccactgttccggcaaactggtcattacatcgggaaaaagtggcggggcagggggctt

SEQ ID NO: 578776 - DNA, 75 bp, synthetic construct
  source 1..75: mol_type = other DNA
cgcgctgtacgcagtgttagtgacgacgagttacactggaagcagttgaataccaaagagtatcaggatcttgtc

SEQ ID NO: 578777 - DNA, 75 bp, synthetic construct
  source 1..75: mol_type = other DNA
gaactgcgccgccgcgtgcatgccggcctgaacaaaggtgaggcgcgcaactcgctggccagggcggtgttcttc

SEQ ID NO: 578778 - DNA, 75 bp, synthetic construct
  source 1..75: mol_type = other DNA
gcgccacccaggggttgtcgaggccggcaagccggtggacggcgagctgctgcaattcctgtcgccgctgggctg

SEQ ID NO: 578779 - DNA, 75 bp, synthetic construct
  source 1..75: mol_type = other DNA
atggctaaatattccgatgaattaaaagaagcggcccgcacgctttatattaaaagctggtcgccgaaagatatc

SEQ ID NO: 578780 - DNA, 75 bp, synthetic construct
  source 1..75: mol_type = other DNA
cgtcgtcgaacgcaagcgcatcgaatgggcaaaagatgccgtagacgaaacgaacaaagagcgcgtcgaaatacc

SEQ ID NO: 578781 - DNA, 75 bp, synthetic construct
  source 1..75: mol_type = other DNA
ttatctgggcgtggacgtaaccgggatcggccagggggtgtttgacaatatccagcactttgccatgaaggttgt

SEQ ID NO: 578782 - DNA, 75 bp, synthetic construct
  source 1..75: mol_type = other DNA
cgcgatcgcgggcggctttaatctcgccaatattgacgatctacgcgagcgttacagtgaatcagcgttcgcaat

SEQ ID NO: 578783 - DNA, 75 bp, synthetic construct
  source 1..75: mol_type = other DNA
atcgtgaagtgtgggcgggctatgatccggctcgtagcggtgacacctccacctttgtgattatcgcgccgccga

SEQ ID NO: 578784 - DNA, 75 bp, synthetic construct
  source 1..75: mol_type = other DNA
acttttccacccccagcagcaaaacgcaccaggcgtacccgttctggactggtgaagaatggaagcgcggtgaca

SEQ ID NO: 578785 - DNA, 75 bp, synthetic construct
  source 1..75: mol_type = other DNA
tgtacggggatgaggtcttctggatatcgaaatttgcccgcctgcatgaagtggcgtcagcgatggcgacgcatg

SEQ ID NO: 578786 - DNA, 75 bp, synthetic construct
  source 1..75: mol_type = other DNA
gccatccgccgtgtaatgactgccagtcagaacgcaatgacgttcgccgccgaacgcagcgaaacgaccggtcac

SEQ ID NO: 578787 - DNA, 75 bp, synthetic construct
  source 1..75: mol_type = other DNA
ccgaactgcgtgaacttatcgcgcagcacgtgaagatcatcgcccagaaaaacaaacacgctgaaaggatggcgg

SEQ ID NO: 578788 - DNA, 75 bp, synthetic construct
  source 1..75: mol_type = other DNA
cgcggatcgtttactactgggctgagaaatacagctgggctgatttactcagttttgaaagcacagaggaggcaa

SEQ ID NO: 578789 - DNA, 75 bp, synthetic construct
  source 1..75: mol_type = other DNA
cgatgaaccgcgccccaaacgcaaaaacaggaaaaacgatatttcctctctgacccaggcggattttgacatctg

SEQ ID NO: 578790 - DNA, 75 bp, synthetic construct
  source 1..75: mol_type = other DNA
gcgtattgagtgggataaaaacctgaaagagatcgccgccagctttatgtctgtgcgccgaaccaccacacaaag

SEQ ID NO: 578791 - DNA, 75 bp, synthetic construct
  source 1..75: mol_type = other DNA
gcaaccttttattttgcctttgaagctttcgaagatgctgtattaactggcgacactcagatatttctgtccgct

SEQ ID NO: 578792 - DNA, 75 bp, synthetic construct
  source 1..75: mol_type = other DNA
cgttggatttaaccgggctggatatggcctctgcttctcttctggacgaggccaccgctgccgccgaagcaatgg

SEQ ID NO: 578793 - DNA, 75 bp, synthetic construct
  source 1..75: mol_type = other DNA
tggtccgggtatgggaccgatcggcgtgaaagcgcatttggcaccgtttgtaccgggtcatagcgtggtgcaaat

SEQ ID NO: 578794 - DNA, 75 bp, synthetic construct
  source 1..75: mol_type = other DNA
tttgtacttcccaggtactgctggcaaacatcgccagtctgtatgccgtttatcacggtccggttggcctgaaac

SEQ ID NO: 578795 - DNA, 75 bp, synthetic construct
  source 1..75: mol_type = other DNA
ccgcacattcagagcgaactggtcgccgattgggcgcatccgtacagccgtgaagttgcggtattcccggcaggc

SEQ ID NO: 578796 - DNA, 75 bp, synthetic construct
  source 1..75: mol_type = other DNA
tgggttcctgcaccatgaaactgaacgccgccgccgagatgatcccgatcacctggccggaatttgccgaactgc

SEQ ID NO: 578797 - DNA, 75 bp, synthetic construct
  source 1..75: mol_type = other DNA
aacctttggttttgaagtgattgtcgatgacgcgcaaaaagtgctcgaccatcaggacgtgttcggcgtgctgtt

SEQ ID NO: 578798 - DNA, 75 bp, synthetic construct
  source 1..75: mol_type = other DNA
ataccgcgtatactccgtatcaacctgaagtctcccagggccgccttgaagcactgctcaacttccagcaggtaa

SEQ ID NO: 578799 - DNA, 75 bp, synthetic construct
  source 1..75: mol_type = other DNA
gcagtttctgcggcaccgttcggtagcgcctctatcctgccaatcagctggatgtacatccgcatgatgggcgca

SEQ ID NO: 578800 - DNA, 75 bp, synthetic construct
  source 1..75: mol_type = other DNA
gtcgcgtggcgcacgaatgtattctcgatattcgcccgctgaaagaagaaaccggcatcagcgaactggatattg

SEQ ID NO: 578801 - DNA, 75 bp, synthetic construct
  source 1..75: mol_type = other DNA
tgaagtctcgcagggccgccttgaggcactgctcaatttccagcaggtaacgctggatttaaccgggctggatat

SEQ ID NO: 578802 - DNA, 75 bp, synthetic construct
  source 1..75: mol_type = other DNA
gcttctgacgtccatccgcaaacgttggatgtggtacgtactcgtgccgaaacctttggttttgaagtgattgtc

SEQ ID NO: 578803 - DNA, 75 bp, synthetic construct
  source 1..75: mol_type = other DNA
atcaggacgtcttcggcgtgctgttacagcaggttggcactaccggtgaaattcacgactacactgcgctcatca

SEQ ID NO: 578804 - DNA, 75 bp, synthetic construct
  source 1..75: mol_type = other DNA
aaaagaagagcgcggagaaaaagacgcggataagaaagagcgtcgtcgtaaagctaatgatgtgtcagggctgac

SEQ ID NO: 578805 - DNA, 75 bp, synthetic construct
  source 1..75: mol_type = other DNA
ttatgctgcttcgcaacggaatacaacaacgttgcaagctccgactacatcagggcaatggctggagaagttgag

SEQ ID NO: 578806 - DNA, 75 bp, synthetic construct
  source 1..75: mol_type = other DNA
aagaaaaatgcaatagaagtaaaaaatggcctctcgtatcccaggagtaaaggcgtatcccaaaatgcgctgaat

SEQ ID NO: 578807 - DNA, 75 bp, synthetic construct
  source 1..75: mol_type = other DNA
tttttggtacaacagaaatggccagcagtgagtattactctgacgatgagttgatcaatgccatagagaaaagta

SEQ ID NO: 578808 - DNA, 75 bp, synthetic construct
  source 1..75: mol_type = other DNA
cgtcgtttcggaggacgattacacgcacgtaatgacggaatcagagcttttgttcagtctgtacggtcaggctac

SEQ ID NO: 578809 - DNA, 75 bp, synthetic construct
  source 1..75: mol_type = other DNA
aataccgcttttccctgtttatgacggaaagacccatcagctgacaattcatgtcagcccgccacttgctatacg

SEQ ID NO: 578810 - DNA, 75 bp, synthetic construct
  source 1..75: mol_type = other DNA
cttcccccgttactggatgacgtggacaggtatcggtattatctgtgtgtttgcaatggtcccccccgcactgag

SEQ ID NO: 578811 - DNA, 75 bp, synthetic construct
  source 1..75: mol_type = other DNA
caaccgcgaggcgtttcacagggcggaagatgcgctgaaacgggaagggcataccgttttaaacccggcagtact

SEQ ID NO: 578812 - DNA, 75 bp, synthetic construct
  source 1..75: mol_type = other DNA
ctggattgtcgaactgccagctggaccggaatagaccattcctggactttccgaaagttaattctgttttatctg

SEQ ID NO: 578813 - DNA, 75 bp, synthetic construct
  source 1..75: mol_type = other DNA
ttgggcattcgaacatcaaaaccacaatggacgtttacggtcacctgttcggtgaagtggtggagatggatttgg

SEQ ID NO: 578814 - DNA, 75 bp, synthetic construct
  source 1..75: mol_type = other DNA
tgaagagtaaagaaaccggtgaaaaaccaaaaagatacttatggactattcgtgatgaacttgttcaggcaatta

SEQ ID NO: 578815 - DNA, 75 bp, synthetic construct
  source 1..75: mol_type = other DNA
gagcggaaagatgtattaaaaaaagcgggaatcgagatattattagaggatttgattcttttttacaagatggaa

SEQ ID NO: 578816 - DNA, 75 bp, synthetic construct
  source 1..75: mol_type = other DNA
ggtgcaagggctgagctggcactggcggagaaactgggccatgcggtgatttttcaggaggtgggcagtgaatat

SEQ ID NO: 578817 - DNA, 75 bp, synthetic construct
  source 1..75: mol_type = other DNA
gtcctctgattaacataattcgcggtacccaatgtctagcagacaagcgagttcctcaaggcttacttaccggta

SEQ ID NO: 578818 - DNA, 75 bp, synthetic construct
  source 1..75: mol_type = other DNA
gtctgcgttcgtggtgccattgacgcaggatgggcggctgtccgcgaaagagtttattggcgggcggtcaaagat

SEQ ID NO: 578819 - DNA, 75 bp, synthetic construct
  source 1..75: mol_type = other DNA
actacgaatcgataaaccgtggcacccgtagccaggtatcgatctcgccggaggcgctggagccgcgtgtattgc

SEQ ID NO: 578820 - DNA, 75 bp, synthetic construct
  source 1..75: mol_type = other DNA
ttagcactgtccgggcctgataaaatttcgcatcgtatacgctggaatggtctggagattgtggagaagatggca

SEQ ID NO: 578821 - DNA, 75 bp, synthetic construct
  source 1..75: mol_type = other DNA
cccattaaaggcaatccggttaagttaagcaatctggctgaactgtattttctggcgaccaacagcaatacggca

SEQ ID NO: 578822 - DNA, 75 bp, synthetic construct
  source 1..75: mol_type = other DNA
aattgcacaaacagagtttggcattcccattaaaggcaatccggttaagttaagtaatttggctgaactgtattt

SEQ ID NO: 578823 - DNA, 75 bp, synthetic construct
  source 1..75: mol_type = other DNA
ggatctgatttacgccaaccgtattgagtgggatgaagaagccacagatattccggcatcatttctggctatccg

SEQ ID NO: 578824 - DNA, 75 bp, synthetic construct
  source 1..75: mol_type = other DNA
ttgaaacattcattgatgaatcacattttcgttttccgtgcgattctcgcggcgcgatggtttatacacctccac

SEQ ID NO: 578825 - DNA, 75 bp, synthetic construct
  source 1..75: mol_type = other DNA
atgagacgggtaatattctattcagttgaaacgtttgttgacaatacgcgtgtttattatccgtgggaagtatac

SEQ ID NO: 578826 - DNA, 75 bp, synthetic construct
  source 1..75: mol_type = other DNA
tgcagacttttttgctacatataaagctacgttacctgttaccgagcgcctcaggaggatcagtagagcgcagat

SEQ ID NO: 578827 - DNA, 75 bp, synthetic construct
  source 1..75: mol_type = other DNA
gccacccggttggcatccggcgctagaaatatcctcggcagcatagcggcatgtacggcattcgacagcgtgcgt

SEQ ID NO: 578828 - DNA, 75 bp, synthetic construct
  source 1..75: mol_type = other DNA
tgactggcgggaagactttggcaagtcaaaatatgtttacgtacatgtgggccatttgcaccataaatcagtgac

SEQ ID NO: 578829 - DNA, 75 bp, synthetic construct
  source 1..75: mol_type = other DNA
aaatggaacagttaatggaagcggcccgcgacgctttcacggatgaaataccacgcgcggaggctgtgccagtgc

SEQ ID NO: 578830 - DNA, 75 bp, synthetic construct
  source 1..75: mol_type = other DNA
tacaggaggtattcgaggctgttgatcctcgtttcttcggtctgtttgaagatgaagccggagtccgtgatctgg

SEQ ID NO: 578831 - DNA, 75 bp, synthetic construct
  source 1..75: mol_type = other DNA
aaatgcatcaaaaattctgggatcaacgttacaatgcgatcagtcgtattattgatgctgaaggggtgtatagtc

SEQ ID NO: 578832 - DNA, 75 bp, synthetic construct
  source 1..75: mol_type = other DNA
gtaaagaaactatgatagggcttttcacaggcagtaagaaatatactttactgcaatgtgttgagaagcttggtg

SEQ ID NO: 578833 - DNA, 75 bp, synthetic construct
  source 1..75: mol_type = other DNA
cgcaaaattctggcttggtgcgctactgaaaggtggtgggcttggcctgtatggtgattttcttctttcagatca

SEQ ID NO: 578834 - DNA, 75 bp, synthetic construct
  source 1..75: mol_type = other DNA
ggcgcacgtgctaaccgtggtaatgcatcacgacagatacatttcaaagatgcagattcctatctgcaatatcag

SEQ ID NO: 578835 - DNA, 75 bp, synthetic construct
  source 1..75: mol_type = other DNA
gctaaagcctggggcgaagttactgagctactgcgccgcaggtttaatgatgctggtggtgatatcggatatctg

SEQ ID NO: 578836 - DNA, 75 bp, synthetic construct
  source 1..75: mol_type = other DNA
ttgtgtcacttgatgataaatcacaagaatatatcgaatctttaaaagatatggtgtttaatctttctgataaga

SEQ ID NO: 578837 - DNA, 75 bp, synthetic construct
  source 1..75: mol_type = other DNA
gtttaaggaaggagagagtccgagggataagcggaagagtactgattttggagcgcatcaaagattctgggatca

SEQ ID NO: 578838 - DNA, 75 bp, synthetic construct
  source 1..75: mol_type = other DNA
ctgaagctgccgtgaatgctgattataacggcttaccgtttaaagaggtctcaccggctgaagtaacttctgcaa

SEQ ID NO: 578839 - DNA, 75 bp, synthetic construct
  source 1..75: mol_type = other DNA
aaattctataatgcattttattcattaagtgtcttacttgatatacaacgaaagacgaagatacttcaaagcctt

SEQ ID NO: 578840 - DNA, 75 bp, synthetic construct
  source 1..75: mol_type = other DNA
atgaattcttatccagtgcattccacactaaaacctgaattccttcgcagctattgtctgcgcacttttggggtt

SEQ ID NO: 578841 - DNA, 75 bp, synthetic construct
  source 1..75: mol_type = other DNA
tagaaaaaatataaagtatggctcgttgttttattggcttgaccatgtaaaagctcatcaggatgcatttattga

SEQ ID NO: 578842 - DNA, 75 bp, synthetic construct
  source 1..75: mol_type = other DNA
atgttgtcaccagaacgccggatctgaaaagcctgtctaatgacgatttccgcatactgaaaagcaaaggaatca

SEQ ID NO: 578843 - DNA, 75 bp, synthetic construct
  source 1..75: mol_type = other DNA
atgattaaaataaagtcaaataaattactggcaatatgtatggttgttttatatttgctattagttatcgcttta

SEQ ID NO: 578844 - DNA, 75 bp, synthetic construct
  source 1..75: mol_type = other DNA
atcattcgcgattccaaaaggtgccattgtcggtattatcggcccgaacggcgctggtaaatcaacgctgtttcg

SEQ ID NO: 578845 - DNA, 75 bp, synthetic construct
  source 1..75: mol_type = other DNA
catcgttaaaggctctgtggcagtgctgatcaaagacgaagagggtaaagaaatgatcctctcctatctgaatca

SEQ ID NO: 578846 - DNA, 75 bp, synthetic construct
  source 1..75: mol_type = other DNA
atttgaactgactctggaagagaaattgtactactgctcttgtataagaagaaacaggcacaaatacagctacgg

SEQ ID NO: 578847 - DNA, 75 bp, synthetic construct
  source 1..75: mol_type = other DNA
gagaagcggtttgatggcggccgacgtattcatttcccctttacgtccgtcacaaatggatttggatgttgttcc

SEQ ID NO: 578848 - DNA, 75 bp, synthetic construct
  source 1..75: mol_type = other DNA
agaacgggaaatgcgtaatgccgtggaaagagctaacctgctggcgcgggcatgttataagccaccattaaaact

SEQ ID NO: 578849 - DNA, 75 bp, synthetic construct
  source 1..75: mol_type = other DNA
ggtccgtcttttaaatataaagattattcggtcaatgacctggtcgcatccagttttcctgtttctgcaaaattg

SEQ ID NO: 578850 - DNA, 75 bp, synthetic construct
  source 1..75: mol_type = other DNA
atgcgcaagaaaatcctccgccacggcaagaaagtgggtttcatcaatctgatcaaggatggcatgaaaggagtg

SEQ ID NO: 578851 - DNA, 75 bp, synthetic construct
  source 1..75: mol_type = other DNA
tttctgatctcggaaccatgtatctgtctgcgaaggtgttaaaccttccaatgaaccagttattccgcaaccagc

SEQ ID NO: 578852 - DNA, 75 bp, synthetic construct
  source 1..75: mol_type = other DNA
tattggtgacatttttcatacccattggggctatgagcaaactaatatcgagttttatcaagttgtttcactaca

SEQ ID NO: 578853 - DNA, 75 bp, synthetic construct
  source 1..75: mol_type = other DNA
taatctccggaatggatatcacgccggagcgtagcaaacaggtatcgtttaccacgccctactatgaaaactcag

SEQ ID NO: 578854 - DNA, 75 bp, synthetic construct
  source 1..75: mol_type = other DNA
gtcatgatatttgcgatcattttgcattggctaccaggcggtggctggaatggcggggcgctgaaattcatgata

SEQ ID NO: 578855 - DNA, 75 bp, synthetic construct
  source 1..75: mol_type = other DNA
gtaacgtacagtggtcaaagtggtgaaagtaagacgataaccgttaattttgaaccacaggaattaagtccggta

SEQ ID NO: 578856 - DNA, 75 bp, synthetic construct
  source 1..75: mol_type = other DNA
aatgcaattaaccagcttacaaacgacaaaggcgagattgatgatgatgaacttttacgcgtaagaatcagatta

SEQ ID NO: 578857 - DNA, 75 bp, synthetic construct
  source 1..75: mol_type = other DNA
tgaactatggagcttataatgctatacgtatgttaattggtgtctaccatgcagcatttcttatatctacaggtg

SEQ ID NO: 578858 - DNA, 75 bp, synthetic construct
  source 1..75: mol_type = other DNA
gccgcgaggcgttttatgatgttgccagcgtaatagacaatcgggttagcaatgcaattaaccagattacagacg

SEQ ID NO: 578859 - DNA, 75 bp, synthetic construct
  source 1..75: mol_type = other DNA
gtattacactggcgctgtttgctgcgggttcaacaggtttaacggcggccatcaaccagatgaccaaaacgacga

SEQ ID NO: 578860 - DNA, 75 bp, synthetic construct
  source 1..75: mol_type = other DNA
gtggcttgcgccgctcggaaatcgttgcgctggacatgggaagcatgatctacaaggaccgcgctctcaaggttc

SEQ ID NO: 578861 - DNA, 75 bp, synthetic construct
  source 1..75: mol_type = other DNA
tagcttccagcacgtacgtggatctcgacttcctaaagggcgggcacttgaacgccatgagattcgcagcctctt

SEQ ID NO: 578862 - DNA, 75 bp, synthetic construct
  source 1..75: mol_type = other DNA
ctcagtgaagaaggagtagaagcagctctgtcacgccgtattcagttactgacagaccgggataaaaagacagat

SEQ ID NO: 578863 - DNA, 75 bp, synthetic construct
  source 1..75: mol_type = other DNA
aaaccggtcacgcagacgatttctgggccatatctcatgcaatgattaatgagccgctgaataccgaacataaac

SEQ ID NO: 578864 - DNA, 75 bp, synthetic construct
  source 1..75: mol_type = other DNA
ccggcatcggcgcacggtactaatcctgcttccgcgcatatggcaggaatgcaggtggtcattgtggcgtgtgat

SEQ ID NO: 578865 - DNA, 75 bp, synthetic construct
  source 1..75: mol_type = other DNA
cttgacgaaaacctgccacagatactggctgattacctgatggaaactaccggaaacgtgcctgagaagttgcta

SEQ ID NO: 578866 - DNA, 75 bp, synthetic construct
  source 1..75: mol_type = other DNA
cgacgtgattgatacagggttttgcctgtacgcgctttcaaagctggctagccagatttcttcaatcatggacag

SEQ ID NO: 578867 - DNA, 75 bp, synthetic construct
  source 1..75: mol_type = other DNA
aaactatggcgaaaagctgccgtgtaagtgcgacagcgtttgaaaagtggggagttactcccgttgaacgtaaag

SEQ ID NO: 578868 - DNA, 75 bp, synthetic construct
  source 1..75: mol_type = other DNA
cgcatacaatcccaacctgagctacgaccgacccgatttctcgttaagtcatactcctaatgtggtgttgccatg

SEQ ID NO: 578869 - DNA, 75 bp, synthetic construct
  source 1..75: mol_type = other DNA
atttcctttgtgtctcctgagcctcaagaaatgcctgatatttgcaagagtgaagcattgcttgagcttgaaaag

SEQ ID NO: 578870 - DNA, 75 bp, synthetic construct
  source 1..75: mol_type = other DNA
aatatgagtcgcagaagaaggttgctatgcagggtgatattgagcagttagtgaagatttctcagaaatatgcaa

SEQ ID NO: 578871 - DNA, 75 bp, synthetic construct
  source 1..75: mol_type = other DNA
agcttgatactatgaaagagcttgttagtgaatatgagtcgcagaagaaggttgccatgcaggctgatattgagc

SEQ ID NO: 578872 - DNA, 75 bp, synthetic construct
  source 1..75: mol_type = other DNA
ctgattgagctgcataccgataatctggataaattcttcaccccgcgcccgaaagttgactggcctgcccactcg

SEQ ID NO: 578873 - DNA, 75 bp, synthetic construct
  source 1..75: mol_type = other DNA
gccgcctgccggaggcgatggacggcgaaggcggctggctgctgccggggctgattgagctgcataccgataatc

SEQ ID NO: 578874 - DNA, 75 bp, synthetic construct
  source 1..75: mol_type = other DNA
atgacaaacgatttatatattaacggcagaaagattgatagcttcagtgactggtcgccacagactgaacatcca

SEQ ID NO: 578875 - DNA, 75 bp, synthetic construct
  source 1..75: mol_type = other DNA
gctttgttgtgtatcacgcgccgagagtctctggcgtcgattgctccgggttttgcctttttaccgacgcttaac

SEQ ID NO: 578876 - DNA, 75 bp, synthetic construct
  source 1..75: mol_type = other DNA
ggacgcgctgccgcagcaggacgggtatgaaaccctggcaagcttgctgcaggacctgcccgttggggtgacgct

SEQ ID NO: 578877 - DNA, 75 bp, synthetic construct
  source 1..75: mol_type = other DNA
taacggcttagatgaagttaacctgccggtggcctttaacgatgtggattactgtctgcgggtcggcgaggctgg

SEQ ID NO: 578878 - DNA, 75 bp, synthetic construct
  source 1..75: mol_type = other DNA
cgccgcgtcctgaagcgtacatgcaggcactgatgctgttgcaggaatctatcggcaaagaacgtcgtccgctct

SEQ ID NO: 578879 - DNA, 75 bp, synthetic construct
  source 1..75: mol_type = other DNA
atggtttgtcagctaacgatcctggatatcagcgtagggctgttagtgcccaagagctgtcagctgtgactgcag

SEQ ID NO: 578880 - DNA, 75 bp, synthetic construct
  source 1..75: mol_type = other DNA
ggcagtgggtgttgcctgtaggggcagtggtttcgccaggcgccttattttgggttgcccaccagttacgccaga

SEQ ID NO: 578881 - DNA, 75 bp, synthetic construct
  source 1..75: mol_type = other DNA
ccgctcatgacgttattgttaaaactcttgaccagtctttgactggtcagttagataacttttcttcaatagcgt

SEQ ID NO: 578882 - DNA, 75 bp, synthetic construct
  source 1..75: mol_type = other DNA
ttatattgcgacccctcaagttgaaggtggggcgtgcgcttcatcgtttattataacaggcgcatcccctgtaac

SEQ ID NO: 578883 - DNA, 75 bp, synthetic construct
  source 1..75: mol_type = other DNA
gaaataacaatgcctggcgacaagattgtaaagtttaaacgcgcatcgaaagcaacttacattaataaatctggt

SEQ ID NO: 578884 - DNA, 75 bp, synthetic construct
  source 1..75: mol_type = other DNA
gatgtcacaggtgatgaaaaatatgtgaccatttcatgccgtgtcagaagtgatgttgaaaatataaggtgtcgt

SEQ ID NO: 578885 - DNA, 75 bp, synthetic construct
  source 1..75: mol_type = other DNA
ccggcacgctgaatgattttctcggagccatgacggaagaagatgtcatgccggaggcattgcgtcgttttgagg

SEQ ID NO: 578886 - DNA, 75 bp, synthetic construct
  source 1..75: mol_type = other DNA
ctggcacgctgaatgattttctcggcgccatgacggaagatgatgtcatgccggaggcattgcgtcgttttgagg

SEQ ID NO: 578887 - DNA, 75 bp, synthetic construct
  source 1..75: mol_type = other DNA
caggcacgctgaatgattttctcggcgccatgacggaagaagatgtcatgccggaggcattgcgtcgttttgagg

SEQ ID NO: 578888 - DNA, 75 bp, synthetic construct
  source 1..75: mol_type = other DNA
gataataagtgcgtgacgacatcgtgcagatttaaaacggatttggaactcctgttaaagatcaggtttgaagcc

SEQ ID NO: 578889 - DNA, 75 bp, synthetic construct
  source 1..75: mol_type = other DNA
ggctgccattgacgagccacggtttgaacgtgatggcctgcttattgaggggcaaagaacgaactacatgctcaa

SEQ ID NO: 578890 - DNA, 75 bp, synthetic construct
  source 1..75: mol_type = other DNA
agtgagacagcttcaaagaccagcgaaactaatgcgaaaaatagcgaggtagctgcaaaatcgagtcagagtgct

SEQ ID NO: 578891 - DNA, 75 bp, synthetic construct
  source 1..75: mol_type = other DNA
aactgcggcaaaaaacagccaggttgcagcagcccaaagcgagagcgcggcagccggttctgcgacttcagcagc

SEQ ID NO: 578892 - DNA, 75 bp, synthetic construct
  source 1..75: mol_type = other DNA
caggtacgctgaatgattttctcggtgccatgacggaggatgatgcccgtccggaggcactgcgccgttttgagc

SEQ ID NO: 578893 - DNA, 75 bp, synthetic construct
  source 1..75: mol_type = other DNA
cgttcgtattttatttgaacattatgatggggaggtaaggacatcaataggagcagcaaacctgaaccttaccac

SEQ ID NO: 578894 - DNA, 75 bp, synthetic construct
  source 1..75: mol_type = other DNA
ccggcacgctgaatgattttctcggtgccatgacggaagatgatgtcatgccggaggcattgcgtcgttttgagg

SEQ ID NO: 578895 - DNA, 75 bp, synthetic construct
  source 1..75: mol_type = other DNA
cgccgaagccgcctctcagagcgcagcggcggcaaagaaatccgaaactgcagcggcatcatcaaagaacgcggc

SEQ ID NO: 578896 - DNA, 75 bp, synthetic construct
  source 1..75: mol_type = other DNA
aggtaaggacatcaataggagcagcaaacctgaaccttaccacccgcataattagcaagacaggtcagacaagcc

SEQ ID NO: 578897 - DNA, 75 bp, synthetic construct
  source 1..75: mol_type = other DNA
tcggcgaaagcatcggcagcaagccagacagcagcaaaagcaagtgaagatgctgccagagaatacgcaaaccag

SEQ ID NO: 578898 - DNA, 75 bp, synthetic construct
  source 1..75: mol_type = other DNA
atgctgcaccgcgtgtcattgattcagaaaatcaccagtccggaggcccatttattatggggtttggttcttctg

SEQ ID NO: 578899 - DNA, 75 bp, synthetic construct
  source 1..75: mol_type = other DNA
tcaatgttcgcgcacgtatccgttttgaacggtataactcggaaggatacaccttcctttgcgacgcctatttgt

SEQ ID NO: 578900 - DNA, 75 bp, synthetic construct
  source 1..75: mol_type = other DNA
cgggcacgctgaatgattttctcggcgccatgacggaagaggatgtcatgccggaggcattgcgtcgttttgagg

SEQ ID NO: 578901 - DNA, 75 bp, synthetic construct
  source 1..75: mol_type = other DNA
ccggcacgctgaatgattttctcggggccatgacggaagaggatgtcatgccggaggcattgcgtcgttttgagg

SEQ ID NO: 578902 - DNA, 75 bp, synthetic construct
  source 1..75: mol_type = other DNA
ccggcacgctgaatgattttctcggcgccatgacggaagacgatgtcatgccggaggcattgcgtcgttttgagg

SEQ ID NO: 578903 - DNA, 75 bp, synthetic construct
  source 1..75: mol_type = other DNA
gcatcgagaaacttgataactgggaagaaatcacatccagaccaaactttgttgccagtatagataaaggagaac

SEQ ID NO: 578904 - DNA, 75 bp, synthetic construct
  source 1..75: mol_type = other DNA
caatggtggaagaagcggcacgcaacgccgaagccgcctctcagagcgcagcggcggcaaagaaatccgaaactg

SEQ ID NO: 578905 - DNA, 75 bp, synthetic construct
  source 1..75: mol_type = other DNA
atgtatttggggtatacatctttgggagcacgcgcaatcattacaaatggtaaaggcactaaaatagaatataaa

SEQ ID NO: 578906 - DNA, 75 bp, synthetic construct
  source 1..75: mol_type = other DNA
gtcgtgtcataatggggagaaaatcaatatgtggggtgcgaaaagtaatattaggtacacatcgttggttatata

SEQ ID NO: 578907 - DNA, 75 bp, synthetic construct
  source 1..75: mol_type = other DNA
cggggcagtcaaacagcatggcatatggtgaaggccttccgctgccggagacatatgaccgtccggacccgcgta

SEQ ID NO: 578908 - DNA, 75 bp, synthetic construct
  source 1..75: mol_type = other DNA
acggcaaactgaatctgatgcatcacaagaaagcaggaaacacaaagttgggcgagttcgggaattacagtaacg

SEQ ID NO: 578909 - DNA, 75 bp, synthetic construct
  source 1..75: mol_type = other DNA
tcagagggtgtatttaagatcaccaagcagagcaataaagcctggtccctgacgcgcccggtggatgacgcagtc

SEQ ID NO: 578910 - DNA, 75 bp, synthetic construct
  source 1..75: mol_type = other DNA
gtggttcggcattcactcagggcgcggagggaacattcagtacgaccacgggggccagccaggattcggcgcgct

SEQ ID NO: 578911 - DNA, 75 bp, synthetic construct
  source 1..75: mol_type = other DNA
ccgtggatttgtggtgacacgacgtattactggaaaaatacatacgctacccagtacgacaccgtgtacggcggg

SEQ ID NO: 578912 - DNA, 75 bp, synthetic construct
  source 1..75: mol_type = other DNA
ggttcagcatttacagcaggggcggatggtacattcagtgaagctacgggggccagccagaactctgcgcgctgg

SEQ ID NO: 578913 - DNA, 75 bp, synthetic construct
  source 1..75: mol_type = other DNA
ctggaggtggaacgcctgcactcgcatctgctcaacctcggccttgcctgccacttcactggctttgactccggc

SEQ ID NO: 578914 - DNA, 75 bp, synthetic construct
  source 1..75: mol_type = other DNA
gacaagaaaaacaacgtcgtgccgattggtccgctgcacgtcacttctgacgaaccgggccacttccgtctgttc

SEQ ID NO: 578915 - DNA, 75 bp, synthetic construct
  source 1..75: mol_type = other DNA
cgaagttgacgccaacaaaccggagtatccttccgtgacgccgcgcgttccggcggcggtgtggggcgagcgtga

SEQ ID NO: 578916 - DNA, 75 bp, synthetic construct
  source 1..75: mol_type = other DNA
agctggtgttcaccgccggcagtgccacggttactccgaaactgaatggagtggctggcccggcattccaggtta

SEQ ID NO: 578917 - DNA, 75 bp, synthetic construct
  source 1..75: mol_type = other DNA
gtctggtgctgccggatgactggccggatgaactttatcctctgcgtaaagacagcatggattatcgtcaacgtc

SEQ ID NO: 578918 - DNA, 75 bp, synthetic construct
  source 1..75: mol_type = other DNA
gacaagaaaaacaacgtcgtgccgattggtccgctgcacgtcacttccgacgaaccgggtcacttccgtctgttc

SEQ ID NO: 578919 - DNA, 75 bp, synthetic construct
  source 1..75: mol_type = other DNA
cgtactggccgggcagtccaatgccatggcttacggtgaagggcttccgcttccggattcatacgatgcgcccca

SEQ ID NO: 578920 - DNA, 75 bp, synthetic construct
  source 1..75: mol_type = other DNA
catggctggaaagtagtgacggttgcaatgggcgcagagaagttctggatgcaaaagcatgtcttgcagatatct

SEQ ID NO: 578921 - DNA, 75 bp, synthetic construct
  source 1..75: mol_type = other DNA
tacttctgagctggttatttttttgcgccttctggtttgtatttctcaattacctccgtctggaagaaccccatt

SEQ ID NO: 578922 - DNA, 75 bp, synthetic construct
  source 1..75: mol_type = other DNA
tcgcacagagaaaaaaaggattgtcttttgaagatgcaatgaagcgtacaagagaaaaacatgcggatatcatta

SEQ ID NO: 578923 - DNA, 75 bp, synthetic construct
  source 1..75: mol_type = other DNA
atacgctgatcgataacctgaacaccctgatttgtgaggacagcctgctcacgcgccaggagcgtgaaaccctgg

SEQ ID NO: 578924 - DNA, 75 bp, synthetic construct
  source 1..75: mol_type = other DNA
acctgacggatgaaattaaaaacgacggatgtcagatggctaacaattcctttgaatatgcgaaaagcagtattc

SEQ ID NO: 578925 - DNA, 75 bp, synthetic construct
  source 1..75: mol_type = other DNA
cgccaacggaaaatatcgggcctcatgatttactggcaaatatcgtcctgactatggctcctgaaattattaaaa

SEQ ID NO: 578926 - DNA, 75 bp, synthetic construct
  source 1..75: mol_type = other DNA
acctgattgcgcgcactaagctgcattacagaagaacccgaaaaatgtgttgctggcggtgtgctggatgcaggg

SEQ ID NO: 578927 - DNA, 75 bp, synthetic construct
  source 1..75: mol_type = other DNA
gtgtcatggtggcagtgctgtaaatgtgccgtggatttgtggtgacacgacgtattactggaaaaacacctacgg

SEQ ID NO: 578928 - DNA, 75 bp, synthetic construct
  source 1..75: mol_type = other DNA
ccagcgccttcatcagcggtaccgcaccggagattaaaccctcgcccggcggcgacacgccatcggggccgtctg

SEQ ID NO: 578929 - DNA, 75 bp, synthetic construct
  source 1..75: mol_type = other DNA
gctattctgaacgcagccgggcgcacctcagccttcatcagtggtaaggcaccgaacgtacaacctaaccgccgg

SEQ ID NO: 578930 - DNA, 75 bp, synthetic construct
  source 1..75: mol_type = other DNA
atggcggaattcagttgtcagatggtgtatttaagatcaccaagcagagcaataaaacctggtccctgacgcatc

SEQ ID NO: 578931 - DNA, 75 bp, synthetic construct
  source 1..75: mol_type = other DNA
agtggctggcccggcattccaggttataaaagacggtctgacactgggactgaatgcgctgacgctgacggatgt

SEQ ID NO: 578932 - DNA, 75 bp, synthetic construct
  source 1..75: mol_type = other DNA
gcggcgaactcggcgaaagcatcggcagcaagccaggcggcagcaaaagcaagtgaagatgctgccagagaatac

SEQ ID NO: 578933 - DNA, 75 bp, synthetic construct
  source 1..75: mol_type = other DNA
acgccaaatgcagcaccgcgtgtttttgataccggcggtcatcaaaccggagcggctattattcttggcttcggt

SEQ ID NO: 578934 - DNA, 75 bp, synthetic construct
  source 1..75: mol_type = other DNA
actgcatcagccaacagtcaaaaagcagcaaaaaccagtgaaaccaatgcaaagacaagcgagactgcagcggcg

SEQ ID NO: 578935 - DNA, 75 bp, synthetic construct
  source 1..75: mol_type = other DNA
gaagccgcctctcagagcgcagcggcggcaaagaaatccgaaactgcagcggcatcatcgaagaacgcggcgaaa

SEQ ID NO: 578936 - DNA, 75 bp, synthetic construct
  source 1..75: mol_type = other DNA
gcagctggttctgcgacttcagctgctggatcagcaactgctgcggctaacagtcagaaagcagcgaagacgagt

SEQ ID NO: 578937 - DNA, 75 bp, synthetic construct
  source 1..75: mol_type = other DNA
cttcctgatgtgtggataccatttaacgattcactggatatgattacggggttttcgccgtcatataaaaagatt

SEQ ID NO: 578938 - DNA, 75 bp, synthetic construct
  source 1..75: mol_type = other DNA
cgaagaccagcgaaacgaatgctaaagccagtgaaactgcggcaaaaaacagccaggttgcagcagcccaaagcg

SEQ ID NO: 578939 - DNA, 75 bp, synthetic construct
  source 1..75: mol_type = other DNA
tagttttggttttacctatggaaagtttgtctgtaacgattctctgattgggcaaacctcagccattaatatggc

SEQ ID NO: 578940 - DNA, 75 bp, synthetic construct
  source 1..75: mol_type = other DNA
gcagccggttctgcgacttcagcagctggatcagcaactgctgcggctaacagccagaaagcagcgaagacgagc

SEQ ID NO: 578941 - DNA, 75 bp, synthetic construct
  source 1..75: mol_type = other DNA
tttattatggggtttggttcttctggaactattagtcaggacggttattcgtattgcgatataggcggggctaac

SEQ ID NO: 578942 - DNA, 75 bp, synthetic construct
  source 1..75: mol_type = other DNA
cagccagaaagccgcgaagacgagcgaaactaacgcaaagtccagccagacggcagcgaagaccagcgaaacgaa

SEQ ID NO: 578943 - DNA, 75 bp, synthetic construct
  source 1..75: mol_type = other DNA
aatggttatggggatgcgtgtaaagtcagatcagtctacgtgctcagtaagtaacgggcgtatatccagcgaaac

SEQ ID NO: 578944 - DNA, 75 bp, synthetic construct
  source 1..75: mol_type = other DNA
aacaccgcaattatccgtattggaggccagactacagccgggttacgtcatttatttggtcatgtcaggaatttc

SEQ ID NO: 578945 - DNA, 75 bp, synthetic construct
  source 1..75: mol_type = other DNA
tgaaatacattaacgatcgtcatctgccggataaagcgattgatgttatcgacgaagcgggcgctcgcgcacgtc

SEQ ID NO: 578946 - DNA, 75 bp, synthetic construct
  source 1..75: mol_type = other DNA
gtttgcgttttgaaaaatacgatgggtcggtttatacatttttaggagatgcttatttaactttcggaactctga

SEQ ID NO: 578947 - DNA, 75 bp, synthetic construct
  source 1..75: mol_type = other DNA
ttataatcttccttttacggttctttgtgaggtacataagaactggtataaaacgccaaatgcagcaccgcgtgt

SEQ ID NO: 578948 - DNA, 75 bp, synthetic construct
  source 1..75: mol_type = other DNA
aaagtccagccagacggcagcgaagaccagcgaaacgaatgccaaagccagcgaaactgcggcaaaaaacagtca

SEQ ID NO: 578949 - DNA, 75 bp, synthetic construct
  source 1..75: mol_type = other DNA
gtacagtaaaggtccgtatgttaccgcgtcgttcagggtaagaagtgatctcaatgttcgcgcacgtatccgttt

SEQ ID NO: 578950 - DNA, 75 bp, synthetic construct
  source 1..75: mol_type = other DNA
cagcgaagaccagcgaaacgaatgccaaagccagcgaaactgcggcgaaaaacagtcaggatgcagcagccgaaa

SEQ ID NO: 578951 - DNA, 75 bp, synthetic construct
  source 1..75: mol_type = other DNA
atatataacgcagcaatattccgtttcggcggtcaaacagcatcaggggagcgacatctttttggacatattaga

SEQ ID NO: 578952 - DNA, 75 bp, synthetic construct
  source 1..75: mol_type = other DNA
ggcggtcatcaaaccggagcggctattattcttggcttcggttcttcagcagattacgacggatttccttattgc

SEQ ID NO: 578953 - DNA, 75 bp, synthetic construct
  source 1..75: mol_type = other DNA
aaagccagtgaaactgcggcgaaaagcagtcaggatgcagcggcccaaagcgagagtgccgcagccagttctgca

SEQ ID NO: 578954 - DNA, 75 bp, synthetic construct
  source 1..75: mol_type = other DNA
ttccttttacggttctttgtgaggtacataagaactggtataaaacgccaaatgcagcaccgcgtgtttttcaaa

SEQ ID NO: 578955 - DNA, 75 bp, synthetic construct
  source 1..75: mol_type = other DNA
aagtcagatcagtctacatgcgcagtaagtaacgggcgtatatccagcgaaacaaaaaccacatggtcctgtatt

SEQ ID NO: 578956 - DNA, 75 bp, synthetic construct
  source 1..75: mol_type = other DNA
tcgatgtaaccactccccagattgaggctggtacaggcgcatcatcttttattgttacgggggctgcaccggtaa

SEQ ID NO: 578957 - DNA, 75 bp, synthetic construct
  source 1..75: mol_type = other DNA
cgctgatgaaaaatatgtataccatgccttttacgttcatggtggaagtccataaaaactggtttatttctcata

SEQ ID NO: 578958 - DNA, 75 bp, synthetic construct
  source 1..75: mol_type = other DNA
tggggaatggttggtacgcagctgcaaattgcagccgacagagctgtggggtcttttgcaacaggtgactggata

SEQ ID NO: 578959 - DNA, 75 bp, synthetic construct
  source 1..75: mol_type = other DNA
tcaacagatgaatttgagtttaaatatggacgtttcacggtaggaagcgatatagcaggaacgacaacagggcga

SEQ ID NO: 578960 - DNA, 75 bp, synthetic construct
  source 1..75: mol_type = other DNA
atcggggggcaaacgacgacaggattacgacaccttaatggtcatataaaaaacctccgtttctggaacagagca

SEQ ID NO: 578961 - DNA, 75 bp, synthetic construct
  source 1..75: mol_type = other DNA
ctggtacgctgaatgattttctcggtgccatgacggaagatgatgtcatgccggaggcattgcgtcgttttgagg

SEQ ID NO: 578962 - DNA, 75 bp, synthetic construct
  source 1..75: mol_type = other DNA
ttacaacatcatgtcgtgtaaaaagcgatagtgctaatatacaatgtcgtataagatttgaaagatatgacgggt

SEQ ID NO: 578963 - DNA, 75 bp, synthetic construct
  source 1..75: mol_type = other DNA
aaactgcggcgaaaaacagccaggctgcagcagctgaaagcgagagcgcagcagccggttctgcgacttcagcag

SEQ ID NO: 578964 - DNA, 75 bp, synthetic construct
  source 1..75: mol_type = other DNA
aagcaagtaaagaaacttacataacctctgcaatacaatacgcaccaaaaaaaggtggtgtcgttgaatctggtg

SEQ ID NO: 578965 - DNA, 75 bp, synthetic construct
  source 1..75: mol_type = other DNA
caaatgcagcgccacgtgtttttgataccggcggtcatcaaaccggagcggctattattcttggcttcggatctt

SEQ ID NO: 578966 - DNA, 75 bp, synthetic construct
  source 1..75: mol_type = other DNA
gtccggaggcactgcgccgttttgagctgatggtgaatgaagtggcacgtcatgccggagcgtcatcacagagtg

SEQ ID NO: 578967 - DNA, 75 bp, synthetic construct
  source 1..75: mol_type = other DNA
taagggatctcgttatgggattcagggttaaggctgacggcatgacatgctcatttgcaaataagcatataagcg

SEQ ID NO: 578968 - DNA, 75 bp, synthetic construct
  source 1..75: mol_type = other DNA
ctggctacccttgaatgattctctggaagcgataacagggtatgccccgggctataaaacaataaccatcggcag

SEQ ID NO: 578969 - DNA, 75 bp, synthetic construct
  source 1..75: mol_type = other DNA
cagcgaaactaaaaccaaatgggaatatatccggagtacagcaaccattcgcattggtggacaaactacagcagg

SEQ ID NO: 578970 - DNA, 75 bp, synthetic construct
  source 1..75: mol_type = other DNA
cagcggcatcatcgaagaacgcggcgaaaacctcagaaacgcatgcagctaacagcgcacaggcggcagcggcct

SEQ ID NO: 578971 - DNA, 75 bp, synthetic construct
  source 1..75: mol_type = other DNA
gatggcagcgcttcatctaatcttggatatgccattgttaatacgcggtctttattggttgaaatcaccggtgta

SEQ ID NO: 578972 - DNA, 75 bp, synthetic construct
  source 1..75: mol_type = other DNA
ccaggtacgctgaatgattttctcggtgccatgacggaggatgatgcccgtccggaggcactgcgccgttttgag

SEQ ID NO: 578973 - DNA, 75 bp, synthetic construct
  source 1..75: mol_type = other DNA
ccattatcgggctgtattcgagtaccggaggggttgatacttcaggggacgaaaagcatgtaactatatcctgtc

SEQ ID NO: 578974 - DNA, 75 bp, synthetic construct
  source 1..75: mol_type = other DNA
gaatatcgctgcggtttcaggaggaagaggtgtcgatgttactggaactgaaaagtatgttacaacatcatgtcg

SEQ ID NO: 578975 - DNA, 75 bp, synthetic construct
  source 1..75: mol_type = other DNA
gcgcatcaggtgcaacatacattaataaatcaggagtattaaccgttgctgaagttgacgaaccgcgatttgaac

SEQ ID NO: 578976 - DNA, 75 bp, synthetic construct
  source 1..75: mol_type = other DNA
cgatgtgtggataccgtttaacgattcactggatatgcttgctggcttttcgcctggttataagcaaataactgt

SEQ ID NO: 578977 - DNA, 75 bp, synthetic construct
  source 1..75: mol_type = other DNA
aactcggcgcaagcatcggcagcaagccagacagcagctaaagcaagtgaagacgcagccagagagtatgcaagc

SEQ ID NO: 578978 - DNA, 75 bp, synthetic construct
  source 1..75: mol_type = other DNA
gtttgtttactggtcgaacggatgttcgaaaattcattggtggttttaatatttattctgatggtactaaacgag

SEQ ID NO: 578979 - DNA, 75 bp, synthetic construct
  source 1..75: mol_type = other DNA
caggctgcggagccgtataaacaagtattgcagccacttcctgatgtgtggataccatttaacgattcgctggat

SEQ ID NO: 578980 - DNA, 75 bp, synthetic construct
  source 1..75: mol_type = other DNA
cgcaaaccagacagcagagccgtacagatatgttttacagccgctgccggatgtgtggataccctttaatgattc

SEQ ID NO: 578981 - DNA, 75 bp, synthetic construct
  source 1..75: mol_type = other DNA
tctgcatcagccaacagtcaaaaagctgcaaaaaccagtgaaaccaacgcaaaggcgagcgagactgcggcggct

SEQ ID NO: 578982 - DNA, 75 bp, synthetic construct
  source 1..75: mol_type = other DNA
aagtccagccagctgggggaagtcatcaaacatggatgtgcccgaaaccgggacagatagttttggttttactta

SEQ ID NO: 578983 - DNA, 75 bp, synthetic construct
  source 1..75: mol_type = other DNA
ccgtcaaacgccttaacggttgaaactgacctcgccacaggagagcttgcgtgggagtttaatctcgggcgctgc

SEQ ID NO: 578984 - DNA, 75 bp, synthetic construct
  source 1..75: mol_type = other DNA
cgcttatgcagtcgccactgttacgctacaaatagtattattgttctctttattcttttctgcgcaatgtttttt

SEQ ID NO: 578985 - DNA, 75 bp, synthetic construct
  source 1..75: mol_type = other DNA
tctgaaatatcagatgagaaaaacatgacagaaaaacttaaaaatatcgacacgtcttcattgtttcataactca

SEQ ID NO: 578986 - DNA, 75 bp, synthetic construct
  source 1..75: mol_type = other DNA
ggtctgccacctggccgccatgcgttatattgctgctcgccagggtagcgaagtcatccgtttacaggcggttta

SEQ ID NO: 578987 - DNA, 75 bp, synthetic construct
  source 1..75: mol_type = other DNA
tcaatcagtcaaatcgaagacctagtaaccaatgctggtgatagccataccctgcagcagccaattcctttagat

SEQ ID NO: 578988 - DNA, 75 bp, synthetic construct
  source 1..75: mol_type = other DNA
ttgttggcacaagaattcttgcagatctgaataacggcgttcgcctatatagagcttttccgttaccgattggtt

SEQ ID NO: 578989 - DNA, 75 bp, synthetic construct
  source 1..75: mol_type = other DNA
aacacctaccagctcgacagcgcctcgctgtatatgccaggtaacagtattacttccgcgttggcgaacgaattt

SEQ ID NO: 578990 - DNA, 75 bp, synthetic construct
  source 1..75: mol_type = other DNA
atcaccaccgactatttgcaacagtgccctgaatttacctggcgtgagccccgtcgggtattaaaaagccttaca

SEQ ID NO: 578991 - DNA, 75 bp, synthetic construct
  source 1..75: mol_type = other DNA
cgtagtgctgaacatttcgtgatgaatgccaccgaggaagaagcacggcgcggttttgctaaagtgatgtctgag

SEQ ID NO: 578992 - DNA, 75 bp, synthetic construct
  source 1..75: mol_type = other DNA
cccgggaggatgggataaaaccatttattcagtcagtacgccagggatactggggatattacctcccagatcagg

SEQ ID NO: 578993 - DNA, 75 bp, synthetic construct
  source 1..75: mol_type = other DNA
aaatttggtctggctttcctgtggaccaaagagtgggatgcaccgaacgatatctacggggcgctggtgccgatc

SEQ ID NO: 578994 - DNA, 75 bp, synthetic construct
  source 1..75: mol_type = other DNA
tacggtacgctggtgacttcgtttatcgcgctgctgatcgccgtcccggtgagtttcggtatcgccctgttcctg

SEQ ID NO: 578995 - DNA, 75 bp, synthetic construct
  source 1..75: mol_type = other DNA
tggttgatagtggtgcaaattctgcattgcggtaccttcacggtctgccacctggctgccatgcgctatattgct

SEQ ID NO: 578996 - DNA, 75 bp, synthetic construct
  source 1..75: mol_type = other DNA
tccctgacgcatccggtggatgacgcaattaccctgctgacacagggcggcagactgacctgtaagtttcgactg

SEQ ID NO: 578997 - DNA, 75 bp, synthetic construct
  source 1..75: mol_type = other DNA
tcgggtccgtctgcagatacgtccgttcgcacaatctccctgctgccggcagccggagaggctgctgcgcagggc

SEQ ID NO: 578998 - DNA, 75 bp, synthetic construct
  source 1..75: mol_type = other DNA
cctgagacagatactttcttttcaccactaaaaaccatcaaggatttcgcgctgtataactataatgaattcgat

SEQ ID NO: 578999 - DNA, 75 bp, synthetic construct
  source 1..75: mol_type = other DNA
ccgcaactgacccacgcagtgtcggcacccaggtggacgatggtaccctggaagtgcgcgtgaacagcgcattgt

SEQ ID NO: 579000 - DNA, 75 bp, synthetic construct
  source 1..75: mol_type = other DNA
agcagaacccgcagcagtgcatcggctgcgcggcctgcgtcaatgcctgcccgtcaaacgccttaacggttgaaa

SEQ ID NO: 579001 - DNA, 75 bp, synthetic construct
  source 1..75: mol_type = other DNA
tcggcctgggaatttatctgtatacggatgctcccgttcctgatggtgtggcgatgacgggtaccggtaatccgt

SEQ ID NO: 579002 - DNA, 75 bp, synthetic construct
  source 1..75: mol_type = other DNA
gctgttttgttggcctcgaagcatatggtgacgtttcaagtgagcgcgcgattgtccgtacccgaaatatcagct

SEQ ID NO: 579003 - DNA, 75 bp, synthetic construct
  source 1..75: mol_type = other DNA
tactgaccagatgctgaaacaactcgggaaattagatccccaccagttttcacctggtgccatgtcagaggggaa

SEQ ID NO: 579004 - DNA, 75 bp, synthetic construct
  source 1..75: mol_type = other DNA
aacgtaagcaatatatctggctgggactcattctggcgggcggcgcggcagccgtcggaggcgggctgtatctgt

SEQ ID NO: 579005 - DNA, 75 bp, synthetic construct
  source 1..75: mol_type = other DNA
tgattacaagattatccctctgatggacctcatcgcttgggaacagctcaacaaccagaaaatcaaataccctgt

SEQ ID NO: 579006 - DNA, 75 bp, synthetic construct
  source 1..75: mol_type = other DNA
gccagcagtgacgatctggctgaacacctgaaagtgcttatcagtcagtggcaaaagcacctgaaagtgcctaaa

SEQ ID NO: 579007 - DNA, 75 bp, synthetic construct
  source 1..75: mol_type = other DNA
gacctcatcgcttgggaacagctcaacaaccagaaaatcaaataccctgtactgagagatcccctcataatttcc

SEQ ID NO: 579008 - DNA, 75 bp, synthetic construct
  source 1..75: mol_type = other DNA
ttcagtcaccatctgtcattgtcaccgtaaagttgagcgataggatgcctgatatcgactcgatatctgttgcgt

SEQ ID NO: 579009 - DNA, 75 bp, synthetic construct
  source 1..75: mol_type = other DNA
attcgaacgctggaaggctatcgacactagggataagcgtgaaaaattcacggcgctgattccggcaattatgga

SEQ ID NO: 579010 - DNA, 75 bp, synthetic construct
  source 1..75: mol_type = other DNA
ggaagttcaggtactgcgctctatgtatcagcaggcggtgagtcaggccaatattgtcggtttgtgtgttggcac

SEQ ID NO: 579011 - DNA, 75 bp, synthetic construct
  source 1..75: mol_type = other DNA
tcgagttggatcgctatcttaacgaatacggtgtacaaggatcggcattgggacgcccgtggttacctccaacag

SEQ ID NO: 579012 - DNA, 75 bp, synthetic construct
  source 1..75: mol_type = other DNA
gcgaggctctggatgcctgggtgtgccgaccaggaatgacacaggagcaggcgacgatattaatcacggaagcat

SEQ ID NO: 579013 - DNA, 75 bp, synthetic construct
  source 1..75: mol_type = other DNA
gttaaataaagaatatggcgatgtggtggaatccggactactttttgcagatcctgccgttgtagatcgtgaaac

SEQ ID NO: 579014 - DNA, 75 bp, synthetic construct
  source 1..75: mol_type = other DNA
tcaagcgaatatttgccggtattccatcaacgactgatggagatagttaacgaaagtattgccagagataatcaa

SEQ ID NO: 579015 - DNA, 75 bp, synthetic construct
  source 1..75: mol_type = other DNA
gcttaataacgccaatcaggctatagatggtttaaaagaaactcttgccggtggtgatccttggttatggatgga

SEQ ID NO: 579016 - DNA, 75 bp, synthetic construct
  source 1..75: mol_type = other DNA
gcatggaaaggcttacgacgcgagaaagaaggcctagctgagtctacaggcgtttctggaaaagtaggtaaccta

SEQ ID NO: 579017 - DNA, 75 bp, synthetic construct
  source 1..75: mol_type = other DNA
aagcggggatgacattcctgaatggtgttctatctgtttcactatcaaacattgatatcgtgaatttgatatcag

SEQ ID NO: 579018 - DNA, 75 bp, synthetic construct
  source 1..75: mol_type = other DNA
gcggccatgattttgcctgttatcagcgtacaacccagctggcacgtcagcgcgggctgaaggtgtgttcccact

SEQ ID NO: 579019 - DNA, 75 bp, synthetic construct
  source 1..75: mol_type = other DNA
gcacctgacagcctgaatcagaccgtacagtttatggagcgtccggtaaaggattttcagtatgcgcccgggcgg

SEQ ID NO: 579020 - DNA, 75 bp, synthetic construct
  source 1..75: mol_type = other DNA
ggtaaaaatgcagggattggctcatggaaagggcttcgtcgtcaggatggcggattttctcagtctcctggaata

SEQ ID NO: 579021 - DNA, 75 bp, synthetic construct
  source 1..75: mol_type = other DNA
cagaccaggaatgacacaggagcaggcgacgatattaatcaccgaagcattctgggatctgaaagagcgcccgaa

SEQ ID NO: 579022 - DNA, 75 bp, synthetic construct
  source 1..75: mol_type = other DNA
agtggttttttgagaatctggatgcatatgcatgttctgcacaaacttctaacatgttgtatggtgctagcttgg

SEQ ID NO: 579023 - DNA, 75 bp, synthetic construct
  source 1..75: mol_type = other DNA
acagctgaggatttttggcgtaatacgggggaggagcaaatctttaaaattgtttttgaatcgattccgggcctt

SEQ ID NO: 579024 - DNA, 75 bp, synthetic construct
  source 1..75: mol_type = other DNA
gtcacttttgaaaccgctaccctgccgcgcggcctgacgaccgttatttgcgaccctcatgaaatcgtcaacgtg

SEQ ID NO: 579025 - DNA, 75 bp, synthetic construct
  source 1..75: mol_type = other DNA
tttggcgaactcttggataaggttaacaatgtcctttcaatcagttcagcaaggtccaaagcgttaacagcttcc

SEQ ID NO: 579026 - DNA, 75 bp, synthetic construct
  source 1..75: mol_type = other DNA
caaaactcaggattcaactacgacacagaaaggaattgttcaacttacatcatcaagggtatccgaatctgaaac

SEQ ID NO: 579027 - DNA, 75 bp, synthetic construct
  source 1..75: mol_type = other DNA
ctcagacaacaaatcttgcagggcaaagagcaactatcgcattcatggttcctgccggtgcgacctatattgtgc

SEQ ID NO: 579028 - DNA, 75 bp, synthetic construct
  source 1..75: mol_type = other DNA
ggtggagtttaccggcaaggtgcagcgcatggcgcgggtgcatcagtacgggctcaaagacagaccaaaccgcaa

SEQ ID NO: 579029 - DNA, 75 bp, synthetic construct
  source 1..75: mol_type = other DNA
atgaatgagtttaagcgttttgaagaccggctggccggactgattgaatcgctgtcaccgtcagggcgtcggcga

SEQ ID NO: 579030 - DNA, 75 bp, synthetic construct
  source 1..75: mol_type = other DNA
ggctatccggattagtgatttcaggttgtatcgtgaaattagtgacggaaagagcattacgtacatgatcgctgg

SEQ ID NO: 579031 - DNA, 75 bp, synthetic construct
  source 1..75: mol_type = other DNA
acaccctacgcaccacgccagcagcagagcgccagaaaaaagaccggtcgcgttaagcgaaaaatgtttgcgaaa

SEQ ID NO: 579032 - DNA, 75 bp, synthetic construct
  source 1..75: mol_type = other DNA
cgctcaggacgtgcaatacccggaacgccagttactcggatttaaccaagacgataaacagctcatagatatgtt

SEQ ID NO: 579033 - DNA, 75 bp, synthetic construct
  source 1..75: mol_type = other DNA
atgaatgagtttaagcgttttgaagaccggctgaccgggctgattgaatcgctgtcaccgtcagggcgtcggcga

SEQ ID NO: 579034 - DNA, 75 bp, synthetic construct
  source 1..75: mol_type = other DNA
gtgcccttcatgacagacggtaacggcgtcaataccgccactaacgcgccggcagaagatccggatattccggca

SEQ ID NO: 579035 - DNA, 75 bp, synthetic construct
  source 1..75: mol_type = other DNA
tacaccgtaaaccagcgtctggtgcgtggtctggattactacaaccgtaccgttttcgagtgggtgactaacagt

SEQ ID NO: 579036 - DNA, 75 bp, synthetic construct
  source 1..75: mol_type = other DNA
ctgtttaagcgcgctatcggtgaagttactgatgttgttgaaaaggagatgtacaccttcaacgatcgtgagcgt

SEQ ID NO: 579037 - DNA, 75 bp, synthetic construct
  source 1..75: mol_type = other DNA
aacagcatcccaccattcgcccgctgatcagtggcgggaaattgctcgagtactccgcacatatggtgccggaag

SEQ ID NO: 579038 - DNA, 75 bp, synthetic construct
  source 1..75: mol_type = other DNA
ggcagactgacctgtaagttccgcctgtcaggcgcactgaccaacaatcagttcggtctgggaatttatctgtat

SEQ ID NO: 579039 - DNA, 75 bp, synthetic construct
  source 1..75: mol_type = other DNA
attttactggttccatgctgtcgtggtggttcggcattcaccctgggcgcggaggggacattcagcgagtccaca

SEQ ID NO: 579040 - DNA, 75 bp, synthetic construct
  source 1..75: mol_type = other DNA
tggtgcggagttcatccagccagttgtgagtgaggggaacatctcatcaccagaggagccaggcaactgtccgac

SEQ ID NO: 579041 - DNA, 75 bp, synthetic construct
  source 1..75: mol_type = other DNA
atccgaaggcagacctgagcaaagggcagtacggctgtgtcggccagggcttacatattgccaaacgtctgctgc

SEQ ID NO: 579042 - DNA, 75 bp, synthetic construct
  source 1..75: mol_type = other DNA
catacgcgtggaaacaagaacacggtacgcaatatgaagtggtatatggtgcatataaaggtaaagaatcccagc

SEQ ID NO: 579043 - DNA, 75 bp, synthetic construct
  source 1..75: mol_type = other DNA
tctccactggcggcggcgcattcctagaattcgtagaaggtaaagtactgcctgcagtagcgatgctcgaagagc

SEQ ID NO: 579044 - DNA, 75 bp, synthetic construct
  source 1..75: mol_type = other DNA
ccggttgttaactacctgaaagacaaactgtctaacccggttcgtctggttaaagattacctcgacggtgttgat

SEQ ID NO: 579045 - DNA, 75 bp, synthetic construct
  source 1..75: mol_type = other DNA
aagatgcatccgtacgcacaatctccctgctgccggcagccggagaggctgctgcgcagggctggagcattaagg

SEQ ID NO: 579046 - DNA, 75 bp, synthetic construct
  source 1..75: mol_type = other DNA
ggcggcaaactgcttgaatattccgcgcatatggtgccagaaggcggtctggcaatggtgccgcagctggttaac

SEQ ID NO: 579047 - DNA, 75 bp, synthetic construct
  source 1..75: mol_type = other DNA
aggtatcatcaaaccgcccgacacatttcagttcatgggcgcgcaggagcattattccggatcgtctggcaaccg

SEQ ID NO: 579048 - DNA, 75 bp, synthetic construct
  source 1..75: mol_type = other DNA
atttctggaagcagaagaacgaatccacgtaccagacggtgtatggcagctataaaaacaaaacggaaaagaata

SEQ ID NO: 579049 - DNA, 75 bp, synthetic construct
  source 1..75: mol_type = other DNA
tggcgatgacgggtaccggtaatccgttcctgatgtcgtacttcactcagaccactgacggcagagtgaatctga

SEQ ID NO: 579050 - DNA, 75 bp, synthetic construct
  source 1..75: mol_type = other DNA
gcggacctgtcaaaggggcagtacggaaccgtggggcaagggctgcatatcgccaaaaaattgctgccgtttata

SEQ ID NO: 579051 - DNA, 75 bp, synthetic construct
  source 1..75: mol_type = other DNA
gccgtggatttgtggtgacacgacgtattactggaaaaatacatacgctacccagtacgacaccgtgtacggggc

SEQ ID NO: 579052 - DNA, 75 bp, synthetic construct
  source 1..75: mol_type = other DNA
tgcggcatcgagaacgaatggaaaccaggtatcatcaaaccgcccgacacatttcagttcatgggcgcgcaggaa

SEQ ID NO: 579053 - DNA, 75 bp, synthetic construct
  source 1..75: mol_type = other DNA
aattagcggtggcaaactgcttgaatattccgcgcatatggtgccggaaggtggtctggcgatggtgccgcaact

SEQ ID NO: 579054 - DNA, 75 bp, synthetic construct
  source 1..75: mol_type = other DNA
ccggtacgcaagatgatcatgggacatgcgaagaaaattgggctggtcaacttgcttaaagatggcattaaggga

SEQ ID NO: 579055 - DNA, 75 bp, synthetic construct
  source 1..75: mol_type = other DNA
gccagaacaaatcaacgatcgcttcaacgtcaccggcgatgaaggtgccgcctggctgtttgccggttccccttc

SEQ ID NO: 579056 - DNA, 75 bp, synthetic construct
  source 1..75: mol_type = other DNA
tgagctgtaagtttcgactgtcaggcgcactgaccaacaatcagttcggtctgggaatttatctgtataccgatg

SEQ ID NO: 579057 - DNA, 75 bp, synthetic construct
  source 1..75: mol_type = other DNA
cagcagtctggcgcaatacaaacgtgagctggaacaaagctgcgtcatgcgtgatatgcagcattttcgcaagat

SEQ ID NO: 579058 - DNA, 75 bp, synthetic construct
  source 1..75: mol_type = other DNA
atcccgggcgttcgcgtcgatgcgctggttcgtgaaggaaacaaggtcactggcgtgcaggccggggatgatatt

SEQ ID NO: 579059 - DNA, 75 bp, synthetic construct
  source 1..75: mol_type = other DNA
ggtgtatttaagatcaccaagcagagcaataaaacctggtccctgacgcatccggtggatgacgcaattaccctg

SEQ ID NO: 579060 - DNA, 75 bp, synthetic construct
  source 1..75: mol_type = other DNA
gggagaactggccgcagatgtgcgatttacgggagcgattgatgtcgttgcagcgcaggccacgcttaatgatgc

SEQ ID NO: 579061 - DNA, 75 bp, synthetic construct
  source 1..75: mol_type = other DNA
atggataaaattacccaggttttattttcagatattgggaaagtcaccactcaatatgttgaagtaccacaccag

SEQ ID NO: 579062 - DNA, 75 bp, synthetic construct
  source 1..75: mol_type = other DNA
gtgccgtggatttgtggtgacacgacgtattactggaaaaacacctacggcacgcagtacgacaccgtttacggg

SEQ ID NO: 579063 - DNA, 75 bp, synthetic construct
  source 1..75: mol_type = other DNA
ggtcgtctgcacctggcgaaattgctgcaagttggcggcaacatgctgctgctcgacgaaccgaccaacgacctg

SEQ ID NO: 579064 - DNA, 75 bp, synthetic construct
  source 1..75: mol_type = other DNA
ctgacctcactgtgtttaacgcgcagtgtcatggtggcagtgctgtagatgtgccgtggatttgtggtgacacga

SEQ ID NO: 579065 - DNA, 75 bp, synthetic construct
  source 1..75: mol_type = other DNA
attgcagaaaaacccgaaaaacgttttgctggcgatatgctggatgcagggggaattcgatatgacgaatgccag

SEQ ID NO: 579066 - DNA, 75 bp, synthetic construct
  source 1..75: mol_type = other DNA
accgaaaacggcgaagtgttcctgatggggctggtgactgagcgtgaggcgaaagcggcggcagatattgccagc

SEQ ID NO: 579067 - DNA, 75 bp, synthetic construct
  source 1..75: mol_type = other DNA
acgagattcgtcagggccaaccaattggtctgggcgaagcgtcgaatgatacgtggatcaccactaaagttcgct

SEQ ID NO: 579068 - DNA, 75 bp, synthetic construct
  source 1..75: mol_type = other DNA
tggtctgggcgaagcgtctaacgatacgtggatcaccaccaaagtgcgttcgcagctgttaaccagcgacctggt

SEQ ID NO: 579069 - DNA, 75 bp, synthetic construct
  source 1..75: mol_type = other DNA
tcagggcggtatcgccgtcagaccttgctgatgcacttgctcaaaaaattcgtgaaggatggcaaccatacggcg

SEQ ID NO: 579070 - DNA, 75 bp, synthetic construct
  source 1..75: mol_type = other DNA
cattattcccgatcgtatggcaactgctattctgaacgtagccggtcgcaccttagccttcattagtggtaaggc

SEQ ID NO: 579071 - DNA, 75 bp, synthetic construct
  source 1..75: mol_type = other DNA
tgccgacagccggagaggctgctgcgcagggctggaccatcaacgacggcagaattcagctggaagatggtgtat

SEQ ID NO: 579072 - DNA, 75 bp, synthetic construct
  source 1..75: mol_type = other DNA
aaggggttgatcagggtaaacgcgttggcgaactttccggtggtgagcgtggtcgtctgcatctggcgaagctgc

SEQ ID NO: 579073 - DNA, 75 bp, synthetic construct
  source 1..75: mol_type = other DNA
gcattaaggatggcggaattcagttgtcagatggtgtatttaagatcaccaagcagagcaataaaacctggtccc

SEQ ID NO: 579074 - DNA, 75 bp, synthetic construct
  source 1..75: mol_type = other DNA
aatagagtctcacttttcaccactaagaaccatcaaggattttgctctgtataactataatgaattcgatgagcg

SEQ ID NO: 579075 - DNA, 75 bp, synthetic construct
  source 1..75: mol_type = other DNA
agagcaataaaacctggtccctgatgcatccggtggatgacgcagtctccctgctgacacggggtggcagactga

SEQ ID NO: 579076 - DNA, 75 bp, synthetic construct
  source 1..75: mol_type = other DNA
ggatgctgcaagtgagggatattacggttcggcatcccgaacgaacaaaaactgggtatcatcaaatcgccagac

SEQ ID NO: 579077 - DNA, 75 bp, synthetic construct
  source 1..75: mol_type = other DNA
ggcacgcagtacgacaccatttacggggcgtacaaaaacagggagagcgacaacgttttctttgtgccattcctg

SEQ ID NO: 579078 - DNA, 75 bp, synthetic construct
  source 1..75: mol_type = other DNA
gaccatcgaactggccctgaaacaaggcgcaaaagtgatggtaacttcccccctgggtcgtcctaccgaaggcga

SEQ ID NO: 579079 - DNA, 75 bp, synthetic construct
  source 1..75: mol_type = other DNA
ggtcgtctgcatctggcgaagctgctgcaagttggcggcaacatgctgctgctcgacgaaccgaccaacgacctg

SEQ ID NO: 579080 - DNA, 75 bp, synthetic construct
  source 1..75: mol_type = other DNA
tgcaggttggcggcaacatgttgctgctcgacgaaccgaccaacgatctggatatcgaaaccctgcgcgcgctgg

SEQ ID NO: 579081 - DNA, 75 bp, synthetic construct
  source 1..75: mol_type = other DNA
agcggtttctgaagtggttaacgccctgaaacgtctggatgaagtgtatgcgctgtacgccgatccggatgccga

SEQ ID NO: 579082 - DNA, 75 bp, synthetic construct
  source 1..75: mol_type = other DNA
accgacggtaacggcaacaacacgcccaccaacttaccggcagaagacccggatattgctgatgcaggttattac

SEQ ID NO: 579083 - DNA, 75 bp, synthetic construct
  source 1..75: mol_type = other DNA
aaggggttgatcagggtaaacacgttggcgaactctccggtggtgagcgcggtcgtctgcacctggcgaaattgc

SEQ ID NO: 579084 - DNA, 75 bp, synthetic construct
  source 1..75: mol_type = other DNA
gcgggctggatcctcgaacttgaccgcggtgaaggtattccgtgggaaggtaactactcctcctggctggagcag

SEQ ID NO: 579085 - DNA, 75 bp, synthetic construct
  source 1..75: mol_type = other DNA
gtaccagaaaaattgcggagaaaacacgggagcgcctgaaaaaattaatctggctggcggcacaggatgtgaaga

SEQ ID NO: 579086 - DNA, 75 bp, synthetic construct
  source 1..75: mol_type = other DNA
agaattaccggatgatgccagggaaagcattaccgctcttttcaccccaaaaagaggtgactggtgcgacatctg

SEQ ID NO: 579087 - DNA, 75 bp, synthetic construct
  source 1..75: mol_type = other DNA
ggacagccgcgccgtgcatgatttctttgccagcgaacgtattgaccaggtctatctggcggcggcgaaagtggg

SEQ ID NO: 579088 - DNA, 75 bp, synthetic construct
  source 1..75: mol_type = other DNA
acggtgaaatgccatcagcattattacatcaccacattaccgggcaggcagtggccaaaaattgaagcatttatt

SEQ ID NO: 579089 - DNA, 75 bp, synthetic construct
  source 1..75: mol_type = other DNA
cagttgggcacaacattatgcggttaatttgccgacatcttcgggaattggctttgatcgttcagacttagccgt

SEQ ID NO: 579090 - DNA, 75 bp, synthetic construct
  source 1..75: mol_type = other DNA
gagcaaaactgcctgatgctgcatgaactctggctgcagagcggtactggccagcgtcgctgggaaggattaccg

SEQ ID NO: 579091 - DNA, 75 bp, synthetic construct
  source 1..75: mol_type = other DNA
ggtatgaggtgaatatcagcgtcagggagacaacttcattcaggttgatttcgacacgccgtggtgtcagccgga

SEQ ID NO: 579092 - DNA, 75 bp, synthetic construct
  source 1..75: mol_type = other DNA
tttaacggtaatatcgttaacgcgtccttgcttattgccgcacagttagagaaggcagatattcgtaccgcagaa

SEQ ID NO: 579093 - DNA, 75 bp, synthetic construct
  source 1..75: mol_type = other DNA
cgtgtgcttgtcagaatcagtgaccctaaggactgcaacgatgactggctttcttattgcggagctgaaaggtca

SEQ ID NO: 579094 - DNA, 75 bp, synthetic construct
  source 1..75: mol_type = other DNA
gtatggggcagcggtacgccgatgcgcgaatttctgcatgtcgatgatatggcggcggcaagcattcatgtcatg

SEQ ID NO: 579095 - DNA, 75 bp, synthetic construct
  source 1..75: mol_type = other DNA
gccggacttctgcagaccactgaagatgtgcggtttgaaccatgccccggactgacggctgccggacgtggtgtt

SEQ ID NO: 579096 - DNA, 75 bp, synthetic construct
  source 1..75: mol_type = other DNA
tgcatttttctggtgaaccggcacagattgctgagattaaacgactggccagcggtgcagtcacaccgctttatc

SEQ ID NO: 579097 - DNA, 75 bp, synthetic construct
  source 1..75: mol_type = other DNA
tgcatttttctggtgaaccggcacagattgctgagattaaacgactggccagtggtgccgtcacaccgttttatc

SEQ ID NO: 579098 - DNA, 75 bp, synthetic construct
  source 1..75: mol_type = other DNA
agccttatgccattgccaaaatcgccgggatcaaactgtgcgaatcttacaaccgtcagtacggacgcgattacc

SEQ ID NO: 579099 - DNA, 75 bp, synthetic construct
  source 1..75: mol_type = other DNA
ggctgacacacctgcagaatagtgtgctactggatgaacaaaactgcctgatgctgcatgaactctggctgcaga

SEQ ID NO: 579100 - DNA, 75 bp, synthetic construct
  source 1..75: mol_type = other DNA
gcgtggagagctcgttgatgtgctgtggggggaactggaatggtcttccccgacagatgacgatgagctgccgga

SEQ ID NO: 579101 - DNA, 75 bp, synthetic construct
  source 1..75: mol_type = other DNA
atgtatcggtgtggtggaaccgtctgtgtgacaacgtactgccggaaaaaaccatgccgtttgacctgctgacgg

SEQ ID NO: 579102 - DNA, 75 bp, synthetic construct
  source 1..75: mol_type = other DNA
gacggaaaatatcgcgttcacccgctggctgacacacctgcagaacggtgtactgctggatgagcaaaactgcct

SEQ ID NO: 579103 - DNA, 75 bp, synthetic construct
  source 1..75: mol_type = other DNA
atttctgtggctggcagcgatatgagcgtggcgagcttgttgatgtgctgtggggggagttggaatggtcacatc

SEQ ID NO: 579104 - DNA, 75 bp, synthetic construct
  source 1..75: mol_type = other DNA
tatgagcgcggagagcttgttgatgtgctgtggggggaactggaatggtcttccccgacagatgacgatgagctg

SEQ ID NO: 579105 - DNA, 75 bp, synthetic construct
  source 1..75: mol_type = other DNA
caccgcaaaaagaggtgactggtgtggcttctggagtaacgaggatgtatcggtgtggtggaaccgtctgtgtga

SEQ ID NO: 579106 - DNA, 75 bp, synthetic construct
  source 1..75: mol_type = other DNA
ggtttgaaccgtgccccggactgacggctgccggacgtggcgttgtatcgccggagaatatcgcgttcacccgct

SEQ ID NO: 579107 - DNA, 75 bp, synthetic construct
  source 1..75: mol_type = other DNA
gttgatttcgacacgccgtggtgtcagccggaaagcgacgttattgcagaattaagccgccgtttcagctgcacg

SEQ ID NO: 579108 - DNA, 75 bp, synthetic construct
  source 1..75: mol_type = other DNA
gaggatgtatcggtgtggtggaaccgtctgtgtgacaacgtactgccggaaaaaaccatgccgtttgacctgctg

SEQ ID NO: 579109 - DNA, 75 bp, synthetic construct
  source 1..75: mol_type = other DNA
accatcaccgcacttttcaccgcaaaaagaggtgactggtgtggcttctggagtaacgaggatgtatcggtgtgg

SEQ ID NO: 579110 - DNA, 75 bp, synthetic construct
  source 1..75: mol_type = other DNA
acgcacggcgattctgtgggcggggatttctggactggcagaaattcttggtggtgtgctggcgtggttaatcct

SEQ ID NO: 579111 - DNA, 75 bp, synthetic construct
  source 1..75: mol_type = other DNA
gtggccaaaaattgaggcatttattacttggttaagagaacaggtaaaaaccactgcgtattaccgtgaaggaga

SEQ ID NO: 579112 - DNA, 75 bp, synthetic construct
  source 1..75: mol_type = other DNA
gtggccaaaaattgaggcatttattacctggctaagagagcaggtatgtcagtcttgtcagtagcagtgataccg

SEQ ID NO: 579113 - DNA, 75 bp, synthetic construct
  source 1..75: mol_type = other DNA
gtggccaaaaattgaggcatttattacctggctaagagagcaggtatgtcagtcttgtcagtacctgcgataccg

SEQ ID NO: 579114 - DNA, 75 bp, synthetic construct
  source 1..75: mol_type = other DNA
gagctttacgacgagaacgatcatcgacgtgatggcggtttttcgctgctgtatgctgcgggcaatatcggttct

SEQ ID NO: 579115 - DNA, 75 bp, synthetic construct
  source 1..75: mol_type = other DNA
cagtttggcgattatattggtggtgtactgaatcctgctctggcctttatctctatcatgcttgtttgtttcaca

SEQ ID NO: 579116 - DNA, 75 bp, synthetic construct
  source 1..75: mol_type = other DNA
ggcgttgcggctggtactgccacaatcgaggttactacccaagatggtagccacaaagcgacagcgaccgtagaa

SEQ ID NO: 579117 - DNA, 75 bp, synthetic construct
  source 1..75: mol_type = other DNA
gaagagatgaacggcgttccggtggtgccgctgtacgatacgccgctttccggggttaaccgcctgctaaaacgt

SEQ ID NO: 579118 - DNA, 75 bp, synthetic construct
  source 1..75: mol_type = other DNA
cttcaacattctccattcacgtctcgaagagatgaacggcgttccggtggtgccgctgtatgacacgccactttc

SEQ ID NO: 579119 - DNA, 75 bp, synthetic construct
  source 1..75: mol_type = other DNA
gcgtttctaacgactgggcgggtaacctgcaacagctggtcgaggatgcgaaagcgggcaaaatccataacgtct

SEQ ID NO: 579120 - DNA, 75 bp, synthetic construct
  source 1..75: mol_type = other DNA
gtggccaaaaattgaggcatttattacctggctaagagagcaggtatgtcagtcttgtcagtatcagggataccg

SEQ ID NO: 579121 - DNA, 75 bp, synthetic construct
  source 1..75: mol_type = other DNA
gtatatcacgatccgaagtcgggcggcgtttctaatgactgggcaggcaacctgcaacaactggttgaggacgct

SEQ ID NO: 579122 - DNA, 75 bp, synthetic construct
  source 1..75: mol_type = other DNA
cgggatggttgcgtaatcatggctataacaaacgcatggtcgcggtggcgggggacttagccgccggacaaatgc

SEQ ID NO: 579123 - DNA, 75 bp, synthetic construct
  source 1..75: mol_type = other DNA
ggtgatgctcgctggggttgttctggcctggctggcgtcgccagaaagccgcggcaattcagcattgcgcgtctg

SEQ ID NO: 579124 - DNA, 75 bp, synthetic construct
  source 1..75: mol_type = other DNA
cttgccatacccgttcaggcggctgaacaggatgaactggccaccgccatgcgccagcttgaccaggtgcaggcg

SEQ ID NO: 579125 - DNA, 75 bp, synthetic construct
  source 1..75: mol_type = other DNA
atcccgttacttctttgattatccccgggcacgtgccgatctggagaccatccgtaatggcattgaccgctatct

SEQ ID NO: 579126 - DNA, 75 bp, synthetic construct
  source 1..75: mol_type = other DNA
ctgccgaaagaaaaagtgatcgataccaccgcagctggcgactctttcagtgccggttatctggcggtacgtttg

SEQ ID NO: 579127 - DNA, 75 bp, synthetic construct
  source 1..75: mol_type = other DNA
tgacgaattaatgccgttagcgaaagagatagaccccaataataacccgagctatggcgtgctatgcggaatgtc

SEQ ID NO: 579128 - DNA, 75 bp, synthetic construct
  source 1..75: mol_type = other DNA
ggcgcaaccgtcgtgtcccgggcatcactggcctggtattgctgatctttctggcatcagctgcacaggcatccg

SEQ ID NO: 579129 - DNA, 75 bp, synthetic construct
  source 1..75: mol_type = other DNA
caggatgggcagcacggacgcttctatttcgattacctacgggcaacgcaggatatcaaagcgattcgccagggg

SEQ ID NO: 579130 - DNA, 75 bp, synthetic construct
  source 1..75: mol_type = other DNA
ctgttactattgagaattctgtagcctatgaaaatggcctgccatacaataaagcggatatcctaaaagggagta

SEQ ID NO: 579131 - DNA, 75 bp, synthetic construct
  source 1..75: mol_type = other DNA
tgtagagcgcgaaaccgggttcatgaaatgtctgactcatgtacttccgatacaaaaacaagggttcactcatca

SEQ ID NO: 579132 - DNA, 75 bp, synthetic construct
  source 1..75: mol_type = other DNA
gcgaaggttctgaactgattgaagaggaagatattgatgctgaaatcgaaaccgatggtgttaacgttggtaata

SEQ ID NO: 579133 - DNA, 75 bp, synthetic construct
  source 1..75: mol_type = other DNA
cgaaacgcggacatctgactgcaagcaccgttattcagtatcgcggcgcgattatcccgcgtgaagcaatgccag

SEQ ID NO: 579134 - DNA, 75 bp, synthetic construct
  source 1..75: mol_type = other DNA
agtaaagaagaaacgcaacaggtgtaccagcagatgctggaatgcacagatatcgccttcctgacgctggacgac

SEQ ID NO: 579135 - DNA, 75 bp, synthetic construct
  source 1..75: mol_type = other DNA
ttggtgctgttgctgatctttatggcaacagcgccaatcatcacccagagcgtagaagtcgatctgccggacgcc

SEQ ID NO: 579136 - DNA, 75 bp, synthetic construct
  source 1..75: mol_type = other DNA
gtggatgtcacctttgaagatgaaaagggtggtaaacacaccgtgacgctggagaacggtgataacggctggaca

SEQ ID NO: 579137 - DNA, 75 bp, synthetic construct
  source 1..75: mol_type = other DNA
gtggatgtcacctttgaagatgaaaagggtgttaagcacaccgtgacgctggagaacggagataacggctggaca

SEQ ID NO: 579138 - DNA, 75 bp, synthetic construct
  source 1..75: mol_type = other DNA
gtggatgtcacctttgaagatgaaaagggtgttaatcacaccgtgacgctggagaacggtgataacggctggaca

SEQ ID NO: 579139 - DNA, 75 bp, synthetic construct
  source 1..75: mol_type = other DNA
ttgccagcaacgttgcagagaccattccgcccattaccccgatacccactgcgttctgcgcgccactgccggccc

SEQ ID NO: 579140 - DNA, 75 bp, synthetic construct
  source 1..75: mol_type = other DNA
aaaggaaatgggtttggttttggtttagttgatcctaaaaatccagatagtatcgcacgaacgctgtctgctcgt

SEQ ID NO: 579141 - DNA, 75 bp, synthetic construct
  source 1..75: mol_type = other DNA
gtggatgtcacctttgaagatgaaaagggtggtaatcacaccgtgacgctggagaacggagataacggctggaca

SEQ ID NO: 579142 - DNA, 75 bp, synthetic construct
  source 1..75: mol_type = other DNA
atacatttatccagggggatgctactgataataacgatacaacattatctggtttattggatcttggtagtggta

SEQ ID NO: 579143 - DNA, 75 bp, synthetic construct
  source 1..75: mol_type = other DNA
aggcgataaagttggtgcggatgcctctgtttccggcgaggtaatggaagttccggcaactattgaggacaatga

SEQ ID NO: 579144 - DNA, 75 bp, synthetic construct
  source 1..75: mol_type = other DNA
gtcaccggagatgaggttactgccggtaaggtatccatggatattcctgagggtgctgttgttgacggtcagaac

SEQ ID NO: 579145 - DNA, 75 bp, synthetic construct
  source 1..75: mol_type = other DNA
gtggatgtcacctttgaagatgaaaagggtgttaaacacaccgtgacgctggagaacggggataacggctggaca

SEQ ID NO: 579146 - DNA, 75 bp, synthetic construct
  source 1..75: mol_type = other DNA
gtggatgtcacctttgaagatgaaaagggtgataagcacaccgtgacgctggagaacggtgataacggctggaca

SEQ ID NO: 579147 - DNA, 75 bp, synthetic construct
  source 1..75: mol_type = other DNA
gtggatgtcacctttgaagatgaaaagggtgataatcacaccgtgacgctggagaacggggataacggctggaca

SEQ ID NO: 579148 - DNA, 75 bp, synthetic construct
  source 1..75: mol_type = other DNA
tgactatacctttcggtttattgacctgtttgctggcatcggtggtatacgaaaaggttttgaagatattggtgg

SEQ ID NO: 579149 - DNA, 75 bp, synthetic construct
  source 1..75: mol_type = other DNA
cgctggcggcgggcaactgtgtggtgctgaaacccgcacgacttaccccgctttcagtactgctgctaatggaaa

SEQ ID NO: 579150 - DNA, 75 bp, synthetic construct
  source 1..75: mol_type = other DNA
cctgggataacggcaagcccattcgtgaaaccagtgctgccgatgtgccgctggcaattgaccatttccgctatt

SEQ ID NO: 579151 - DNA, 75 bp, synthetic construct
  source 1..75: mol_type = other DNA
tctgtttaagattgccgatcgaatggaacaaaacctcgagctgttagcgacagctgaaacctgggataacggcaa

SEQ ID NO: 579152 - DNA, 75 bp, synthetic construct
  source 1..75: mol_type = other DNA
ggatgttcccgcaactattgaagataaggatgattccactggactggtttatacggtttctctgaatcatgtcac

SEQ ID NO: 579153 - DNA, 75 bp, synthetic construct
  source 1..75: mol_type = other DNA
cgctggcggcgggcaactgcgtggtgctaaaacccgcacgacttaccccgctttcagtgttgcttttgatggaga

SEQ ID NO: 579154 - DNA, 75 bp, synthetic construct
  source 1..75: mol_type = other DNA
caccttcaaaacgatggaagaagcgctggagctggcgaacgatacgcaatatggcctgggcgcgggtgtctggag

SEQ ID NO: 579155 - DNA, 75 bp, synthetic construct
  source 1..75: mol_type = other DNA
atgaagttgccgatgcgaaggacatggggaaaagtgatcctaaggtcatcgatggcaagcattttcttcctcagc

SEQ ID NO: 579156 - DNA, 75 bp, synthetic construct
  source 1..75: mol_type = other DNA
caattatgcaaaaaaacatgcagcaaaaggcaatgggtttggttttggtttagtggatcctaaaaatccagatag

SEQ ID NO: 579157 - DNA, 75 bp, synthetic construct
  source 1..75: mol_type = other DNA
tcgttaatcctgaaaataaagaaagcattgcccgtacgctttctgctcgctatcacaaagacgggtctgaaattc

SEQ ID NO: 579158 - DNA, 75 bp, synthetic construct
  source 1..75: mol_type = other DNA
atggggcgcggcattcaggccgggcgcgtgtggaccaactgttatcacgcttacccggcacatgcggcgtttggt

SEQ ID NO: 579159 - DNA, 75 bp, synthetic construct
  source 1..75: mol_type = other DNA
aggcggtattagtgaagtggatagcgaaactgtggcttatcacttccacgaaccgttaggcgtggtggggcagat

SEQ ID NO: 579160 - DNA, 75 bp, synthetic construct
  source 1..75: mol_type = other DNA
cagggattcacattaaagaatattcataaattctaccctgagaaaagaccaacatttggtcagcttctggaccct

SEQ ID NO: 579161 - DNA, 75 bp, synthetic construct
  source 1..75: mol_type = other DNA
atggttctgtttctgttgagctgccgggtgatgccaataaaggcgataccgtggatgtcacctttgaagatgaaa

SEQ ID NO: 579162 - DNA, 75 bp, synthetic construct
  source 1..75: mol_type = other DNA
gcttaaatcctgtaccagcgccggggagtccttcggcaagattgtgggtgaggccatctcactggtgctatggcc

SEQ ID NO: 579163 - DNA, 75 bp, synthetic construct
  source 1..75: mol_type = other DNA
gggagaaaacttcattcaggtggattttgatacaccgtggtgtcagccggagaatgccgttgttgcagaattaag

SEQ ID NO: 579164 - DNA, 75 bp, synthetic construct
  source 1..75: mol_type = other DNA
catcagtggaccacggcaccgcgcttgaactggcgggacgtggcaaagccgatgtcggcagttttattacggcgc

SEQ ID NO: 579165 - DNA, 75 bp, synthetic construct
  source 1..75: mol_type = other DNA
tcgtgccgaagatgagcaacagcctggacaagatcgccaccaataccacggagaagaaagacggccccggcgaaa

SEQ ID NO: 579166 - DNA, 75 bp, synthetic construct
  source 1..75: mol_type = other DNA
tgctcagtggcaactgaccaaaaccggcgcggttaacgcattcagttcagcaggggaaacgctccgcgaaccgct

SEQ ID NO: 579167 - DNA, 75 bp, synthetic construct
  source 1..75: mol_type = other DNA
gaagaggagaagaaggagcagaagcgaaaaaccgaacagagccagcaacagcaggcgcttgccaataacctgaaa

SEQ ID NO: 579168 - DNA, 75 bp, synthetic construct
  source 1..75: mol_type = other DNA
ggtttgaaccatgccccggactgacggctgccgggcgtggcgttgtatcgccggagaatatcgcgttcacccgct

SEQ ID NO: 579169 - DNA, 75 bp, synthetic construct
  source 1..75: mol_type = other DNA
aatttctgtggctggcagcgatatgagcgtggagagcttgttgatgtgctgtggggggaactggaatggtcttcc

SEQ ID NO: 579170 - DNA, 75 bp, synthetic construct
  source 1..75: mol_type = other DNA
tactgctggatgagcaaaactgcctgatgctgcatgaactctggctgcagagcggtactggccagcgtcgctggg

SEQ ID NO: 579171 - DNA, 75 bp, synthetic construct
  source 1..75: mol_type = other DNA
atgatgctggcaaccgaagaacttcgcgtggcgctggcaacgacgcatttaccgctgcgcgatatcgctgacgcc

SEQ ID NO: 579172 - DNA, 75 bp, synthetic construct
  source 1..75: mol_type = other DNA
tgctgcgtcgcttccacgaggcgacggcacagaatgcaccggacgtggtggtgtggggcagcggtacaccgatgc

SEQ ID NO: 579173 - DNA, 75 bp, synthetic construct
  source 1..75: mol_type = other DNA
tggggtaacgaggatgtatcggtgtggtggaaccgtctgtgtgacaacgtactgccggaaaaaaccatgccgttt

SEQ ID NO: 579174 - DNA, 75 bp, synthetic construct
  source 1..75: mol_type = other DNA
ttacagccgcgccaaagaaaccggcgaaaagatgatgagcgggggaatgaaaaccgccgcagtaggggcggcaac

SEQ ID NO: 579175 - DNA, 75 bp, synthetic construct
  source 1..75: mol_type = other DNA
tggcgggcagcaccgtgctcgggctggccgtggcgatgtttttcaaccgcgagttccgcctgcgcaaaaccgcgc

SEQ ID NO: 579176 - DNA, 75 bp, synthetic construct
  source 1..75: mol_type = other DNA
ctgcgcactatctggatgttctacatgtttgctgatgtttatctgctgaccaccaaggtcgatattctcggcgtc

SEQ ID NO: 579177 - DNA, 75 bp, synthetic construct
  source 1..75: mol_type = other DNA
caggcgccgctgtggttcgataacccgggcagtagttttgtgctggtggtgctgttcgccatctggcgctacttc

SEQ ID NO: 579178 - DNA, 75 bp, synthetic construct
  source 1..75: mol_type = other DNA
agttatacgctttacagcagtgtaagtggagcaaatgtgtatattgataacaatatcattgatgcgaatggtgta

SEQ ID NO: 579179 - DNA, 75 bp, synthetic construct
  source 1..75: mol_type = other DNA
cacctacattcagggagatgcggtgactgaaaataataccgaattgtctggtttattagacttgggcagcggtac

SEQ ID NO: 579180 - DNA, 75 bp, synthetic construct
  source 1..75: mol_type = other DNA
tattaacggcggggaaggcagtgataccctggttctgacaggtaccatttctgtcaatctagcggccggtaaaaa

SEQ ID NO: 579181 - DNA, 75 bp, synthetic construct
  source 1..75: mol_type = other DNA
aattatggtttactgaaggcgatctccatcttgctattcgtgcatcatgcagtattctaggactaatggcacccg

SEQ ID NO: 579182 - DNA, 75 bp, synthetic construct
  source 1..75: mol_type = other DNA
accatgccgtttgacctgctgacggttctgccgacccgcctggatgttgaagtgaatggctttaacggtggtgtt

SEQ ID NO: 579183 - DNA, 75 bp, synthetic construct
  source 1..75: mol_type = other DNA
gaaccgcttaagcaggcgcagcgccagctaccatcccttaccgattgggtgacgcagcaggccggatcgctgatc

SEQ ID NO: 579184 - DNA, 75 bp, synthetic construct
  source 1..75: mol_type = other DNA
tgtatgtctggaccccgccaggatacaccggcatgggcgagcctttgccagtgctctatttctatcacggttttg

SEQ ID NO: 579185 - DNA, 75 bp, synthetic construct
  source 1..75: mol_type = other DNA
attgctattaatattttgacgaatgataaggtattcaaggcagggttaagacgtaagatgcgaaaagcagccatg

SEQ ID NO: 579186 - DNA, 75 bp, synthetic construct
  source 1..75: mol_type = other DNA
gtttgcgatgtccctgatgaacttattgatttcacgtttgaatggaaagggctgaagaaattatgcgtggcagtc

SEQ ID NO: 579187 - DNA, 75 bp, synthetic construct
  source 1..75: mol_type = other DNA
cgaagcgggctggcgcacgctgttaggcagcaaagagcgtgacgaagaaaacgacggcacgccacttcctgtggt

SEQ ID NO: 579188 - DNA, 75 bp, synthetic construct
  source 1..75: mol_type = other DNA
cgagtctggcgcgcgctattgctgatgtcctgcccaaaccgcaccgtaaaggcgatggctttatcgaatgcggca

SEQ ID NO: 579189 - DNA, 75 bp, synthetic construct
  source 1..75: mol_type = other DNA
ccgcgcactgggaatcggtgctgacgcaaatcagcgaaaagcagtgtcgctatcaggactttatgcagccgctgg

SEQ ID NO: 579190 - DNA, 75 bp, synthetic construct
  source 1..75: mol_type = other DNA
atgaaaccgatttctttatttattcctcttctggagacgttattactttccggctgcgccggaacgaattctgat

SEQ ID NO: 579191 - DNA, 75 bp, synthetic construct
  source 1..75: mol_type = other DNA
cagccccgaccctccgtgactaaacaacttaatgtcatcaaacgctttctgcatgaagccagcgaaatcgttcac

SEQ ID NO: 579192 - DNA, 75 bp, synthetic construct
  source 1..75: mol_type = other DNA
caaaaaagggcgctatatccactccaccgacgccggaaaagcgttattccattcgctgccagagatggcgacgcg

SEQ ID NO: 579193 - DNA, 75 bp, synthetic construct
  source 1..75: mol_type = other DNA
gcgccaaatacccgccagagaaaatcagttgatcgccagtatcaaaaatggctatgattcccgcgcacctcataa

SEQ ID NO: 579194 - DNA, 75 bp, synthetic construct
  source 1..75: mol_type = other DNA
ttatcatctttggcgcgtcagaatcccaaatcatccacgtcaccgcctggacggaacgcgaagcgcgtaaccatt

SEQ ID NO: 579195 - DNA, 75 bp, synthetic construct
  source 1..75: mol_type = other DNA
cttaccacctccggcggttggtatatcccaacgtctaaggaggctgccactatggctactatccctacccttgta

SEQ ID NO: 579196 - DNA, 75 bp, synthetic construct
  source 1..75: mol_type = other DNA
aatcagaatccgcaccgctgccgttttcgctttcggcgttgcagattgaagcggcaaaacgctttggtctgagtg

SEQ ID NO: 579197 - DNA, 75 bp, synthetic construct
  source 1..75: mol_type = other DNA
aatcagaatcagcaccgctgccgttttcgctttcgacattacagattgaagcggcaaagcgttttgggctgagtg

SEQ ID NO: 579198 - DNA, 75 bp, synthetic construct
  source 1..75: mol_type = other DNA
tggacagaacgcgaagcgcgtaaccattgcccgtcaggttgtgtcgctgtatttgccgcccgtattcgtcagggg

SEQ ID NO: 579199 - DNA, 75 bp, synthetic construct
  source 1..75: mol_type = other DNA
ggctgaagggaacttccggacaatgccggtgcagaccgtcaccgcgaccactccgtccggcagcagacctgcggt

SEQ ID NO: 579200 - DNA, 75 bp, synthetic construct
  source 1..75: mol_type = other DNA
acgctgacgccggaggccattgaatcgcttatattcccggagaaaaaagcgtctgtgctgataccggtgctgccc

SEQ ID NO: 579201 - DNA, 75 bp, synthetic construct
  source 1..75: mol_type = other DNA
ccaaaagagaacagaggaaacagataaaaagatatgaaaactcaacacggctaactaaacaaacgataagcgact

SEQ ID NO: 579202 - DNA, 75 bp, synthetic construct
  source 1..75: mol_type = other DNA
gctataaggcgttgttctggttatcgttatttcacctgttggtgatcacctccagtaactatctggtacagcttc

SEQ ID NO: 579203 - DNA, 75 bp, synthetic construct
  source 1..75: mol_type = other DNA
cggtggcgcacaacgaacagtatcgccagttgattgagggttacatgctgcgccacaaagtgaagccaggcatta

SEQ ID NO: 579204 - DNA, 75 bp, synthetic construct
  source 1..75: mol_type = other DNA
agctaccacgacgcgaaaccgggtggcgtaccgtcggactgggcgggcaactatgaccagcttattgacgatgcg

SEQ ID NO: 579205 - DNA, 75 bp, synthetic construct
  source 1..75: mol_type = other DNA
aagtattcggattgggtaatgtttaatcaaactaatgctgcgacggggcagattgctccgcctctctctcttgat

SEQ ID NO: 579206 - DNA, 75 bp, synthetic construct
  source 1..75: mol_type = other DNA
gcatcatgcacgaagaattccgtaacgcgctggttaacgccgcctctgccgacgctatcgccagcctgctgcaac

SEQ ID NO: 579207 - DNA, 75 bp, synthetic construct
  source 1..75: mol_type = other DNA
cgtccgctaagaacgggtgagcagacggcagcattatggatagcgccttatattgataatcaggatgtttatcat

SEQ ID NO: 579208 - DNA, 75 bp, synthetic construct
  source 1..75: mol_type = other DNA
gggaagtgaaaacgattgttccggtcagttcagttgcgccggtaacacctccccgcccgctaagaacgggtgagc

SEQ ID NO: 579209 - DNA, 75 bp, synthetic construct
  source 1..75: mol_type = other DNA
atgaacgttttctcgcaaacgcaacgctataaggcgttgttctggttatcgttatttcatctgctggtgatcacc

SEQ ID NO: 579210 - DNA, 75 bp, synthetic construct
  source 1..75: mol_type = other DNA
accgacagcgtccacactgttcggtaacgtcagcgacacgctggcctttttcttcattgccttctggcgtagccc

SEQ ID NO: 579211 - DNA, 75 bp, synthetic construct
  source 1..75: mol_type = other DNA
acgctaaggttactcgtcactacaacagcctgaatccggccttcttgcgggcgctcgattacgccgtgcaagcgg

SEQ ID NO: 579212 - DNA, 75 bp, synthetic construct
  source 1..75: mol_type = other DNA
cgtctttttttgtatcggcgcacacgcacacctctacaatggtgggctgtacggggccgacttcggtcgggctgg

SEQ ID NO: 579213 - DNA, 75 bp, synthetic construct
  source 1..75: mol_type = other DNA
aacatgattaaccggggcgtcgatgttcttgtcattattccgtataacggtcaggtattaagtaacgttgtaaaa

SEQ ID NO: 579214 - DNA, 75 bp, synthetic construct
  source 1..75: mol_type = other DNA
aatattgtctggaatgcgacggcgacctttattgccgtgattattatcagccttctgctcgatgaatcgggcttt

SEQ ID NO: 579215 - DNA, 75 bp, synthetic construct
  source 1..75: mol_type = other DNA
catccatcatctttccaccatcgcgtcatctgaacgggaagctcgtcgccagttcgccagccggtttgtcctggt

SEQ ID NO: 579216 - DNA, 75 bp, synthetic construct
  source 1..75: mol_type = other DNA
gggagtacggcgactggcgtcgtcaaagaggcaatgatttatgccaacgtgattggctgcgatttaggcccgaaa

SEQ ID NO: 579217 - DNA, 75 bp, synthetic construct
  source 1..75: mol_type = other DNA
acctggtgaatatcgtctcggcggacttcttcgatctgggctttacgcagtacgcctccgttatgatccccgtgg

SEQ ID NO: 579218 - DNA, 75 bp, synthetic construct
  source 1..75: mol_type = other DNA
atgaaaataaagaacattttactcaccctttgcacctcacttctgcttactaacgtcgcggcgcacgccaaagaa

SEQ ID NO: 579219 - DNA, 75 bp, synthetic construct
  source 1..75: mol_type = other DNA
ccgcgaaagacgcggtgatccctggtttacagaaagattatgaagaagatttcaaaacggcgctgttacgtgcac

SEQ ID NO: 579220 - DNA, 75 bp, synthetic construct
  source 1..75: mol_type = other DNA
atctatcacctgaaaatgcgtgattccgcgaaagatgcggtgatcccgggtttgcagaaagattatgaagaagat

SEQ ID NO: 579221 - DNA, 75 bp, synthetic construct
  source 1..75: mol_type = other DNA
ttattgaactcctccagccagcctggcaaaaagagccagaccttaacctgttgcaatttttgcagaaactggcga

SEQ ID NO: 579222 - DNA, 75 bp, synthetic construct
  source 1..75: mol_type = other DNA
attgtttcccgtcattcatttaacagagacaaatttaaaaaagaacatttaaacatatcaagacaccttttcaat

SEQ ID NO: 579223 - DNA, 75 bp, synthetic construct
  source 1..75: mol_type = other DNA
acgacgatcgcaaaccgtggttgcaggcgctgaacgacgccgcgtttgctatgcagcgcactaataaagtgtcac

SEQ ID NO: 579224 - DNA, 75 bp, synthetic construct
  source 1..75: mol_type = other DNA
cagagcgcgccttcgctgtcctattcaatgtattggggatcgaagcccccgaccgcgaacgccttgccttctatc

SEQ ID NO: 579225 - DNA, 75 bp, synthetic construct
  source 1..75: mol_type = other DNA
ggttattacttccgcacgggcattatcatgtctctgcccgtgctgtttgtcactctggccgcgctggcgttgcgg

SEQ ID NO: 579226 - DNA, 75 bp, synthetic construct
  source 1..75: mol_type = other DNA
tgatctctggcttccaactaaattagaaacgcagatgtatgaattgcggcatacacaatatgatgcaattttttg

SEQ ID NO: 579227 - DNA, 75 bp, synthetic construct
  source 1..75: mol_type = other DNA
cgacccgcaaaacaaaccgcgagcgagctggcgtagccacggcaatttgctgtttaccaactggctcaactatta

SEQ ID NO: 579228 - DNA, 75 bp, synthetic construct
  source 1..75: mol_type = other DNA
attgcggctgttggcgctgtgatcctgtttgcggtggcgaaacgaggtcatgccattaacaccggtaaagtgctg

SEQ ID NO: 579229 - DNA, 75 bp, synthetic construct
  source 1..75: mol_type = other DNA
tcttctcgctcggcatgtatctggtggtttatggcctgcgcaatgccggactaacggaatatctttctggcgtac

SEQ ID NO: 579230 - DNA, 75 bp, synthetic construct
  source 1..75: mol_type = other DNA
tgctggtgggatttttcgtcctggaaccgctcggcattccggtaagcgccattgcggcagtgggcgcgctgatat

SEQ ID NO: 579231 - DNA, 75 bp, synthetic construct
  source 1..75: mol_type = other DNA
aagcgatggtttatgccaacgtgattggctgcgatttggggccgaaaattacaccgattggtagcctggcaacgc

SEQ ID NO: 579232 - DNA, 75 bp, synthetic construct
  source 1..75: mol_type = other DNA
tctggctggttgcccgcaaaggacacgtgattgacgccggcagggtgctgaaaggcgcgccctggcagatcgtta

SEQ ID NO: 579233 - DNA, 75 bp, synthetic construct
  source 1..75: mol_type = other DNA
tatacgtgatgtgaatacctttaaaaccggctggctggttctggtgttgcttctggtgggattcttcggactgga

SEQ ID NO: 579234 - DNA, 75 bp, synthetic construct
  source 1..75: mol_type = other DNA
gagcaaccttagcgtttatcatggccgcagggtttatcgctgacacggcaagcctgccactgattgtctcaaacc

SEQ ID NO: 579235 - DNA, 75 bp, synthetic construct
  source 1..75: mol_type = other DNA
cctgctgtttacgtatattgttctgctcggcgcggcagtggcggcactgtttgccaacgatggtgcggctcttat

SEQ ID NO: 579236 - DNA, 75 bp, synthetic construct
  source 1..75: mol_type = other DNA
tggttaacatcgtttctgcagacttctttggactgggcttcaccgagtatgcgtcggtaatggtgccggtggata

SEQ ID NO: 579237 - DNA, 75 bp, synthetic construct
  source 1..75: mol_type = other DNA
atttatatttacattggtttatttttatcgttatgcacctaaaattataatatcaggttttatatttataatact

SEQ ID NO: 579238 - DNA, 75 bp, synthetic construct
  source 1..75: mol_type = other DNA
atggaagactctctgcctctggttcaggcacatatggtggcggatcaggtagagcaggctattttacggcgtttt

SEQ ID NO: 579239 - DNA, 75 bp, synthetic construct
  source 1..75: mol_type = other DNA
gcggtacagtcattactggatcgcgcattgcctgatgaggaacggcaagaaattattgatatcgtgacttcctgg

SEQ ID NO: 579240 - DNA, 75 bp, synthetic construct
  source 1..75: mol_type = other DNA
tggcgcgtttctcggcgttctcgggcaaaaaccctcgaaccgcttactggcgttttcgctaggatttgcggcggg

SEQ ID NO: 579241 - DNA, 75 bp, synthetic construct
  source 1..75: mol_type = other DNA
atggtgaattactgtcttatatcattggcgctgacaacgcaaagttgaaaaaatttatgacaatggattcaaagc

SEQ ID NO: 579242 - DNA, 75 bp, synthetic construct
  source 1..75: mol_type = other DNA
acctggagctgggatttggcatcgcactggccgtcgcgttgcacaatattcctgaaggtctggcggttgcaggcc

SEQ ID NO: 579243 - DNA, 75 bp, synthetic construct
  source 1..75: mol_type = other DNA
atttctggattggcagaaattcttggtggtgtgctggcgtggttaatcctcggtagcatgatttccccggtggtc

SEQ ID NO: 579244 - DNA, 75 bp, synthetic construct
  source 1..75: mol_type = other DNA
cagcaaaagaagccggatttcacctggcggtgacaaccatgaaaggcaaagtaaaaccgggggataatccgttgt

SEQ ID NO: 579245 - DNA, 75 bp, synthetic construct
  source 1..75: mol_type = other DNA
taatgacaaagccgtgaaggcagcaaaagaagccggatttcacctggcggtgacgaccatgaaaggcaaagtaaa

SEQ ID NO: 579246 - DNA, 75 bp, synthetic construct
  source 1..75: mol_type = other DNA
tgttgatgctgtttacggtaagcgtcagtgctgcattacccgctcgttatatgcaaactatcgaagatgccgcca

SEQ ID NO: 579247 - DNA, 75 bp, synthetic construct
  source 1..75: mol_type = other DNA
cggtagcatgatttccccggtggtcatggcggcaatcatggcggcggttgcaggaatcatggtggcgctctccgt

SEQ ID NO: 579248 - DNA, 75 bp, synthetic construct
  source 1..75: mol_type = other DNA
agccacttcgtgcgctttggtgcatcgccagcgatagtcccgtcggcagtgattcatcagctgtcggtgtataaa

SEQ ID NO: 579249 - DNA, 75 bp, synthetic construct
  source 1..75: mol_type = other DNA
ccctggaaaaaatcgtgcgaggcaaacgaaccgcagtcagtgaaccactgttccccaattacctgtttgtggaat

SEQ ID NO: 579250 - DNA, 75 bp, synthetic construct
  source 1..75: mol_type = other DNA
gatcatgttgctcatctcattaatggaaatgcttcctgccgcactagccgctgaaggaatgtcgcctgtgttggg

SEQ ID NO: 579251 - DNA, 75 bp, synthetic construct
  source 1..75: mol_type = other DNA
tggcgctgacaatggcaacacatcagttattggatctggttcagctactgggccaacgttgaatcccgtagcatt

SEQ ID NO: 579252 - DNA, 75 bp, synthetic construct
  source 1..75: mol_type = other DNA
ggtcgtggcgcacgcctgtcctgaaaggcaacctgtacgagtattttttcaatgttgatggtgtacgcagcattg

SEQ ID NO: 579253 - DNA, 75 bp, synthetic construct
  source 1..75: mol_type = other DNA
gttgtagagcaactggaggagtcacgacaacgtctgtcacggttggtgcaaaaactggaggagatgcgtgagcgc

SEQ ID NO: 579254 - DNA, 75 bp, synthetic construct
  source 1..75: mol_type = other DNA
gctcatcaccgcttgaaattgctgccgcaaaagcctgtgcggaaattgaaaaaacgccggtcagtattcgtgaac

SEQ ID NO: 579255 - DNA, 75 bp, synthetic construct
  source 1..75: mol_type = other DNA
ccgttgaccgctgggatgaaaactggccagccgataccaagcggcaggtgattgctgcttctttctacatccatc

SEQ ID NO: 579256 - DNA, 75 bp, synthetic construct
  source 1..75: mol_type = other DNA
tttcctgaaactatcgctgtgggtggcaatgactacaccggcgcagcaatccatttaattgataccgtggagatc

SEQ ID NO: 579257 - DNA, 75 bp, synthetic construct
  source 1..75: mol_type = other DNA
actggccgtcgcgttgcacaatatccctgaaggtctggcagtggcaggcccggtttatgcggcaacggggtctaa

SEQ ID NO: 579258 - DNA, 75 bp, synthetic construct
  source 1..75: mol_type = other DNA
acctggagctgggatttggcatcgccctggccgtagcgttgcacaatattcctgaaggtctggcggttgcaggcc

SEQ ID NO: 579259 - DNA, 75 bp, synthetic construct
  source 1..75: mol_type = other DNA
gatcatgttgctcatctcattaatggaaatgcttcctgccgcattagccgccgaaggaatgtcgcctgtgttggg

SEQ ID NO: 579260 - DNA, 75 bp, synthetic construct
  source 1..75: mol_type = other DNA
tcgagcaactggaggagtcacgacaacgtctgtcacggctggtgcaaaaactggaggagatgcgcgagcgcgatt

SEQ ID NO: 579261 - DNA, 75 bp, synthetic construct
  source 1..75: mol_type = other DNA
acagggcaaaggttctacctttacgttgacgatccacgcaccgtcggtggctgaagaggtcgatgatgcgtttga

SEQ ID NO: 579262 - DNA, 75 bp, synthetic construct
  source 1..75: mol_type = other DNA
cttgataatcagccggttgatttcaccagcttccttgccgatctggaaaatctctccgcattgcaggcgcaacaa

SEQ ID NO: 579263 - DNA, 75 bp, synthetic construct
  source 1..75: mol_type = other DNA
cctgtgttgaaacaatatggtatgaaggcgacggcgtttattgttacctcgcgcatcaaacgtcacccgcagaaa

SEQ ID NO: 579264 - DNA, 75 bp, synthetic construct
  source 1..75: mol_type = other DNA
atgagaaagagattattggcgttgccaatttttctaatgtggtgcgaggatcttttcatgcctgctatctcggtt

SEQ ID NO: 579265 - DNA, 75 bp, synthetic construct
  source 1..75: mol_type = other DNA
gtcggtaacctcaccgcaggtggcaatggaaaaaccccggtcgttgtctggctggtggaacaactgcaaaaatgc

SEQ ID NO: 579266 - DNA, 75 bp, synthetic construct
  source 1..75: mol_type = other DNA
tggtatttgcccgttgatgcgcggcttacgggcgatgaaccagacgaactgctcgcgcaactttcttcgctggct

SEQ ID NO: 579267 - DNA, 75 bp, synthetic construct
  source 1..75: mol_type = other DNA
agcacggcatctggcgttatcaaagaagcgatggtttatgccaacgtgattggctgcgatttggggccgaaaatc

SEQ ID NO: 579268 - DNA, 75 bp, synthetic construct
  source 1..75: mol_type = other DNA
cacgctggggcaatggtcgtggtcgcctgctgtttacctggattgtcctgctcggtgccgccgttgcagctctgt

SEQ ID NO: 579269 - DNA, 75 bp, synthetic construct
  source 1..75: mol_type = other DNA
cgtgagctggattatctggccgaccgcaagatggttgatctggagaaaaaaccctccggagactggtttgccgac

SEQ ID NO: 579270 - DNA, 75 bp, synthetic construct
  source 1..75: mol_type = other DNA
cttcaacattctccattcccgtatcgaagaggtgaacggtgtaccggtagtgccgctgtacgacacgccgctgtc

SEQ ID NO: 579271 - DNA, 75 bp, synthetic construct
  source 1..75: mol_type = other DNA
gagctaaaacgaatgcatcgttaatctccatggtgcagcgtttttccgacatcaccatcatgttggggggattgt

SEQ ID NO: 579272 - DNA, 75 bp, synthetic construct
  source 1..75: mol_type = other DNA
cggtggcgcataacgaacagtatcgccagttgattgaaggctacatgttgcgccacaaagtgaagcctggcatta

SEQ ID NO: 579273 - DNA, 75 bp, synthetic construct
  source 1..75: mol_type = other DNA
tggtatttgcccgttgacgcacagttttcgggcgctgagccagagaaactgctcgcgcaactttcctcgctggct

SEQ ID NO: 579274 - DNA, 75 bp, synthetic construct
  source 1..75: mol_type = other DNA
gtaagtggcgcgatccgtctttgctataaactaaaactgaagcgcgcctggcgtgcccccgtaccggttgtcgtg

SEQ ID NO: 579275 - DNA, 75 bp, synthetic construct
  source 1..75: mol_type = other DNA
tacaccgccagcgaaacgttgctgctggacgtgtcccgtgccatctacccggacaccacgcaactggagctgcgc

SEQ ID NO: 579276 - DNA, 75 bp, synthetic construct
  source 1..75: mol_type = other DNA
tgcgccattattgcgaccgactggatctcgatcccaaccgtttgtttgagcttgaacaacgtatctcaaagcaga

SEQ ID NO: 579277 - DNA, 75 bp, synthetic construct
  source 1..75: mol_type = other DNA
ttgacgcagtagattttccacaagagcgcattttgaatgtttctccgcgccgcttgctgagtttccttgaatctc

SEQ ID NO: 579278 - DNA, 75 bp, synthetic construct
  source 1..75: mol_type = other DNA
aaatagactacctttcatttcgtctttcaggtattgaactgatcaccgctggttttgaggagactctggccgcaa

SEQ ID NO: 579279 - DNA, 75 bp, synthetic construct
  source 1..75: mol_type = other DNA
acaaagcgaccaatacaaaagcgatgatcgccactatcgccagcggcaatgttcatataataagttatcccggaa

SEQ ID NO: 579280 - DNA, 75 bp, synthetic construct
  source 1..75: mol_type = other DNA
cttgtatctttcttatccgtttggcggttttaatgacaaagcggttaaggcggcacgtgaagccggatttcatct

SEQ ID NO: 579281 - DNA, 75 bp, synthetic construct
  source 1..75: mol_type = other DNA
tcgacgcggtagattttccgccagagcgcattttgaatgtttctccgcgccgcttactgaacttccttgaatctc

SEQ ID NO: 579282 - DNA, 75 bp, synthetic construct
  source 1..75: mol_type = other DNA
ggccgcgagtggttgatggggtagggatcctgcgcggcatcgaagctaacattaaaaatgttgatggtgaaattg

SEQ ID NO: 579283 - DNA, 75 bp, synthetic construct
  source 1..75: mol_type = other DNA
ggaagcccgtctgttttctgccccggagccgggctggccgccgtggacgactggctggacaactttattcaggaa

SEQ ID NO: 579284 - DNA, 75 bp, synthetic construct
  source 1..75: mol_type = other DNA
cggttacaagagctggcgcgcctgcttggcggcagtgaagtcacacgcaacacgctggcaaacgcgaaagaactg

SEQ ID NO: 579285 - DNA, 75 bp, synthetic construct
  source 1..75: mol_type = other DNA
tggccgacggtgaagacgcaaacctgcaaagtcagctttacacggctaaacaactggtgagcgaattgattggca

SEQ ID NO: 579286 - DNA, 75 bp, synthetic construct
  source 1..75: mol_type = other DNA
ttctcacaccgcgtttaccatgggtgaatttgaagagtgtcttaaaatcctcgacgcggtagattttccgccaga

SEQ ID NO: 579287 - DNA, 75 bp, synthetic construct
  source 1..75: mol_type = other DNA
aaaggccgtactgctggtgatttccgtgtatctggaaccgaagactccggaacggacggcagaatcctccaccgc

SEQ ID NO: 579288 - DNA, 75 bp, synthetic construct
  source 1..75: mol_type = other DNA
agtcattttgcaggaaacacggcggggacgacgggcgttgcagatactcagtttttccgtacaaaccgcgctgaa

SEQ ID NO: 579289 - DNA, 75 bp, synthetic construct
  source 1..75: mol_type = other DNA
cagggatttagccttgctgacatttcttcgctgtttcctgaaagaaaagtgctgttcagagaactccttgacagt

SEQ ID NO: 579290 - DNA, 75 bp, synthetic construct
  source 1..75: mol_type = other DNA
tatatccgctgtccgtttgaagacggccacagtagcgggggcgatccaacaagcacagtttattttcctgcggga

SEQ ID NO: 579291 - DNA, 75 bp, synthetic construct
  source 1..75: mol_type = other DNA
tgactaatgaacttccgcgaaattgcgaatttttacgcgcaagtgatgttttgcgtgatgcgattgggctaaatc

SEQ ID NO: 579292 - DNA, 75 bp, synthetic construct
  source 1..75: mol_type = other DNA
gtccgcagggctgcggtaagtcttccggagtggaggcactgagccctgatcctgcgttttttactgaaatctctt

SEQ ID NO: 579293 - DNA, 75 bp, synthetic construct
  source 1..75: mol_type = other DNA
agaagactgatctggtgattgccggtgaggcagcgggttcaaaactggcgaaggcgcaggaattgggcattgaag

SEQ ID NO: 579294 - DNA, 75 bp, synthetic construct
  source 1..75: mol_type = other DNA
cgccaacggcgcgctgacggcccgcgcggtggtcagccaacgtgtaccgccgggcatgaccatgatgtatcacgc

SEQ ID NO: 579295 - DNA, 75 bp, synthetic construct
  source 1..75: mol_type = other DNA
tacagtgaaaacctgctaatgctgacgctctctcgcggtggaccgattgtctggatcagcgaaacagatgcccga

SEQ ID NO: 579296 - DNA, 75 bp, synthetic construct
  source 1..75: mol_type = other DNA
atcgagttattttcaaaagaagatcagcccctttcgggggaaagctatattcgttatcaggttgaggtttattta

SEQ ID NO: 579297 - DNA, 75 bp, synthetic construct
  source 1..75: mol_type = other DNA
atgacacgattccattgtgtactccagcaccatgatttcagcgccatcatgagtggacgcattcccgcactgacg

SEQ ID NO: 579298 - DNA, 75 bp, synthetic construct
  source 1..75: mol_type = other DNA
gttaatccccggttcaatgggcgattattcgtggcttgcagtcggttgcggcaacccggagtggctgtggtcttg

SEQ ID NO: 579299 - DNA, 75 bp, synthetic construct
  source 1..75: mol_type = other DNA
acttctgggggagttgccgccgcgacgctggcgagcaaacagtaataagtgtctgtatctgctggccgttgatgg

SEQ ID NO: 579300 - DNA, 75 bp, synthetic construct
  source 1..75: mol_type = other DNA
tttgcccgctggtcgaatgaaccggattatggcatctgcgtgcgtacaggccatggctggctggcgctggactgc

SEQ ID NO: 579301 - DNA, 75 bp, synthetic construct
  source 1..75: mol_type = other DNA
cgtgcgtcatctcatcgatgacaagcgtccggtgccagaactgccggaaaaatatcgtccgaaaaaacctcgtga

SEQ ID NO: 579302 - DNA, 75 bp, synthetic construct
  source 1..75: mol_type = other DNA
ggcgcaaaacgtggttaacgcactggaaaaagcgaaagaaaccacctttgcccgcttcctttatgcgcttggcat

SEQ ID NO: 579303 - DNA, 75 bp, synthetic construct
  source 1..75: mol_type = other DNA
attatcttctcccgtcacgcagactgcctgttttctgaaactggcggaagctatccgcgactaccgcgccgttac

SEQ ID NO: 579304 - DNA, 75 bp, synthetic construct
  source 1..75: mol_type = other DNA
ctgatgaatttggtgtctcagaacgcaccctacagcgggattttcagcaacgcctgatccatctggatcttgagc

SEQ ID NO: 579305 - DNA, 75 bp, synthetic construct
  source 1..75: mol_type = other DNA
atgaaaacacagcatgatcatcatgaccgcctgtctgtcaggctatcagtcattatcagccgcttactggctggt

SEQ ID NO: 579306 - DNA, 75 bp, synthetic construct
  source 1..75: mol_type = other DNA
gatctcccgcttgatggggttcctgctggtatgtatgggtgtacagtttattattaacggcatcctggaaatcat

SEQ ID NO: 579307 - DNA, 75 bp, synthetic construct
  source 1..75: mol_type = other DNA
cactttgaaaacaaaactcaactacttaatgaaatgtggctacaacagccctctttgcgggaactgattcaggag

SEQ ID NO: 579308 - DNA, 75 bp, synthetic construct
  source 1..75: mol_type = other DNA
agtgtccggtgcactgttaccagcctgcaaagcgtgaagagatgaaacagattatgcgttgggccgggccgagaa

SEQ ID NO: 579309 - DNA, 75 bp, synthetic construct
  source 1..75: mol_type = other DNA
atgagctatacggacagcagcagactcacgcctaaaacggatgcaaatcagaagatctcttccccacagcctgtt

SEQ ID NO: 579310 - DNA, 75 bp, synthetic construct
  source 1..75: mol_type = other DNA
cggcgaattaccagccagacactgttaggtccggatggcaaactgattatcgatcatgacgggcaagaatatctg

SEQ ID NO: 579311 - DNA, 75 bp, synthetic construct
  source 1..75: mol_type = other DNA
gtggcggcattgattacacggagattggcgcgattcgctgggcttttgccattgccccggatcacccattagcct

SEQ ID NO: 579312 - DNA, 75 bp, synthetic construct
  source 1..75: mol_type = other DNA
tgactgcttgcccgactggcgtagcacacacctttatggcggctgaagccattgaaaccgaagcgaaaaacgtgg

SEQ ID NO: 579313 - DNA, 75 bp, synthetic construct
  source 1..75: mol_type = other DNA
gttgctgaaaatggcatcgccagaactaaacgacattacgccttttggtcgagtcccggaggccgtaacgataaa

SEQ ID NO: 579314 - DNA, 75 bp, synthetic construct
  source 1..75: mol_type = other DNA
taggtccggatggcaagctcatcattgatcatgacggacaagaatatctgctacgtaaaacacaggcaggcaaac

SEQ ID NO: 579315 - DNA, 75 bp, synthetic construct
  source 1..75: mol_type = other DNA
cttataaagatattgctccggttatcgaagcccaacaagaagctggattgattcagcctgcggtcagatttcgac

SEQ ID NO: 579316 - DNA, 75 bp, synthetic construct
  source 1..75: mol_type = other DNA
cgagctagcccgctggtttgggatcccgctggagaaggtggggctggcaccaacacactgctgtggcggaaaaac

SEQ ID NO: 579317 - DNA, 75 bp, synthetic construct
  source 1..75: mol_type = other DNA
cagccgatgagcttcgttgagaacgctaaagcgaaagcattccttgaagcttctggagccgaagggcttccgctg

SEQ ID NO: 579318 - DNA, 75 bp, synthetic construct
  source 1..75: mol_type = other DNA
gaacatcaacagcgggaatcactgctgacggaacttgccggttattgtgaaggttttcaggctattcccgacacc

SEQ ID NO: 579319 - DNA, 75 bp, synthetic construct
  source 1..75: mol_type = other DNA
ctggatagcgaagctttattgtttgcggcgagaacacgttcgaaacaaaagacgatattgtccaggcaaggtatt

SEQ ID NO: 579320 - DNA, 75 bp, synthetic construct
  source 1..75: mol_type = other DNA
ctggtcgtcggatcgaaaaaggccagagggcaaaaaatagtgttcggcactggagcacacgcaaagatcctctgg

SEQ ID NO: 579321 - DNA, 75 bp, synthetic construct
  source 1..75: mol_type = other DNA
agtggctgaaaggacgtgccgtacaggttgaacgttacaacctggcgcagcagcccatgagctttgttcagaatg

SEQ ID NO: 579322 - DNA, 75 bp, synthetic construct
  source 1..75: mol_type = other DNA
aacgtctatgcgcctcgcccgcaggatcagcgctgtgcgctcggttccgtgaaaagtaacatgggccatctggat

SEQ ID NO: 579323 - DNA, 75 bp, synthetic construct
  source 1..75: mol_type = other DNA
ccggaaactttcgcacagtatgtggctgatacgcacacattaacgtacgttttcgttccattggccctcaccccc

SEQ ID NO: 579324 - DNA, 75 bp, synthetic construct
  source 1..75: mol_type = other DNA
cgcgccgtagcatcgataaacattacgggatggggcgaaactgccacctgttcgaaatgacgcgcaaatgggctt

SEQ ID NO: 579325 - DNA, 75 bp, synthetic construct
  source 1..75: mol_type = other DNA
tattttccgggccggaagcccgtctcgcggtattttgcgccacgctctcgcagcatgacattaactatcgtcgcc

SEQ ID NO: 579326 - DNA, 75 bp, synthetic construct
  source 1..75: mol_type = other DNA
tctgattgcgcaggtcagcccgaacagtttaacgctcgctggcaggaggcatggcgtctgctttcacagcgtcat

SEQ ID NO: 579327 - DNA, 75 bp, synthetic construct
  source 1..75: mol_type = other DNA
taacggtgattatctcgccgactggtctgattgcgcaggtcagcccgaacagtttaacgcccgctggcaggaggc

SEQ ID NO: 579328 - DNA, 75 bp, synthetic construct
  source 1..75: mol_type = other DNA
tgatgaacatcagtcaggctatgattataccacttttcccggtttatgatgaaaaaaaaacatctactgactatt

SEQ ID NO: 579329 - DNA, 75 bp, synthetic construct
  source 1..75: mol_type = other DNA
agcgtgaagtgctggcacgtcgattcggtttgctggggtacgaagcggcaacactggaagatgtaggtcgtgaaa

SEQ ID NO: 579330 - DNA, 75 bp, synthetic construct
  source 1..75: mol_type = other DNA
atgcttcgtcttaacgagcgcattacctcggtagacaccccgctgggtggtgattccgaaaaagcgttgctggac

SEQ ID NO: 579331 - DNA, 75 bp, synthetic construct
  source 1..75: mol_type = other DNA
gacgtcctgatgcgtctgccggagtggccggaggagcgactggcagagttgctgcctcttgagggatttaccttc

SEQ ID NO: 579332 - DNA, 75 bp, synthetic construct
  source 1..75: mol_type = other DNA
gccaatctctttcatcaggacaattcgcatctggtggtggatgtgccgcataacatcatccttcgcgagcatgaa

SEQ ID NO: 579333 - DNA, 75 bp, synthetic construct
  source 1..75: mol_type = other DNA
tgaatattcatcgcaaaggtgcaacaccggcacacgcgggcgctctggcattaatccccggttcaatgggcgatt

SEQ ID NO: 579334 - DNA, 75 bp, synthetic construct
  source 1..75: mol_type = other DNA
tcggagagccaaaaacagcgataacgagtacatggcatgggatatggctctcggctgggttgtctggcagcaacg

SEQ ID NO: 579335 - DNA, 75 bp, synthetic construct
  source 1..75: mol_type = other DNA
ttgaaaaggcagaactggaacggcttcagaacaatatagacagcatcgaggcattgaccatcagagcaggaaact

SEQ ID NO: 579336 - DNA, 75 bp, synthetic construct
  source 1..75: mol_type = other DNA
cgacacttaaagctttgggccggtattgaaaaggcagaactggaacggcttcagaacaatatagacagcatcgag

SEQ ID NO: 579337 - DNA, 75 bp, synthetic construct
  source 1..75: mol_type = other DNA
agttcagggccatccgttatattcagctccgtggtcaggatatcgcgaacgctcacgagacaattaacagtgata

SEQ ID NO: 579338 - DNA, 75 bp, synthetic construct
  source 1..75: mol_type = other DNA
cgtctgactatgttgcgctacggcgtcaccgacctgcgttcattctttgaaaacgatctgcgtttcctcaaacag

SEQ ID NO: 579339 - DNA, 75 bp, synthetic construct
  source 1..75: mol_type = other DNA
catcagctttaccaacctgaaaggcacgctgcacgacttcctgcgtaacttctttgaggaagatttgcagattcg

SEQ ID NO: 579340 - DNA, 75 bp, synthetic construct
  source 1..75: mol_type = other DNA
ataaaaggagatgaaattattactctatcgggaaagaaaagatatgcaaaaaattcatattggatgctctcgtca

SEQ ID NO: 579341 - DNA, 75 bp, synthetic construct
  source 1..75: mol_type = other DNA
atggacaacatattttgcaccggtataatcaccggggctctttcttttatttatgcattttatatccgcaccttt

SEQ ID NO: 579342 - DNA, 75 bp, synthetic construct
  source 1..75: mol_type = other DNA
caggcagcactggcgagctggcttccagagtgattataacgaccacatctgccggtggtaattacgaaatgaata

SEQ ID NO: 579343 - DNA, 75 bp, synthetic construct
  source 1..75: mol_type = other DNA
ttgacagattcgggtaacagtcttggtacgtacaatagcttaaggccgtttataattagtaactctactggcaat

SEQ ID NO: 579344 - DNA, 75 bp, synthetic construct
  source 1..75: mol_type = other DNA
accttctaagttcctatgtgaagagcagtgctcttccaagtatgactgtgcgaacttcctctgtttcaggtgggg

SEQ ID NO: 579345 - DNA, 75 bp, synthetic construct
  source 1..75: mol_type = other DNA
ggattctttatccgaaacgatggttcaaacacatacttcatgttgaccgcctcgggtgacaatcttggatcatgg

SEQ ID NO: 579346 - DNA, 75 bp, synthetic construct
  source 1..75: mol_type = other DNA
gttcaatttgtcgaggtgaccgaaaggattgggggtattacggccttattgctgaagaggttggtgagattgccc

SEQ ID NO: 579347 - DNA, 75 bp, synthetic construct
  source 1..75: mol_type = other DNA
tactgcaggattctaaagattataaacctgaaaagccatcggatactgagttagtattcattagcaacgctgaaa

SEQ ID NO: 579348 - DNA, 75 bp, synthetic construct
  source 1..75: mol_type = other DNA
ctgacggcgaccgcgacaatgaccattggaccgttgagttttgttggtttaatggcaccgcatattgcgcggatg

SEQ ID NO: 579349 - DNA, 75 bp, synthetic construct
  source 1..75: mol_type = other DNA
atgggctttcgacggacgatgccacacatcgtaatttcggcgctggtgggtggtttactgctggtgttcgctgac

SEQ ID NO: 579350 - DNA, 75 bp, synthetic construct
  source 1..75: mol_type = other DNA
ggactctttcaggtggtttaactgctgctggtgagattatttcaaagtcagcaaatggtctgcgtattgcctatg

SEQ ID NO: 579351 - DNA, 75 bp, synthetic construct
  source 1..75: mol_type = other DNA
cggatacgccatgaataattgtgaatttaatgggtttgttatgcctggcggttggtctgatcgcggttcatatgc

SEQ ID NO: 579352 - DNA, 75 bp, synthetic construct
  source 1..75: mol_type = other DNA
agcaatagcattcttagagagtgatattgataagtggattgatgaaaagatttctttatcacgtaataaagtagc

SEQ ID NO: 579353 - DNA, 75 bp, synthetic construct
  source 1..75: mol_type = other DNA
catttacacagggcagcaatactctggttggggcagggacagcctggaacgtaacagctaatggtgtgttgccgg

SEQ ID NO: 579354 - DNA, 75 bp, synthetic construct
  source 1..75: mol_type = other DNA
gaatcagatggtttgtagggctccggataaagatcttgctcatctggctgcagaaacagtatttaaaaaaatcaa

SEQ ID NO: 579355 - DNA, 75 bp, synthetic construct
  source 1..75: mol_type = other DNA
cgggattaattggcgggtatgggaagaatcaggtggtttgtagggccccggggaaaagcttaattaatctcaacg

SEQ ID NO: 579356 - DNA, 75 bp, synthetic construct
  source 1..75: mol_type = other DNA
gaatcaggtggtttgtagggctccgctaatgaatttaaataatttagaagcagcggctgtttataaaaaaatcac

SEQ ID NO: 579357 - DNA, 75 bp, synthetic construct
  source 1..75: mol_type = other DNA
cagtttgttctggtcatggaggattccctccgcgacctgtagcagaaacagtttcctggtttaccgtaaatggaa

SEQ ID NO: 579358 - DNA, 75 bp, synthetic construct
  source 1..75: mol_type = other DNA
gttgagcgagttattcctgtggcaatacgtcgctggcgtaaagcctggttctcggcccccataaaagctgaacgc

SEQ ID NO: 579359 - DNA, 75 bp, synthetic construct
  source 1..75: mol_type = other DNA
acctgcctacagatgctggcgaatatgccgtatttcttcatgcaacaacccgagatgataaacactggccggaag

SEQ ID NO: 579360 - DNA, 75 bp, synthetic construct
  source 1..75: mol_type = other DNA
cataaagaaaaactggcgctggagaaagatattctctggagcgtcgggcgcgcgataattcagctgattattgtc

SEQ ID NO: 579361 - DNA, 75 bp, synthetic construct
  source 1..75: mol_type = other DNA
atgtatgagcgtttggttgtaccactcattcatcatattcagcaattgaccaaaagggttgaggagcttgaaacg

SEQ ID NO: 579362 - DNA, 75 bp, synthetic construct
  source 1..75: mol_type = other DNA
ggtgcgagtgctgctggtgagggcgagttgcttattggctggagtggtacgagcggtgcacatgcgccggttttc

SEQ ID NO: 579363 - DNA, 75 bp, synthetic construct
  source 1..75: mol_type = other DNA
ctgttttacaatcgtaagcatcatattgcaaaacagcagcacgccgtagaacgcacccgcgaactgtttgccaaa

SEQ ID NO: 579364 - DNA, 75 bp, synthetic construct
  source 1..75: mol_type = other DNA
gcgcgtttgatagctatttgctgctgcgtggtctgcgaacgctggtgccgcgtatggaactggcccagcgtaatg

SEQ ID NO: 579365 - DNA, 75 bp, synthetic construct
  source 1..75: mol_type = other DNA
caacaatttagggcaacgggtgattagcgaacagcaacagattcaggagaaactgagtcttggcgcgacgccgaa

SEQ ID NO: 579366 - DNA, 75 bp, synthetic construct
  source 1..75: mol_type = other DNA
ggtgccgggtaatgcctttggctggctgttacccgcaggcagtctcggggcggcggtgacgctgttgatcattat

SEQ ID NO: 579367 - DNA, 75 bp, synthetic construct
  source 1..75: mol_type = other DNA
attgagaagcacagggtagagcggctggctgatgatatagaaaactactgtaagcaaaaaaacggtatcaggctg

SEQ ID NO: 579368 - DNA, 75 bp, synthetic construct
  source 1..75: mol_type = other DNA
aaattaaaagatgatatatgtattaaaaagtatagaaaatttctgcggcgcgaagctggttttgacatacatcca

SEQ ID NO: 579369 - DNA, 75 bp, synthetic construct
  source 1..75: mol_type = other DNA
cggtattgattatgtgagtacaaatagagaggttagcgatcaattaatcgaaaaagcgattatcgaattgcgaga

SEQ ID NO: 579370 - DNA, 75 bp, synthetic construct
  source 1..75: mol_type = other DNA
tgttgccgcaggatacgccgacggttatccgcgccacgcgcctaccggtacccctgttttagtggacggcgtgcg

SEQ ID NO: 579371 - DNA, 75 bp, synthetic construct
  source 1..75: mol_type = other DNA
aataccggattacgtccggtgatgacgctaagcagtgagattattggtgtccagacgctaacagcgggcgagcgt

SEQ ID NO: 579372 - DNA, 75 bp, synthetic construct
  source 1..75: mol_type = other DNA
aaaaacagtgggggcacaaaagggggcatatttcattgttgtgttttattatttgttttttatcattaacttatt

SEQ ID NO: 579373 - DNA, 75 bp, synthetic construct
  source 1..75: mol_type = other DNA
atttccgcattatcctcgccggtggtgaattgcgtagccgcgacggcgggataatcggtgaggcgacgctcgatt

SEQ ID NO: 579374 - DNA, 75 bp, synthetic construct
  source 1..75: mol_type = other DNA
ctcgacgctgtttatcgatatcggcaccacgccggaagcggtggcgcacgcgctgcttaatcacagcaatttgcg

SEQ ID NO: 579375 - DNA, 75 bp, synthetic construct
  source 1..75: mol_type = other DNA
cgccgccgctgatctttttcctggtggcggtcattttatggggaagtctgcgtagctctggtgccattatgcggc

SEQ ID NO: 579376 - DNA, 75 bp, synthetic construct
  source 1..75: mol_type = other DNA
gcgcgtttgacagctatctgctgctacgcgggttgcgaactctggtgccgcgtatggagctggccagcgcaacgc

SEQ ID NO: 579377 - DNA, 75 bp, synthetic construct
  source 1..75: mol_type = other DNA
attgaaaacggcggtctgcatccggttacccgtaccatcgaccgtatcgaaagtttcttcggtgagcttggcttt

SEQ ID NO: 579378 - DNA, 75 bp, synthetic construct
  source 1..75: mol_type = other DNA
cacgccgccttctcaggtgcgtgattacaaagcagaagtagcgaaacttatcgacgtttccacctgtatcggctg

SEQ ID NO: 579379 - DNA, 75 bp, synthetic construct
  source 1..75: mol_type = other DNA
aactttgcggtaagtgcggcgagagagttcccgttaattcatgcccgtgtaatggtgactcgcaatgctgggtga

SEQ ID NO: 579380 - DNA, 75 bp, synthetic construct
  source 1..75: mol_type = other DNA
tgctggcgattaccccgctgtgccgccgctggctgaccattttaccgctgggaggtgataccgcacgagccgtgg

SEQ ID NO: 579381 - DNA, 75 bp, synthetic construct
  source 1..75: mol_type = other DNA
tgttcgcgccgctgctggcaaaaatgctgggggcgcggcgtctgctgccacggttgatgctggcgtcgctgattg

SEQ ID NO: 579382 - DNA, 75 bp, synthetic construct
  source 1..75: mol_type = other DNA
tgtgtcgttggcttaatcgtctttggcgtcgcgtgggggaaacggctttcgccggttacgcttattctcgcgggg

SEQ ID NO: 579383 - DNA, 75 bp, synthetic construct
  source 1..75: mol_type = other DNA
gtgagtaaacgaattgcgctttttccggcgttattgctggcgctgctggtgattgtcgcaatggcgttgacctgg

SEQ ID NO: 579384 - DNA, 75 bp, synthetic construct
  source 1..75: mol_type = other DNA
ggcgtcatgctggcggtggcgggctgtattattcagcggctgaccggcaacccgatggcaagcccggaagtgctg

SEQ ID NO: 579385 - DNA, 75 bp, synthetic construct
  source 1..75: mol_type = other DNA
cggcgttattgctggcgctgttagtgattgtcgctacggcgctcacctggatgaacttctcacaggcgctgccgc

SEQ ID NO: 579386 - DNA, 75 bp, synthetic construct
  source 1..75: mol_type = other DNA
cagtttccacttaaggcaagagctatcacggtgaatggaaacgcaagccagggtacgatcgaggcgctaatcaat

SEQ ID NO: 579387 - DNA, 75 bp, synthetic construct
  source 1..75: mol_type = other DNA
acttgataaccacgatccattaagtggcattcctggctataaaagtattccggttgaattagaaccatcaaatta

SEQ ID NO: 579388 - DNA, 75 bp, synthetic construct
  source 1..75: mol_type = other DNA
aagcctggtgcgggtatctgcccactacgaggtcactctaatgtacagggcgaccgaaccgtcggtatcaccgag

SEQ ID NO: 579389 - DNA, 75 bp, synthetic construct
  source 1..75: mol_type = other DNA
agcaacatttaatgcacaaatcggcggtaaagtattaatgactctgaaatacggcaataaaccagttccattcgg

SEQ ID NO: 579390 - DNA, 75 bp, synthetic construct
  source 1..75: mol_type = other DNA
tatcatttggattaaatgtgccgtttggtgatattacgacttcgctgaattacagctattccaataatatatggc

SEQ ID NO: 579391 - DNA, 75 bp, synthetic construct
  source 1..75: mol_type = other DNA
taggctggctggtatgcaggtttgccgtttgccgcatcttccctgcgttgaagagtcaggctggcaaaccgcgtg

SEQ ID NO: 579392 - DNA, 75 bp, synthetic construct
  source 1..75: mol_type = other DNA
tgaacttcgacggccgctacaccctgttttcaccgtttgaacgtggatggaattttgaccgtgccggaggaaatg

SEQ ID NO: 579393 - DNA, 75 bp, synthetic construct
  source 1..75: mol_type = other DNA
accaaatctaaatatttagaagaagatgatcttcttgacattgaagatgttggtcctaaacttttttacgctgaa

SEQ ID NO: 579394 - DNA, 75 bp, synthetic construct
  source 1..75: mol_type = other DNA
tggtattgtaggattaacaatttttttaaaaaatataaaacgtcgatgcgccactagtggtagaactgtaagagt

SEQ ID NO: 579395 - DNA, 75 bp, synthetic construct
  source 1..75: mol_type = other DNA
ggagaaagtaatgaagacaatgaagatcacaagacacatgagatgctagataaccacatatctatagatgatggg

SEQ ID NO: 579396 - DNA, 75 bp, synthetic construct
  source 1..75: mol_type = other DNA
gtttcgtaaaaaagaagaatctaaagccgttaacgcctgtgttcaacaagtgattgatttatcgggttcaatgag

SEQ ID NO: 579397 - DNA, 75 bp, synthetic construct
  source 1..75: mol_type = other DNA
aagcacaaacatgataataacgacagtgatgattcagataattctgaatcatcagaaacaatattcgatgataca

SEQ ID NO: 579398 - DNA, 75 bp, synthetic construct
  source 1..75: mol_type = other DNA
aggaaaaagaagagattcgacaccctgattcacctgagggattagtggtagccgcagcaaataacatggcgttcg

SEQ ID NO: 579399 - DNA, 75 bp, synthetic construct
  source 1..75: mol_type = other DNA
agaagggcttgaacttcttctggatgaaatgattaacgacctaaatactcatggtatgccagaagcgccagtgac

SEQ ID NO: 579400 - DNA, 75 bp, synthetic construct
  source 1..75: mol_type = other DNA
aatacggcgaagctgaaggaatgggaagagcgctgtttctttatcagaaaatgctcactacttcccctgataaag

SEQ ID NO: 579401 - DNA, 75 bp, synthetic construct
  source 1..75: mol_type = other DNA
ttccaggggcaatttgctttgagctggtttgatcgcttccctgtccaggttgaacaacaaaaagacatgaccgcc

SEQ ID NO: 579402 - DNA, 75 bp, synthetic construct
  source 1..75: mol_type = other DNA
cagcaaagagcttatgagcgtctcaccttctgattatcggccatacgatcgatcatacgactttatcgggttgat

SEQ ID NO: 579403 - DNA, 75 bp, synthetic construct
  source 1..75: mol_type = other DNA
taccagaacttaaatcatctgccagaaagccgtcggagagcaaagacgagtccgaggaaacgccagaatcaggtg

SEQ ID NO: 579404 - DNA, 75 bp, synthetic construct
  source 1..75: mol_type = other DNA
atgtctaaaaaacgatctatcaaagagattcaagacttccgtgacagtgtaaaacgagtagtcgctcttctttct

SEQ ID NO: 579405 - DNA, 75 bp, synthetic construct
  source 1..75: mol_type = other DNA
catcacaactctcacaggctgtaggacaaagtagcgaaataaatactattgcacagatttcacgctcgctgagcg

SEQ ID NO: 579406 - DNA, 75 bp, synthetic construct
  source 1..75: mol_type = other DNA
gaggatcaactcaaattgcagccagagcaagacaatacgacgtttaagcaagtaaaagcggcgatcggctcattt

SEQ ID NO: 579407 - DNA, 75 bp, synthetic construct
  source 1..75: mol_type = other DNA
gggtcactatcaagtcccatgagcaaaccaactcactgctcctgacaggggctcccgatgtcattcgcgaccttg

SEQ ID NO: 579408 - DNA, 75 bp, synthetic construct
  source 1..75: mol_type = other DNA
ctagtttctttctcccacgtttaaaagtgcagcgtctgaacaacattagtgcgccggtgatgtgccatcaatgcg

SEQ ID NO: 579409 - DNA, 75 bp, synthetic construct
  source 1..75: mol_type = other DNA
tggcacctgagttgattaagcgtaatgcgataggctatgaatcggcttcgcagttgctgagcatagccgatgata

SEQ ID NO: 579410 - DNA, 75 bp, synthetic construct
  source 1..75: mol_type = other DNA
tggatcgtcaggaggatgttcagggtaatactaaggtgatttacctgaaatatgcgaaggcgaaggatttagtgg

SEQ ID NO: 579411 - DNA, 75 bp, synthetic construct
  source 1..75: mol_type = other DNA
ccagtggcagtgatgaagatgatcctacggcgattaataaaacggtgcgcgtggtaacgaccgtaacctatgcgt

SEQ ID NO: 579412 - DNA, 75 bp, synthetic construct
  source 1..75: mol_type = other DNA
gctggcgacatgtgctgccgctgtacggggaaaaccggatgattacgtttttgtctacagcatggaaatgccgga

SEQ ID NO: 579413 - DNA, 75 bp, synthetic construct
  source 1..75: mol_type = other DNA
acgttctggaggtggctgagaaccagctgttctgcattgctgagcagggcatgctgcaggcaggtactgaaacca

SEQ ID NO: 579414 - DNA, 75 bp, synthetic construct
  source 1..75: mol_type = other DNA
tgggtgatattcccgtgctggggcatctattccgagctaaaagtgagcatgttgctaaacgtaacctgatgctgt

SEQ ID NO: 579415 - DNA, 75 bp, synthetic construct
  source 1..75: mol_type = other DNA
ctgccaacgatatttgcactgtcagccgccggtgcagccggggatgccctgagtgaggggcagtatacctcgcag

SEQ ID NO: 579416 - DNA, 75 bp, synthetic construct
  source 1..75: mol_type = other DNA
gccttctgcagccaatattctggcttacgctggggtggtggcggagaaaagccgcctgcggcaactgatggcagt

SEQ ID NO: 579417 - DNA, 75 bp, synthetic construct
  source 1..75: mol_type = other DNA
cgcgccgtaatatataacgggaagcatggagttatgactatataccctagtcccattcggtttgccttacagcag

SEQ ID NO: 579418 - DNA, 75 bp, synthetic construct
  source 1..75: mol_type = other DNA
cgatatgagaaccttgaggctctcattaccttcctgacagaagaatgctgctcaggaactgccgactgcctcact

SEQ ID NO: 579419 - DNA, 75 bp, synthetic construct
  source 1..75: mol_type = other DNA
actaaaacggagtttttccgcgacggtatgccgcgcaggattgagttcaccctttcgctaaaacgggtggatgaa

SEQ ID NO: 579420 - DNA, 75 bp, synthetic construct
  source 1..75: mol_type = other DNA
gtatgtcatcaacaaggtgagtgaaacagggagtattttctttgcagacggcacaccccggaaaattgattttac

SEQ ID NO: 579421 - DNA, 75 bp, synthetic construct
  source 1..75: mol_type = other DNA
atgatgatggtgctaggattgtacgtgtttatgctgcgcaccgtgccgtatcaggaactgcagtatcaacgcagc

SEQ ID NO: 579422 - DNA, 75 bp, synthetic construct
  source 1..75: mol_type = other DNA
aggttcatacactggtgccagtcaggcttcatcaatggcaattgctgaactttcagcattgacaagcttatcttt

SEQ ID NO: 579423 - DNA, 75 bp, synthetic construct
  source 1..75: mol_type = other DNA
atgcaactggaagaagtagctaaagcactaaaagagctgggtcacccgacccgtttgttcatattcaaacatctt

SEQ ID NO: 579424 - DNA, 75 bp, synthetic construct
  source 1..75: mol_type = other DNA
tcggtaaacaggcggaatcgctcatcggtaaggctggcagtatggcgactaaattcacgggtatgacggaggcgg

SEQ ID NO: 579425 - DNA, 75 bp, synthetic construct
  source 1..75: mol_type = other DNA
atgatgatggtgctgggattgtacgtgtttatgctgcgcaccgtgccgtatcaggagctgcagtatcaacgcagc

SEQ ID NO: 579426 - DNA, 75 bp, synthetic construct
  source 1..75: mol_type = other DNA
ttgttgatcgtggttgggatagcgaactcggtgaaaaaaactttaatgaccctgataacatggccagacgtcctc

SEQ ID NO: 579427 - DNA, 75 bp, synthetic construct
  source 1..75: mol_type = other DNA
aaagtggtgggttacaaaggtcgggtggtttttgatgccagcaaaccggatggcacgccgcgcaaactgctggat

SEQ ID NO: 579428 - DNA, 75 bp, synthetic construct
  source 1..75: mol_type = other DNA
atggtcggttctgccatcaggcggcagctcgaacagcgcggtgatgtggaactggtattacgcacccgcgacgag

SEQ ID NO: 579429 - DNA, 75 bp, synthetic construct
  source 1..75: mol_type = other DNA
tcggtaaacaggcggagtcgctcatcggtaagaccggcagtatggcgaccagattcacgggtatgacgggggcag

SEQ ID NO: 579430 - DNA, 75 bp, synthetic construct
  source 1..75: mol_type = other DNA
tgtttatgctgcgcaccgtgccgtatcaggaactgcagtatcaacgtagctggcgacatgcggcaaacagtcggg

SEQ ID NO: 579431 - DNA, 75 bp, synthetic construct
  source 1..75: mol_type = other DNA
agaaggtccaacactaaccggttttaattccgcttacagaactgcatcaaccagctccacagtatcgatgaatta

SEQ ID NO: 579432 - DNA, 75 bp, synthetic construct
  source 1..75: mol_type = other DNA
agtggtgatggatggatgaaattacccaacgggaaaatcctgcaatatggtcgtggtgcgattacgccgacatta

SEQ ID NO: 579433 - DNA, 75 bp, synthetic construct
  source 1..75: mol_type = other DNA
ctgtttgatgacgtggttaagttgtttgagtttgatacattcgaaagcccagcaaaggaggcagccagtgagcaa

SEQ ID NO: 579434 - DNA, 75 bp, synthetic construct
  source 1..75: mol_type = other DNA
tgcatggcccactgggccagcgacatttgcgggaaatcctaagcgcgcagtttagtggcttgatcctctatccgg

SEQ ID NO: 579435 - DNA, 75 bp, synthetic construct
  source 1..75: mol_type = other DNA
aacgaagctctggctgaactgaacaagattgcttctcgcaaaggtaagatccttttcgttggtactaaacgcgct

SEQ ID NO: 579436 - DNA, 75 bp, synthetic construct
  source 1..75: mol_type = other DNA
aatgggataaaacccccaaaggaatggagatctggaacagcaatcatacaccaaagacgtggatgcaattttctg

SEQ ID NO: 579437 - DNA, 75 bp, synthetic construct
  source 1..75: mol_type = other DNA
ctacaaacgcagggaacttactatcgatcacgaaggatgtggattttccttgggctcctggtatgtctaaaacgc

SEQ ID NO: 579438 - DNA, 75 bp, synthetic construct
  source 1..75: mol_type = other DNA
taacgaggaagagcagcacacctatcaaagtgtactgcttacccgaggaaaaggaacagatcgaagtgcaagcga

SEQ ID NO: 579439 - DNA, 75 bp, synthetic construct
  source 1..75: mol_type = other DNA
gctggcactggaacagatggcagaacaggggaaagcatggcccctgattgaaggcagtggcacgatttacggcat

SEQ ID NO: 579440 - DNA, 75 bp, synthetic construct
  source 1..75: mol_type = other DNA
atggcgataacaaaacaacgtgtagaagaaatcatatcccgtattgaaatgtatgggcatggtgccgggtatact

SEQ ID NO: 579441 - DNA, 75 bp, synthetic construct
  source 1..75: mol_type = other DNA
tgaagattctgatggcgattatgtcctgtttgatgacgtagttaagttgtttgagtttgatacattcgaaagccc

SEQ ID NO: 579442 - DNA, 75 bp, synthetic construct
  source 1..75: mol_type = other DNA
gtcaggattgtggcgctgacatgactgaagattctgatggcgattatgtcctgtttgatgacgtggttaagttgt

SEQ ID NO: 579443 - DNA, 75 bp, synthetic construct
  source 1..75: mol_type = other DNA
cgccggcgggcagaataataacgctcaggctaaacaggataccggcaccagtggcggtatcggctggatttcgga

SEQ ID NO: 579444 - DNA, 75 bp, synthetic construct
  source 1..75: mol_type = other DNA
tccggcacggccagtggtgactggacgctttcctgtgtgcgcgggcaggtgaacagtatcacctttgtttttgct

SEQ ID NO: 579445 - DNA, 75 bp, synthetic construct
  source 1..75: mol_type = other DNA
aaatccaatggcggcagtattggctggttgtccgatgagcacggtattccgtgcctgtccggcgaccgcaaaagc

SEQ ID NO: 579446 - DNA, 75 bp, synthetic construct
  source 1..75: mol_type = other DNA
tggcatggcttgccggggtgtttgcttcagcctggcagtttatcagcgaaggctggaacagttttatttccatgc

SEQ ID NO: 579447 - DNA, 75 bp, synthetic construct
  source 1..75: mol_type = other DNA
tatgaaggctttatgaccggagccattgagggcggtaaaaagctggggctgtccttcacggattccaccggcaaa

SEQ ID NO: 579448 - DNA, 75 bp, synthetic construct
  source 1..75: mol_type = other DNA
gatgattctgcgcttaaggccgttcagcgtgatgcgctgcgcttcagtacaacctacggtgccagtgcggtggag

SEQ ID NO: 579449 - DNA, 75 bp, synthetic construct
  source 1..75: mol_type = other DNA
gcgggtgcccattgacggtaaagtgaccgatccgtatccgttcaaggtggtggtgggaaaagacaacctcacggc

SEQ ID NO: 579450 - DNA, 75 bp, synthetic construct
  source 1..75: mol_type = other DNA
ccgggggagctgaagtcactcgggattgagggggataccccggccgatacactgaggatgctgattggcactatg

SEQ ID NO: 579451 - DNA, 75 bp, synthetic construct
  source 1..75: mol_type = other DNA
gcagacgtttgatgccatttatgttcctccggggaaagcgctggcggtacatattacccgacaactggctattga

SEQ ID NO: 579452 - DNA, 75 bp, synthetic construct
  source 1..75: mol_type = other DNA
atgttagttacgctcatttttctgtcatcgacacaccaggaagagcgcgacgcattaattcgactacgggcaagt

SEQ ID NO: 579453 - DNA, 75 bp, synthetic construct
  source 1..75: mol_type = other DNA
gcgcaacgtcagcgtgagccgtttttcgttaagcgtggaaggtgatgaccttttgttcacgctacaactggagac

SEQ ID NO: 579454 - DNA, 75 bp, synthetic construct
  source 1..75: mol_type = other DNA
ttgaaaacgctgtgggaagcagtgccgtcggcatttacacggctggcagagcgcaacgtcagcgtgagccgtttt

SEQ ID NO: 579455 - DNA, 75 bp, synthetic construct
  source 1..75: mol_type = other DNA
tatgaaggctttatgaccggcgcaattgagggggctaaaaagctggggctgtccttcacggactctaccggcaaa

SEQ ID NO: 579456 - DNA, 75 bp, synthetic construct
  source 1..75: mol_type = other DNA
ttaagtggctggcgggtatttttgccagcgcctggcaatacatcagcgatggatggaatgcctttactgcattgc

SEQ ID NO: 579457 - DNA, 75 bp, synthetic construct
  source 1..75: mol_type = other DNA
ttccgaaaagctgaaagatgaaaaagggaattcgcgtaagccttcttctacttctgcgatggataatgtggccat

SEQ ID NO: 579458 - DNA, 75 bp, synthetic construct
  source 1..75: mol_type = other DNA
ggtggtcctgggcggattgctggatgatttttctaaagagcaagtgtcaaaggttcctctgcttggcgatattcc

SEQ ID NO: 579459 - DNA, 75 bp, synthetic construct
  source 1..75: mol_type = other DNA
tctgtaccgccagggaatgtccgagcaacccgggtctcgataatgctctggaaggttgcccttaccgcttggcgt

SEQ ID NO: 579460 - DNA, 75 bp, synthetic construct
  source 1..75: mol_type = other DNA
aggcggtgtgttcactgttagtgatctgatatccctgctgaagcccgagcacgacaccgagcgtcaagcctactt

SEQ ID NO: 579461 - DNA, 75 bp, synthetic construct
  source 1..75: mol_type = other DNA
cgaaaatccactgatcggctctatcgtcagatacctgcttttgtgcaggccaattttgtcgtcaagaaactcgat

SEQ ID NO: 579462 - DNA, 75 bp, synthetic construct
  source 1..75: mol_type = other DNA
gattctgcttgtgattggtgccattgcgctactggttgccggttgttatctgctggttaagcactgggacacaat

SEQ ID NO: 579463 - DNA, 75 bp, synthetic construct
  source 1..75: mol_type = other DNA
ggttacgaaaatctacactgtcactgtctggctggcgcaaatggcggtaatcgcctggaataccacgctgaagtt

SEQ ID NO: 579464 - DNA, 75 bp, synthetic construct
  source 1..75: mol_type = other DNA
ggtggccaatatcgtgatgggggtatccagattcatcatgatgggattgcgcgggatctggggggcgttaacggc

SEQ ID NO: 579465 - DNA, 75 bp, synthetic construct
  source 1..75: mol_type = other DNA
agggaaccatttccgtacgcagtaatgatacgtttagccaacaggagtactaccagttctttttaagtattcttg

SEQ ID NO: 579466 - DNA, 75 bp, synthetic construct
  source 1..75: mol_type = other DNA
tgaaatccacatccgccgacacggcggagttcatggggcagatgtacggtaacttttccgccgatgcggcgcggc

SEQ ID NO: 579467 - DNA, 75 bp, synthetic construct
  source 1..75: mol_type = other DNA
ttggtatcaacctgatgagctggccgatcctgcttgtgattggtgccattgcgctactggttgccggttgttatc

SEQ ID NO: 579468 - DNA, 75 bp, synthetic construct
  source 1..75: mol_type = other DNA
cgctgccggcaccggatgtgaatggcaccaccaacagcaatcagcagacgaagaacgggaataacaccggcggca

SEQ ID NO: 579469 - DNA, 75 bp, synthetic construct
  source 1..75: mol_type = other DNA
aaaacggattcatggtggttgtcatgcggggagtgtttcagtctggacaaacaggattacagaattacttcgtta

SEQ ID NO: 579470 - DNA, 75 bp, synthetic construct
  source 1..75: mol_type = other DNA
ggcatttactatttctttgttcataatagagataaacatattatgacattggcagatgatcctgcatctcatcct

SEQ ID NO: 579471 - DNA, 75 bp, synthetic construct
  source 1..75: mol_type = other DNA
tttagtaggaccgaccacaactctctggataagttacacggcacgcgtttgagttgtgagatcggggaacaatac

SEQ ID NO: 579472 - DNA, 75 bp, synthetic construct
  source 1..75: mol_type = other DNA
tttctgaagtaaaaggcactatgttgacgcttcagggatctgcaataacgcagataaaaggaggaatagtgaata

SEQ ID NO: 579473 - DNA, 75 bp, synthetic construct
  source 1..75: mol_type = other DNA
agtgggggcaaatgagataactatatccacatcagggataagtataaaagccgcaaaaattaccattgaagggca

SEQ ID NO: 579474 - DNA, 75 bp, synthetic construct
  source 1..75: mol_type = other DNA
tttctcttcctgagaataattgtaagtctggatttatcacccgtagtgttaagaatggtaaaaaaggagaaggtc

SEQ ID NO: 579475 - DNA, 75 bp, synthetic construct
  source 1..75: mol_type = other DNA
gctggatgttcaatcggttcgctggtgggcgctgcttttgcatgcgatcgcctgaccgcgcttgaacagtgggtt

SEQ ID NO: 579476 - DNA, 75 bp, synthetic construct
  source 1..75: mol_type = other DNA
ggcgcggcgagaggttggtcgcatattggcgttattaatgcgctaaaaaaagtgggtattgaaattgatatcgtt

SEQ ID NO: 579477 - DNA, 75 bp, synthetic construct
  source 1..75: mol_type = other DNA
gggccagcctgcgttgaatcttgcccgacacaggcgttgcagttgctgactgaaagagaactcaggcgagtccgc

SEQ ID NO: 579478 - DNA, 75 bp, synthetic construct
  source 1..75: mol_type = other DNA
aaagtcaacttcaggtacagagaatagttcttgttgggtccgcgtatctcaggtgtggtccggggatggtttcgg

SEQ ID NO: 579479 - DNA, 75 bp, synthetic construct
  source 1..75: mol_type = other DNA
tgataatagcatgcaacatggctgtattattgtgttgcaaccagaaatatcagagttagcatctggaaaaaggac

SEQ ID NO: 579480 - DNA, 75 bp, synthetic construct
  source 1..75: mol_type = other DNA
gttccgaccgggctggcgattcatattgccgatccttcactggcggcaatgatgctgccgcgctccggattggga

SEQ ID NO: 579481 - DNA, 75 bp, synthetic construct
  source 1..75: mol_type = other DNA
gatgttaagtccagtaagggagtttatgaagatattattcctgatggaaaacgtgagttaataaaaaaacgttca

SEQ ID NO: 579482 - DNA, 75 bp, synthetic construct
  source 1..75: mol_type = other DNA
atcccggaactgaacaaagaaacgctggcggccatcgctgaacctgatagcgctaaacgtcttgatttgtataag

SEQ ID NO: 579483 - DNA, 75 bp, synthetic construct
  source 1..75: mol_type = other DNA
gatgctgatatggcacgcgatctgggtgccgatcaaatcgatgcactacagggtaaacctggcgtcaaggtgatg

SEQ ID NO: 579484 - DNA, 75 bp, synthetic construct
  source 1..75: mol_type = other DNA
gttccccgtatgtctttattgatcaaggcaaaacgcaaattgtcatgcgtgataatgtgcagggttatcaacaag

SEQ ID NO: 579485 - DNA, 75 bp, synthetic construct
  source 1..75: mol_type = other DNA
gttacggtctgattattgcgttgttttccctgtcgttatcagggtgcggtctgacgcaaagagtggcagacggta

SEQ ID NO: 579486 - DNA, 75 bp, synthetic construct
  source 1..75: mol_type = other DNA
atggtgcacagacaccactggcgacgatggtgctggtttaccagctcagggatcgtaaagcggttgatgctgccg

SEQ ID NO: 579487 - DNA, 75 bp, synthetic construct
  source 1..75: mol_type = other DNA
gagtttgaaaaaggacaggttgctctctacaaaaaaattagcccagttgtgaaaaatggaatttcgagtattgaa

SEQ ID NO: 579488 - DNA, 75 bp, synthetic construct
  source 1..75: mol_type = other DNA
tttagtaggactgatcataactccttggatcagttacacggtacgcgtctgagttgtgagattggagaacaatac

SEQ ID NO: 579489 - DNA, 75 bp, synthetic construct
  source 1..75: mol_type = other DNA
taattatgataacagcatacagcatacctgtattatcatgttacaaccagaaattgccgagttagcaaccagtaa

SEQ ID NO: 579490 - DNA, 75 bp, synthetic construct
  source 1..75: mol_type = other DNA
attataaattccaagataaacattttatccgtctgcatggttgtagcgtatcgttatttccaattgaaattaaag

SEQ ID NO: 579491 - DNA, 75 bp, synthetic construct
  source 1..75: mol_type = other DNA
attctcaatgtgctgggctggcagccagaaaatatcgccagtcagttaaagaaaatcgacgatcataccgtccag

SEQ ID NO: 579492 - DNA, 75 bp, synthetic construct
  source 1..75: mol_type = other DNA
ttcaatctacatcaacttactgatgcgggtacaactgcgggtatttcccggttcgattatgtttgtacccacaca

SEQ ID NO: 579493 - DNA, 75 bp, synthetic construct
  source 1..75: mol_type = other DNA
taattatgataacagcatgcagtatacctgcattattgtgttacagccagaaatagctgagttggcatctggaaa

SEQ ID NO: 579494 - DNA, 75 bp, synthetic construct
  source 1..75: mol_type = other DNA
cccctcaccctaaccctctccccaaaggggcgaggggaccgatcgaactcgtatttgactttatcaacaatgtga

SEQ ID NO: 579495 - DNA, 75 bp, synthetic construct
  source 1..75: mol_type = other DNA
gaacgggcgatggttatcgcgccttgttcgcgaatggggccggtgacggaagatgagcgtaacggcctgattaat

SEQ ID NO: 579496 - DNA, 75 bp, synthetic construct
  source 1..75: mol_type = other DNA
ctgctcgactttaaagatttgcgggcgattacccagtacatcggcgataacgccaaatccttccagaatcagtac

SEQ ID NO: 579497 - DNA, 75 bp, synthetic construct
  source 1..75: mol_type = other DNA
ttaccgggcgtcgttcacgttatcactcatctcaactgcccggatatttactacactcctggtggtcaaagcgcg

SEQ ID NO: 579498 - DNA, 75 bp, synthetic construct
  source 1..75: mol_type = other DNA
agaataaggatgaggtgtttgagcggggagtgattaacgtcttcaggggactgagctggaattataaaaccaact

SEQ ID NO: 579499 - DNA, 75 bp, synthetic construct
  source 1..75: mol_type = other DNA
tcgcgttcaacacgctttgcgggcttttacgcccaaagatcagaaagcggtaaaagctgcggcgcaaaccatgcg

SEQ ID NO: 579500 - DNA, 75 bp, synthetic construct
  source 1..75: mol_type = other DNA
gaaaagctttatcagatgccgaaactgtacgccaccagtctgctatggacgctctcggagttgtatgagcaacta

SEQ ID NO: 579501 - DNA, 75 bp, synthetic construct
  source 1..75: mol_type = other DNA
ccgccctggactgggcgatgaaacaggattttcgatgtggctgctggctgatggagaaacctgaaacagtaatga

SEQ ID NO: 579502 - DNA, 75 bp, synthetic construct
  source 1..75: mol_type = other DNA
cggcaagctgttgcgtcgtatctcaaagcatcaggataaaattgagcgggcacagaaactgatccagcgccatcc

SEQ ID NO: 579503 - DNA, 75 bp, synthetic construct
  source 1..75: mol_type = other DNA
gctttcagagttgtatgaacaattgccggaagcgggcgatctggagaaaccaaaactggtgtttttcttcgacga

SEQ ID NO: 579504 - DNA, 75 bp, synthetic construct
  source 1..75: mol_type = other DNA
ctgctcgcaaggcttaaaaatatcggcgtcaatgactggcaaccacatgctaatccggtggtggtgtgggatatc

SEQ ID NO: 579505 - DNA, 75 bp, synthetic construct
  source 1..75: mol_type = other DNA
gcgaagcgttgatctcatttcttgatgcgaaaggtagtccttctgtggtggagcgtgcaatggtgattgcacctt

SEQ ID NO: 579506 - DNA, 75 bp, synthetic construct
  source 1..75: mol_type = other DNA
agaaaaccggaactggttgatcggctaaatgacatcattgcgaagcattatccggggcaactatcagccatctga

SEQ ID NO: 579507 - DNA, 75 bp, synthetic construct
  source 1..75: mol_type = other DNA
atgtcagatatcacaatctcccgcccggaactggtcaacgggcatacggacgttatctgctcaaccagtatccgc

SEQ ID NO: 579508 - DNA, 75 bp, synthetic construct
  source 1..75: mol_type = other DNA
tgaaatctggcgtgacctgatgcaacgctccgggatgctgagtcttatggatgcacaggcgcgtgatgaatggta

SEQ ID NO: 579509 - DNA, 75 bp, synthetic construct
  source 1..75: mol_type = other DNA
atgttgcacctgttcagcggtaaaccaatccccgacaaccgggaaaacatcactattcgtctggatgatcacatt

SEQ ID NO: 579510 - DNA, 75 bp, synthetic construct
  source 1..75: mol_type = other DNA
atcgtcaacaacctagtgaggtgggaccggtgggggtttcatcttatcaccgggcaacagactgaccgactcgtc

SEQ ID NO: 579511 - DNA, 75 bp, synthetic construct
  source 1..75: mol_type = other DNA
ggctccgcacacatcacgttcaggaaaccagaactggttgacagactgaatgatattatcgcaaaacactatcct

SEQ ID NO: 579512 - DNA, 75 bp, synthetic construct
  source 1..75: mol_type = other DNA
caacaatctggtgagatgggaccggtggagatttcatcttatcaccggacaacagactgaccgactcgccgatct

SEQ ID NO: 579513 - DNA, 75 bp, synthetic construct
  source 1..75: mol_type = other DNA
actttccggaaatcagtgaagcgaacatttggagcacatttgagcaactgcaccagaataaggatgaagtgtttg

SEQ ID NO: 579514 - DNA, 75 bp, synthetic construct
  source 1..75: mol_type = other DNA
cactgctgcaaatcgacacacttatccggcaactggcagaaatctcagcaatgacagaaagtattggaggtaaaa

SEQ ID NO: 579515 - DNA, 75 bp, synthetic construct
  source 1..75: mol_type = other DNA
ccggcaactggctgacatctcagttctgacggaaagcattggaggtaaaaccgcccgggactgggccatgaaaca

SEQ ID NO: 579516 - DNA, 75 bp, synthetic construct
  source 1..75: mol_type = other DNA
tgagctgggattacaaaaccaactcaccctgtaaattttgcagtaaaattatcgtcaacaatctggtgagatggg

SEQ ID NO: 579517 - DNA, 75 bp, synthetic construct
  source 1..75: mol_type = other DNA
tatcaccggacaacaggctgaccgactcgccgatctggaaagaatgttgcacctgttcagcggtaaaccaatccc

SEQ ID NO: 579518 - DNA, 75 bp, synthetic construct
  source 1..75: mol_type = other DNA
attcaccctgtaaatttggcagtaaaattatcgtcaacaatctggtgaggtgggacagatggggatttcatctga

SEQ ID NO: 579519 - DNA, 75 bp, synthetic construct
  source 1..75: mol_type = other DNA
atctgaagcactggatttggttgattctgatcgtagtcttggtgatcggcgtgcgctggtggctgaaacggcgcg

SEQ ID NO: 579520 - DNA, 75 bp, synthetic construct
  source 1..75: mol_type = other DNA
gtcggcgacggaaaaaaaaccggcatcaccaccaccattggcgttaacctgaccagttggctttcgacgacgggc

SEQ ID NO: 579521 - DNA, 75 bp, synthetic construct
  source 1..75: mol_type = other DNA
attaaagccgctaccgatggcgttagtaagaccctgaataaattaactaaagactacaacgccgccagcgatcgc

SEQ ID NO: 579522 - DNA, 75 bp, synthetic construct
  source 1..75: mol_type = other DNA
gggaatatcaccattaatctggatgaccacatacagtccgttcagggtaaaggacgctatgaagatgagatgttc

SEQ ID NO: 579523 - DNA, 75 bp, synthetic construct
  source 1..75: mol_type = other DNA
gctattcaggatttgtggatgttgctcaatggcgataaagccgagcagcggatgcaactggaaactattattgaa

SEQ ID NO: 579524 - DNA, 75 bp, synthetic construct
  source 1..75: mol_type = other DNA
tcggtggtcgccagttcgaagctgataatatcgatcagatggaagcggttgggcgttatttagggcgtatgcacc

SEQ ID NO: 579525 - DNA, 75 bp, synthetic construct
  source 1..75: mol_type = other DNA
aaaagcgcgttgacaactttccagaccgccaatacggcattgtctaaagccgatctgttttccgccaccagcacg

SEQ ID NO: 579526 - DNA, 75 bp, synthetic construct
  source 1..75: mol_type = other DNA
tctgagcacatttgaacaactgcaccagaaaaaggatgaggtgtttgatcggggcgtgatcaacgtcttcatagg

SEQ ID NO: 579527 - DNA, 75 bp, synthetic construct
  source 1..75: mol_type = other DNA
tctgagcacatttgaacaactgcaccagaaaaatgatgaggtgtttgaacggggcgtgatcaacgtcttcatagg

SEQ ID NO: 579528 - DNA, 75 bp, synthetic construct
  source 1..75: mol_type = other DNA
caaagagtggcgacaggaacaaggcgccgatgtgccactggcgtttattattggtcaggactcactgctgacttt

SEQ ID NO: 579529 - DNA, 75 bp, synthetic construct
  source 1..75: mol_type = other DNA
tctgagcacatttgaacaactgcaccagaagaatgatgaggtgtttgagcggggcgtgatcaacgtcttcatagg

SEQ ID NO: 579530 - DNA, 75 bp, synthetic construct
  source 1..75: mol_type = other DNA
tctgagcacatttgaacaactgcaccagaagaaagatgaggtgtttgatcggggcgtgatcaacgtcttcatagg

SEQ ID NO: 579531 - DNA, 75 bp, synthetic construct
  source 1..75: mol_type = other DNA
tctgagcacatttgaacaactgcaccagaacaatgatgaggtgtttgaccggggcgtgatcaacgtcttcatagg

SEQ ID NO: 579532 - DNA, 75 bp, synthetic construct
  source 1..75: mol_type = other DNA
aaggcaacggatgaacttattaccgccgttacagcgcactggcgggaggactttaccgttctgcgattacatggt

SEQ ID NO: 579533 - DNA, 75 bp, synthetic construct
  source 1..75: mol_type = other DNA
ttcaaatcaccagaagagattgccgtacttcgccgcgcgggggaaatcaccgccctggcgcatacccgggcgatg

SEQ ID NO: 579534 - DNA, 75 bp, synthetic construct
  source 1..75: mol_type = other DNA
gatgtggtttaccacgcccagggcgaatatgcatatgctgatgaaatcgtgaacagcgcgctggaaaaactgcgt

SEQ ID NO: 579535 - DNA, 75 bp, synthetic construct
  source 1..75: mol_type = other DNA
gtgatgtcgatgaactgatcgctcaaaacgcccaccgtcctttctttatgcatggccttagccattggttagggc

SEQ ID NO: 579536 - DNA, 75 bp, synthetic construct
  source 1..75: mol_type = other DNA
aatatggttatgccgcgctggtgatcggtagcctggcggaaggtgaaaccgtgactttgctgggaggcgttgcgg

SEQ ID NO: 579537 - DNA, 75 bp, synthetic construct
  source 1..75: mol_type = other DNA
tgaaaacctcaccgccagcgtagtgaaaaagccgggagaaattgaagcgttgatggctgctgcgagaaagcaatg

SEQ ID NO: 579538 - DNA, 75 bp, synthetic construct
  source 1..75: mol_type = other DNA
tctgcactacaccgaaaacgagtgtgaactgcgtgacggtgacctggtgttgattgacgcgggttgtgaatacaa

SEQ ID NO: 579539 - DNA, 75 bp, synthetic construct
  source 1..75: mol_type = other DNA
tcaatttcaggacgaagatcgccgacgctttgtcgttaaattttatcgtcctgaacgctggacagcctatcaaat

SEQ ID NO: 579540 - DNA, 75 bp, synthetic construct
  source 1..75: mol_type = other DNA
tcaatggcgataaagccgagcagcggatgcaactggaaactattattgaggcttatgaagaatttagcgagttcg

SEQ ID NO: 579541 - DNA, 75 bp, synthetic construct
  source 1..75: mol_type = other DNA
ggcgcgatggcccaatgtttgttgacctggatgatgcgcgtaatggccctgcaattcaggacctgtggatgttgc

SEQ ID NO: 579542 - DNA, 75 bp, synthetic construct
  source 1..75: mol_type = other DNA
cattgtgctggagtctctcgaaaccagcttgcgcctgtatcgtccgggaacttccatgcaggaagtcaccggtga

SEQ ID NO: 579543 - DNA, 75 bp, synthetic construct
  source 1..75: mol_type = other DNA
tggtcaggatcgctcgcgcattctggaaccgggcatggtactgaccgtagagccagggctgtatattgcgccgga

SEQ ID NO: 579544 - DNA, 75 bp, synthetic construct
  source 1..75: mol_type = other DNA
tcagactttattgaatcatcagggattttatttcgccgttttctcaagcgtcggtggtcgccagttcgaagctga

SEQ ID NO: 579545 - DNA, 75 bp, synthetic construct
  source 1..75: mol_type = other DNA
atgatgtaccagaccggcagtggcgcaaccgctacacagacccgtgacggtaatatggtgatggatgcgagcggg

SEQ ID NO: 579546 - DNA, 75 bp, synthetic construct
  source 1..75: mol_type = other DNA
tgtcaattcattgttgaatacgggttgcaaatatcattattaagaaagttaaatgaaaataagagtgatttaagt

SEQ ID NO: 579547 - DNA, 75 bp, synthetic construct
  source 1..75: mol_type = other DNA
acaatatctttactgccaatttttctaaaactaatgtcattgctaattgttgttatcttgttgagtaactttttt

SEQ ID NO: 579548 - DNA, 75 bp, synthetic construct
  source 1..75: mol_type = other DNA
agcgaagatttgtcgcaacagtttgcacagtatgtgatgaaacgcgcaccgcaggatgcagaagctattctgaca

SEQ ID NO: 579549 - DNA, 75 bp, synthetic construct
  source 1..75: mol_type = other DNA
gaggacagtattctgaactgcagaatcaccataaaacagaggcattatctcagaataataaatataatgaaggaa

SEQ ID NO: 579550 - DNA, 75 bp, synthetic construct
  source 1..75: mol_type = other DNA
acatggcgaggaaaatattgtaagaggacagtattctgaactgcagaatcaccataaaacagaagcattatctca

SEQ ID NO: 579551 - DNA, 75 bp, synthetic construct
  source 1..75: mol_type = other DNA
gccggatagcagttcatccggcgcgtcagcgggaaggcacagggcagcaacttattgctggtgctttgcaatata

SEQ ID NO: 579552 - DNA, 75 bp, synthetic construct
  source 1..75: mol_type = other DNA
aaaggtttatcagttattgtctggtgcgcactaccggacctcgccgctggatttacgccggatgatggatgcacc

SEQ ID NO: 579553 - DNA, 75 bp, synthetic construct
  source 1..75: mol_type = other DNA
gcgatcctgattaacgcctgccgtggcgcagtcgtcgataataccgccctgctgacctgcctgaacgaaggccag

SEQ ID NO: 579554 - DNA, 75 bp, synthetic construct
  source 1..75: mol_type = other DNA
aaaggtttatcagctattgtctggcgcgcactaccggacctcgccgctggatttacgccggatgatggatgcacc

SEQ ID NO: 579555 - DNA, 75 bp, synthetic construct
  source 1..75: mol_type = other DNA
actgttctccctcggcgctacaaactttacttgggcgcgagttccggcatgcggtattcgacgcccgccacggct

SEQ ID NO: 579556 - DNA, 75 bp, synthetic construct
  source 1..75: mol_type = other DNA
agcggggaagagggttggtgttttgatcatgctcttaagttgcgtgatgccttacctggcgactggctgtggatt

SEQ ID NO: 579557 - DNA, 75 bp, synthetic construct
  source 1..75: mol_type = other DNA
cgtggcgaggaaaatattgtaagaggacagtattctgaactgcagaatcaccataaaacagaggcattatctcag

SEQ ID NO: 579558 - DNA, 75 bp, synthetic construct
  source 1..75: mol_type = other DNA
ctcatgacctgtatgccaacgtcttcaaaaaaggcgcaactgaacgtgaagaactacgggtatcaaaaatcaccg

SEQ ID NO: 579559 - DNA, 75 bp, synthetic construct
  source 1..75: mol_type = other DNA
atcatgaaaccaggcggtctggtaaaagatcctatctctgctctgtcgctgggtctcggtttgatgtttggtacg

SEQ ID NO: 579560 - DNA, 75 bp, synthetic construct
  source 1..75: mol_type = other DNA
ggcggtacacccaaaaggtacagacatcatgaaaccaggcggtctggtaaaagatcctatctctgctctgtcgct

SEQ ID NO: 579561 - DNA, 75 bp, synthetic construct
  source 1..75: mol_type = other DNA
atcatgaagccgggcggattggtgaaagatcctatctccgcgctgtcgctgggtctggggctgatgtttggtacg

SEQ ID NO: 579562 - DNA, 75 bp, synthetic construct
  source 1..75: mol_type = other DNA
accgaacgtgaagagctgcgggtatcgaaaatcaccgtcctgattttgggtgtgattgcgattatcctcggcgtg

SEQ ID NO: 579563 - DNA, 75 bp, synthetic construct
  source 1..75: mol_type = other DNA
gtgggcggcaacctgttcctcggctttatttcagcggttgctttcgccactatcctcgcggtggttgcgggtctg

SEQ ID NO: 579564 - DNA, 75 bp, synthetic construct
  source 1..75: mol_type = other DNA
tcgcaaaatccgtccgatattccggataacgtgctcggccagctcggtaatcgcgttcaacacgctttgcggact

SEQ ID NO: 579565 - DNA, 75 bp, synthetic construct
  source 1..75: mol_type = other DNA
gatgaggtggaccgagaatccgcctatgagatgttgcaaaaaggctttcaggccagtaccgagcagcaaaataat

SEQ ID NO: 579566 - DNA, 75 bp, synthetic construct
  source 1..75: mol_type = other DNA
actgccgggaatggctaaccgtcacgggctgattactggcgcaacggggacgggtaaaactgtcacgctgcaaaa

SEQ ID NO: 579567 - DNA, 75 bp, synthetic construct
  source 1..75: mol_type = other DNA
tttacgccgaaagatcaaaaagcagtgaaagcggcggcgcaaacaatgcgtgccaatccagcatttgataccgaa

SEQ ID NO: 579568 - DNA, 75 bp, synthetic construct
  source 1..75: mol_type = other DNA
agatgagcgtaatggcttgattaatcactctccggtgtatagcaaatatgaagatgaggtggaccgcgagtccgc

SEQ ID NO: 579569 - DNA, 75 bp, synthetic construct
  source 1..75: mol_type = other DNA
gaaaggtgtgggcgtctggtttgtttcgcaaaacccgtctgatatccctgacaacgtgcttgggcagttgggaaa

SEQ ID NO: 579570 - DNA, 75 bp, synthetic construct
  source 1..75: mol_type = other DNA
ctgcgtaaagtcgccgggataccgggtgagttcgataaactgcgcaaaaactatcttgagcgccgtgaatggtca

SEQ ID NO: 579571 - DNA, 75 bp, synthetic construct
  source 1..75: mol_type = other DNA
tggtctggcgatcctgatagccattttttaccgaactgaatattcagtgtatgaccctggcgggcggtgcgctgc

SEQ ID NO: 579572 - DNA, 75 bp, synthetic construct
  source 1..75: mol_type = other DNA
cgccacattctggctgtacgaaagagtacactgctgcaaatcgacacacttatccggcaactggctgaaatatca

SEQ ID NO: 579573 - DNA, 75 bp, synthetic construct
  source 1..75: mol_type = other DNA
cgaaatctggcgtgacctgatgcaacgttcagggatgctgtcattaatggatgcacaggcccgtgatacatggta

SEQ ID NO: 579574 - DNA, 75 bp, synthetic construct
  source 1..75: mol_type = other DNA
aggtgatcagcggtgaagaggaagcacgtctgatttatcagggtgttgctcacaccactggcggtgccgatcagc

SEQ ID NO: 579575 - DNA, 75 bp, synthetic construct
  source 1..75: mol_type = other DNA
ggagctgcatccgctgggcaaagagattattgatcaagaaagccagtggcagagctacgtccactggccgttgga

SEQ ID NO: 579576 - DNA, 75 bp, synthetic construct
  source 1..75: mol_type = other DNA
cgttaacgcttccgcaaggttggctggagctgcatccgctgggcaaagagattattgatcaagaaagccagtggc

SEQ ID NO: 579577 - DNA, 75 bp, synthetic construct
  source 1..75: mol_type = other DNA
tgagcacatttgaacaactgcaccagaataacgatgatgtgtttgaccggggcgtgatcaacgtcttcatagggc

SEQ ID NO: 579578 - DNA, 75 bp, synthetic construct
  source 1..75: mol_type = other DNA
tgagcacatttgaacaactgcaccagaataacgatgaagtgtttgaccggggcgtgatcaacgtcttcagagggc

SEQ ID NO: 579579 - DNA, 75 bp, synthetic construct
  source 1..75: mol_type = other DNA
atcgcgaaatctggcgtgacctgatgcaacattccgggatgctgtcattaatggatacgcaggcccgtgatacat

SEQ ID NO: 579580 - DNA, 75 bp, synthetic construct
  source 1..75: mol_type = other DNA
tggaatgcaggcagatcgcctggctgacctggaaagaatgttgcatctgctcagcggtaaaccgatccccaacaa

SEQ ID NO: 579581 - DNA, 75 bp, synthetic construct
  source 1..75: mol_type = other DNA
tgagcacatttgaacaactgcaccagaataacgatgaggtgtttgaccggggcgtgatcaacgtcttcaaagggc

SEQ ID NO: 579582 - DNA, 75 bp, synthetic construct
  source 1..75: mol_type = other DNA
tgagcacatttgaacaactgcaccagaataacgatgacgtgtttgaccggggagtgatcaacgtcttcacagggc

SEQ ID NO: 579583 - DNA, 75 bp, synthetic construct
  source 1..75: mol_type = other DNA
cgttgacttcaaacaagcgccgcaacacgctgcttatctggtgcgtaatctggatcttcccggttttacccccgc

SEQ ID NO: 579584 - DNA, 75 bp, synthetic construct
  source 1..75: mol_type = other DNA
gcgattgctaccgcaattcacgatgcatgcggcatctggttacgcgaatggcatttcacaccggagaaaatactc

SEQ ID NO: 579585 - DNA, 75 bp, synthetic construct
  source 1..75: mol_type = other DNA
ggattttcgctgcggttgctggctgatggagaaacctgaaacggcaatgaaagccatcacccgcaatctcgatcg

SEQ ID NO: 579586 - DNA, 75 bp, synthetic construct
  source 1..75: mol_type = other DNA
tgtttgagcgaggggtgatcaacgtcttcaggggactgagctgggattacaaaaccaactcaccctgcaaatttg

SEQ ID NO: 579587 - DNA, 75 bp, synthetic construct
  source 1..75: mol_type = other DNA
accgaaaattcgcgaagcggtggaaaaagttaaggcagcaaaagctgtctggcaggaagaacggcgaaaacaaac

SEQ ID NO: 579588 - DNA, 75 bp, synthetic construct
  source 1..75: mol_type = other DNA
ggcgcgtctggatttcagtaatcaactctctccggcagctatgcataaaataaaggttcgtcaggaacttgctga

SEQ ID NO: 579589 - DNA, 75 bp, synthetic construct
  source 1..75: mol_type = other DNA
tcgagacccatgttacccggctatgggatgattttatgaagcagcatggtcaaacccttattcagcttttaagcc

SEQ ID NO: 579590 - DNA, 75 bp, synthetic construct
  source 1..75: mol_type = other DNA
gagcaggatattcgcagccgtacgctgcgtaatattcagcgccgctttatgatcgatattgatcaggcacagcgc

SEQ ID NO: 579591 - DNA, 75 bp, synthetic construct
  source 1..75: mol_type = other DNA
tggatcttcccggttttacccccgcacagaaaaaattgctggcgacgctactgctcaaccagactaacccggtcg

SEQ ID NO: 579592 - DNA, 75 bp, synthetic construct
  source 1..75: mol_type = other DNA
aggtgatcagcggtgaagaggaagcgcgtctgatttatcagggcgttgctcacaccactggtggtgccgatcagc

SEQ ID NO: 579593 - DNA, 75 bp, synthetic construct
  source 1..75: mol_type = other DNA
atgtcagatatcacaatctcccgcccggaactggtcaacagacatacggacgttatctgctcaaccagtatccgc

SEQ ID NO: 579594 - DNA, 75 bp, synthetic construct
  source 1..75: mol_type = other DNA
gtgctgacggaaagcatcggaggtaaaactgccccggactgggccatgaaacaggattttcgctgcggctgctgg

SEQ ID NO: 579595 - DNA, 75 bp, synthetic construct
  source 1..75: mol_type = other DNA
ttcaggaaaccagaactggttgacaggcttaatgagattattgcgaaacactatccgggagtgttaccttcataa

SEQ ID NO: 579596 - DNA, 75 bp, synthetic construct
  source 1..75: mol_type = other DNA
cattcagatgattaccctgaaattaatgcactaaaagaagaaatacgagttgctttaagtgctggtgatttcatt

SEQ ID NO: 579597 - DNA, 75 bp, synthetic construct
  source 1..75: mol_type = other DNA
cggtgatgggggcgattgtcgcgggactggcattattgctggtgtttatgtcagccagaaaacaacctgaggcag

SEQ ID NO: 579598 - DNA, 75 bp, synthetic construct
  source 1..75: mol_type = other DNA
gtaagtctgttcttctcattacctaaaggtggcgcaggggcgcgacctgaagtgaaaaaagagctggcggtatta

SEQ ID NO: 579599 - DNA, 75 bp, synthetic construct
  source 1..75: mol_type = other DNA
tgatgcttgccgttgtcaacgaagcgtgtgagatcgcaaatggcaatgatgttgccgcagcacgagaggatggca

SEQ ID NO: 579600 - DNA, 75 bp, synthetic construct
  source 1..75: mol_type = other DNA
ttttgtcagagtccatcggtgaaacaaccaacatgtaccgtaccggtaaagctgcaaacgtgcatgtggctcgta

SEQ ID NO: 579601 - DNA, 75 bp, synthetic construct
  source 1..75: mol_type = other DNA
atgcagacccgggataaccttgagcgcatggtggttatcaaggcatttatcgcggtacgggggctgggcctgcgg

SEQ ID NO: 579602 - DNA, 75 bp, synthetic construct
  source 1..75: mol_type = other DNA
tgaggctggcgcgaatgagatctcaggcgtggttgaatgggatatgagcatgtttaacgacacgccggattataa

SEQ ID NO: 579603 - DNA, 75 bp, synthetic construct
  source 1..75: mol_type = other DNA
acaaggcattagccaccatttaccccgtaacgcatgacgactggacaaactccgatgtatacggtgcaccatacc

SEQ ID NO: 579604 - DNA, 75 bp, synthetic construct
  source 1..75: mol_type = other DNA
tgggtccgctgacgtgggatgagaaaggtgatctgaaaggctttgagttcggcgtatttgactggcacgccaacg

SEQ ID NO: 579605 - DNA, 75 bp, synthetic construct
  source 1..75: mol_type = other DNA
ggcagcaagcgtggtgccaaaacataaacaggccagcgcagttgcaactatgtttatgggcttaacactggcgaa

SEQ ID NO: 579606 - DNA, 75 bp, synthetic construct
  source 1..75: mol_type = other DNA
ctgatggcgattttcacgctcggtaacgtactttctgccatcgcaccggactatatgacgctgatgctttcacgc

SEQ ID NO: 579607 - DNA, 75 bp, synthetic construct
  source 1..75: mol_type = other DNA
aaaaaccccaagcatgttcaggttatagaggtcactaatcattttccggggggggtactgggaagactagggtta

SEQ ID NO: 579608 - DNA, 75 bp, synthetic construct
  source 1..75: mol_type = other DNA
aaattgctgaccagctgggcgtttacgacccgtgcgccattgcctgcgaaccgttccgtcagtgggtgattgaag

SEQ ID NO: 579609 - DNA, 75 bp, synthetic construct
  source 1..75: mol_type = other DNA
gtcggggagacgctgaataaaggcggcgtttcgctgctggttaccgggatcgccgcccacgatggcgcgagtttt

SEQ ID NO: 579610 - DNA, 75 bp, synthetic construct
  source 1..75: mol_type = other DNA
gacctgccgctggaagcgaaatcggtgctcgattcgatggtgaacatcgacgcgcagctgaacgagctgacgttc

SEQ ID NO: 579611 - DNA, 75 bp, synthetic construct
  source 1..75: mol_type = other DNA
ggtatttttgccgatgatctgccgcagaatgccgactttgttggcgcggtgacggcggcatatcagcagctgtgc

SEQ ID NO: 579612 - DNA, 75 bp, synthetic construct
  source 1..75: mol_type = other DNA
caactggcgcaggcacagacgctgaccacccaaaatagtcaaaaagacagtaaagctgccatcgccaccagcgat

SEQ ID NO: 579613 - DNA, 75 bp, synthetic construct
  source 1..75: mol_type = other DNA
gaacttcgggtgatagcagcaatggcatggttgaaagcgtcaccgcgcagaacgccaaactgacggtcaataacg

SEQ ID NO: 579614 - DNA, 75 bp, synthetic construct
  source 1..75: mol_type = other DNA
tacggcaacgtttttggtcatcgcgggtttacccattcgctggtgtttgcgtttgttgtcccgctgttatgtgtg

SEQ ID NO: 579615 - DNA, 75 bp, synthetic construct
  source 1..75: mol_type = other DNA
aattatcggttcgatgaaagaagcgctgcatccggaaatcgacggttgcgaaggtattctcaacgcgatggcgcg

SEQ ID NO: 579616 - DNA, 75 bp, synthetic construct
  source 1..75: mol_type = other DNA
gcgtatgctgaacggcagccactctttcctggcgtacctcggttacctcggcggctatgaaactattgccgacac

SEQ ID NO: 579617 - DNA, 75 bp, synthetic construct
  source 1..75: mol_type = other DNA
tttcagcaacccgtctctgcgtcaccgtacctggcagattgcgatggacggcagccagaagttaccgcagcgtct

SEQ ID NO: 579618 - DNA, 75 bp, synthetic construct
  source 1..75: mol_type = other DNA
gcggccttcgccctgatgatgcaggaacaagcgccaacgctgtcgatgccggaaggtacggacctgaacgcctat

SEQ ID NO: 579619 - DNA, 75 bp, synthetic construct
  source 1..75: mol_type = other DNA
agtccgcgattggttacatcgtcgaagccctgcgtctgcgtcgtgaaaaagggttgaaagcgtttacggtgatgt

SEQ ID NO: 579620 - DNA, 75 bp, synthetic construct
  source 1..75: mol_type = other DNA
acggtcacggaaaaaggctactgcgctgatgcggcaagcggtcagctggatctcaataacccgctgatcaagcac

SEQ ID NO: 579621 - DNA, 75 bp, synthetic construct
  source 1..75: mol_type = other DNA
tggaccacctacgccgcgctgcaatctttgcaggcgggcctgaatcagtctgacgatccggctgaaatcgccaaa

SEQ ID NO: 579622 - DNA, 75 bp, synthetic construct
  source 1..75: mol_type = other DNA
ctgcgtatttatgaaggcggcgcgctggaatgtattctgaaccgttataagcccgcgtggcagacgtttatttac

SEQ ID NO: 579623 - DNA, 75 bp, synthetic construct
  source 1..75: mol_type = other DNA
gtacagtccatattgatatacacatgttgcgtaatgttaaaaaagatgacattattaattcagatggataccatc

SEQ ID NO: 579624 - DNA, 75 bp, synthetic construct
  source 1..75: mol_type = other DNA
ttaatctgtataagactatggcctatcagactgatgcattgctcattgagctggaagctttattttctgccggtt

SEQ ID NO: 579625 - DNA, 75 bp, synthetic construct
  source 1..75: mol_type = other DNA
gagaagacgcccggaaagcgtcattgttcatacggaccgtggtggtcaatactggttcaggggattatcaggcgc

SEQ ID NO: 579626 - DNA, 75 bp, synthetic construct
  source 1..75: mol_type = other DNA
gcatttatggcgaaggtcttacccgtaccaacaaatacgggcaattctcaattctgacgtttaccccgctgatgg

SEQ ID NO: 579627 - DNA, 75 bp, synthetic construct
  source 1..75: mol_type = other DNA
gtggaactggacgcgattcttgataacctgagcgacgaagagcaaatcgaattgctcgagctactcgaagaagaa

SEQ ID NO: 579628 - DNA, 75 bp, synthetic construct
  source 1..75: mol_type = other DNA
accctgattcttgtcgacggtaaacgcgttaactcccgcaatgccgtcttccgccacaatgatttcgatctgaac

SEQ ID NO: 579629 - DNA, 75 bp, synthetic construct
  source 1..75: mol_type = other DNA
cagaactttgtaggttttgaaaccggggctaatggtcgacgtgtaccggtattcagctactacaacgttaacaaa

SEQ ID NO: 579630 - DNA, 75 bp, synthetic construct
  source 1..75: mol_type = other DNA
accgttttccgcaacgatgtaaaagatcgtatcagcatcagccgtacgtctgacgtcaatgctgctccgggctac

SEQ ID NO: 579631 - DNA, 75 bp, synthetic construct
  source 1..75: mol_type = other DNA
atcgcagatgtgaatcctgatctggttaatctttataaggcgatggcgtatcacactgatgcgctgctgaatgag

SEQ ID NO: 579632 - DNA, 75 bp, synthetic construct
  source 1..75: mol_type = other DNA
gggtgggcagcaaagcccgccttatgccgcagttgcgtccccatttgccggaaggaaagcgcctggttgaaccgt

SEQ ID NO: 579633 - DNA, 75 bp, synthetic construct
  source 1..75: mol_type = other DNA
ttggtgcggcagctgcaagcccgaaaatggcggcggagctgattcttaaatggcctttaccggcgactcatgagg

SEQ ID NO: 579634 - DNA, 75 bp, synthetic construct
  source 1..75: mol_type = other DNA
gaataaacacaatatggcactggttactatcgaagatctggtggcttatcgtcaggcgcacgagcgtaaagccag

SEQ ID NO: 579635 - DNA, 75 bp, synthetic construct
  source 1..75: mol_type = other DNA
ctttgcaggcgggcctgaatcagtctgacgatccggcggagatcgctaaatacctgaaagcgaactcggttgata

SEQ ID NO: 579636 - DNA, 75 bp, synthetic construct
  source 1..75: mol_type = other DNA
acatagttgttggtctttttcagttggctgcgatcatggctggtcttgaatcgtggtggggactgcactggatag

SEQ ID NO: 579637 - DNA, 75 bp, synthetic construct
  source 1..75: mol_type = other DNA
tagaatcgcgctactggtaggccatgagcgtggaagtacagaaagtttcaaaacctattcacgaaatagcgcctc

SEQ ID NO: 579638 - DNA, 75 bp, synthetic construct
  source 1..75: mol_type = other DNA
cggtgatggggccgctgacctgggatgagaaaggtgatctgaaaggctttgagttcggcgtatttgactggcacg

SEQ ID NO: 579639 - DNA, 75 bp, synthetic construct
  source 1..75: mol_type = other DNA
tctgacatctacgaagacgaaggcattttaatgatcaccccagcggcaaccgcgccggagctgaccgcccgtggc

SEQ ID NO: 579640 - DNA, 75 bp, synthetic construct
  source 1..75: mol_type = other DNA
gcctgaagaaaggcaatgctaacgtggtgttctttgacggcatcaccgccggggaaaaagatttctcaacgctgg

SEQ ID NO: 579641 - DNA, 75 bp, synthetic construct
  source 1..75: mol_type = other DNA
ggcggatgggaaacgctcaacgtggcatacgcagcgtttcacgcgggctaagcggcaggcgttgggagagaaggc

SEQ ID NO: 579642 - DNA, 75 bp, synthetic construct
  source 1..75: mol_type = other DNA
cggatcaatgaaatatgtacgctgcgtgagagcagtattaaaaccatcgagggcgttttgtgctttgagatcacc

SEQ ID NO: 579643 - DNA, 75 bp, synthetic construct
  source 1..75: mol_type = other DNA
gcatcatttggtgcatcggttcaggcttgcccttccctacttaaaatgcgcgatctgtatcttctccaatacagc

SEQ ID NO: 579644 - DNA, 75 bp, synthetic construct
  source 1..75: mol_type = other DNA
gactcgcttacggaatctgcttaagccacaaggcggctcatctgtagaccaaatcattgatgagctacgccgtgt

SEQ ID NO: 579645 - DNA, 75 bp, synthetic construct
  source 1..75: mol_type = other DNA
gactcgcttacggaatctgctaaagccgcaaggcggctcgtctgtagatcaaatcattgatgagctacgccgtgt

SEQ ID NO: 579646 - DNA, 75 bp, synthetic construct
  source 1..75: mol_type = other DNA
agacgtactcaaaacactcagcgtcaccgaaggagctatcaaaatatgtcgagatggtaatatacaaatcagaaa

SEQ ID NO: 579647 - DNA, 75 bp, synthetic construct
  source 1..75: mol_type = other DNA
tgagctgggattacaaaaccaactcaccctgtaaatttggcagtaaaattatcgtcaacaacctggtgaggtggg

SEQ ID NO: 579648 - DNA, 75 bp, synthetic construct
  source 1..75: mol_type = other DNA
aacgatccagctgcagctctgattatcaccgatcttctcgatcgcatcgacgcacctacccgcgaagagatcgac

SEQ ID NO: 579649 - DNA, 75 bp, synthetic construct
  source 1..75: mol_type = other DNA
ggattttcgctgcggttgctggctaatggagaaacccgaaacagcaatgaaagccattacccggaatcttgaccg

SEQ ID NO: 579650 - DNA, 75 bp, synthetic construct
  source 1..75: mol_type = other DNA
cccctgcaaatttggcagtaaaattatcgtcaacaacctagtgaggtgggaccggtgggggtttcatcttatcac

SEQ ID NO: 579651 - DNA, 75 bp, synthetic construct
  source 1..75: mol_type = other DNA
atgacagtaagtattggcggtaaaactgcactggactgggccatgaaacaggattttcgctgcggtttctggctg

SEQ ID NO: 579652 - DNA, 75 bp, synthetic construct
  source 1..75: mol_type = other DNA
ttgagcgaggggtgatcaacgtcttcagagggctgaactggaattacaaaaccaattgcccctgtaaatttggca

SEQ ID NO: 579653 - DNA, 75 bp, synthetic construct
  source 1..75: mol_type = other DNA
atgaagatgagatgttcatcattaaatactttaagaagggatctgcacacatcactttcaaaaggctggagctga

SEQ ID NO: 579654 - DNA, 75 bp, synthetic construct
  source 1..75: mol_type = other DNA
agatcgcctggctgacctggaaagaatgttgcatctgctcagcggtaaaccgatccccgacaaccgagggaatat

SEQ ID NO: 579655 - DNA, 75 bp, synthetic construct
  source 1..75: mol_type = other DNA
ggcaactggctgaaatctcagttctgacggaaagcattggaggtaaaaccacccgggactgggccatgaaacagg

SEQ ID NO: 579656 - DNA, 75 bp, synthetic construct
  source 1..75: mol_type = other DNA
cgcatatcacgttcagaaaaccagaactggttgatcggctaaatgacatcattgcgaagtattatccagaaataa

SEQ ID NO: 579657 - DNA, 75 bp, synthetic construct
  source 1..75: mol_type = other DNA
gcaatgacagaaagtattggcggtaaaaccgcactggactgggcgatgaaacaggattttcgctgtggctgctgg

SEQ ID NO: 579658 - DNA, 75 bp, synthetic construct
  source 1..75: mol_type = other DNA
tacgtcagcagctcattgtggcgaccgcagatctgagcggggcgacgaaagggcagctggtagctttcgccgaga

SEQ ID NO: 579659 - DNA, 75 bp, synthetic construct
  source 1..75: mol_type = other DNA
tcagaaaaccggaactgattgatcggctaaatgacatcattgcgaagtattatccagaaataatcccatacaata

SEQ ID NO: 579660 - DNA, 75 bp, synthetic construct
  source 1..75: mol_type = other DNA
caaaccgattcccgacaaccgggaaaacataaccattcatctggatgctcacatccactcagttcagggtaaagc

SEQ ID NO: 579661 - DNA, 75 bp, synthetic construct
  source 1..75: mol_type = other DNA
tgaagatgagatgttcaacatcagatactttaagaagggctccgcacacatcacgttcaggaaaccagaactggt

SEQ ID NO: 579662 - DNA, 75 bp, synthetic construct
  source 1..75: mol_type = other DNA
ctgatggagaaacctgaaaccgcaatgaaagccatcacccgcaacctcgactgcgaaatctggcgtgacctgatg

SEQ ID NO: 579663 - DNA, 75 bp, synthetic construct
  source 1..75: mol_type = other DNA
aaacggtgaatcgtgtgaggatttgttgccggaatcagtattgacctacattaaccaacaaggcttgtattgctg

SEQ ID NO: 579664 - DNA, 75 bp, synthetic construct
  source 1..75: mol_type = other DNA
aacggtgaatcgtgtgaggatttattgccggaaccggtactgacttacattaaccaacaaggcttgtatcgctga

SEQ ID NO: 579665 - DNA, 75 bp, synthetic construct
  source 1..75: mol_type = other DNA
aagatcttcaccttcagcctgccggtaaaatttatctggctgaaacgccgtggtttaacatctcggcgaccatca

SEQ ID NO: 579666 - DNA, 75 bp, synthetic construct
  source 1..75: mol_type = other DNA
cactgcaacaaaccgaaatgcttatccggaaactggctgaaatctcagcaatgacagaaagtattggcggtaaaa

SEQ ID NO: 579667 - DNA, 75 bp, synthetic construct
  source 1..75: mol_type = other DNA
tgagtacgtttgaacaactgcaccagaataaggatgacgtgtttgagcgaggtgtgatcaacctcttcaggggac

SEQ ID NO: 579668 - DNA, 75 bp, synthetic construct
  source 1..75: mol_type = other DNA
atgacagaaagcattggcggtaaaaccgcactggactgggccatgaaacaggattttcgctgcggttgctggctg

SEQ ID NO: 579669 - DNA, 75 bp, synthetic construct
  source 1..75: mol_type = other DNA
cactgctgcaaatcgacacgcttatccggcaactgacagaaatctcagcactgacggaaagtattggcggtaaag

SEQ ID NO: 579670 - DNA, 75 bp, synthetic construct
  source 1..75: mol_type = other DNA
cacgttcaggaaaccagaactggttgacaggcttaatgatattattgccaagcactatcccggagcgttagcgat

SEQ ID NO: 579671 - DNA, 75 bp, synthetic construct
  source 1..75: mol_type = other DNA
ccggtcactggagtacaataatttgccggaaatcagtgaagcgaacattatgagcacatttgaacaactgcacca

SEQ ID NO: 579672 - DNA, 75 bp, synthetic construct
  source 1..75: mol_type = other DNA
atgcgcagacccgtgatacatggtaccgatcactggagtacgataattttccggaaatcagtgaagagaatattc

SEQ ID NO: 579673 - DNA, 75 bp, synthetic construct
  source 1..75: mol_type = other DNA
ccttctattgccacaggctatgaagattttatgataaatatttcgcctgaatttatttcttcgcgtgataatgat

SEQ ID NO: 579674 - DNA, 75 bp, synthetic construct
  source 1..75: mol_type = other DNA
atggcggacagtgaatttcagcgcccgacgctggcagaaaatatcagtatgctctgtaacgatttattcgccagg

SEQ ID NO: 579675 - DNA, 75 bp, synthetic construct
  source 1..75: mol_type = other DNA
ggcgttgcaacgcgcctatgaggtttacggcgtgccaccagaaattatcgtcggaatcattggggttgagactcg

SEQ ID NO: 579676 - DNA, 75 bp, synthetic construct
  source 1..75: mol_type = other DNA
aacaatgtgttgatgatgaccggggttagcccgtcaatcggtaaaacctttgtctgcgccaacctggcggcggtg

SEQ ID NO: 579677 - DNA, 75 bp, synthetic construct
  source 1..75: mol_type = other DNA
tcgttttcagcgtggcagacgagcgtggccttctcttgattgatttgatggacctacgggctatgctcaattttg

SEQ ID NO: 579678 - DNA, 75 bp, synthetic construct
  source 1..75: mol_type = other DNA
caatagcacaagatagctcaattaaaaatggttattatgccgaatattcaaaagtatatgaggagattagatctt

SEQ ID NO: 579679 - DNA, 75 bp, synthetic construct
  source 1..75: mol_type = other DNA
gacactgaccatcagtaaagacacatccaaagctgaaaatgcggttaaagcgtgggtggatgcctataactcatt

SEQ ID NO: 579680 - DNA, 75 bp, synthetic construct
  source 1..75: mol_type = other DNA
cgtgggtggatgcctataacacattgcaggatacattcagcagcttaaccaaatacaccgctgtcgatgccggag

SEQ ID NO: 579681 - DNA, 75 bp, synthetic construct
  source 1..75: mol_type = other DNA
ttgagattgaaaacagcagtaacactatcagcgacgcactggaagatatcaccctcaacctgaatgacgtcacca

SEQ ID NO: 579682 - DNA, 75 bp, synthetic construct
  source 1..75: mol_type = other DNA
gttgctggtggcactggcggcgatcatcgtagaccgcctgtttgaacggctggtgcagcgacttagccagcacgc

SEQ ID NO: 579683 - DNA, 75 bp, synthetic construct
  source 1..75: mol_type = other DNA
gcccactggtggaaactattgccgccgttgggcagacttttccgcccgtcgcggtgctggcgattgccgttccgg

SEQ ID NO: 579684 - DNA, 75 bp, synthetic construct
  source 1..75: mol_type = other DNA
agtagggcagaccttcccgccagtggcggtactggcgctcgccgttccggttatcgggtttggtctgcaacctgc

SEQ ID NO: 579685 - DNA, 75 bp, synthetic construct
  source 1..75: mol_type = other DNA
tcggcctgatgctttctatcgtgggtgtactgctgcgctcgttgtttaatcgcggcatcgaaagcccacaggtgc

SEQ ID NO: 579686 - DNA, 75 bp, synthetic construct
  source 1..75: mol_type = other DNA
tggggatttcatcttatcagtggaatgcaggcagatcgcctggctgacctggaaagaatgttgcatctgctcagc

SEQ ID NO: 579687 - DNA, 75 bp, synthetic construct
  source 1..75: mol_type = other DNA
accggctggttgttgtggtacttttgctttccttcttcgcactcgctctccggtgagttgcactggcagtggttc

SEQ ID NO: 579688 - DNA, 75 bp, synthetic construct
  source 1..75: mol_type = other DNA
acctctggcggtaattccattttcaccgtttgtttcatccattggtttattaacccagactggcgattacacgcg

SEQ ID NO: 579689 - DNA, 75 bp, synthetic construct
  source 1..75: mol_type = other DNA
gccattacccgcaaccttgaccgtgaaatctggcgtgacctgatgcaacgctccgggatgctgtcattaatggat

SEQ ID NO: 579690 - DNA, 75 bp, synthetic construct
  source 1..75: mol_type = other DNA
ggcaactggcagaaatctcagtactgacagaaagtattggaggtaaaaccgccctggactgggcgatgaaacagg

SEQ ID NO: 579691 - DNA, 75 bp, synthetic construct
  source 1..75: mol_type = other DNA
gacaaggataagcagcgcatggtcaacccggatggtccgccgatgagcggcagccagtcacgcgctaagggctcg

SEQ ID NO: 579692 - DNA, 75 bp, synthetic construct
  source 1..75: mol_type = other DNA
ttttttatcgccaacgaagtttcgccacgttttgatcatctggtgaaagaagataccggttttattggcttcaaa

SEQ ID NO: 579693 - DNA, 75 bp, synthetic construct
  source 1..75: mol_type = other DNA
tacggcaatgtttttggtcatcgcggatttacccattcgctggtatttgcgtttgttgtcccgttgctatgcgta

SEQ ID NO: 579694 - DNA, 75 bp, synthetic construct
  source 1..75: mol_type = other DNA
atgccaaccgttattacgcacgccgccgttcccctttgcattggtttagggttgggttcgaaaggtctgttattt

SEQ ID NO: 579695 - DNA, 75 bp, synthetic construct
  source 1..75: mol_type = other DNA
tatccctttacccgtgagtagtgcggtcatgctggtttcttatctgcctttactctttccgcgctggtgtttagc

SEQ ID NO: 579696 - DNA, 75 bp, synthetic construct
  source 1..75: mol_type = other DNA
ttcaaggctggcgacgtcagcgaaagtgcggataacggtagaatttttacgccagtattttgccgagcactaccc

SEQ ID NO: 579697 - DNA, 75 bp, synthetic construct
  source 1..75: mol_type = other DNA
tcaaggctggcgacatccgcaaaagtacggattacggtagagtttttgcgccagtattttgcaaatcattacccg

SEQ ID NO: 579698 - DNA, 75 bp, synthetic construct
  source 1..75: mol_type = other DNA
ctcgtagcgactactacaccgcaggcggcaatatcaccggtttccagaacgggctggcgattgccggggactata

SEQ ID NO: 579699 - DNA, 75 bp, synthetic construct
  source 1..75: mol_type = other DNA
cttggataccatgacactgccgaacttgccgctgcggcttttgaggccgccagaattaaatatcataccgtttaa

SEQ ID NO: 579700 - DNA, 75 bp, synthetic construct
  source 1..75: mol_type = other DNA
tggtacaagtttttctcattacggaggtaatttcgacattgggtctggtcattcaatcaataactatgaccaaat

SEQ ID NO: 579701 - DNA, 75 bp, synthetic construct
  source 1..75: mol_type = other DNA
atgtatcccaaactggcaaaagcctaccccaccaataaattgccggatttacgcggtgaatttatccgtggctgg

SEQ ID NO: 579702 - DNA, 75 bp, synthetic construct
  source 1..75: mol_type = other DNA
ctgcttatggagttaactcaactggtacttcaagaacgggttttacagcccgtatgtcaggcgccggtgggttta

SEQ ID NO: 579703 - DNA, 75 bp, synthetic construct
  source 1..75: mol_type = other DNA
cagaacaacctggacgagactgctggtgagttgatcgaaaacatccagcgggatgatttgactccggtagagatt

SEQ ID NO: 579704 - DNA, 75 bp, synthetic construct
  source 1..75: mol_type = other DNA
accttgctgaccgaagggcagcagtctccgatcatcgtgttcccgaagaacgaagaaggcaagttcgtcatccaa

SEQ ID NO: 579705 - DNA, 75 bp, synthetic construct
  source 1..75: mol_type = other DNA
ctgacccatgtggaggcggcgaaagccctgcgcgagaagtttggcgctaacggccatatctggacgccggaacat

SEQ ID NO: 579706 - DNA, 75 bp, synthetic construct
  source 1..75: mol_type = other DNA
gcgatgtggcgcaggtggtgctgaccggtgaggacggtcacgagacgttcttcctggtcgaggaggtcagaaaga

SEQ ID NO: 579707 - DNA, 75 bp, synthetic construct
  source 1..75: mol_type = other DNA
gtcagtggttattcgggagtgagtcatttcagtgatgcctccctgcgtcaggttgaaggtgcgtatggtgcacag

SEQ ID NO: 579708 - DNA, 75 bp, synthetic construct
  source 1..75: mol_type = other DNA
cgcggatgcagtggaaaccctgcgggctaatggctttatctccgcaggcagaacagatgaaaccaccggtgagtt

SEQ ID NO: 579709 - DNA, 75 bp, synthetic construct
  source 1..75: mol_type = other DNA
cgcggatgcggtggagaccctgcggtcaaacggctttatcactgctggcagaacggacgaggccacaggcgagtt

SEQ ID NO: 579710 - DNA, 75 bp, synthetic construct
  source 1..75: mol_type = other DNA
cgcagatgcagtggaaaccctacgggctaacggctttatcaccgcaggcagaacagatgaaaccaccagtgagtt

SEQ ID NO: 579711 - DNA, 75 bp, synthetic construct
  source 1..75: mol_type = other DNA
ctgacgggctaatcattcagatggttactgtaagtataagcggtccagtggcgatgaatggaatgactgataatg

SEQ ID NO: 579712 - DNA, 75 bp, synthetic construct
  source 1..75: mol_type = other DNA
caaccgctggacaatacgctgactcatttgagtggaaaggatgttgccggtcttctcgtataccttggtttggga

SEQ ID NO: 579713 - DNA, 75 bp, synthetic construct
  source 1..75: mol_type = other DNA
atgaatatatatatcggatggttgtttaaattaattcctttgctgatgggtataatatgcatcgcattaggtgtg

SEQ ID NO: 579714 - DNA, 75 bp, synthetic construct
  source 1..75: mol_type = other DNA
ctattgttcatcaaacgcggaacacattctcagcgaaagaacattggctctggtgttattgggttatttttctcg

SEQ ID NO: 579715 - DNA, 75 bp, synthetic construct
  source 1..75: mol_type = other DNA
aatgggctggctaaagtcgtttatccaattgcactacctaagctttcacgttttatcagcatagcggaaagaata

SEQ ID NO: 579716 - DNA, 75 bp, synthetic construct
  source 1..75: mol_type = other DNA
actaaccggttttaattccgcttacagaactgcatcaaccagctccacagtatcgatgaattacagttggtgggc

SEQ ID NO: 579717 - DNA, 75 bp, synthetic construct
  source 1..75: mol_type = other DNA
ttttcataaacgttggtttgggagaagcggctaaaagaaatgtagggacaggggcgaatcagatacctgatatgg

SEQ ID NO: 579718 - DNA, 75 bp, synthetic construct
  source 1..75: mol_type = other DNA
cacgcccccttcatttcaccctttggcctgtaactcaatgatattatgctcaagttttgcgatgagcgtaatcag

SEQ ID NO: 579719 - DNA, 75 bp, synthetic construct
  source 1..75: mol_type = other DNA
ctggacacactgaaagaaattgccgcagccattaacaatgacccgaaattcagtaccaccattaacaatgcgctg

SEQ ID NO: 579720 - DNA, 75 bp, synthetic construct
  source 1..75: mol_type = other DNA
tggggtgttttctgcacaaaggcaacttatgcgcaagttgtgacgtcatgcgaatcagtcacagcaacaggtttc

SEQ ID NO: 579721 - DNA, 75 bp, synthetic construct
  source 1..75: mol_type = other DNA
taacgatcccgttaattatttcaggttcccggagaacactgattattcagtgggggcaggcgagatttggtgggt

SEQ ID NO: 579722 - DNA, 75 bp, synthetic construct
  source 1..75: mol_type = other DNA
ctgacgaaaccgctggggatcggcgttcttaccacggctgagaaaaaatcactgctgaaaccagaacatcaggga

SEQ ID NO: 579723 - DNA, 75 bp, synthetic construct
  source 1..75: mol_type = other DNA
ccatatttccgatgatgattggcggtacgcgtaagacgcttattatgcaatggggagtaatgacatctctgagat

SEQ ID NO: 579724 - DNA, 75 bp, synthetic construct
  source 1..75: mol_type = other DNA
acggtggcaggcagtggtgaattacgtctgaacggcgcaattccggaacggtggcaaatatcgttgccgataagt

SEQ ID NO: 579725 - DNA, 75 bp, synthetic construct
  source 1..75: mol_type = other DNA
atgagcgagcaacgcgtggtggtaatggggctgggcaacctgctgtgggccgatgaaggcttcggcgtgcgggtg

SEQ ID NO: 579726 - DNA, 75 bp, synthetic construct
  source 1..75: mol_type = other DNA
ctgtctcaattatgactgtctgtcgatggaaaattacgaaggcgttcgcttgcgccagtaccggatgacactgga

SEQ ID NO: 579727 - DNA, 75 bp, synthetic construct
  source 1..75: mol_type = other DNA
ctgtctcaattatgactgtctgtcgatggaaaattacgaaggcgtgcgtttgcgtcagtatcggatgacgctgga

SEQ ID NO: 579728 - DNA, 75 bp, synthetic construct
  source 1..75: mol_type = other DNA
tttgaaatcggtgtcttcttctcacgcttttacgttggtaaggggcgaaatcgggaagaggaaaacgacgctgaa

SEQ ID NO: 579729 - DNA, 75 bp, synthetic construct
  source 1..75: mol_type = other DNA
atccagatgtaaacggcgagatgaattggagtgcgtacaatggcacattgtatagcagctattacatcactgttc

SEQ ID NO: 579730 - DNA, 75 bp, synthetic construct
  source 1..75: mol_type = other DNA
ttgtctcaattatgactgtctgtcgatggaaaattacgaaggtgttcgcttgcgtcagtatcggatgacactgga

SEQ ID NO: 579731 - DNA, 75 bp, synthetic construct
  source 1..75: mol_type = other DNA
atcggttcggcgttagccaacaaaccgccagcatcggacgccgagatccagttgattcgatcgcgtctggtgctc

SEQ ID NO: 579732 - DNA, 75 bp, synthetic construct
  source 1..75: mol_type = other DNA
cctctgtgctgtgatatacaccttcttcgccacgccgatttatagcgccgacgcactggtacaaatcgaacaaag

SEQ ID NO: 579733 - DNA, 75 bp, synthetic construct
  source 1..75: mol_type = other DNA
tgattggcatcaccgccgtgttcgccctctgtgctgtgatatacaccttcttcgccacgccgatttatagcgccg

SEQ ID NO: 579734 - DNA, 75 bp, synthetic construct
  source 1..75: mol_type = other DNA
cctctgtgccgtggtttacaccttcttcgccacgccgatttatagcgccgacgcactggtacaaatcgagcaaag

SEQ ID NO: 579735 - DNA, 75 bp, synthetic construct
  source 1..75: mol_type = other DNA
aaagaggcggaaatctccaagctgtacaccaaagttcacccggcgtatcgcacgctgctggagaaacggcaggcg

SEQ ID NO: 579736 - DNA, 75 bp, synthetic construct
  source 1..75: mol_type = other DNA
cgtgttgctgcgctcactgtttaatcgcggtattgaaagcccgcaggtgctggaagaacatggcatcagcgttta

SEQ ID NO: 579737 - DNA, 75 bp, synthetic construct
  source 1..75: mol_type = other DNA
ggaaggggtacaggtatccaccgacatcgccagctatttaagcttcgttatggcgttgtttatggcgtttggtgt

SEQ ID NO: 579738 - DNA, 75 bp, synthetic construct
  source 1..75: mol_type = other DNA
cgcagatgcagtggaaaccctgcgggctaacggctttatcaccgcaggcagaacagatgaaaccaccggtgagtt

SEQ ID NO: 579739 - DNA, 75 bp, synthetic construct
  source 1..75: mol_type = other DNA
aagttccggccggttcacagtctggaagaactcaaggcgctggccgcgaaatggcgcagccactttaacgccacg

SEQ ID NO: 579740 - DNA, 75 bp, synthetic construct
  source 1..75: mol_type = other DNA
gtgcttatcaacgccatgcaggagcgtggcggcgcagacgtgctgcacggcgtgccaaaaatactctatctcgac

SEQ ID NO: 579741 - DNA, 75 bp, synthetic construct
  source 1..75: mol_type = other DNA
tgcacccagaacaactggatgcccctgcgccgcataccgaagtggccagtctgcatcccaatcacgtctggcaga

SEQ ID NO: 579742 - DNA, 75 bp, synthetic construct
  source 1..75: mol_type = other DNA
acgagtttggctttgctgaaagcgcggcggtatttggcgaaagttacaaagccctgccggaaaccccggcgcaga

SEQ ID NO: 579743 - DNA, 75 bp, synthetic construct
  source 1..75: mol_type = other DNA
accagaactccgcaaagtcacgccaaaacttcgtgtctcgttccggggcactgaatttgacgtatcaacggtacc

SEQ ID NO: 579744 - DNA, 75 bp, synthetic construct
  source 1..75: mol_type = other DNA
gcggcgcgctgaagggcgacagaatgcaggtatctggcctacgtgatatccctagcccgtctatcacagacgtcc

SEQ ID NO: 579745 - DNA, 75 bp, synthetic construct
  source 1..75: mol_type = other DNA
gctcgacagtgccctggcgcagcaccgtgccgtctcgttcatccgggtggatttacggtttcctgagtatatgcc

SEQ ID NO: 579746 - DNA, 75 bp, synthetic construct
  source 1..75: mol_type = other DNA
tttgaaatcggtgtcttcttctcacgcttttacgttggtaagggtcgaaaccgggaagaagaaaacgacgctgaa

SEQ ID NO: 579747 - DNA, 75 bp, synthetic construct
  source 1..75: mol_type = other DNA
taccgccagttaacggcacagtagccggacggcgtaccggaagcggcactggatgaagtcatggccacgctgacc

SEQ ID NO: 579748 - DNA, 75 bp, synthetic construct
  source 1..75: mol_type = other DNA
gcgcgcctcaggagctaaccgttaatccaggtgaaaacgtgcaaaagctgttgtttaacatgggaatgcactctg

SEQ ID NO: 579749 - DNA, 75 bp, synthetic construct
  source 1..75: mol_type = other DNA
tgcacccggatcagctcagtcagcccgcgccggtgacggaactcgccagcctgcaccccaatcacgtctgggaaa

SEQ ID NO: 579750 - DNA, 75 bp, synthetic construct
  source 1..75: mol_type = other DNA
tctccgtttcttccaccataccgttctgattgaagaaggaacaacgctggcaagtatctttctggctatatttta

SEQ ID NO: 579751 - DNA, 75 bp, synthetic construct
  source 1..75: mol_type = other DNA
ctatgtcaccgcgctgtgtcttgaatatgacgatatggtcagggctaaggtcaaaatccataccacgctttcgaa

SEQ ID NO: 579752 - DNA, 75 bp, synthetic construct
  source 1..75: mol_type = other DNA
gaacctcagcaacagggtaaatataaagttttccccgttgaagcggttttggctgctgagaagttgaatgagttt

SEQ ID NO: 579753 - DNA, 75 bp, synthetic construct
  source 1..75: mol_type = other DNA
tcgcgcctcgcgagcgcataaatatatcgtatgtcccaaaaacggacggtcagacggctgaagtagagcttccgc

SEQ ID NO: 579754 - DNA, 75 bp, synthetic construct
  source 1..75: mol_type = other DNA
acttcaggccttactggaaaacgaggaatcccgggagcagttactcagggaaatcggtctggtaagcggaaagta

SEQ ID NO: 579755 - DNA, 75 bp, synthetic construct
  source 1..75: mol_type = other DNA
ccattgctatccatccagaacacgatagccaataccgatcccttctttcttcttcgcttctttgaagtggtttac

SEQ ID NO: 579756 - DNA, 75 bp, synthetic construct
  source 1..75: mol_type = other DNA
aacccggccagcccggcttacggtaaatataccgacgcgacgggtaaaaactatggcgcagcccagccaggccgc

SEQ ID NO: 579757 - DNA, 75 bp, synthetic construct
  source 1..75: mol_type = other DNA
taaataaattcaatgattttaaagataattttaatggcctgggaatcagcattcatgatatctcagctcaaaaaa

SEQ ID NO: 579758 - DNA, 75 bp, synthetic construct
  source 1..75: mol_type = other DNA
ataaaacacttatcgaagatctgattgaacattttagatatggaaatggcagcaattttcatagccaacaattaa

SEQ ID NO: 579759 - DNA, 75 bp, synthetic construct
  source 1..75: mol_type = other DNA
gcaaaagcgccgaatgtaccaccgcgtacaacaatgcgctgaaagaagccgaacgtactgcgccgaaatacgcca

SEQ ID NO: 579760 - DNA, 75 bp, synthetic construct
  source 1..75: mol_type = other DNA
cagccctgaggcattgccacagtattaccagtcgctactggaagaacagcagcaactggacgatcaggccgactc

SEQ ID NO: 579761 - DNA, 75 bp, synthetic construct
  source 1..75: mol_type = other DNA
cagattgctgaagccagtgatgaactgcgccactactgcgatcgtctggatctcgatcccaaccgactgtttgaa

SEQ ID NO: 579762 - DNA, 75 bp, synthetic construct
  source 1..75: mol_type = other DNA
tattcttcattaatcggtaattgcctcattgccgttcccgtattactcaccctgctcggtttcatttggtcgata

SEQ ID NO: 579763 - DNA, 75 bp, synthetic construct
  source 1..75: mol_type = other DNA
atccacaatggtcgtttgaatgcgttcgtcggacagctgacgtaattgaagattctatagcccgggcaatgatga

SEQ ID NO: 579764 - DNA, 75 bp, synthetic construct
  source 1..75: mol_type = other DNA
gctattttaaaaaaccgccttaaattcacggcgacgggacagggggtgaggggcaattcatggagcgtagagatt

SEQ ID NO: 579765 - DNA, 75 bp, synthetic construct
  source 1..75: mol_type = other DNA
gcacctcggaacagacgttgtcgagtcgataaacgcatatctgcacaaattagaggagcagggtgcgattaacgg

SEQ ID NO: 579766 - DNA, 75 bp, synthetic construct
  source 1..75: mol_type = other DNA
ccagtattcatggtcatattggcgatatggacaaaggctttgccgatgccgatgtgatcattgagcgaacctata

SEQ ID NO: 579767 - DNA, 75 bp, synthetic construct
  source 1..75: mol_type = other DNA
cggaacaataaaattaacgctcgggaccgacagcacaacaacgccggaacggctggcgcaagacgtagtgactca

SEQ ID NO: 579768 - DNA, 75 bp, synthetic construct
  source 1..75: mol_type = other DNA
tattatcgacggtgtcaaacagctggaaaaatcgaaacagttaaccgaagtcacaccgcgtattattattgcacc

SEQ ID NO: 579769 - DNA, 75 bp, synthetic construct
  source 1..75: mol_type = other DNA
cacgcacgctcgaatacgacgacggaacaaaagagatcagcacggtcgatatttccgttatcggtatcgtcggca

SEQ ID NO: 579770 - DNA, 75 bp, synthetic construct
  source 1..75: mol_type = other DNA
aatcatacaaaaattaacggaagaattagaaactgctgaagcttataattcttcaacatgggaagactcagagat

SEQ ID NO: 579771 - DNA, 75 bp, synthetic construct
  source 1..75: mol_type = other DNA
tcattgatactgagttttttgtaaaagcaaacctggacttcaactcaaaaactataaaatcatttgaagaactat

SEQ ID NO: 579772 - DNA, 75 bp, synthetic construct
  source 1..75: mol_type = other DNA
aactccggggagtgtgttatatcgactctccgcgcgctgctacccctgcagacgttgtgaatcgcaggcaaaaac

SEQ ID NO: 579773 - DNA, 75 bp, synthetic construct
  source 1..75: mol_type = other DNA
tcatcgctggctgataatctcgttgagttttcaactgtatcaccgggcagcgacgggaataaatgggttgttgaa

SEQ ID NO: 579774 - DNA, 75 bp, synthetic construct
  source 1..75: mol_type = other DNA
aaacaaaaatgaggcagaacgtcgttaacgggattaacgcattgttgacgtctgcacaaataaatcaagtgactc

SEQ ID NO: 579775 - DNA, 75 bp, synthetic construct
  source 1..75: mol_type = other DNA
ttttccttttttggacaaaataaaacacttatcgaagatctgattgaacattttagatatggaaatggcagcaat

SEQ ID NO: 579776 - DNA, 75 bp, synthetic construct
  source 1..75: mol_type = other DNA
actgacaatgacagatatccaggagtctctgctttctccaacaaccatgcctgcttatggagttaactcaactgg

SEQ ID NO: 579777 - DNA, 75 bp, synthetic construct
  source 1..75: mol_type = other DNA
attttgaacatatcagtaattcagcgtggcgtgtggcaaccagtgatatctcacagcaatacagattcagttata

SEQ ID NO: 579778 - DNA, 75 bp, synthetic construct
  source 1..75: mol_type = other DNA
aatggtggaggaaaaattgttgccggggcagcagggaatatgaccaggacaggatttcttctacgctgtgatgct

SEQ ID NO: 579779 - DNA, 75 bp, synthetic construct
  source 1..75: mol_type = other DNA
atctggatgatgactactttgacatgttgcaggaggaactttgcagtgttgtggaggcatccggtgccagtctgg

SEQ ID NO: 579780 - DNA, 75 bp, synthetic construct
  source 1..75: mol_type = other DNA
tttgggagaagccagatatgtcattcagcgagagctaatgccaatggtgcgtggatacgctggtcagatggtgca

SEQ ID NO: 579781 - DNA, 75 bp, synthetic construct
  source 1..75: mol_type = other DNA
gtagtgctggcaactcgcgcttatgttgattctcaaattattatcgcgaaatcgtatgcagatgatttgatggat

SEQ ID NO: 579782 - DNA, 75 bp, synthetic construct
  source 1..75: mol_type = other DNA
catcacgcaaagcaggaggattaactctggcgttttatcgtgggggcattggtcagccaccaacagccaattcca

SEQ ID NO: 579783 - DNA, 75 bp, synthetic construct
  source 1..75: mol_type = other DNA
tgtaacactgaataatggtaattatcagctgtcaggctataaatggccccagtcatttggtgtcctgtttgctgt

SEQ ID NO: 579784 - DNA, 75 bp, synthetic construct
  source 1..75: mol_type = other DNA
aattgggagaagcggcaaaacgggatgtcggaaccggtaataatcaactcccggacatgtccgcatttggtatgt

SEQ ID NO: 579785 - DNA, 75 bp, synthetic construct
  source 1..75: mol_type = other DNA
ggtacacgacaacaaggacatcagtaaccttaaaagtatcaaccggaaatggtttgtatggaactatgattatcg

SEQ ID NO: 579786 - DNA, 75 bp, synthetic construct
  source 1..75: mol_type = other DNA
atgccatttgcttgttatttcttcattttcataaacgttggtttgggagaagccagatatgtcattcagcgagga

SEQ ID NO: 579787 - DNA, 75 bp, synthetic construct
  source 1..75: mol_type = other DNA
atgccatttgctcgttatttctgcattttcataaacgttggtttgggagaagcggcgaaaaggaatgtggggact

SEQ ID NO: 579788 - DNA, 75 bp, synthetic construct
  source 1..75: mol_type = other DNA
ggctctcgaaaaccttggtttgggagatacaagcggatacgtgggacgctgggtgaatacccgggttttcacgtc

SEQ ID NO: 579789 - DNA, 75 bp, synthetic construct
  source 1..75: mol_type = other DNA
aacccaccatttgggaaaaagagcggttgggataatattcatattgacacacattataaaggacctaatctagac

SEQ ID NO: 579790 - DNA, 75 bp, synthetic construct
  source 1..75: mol_type = other DNA
cgatcacccatgttcaaaagtggacgtaatcgcggagcacattggtgtgtcgcagaactctatgcgttgcagact

SEQ ID NO: 579791 - DNA, 75 bp, synthetic construct
  source 1..75: mol_type = other DNA
atgcacagaataccgggcgagataccgcaacataacactaaaaatatcaagctgatggctattgttcaccgtcta

SEQ ID NO: 579792 - DNA, 75 bp, synthetic construct
  source 1..75: mol_type = other DNA
tcaacgcccaggcgcgttttagccagaacctgctggatcagggcagccatcccaccagcgaaaaactgctgtcgg

SEQ ID NO: 579793 - DNA, 75 bp, synthetic construct
  source 1..75: mol_type = other DNA
ggcgctggcggaaaatatgctcgaccgctacggcatcatcagtcgtcaggcggtgatagccgaaaatatccctgg

SEQ ID NO: 579794 - DNA, 75 bp, synthetic construct
  source 1..75: mol_type = other DNA
aggtcggcaacggtgatatgacactggtgcgtttggctgatacccagggtacatccattctgactgatgtacata

SEQ ID NO: 579795 - DNA, 75 bp, synthetic construct
  source 1..75: mol_type = other DNA
catcgattggcgttttaaacacgctcattcactgggttgtttttggtgtttgcgtgtatggattgtccacgagcc

SEQ ID NO: 579796 - DNA, 75 bp, synthetic construct
  source 1..75: mol_type = other DNA
tgtatctatgccgcgcataccaatcaggctctggcaaacttcgcaggtttcgttgtggctgtgagctttagcttc

SEQ ID NO: 579797 - DNA, 75 bp, synthetic construct
  source 1..75: mol_type = other DNA
tttaattctgcttacagaacgtcatcaaccagcgacacggtatcgatgaattacagttggtgggctgttggtgag

SEQ ID NO: 579798 - DNA, 75 bp, synthetic construct
  source 1..75: mol_type = other DNA
agacggtttaacgatatcagtagacagaaaattgaggtatttcgaccagcaaacatgcctaagaaactaccgcat

SEQ ID NO: 579799 - DNA, 75 bp, synthetic construct
  source 1..75: mol_type = other DNA
tatctcttttaaattttcaaaaatatcctatgggctggagcgctaccattcatttcatagcacaagaccacttta

SEQ ID NO: 579800 - DNA, 75 bp, synthetic construct
  source 1..75: mol_type = other DNA
ttattaataaattgaaagatcgcctgaatcaaacctggtatcaaattcgtattggtgaacgtctggcctatatca

SEQ ID NO: 579801 - DNA, 75 bp, synthetic construct
  source 1..75: mol_type = other DNA
cctgggacaggtggtatcgcaggcggggaattatctggggcagaccctgcagtcagcttccacgcaattgtcgtc

SEQ ID NO: 579802 - DNA, 75 bp, synthetic construct
  source 1..75: mol_type = other DNA
tggcctccagccgtgtcactgacagtggtagtcattgtcacgaacggtgcaatagtgatccacacccaacgcctg

SEQ ID NO: 579803 - DNA, 75 bp, synthetic construct
  source 1..75: mol_type = other DNA
ctcaatggcaaaaatgcgactgtcacaggcgaccagtgcgtcgattgcggctaacacactgccggtgatgtacag

SEQ ID NO: 579804 - DNA, 75 bp, synthetic construct
  source 1..75: mol_type = other DNA
ctggacggccaacattgcttctaccggtaagatgaacggcttttcattcgaataccgcgatatagctttcaaggc

SEQ ID NO: 579805 - DNA, 75 bp, synthetic construct
  source 1..75: mol_type = other DNA
gggaagctctacttgggtaggaacgaaaaccttataagcacacggatcattagtgaactcgaaatcgctcacggt

SEQ ID NO: 579806 - DNA, 75 bp, synthetic construct
  source 1..75: mol_type = other DNA
caattgcaccaaagcaaccgaagcggaagagaatctctcgcaacgaacagatgctatcagaacgaactggtgttc

SEQ ID NO: 579807 - DNA, 75 bp, synthetic construct
  source 1..75: mol_type = other DNA
cattaaccagaactactcgcaggaatttgtcggatatgtcaccagtaaacgtccgggagaggctgaccagctgct

SEQ ID NO: 579808 - DNA, 75 bp, synthetic construct
  source 1..75: mol_type = other DNA
tggcaggtagcgacacctcaagcagcagcaatctgaccaaggcgctgaacaccattcagtcgattggtttgcgtt

SEQ ID NO: 579809 - DNA, 75 bp, synthetic construct
  source 1..75: mol_type = other DNA
tgaatgtggccacacagacctcaatggcaaaaatgcgactgtcgcaggcgaccagtgcgtccattgctgctaaca

SEQ ID NO: 579810 - DNA, 75 bp, synthetic construct
  source 1..75: mol_type = other DNA
tgttcacggaaatgctgggtgacagctataactattttcacggcagttctctgacttctaccgaaatcattcgta

SEQ ID NO: 579811 - DNA, 75 bp, synthetic construct
  source 1..75: mol_type = other DNA
accgctatgcccgcgatgaaaatgtcagtctggctgaagccgtgagagaagccgcgacaaaaagtcaggagacga

SEQ ID NO: 579812 - DNA, 75 bp, synthetic construct
  source 1..75: mol_type = other DNA
caccagaattaatacggactccggtgatatttccggggcgaatacgtcaccttttcttcaacagatcctgaatac

SEQ ID NO: 579813 - DNA, 75 bp, synthetic construct
  source 1..75: mol_type = other DNA
actacggctcagagaagacaaacggaacgaaatcgtagaaaagatccttcaaaagaatgcagccaaacagcaaaa

SEQ ID NO: 579814 - DNA, 75 bp, synthetic construct
  source 1..75: mol_type = other DNA
acgtcttaatctgggcggtcgttctgtaggttggctgctgtccgaggttatggaatgggttaaaagccgggatcg

SEQ ID NO: 579815 - DNA, 75 bp, synthetic construct
  source 1..75: mol_type = other DNA
catgccagcgtgatgagtggaatagccagctgatgagcgacacctgtcctgaaatcaccctggacaatgtactgt

SEQ ID NO: 579816 - DNA, 75 bp, synthetic construct
  source 1..75: mol_type = other DNA
gctccccacaattccccggcatcaaatctccatgcaggtgaactattttacccccagcggcaaatcgcaaaaaca

SEQ ID NO: 579817 - DNA, 75 bp, synthetic construct
  source 1..75: mol_type = other DNA
ctctggaacagtacttcggtcgtgaaactgctcgcatggtagttcgtcagccgctggaactggtcgacatggttg

SEQ ID NO: 579818 - DNA, 75 bp, synthetic construct
  source 1..75: mol_type = other DNA
acagcaatgctgtttcactggtcatgcggcggatccgaaaagaaaacgttgatgccggtgaacgtgcaaaacagg

SEQ ID NO: 579819 - DNA, 75 bp, synthetic construct
  source 1..75: mol_type = other DNA
ctatatcttcaggcgcgcggtctggcagtaaaaactatccagcaacatttgggccagctaaatatgcttcatcgt

SEQ ID NO: 579820 - DNA, 75 bp, synthetic construct
  source 1..75: mol_type = other DNA
aggctcagtagctggttcccctttttacaacggctcatagagattctccgaagctacggtaagagcatccttcac

SEQ ID NO: 579821 - DNA, 75 bp, synthetic construct
  source 1..75: mol_type = other DNA
gatggggttcaatgatactcatctccgttgctatgtgcttcatgacgacgatggccagcatatacacatcattgc

SEQ ID NO: 579822 - DNA, 75 bp, synthetic construct
  source 1..75: mol_type = other DNA
aaagacagacgaaatgagatcgttgagaagattctccaaaagaatgcggttaaccagcaaatgatcttacccagc

SEQ ID NO: 579823 - DNA, 75 bp, synthetic construct
  source 1..75: mol_type = other DNA
atatctcacgtactgacggtgggagaatgttaatccatattggcagaacgaaaacgctggttagcaccgctggtg

SEQ ID NO: 579824 - DNA, 75 bp, synthetic construct
  source 1..75: mol_type = other DNA
accatgctggaagacagaactggcgagaaatgccgaaagacgatcatacaggaagctatagatacactcattacc

SEQ ID NO: 579825 - DNA, 75 bp, synthetic construct
  source 1..75: mol_type = other DNA
accttatcagtactaggatcatcactgaactcgaaatcgatcatgctcttacagtgaccaaggcagcatcatccc

SEQ ID NO: 579826 - DNA, 75 bp, synthetic construct
  source 1..75: mol_type = other DNA
gatatttccggggcgaatacgtccccatttctgcaacagatcctgaatacgttacatggtttcactgatcaggtg

SEQ ID NO: 579827 - DNA, 75 bp, synthetic construct
  source 1..75: mol_type = other DNA
agcggctggcgcagcagtcaggcggcagccataagaccgttcacgaccgcattaagctggcgcagcgtttttgtg

SEQ ID NO: 579828 - DNA, 75 bp, synthetic construct
  source 1..75: mol_type = other DNA
tggcggcagcggtggaactggcgcggctgatggggttgcgctcacaggaagcagtacaaagcgtacagtcgctga

SEQ ID NO: 579829 - DNA, 75 bp, synthetic construct
  source 1..75: mol_type = other DNA
tctgaaaagcgcgatggactactggcacaaccaggcggcgcgtatgggcctgactggtgcatactccccgcattc

SEQ ID NO: 579830 - DNA, 75 bp, synthetic construct
  source 1..75: mol_type = other DNA
gccggagcattaccgccatgtgctggaaaccgcccgcgcaaaagatccggggctggcggcaacgctggaactctc

SEQ ID NO: 579831 - DNA, 75 bp, synthetic construct
  source 1..75: mol_type = other DNA
agatttgaaatcagcaatgaaatactggcacagccaggcgtcgggtcttggtttaactggcgcatattccccgca

SEQ ID NO: 579832 - DNA, 75 bp, synthetic construct
  source 1..75: mol_type = other DNA
agggattttgtgagaaggaagcgctggcgatgacggcgatggatttgggtcacggcgacgggcgcgggcggtatg

SEQ ID NO: 579833 - DNA, 75 bp, synthetic construct
  source 1..75: mol_type = other DNA
acagtgaagctattcgcgacgctcaacgaaaaaaacctaaagttccggtacatgctgtactgacggcgacaaatc

SEQ ID NO: 579834 - DNA, 75 bp, synthetic construct
  source 1..75: mol_type = other DNA
ttccggtacatgctgtactgacggcgacaaatccgctgatccgttttatcggtagtgatgatatgacgcaaaacc

SEQ ID NO: 579835 - DNA, 75 bp, synthetic construct
  source 1..75: mol_type = other DNA
atactggctgcaactgcctgccacattcggcccacgggagctgcctgcgctttggcattttctcgattctcttcc

SEQ ID NO: 579836 - DNA, 75 bp, synthetic construct
  source 1..75: mol_type = other DNA
tgatggcagccataacgctacctgtagcagcaacacagtacgtaaaacctggagcggttctaaccctgaatccgg

SEQ ID NO: 579837 - DNA, 75 bp, synthetic construct
  source 1..75: mol_type = other DNA
ggccagcgtgatgactcgtggttgcgaaggctactgtgggatttctgcggcaggcacaatggatggtctatttaa

SEQ ID NO: 579838 - DNA, 75 bp, synthetic construct
  source 1..75: mol_type = other DNA
gtggagggcaacaccacgctttacgccctgccgaaacccgaggttgtcctgcgctggcgtgagcagaccacagat

SEQ ID NO: 579839 - DNA, 75 bp, synthetic construct
  source 1..75: mol_type = other DNA
gatggtggcaatggacctagggcatggcgacgggcgtggtcgctgggtgaagcaggtgtatgcacggaatgatga

SEQ ID NO: 579840 - DNA, 75 bp, synthetic construct
  source 1..75: mol_type = other DNA
gctgacggcgacggatctgggccacggcgacgggcgcgggcgttgggtgaaacaggtgtacggctaccgctggag

SEQ ID NO: 579841 - DNA, 75 bp, synthetic construct
  source 1..75: mol_type = other DNA
gcgatccgccattatctggcgcagggattcagcgaaaaggaatccctggcgctgacggcgacggatctgggtcat

SEQ ID NO: 579842 - DNA, 75 bp, synthetic construct
  source 1..75: mol_type = other DNA
gctgacggcgacggatctgggtcatggcgacggtcgcggtcgctgggtgaaacaggtgtatggataccgctggag

SEQ ID NO: 579843 - DNA, 75 bp, synthetic construct
  source 1..75: mol_type = other DNA
cgaaaaccctgacttcgtcaggtcagcaggtgttcaataatgctgagtccatatcaaaactgccggtggatatca

SEQ ID NO: 579844 - DNA, 75 bp, synthetic construct
  source 1..75: mol_type = other DNA
aacaagtacagcattggcgacctgatgaattctacagacccatatgcgctgatattcagtaaacccagcccgctg

SEQ ID NO: 579845 - DNA, 75 bp, synthetic construct
  source 1..75: mol_type = other DNA
gcggtacagagttcacagtcgctgaaaacgtggctgaaagccatttcccgcggtgaaacccggctgaaagtggtg

SEQ ID NO: 579846 - DNA, 75 bp, synthetic construct
  source 1..75: mol_type = other DNA
gcgaagcatattgaggcgtatattcagatgcggctggcgcaggggattcagaaaaatacgctgcataacgaaacg

SEQ ID NO: 579847 - DNA, 75 bp, synthetic construct
  source 1..75: mol_type = other DNA
aatggtggcaatggacctggggcatggcgacggacgtggtcgctgggtgaagcaggtatacgcgcacgaatggca

SEQ ID NO: 579848 - DNA, 75 bp, synthetic construct
  source 1..75: mol_type = other DNA
gaaacagacgctgcataacgaaacggcggctatccgtaaaatcctgacgcaggccgggcgcgaaaaactggcgca

SEQ ID NO: 579849 - DNA, 75 bp, synthetic construct
  source 1..75: mol_type = other DNA
ggagcattatcagcaggtaatggagaaagcccgtgctgaggatgcaggactgacggcggcgctggagattgcgcg

SEQ ID NO: 579850 - DNA, 75 bp, synthetic construct
  source 1..75: mol_type = other DNA
atgagcaaattaagcagtgaaatgaaggcgctggcgaagaaagcgggcggtagcttcaaaacggtgaatgaccgt

SEQ ID NO: 579851 - DNA, 75 bp, synthetic construct
  source 1..75: mol_type = other DNA
ccttaaacaggcaatgaaatactggcgcaaccagactttgcgtatggggctaacgggcaaatactccccgcactc

SEQ ID NO: 579852 - DNA, 75 bp, synthetic construct
  source 1..75: mol_type = other DNA
acaaaagcagtgcgtttcagattcgcagtgaaggccggggatatcgacttcggcattcggttgtcacggtatgcg

SEQ ID NO: 579853 - DNA, 75 bp, synthetic construct
  source 1..75: mol_type = other DNA
tcgcctcatgactggtttgaaggtcggggccccaaatgcacactgatagtctttatcgatgatgctaccagcgct

SEQ ID NO: 579854 - DNA, 75 bp, synthetic construct
  source 1..75: mol_type = other DNA
gaaacaacccgggcttacatggaaaccctccggggttaccttaatgatcatggcgtaccactcgctctctactct

SEQ ID NO: 579855 - DNA, 75 bp, synthetic construct
  source 1..75: mol_type = other DNA
tgactggcacatcggtcgtggcgtcgccattatcatgcagaaatcagggatcccggatatcgatcaggctaactg

SEQ ID NO: 579856 - DNA, 75 bp, synthetic construct
  source 1..75: mol_type = other DNA
aaacaggaggttgaacggattaacaacgccgctaaaagtgaatccagtacatctgattctctcggacagtgcctg

SEQ ID NO: 579857 - DNA, 75 bp, synthetic construct
  source 1..75: mol_type = other DNA
tctgtgagctcatttgcggcaacacagacctgtgcagcatacgaactggcaaaagctggtgctgatgctgcctat

SEQ ID NO: 579858 - DNA, 75 bp, synthetic construct
  source 1..75: mol_type = other DNA
cggtaccaggcgcatctgaaaaaacaggccagctacattgtggaaggtgatgcacaaagcagaaaggcgctacgc

SEQ ID NO: 579859 - DNA, 75 bp, synthetic construct
  source 1..75: mol_type = other DNA
aatgagatgtatcactatcgccgggcaaccattgtggcgaataacgacctgcgccggggagatttgctatttttc

SEQ ID NO: 579860 - DNA, 75 bp, synthetic construct
  source 1..75: mol_type = other DNA
tgctgtgcctgagcgtgttttctttgtcccttttgcttcctttacttgccagcgccactacctcacacactacct

SEQ ID NO: 579861 - DNA, 75 bp, synthetic construct
  source 1..75: mol_type = other DNA
gcgcgtttattaaaacagtaccaaacccatctgaaaaaacaggccagctatattgtggaaggcaatgccgaaagc

SEQ ID NO: 579862 - DNA, 75 bp, synthetic construct
  source 1..75: mol_type = other DNA
cggataagccggttagccgaacctttctggcaggatcattttttgggcgcgcgacggattttgacggaagagacg

SEQ ID NO: 579863 - DNA, 75 bp, synthetic construct
  source 1..75: mol_type = other DNA
catatccacagccgcgagattgccgaccatatgggggggtatctgggcgacggtcagtttattgagtcaccgcgc

SEQ ID NO: 579864 - DNA, 75 bp, synthetic construct
  source 1..75: mol_type = other DNA
gctgtatgacctggagcaggagaacattcctgctccgggagttcaggcccgtcaggcgcttgacagtctgatggc

SEQ ID NO: 579865 - DNA, 75 bp, synthetic construct
  source 1..75: mol_type = other DNA
gttcccgattttcggtgcgggttgggatcgcctgatgggacgtcagaacgagacggtgaaagtgaccacctttaa

SEQ ID NO: 579866 - DNA, 75 bp, synthetic construct
  source 1..75: mol_type = other DNA
ccgctccggtaacgggcagtgatgaaatcgatattggtcgcctggtcggcaccgtcattgaagcacgctggtggg

SEQ ID NO: 579867 - DNA, 75 bp, synthetic construct
  source 1..75: mol_type = other DNA
tgtgctgggggctccagactttattactgttcccacaattctctattccttcctcggttactcctttgtccgccc

SEQ ID NO: 579868 - DNA, 75 bp, synthetic construct
  source 1..75: mol_type = other DNA
tactaccgctgctaaaccgacctctattgccaaatttgacctgatcccgcgcggtcaggtaccgccaaatccttc

SEQ ID NO: 579869 - DNA, 75 bp, synthetic construct
  source 1..75: mol_type = other DNA
agagcaggagctgaaaatcaccgaggccagcaccgtcggcgatgtgcgcattgttgacccggcaatcacccagcc

SEQ ID NO: 579870 - DNA, 75 bp, synthetic construct
  source 1..75: mol_type = other DNA
gttcccgattttcggtgcgggctgggatcgcctgatgggacgccagaacgagacggtaaaagtgaccacctttaa

SEQ ID NO: 579871 - DNA, 75 bp, synthetic construct
  source 1..75: mol_type = other DNA
atcacttatccgcgttccgattgccgctatttgccagaagaacattttgccggacgccacgcggtgatgaatgct

SEQ ID NO: 579872 - DNA, 75 bp, synthetic construct
  source 1..75: mol_type = other DNA
ttcgctttcggcgttgcagattgaagcggctaaacgttttggtctgagcgcgcagaacgtgcttgatatctgcca

SEQ ID NO: 579873 - DNA, 75 bp, synthetic construct
  source 1..75: mol_type = other DNA
actatcgatggtgtaattacttatgctcaccacgttatatggatgataaataatggtgagattccattagggtat

SEQ ID NO: 579874 - DNA, 75 bp, synthetic construct
  source 1..75: mol_type = other DNA
cgcgatctgggggcaggggcgtggggtacattctgcaacgcctatctgccgatgttaaagccgagtttccttgcg

SEQ ID NO: 579875 - DNA, 75 bp, synthetic construct
  source 1..75: mol_type = other DNA
atcttgatattagcaatcccttctttggcattgtgttggggcatacagtgttaaccctgccatattcgatacgca

SEQ ID NO: 579876 - DNA, 75 bp, synthetic construct
  source 1..75: mol_type = other DNA
cgagtctggcgcgcgccattgctgatgtcctgcctaaaccgcaccggaaaggcgatggctttatcgagtgcggta

SEQ ID NO: 579877 - DNA, 75 bp, synthetic construct
  source 1..75: mol_type = other DNA
gcctggagcagcagcttggcaagccttacgtctggggcggcacgcggcccgataaaggcttcgactgcagcgggt

SEQ ID NO: 579878 - DNA, 75 bp, synthetic construct
  source 1..75: mol_type = other DNA
cgttatcgcaaaaaatttattactccggataacgtgcagaacggcgtggttttctggaaccagtatgaagatgcg

SEQ ID NO: 579879 - DNA, 75 bp, synthetic construct
  source 1..75: mol_type = other DNA
tcttgctgatggcgcgcgacgagcaggacgatccgctcaatctgaaaggctcgtttgccggtgcgatgggctacg

SEQ ID NO: 579880 - DNA, 75 bp, synthetic construct
  source 1..75: mol_type = other DNA
tcgcaaaaaatttattaccccggataacgtgcaaaatggcgtggttttctggaatcaatatgaagatgcactgaa

SEQ ID NO: 579881 - DNA, 75 bp, synthetic construct
  source 1..75: mol_type = other DNA
accaagtaaaaacaagaattttgaaataataaaagagcttaattctattgggttgtttaagttccctgttacaac

SEQ ID NO: 579882 - DNA, 75 bp, synthetic construct
  source 1..75: mol_type = other DNA
catatcgttaacgggcatgtgacggggagagagaagggggcacctgtaacaaatatagcactggaaaaactggca

SEQ ID NO: 579883 - DNA, 75 bp, synthetic construct
  source 1..75: mol_type = other DNA
aggcgatcaggtggcggtgatggcaaacggtcaggcgccaggcttaccgaatggcttcaaaaccaggtacagcat

SEQ ID NO: 579884 - DNA, 75 bp, synthetic construct
  source 1..75: mol_type = other DNA
ctggtcgccgcaaaagttccacagctcgcgttttcatcaaaccgggcaacggtaaaatcgtaatcaaccaacgtt

SEQ ID NO: 579885 - DNA, 75 bp, synthetic construct
  source 1..75: mol_type = other DNA
caacatcgaaggcgtaaaagcgatgaccgacgttacgggttttggtctgctgggccatttgagcgaaatgtgtca

SEQ ID NO: 579886 - DNA, 75 bp, synthetic construct
  source 1..75: mol_type = other DNA
ttggaaaccatcttgcacagtgagcaggcgaagtttgttgatccgaatttgcttgtgggtaatgaaacccgcgac

SEQ ID NO: 579887 - DNA, 75 bp, synthetic construct
  source 1..75: mol_type = other DNA
ctctggcgaactggaaaccttcctgctaatggcgcgcgatgagcaggatgatccgctcaatctgaaaggttcctt

SEQ ID NO: 579888 - DNA, 75 bp, synthetic construct
  source 1..75: mol_type = other DNA
tcgcaaaagtacataaatcgtatcctgatatttctgttggcatgtattttgacaattatcggtttgtttatcgca

SEQ ID NO: 579889 - DNA, 75 bp, synthetic construct
  source 1..75: mol_type = other DNA
aaccttcaactccagctcatccggcacttcgttatacgacagcacatgcagccccggcgcaaacaatctcgcata

SEQ ID NO: 579890 - DNA, 75 bp, synthetic construct
  source 1..75: mol_type = other DNA
tcacttattctgaataaaaataaagaaccagtaggaatgatatgtatgaattttgctctggatatgcctcttaat

SEQ ID NO: 579891 - DNA, 75 bp, synthetic construct
  source 1..75: mol_type = other DNA
tgcgttttctctataacaaatcgctcaatgaatcaggcacgaatattcagttagggaaggtgcgaacaagtccct

SEQ ID NO: 579892 - DNA, 75 bp, synthetic construct
  source 1..75: mol_type = other DNA
cgatgtgctacgtatcccgggagagccaccgcgtcgatggatggatatgaccctgttgcgtgaggtgatggccga

SEQ ID NO: 579893 - DNA, 75 bp, synthetic construct
  source 1..75: mol_type = other DNA
ctgaccatgtttgacttacgtgacagtttcgatgccctcgcctccgccgaaaagctgccttacagcaagccgcat

SEQ ID NO: 579894 - DNA, 75 bp, synthetic construct
  source 1..75: mol_type = other DNA
gctgtttttccatatccacagccgtgaaattgccgatcatatgggggggtatctgggcgatgggcagtttatcga

SEQ ID NO: 579895 - DNA, 75 bp, synthetic construct
  source 1..75: mol_type = other DNA
cagcattattagacaacaaggaacattcggcagataaacatgtgccggacaacagcgcatgcacaccacttcagg

SEQ ID NO: 579896 - DNA, 75 bp, synthetic construct
  source 1..75: mol_type = other DNA
aacagtgggagtagcaattcatctgacagcaataaatggcagcatatcaatacgtcggctgaacgtgacattatt

SEQ ID NO: 579897 - DNA, 75 bp, synthetic construct
  source 1..75: mol_type = other DNA
cgggtaagtcggttagctgaacctttctggcaggatcattttttgggcgcgcggcggattttgacggaagagacg

SEQ ID NO: 579898 - DNA, 75 bp, synthetic construct
  source 1..75: mol_type = other DNA
cgggtaagtcggttagctgaacctttctggcaggatcattttttaggcgcgcgcaggattttgacggaagagacg

SEQ ID NO: 579899 - DNA, 75 bp, synthetic construct
  source 1..75: mol_type = other DNA
gtaagccttacgtctggggcggcacgcggcccgatcaaggcttcgactgtagcgggttggttttttatgcctaca

SEQ ID NO: 579900 - DNA, 75 bp, synthetic construct
  source 1..75: mol_type = other DNA
tttcactggttgaagagacgcgaccattactgcctggtgtgcgtgaggccgttgcgctatgcaaagaacaaggat

SEQ ID NO: 579901 - DNA, 75 bp, synthetic construct
  source 1..75: mol_type = other DNA
aagctgtgacattacagtgcctgcttcatataacttgggcaccttgactccaggagcaaagacacatgctccgct

SEQ ID NO: 579902 - DNA, 75 bp, synthetic construct
  source 1..75: mol_type = other DNA
agcatccagaatggtttcctgcgccgctcaaggcgagtgacagacgctggcaggcgttggtggagaataatcatt

SEQ ID NO: 579903 - DNA, 75 bp, synthetic construct
  source 1..75: mol_type = other DNA
gttccatcagacgtaacctgcgacaggtcctgaatacccgctccggcagttgttatggctcaccagagctgggga

SEQ ID NO: 579904 - DNA, 75 bp, synthetic construct
  source 1..75: mol_type = other DNA
atacccgtgaagtcgtggcgaatgccataacggcactcgaaacgctgattaaccgtagccatgatgaacaaacat

SEQ ID NO: 579905 - DNA, 75 bp, synthetic construct
  source 1..75: mol_type = other DNA
aactgatctctcaactgttaagcgaaatgaaaagcggtcagcaggagatgcaggcagggatgaatgagatgctgc

SEQ ID NO: 579906 - DNA, 75 bp, synthetic construct
  source 1..75: mol_type = other DNA
atggacgatacattgttttatatgtgctgtttctggggttttattgccttatacctgtttatcaggtggtttatt

SEQ ID NO: 579907 - DNA, 75 bp, synthetic construct
  source 1..75: mol_type = other DNA
gtgttaatattgggtttgccgctttacgcatgaatgaatcccttggtattacaccagaggattttgctaatatat

SEQ ID NO: 579908 - DNA, 75 bp, synthetic construct
  source 1..75: mol_type = other DNA
cttcaatattttttgtgtcctatttgatttttcaaattccgagcagtattggattgcaaaagttaggtgcaagaa

SEQ ID NO: 579909 - DNA, 75 bp, synthetic construct
  source 1..75: mol_type = other DNA
tcctgcataacattgccgaggtaatgggaaccagttttgaatcctttacgaccggagtggaaaacggcctgaatc

SEQ ID NO: 579910 - DNA, 75 bp, synthetic construct
  source 1..75: mol_type = other DNA
tgctctcaggtaaaaaagaagcgggcgtttccagagagcagaaagtaaaactgataaattttaattgcgagaaac

SEQ ID NO: 579911 - DNA, 75 bp, synthetic construct
  source 1..75: mol_type = other DNA
aaaggttagtgaaaacgatgaaggaagactacattgcgttcataccgaaaccgaatgtaataacggcattgcata

SEQ ID NO: 579912 - DNA, 75 bp, synthetic construct
  source 1..75: mol_type = other DNA
tgcggtttgccatcatcagccaacctgtgggcgctcggtgattgttgagcacaacggcgacgtttacgcctgcga

SEQ ID NO: 579913 - DNA, 75 bp, synthetic construct
  source 1..75: mol_type = other DNA
atggacgccattgagctcagaatgggcgaactgcgtcgctatgtcatcaccatgatcgacgaatgcagcaattac

SEQ ID NO: 579914 - DNA, 75 bp, synthetic construct
  source 1..75: mol_type = other DNA
aaagactccacaaggcgctcgcactaatgacgcccgtggaatatattttaaaagagaacaaaaattgcaatatgt

SEQ ID NO: 579915 - DNA, 75 bp, synthetic construct
  source 1..75: mol_type = other DNA
gcatcaatgacttatggcaagtgatgtatcgcgccggattctatcgcggcggtccgatcctgatgagcgccatcg

SEQ ID NO: 579916 - DNA, 75 bp, synthetic construct
  source 1..75: mol_type = other DNA
gaggagtaccttgcctcactggtaaaatccagtaatgaaagcgcgacccaggcacgccatctgaaagagagcctg

SEQ ID NO: 579917 - DNA, 75 bp, synthetic construct
  source 1..75: mol_type = other DNA
agtttgttggtaagtatggagaaatggtagaaatcgaacttcagctccctcatgttttagcaaacgatagtgcag

SEQ ID NO: 579918 - DNA, 75 bp, synthetic construct
  source 1..75: mol_type = other DNA
gatggactgctggatatcatccagcccccggacgatttcgccgggagcctgcagagccggttgccagaatactga

SEQ ID NO: 579919 - DNA, 75 bp, synthetic construct
  source 1..75: mol_type = other DNA
acgtcattaaacacaaacgtgcgacttaacgtctcatgggattcatcacataatactgctcttggtgcaggtctt

SEQ ID NO: 579920 - DNA, 75 bp, synthetic construct
  source 1..75: mol_type = other DNA
ggggaggtgattacccgctggcagaggaaatccggtttttttgatgtcagccataacgtatttgacaataaagca

SEQ ID NO: 579921 - DNA, 75 bp, synthetic construct
  source 1..75: mol_type = other DNA
cagaagaaagtattcctgtttcctgccgtacctggagtgaaacaaaggcagcttatagttgtttttcaaacgata

SEQ ID NO: 579922 - DNA, 75 bp, synthetic construct
  source 1..75: mol_type = other DNA
catgttttagcaaacgatagtgcagacagtcggaggctattgggcatcatgcgtcatttcatagcaagtggtgtt

SEQ ID NO: 579923 - DNA, 75 bp, synthetic construct
  source 1..75: mol_type = other DNA
ctcacaatatgagctggaggacggggaagagaaaatcgtccgtattagggctacagcaccaagcgccagcttctt

SEQ ID NO: 579924 - DNA, 75 bp, synthetic construct
  source 1..75: mol_type = other DNA
gaggagtaccttgcctcactggtgaagtccagtaatgaaagcgcgacccaggcacgccatctgaaagagagcctg

SEQ ID NO: 579925 - DNA, 75 bp, synthetic construct
  source 1..75: mol_type = other DNA
gcctctgtcgagttgcttggtgaacaactgggtagcctgtttgggcagattgataagggccagcaacagatttca

SEQ ID NO: 579926 - DNA, 75 bp, synthetic construct
  source 1..75: mol_type = other DNA
ggcattcaatataaaacgtcattaaacacaaacgtgcgacttaacgtctcatgggattcatctcataacactgct

SEQ ID NO: 579927 - DNA, 75 bp, synthetic construct
  source 1..75: mol_type = other DNA
ttgcaactatgtatctgtcctttgtatacactgctcatgcagaagatactaatattatcaatggagaaaataaca

SEQ ID NO: 579928 - DNA, 75 bp, synthetic construct
  source 1..75: mol_type = other DNA
ctgcatttgctatttttgcttccattctggtcacttggcttgaaaaattatccatcgctaaaagctacaaatatc

SEQ ID NO: 579929 - DNA, 75 bp, synthetic construct
  source 1..75: mol_type = other DNA
ttgccaattttgtcggtgcgccgggtgcggtttgccatcatcagccaacctgtgggcgctcggtgattgttgagc

SEQ ID NO: 579930 - DNA, 75 bp, synthetic construct
  source 1..75: mol_type = other DNA
cattatcagtcagcacacatagtttccacgacacaacatggacgccagcagtattttacgctgccgcccactcaa

SEQ ID NO: 579931 - DNA, 75 bp, synthetic construct
  source 1..75: mol_type = other DNA
gagtgacaataacgttatagtcccttccccgacagttaacggtaaatggacatcatcaatcagcgcacaaagttt

SEQ ID NO: 579932 - DNA, 75 bp, synthetic construct
  source 1..75: mol_type = other DNA
tcgccgtggccaacccgccgttttccaacaaaaactggaccagcggcattaacccgaacgacgacgaatttggcc

SEQ ID NO: 579933 - DNA, 75 bp, synthetic construct
  source 1..75: mol_type = other DNA
cgatgccattgcgctgaaaaaccgcgaacgtcgcgcactggctaatttttatcatcttgggcagttaaatcctcc

SEQ ID NO: 579934 - DNA, 75 bp, synthetic construct
  source 1..75: mol_type = other DNA
tttggcaaagatgtctgtagccgcgttgtgactttggaagatagccgcaaagccctggtcggaaatttaaaataa

SEQ ID NO: 579935 - DNA, 75 bp, synthetic construct
  source 1..75: mol_type = other DNA
tcctggcagcaatagttaccggatgttcatcacctccacctcccgtccctgtagagtgggataaagcctccgctc

SEQ ID NO: 579936 - DNA, 75 bp, synthetic construct
  source 1..75: mol_type = other DNA
gaatccgctgacgcataaacgcgttcttcaggccgacaacgtgccgtacattctggctgaaatgatgatggaagg

SEQ ID NO: 579937 - DNA, 75 bp, synthetic construct
  source 1..75: mol_type = other DNA
tactccgccggatatctctattgtgatgcaatggaagcctgtgacgtgtacacccgtcagtgctccacgctcctc

SEQ ID NO: 579938 - DNA, 75 bp, synthetic construct
  source 1..75: mol_type = other DNA
ttatccaaagctaacggataacgacatcaaaatcttactagtacgggataaatggcaggctactctgtttaatgc

SEQ ID NO: 579939 - DNA, 75 bp, synthetic construct
  source 1..75: mol_type = other DNA
gcgctacaaggccgatgtgctaccccgttcactagtggaaattcgctgcttcccggaactgctggatacgttgaa

SEQ ID NO: 579940 - DNA, 75 bp, synthetic construct
  source 1..75: mol_type = other DNA
ggaaatgattacaacctgaatattcctcgctatatcgagagcggcgagccggaagatttgcacgatctgaccgcg

SEQ ID NO: 579941 - DNA, 75 bp, synthetic construct
  source 1..75: mol_type = other DNA
gggatgatcgtgatacccaaaggagccagctttgacgatatggttgcgctgaaaaatgacaaagagatcggcgac

SEQ ID NO: 579942 - DNA, 75 bp, synthetic construct
  source 1..75: mol_type = other DNA
gttttgacaaagaagcgttgatcaatgaactggacgcgatgaccgcccgcattcgtcagcagtgggaagaaggcc

SEQ ID NO: 579943 - DNA, 75 bp, synthetic construct
  source 1..75: mol_type = other DNA
cccggcaaaagcccgcgtgatctacggttctcattttgaagtgggtgaagacggtagcgtagtgggttatgacaa

SEQ ID NO: 579944 - DNA, 75 bp, synthetic construct
  source 1..75: mol_type = other DNA
atggaagcagcaaatttaagtccttctggtgcagtattaccactggcagccacaatcaatggaaataatccagtg

SEQ ID NO: 579945 - DNA, 75 bp, synthetic construct
  source 1..75: mol_type = other DNA
cagaaaatggaacaaatcgtaccattagagttatcggcggaatcttccttgccactacggctctggcagctgtag

SEQ ID NO: 579946 - DNA, 75 bp, synthetic construct
  source 1..75: mol_type = other DNA
ttataaactagaattaatcgatgatttgatcgcgcaacgcgaccaattaaattttacgttttctgatttgcttaa

SEQ ID NO: 579947 - DNA, 75 bp, synthetic construct
  source 1..75: mol_type = other DNA
cccgtcgtggtctgatggatgttgctgaagcgcatgagcgtggaggcgctggcggtgtagctgctgataatgagc

SEQ ID NO: 579948 - DNA, 75 bp, synthetic construct
  source 1..75: mol_type = other DNA
caaatcgacctacacaatatcccaaccgaagaacaagtcgactatggataagttgacctctggtcttgggaaaat

SEQ ID NO: 579949 - DNA, 75 bp, synthetic construct
  source 1..75: mol_type = other DNA
cgtttttttctgcttttcttcgcgaattaattccgcttcgcaatttatccataaaataaatttaaaatcacaaaa

SEQ ID NO: 579950 - DNA, 75 bp, synthetic construct
  source 1..75: mol_type = other DNA
gtggcggagttgaaaccgtggctgaagaagaactggcgcagcgtcaggcaggcattgattgacggaaactaccag

SEQ ID NO: 579951 - DNA, 75 bp, synthetic construct
  source 1..75: mol_type = other DNA
ttctattatggtttattagatgtggatactgtaagtaaaatatgctcagataataatttagaaataataaaatca

SEQ ID NO: 579952 - DNA, 75 bp, synthetic construct
  source 1..75: mol_type = other DNA
ggaggagaatcctactgttttggctgatgatattggtatcatctttattgatcaggctaagactatatttaaaat

SEQ ID NO: 579953 - DNA, 75 bp, synthetic construct
  source 1..75: mol_type = other DNA
gaacgcgaccgtaaagatatttttttctgcttttcttcgcgaattaattccgcttcgcaatttatccataaaata

SEQ ID NO: 579954 - DNA, 75 bp, synthetic construct
  source 1..75: mol_type = other DNA
cacggtatagagaagaaagtggttgcgatggacgctaaatttgaccaagttatcgatttactcagacaaaaataa

SEQ ID NO: 579955 - DNA, 75 bp, synthetic construct
  source 1..75: mol_type = other DNA
cgacatgcacagcaaaaacgcatcactaccttcagcgcctcactggcagcacgtctggagattgcgctgaaaatt

SEQ ID NO: 579956 - DNA, 75 bp, synthetic construct
  source 1..75: mol_type = other DNA
atcgcatgggcgatttctcgtgccattgacggagaaagctggtcagcgattgttgattctctaccctcgattgcg

SEQ ID NO: 579957 - DNA, 75 bp, synthetic construct
  source 1..75: mol_type = other DNA
agattgcgcttaacgccattcgcgacggtaaacccgttgctgaactggaaaacaacggcgtgaccaacggcgcag

SEQ ID NO: 579958 - DNA, 75 bp, synthetic construct
  source 1..75: mol_type = other DNA
tgatgtgctcggggcggcggtgacacccgttgatggtgcattgctcggagatgtagtcacggttgagtcggcaga

SEQ ID NO: 579959 - DNA, 75 bp, synthetic construct
  source 1..75: mol_type = other DNA
gtgacacctgttgatggtgcattgctcggagatgtagtcacggttgaggcggcagagacattcagtctcaacaac

SEQ ID NO: 579960 - DNA, 75 bp, synthetic construct
  source 1..75: mol_type = other DNA
acgtctggagattgcgctgaaaattgtgcgcaatgccgacggcaccgaatccgccagcgaacagctttaccaggt

SEQ ID NO: 579961 - DNA, 75 bp, synthetic construct
  source 1..75: mol_type = other DNA
catcagtgatgctgtcgcccagtatcaggactcgctttataccatcatcgaaacagagtcaggtgaccgcaagtt

SEQ ID NO: 579962 - DNA, 75 bp, synthetic construct
  source 1..75: mol_type = other DNA
acgggatatctggacggaaaaattaccgatgacggcgaatttattcctgccccgcgcaatgaggcgacaaaatga

SEQ ID NO: 579963 - DNA, 75 bp, synthetic construct
  source 1..75: mol_type = other DNA
caggccgatagccagcaaatcaacgattttcgcaccgtgatgaccggtgaattacatcatttactgttaaatcac

SEQ ID NO: 579964 - DNA, 75 bp, synthetic construct
  source 1..75: mol_type = other DNA
caggtggcgggcgatgtgatgctcgaaaacacctccacgcatcatattgtgtcgctaatgctcgggcgcgatcac

SEQ ID NO: 579965 - DNA, 75 bp, synthetic construct
  source 1..75: mol_type = other DNA
aaaaattagcgccaacggcgtgctgcaatggtccaccattcgtcgtctgaccgaagaggtgatgcaacggatgac

SEQ ID NO: 579966 - DNA, 75 bp, synthetic construct
  source 1..75: mol_type = other DNA
ttgggctggagacgtatgaacagggcgaaattgttatcaacggcgagaaaatcacgcgcccgattacggcgacat

SEQ ID NO: 579967 - DNA, 75 bp, synthetic construct
  source 1..75: mol_type = other DNA
cggttcgggtttaggatccagcgcttgttcggtggtggcggcgctgatggcgatgaatgaacattgcggcaagcc

SEQ ID NO: 579968 - DNA, 75 bp, synthetic construct
  source 1..75: mol_type = other DNA
ctttatgcacctcgataaagacggcgcgatccgtatggactgctcctctgagtgtgcgatggcgggcctgctggc

SEQ ID NO: 579969 - DNA, 75 bp, synthetic construct
  source 1..75: mol_type = other DNA
cgccaaatggtggcccggctgataccaacgtcactaaagtggtggaagacagagccaacgcactgctggctgatg

SEQ ID NO: 579970 - DNA, 75 bp, synthetic construct
  source 1..75: mol_type = other DNA
tgaatgcacagggagttcccacgggtacgctggaaaagtatgccgcacacacggcagacacccgcttacatctcg

SEQ ID NO: 579971 - DNA, 75 bp, synthetic construct
  source 1..75: mol_type = other DNA
cttgatagccaagctttattgcttttaacggaaacacgttcaaaacaaaaaacgacattttcacagcaaactatt

SEQ ID NO: 579972 - DNA, 75 bp, synthetic construct
  source 1..75: mol_type = other DNA
agattgataattacgtgcgtaaggagcatcccctgcactgtgcgggtagctttaagagtgaaggatttggcatta

SEQ ID NO: 579973 - DNA, 75 bp, synthetic construct
  source 1..75: mol_type = other DNA
cgttgtctaagctgtctccggaaatggtgagcgccagcaccctggcaggtgacccgatcaccgcacgtctgacgg

SEQ ID NO: 579974 - DNA, 75 bp, synthetic construct
  source 1..75: mol_type = other DNA
ttgggcaagcaaattccagtggcgatgaccctggaaaagaatatgccgatcggttctggtttaggttccagcgcc

SEQ ID NO: 579975 - DNA, 75 bp, synthetic construct
  source 1..75: mol_type = other DNA
gtttgatgagtggctgtgggtgctggcgtatccggggattaaagtctcgacggcagaagcccgggctattttacc

SEQ ID NO: 579976 - DNA, 75 bp, synthetic construct
  source 1..75: mol_type = other DNA
gaaatcggcgcggtagcgagcggtatctccggctccggcccgaccttgttcgctctgtgtgacaagccggaaacc

SEQ ID NO: 579977 - DNA, 75 bp, synthetic construct
  source 1..75: mol_type = other DNA
tgttgccgttggtaaaacgctggtttcttctgcgatgatcgaccgtgtggtcaatgatttgggccgcaggctggt

SEQ ID NO: 579978 - DNA, 75 bp, synthetic construct
  source 1..75: mol_type = other DNA
cctcgcatgtgctgggaacacttccccgcgaacaggtcagcgaatttctctctggtttgttgattggtgcagagg

SEQ ID NO: 579979 - DNA, 75 bp, synthetic construct
  source 1..75: mol_type = other DNA
ctttatgcacctcgataaagacggtgcgatccgtatggactgctcctccgagtgtgcgatggcgggcctgctggc

SEQ ID NO: 579980 - DNA, 75 bp, synthetic construct
  source 1..75: mol_type = other DNA
aaagaagacggcctgcatttaatcgaaatcgctcctggcgtcgatttacaaaaagatattctcgacaaaatggat

SEQ ID NO: 579981 - DNA, 75 bp, synthetic construct
  source 1..75: mol_type = other DNA
acctttcgggcgctgatactgcgccgcagcaatcgccgtatatggccgcacctgtaggcgctgacaacggcgcta

SEQ ID NO: 579982 - DNA, 75 bp, synthetic construct
  source 1..75: mol_type = other DNA
agctcaagtggatgctgtctaaatacagactttcgaaccggaaggctcagcgagagctgacgctggtaaggaagg

SEQ ID NO: 579983 - DNA, 75 bp, synthetic construct
  source 1..75: mol_type = other DNA
atggctaagcacagttggttattaatcgccgcattacctctctccatttcaccttcctggggcgcagatttttat

SEQ ID NO: 579984 - DNA, 75 bp, synthetic construct
  source 1..75: mol_type = other DNA
tcacgggcgcatcgtgctctaccgtgattcgctggacgacgccatcagtatgctgcgagtacgtgaagcctggcg

SEQ ID NO: 579985 - DNA, 75 bp, synthetic construct
  source 1..75: mol_type = other DNA
ggacaatatgattaagcaggtaaaagtttttcctgtaaaacgctgcgcgagagtgtggcggagtaaaaaaacggc

SEQ ID NO: 579986 - DNA, 75 bp, synthetic construct
  source 1..75: mol_type = other DNA
taagccagaccgcctgataagcctggtgttaatcggcaataacctggtcaatattcttgcctccgcgctcggcac

SEQ ID NO: 579987 - DNA, 75 bp, synthetic construct
  source 1..75: mol_type = other DNA
tcactcagatgtgtctggcgctggcagggcatgacagcatacatctggttctggagctgacggagcagcagccgt

SEQ ID NO: 579988 - DNA, 75 bp, synthetic construct
  source 1..75: mol_type = other DNA
tgctctctgggaatggattatctgcagggattttatttcggcaggccggaaaaggtggttgtaatggttgcaata

SEQ ID NO: 579989 - DNA, 75 bp, synthetic construct
  source 1..75: mol_type = other DNA
gaatctgccggtctgttgttgccgctgacgaaaaagatcctcgaccgtgcggtggccaagctttcggagattaaa

SEQ ID NO: 579990 - DNA, 75 bp, synthetic construct
  source 1..75: mol_type = other DNA
ttgttggtttaccgcgataaaagcggcgagcatgactatgagcttaaagatattggtcacagttgtgcgtcattt

SEQ ID NO: 579991 - DNA, 75 bp, synthetic construct
  source 1..75: mol_type = other DNA
tcgccgcattaccgctctccatttcaccttcctggggcgcagatttttattaccgccaacaggagaaaggcacgg

SEQ ID NO: 579992 - DNA, 75 bp, synthetic construct
  source 1..75: mol_type = other DNA
aaactgaatggctgcgttacaaccccatttcagcagaatggtctacggtgaagcaacccccgagcggtctgaaac

SEQ ID NO: 579993 - DNA, 75 bp, synthetic construct
  source 1..75: mol_type = other DNA
tcagtatgctgcgtgtacgtgaagcctggcggttgatgtcggagaaaaaagagttcaccaaagaaaccatgctac

SEQ ID NO: 579994 - DNA, 75 bp, synthetic construct
  source 1..75: mol_type = other DNA
cactgcaaaggcgaattgacccgctcactggcgctaatgcagcaaaccgaacagatggcacgccagcacgatgtc

SEQ ID NO: 579995 - DNA, 75 bp, synthetic construct
  source 1..75: mol_type = other DNA
atcgcaccggatttatcagccattttgtgattgaaggcgaagcgatggcgcaacaactgcgccagttgattcaac

SEQ ID NO: 579996 - DNA, 75 bp, synthetic construct
  source 1..75: mol_type = other DNA
gcgctctcggcaaggcaaaatacccattctgctcataaatccgcacgccgcctggctggaatcaatgccagccat

SEQ ID NO: 579997 - DNA, 75 bp, synthetic construct
  source 1..75: mol_type = other DNA
ggcggcaaactgaatgaagtcactaaagaagacctgattaaactggtcgagtttgataacaaagaatatctctat

SEQ ID NO: 579998 - DNA, 75 bp, synthetic construct
  source 1..75: mol_type = other DNA
gagccgaacacgagatccagggtatcagggaaggcaccatgcacgcagaatttaacgctctgcgcgcccaggtcg

SEQ ID NO: 579999 - DNA, 75 bp, synthetic construct
  source 1..75: mol_type = other DNA
ggaacagcatcgcgcgcagcgtattctgcgagaaatcaatcaacatcatcggcataaattcgcccatttcgatga

SEQ ID NO: 580000 - DNA, 75 bp, synthetic construct
  source 1..75: mol_type = other DNA
attttgcgctcaatgaacgatgccctcatcacccgtgtgaccggcgaagaaaacgggcaaatgcgtctcgaagag

SEQ ID NO: 580001 - DNA, 75 bp, synthetic construct
  source 1..75: mol_type = other DNA
tttggcaaagatgtctgtagccgtgttgtgactctggaagagagccgcaaagctctggtcgggaatttaaaataa

SEQ ID NO: 580002 - DNA, 75 bp, synthetic construct
  source 1..75: mol_type = other DNA
cggattacgttgaaacaaaatttgttgttggcagtgctggcgaggctggcgagttgattcagatgggcacctgga

SEQ ID NO: 580003 - DNA, 75 bp, synthetic construct
  source 1..75: mol_type = other DNA
ttgtcctcgaagaactcaacgaaaatgcccgcagtctgcggttaatgagcgacctgaaccgcaacctgctgttac

SEQ ID NO: 580004 - DNA, 75 bp, synthetic construct
  source 1..75: mol_type = other DNA
cacggctggatgaagccgaagcctcggcgcgtagcgggatcgaagttttatcttcttatcagcctcagcaacagc

SEQ ID NO: 580005 - DNA, 75 bp, synthetic construct
  source 1..75: mol_type = other DNA
cacggctggatgaagccgaagcgtcggcgcgtagcgggattgaagtcttgtcgtcttatcagccacagcaacagc

SEQ ID NO: 580006 - DNA, 75 bp, synthetic construct
  source 1..75: mol_type = other DNA
gctccacctccgatgaaaccatcgaagaagccgagaaagacctgccgcgcaatctctgcccgctgatcaaaagca

SEQ ID NO: 580007 - DNA, 75 bp, synthetic construct
  source 1..75: mol_type = other DNA
gaaagccgagatgctgcgcttacaaaaagcggtggaagaacgttttgggcacgaaattagcgaagatgctctgcg

SEQ ID NO: 580008 - DNA, 75 bp, synthetic construct
  source 1..75: mol_type = other DNA
tgcaatgaagcacatttttctacagcttgatagcgaagctttattgcttgtaacgagaacacgttcaaaacaaaa

SEQ ID NO: 580009 - DNA, 75 bp, synthetic construct
  source 1..75: mol_type = other DNA
tcacctgaacaacagagaaaaaacaaagatcgctgatgccctgagacaaacatatcccctgacagaattactgca

SEQ ID NO: 580010 - DNA, 75 bp, synthetic construct
  source 1..75: mol_type = other DNA
tgacaaccagtctcccgcccagcagcagcaacttacccactggcaagagcaaggacatgatattttcccgcttgg

SEQ ID NO: 580011 - DNA, 75 bp, synthetic construct
  source 1..75: mol_type = other DNA
cgcgagatcaaacgctggatcgacaacggcgtgcaggttagcaaagttaagatgttgctaagtaatgataatgtt

SEQ ID NO: 580012 - DNA, 75 bp, synthetic construct
  source 1..75: mol_type = other DNA
actgttcaacggtgcgccgccggaaggtgacattgctgtcgagtactggagtacggtggcgaaaattccggctcg

SEQ ID NO: 580013 - DNA, 75 bp, synthetic construct
  source 1..75: mol_type = other DNA
aatgcgcaatctggcgcagcagaagtcgaacgacccagagcaggtttacgcttacgggctgtacctacgcttacg

SEQ ID NO: 580014 - DNA, 75 bp, synthetic construct
  source 1..75: mol_type = other DNA
cgggtatgtaaaaacaagcaaggcacgaaaggacaggggtggcggaacatggctgcatccaaagttatcagttgc

SEQ ID NO: 580015 - DNA, 75 bp, synthetic construct
  source 1..75: mol_type = other DNA
gcgccgggcacatcatagcccatatacctgcacgctgaccacactcacttttcctgaaaataacccgctcattca

SEQ ID NO: 580016 - DNA, 75 bp, synthetic construct
  source 1..75: mol_type = other DNA
tgacaggatcgcggcaaaccgcggttatccggtcatgctgagcatagataattgtccggaatttatctctctggc

SEQ ID NO: 580017 - DNA, 75 bp, synthetic construct
  source 1..75: mol_type = other DNA
tatccggtcatgctgcgcatggataatggtccggaatttatctctctggcgctggctgaatgggcagagatacac

SEQ ID NO: 580018 - DNA, 75 bp, synthetic construct
  source 1..75: mol_type = other DNA
tccatcttaccagacctcacccagacaaagacaaaagagaatgattgttatttacttttcaaaaaaagtgtcata

SEQ ID NO: 580019 - DNA, 75 bp, synthetic construct
  source 1..75: mol_type = other DNA
agcggtaaaagtaacgaaggaggtatgttctctggccttcgtggcaacattttcctgcttggcgagatcggagat

SEQ ID NO: 580020 - DNA, 75 bp, synthetic construct
  source 1..75: mol_type = other DNA
aagccaaagatgctgagacaaaagcagtgaaggattccatcttctcgatgcagaacctcagctctgttaccggtg

SEQ ID NO: 580021 - DNA, 75 bp, synthetic construct
  source 1..75: mol_type = other DNA
cgtgcggctgtggccgttcagcagatgtccggtaagggcgttgtgtcaatggaagagctacgtcagcaattaggt

SEQ ID NO: 580022 - DNA, 75 bp, synthetic construct
  source 1..75: mol_type = other DNA
ctttcttctcgtaagaatgctgtcgaggggcaaatagccactcttaatgatcagcttgaaaaagcgaaaaaggaa

SEQ ID NO: 580023 - DNA, 75 bp, synthetic construct
  source 1..75: mol_type = other DNA
atacagaaagcatatggaacaatgctgctaaacgggtgaaagccgtcgtacttgagactatcgctcaagaaaaac

SEQ ID NO: 580024 - DNA, 75 bp, synthetic construct
  source 1..75: mol_type = other DNA
tagctgggtatcagggctatttaatagcaccgaagccaaagatgctgagacaaaagcagtgaaggactccatctt

SEQ ID NO: 580025 - DNA, 75 bp, synthetic construct
  source 1..75: mol_type = other DNA
tggagcgtctgctggatggcttctatacccttagcgatcaaaccatgtatgacatgcttggctggctggcgcagg

SEQ ID NO: 580026 - DNA, 75 bp, synthetic construct
  source 1..75: mol_type = other DNA
attgtccatataaagtcaagaggtattttacgttatgtcactgatgcaattgttagtcaggatctcatggttgtc

SEQ ID NO: 580027 - DNA, 75 bp, synthetic construct
  source 1..75: mol_type = other DNA
atgacagcgctgaccgactgtcatttacagaaaccctgtttgtagcacattccatcttacctgacccagacaaag

SEQ ID NO: 580028 - DNA, 75 bp, synthetic construct
  source 1..75: mol_type = other DNA
tttaatcaccggctgcccaattggcggcgcagcagagaaagtggtgcgcgcgattgaagagaatggcggctgggt

SEQ ID NO: 580029 - DNA, 75 bp, synthetic construct
  source 1..75: mol_type = other DNA
cgcagaacaactgcgtaatgccactcatctggtgtgggcgacgggaggtggaatggtgccggaagaagagatgga

SEQ ID NO: 580030 - DNA, 75 bp, synthetic construct
  source 1..75: mol_type = other DNA
taccggattacacgatcagatttctgttcaggatattggcatcgacaaccttaccgcagcggatggccttgcagt

SEQ ID NO: 580031 - DNA, 75 bp, synthetic construct
  source 1..75: mol_type = other DNA
aaggcgaacctatccgcttcaatacggatggctggattaatgccactgatattgcaaaacgtttcgggaagcgtc

SEQ ID NO: 580032 - DNA, 75 bp, synthetic construct
  source 1..75: mol_type = other DNA
ctatcagcaggagctgctggaaggaaaaccgaaacccaacaacagcgagctggtggtacgcaactggtataaccc

SEQ ID NO: 580033 - DNA, 75 bp, synthetic construct
  source 1..75: mol_type = other DNA
ttttgcccgcgccagcgcctttacccatgtgctgctgttgaaaagtccgcaggagatccgcccaactatcgatac

SEQ ID NO: 580034 - DNA, 75 bp, synthetic construct
  source 1..75: mol_type = other DNA
cctgtttcatggcgcgttgatgaatataagaaaaaattccttgcggcttccccatcaggaaagcgtgaattgatt

SEQ ID NO: 580035 - DNA, 75 bp, synthetic construct
  source 1..75: mol_type = other DNA
gccagttcattagcgaaaactggctacggccaatatctgctggagttactccgtgcccgtccgcgccagtattga

SEQ ID NO: 580036 - DNA, 75 bp, synthetic construct
  source 1..75: mol_type = other DNA
cacctcagaaaacggcgatattcaaccggaatcaccggtggttgatgcgactgaagcacaacccgaaccgggcac

SEQ ID NO: 580037 - DNA, 75 bp, synthetic construct
  source 1..75: mol_type = other DNA
ggatgccattctggatgaactgcttggtgtacaggcagagccaccgactgaagcgggagataccaccgcagagag

SEQ ID NO: 580038 - DNA, 75 bp, synthetic construct
  source 1..75: mol_type = other DNA
actctgtaagtattgatatttcttttccagatttttctactacctataaatttacaggtgaaacagcctggattg

SEQ ID NO: 580039 - DNA, 75 bp, synthetic construct
  source 1..75: mol_type = other DNA
atggcgtgttgcagaatataagagaatgtttatggaggcttcaccatcagataaacgagatttgattctgtctct

SEQ ID NO: 580040 - DNA, 75 bp, synthetic construct
  source 1..75: mol_type = other DNA
cgaacgcaaaacaaggatgaattaataaatgtacaggggcaactagacttactgaatcagaccctacaaaatgct

SEQ ID NO: 580041 - DNA, 75 bp, synthetic construct
  source 1..75: mol_type = other DNA
aaatattaaaatatgaagataaagtcagatctaatatactttatttaccttttaaacccgcattgaatgataaat

SEQ ID NO: 580042 - DNA, 75 bp, synthetic construct
  source 1..75: mol_type = other DNA
gtatgttttcacttaaagtggataacggaatgaagcgtcagatagagcaatttgacctcatgtcacgtatatacc

SEQ ID NO: 580043 - DNA, 75 bp, synthetic construct
  source 1..75: mol_type = other DNA
cttctcgaccatgcagtcacttatacggggtgccggcttgatgaacaatggaaaaattctgttttaagccagtta

SEQ ID NO: 580044 - DNA, 75 bp, synthetic construct
  source 1..75: mol_type = other DNA
acgcgaagcggaatatccgacaggaatagaactggaaggttattctatcgctataccacactgtgatagtgaaca

SEQ ID NO: 580045 - DNA, 75 bp, synthetic construct
  source 1..75: mol_type = other DNA
cagcgaagcaaaagtgcggcactcgcccgattaatgaaacacgaagtctctgaagtgatcgccgatgttccctgg

SEQ ID NO: 580046 - DNA, 75 bp, synthetic construct
  source 1..75: mol_type = other DNA
catcgacggaagatcagttcgccgatcgggcaaaagagatgctggagcagttcgttcaggagcggggacataaaa

SEQ ID NO: 580047 - DNA, 75 bp, synthetic construct
  source 1..75: mol_type = other DNA
gataacccgcgcagtaataaccgccatcaataacatgcttatcgatctgatggccgcaatgtcacataaggactg

SEQ ID NO: 580048 - DNA, 75 bp, synthetic construct
  source 1..75: mol_type = other DNA
catcaacggaagatcagttcgccgatcgggcaaaagagatgctggagcagttcgttcaggagcgggggcataaaa

SEQ ID NO: 580049 - DNA, 75 bp, synthetic construct
  source 1..75: mol_type = other DNA
gaagttactgttactgaagataaaaaacagtacgcccgcgctaaagtcgtacgccggttaagcgatagcccggaa

SEQ ID NO: 580050 - DNA, 75 bp, synthetic construct
  source 1..75: mol_type = other DNA
cccgattaatgaaacacgaagtctctgaagtgatcgccgatgttccctggggctatcgccgtcgcgcgcgtttaa

SEQ ID NO: 580051 - DNA, 75 bp, synthetic construct
  source 1..75: mol_type = other DNA
tctctctgggttcaaatagttattttttttggtatgtatataagtccagagttaaaaagattgttatatactttc

SEQ ID NO: 580052 - DNA, 75 bp, synthetic construct
  source 1..75: mol_type = other DNA
ttatatttggattacagcaaaacatatcttcatcaatccccgatattaaacaaagttcggatatgggctgggtta

SEQ ID NO: 580053 - DNA, 75 bp, synthetic construct
  source 1..75: mol_type = other DNA
cgtgcttgagcatatttttaacacgcaccgtacaacgaatacggtgaaagagagctggctcaatgctatgcgtaa

SEQ ID NO: 580054 - DNA, 75 bp, synthetic construct
  source 1..75: mol_type = other DNA
cagatgcaacgggctacagcactttgcaggtttgccgtattcaggcactttatcgagaatcaacgactgatcaaa

SEQ ID NO: 580055 - DNA, 75 bp, synthetic construct
  source 1..75: mol_type = other DNA
ccgatacagccttcagtggttaccagttgctgctggagtatttcagcttccgtccgaagtttatgtttgttgaac

SEQ ID NO: 580056 - DNA, 75 bp, synthetic construct
  source 1..75: mol_type = other DNA
atttgtctgactcaaatcgtaaattctaacatggctgtgattgcagccattattggtatcggttgctctagactt

SEQ ID NO: 580057 - DNA, 75 bp, synthetic construct
  source 1..75: mol_type = other DNA
aattgcgatgatgaccgtattgaggcggttaaggctgtgttgcgtagactggctggcaactctccggtaactccg

SEQ ID NO: 580058 - DNA, 75 bp, synthetic construct
  source 1..75: mol_type = other DNA
ccattaggaattgacgtaggcaaacaaaagttcgtacaggccattggagagcttcctgattttggcggatatcta

SEQ ID NO: 580059 - DNA, 75 bp, synthetic construct
  source 1..75: mol_type = other DNA
gttgcacaaattgaaaatagcctcgcaggacgtccgccaatggcggtggggtttgatatcgatgacacggtactt

SEQ ID NO: 580060 - DNA, 75 bp, synthetic construct
  source 1..75: mol_type = other DNA
ggaagggcattcatgcagcgcagacagtcagggcaaatccgataattcaccattgccgcgctaccaggttatcga

SEQ ID NO: 580061 - DNA, 75 bp, synthetic construct
  source 1..75: mol_type = other DNA
tgttggtgagttttatgaatacaaaccgggtgactggtatcagcgttcggtcggggataaagcaccaaagtgggt

SEQ ID NO: 580062 - DNA, 75 bp, synthetic construct
  source 1..75: mol_type = other DNA
taaatattttattgatggtgtatttcaacctttgagatatgagcgtgactgtgaaagggcggttgtggccgctgg

SEQ ID NO: 580063 - DNA, 75 bp, synthetic construct
  source 1..75: mol_type = other DNA
gcaaaaaaaccttctcaccagaaagcgaagattatctgaaaaatcctgtgttctgggaaaaaatgaacaatggct

SEQ ID NO: 580064 - DNA, 75 bp, synthetic construct
  source 1..75: mol_type = other DNA
gcgcacatcattcgtgttcatgacgtcaaagaaaccgtagaaacgatgcgggtggtggaagccactctgtctgca

SEQ ID NO: 580065 - DNA, 75 bp, synthetic construct
  source 1..75: mol_type = other DNA
cagcagagtccggttttactttacctttgcaggtgctcaaaagcggtcgcggttattatatcggtacggcaaatc

SEQ ID NO: 580066 - DNA, 75 bp, synthetic construct
  source 1..75: mol_type = other DNA
tgttcgctctaaacagttctgctgttgcgttagcctcttcaccttcaccgcttaatcccggcactaacgttgcca

SEQ ID NO: 580067 - DNA, 75 bp, synthetic construct
  source 1..75: mol_type = other DNA
aaaagtttcaacttactgactatttagggaaaaatatgcgcaagatcacacaggcattgagtgccgtttgcttat

SEQ ID NO: 580068 - DNA, 75 bp, synthetic construct
  source 1..75: mol_type = other DNA
gtattttgcgagcctccaattctacctataaacccttgccacaagcgggcgctttcggtgaagaggtgatcgtca

SEQ ID NO: 580069 - DNA, 75 bp, synthetic construct
  source 1..75: mol_type = other DNA
gccgctacgcacaagaagataaccgctggttctcgtgggtctctttcaatggcacaaacattgacgacagcaatc

SEQ ID NO: 580070 - DNA, 75 bp, synthetic construct
  source 1..75: mol_type = other DNA
ttactgcacgctctgtaccggataaaagcgtatcagatgattttatgaatgctgttctcagtaactgcaccacaa

SEQ ID NO: 580071 - DNA, 75 bp, synthetic construct
  source 1..75: mol_type = other DNA
tttattttcttctccgggacatactgtggtctccggacaacccggggacggaaaatctgttccggtggaaaatta

SEQ ID NO: 580072 - DNA, 75 bp, synthetic construct
  source 1..75: mol_type = other DNA
gaacatgcgtaatattaatattattactgcacgctctgtaccggataaaagcgtatcagatgattttatgaatgc

SEQ ID NO: 580073 - DNA, 75 bp, synthetic construct
  source 1..75: mol_type = other DNA
cgagttgcgtggcggaatggatgcttcacagtacaaagactatgtgttgaccctactgtttatgaagtacgtctc

SEQ ID NO: 580074 - DNA, 75 bp, synthetic construct
  source 1..75: mol_type = other DNA
cgggaaaaatcagtaaatgccctgtttattttcctgatgacagaacaaacagaaataacggagataaaaatgaac

SEQ ID NO: 580075 - DNA, 75 bp, synthetic construct
  source 1..75: mol_type = other DNA
attcagtcctgaatcattgccgcacaattttaatatggctgctgtcggtgtgatgaagaagggaatgtcgatgag

SEQ ID NO: 580076 - DNA, 75 bp, synthetic construct
  source 1..75: mol_type = other DNA
tggcaatggagtcagagcatattgctcaggttaccgcaatagctcccgaggtgcgcgggaagacaatgctttttg

SEQ ID NO: 580077 - DNA, 75 bp, synthetic construct
  source 1..75: mol_type = other DNA
ggttttacagtaaatcctgtatgcagtaatcatttctccatatttatgacgagacaaaacactattgctcgcaac

SEQ ID NO: 580078 - DNA, 75 bp, synthetic construct
  source 1..75: mol_type = other DNA
cggcagcaatgtcggctggaaagttgcgccgtatttatctgttcctgcccgtttttcatctattggcgaacaatt

SEQ ID NO: 580079 - DNA, 75 bp, synthetic construct
  source 1..75: mol_type = other DNA
gaccgtatgatggaaaaaggctacacccgtaaacaggtgcgtttactgtgcgaatggtatttgcgcgtacgtaaa

SEQ ID NO: 580080 - DNA, 75 bp, synthetic construct
  source 1..75: mol_type = other DNA
cgcggatttctggattcaggatcaggagtatcgcgatccggataccgggcagttgtttgaccgcgagtctcttaa

SEQ ID NO: 580081 - DNA, 75 bp, synthetic construct
  source 1..75: mol_type = other DNA
aatgatactgtaatcataaaagaacgttataaaatggatatccgttatatcgaatcagtcaatggttttacagta

SEQ ID NO: 580082 - DNA, 75 bp, synthetic construct
  source 1..75: mol_type = other DNA
gatattcaggcgtggacggcagattatcgcgtcagctggcatcagaaggtagctaacggacagactattgagcct

SEQ ID NO: 580083 - DNA, 75 bp, synthetic construct
  source 1..75: mol_type = other DNA
atgaaaaaactcacctcccttatcgcagacgtacaaaaaacccgcctgcgtggctggcttgttgccgccgtactg

SEQ ID NO: 580084 - DNA, 75 bp, synthetic construct
  source 1..75: mol_type = other DNA
atagcgagaatgtgagttgggataatcaggtgctgattactcagtgggcgtggtcgaaattttgcgagcatctgg

SEQ ID NO: 580085 - DNA, 75 bp, synthetic construct
  source 1..75: mol_type = other DNA
tttccggctggctggtcgcttccgtcgcgctgtttgtcgtgatcggctggacatcttccgcacagatcccggtag

SEQ ID NO: 580086 - DNA, 75 bp, synthetic construct
  source 1..75: mol_type = other DNA
gtggaaattattactgaacgcgtgactaatatcgctatgggacctgacattaataaagtcacagaatttgaagaa

SEQ ID NO: 580087 - DNA, 75 bp, synthetic construct
  source 1..75: mol_type = other DNA
atgattggtcgcatgggatgtcaggcgggtcatcgctatggtaacgccagttatctggcctcagattttgttttt

SEQ ID NO: 580088 - DNA, 75 bp, synthetic construct
  source 1..75: mol_type = other DNA
atatcatattccacgaagacgaagataactcggttctgagccttaaagagtggctaaaaaaagggattgaaagcc

SEQ ID NO: 580089 - DNA, 75 bp, synthetic construct
  source 1..75: mol_type = other DNA
gtcgaggaaggacgtaaagcagcgcagtctgacccgaactgtttctttattgatgacgagaattcccgcacgttg

SEQ ID NO: 580090 - DNA, 75 bp, synthetic construct
  source 1..75: mol_type = other DNA
tctttattgatgacgagaattcccgcacgttgttccttgggtattccgtcgctggccagcgtcttaaagcgcaat

SEQ ID NO: 580091 - DNA, 75 bp, synthetic construct
  source 1..75: mol_type = other DNA
tggcgttcgctgacgatgcggggaggacgcggagtatcacgttgagcacaccggttaaggctgtgacagcgccgt

SEQ ID NO: 580092 - DNA, 75 bp, synthetic construct
  source 1..75: mol_type = other DNA
ttttacccttaaccggtgtgctgtatgtagttctgctggcgatcctagcggatcagtcgacgatctatagtaaag

SEQ ID NO: 580093 - DNA, 75 bp, synthetic construct
  source 1..75: mol_type = other DNA
gttgttaccgcttattatttttgccctgaccgcgttagtcgcaaaatgggtaggttatgtcagacaaggactccg

SEQ ID NO: 580094 - DNA, 75 bp, synthetic construct
  source 1..75: mol_type = other DNA
aacgcggttatcatgctggtgatgacgctggttgaacgtaaagttcgcctgcccggcaacatgggaggcaaataa

SEQ ID NO: 580095 - DNA, 75 bp, synthetic construct
  source 1..75: mol_type = other DNA
aatcttatcggcgttcctctgtgctattttattattcggtccgtgcgaaatcctttttatttacgtagctattat

SEQ ID NO: 580096 - DNA, 75 bp, synthetic construct
  source 1..75: mol_type = other DNA
agcagagataatttggtaggggttatgccctttaacctcgggacattaatcaattaccaggccttgctggtaggt

SEQ ID NO: 580097 - DNA, 75 bp, synthetic construct
  source 1..75: mol_type = other DNA
tattatcattattattatttgttggggcggttacagggttttttctccccggcgtaacaacgtttcacatggtga

SEQ ID NO: 580098 - DNA, 75 bp, synthetic construct
  source 1..75: mol_type = other DNA
tggtgttggcgattttcgtgatttcggtcacattaggtgcgcagaacgatcaacaggtaacgtttaattatctgt

SEQ ID NO: 580099 - DNA, 75 bp, synthetic construct
  source 1..75: mol_type = other DNA
tttgcgcgccgcgctggaactggaaccgaataatagcaacatccaggcagcgcttggttacgccttgtgggatag

SEQ ID NO: 580100 - DNA, 75 bp, synthetic construct
  source 1..75: mol_type = other DNA
ttttggcagattgttttccctgcaacgttgtttctggtgctcttccagtttgcggcgtttgtaggtttactggcg

SEQ ID NO: 580101 - DNA, 75 bp, synthetic construct
  source 1..75: mol_type = other DNA
gtttgcgaacaggtacgcgccgcgattcagtcgctgccgcgtgggcagaagaatgccgcgctggcgatgggtctg

SEQ ID NO: 580102 - DNA, 75 bp, synthetic construct
  source 1..75: mol_type = other DNA
ggcgtatgtgctgattaacgccgttattatgctggtgatgacgctggtcgaacgtaaagttcgcctgcccggcaa

SEQ ID NO: 580103 - DNA, 75 bp, synthetic construct
  source 1..75: mol_type = other DNA
ccgttgattgtgcagttctttacctggtatctggtgatcccggagctgctgccggaaaaaatcggcatgtggttt

SEQ ID NO: 580104 - DNA, 75 bp, synthetic construct
  source 1..75: mol_type = other DNA
aacgaagagatccgcgaggcggtgctctctttggggatcgattatatgcagggttatcttattggtaagccgcag

SEQ ID NO: 580105 - DNA, 75 bp, synthetic construct
  source 1..75: mol_type = other DNA
gtggacccggtggttcatctgccaaatgttcgcgccctgaatcgcgcgttgcgtgatgccccctggtctgcgctt

SEQ ID NO: 580106 - DNA, 75 bp, synthetic construct
  source 1..75: mol_type = other DNA
gtttgcgaacaggtgcgcgccgcgatccagtcgctgccgcgcgggcaaaaaaatgccgcgctggcgatggggttg

SEQ ID NO: 580107 - DNA, 75 bp, synthetic construct
  source 1..75: mol_type = other DNA
catttcagcgcggcagcccgtcggggaattatttctgacaggtttgtagaagcaattttgcagttttggcgcgaa

SEQ ID NO: 580108 - DNA, 75 bp, synthetic construct
  source 1..75: mol_type = other DNA
tccacaaacaaattatcaatattggtgaattaaaagcgtacctggcaacacagggcgtggagatcaggatatgtt

SEQ ID NO: 580109 - DNA, 75 bp, synthetic construct
  source 1..75: mol_type = other DNA
ccgttctgcgtggcgggtgggattaagtctctggaagatgccgcgaaaattctttcctttggcgcggataaaatt

SEQ ID NO: 580110 - DNA, 75 bp, synthetic construct
  source 1..75: mol_type = other DNA
ggtgaaaggcgtacagtttcgcaaccatgaaatcattggcgatatcgtgccgctggcaaaacgctacgccgaaga

SEQ ID NO: 580111 - DNA, 75 bp, synthetic construct
  source 1..75: mol_type = other DNA
gagcccttccccattttcacgtttttcactcactgctcgccagaaccggcggcggtcttttacctcataaggaat

SEQ ID NO: 580112 - DNA, 75 bp, synthetic construct
  source 1..75: mol_type = other DNA
tggagagcaccatcatcgagtggcggtgtttccgctgaatgatatccatgcggttaccttgcacccggaactgtt

SEQ ID NO: 580113 - DNA, 75 bp, synthetic construct
  source 1..75: mol_type = other DNA
ctcaacatgatgaaccaggatggtgtgcgtaacggctacgacctggaacaactgaaaaaagtgcgtgaagtctgc

SEQ ID NO: 580114 - DNA, 75 bp, synthetic construct
  source 1..75: mol_type = other DNA
catggataaccacatggtcagctcactgctgagtgggcccggtgagtctccgtgcctcatatgggcagaatcgga

SEQ ID NO: 580115 - DNA, 75 bp, synthetic construct
  source 1..75: mol_type = other DNA
gggatgatggccggcgctcatgcggcaagctggtttatcaatggcggcaaaacaccactcaaatttggcgcgatt

SEQ ID NO: 580116 - DNA, 75 bp, synthetic construct
  source 1..75: mol_type = other DNA
taatgccttgaatctaacacctgacagttttaatggcatgttgtcttcatcgaaagacaaacttcaaagaataaa

SEQ ID NO: 580117 - DNA, 75 bp, synthetic construct
  source 1..75: mol_type = other DNA
ttcagtccttaccccattttcgctttatccagcagtcactgcttacgtttgttccggccgacagctcaccagaat

SEQ ID NO: 580118 - DNA, 75 bp, synthetic construct
  source 1..75: mol_type = other DNA
gtctttatccggctggtaaatgctgtccaggaataccggaaagtgactctgcacggcaacggatgcaaccatacg

SEQ ID NO: 580119 - DNA, 75 bp, synthetic construct
  source 1..75: mol_type = other DNA
gaaacgctggatatacgcaaactggctgctgaatttgacgtgtcagttcgtaccctgcgccgggattttcgtgaa

SEQ ID NO: 580120 - DNA, 75 bp, synthetic construct
  source 1..75: mol_type = other DNA
ttttacaggcgttacctcattttcatctttttcattcactgctcactgacgacagttacgggcagattatccata

SEQ ID NO: 580121 - DNA, 75 bp, synthetic construct
  source 1..75: mol_type = other DNA
tggagaaatacgacgggacggggacgagtaataaacctgggcctgggttatggcactttccccggatgaaaaaat

SEQ ID NO: 580122 - DNA, 75 bp, synthetic construct
  source 1..75: mol_type = other DNA
aatggtgagattatttttgccgatagccaggggatttcacgtataagagctgaggatcaacaagccagcattatg

SEQ ID NO: 580123 - DNA, 75 bp, synthetic construct
  source 1..75: mol_type = other DNA
ggcagaagccatattgtccaatgcaaacacgttttcaccatttctgcccggcgataaagtatgggtagaatttcc

SEQ ID NO: 580124 - DNA, 75 bp, synthetic construct
  source 1..75: mol_type = other DNA
atggtggcgctgacactgttgtatggtgcccggcaaacaggaatagataatgcttgtcacattggcggcctgatt

SEQ ID NO: 580125 - DNA, 75 bp, synthetic construct
  source 1..75: mol_type = other DNA
aacgttgcgcctcttactttgtcgggtgaaccctggcgcttattgagcagtatctttctgcacagtagttttccc

SEQ ID NO: 580126 - DNA, 75 bp, synthetic construct
  source 1..75: mol_type = other DNA
tgtctttctgcacagtagttttccccatttgctgatgaatatgtttgcactcctggtggtgggggcagtggcgga

SEQ ID NO: 580127 - DNA, 75 bp, synthetic construct
  source 1..75: mol_type = other DNA
acagtgatggcgatggcggggcaatcgatgttaccgataataatagcgacagcaagcatccttcaggttatacga

SEQ ID NO: 580128 - DNA, 75 bp, synthetic construct
  source 1..75: mol_type = other DNA
cggattcagggccatggcctgttcggcgctgacagagtcaggcaggtggacaagagaagccgttgagcttcagat

SEQ ID NO: 580129 - DNA, 75 bp, synthetic construct
  source 1..75: mol_type = other DNA
tatagaacgtataggttatcactcgaaagttaaatacctggttccgagtattaaggaggacatatcgaaaactga

SEQ ID NO: 580130 - DNA, 75 bp, synthetic construct
  source 1..75: mol_type = other DNA
catctcttccgcaggaaatctcgatataaagtcaggcgcggatgtcgtcatgaaagcggggggaagtatggcgat

SEQ ID NO: 580131 - DNA, 75 bp, synthetic construct
  source 1..75: mol_type = other DNA
ggcgaaacgtaaatcgaccttcccgtcttcgctgcccgctgatgctcagccatttgaactactggtgattaacat

SEQ ID NO: 580132 - DNA, 75 bp, synthetic construct
  source 1..75: mol_type = other DNA
acactgccgaaggttatggcggggcgatatataccaatagcgtgacggctccctatcttattgatgctacagcca

SEQ ID NO: 580133 - DNA, 75 bp, synthetic construct
  source 1..75: mol_type = other DNA
acatcacgcagaatcagcactatcagcatctggcgcttgcagaacggcgaaaagcagcctcgttggtgcccttgc

SEQ ID NO: 580134 - DNA, 75 bp, synthetic construct
  source 1..75: mol_type = other DNA
cacctgcgtggttagcgtctctttctacgctgaagccagaaacctcggtaacggttaaatcgctgcttgattcat

SEQ ID NO: 580135 - DNA, 75 bp, synthetic construct
  source 1..75: mol_type = other DNA
gcatgggcttgtagtgcgtgtcacgatgaaatcgaccgacgcacccataatctcgacaacaaagacgccagactt

SEQ ID NO: 580136 - DNA, 75 bp, synthetic construct
  source 1..75: mol_type = other DNA
aacgaagcgatgaaaccagaagagattcgcgcggtcgaagacctggtgaacgcacagattcgtcgcaacctgcct

SEQ ID NO: 580137 - DNA, 75 bp, synthetic construct
  source 1..75: mol_type = other DNA
cttcatctttgttatttaatgcagcgattgccggtttttctactggagaaatggatcagatatgtcgtgtcaaac

SEQ ID NO: 580138 - DNA, 75 bp, synthetic construct
  source 1..75: mol_type = other DNA
gtgctggacgaggcgaaaatcggtgtcgcatctatgctcggtagtcgggtacgggtgaaaacctggagctggttt

SEQ ID NO: 580139 - DNA, 75 bp, synthetic construct
  source 1..75: mol_type = other DNA
tctcgacaacaaagacgccagactttatcacctcgaaggcgtgatcaggacgcaggcgatcctgctgaaggaggg

SEQ ID NO: 580140 - DNA, 75 bp, synthetic construct
  source 1..75: mol_type = other DNA
ccatcgagtcaacggtgcttgtaacaagtaacaggcaggtattccttgaagcggaacgctttgactgtaaaggta

SEQ ID NO: 580141 - DNA, 75 bp, synthetic construct
  source 1..75: mol_type = other DNA
ccagagaagatcgggtgattcgctttggtaaagcacgggcaacgcgatatgcactgctgcgtccttatcgcggaa

SEQ ID NO: 580142 - DNA, 75 bp, synthetic construct
  source 1..75: mol_type = other DNA
cccaagctggaggatatcagctttacgctccgtcgtggcgaagtactcggcattgctggcctgctgggggcaggg

SEQ ID NO: 580143 - DNA, 75 bp, synthetic construct
  source 1..75: mol_type = other DNA
ctcgacaacaacgacgccagactttaccacctggaaggcgtgatcaggacgcaggcgatactgctgaaggagggg

SEQ ID NO: 580144 - DNA, 75 bp, synthetic construct
  source 1..75: mol_type = other DNA
gcatgggcttgtagtgactgccacgcggagatcgaccgacgcacccggattctcgacaacaaagacgccagactt

SEQ ID NO: 580145 - DNA, 75 bp, synthetic construct
  source 1..75: mol_type = other DNA
gtgctggacgaggcgaaaatcggtgtcgcatccatgctcggcagtcgggtacgggtgaaaacctggagctggttt

SEQ ID NO: 580146 - DNA, 75 bp, synthetic construct
  source 1..75: mol_type = other DNA
caagcgagaagcagaccgatctgcaaacttaccttaccgccaacacgccgaaaccgctgctggaaggccaggtta

SEQ ID NO: 580147 - DNA, 75 bp, synthetic construct
  source 1..75: mol_type = other DNA
cgtctgccatcgacctgcttcgcggaagagaacggttcaatcgttaactccggtcgctggttacagtggcactgg

SEQ ID NO: 580148 - DNA, 75 bp, synthetic construct
  source 1..75: mol_type = other DNA
cccggggattgcgctgactgatggcgagatcctctccggtatcttcctgcgcttgcgcaagatgtatgccgaaca

SEQ ID NO: 580149 - DNA, 75 bp, synthetic construct
  source 1..75: mol_type = other DNA
actatcaacatctggcgcttgcaggacggcgaaaagcagcctcgttgatgcccttgcagccgatatcgacagcac

SEQ ID NO: 580150 - DNA, 75 bp, synthetic construct
  source 1..75: mol_type = other DNA
ttaactacgaggacctgctatttctacacgagaagggttcgctggcattaaagcgcacactggctttgctggcta

SEQ ID NO: 580151 - DNA, 75 bp, synthetic construct
  source 1..75: mol_type = other DNA
agcacaatggcatcgtcgtgccaagactcaacaactggttgctgcggagagtgtgttgtctggtggagtaatcac

SEQ ID NO: 580152 - DNA, 75 bp, synthetic construct
  source 1..75: mol_type = other DNA
cgaagctggcgattacctgatagataacgttgaagcgcggaaggccgcgcgcgctatgttgcgtcggtccggggc

SEQ ID NO: 580153 - DNA, 75 bp, synthetic construct
  source 1..75: mol_type = other DNA
agccgcaagccaaataagccagtcaggaagcctctaaaaagcatgatcattgatcactctaatgatcaacatgca

SEQ ID NO: 580154 - DNA, 75 bp, synthetic construct
  source 1..75: mol_type = other DNA
gtgacctgggacgatcacaagaagaattttgctcgcctggcgcgagatggtggttacaccatcgcacaatatgcc

SEQ ID NO: 580155 - DNA, 75 bp, synthetic construct
  source 1..75: mol_type = other DNA
gtcgcggtgcgatgaccaaccactgggtcgacatcaagaacgccaacctcgtcgtggtgatgggcggtaacgccg

SEQ ID NO: 580156 - DNA, 75 bp, synthetic construct
  source 1..75: mol_type = other DNA
ttagctcgtttgcccaactgcgcgatgacggtacaacctcctgtggctgctggattttcgccggtagctggacgc

SEQ ID NO: 580157 - DNA, 75 bp, synthetic construct
  source 1..75: mol_type = other DNA
tgaaaacatctgtggtacgccaaaagacgcgttcctgaaagtctgcgaatacatcgcagaaaccagtgctcacga

SEQ ID NO: 580158 - DNA, 75 bp, synthetic construct
  source 1..75: mol_type = other DNA
caacggtactaataaaaaacccgaagcaacaacagccaggaagatcaaatcttatctggaatatggtactcaggt

SEQ ID NO: 580159 - DNA, 75 bp, synthetic construct
  source 1..75: mol_type = other DNA
gcaacaacagccaggaagatcaaatcttatctggaatatggtactcaggtttatccgttgatcaatgtgcgcggt

SEQ ID NO: 580160 - DNA, 75 bp, synthetic construct
  source 1..75: mol_type = other DNA
accgaagagagtgtaaaggtattacagcagcaaacacttcaggcggtaaatcgtctgctggaagatattcacaat

SEQ ID NO: 580161 - DNA, 75 bp, synthetic construct
  source 1..75: mol_type = other DNA
gggccagcacgtcggcggtacagaacagcggcaacaaaaccacaaagcctccagatacttcactgctgaaaagca

SEQ ID NO: 580162 - DNA, 75 bp, synthetic construct
  source 1..75: mol_type = other DNA
gtgatgatagttccgcatcaagtaatggctctggaaagtcaactctaatgaatagcctgatgtggtgtctttatg

SEQ ID NO: 580163 - DNA, 75 bp, synthetic construct
  source 1..75: mol_type = other DNA
cgagcctatgccattgcccgcgagcgtgctaatgcagctgccgcacgtatggacgttaccaaatccaaaatggac

SEQ ID NO: 580164 - DNA, 75 bp, synthetic construct
  source 1..75: mol_type = other DNA
acgaaaaagtacagctcattatgacgattgaaaatggtcaggtaataaatacccgtaaagttcacaataacgaga

SEQ ID NO: 580165 - DNA, 75 bp, synthetic construct
  source 1..75: mol_type = other DNA
ggcggagccagggaatctactgtcgatgagctaagtaaatcatggtcatcactgaagtcatctgttggcggaatc

SEQ ID NO: 580166 - DNA, 75 bp, synthetic construct
  source 1..75: mol_type = other DNA
gctggcatggttactaagcgcggtgttctggtgtgcgctggggcactgtgtttcttatttatcagtagtttgttt

SEQ ID NO: 580167 - DNA, 75 bp, synthetic construct
  source 1..75: mol_type = other DNA
cattttcgaaacacaaatcagtcaaatcacaacattaaaaaaacaactggagggcatgccttatggaacaattca

SEQ ID NO: 580168 - DNA, 75 bp, synthetic construct
  source 1..75: mol_type = other DNA
ttaggtaagagccagcaattacgccagcgtgtagccgctgagacagatccaattcgcgcagcattcctcttgggg

SEQ ID NO: 580169 - DNA, 75 bp, synthetic construct
  source 1..75: mol_type = other DNA
cagccaaacttcctgtgaaagattatcaggaaatggaggccattgttcttagtgagctaccaccaattcagcagg

SEQ ID NO: 580170 - DNA, 75 bp, synthetic construct
  source 1..75: mol_type = other DNA
gaaaagcacactgacgccctggaaattacggaacatccggttgaacagcccacgaatgctggtgccagtggtgag

SEQ ID NO: 580171 - DNA, 75 bp, synthetic construct
  source 1..75: mol_type = other DNA
caaattgcccgcatgggcgtggtgcgcaccttccagcatgtgcgtctgttccgtgaaatgacggtgattgaaaac

SEQ ID NO: 580172 - DNA, 75 bp, synthetic construct
  source 1..75: mol_type = other DNA
ccgccacctggcttgagcgcattggtttgctggaacatgccaaccgtcaggcgagtaacctggcctatggtgacc

SEQ ID NO: 580173 - DNA, 75 bp, synthetic construct
  source 1..75: mol_type = other DNA
aggctgtcgaacctgccggcatggcggtgtccttggtattgccgcaggaagcagccgacgttcgtcagtccttct

SEQ ID NO: 580174 - DNA, 75 bp, synthetic construct
  source 1..75: mol_type = other DNA
actcttcagaaggtatcccgtggcatgagctgccagcttcacacaggggaaacaatcagatgagtttgcctttgc

SEQ ID NO: 580175 - DNA, 75 bp, synthetic construct
  source 1..75: mol_type = other DNA
atgcaaggaatacagtttcaggaaaattttattcaacgatttccggcagggttaagcgttgaacagatcattcgt

SEQ ID NO: 580176 - DNA, 75 bp, synthetic construct
  source 1..75: mol_type = other DNA
actcttcagaaggtatcccgtggcatgagctaccagcttcacacaggggaaacaatcagatgagtttgcctttac

SEQ ID NO: 580177 - DNA, 75 bp, synthetic construct
  source 1..75: mol_type = other DNA
cagcgctggctcaatgaatggatcatgaactacgttgatgccgatccggtgaactcctcgcaggaaaccaaagcc

SEQ ID NO: 580178 - DNA, 75 bp, synthetic construct
  source 1..75: mol_type = other DNA
ttactgagcacccggtggagaagccaacaacgaatagcgcttcgggcttcatcgccgatcatgcgtataagcgcc

SEQ ID NO: 580179 - DNA, 75 bp, synthetic construct
  source 1..75: mol_type = other DNA
ataaaaacgctggaggttacgaccgataagagtagtgaaaatgtgcttctggcgacacttaccctcagggaagta

SEQ ID NO: 580180 - DNA, 75 bp, synthetic construct
  source 1..75: mol_type = other DNA
ttccagcttgaagggttaacaggatcactgtgcctggtcacaaaactgccgtcagtaaaacagggtaattcctga

SEQ ID NO: 580181 - DNA, 75 bp, synthetic construct
  source 1..75: mol_type = other DNA
gtggagaaccttacggttgtattattgcggattattattttgatcacacgccaccggatgtggatctgctcggtt

SEQ ID NO: 580182 - DNA, 75 bp, synthetic construct
  source 1..75: mol_type = other DNA
aagccgcaggaatattacgatccagatgccacggctaacgccaatctctcagcccggttgccatatctgttcgcc

SEQ ID NO: 580183 - DNA, 75 bp, synthetic construct
  source 1..75: mol_type = other DNA
cgcaatgctggcggcaccctgttcaatgctcattatgcggctgtttttttcaccgacgcgctcattctggcaaga

SEQ ID NO: 580184 - DNA, 75 bp, synthetic construct
  source 1..75: mol_type = other DNA
ctccagtttacaggcggtagcagcgaccattctgaacgtaactgaagatcatatggatcgctatccgtttggttt

SEQ ID NO: 580185 - DNA, 75 bp, synthetic construct
  source 1..75: mol_type = other DNA
atgctggtcgcttttccggccatcttttttgttgcacgaccgaaagtaccactgaatttgctcttggggtatgga

SEQ ID NO: 580186 - DNA, 75 bp, synthetic construct
  source 1..75: mol_type = other DNA
gtcgcacgaccgaaagtaccgctgaatttactgctggggtatggtttaaccatcagttttgcacagtttgccttt

SEQ ID NO: 580187 - DNA, 75 bp, synthetic construct
  source 1..75: mol_type = other DNA
ttggcgtgggcggcaacatcggcctgccagcgttgatgttgctcgatgctgagtgtgaattgtacgtgctggaac

SEQ ID NO: 580188 - DNA, 75 bp, synthetic construct
  source 1..75: mol_type = other DNA
gtttgccgcgcgccagcagcctgaaagcgttaaccacattcaccggtctgccgcatcgctttgaagttgtgctgg

SEQ ID NO: 580189 - DNA, 75 bp, synthetic construct
  source 1..75: mol_type = other DNA
atgctgcttgatgctgagtgcgaactgtacgtgctggaactgtcgagcttccagctggaaaccacttccagctta

SEQ ID NO: 580190 - DNA, 75 bp, synthetic construct
  source 1..75: mol_type = other DNA
gtcttatcctctcgcgtgatggcacaaaagcctgggtgatgaatcgcaccagtaatagtgtgtcagcgattgatc

SEQ ID NO: 580191 - DNA, 75 bp, synthetic construct
  source 1..75: mol_type = other DNA
gaagaacgggttaatccaaatggacaggacgcgctcgcttgatccgcaggcaattattcgtcatccccaatatgg

SEQ ID NO: 580192 - DNA, 75 bp, synthetic construct
  source 1..75: mol_type = other DNA
accatcatacactaaatcagtaagttggcagcatcacccggaaggcgggattattgttgcgggcagtcttcttct

SEQ ID NO: 580193 - DNA, 75 bp, synthetic construct
  source 1..75: mol_type = other DNA
atgaacaacaacacgccatttaatatgttgtggcaacgaatgctggcgcgcggctggacgccagtcactggaaca

SEQ ID NO: 580194 - DNA, 75 bp, synthetic construct
  source 1..75: mol_type = other DNA
ggcgtttcccgatgggtaaatctgacttccgggtgcacacctttgaagaagagattgaatttgttcaggggttaa

SEQ ID NO: 580195 - DNA, 75 bp, synthetic construct
  source 1..75: mol_type = other DNA
gaaacaggtggcggaatatgcagatggtattggtccggattatcatatgttgattgaggagacatcgcagccagg

SEQ ID NO: 580196 - DNA, 75 bp, synthetic construct
  source 1..75: mol_type = other DNA
gtgaaaggcgagaaagtgctgaacgtgaaagaaatgaaactttccgggcagcataactacaccaatgcgctggca

SEQ ID NO: 580197 - DNA, 75 bp, synthetic construct
  source 1..75: mol_type = other DNA
tttcaatctgaaagccgccaatcatcaaattatcggctccagccagatgtacgccaccgcgcaatctcgtgaaac

SEQ ID NO: 580198 - DNA, 75 bp, synthetic construct
  source 1..75: mol_type = other DNA
cagatgcccgtgaagatgatactgttaaccgtatggatgcttgggtagactataagtggaataattttgactgga

SEQ ID NO: 580199 - DNA, 75 bp, synthetic construct
  source 1..75: mol_type = other DNA
tttcaagattgttagtttggcttgctctattcagtcctctgttgacaggtagtagaggaatgaccatttttttat

SEQ ID NO: 580200 - DNA, 75 bp, synthetic construct
  source 1..75: mol_type = other DNA
acgcacatgaaaggcgcttttcgggctgccgggcatcctgaaatcggcttgctatttttcattcttcctggagca

SEQ ID NO: 580201 - DNA, 75 bp, synthetic construct
  source 1..75: mol_type = other DNA
aatcccgacttccagaaataaccatgtgtcacgtgtggatgtggataaaaaactgcaggaactgaaaaacatgat

SEQ ID NO: 580202 - DNA, 75 bp, synthetic construct
  source 1..75: mol_type = other DNA
catcgcgtcagtgcgtagcaacagcccacaagaagaacgctatgagaaaaaacagcaagcaacggcaaattctat

SEQ ID NO: 580203 - DNA, 75 bp, synthetic construct
  source 1..75: mol_type = other DNA
gatggcctcgtttatgtggatccagtcgatgatccgcgatgataaaaagcgcgccatgctattcgatttggacaa

SEQ ID NO: 580204 - DNA, 75 bp, synthetic construct
  source 1..75: mol_type = other DNA
cttcagatttgatatatcttatatcaaagatcgaaaacaacaaaaaaattatagagtcaatttatatatcggctg

SEQ ID NO: 580205 - DNA, 75 bp, synthetic construct
  source 1..75: mol_type = other DNA
ggaaaaagagttacaacagcttaaagaacaggctgccgcacaggagagtgcaaatctttccagtaaggcaattga

SEQ ID NO: 580206 - DNA, 75 bp, synthetic construct
  source 1..75: mol_type = other DNA
tcatggtggtcatcaagctttgtatatggctgatcgacctttgtttccttttttggtctttaagctattagcatt

SEQ ID NO: 580207 - DNA, 75 bp, synthetic construct
  source 1..75: mol_type = other DNA
atataaagcgctggacacaacgattatggacttagcggatgagatatcctactcactccatgatcttgaggacgc

SEQ ID NO: 580208 - DNA, 75 bp, synthetic construct
  source 1..75: mol_type = other DNA
gcgcacaaggcgcgcaagtcaagaataatcaacaggtagatacccgcagcgcgttatatgccgcattacaaaatg

SEQ ID NO: 580209 - DNA, 75 bp, synthetic construct
  source 1..75: mol_type = other DNA
ctgaatatgatgaaccaggacggcgtgcgtaacgggtatgacctcgagcagctgaaaaaagtgcgtgcggtttgt

SEQ ID NO: 580210 - DNA, 75 bp, synthetic construct
  source 1..75: mol_type = other DNA
aacatatcacactggaggctcatacctttgactctgtaaaatttattctgaccaccgctctcgccgctggtctgc

SEQ ID NO: 580211 - DNA, 75 bp, synthetic construct
  source 1..75: mol_type = other DNA
tcctgctgatcgcaggatttgccattcttcgccttttgttcagagcattaaccagcacagcgtctgcgctggcag

SEQ ID NO: 580212 - DNA, 75 bp, synthetic construct
  source 1..75: mol_type = other DNA
cccgtagcgtcggtgcggcattcgacggacagaacggacagtatcgttacatgggaaatcatggtcccatgcaac

SEQ ID NO: 580213 - DNA, 75 bp, synthetic construct
  source 1..75: mol_type = other DNA
ttggtgcactgacagggcgtgtggttggtggtgttctggggggaatgattgcctccgctgtatcaggaaaaattg

SEQ ID NO: 580214 - DNA, 75 bp, synthetic construct
  source 1..75: mol_type = other DNA
ctcaacatgatgaatcaggatggtgttcgtaacggttacgacctcgaacaactgaaaaaagtgcgtgaagtttgc

SEQ ID NO: 580215 - DNA, 75 bp, synthetic construct
  source 1..75: mol_type = other DNA
ccctcaacactttaatcatatgattgaagcctttcgtagggatctaaaacaataccattctcagcttaataatat

SEQ ID NO: 580216 - DNA, 75 bp, synthetic construct
  source 1..75: mol_type = other DNA
tttcgcgtcagggatggaagcccgccagggcggagacagctccgctggctccgttcacgacagcccgccccgcca

SEQ ID NO: 580217 - DNA, 75 bp, synthetic construct
  source 1..75: mol_type = other DNA
ttaaggtgacagttcatatgtctgctgatgcccgggcatggaaaaaaagcgaaactgcgcagccatggcgttacg

SEQ ID NO: 580218 - DNA, 75 bp, synthetic construct
  source 1..75: mol_type = other DNA
tcctgctgaccggacatgagattgaaaatctgaacgcgaatctggcccgtgttatcgatcagaatgctctggaga

SEQ ID NO: 580219 - DNA, 75 bp, synthetic construct
  source 1..75: mol_type = other DNA
ggagcaaaaatgggcggtggattccattgccgactgcgcgcgtcgttttatggcgcatcctcaggtgaaaggacg

SEQ ID NO: 580220 - DNA, 75 bp, synthetic construct
  source 1..75: mol_type = other DNA
agtggcttaacaatcagcaggccagccaggtgattgaacaactgaaaaaatggctggcacgtgtcgggaggggaa

SEQ ID NO: 580221 - DNA, 75 bp, synthetic construct
  source 1..75: mol_type = other DNA
caaccggccctgacatgatcaaaatgttgcggggacggatctccggtacgcagttcatcaggaatcttgccgtgg

SEQ ID NO: 580222 - DNA, 75 bp, synthetic construct
  source 1..75: mol_type = other DNA
gcgcaggaataccaacgtcggctaattgaacaaggcaatcccgatgcggtttcggttcagtatccgttgagcgaa

SEQ ID NO: 580223 - DNA, 75 bp, synthetic construct
  source 1..75: mol_type = other DNA
cgatctgatgacgacgctgatgcaacgcctgctacatgtcagcacacctgccagcgaatattcgcaaggtcagga

SEQ ID NO: 580224 - DNA, 75 bp, synthetic construct
  source 1..75: mol_type = other DNA
gtattaataccctgaccgatcataccgatctaatgaccacgttgatgcaacgcctgctgcacgtcagtacgcctg

SEQ ID NO: 580225 - DNA, 75 bp, synthetic construct
  source 1..75: mol_type = other DNA
gaaatatcagtgccctgaacaaagtgatgaagggtacgctggtgacatctctggcactggtagctgtcacaaccg

SEQ ID NO: 580226 - DNA, 75 bp, synthetic construct
  source 1..75: mol_type = other DNA
gcgtcggtgcggcattcgacggacaaaacggacagtatcgttacatgggaaatcatggtcccatgcaactggaag

SEQ ID NO: 580227 - DNA, 75 bp, synthetic construct
  source 1..75: mol_type = other DNA
ggcaaacacgcctgtgcgctcgtttatgttccgtcaggaaggacgcgaagcgctgggctttagcccggaactggt

SEQ ID NO: 580228 - DNA, 75 bp, synthetic construct
  source 1..75: mol_type = other DNA
acctatacccaggcccgtaatatcacccggttcgggaccatcgaatcggtcacttatgatattgccgaaggttca

SEQ ID NO: 580229 - DNA, 75 bp, synthetic construct
  source 1..75: mol_type = other DNA
ggagggcagggacatgggtttgccgctgaacggggaaaccatattgtcgacagagtccgtctgaaaaacgcacgg

SEQ ID NO: 580230 - DNA, 75 bp, synthetic construct
  source 1..75: mol_type = other DNA
ccactgggaccatttggtgcactgacagggcgtgtggttggcggtgttctggggggaatgattgcctccgctgta

SEQ ID NO: 580231 - DNA, 75 bp, synthetic construct
  source 1..75: mol_type = other DNA
actggcagctgatgttcatcagcgtgccggttattttattgcttgaactggtgtttgcgacgtggagctggcaaa

SEQ ID NO: 580232 - DNA, 75 bp, synthetic construct
  source 1..75: mol_type = other DNA
catcgtctggcaactggttatcaacccagacgaaaatgagatggcgcgcgactggcagctgatgttcatcagcgt

SEQ ID NO: 580233 - DNA, 75 bp, synthetic construct
  source 1..75: mol_type = other DNA
ccggacgaaaatgagatggcgcgcgactggcagctgatgttcatcagcgtgccggttattttattgcttgaactg

SEQ ID NO: 580234 - DNA, 75 bp, synthetic construct
  source 1..75: mol_type = other DNA
ctaccgtcttacctgctatagctctctctttttaccatcacccaacgcctttcgctgtaaacggcggtttcgcaa

SEQ ID NO: 580235 - DNA, 75 bp, synthetic construct
  source 1..75: mol_type = other DNA
ctaaagtggcgtgcgccagttgccattccctgcatccacagcaagatacgatgcagacgttaagtgacaaaggac

SEQ ID NO: 580236 - DNA, 75 bp, synthetic construct
  source 1..75: mol_type = other DNA
gactgtcataagccagacactgaaggtatgcatggcaaacatgcttccgctatcaacccaaataacaaactgccg

SEQ ID NO: 580237 - DNA, 75 bp, synthetic construct
  source 1..75: mol_type = other DNA
ggtacattctcacggcccgttcgcctggggaaaaaatgccgccgatgcggtgcataacgccgtggtgctggaaga

SEQ ID NO: 580238 - DNA, 75 bp, synthetic construct
  source 1..75: mol_type = other DNA
agcatcgtccgcagtggagcaaagatgttgctgtcggtaaaacgctggtttcttctgcgatgatcgaccgtgtgg

SEQ ID NO: 580239 - DNA, 75 bp, synthetic construct
  source 1..75: mol_type = other DNA
aattgctgaagaacgtgcgaaaaacggcatcactggcccttgctatgtgggtaaagatactcacgccctgtccga

SEQ ID NO: 580240 - DNA, 75 bp, synthetic construct
  source 1..75: mol_type = other DNA
ggcgtgacagctcagccacctggacgtcacaggacagggcgagccatttcagcacctgggcacgccgggggatta

SEQ ID NO: 580241 - DNA, 75 bp, synthetic construct
  source 1..75: mol_type = other DNA
cctgcgatgcaaaacgaactgctggataagcactacctgcgtaagcatggggccaatgcctattacgggcagtaa

SEQ ID NO: 580242 - DNA, 75 bp, synthetic construct
  source 1..75: mol_type = other DNA
tggggtaaaaacgccgccgatgccgtgcataacgccgtagtactcgaagaatgcgcctatatgggcctattctcg

SEQ ID NO: 580243 - DNA, 75 bp, synthetic construct
  source 1..75: mol_type = other DNA
caggagtccggcacaaatcccggcggtgctggtgcattctcacggcccgttcgcatggggtaaaaacgccgccga

SEQ ID NO: 580244 - DNA, 75 bp, synthetic construct
  source 1..75: mol_type = other DNA
tgcataatgccgtggtgctggaagagtgcgcgtatatggggctgttctcgcgccagctcgcgccgcagcttcctg

SEQ ID NO: 580245 - DNA, 75 bp, synthetic construct
  source 1..75: mol_type = other DNA
attccctgcacgcgcctgatgaccgcagaggagatcaacggcgaatatgaatatcagaccggcgaagtgatcatt

SEQ ID NO: 580246 - DNA, 75 bp, synthetic construct
  source 1..75: mol_type = other DNA
cgccaactcgcgccgcagcttcctgccatgcaaaacgaactgctggataaacactacctgcgtaagcatggggcc

SEQ ID NO: 580247 - DNA, 75 bp, synthetic construct
  source 1..75: mol_type = other DNA
tcatctgcgatgatcgaccgtgtggtcaatgacttgggccgtaagctggtagaagtcccggtaggtttcaaatgg

SEQ ID NO: 580248 - DNA, 75 bp, synthetic construct
  source 1..75: mol_type = other DNA
gtcacgatgaaagcaagcgtcaggactgcctgcggctgtggaacaatatggcccagcgtcagttatatattaccg

SEQ ID NO: 580249 - DNA, 75 bp, synthetic construct
  source 1..75: mol_type = other DNA
cgctggagcaatctggcggagtgtcatgaactttactgcgccggtcatctgattgaagccggagtcgccttcttc

SEQ ID NO: 580250 - DNA, 75 bp, synthetic construct
  source 1..75: mol_type = other DNA
caccgtgctcggcggcatggcgctggatggcaaacatttcttctatgtgaatccgctggaagtacatccaaaatc

SEQ ID NO: 580251 - DNA, 75 bp, synthetic construct
  source 1..75: mol_type = other DNA
accgcgggcagcgaaggggcatattcagaacagcacggagccagccatgattcatgtcgttggggagcagatact

SEQ ID NO: 580252 - DNA, 75 bp, synthetic construct
  source 1..75: mol_type = other DNA
gacgaacgcgcctaatgaagacccggacgatttaagcacgggatattacggttcagcgtaccggtcaccggagaa

SEQ ID NO: 580253 - DNA, 75 bp, synthetic construct
  source 1..75: mol_type = other DNA
cttgatagccaagctttattgcttttaacgaaaacacgttcaaaacaaaagaccacattttcacagcaaagtatt

SEQ ID NO: 580254 - DNA, 75 bp, synthetic construct
  source 1..75: mol_type = other DNA
ggtgatgtgaccacgcctgtggttgtgcccgacacaggggctggtggctctccgggagtggctatcactgaaccg

SEQ ID NO: 580255 - DNA, 75 bp, synthetic construct
  source 1..75: mol_type = other DNA
tttcgcttcaatgttccggtgatctactcggacgatatcgtactgcagcgaatgagttgtatgaactgtagcgat

SEQ ID NO: 580256 - DNA, 75 bp, synthetic construct
  source 1..75: mol_type = other DNA
gggaagcggcctacgtgatccgtctggacggtaccacctgcctgcagctgacggatgccggcggcatacgccgga

SEQ ID NO: 580257 - DNA, 75 bp, synthetic construct
  source 1..75: mol_type = other DNA
cgaactattttgtcgaacagcgtggtgcgcaaccgcactattacgaccaggaatatgaaaagcgcgggcagacct

SEQ ID NO: 580258 - DNA, 75 bp, synthetic construct
  source 1..75: mol_type = other DNA
ggtgtttcaggacagcgacgtcgccaaatggctggaagcggtagcctggtcgctgtgccagaagccggacgccga

SEQ ID NO: 580259 - DNA, 75 bp, synthetic construct
  source 1..75: mol_type = other DNA
atcccgtggtttagctgggctaaccggggtgaaggcgaaatgcggatctgggtgaatgaggaaaccagcgcatga

SEQ ID NO: 580260 - DNA, 75 bp, synthetic construct
  source 1..75: mol_type = other DNA
cggcactattgttggatgaacgcttaactggtctacaatttttcggtgcggtgctcattatgaccgggctgtggc

SEQ ID NO: 580261 - DNA, 75 bp, synthetic construct
  source 1..75: mol_type = other DNA
tcgttaacacggtgaataacatccgtgcagtgtatcgtccgcagggattaccgcgtcagatcctggctcgcgcct

SEQ ID NO: 580262 - DNA, 75 bp, synthetic construct
  source 1..75: mol_type = other DNA
ccccgtttgagattggcctgcgccttggcgagcttggccgtgaagcatggcatcagaaactgatgctcacgtcat

SEQ ID NO: 580263 - DNA, 75 bp, synthetic construct
  source 1..75: mol_type = other DNA
cgcgccgctgctgcccaccagccaggaattattagcgatattggtatcggaacgtttgtcgaccctcgccaacaa

SEQ ID NO: 580264 - DNA, 75 bp, synthetic construct
  source 1..75: mol_type = other DNA
ggtcgcccgtgaagaaggatgtgctgatgactttattctgacggtggaaacgggtccgattggcggtattacctc

SEQ ID NO: 580265 - DNA, 75 bp, synthetic construct
  source 1..75: mol_type = other DNA
tcgctggtaatctggagcgcattaatcccaatcattcccttctttgttgcctcgctgattctcgatggttccgca

SEQ ID NO: 580266 - DNA, 75 bp, synthetic construct
  source 1..75: mol_type = other DNA
aggggcgcggaggggttgacgttgcgtcccgtatattacgcaatgctctggttcgccagctggctgaaccgcccc

SEQ ID NO: 580267 - DNA, 75 bp, synthetic construct
  source 1..75: mol_type = other DNA
ttaacgttttcgcgctgttctggttaacccaggaagcgattcccctgctgccaaaaggtgccagtatcatcacca

SEQ ID NO: 580268 - DNA, 75 bp, synthetic construct
  source 1..75: mol_type = other DNA
aaagcactggtgacagggggcgattccggaatcggtcgcgctgccgccatcgcttacgcgcgtgaaggggctgac

SEQ ID NO: 580269 - DNA, 75 bp, synthetic construct
  source 1..75: mol_type = other DNA
actgttgatcaggtctttgcctggaactgccgtggcgatctggtgcgctcaacgtcggatggctgtacgacggtg

SEQ ID NO: 580270 - DNA, 75 bp, synthetic construct
  source 1..75: mol_type = other DNA
tggatgtgctgaaatggcagattaactgcgctgcgcgtgagtgtatgtactcgcagcatctgctgatggaggcct

SEQ ID NO: 580271 - DNA, 75 bp, synthetic construct
  source 1..75: mol_type = other DNA
actggtgacgatgttgatatttctcagcttgagcctttcattgttccagatccaggcgtccgcgcatgggcttaa

SEQ ID NO: 580272 - DNA, 75 bp, synthetic construct
  source 1..75: mol_type = other DNA
tatgcgcgaacttgggataaacagaagcgatcatttaacccggaaaaatattatcagatatcgacttaaattaat

SEQ ID NO: 580273 - DNA, 75 bp, synthetic construct
  source 1..75: mol_type = other DNA
cactgaccgggaaggctggtatcaccgatgtgagtttaaagagcattacgaggccaatatcaacattccggtacg

SEQ ID NO: 580274 - DNA, 75 bp, synthetic construct
  source 1..75: mol_type = other DNA
cagactggtttctacagtcactcctgaacaaccatatcgacaaaatggtagagcgctattcctgcctgcgggcat

SEQ ID NO: 580275 - DNA, 75 bp, synthetic construct
  source 1..75: mol_type = other DNA
agtgaccacttaacccgaaaaaatattatcagatatcgccttgaattaatgaatcgcggaattaagcagtcaacg

SEQ ID NO: 580276 - DNA, 75 bp, synthetic construct
  source 1..75: mol_type = other DNA
taaatgatagaaaggcttcaattgaatcattaaaaaaaaagtactttgcgttttctaggaaagagtttttgcatt

SEQ ID NO: 580277 - DNA, 75 bp, synthetic construct
  source 1..75: mol_type = other DNA
ttctccgttattcaccacagggttcagaaagtatttaggagagtattgtttagatatattgcttcagaaagattt

SEQ ID NO: 580278 - DNA, 75 bp, synthetic construct
  source 1..75: mol_type = other DNA
acctaaaacgcagacctaaagatattattcagaaggcaattagtattgccgaagcaactagggaaaataatttta

SEQ ID NO: 580279 - DNA, 75 bp, synthetic construct
  source 1..75: mol_type = other DNA
agaaaacatactgccggtgggcgtgaaatttggcattaacatcgcgccggatcatctgcacagcgagagctttaa

SEQ ID NO: 580280 - DNA, 75 bp, synthetic construct
  source 1..75: mol_type = other DNA
cagtgaactgattccggcactaaacatcggcaaagatattgatatggcaatattgccaggcacaccgatggtgcc

SEQ ID NO: 580281 - DNA, 75 bp, synthetic construct
  source 1..75: mol_type = other DNA
caacgcagtacgacaccgacgcggtttacgcgctgatttgtgagctaaaacaggcggagtttgaccaccaggcgt

SEQ ID NO: 580282 - DNA, 75 bp, synthetic construct
  source 1..75: mol_type = other DNA
tgtacgaacgtttgtgctggtaaaggataaaaagagtttctgttcttctgcgactggtgagatggacattccgct

SEQ ID NO: 580283 - DNA, 75 bp, synthetic construct
  source 1..75: mol_type = other DNA
atctatctggaacgctttaccctcgattatttaaaaattgatcgtggatttattaacgccataggtacggaaacg

SEQ ID NO: 580284 - DNA, 75 bp, synthetic construct
  source 1..75: mol_type = other DNA
attctgttcatctgcgactggtgagatggacattccactcaatgaattgattccggcgctcgacattaataaaaa

SEQ ID NO: 580285 - DNA, 75 bp, synthetic construct
  source 1..75: mol_type = other DNA
gcggacaaacgcaggataagatcccgcagtttggtcagaaaacgccgatgaagcgtgcggggcaaccggcggaac

SEQ ID NO: 580286 - DNA, 75 bp, synthetic construct
  source 1..75: mol_type = other DNA
tcccgcaccagtacctaccaatgccccagcgttccgggcatggattcactcccgtaagccccctccagcgttcca

SEQ ID NO: 580287 - DNA, 75 bp, synthetic construct
  source 1..75: mol_type = other DNA
tggcatctagtcatggcagaaggcggtgaaattaattgggagctggatgatggttctcgtatgattttgagggcc

SEQ ID NO: 580288 - DNA, 75 bp, synthetic construct
  source 1..75: mol_type = other DNA
aaccaacgaggccgctcaactcgtttggcatctagtcatggcagaaggcggtgaaattaattgggagctggatga

SEQ ID NO: 580289 - DNA, 75 bp, synthetic construct
  source 1..75: mol_type = other DNA
aatatccggagtggattgtggggagttcgttactcgatatagctctgaacagggagtggcctaagcatgacagcg

SEQ ID NO: 580290 - DNA, 75 bp, synthetic construct
  source 1..75: mol_type = other DNA
ctataaagccaggttcgtggatatttacgaagggccgacgctggtcgcgccaaaatactggcagtacagcgcaac

SEQ ID NO: 580291 - DNA, 75 bp, synthetic construct
  source 1..75: mol_type = other DNA
actgaggcgggggtttcgtgggtgtttaatgatgcacaggcgcagctgtttgaggtgtggttcagggatgtgatc

SEQ ID NO: 580292 - DNA, 75 bp, synthetic construct
  source 1..75: mol_type = other DNA
attgatgcccacgccgtgggcattcagtccgtggatggtgatgcaggcgacaaatcgcgaagccagaaaacgatt

SEQ ID NO: 580293 - DNA, 75 bp, synthetic construct
  source 1..75: mol_type = other DNA
gagcaggtgacatggcttgccggcagtttcctgctgaccggacatgagattgaaaatctgaacgagaatctggcc

SEQ ID NO: 580294 - DNA, 75 bp, synthetic construct
  source 1..75: mol_type = other DNA
gagattgaaaatctgaacgagaatctggcccgtgttatcgatcagaatgctctggagatcattttcgccgccggt

SEQ ID NO: 580295 - DNA, 75 bp, synthetic construct
  source 1..75: mol_type = other DNA
gtccaggcaggaaaaaccttcacccgcacactggctgtctacgtcacaacccagcaacttcaccggctcactgtt

SEQ ID NO: 580296 - DNA, 75 bp, synthetic construct
  source 1..75: mol_type = other DNA
atgatccgtacggggataacataccgttttaagcaacgagtgacagaagccggagcaatccggcttttttgtagg

SEQ ID NO: 580297 - DNA, 75 bp, synthetic construct
  source 1..75: mol_type = other DNA
tgtggttggcggtgttctggggggaatgattgcctccgctgtatcaggaaaaattgccggagcgctggttgaaga

SEQ ID NO: 580298 - DNA, 75 bp, synthetic construct
  source 1..75: mol_type = other DNA
tcacccgcacactggctgtctacgtcacaacccagcaactccaccggctcagtgttgttcagggtatgctgaagc

SEQ ID NO: 580299 - DNA, 75 bp, synthetic construct
  source 1..75: mol_type = other DNA
atatgaccaccatcttgtctctgatgtatctggcatttgtggcgacaattgttggttatgggatctgggggacgt

SEQ ID NO: 580300 - DNA, 75 bp, synthetic construct
  source 1..75: mol_type = other DNA
taaatatttcctatgcaacagcaattgggtatgcaaatgcttctttagcattgtctttaaacaaaaacccagaat

SEQ ID NO: 580301 - DNA, 75 bp, synthetic construct
  source 1..75: mol_type = other DNA
caatattggctgctttaattagtggttcagctcagtcaacctcatttaatacagatttttttaaaatatctgatg

SEQ ID NO: 580302 - DNA, 75 bp, synthetic construct
  source 1..75: mol_type = other DNA
gaacagtttcaaaagacctttgccattaacgttttcgcactgttctggctaacccaggaagcgatccccctgcta

SEQ ID NO: 580303 - DNA, 75 bp, synthetic construct
  source 1..75: mol_type = other DNA
cggggcaaccggcggaactggcccctgtatatgtttatctggcaagtcaggagtcgagctacgtcaccgcagaag

SEQ ID NO: 580304 - DNA, 75 bp, synthetic construct
  source 1..75: mol_type = other DNA
cagcactgcaaatttccggcggacaaacgcaggataagatcccgcagtttggtcagaaaacgccgatgaagcgtg

SEQ ID NO: 580305 - DNA, 75 bp, synthetic construct
  source 1..75: mol_type = other DNA
tactggctggctatatcactgaacgcataacccggttattccatattcgctggctggcaggcgtatttctgacga

SEQ ID NO: 580306 - DNA, 75 bp, synthetic construct
  source 1..75: mol_type = other DNA
cggacagtatcgttacatgggaaataatggccccatgcaactggaagtcccccgtgatcagtatgccggcgctgt

SEQ ID NO: 580307 - DNA, 75 bp, synthetic construct
  source 1..75: mol_type = other DNA
atcagcaaggaaattaacgggtattactgctgtttttatactgcctttttccttatggcgtgttctgcatgcgca

SEQ ID NO: 580308 - DNA, 75 bp, synthetic construct
  source 1..75: mol_type = other DNA
tattttatgcgtccgggcggaatgagccctggtacatacactgtggcaatatttcttaatggggtaaaagttagt

SEQ ID NO: 580309 - DNA, 75 bp, synthetic construct
  source 1..75: mol_type = other DNA
gtgcattttcctttgattcgtctttttcttctgctgaattggataacaatacagtaaaagatggtcaagcttatc

SEQ ID NO: 580310 - DNA, 75 bp, synthetic construct
  source 1..75: mol_type = other DNA
aaaattgacgatgactatgagccaaaactgatccataccgtgcgcggtgccggatatattctggagatcagagaa

SEQ ID NO: 580311 - DNA, 75 bp, synthetic construct
  source 1..75: mol_type = other DNA
cttaatctcgggctgacggcgggtaaagtgtggtacgacaccccaaccgatgattatagtggcttgcaacttgcg

SEQ ID NO: 580312 - DNA, 75 bp, synthetic construct
  source 1..75: mol_type = other DNA
taaactggtcagctatgcataaggctgtctcagcaacgggcttacggatcattggcgtcagtggctgcaaagatg

SEQ ID NO: 580313 - DNA, 75 bp, synthetic construct
  source 1..75: mol_type = other DNA
cgcttaatagatacccctgtacgttccggtcagcgcatttatgcgccacaatgtgatctgattgttacaagccat

SEQ ID NO: 580314 - DNA, 75 bp, synthetic construct
  source 1..75: mol_type = other DNA
agatataaccttgtcgaggttaaattatgtttcggatagttatcctgaattcaaatacaagaaaatatttataac

SEQ ID NO: 580315 - DNA, 75 bp, synthetic construct
  source 1..75: mol_type = other DNA
agcattggcagcaactttcggatgttttctcaattagaccgtgattttcatgccatgctgttatccgctgctgac

SEQ ID NO: 580316 - DNA, 75 bp, synthetic construct
  source 1..75: mol_type = other DNA
tgagtgaacaaaacaaagtgtttgagcaggcttttttcacgatgataaaccagcgtcagttacgccctggggaaa

SEQ ID NO: 580317 - DNA, 75 bp, synthetic construct
  source 1..75: mol_type = other DNA
gcagcatgaagagcgtcagtttacaacgtattcaaccgctgactgagcaacttaatctcgggctgacggcaggta

SEQ ID NO: 580318 - DNA, 75 bp, synthetic construct
  source 1..75: mol_type = other DNA
agagttgtatcctgtatcagtcctgcaaaatttcacgagtgctttattaactggatgcgtgatgcattcttcaga

SEQ ID NO: 580319 - DNA, 75 bp, synthetic construct
  source 1..75: mol_type = other DNA
atggaacttaaaaaattgatggaacatatttctattatccccgattacagacaatcctggaaagtggaacataaa

SEQ ID NO: 580320 - DNA, 75 bp, synthetic construct
  source 1..75: mol_type = other DNA
tactggctgagtgatcaaatcccagcagaattttatggcaaagcggcgagactgcagttagtcgaaaacgctttg

SEQ ID NO: 580321 - DNA, 75 bp, synthetic construct
  source 1..75: mol_type = other DNA
ccggtcagcgtatttatgctccacaatgtgatctgattgttacaagccacgttagcgctggggccgaattgattg

SEQ ID NO: 580322 - DNA, 75 bp, synthetic construct
  source 1..75: mol_type = other DNA
ttatgccgggttaacttccattaccgcgggctacgattttaccgattattctggcgaacatggcaaccgtaattt

SEQ ID NO: 580323 - DNA, 75 bp, synthetic construct
  source 1..75: mol_type = other DNA
aaatcacatctattttttgcttcaatgtcttatcaatggggaaaatcagttatgtcagagaatgagggtgtcgct

SEQ ID NO: 580324 - DNA, 75 bp, synthetic construct
  source 1..75: mol_type = other DNA
gattgtggagattgcacgtcagcataatctcattatcttcgccgatgaaatttatgacaaaattctttacgacga

SEQ ID NO: 580325 - DNA, 75 bp, synthetic construct
  source 1..75: mol_type = other DNA
tttaacccacgcaaagctaaaaaggcgttgccgggtaaaatcaccactgaacagcaggaagccattaaacaactc

SEQ ID NO: 580326 - DNA, 75 bp, synthetic construct
  source 1..75: mol_type = other DNA
ctactatcaatgtaccattccacggcgcagagctttatgttgtcaatcacaacggcgaaccgtataccccaatga

SEQ ID NO: 580327 - DNA, 75 bp, synthetic construct
  source 1..75: mol_type = other DNA
ccggcgcgtcatttacttccagccatgccgtccgcgactggctgcgcctgcagctcgcgtcactggagcgggaag

SEQ ID NO: 580328 - DNA, 75 bp, synthetic construct
  source 1..75: mol_type = other DNA
cgccgagcatcactcaattgccgcgatggcaccagacctgctaaccataacctttaacggactgtcgaaaacgta

SEQ ID NO: 580329 - DNA, 75 bp, synthetic construct
  source 1..75: mol_type = other DNA
atgacattcgcgccaaaattacgccacgcacgcgcggcattgttattatcaacccgaacaacccaaccggcgcag

SEQ ID NO: 580330 - DNA, 75 bp, synthetic construct
  source 1..75: mol_type = other DNA
cgaaacacattccctgcaacactttctcaaccttcccgatgatgaccctcgctggctgcaagcgaaaaccatgct

SEQ ID NO: 580331 - DNA, 75 bp, synthetic construct
  source 1..75: mol_type = other DNA
aaactggtcaagaaatattgaaagtatcaaattggctttagataatacagttgctagaaaaaagaaagtcacagg

SEQ ID NO: 580332 - DNA, 75 bp, synthetic construct
  source 1..75: mol_type = other DNA
aagaaattagtcaaaaatcggtttgtctttctgggcagatggtcgaatgtgattgggacatatacattgatatgc

SEQ ID NO: 580333 - DNA, 75 bp, synthetic construct
  source 1..75: mol_type = other DNA
taatggctgagcaaagctgggcacttaaagagatagcttcattcgcagcgatacgtgatagagcgtgccactcaa

SEQ ID NO: 580334 - DNA, 75 bp, synthetic construct
  source 1..75: mol_type = other DNA
gtcgttataatcttattcaaagcgaaaagcgcggccaatggagcatgaagcagttcgatcaatcctacgccgagc

SEQ ID NO: 580335 - DNA, 75 bp, synthetic construct
  source 1..75: mol_type = other DNA
gcaggcatttttcaccatgattaacctgcgccagttacgcgccggagaaagcttttccgaacttcagctggcgcg

SEQ ID NO: 580336 - DNA, 75 bp, synthetic construct
  source 1..75: mol_type = other DNA
atctgtgatggctgggtggataactctgccggttccgccggtgatgcgagtgtgctggttcgtcgcggtaaagcc

SEQ ID NO: 580337 - DNA, 75 bp, synthetic construct
  source 1..75: mol_type = other DNA
cggatttatttccccactggcgagtgttttgcgccagaaaagcgcagagaccagcaaaatgatgcaatgcgtcaa

SEQ ID NO: 580338 - DNA, 75 bp, synthetic construct
  source 1..75: mol_type = other DNA
acacgatgtttggttgtgttcagatgaaatccatagtgattttgtatttaatcgttgcttcacgtctgcgcttaa

SEQ ID NO: 580339 - DNA, 75 bp, synthetic construct
  source 1..75: mol_type = other DNA
aatcataagttcagaacgatatcgaggtatcgcgatttcgtaaactccccatcagtactgaatgtaattgcgacc

SEQ ID NO: 580340 - DNA, 75 bp, synthetic construct
  source 1..75: mol_type = other DNA
gcagaacgtcggtctggtcagcgtaacacgcgttcacagtcgctgggtgtgtatctcttccgggatcattcttat

SEQ ID NO: 580341 - DNA, 75 bp, synthetic construct
  source 1..75: mol_type = other DNA
ctattccagcgaacgtccgtcgtttattgagctggaagagcatgtgcgtgcggtgaaaaatccgcaacaacagac

SEQ ID NO: 580342 - DNA, 75 bp, synthetic construct
  source 1..75: mol_type = other DNA
aagtcccggcaaacagtctggcgctggtcggtgactcgctcccggcatttggtattgtcgcggctgtgatgggag

SEQ ID NO: 580343 - DNA, 75 bp, synthetic construct
  source 1..75: mol_type = other DNA
cgaacattttgattgttcaggcaatggttcgatgattttttttgatttgttatttttccactttcagtatgctaa

SEQ ID NO: 580344 - DNA, 75 bp, synthetic construct
  source 1..75: mol_type = other DNA
atgtgcctgctcttgcatgagagtgggcatattgccatgctggcaggagaatcacacaaggatgtaaaatcaatg

SEQ ID NO: 580345 - DNA, 75 bp, synthetic construct
  source 1..75: mol_type = other DNA
ggtccgatgatttttttgattttttatttttccacctttggcatgttagttcttgcccctactgattcaccccgc

SEQ ID NO: 580346 - DNA, 75 bp, synthetic construct
  source 1..75: mol_type = other DNA
gatataattaaacatagcgagagaaatattctgacagcctctttgattataaaaaatgaggggggctacgctatc

SEQ ID NO: 580347 - DNA, 75 bp, synthetic construct
  source 1..75: mol_type = other DNA
ctggctgaggctaattctcgttcattaaatgctgagatggtcgcggcacttgaagcatggaccgaaaaaataaac

SEQ ID NO: 580348 - DNA, 75 bp, synthetic construct
  source 1..75: mol_type = other DNA
ctatagcatcacgattgatagatcttgagcgtgatgttgagaagttgaaatgcgtgtatagcaacgagaaaaatg

SEQ ID NO: 580349 - DNA, 75 bp, synthetic construct
  source 1..75: mol_type = other DNA
gtatcggccgctttatggggatccgcctgccggtgattatgtcggtgacctttgctgctgtaacaccaatgatag

SEQ ID NO: 580350 - DNA, 75 bp, synthetic construct
  source 1..75: mol_type = other DNA
gttggagctggtaatgcgaccgcaggtgttgttgatgccacgggaatcatgaccatcaaggctgcggctgctaat

SEQ ID NO: 580351 - DNA, 75 bp, synthetic construct
  source 1..75: mol_type = other DNA
aattttcatcttgctcattactcgctatgcgaaaggatttatgtccaacgtcgccgtattactggggattgtatt

SEQ ID NO: 580352 - DNA, 75 bp, synthetic construct
  source 1..75: mol_type = other DNA
aatgaagtcaatttatccgggctacatgatgcctcgtggtttgcgattgtcaccccgatgtcgtttggtatgccg

SEQ ID NO: 580353 - DNA, 75 bp, synthetic construct
  source 1..75: mol_type = other DNA
accagacgctatcaccagagcattaaaaaaacgcctggaacacccgattttagggtacagtcgttggcaacatgg

SEQ ID NO: 580354 - DNA, 75 bp, synthetic construct
  source 1..75: mol_type = other DNA
aaatgggcagtaccggtatcggcaatggtattgccattccgcatggcaaactggaagaagatactctgcgtgccg

SEQ ID NO: 580355 - DNA, 75 bp, synthetic construct
  source 1..75: mol_type = other DNA
aaaccatctgccgccgtttacgcgcagcccagagcgatgaagagctgtatcaaatcattacggataccgaaggta

SEQ ID NO: 580356 - DNA, 75 bp, synthetic construct
  source 1..75: mol_type = other DNA
cttgcctgtcattatgtcggtgaccttcgctgccgtgacgccgatgattgctatcgggatgaacccggatattgg

SEQ ID NO: 580357 - DNA, 75 bp, synthetic construct
  source 1..75: mol_type = other DNA
cctcatcttcagggcaagaccgccccaccgatgaggttgaccgcatattatcaccaggaaagttgatcatactcg

SEQ ID NO: 580358 - DNA, 75 bp, synthetic construct
  source 1..75: mol_type = other DNA
ctggtgaaggaatccgtctctgataaagatttaaaagtcaggacagtacgtatgaggtgtactggcaatagcgga

SEQ ID NO: 580359 - DNA, 75 bp, synthetic construct
  source 1..75: mol_type = other DNA
gctgtcttaatttttatcttgctcattactcgctatgcgaaaggatttatgtccaacgtcgccgtattactgggg

SEQ ID NO: 580360 - DNA, 75 bp, synthetic construct
  source 1..75: mol_type = other DNA
ctggtgaaggaatccgtctctgataaagatttaaaagtcaggacagtacgtatgtggcttctgatgcgcaagctg

SEQ ID NO: 580361 - DNA, 75 bp, synthetic construct
  source 1..75: mol_type = other DNA
actggggtagtcattacttcgattggtcttagcatcattcaggtcggcattgactgggccgcaggcggtaaaggc

SEQ ID NO: 580362 - DNA, 75 bp, synthetic construct
  source 1..75: mol_type = other DNA
ggcctaacttagcaatgctctttatgagtgatgcgcctgttaagtttcgaatagattatatactatctcaggaat

SEQ ID NO: 580363 - DNA, 75 bp, synthetic construct
  source 1..75: mol_type = other DNA
gagtgatgctcctgttaagtttcgaatagattatattctgtctcaggaatatttttatgtacattatctgttagc

SEQ ID NO: 580364 - DNA, 75 bp, synthetic construct
  source 1..75: mol_type = other DNA
attgattatatattgctacaggaggatttttatctattatttgtagtcagaccaatagcaattggttgtctattg

SEQ ID NO: 580365 - DNA, 75 bp, synthetic construct
  source 1..75: mol_type = other DNA
gacacaaaggccatgatgattgcgtcctatcctgctgaacagcgtgaagccgtctccgccgcgctggagctggaa

SEQ ID NO: 580366 - DNA, 75 bp, synthetic construct
  source 1..75: mol_type = other DNA
cagccgagattgtgccgtaccagattgacgcgacgatctacgtttaccccggccccgaatctgaacccatcaggc

SEQ ID NO: 580367 - DNA, 75 bp, synthetic construct
  source 1..75: mol_type = other DNA
tttacgcagcgctgcatgttgaaggtgtgcaacgggtcgaactggcatcaccgcaggccgacatcgtgctgagta

SEQ ID NO: 580368 - DNA, 75 bp, synthetic construct
  source 1..75: mol_type = other DNA
aagaggtcatgacccgcacggcaaaaatcaccaacaatggcaaaccatcgctggccgaagacagtggtaccgcgc

SEQ ID NO: 580369 - DNA, 75 bp, synthetic construct
  source 1..75: mol_type = other DNA
caacaaaaggtgctggtaccaccctctgggtttacaccggaactggtgatccatacgccaatccgctttcagacg

SEQ ID NO: 580370 - DNA, 75 bp, synthetic construct
  source 1..75: mol_type = other DNA
tcaagaaaggtggcaagatcaaattggttattccaccagagttggcttacggtaaagcgggtgttccggggatcc

SEQ ID NO: 580371 - DNA, 75 bp, synthetic construct
  source 1..75: mol_type = other DNA
ccaagcaagcaataagcgaaaggattaaaagcccattatggggattcatcattcttacatgggtatggtttaact

SEQ ID NO: 580372 - DNA, 75 bp, synthetic construct
  source 1..75: mol_type = other DNA
gtcggcgcaaccacaacgctcaatgtgacggttaacccagccagtgcctcagatacctcgttccgtgtggcaacc

SEQ ID NO: 580373 - DNA, 75 bp, synthetic construct
  source 1..75: mol_type = other DNA
accgccgaatcgtatgacgacacttacctcgacgacgaggatgccgactggaacgcgacggcccagggggcaaaa

SEQ ID NO: 580374 - DNA, 75 bp, synthetic construct
  source 1..75: mol_type = other DNA
caagcagtcgcataccaagggttcgcatattcccctggtgcagccggttgaatactccagcgcatcgtggcgccg

SEQ ID NO: 580375 - DNA, 75 bp, synthetic construct
  source 1..75: mol_type = other DNA
tacctgttcccgatgtggtcgaggaactggactatgaaactatccttgcggaacgcattgcgacgctgatttcgc

SEQ ID NO: 580376 - DNA, 75 bp, synthetic construct
  source 1..75: mol_type = other DNA
cttgatagccaagctttattgcttttaacgaaaacacgttcaaaacaaaagaccacattttcacagcaagatatt

SEQ ID NO: 580377 - DNA, 75 bp, synthetic construct
  source 1..75: mol_type = other DNA
tatggaatctgatactgacctgcgactgcgcacgcaacaggcgtttgagggattgagcgtggcgggtccggtcgg

SEQ ID NO: 580378 - DNA, 75 bp, synthetic construct
  source 1..75: mol_type = other DNA
ccttaatggcgaggacgtcaggccggtggccgaccgcgtgaccgtacagtctgccgccatcgttgaataccagat

SEQ ID NO: 580379 - DNA, 75 bp, synthetic construct
  source 1..75: mol_type = other DNA
cgtgaccgtgtcggtactgtcccgggagaataacggcgcggcatccggggaactgctcgccgtggtgcgtaatgc

SEQ ID NO: 580380 - DNA, 75 bp, synthetic construct
  source 1..75: mol_type = other DNA
cgtgcagcgtgtcgaactgactgcaccgctggccgacatcgtgctcaacagtacgcaggcgtctttctgtaccga

SEQ ID NO: 580381 - DNA, 75 bp, synthetic construct
  source 1..75: mol_type = other DNA
agtaatgcgtacgctggagcttgaatctgaacccgtcaccaaattgctgcaggagaacgcttaccgtgagttgct

SEQ ID NO: 580382 - DNA, 75 bp, synthetic construct
  source 1..75: mol_type = other DNA
cagcggcaaaagtcagtctgcagaggtacatcgccagtcagacgcggctcggtcgggatattcgccgtagtgcta

SEQ ID NO: 580383 - DNA, 75 bp, synthetic construct
  source 1..75: mol_type = other DNA
ccttaatggcgaggacgtcagaccggtggccgaccgcgtgaccgtgcagtctgccgccatcgttgaataccagat

SEQ ID NO: 580384 - DNA, 75 bp, synthetic construct
  source 1..75: mol_type = other DNA
tcagagccgatcgtgaaactgctgcaggaaaacgcttatcgggaggttatctggcgtcagcgcgtcaatgagtcg

SEQ ID NO: 580385 - DNA, 75 bp, synthetic construct
  source 1..75: mol_type = other DNA
gaacgtaaggcagaatttgtggcgctccatccgaaagatgagcaggaagctgtgatgcgtacgctggaactggaa

SEQ ID NO: 580386 - DNA, 75 bp, synthetic construct
  source 1..75: mol_type = other DNA
tctgaacccgttaccaaattgttgcaggagaacgcttatcgtgagttgcttctgcgtcagcgcattaacgaagcc

SEQ ID NO: 580387 - DNA, 75 bp, synthetic construct
  source 1..75: mol_type = other DNA
tgtagaactgctggatgtgaagccggcgccgaaggctgatgcgaaaccagaagcagcggcagacgcagacgcgaa

SEQ ID NO: 580388 - DNA, 75 bp, synthetic construct
  source 1..75: mol_type = other DNA
aggcggcatatcactctatactggcccggtgatcaccagctaccgctatacccattatgactccagcgatgcagg

SEQ ID NO: 580389 - DNA, 75 bp, synthetic construct
  source 1..75: mol_type = other DNA
cgcggccagggtgcagtctggtacaaatggaataactggctgacaacccgaacgggtattgcctttgcggataat

SEQ ID NO: 580390 - DNA, 75 bp, synthetic construct
  source 1..75: mol_type = other DNA
caactctccgcgccagagcgggaagaatttgttgcgctcttcctcgataaccagcatcgccttattgctcacgaa

SEQ ID NO: 580391 - DNA, 75 bp, synthetic construct
  source 1..75: mol_type = other DNA
aggcggcctatcactctatactggcccggtgatcaccagttaccgctatacccagtatgactccagcgatgcagg

SEQ ID NO: 580392 - DNA, 75 bp, synthetic construct
  source 1..75: mol_type = other DNA
aggcggcctatcactctatactggcccggtgatcaccagataccgctatacccattatgactccagcgatgcagg

SEQ ID NO: 580393 - DNA, 75 bp, synthetic construct
  source 1..75: mol_type = other DNA
aggcggcttatcactctatactggcccggtgatcaccagctaccgctatacccagtatgactccagcgatgcagg

SEQ ID NO: 580394 - DNA, 75 bp, synthetic construct
  source 1..75: mol_type = other DNA
accgcgcccccagcatctctggcagcctgagttgatcgagatattcgaagagaagttagccaaacgcgctgtaac

SEQ ID NO: 580395 - DNA, 75 bp, synthetic construct
  source 1..75: mol_type = other DNA
gcctgtcacgttgcaaggacgaggcggaactgttcgaaaccaaatggtttgactatcgcgatatgcacccgctca

SEQ ID NO: 580396 - DNA, 75 bp, synthetic construct
  source 1..75: mol_type = other DNA
gtcatgccgaccggcagatgactgagcggctaaagcatgcactggacctggtggatatccgtctgctggaccacc

SEQ ID NO: 580397 - DNA, 75 bp, synthetic construct
  source 1..75: mol_type = other DNA
ggtgtggccttcacctccgccggtgccacccgggactggctgcgtctgcgcctggcaggggaagagcgcgaagtg

SEQ ID NO: 580398 - DNA, 75 bp, synthetic construct
  source 1..75: mol_type = other DNA
actggagagtgaaacgctatttgccggttcgattaaccatgtgcaggtccatccccgtgaggtagtgaaatcagc

SEQ ID NO: 580399 - DNA, 75 bp, synthetic construct
  source 1..75: mol_type = other DNA
gaagccatggcactggttgatgtgaacatactcgatcatctggttgtcggttcagatggcattgtgtcgtttgca

SEQ ID NO: 580400 - DNA, 75 bp, synthetic construct
  source 1..75: mol_type = other DNA
atcagcgctacggcacaatgccgcagcagtgatccttgcgcataaccatccctccggcgtggcggaacccagtcg

SEQ ID NO: 580401 - DNA, 75 bp, synthetic construct
  source 1..75: mol_type = other DNA
tattctggcgtccaaaagccattgaattaaaagaggggcaaatggtgcctctgcaaaaagtcacggtaagccgta

SEQ ID NO: 580402 - DNA, 75 bp, synthetic construct
  source 1..75: mol_type = other DNA
atgcttcgaataaaagcgcaacggttcgcctgaccaaccaaagtaaaatcgatccttatcttgctcaatcgtgga

SEQ ID NO: 580403 - DNA, 75 bp, synthetic construct
  source 1..75: mol_type = other DNA
ttcgtttactggcgattctttgcctgttttttaacgtttcagcttttgctgttgattgctatcaggatgggtaca

SEQ ID NO: 580404 - DNA, 75 bp, synthetic construct
  source 1..75: mol_type = other DNA
agaaaagttgggcattaagctggataaagatcagctgatcgccggtgtccaggatgcgtttgccgataagagcaa

SEQ ID NO: 580405 - DNA, 75 bp, synthetic construct
  source 1..75: mol_type = other DNA
ggaaaaagacgcggctgataacgaagctaaaggtaaagagtaccgcgagaaatttgccaaagagaaaggtgtgaa

SEQ ID NO: 580406 - DNA, 75 bp, synthetic construct
  source 1..75: mol_type = other DNA
cgtagagctgctggatgtgaaaccagcgccgaaggctgatgcaaagccggaagctaatgcgaaagccgcagactc

SEQ ID NO: 580407 - DNA, 75 bp, synthetic construct
  source 1..75: mol_type = other DNA
gaacgaattttatcaggtaacgttccgtaaaaaactgtacggcgatcttgatacattacagtcggatcttgatga

SEQ ID NO: 580408 - DNA, 75 bp, synthetic construct
  source 1..75: mol_type = other DNA
atgacagatcacagtcacatgattgtgttccctgggagcaatgtcgaatcacttgctgaggctaacgccatgttg

SEQ ID NO: 580409 - DNA, 75 bp, synthetic construct
  source 1..75: mol_type = other DNA
tacctcaatagcaagcggccttaaaattttagagttttcacatcctatagaatggctatctacttcagttgcatt

SEQ ID NO: 580410 - DNA, 75 bp, synthetic construct
  source 1..75: mol_type = other DNA
atgaaagcgtattgggactctttaaccaaagaacagcagggtgagttggccggaaaagttggctcaacaccaggc

SEQ ID NO: 580411 - DNA, 75 bp, synthetic construct
  source 1..75: mol_type = other DNA
gttcgttgatacgtactcgaaagtggctcactgtaagctttacgtcaccaaaacaccgattaccgcggctgactt

SEQ ID NO: 580412 - DNA, 75 bp, synthetic construct
  source 1..75: mol_type = other DNA
cgaaatcgaaacggctcatccgggatatctgggttcgcaggacacgttctatgtaggcaacctgaaaggtgtcgg

SEQ ID NO: 580413 - DNA, 75 bp, synthetic construct
  source 1..75: mol_type = other DNA
atgcgcttaggaacttttcacaaaaagaaaagattttatataaacaaaatcaagattaatttcctttctttttta

SEQ ID NO: 580414 - DNA, 75 bp, synthetic construct
  source 1..75: mol_type = other DNA
tctgttgaaatcgaccgtaagatcctggctgatatcgcagtattcgacaaagtagcgtttcaccactctggttga

SEQ ID NO: 580415 - DNA, 75 bp, synthetic construct
  source 1..75: mol_type = other DNA
ggtgcgcgttctcgcgtataccgcgttgcattccaggctgttatcaaagctggtcagtatgcttaccgtgaccgt

SEQ ID NO: 580416 - DNA, 75 bp, synthetic construct
  source 1..75: mol_type = other DNA
tttttacgttgtttgtggatggtgaaaacgaagtgggtaaggtgacctccgtcactccgcccaaactgacgcgca

SEQ ID NO: 580417 - DNA, 75 bp, synthetic construct
  source 1..75: mol_type = other DNA
gggcgaagccacatcacacacttacgccattaaaaacacctactacaagctgagagttaacgatcgcccgttgtg

SEQ ID NO: 580418 - DNA, 75 bp, synthetic construct
  source 1..75: mol_type = other DNA
tatcgctactgcttatcataaaccaactcttgcattttatcctaattcacgtacaccagaatatccctcacattt

SEQ ID NO: 580419 - DNA, 75 bp, synthetic construct
  source 1..75: mol_type = other DNA
tttgtcgataccggcgcgggtgcggcgttagttccgggcgatgtactgtacgtccccgctggcggctggaatttc

SEQ ID NO: 580420 - DNA, 75 bp, synthetic construct
  source 1..75: mol_type = other DNA
acagcaactacttctgccgtctgtttcgtaaaaacaccgaacgctcgccgtcggaatatcgtcggcagtaccaca

SEQ ID NO: 580421 - DNA, 75 bp, synthetic construct
  source 1..75: mol_type = other DNA
cgggggctattggctttaacgaatacctgaatcacacgcgactggaacatgctaagacgctactgaaaggctatg

SEQ ID NO: 580422 - DNA, 75 bp, synthetic construct
  source 1..75: mol_type = other DNA
attatcagttgaataatggatttgcccctatatttccagacacctgttatcacttaacccattactggcctgctg

SEQ ID NO: 580423 - DNA, 75 bp, synthetic construct
  source 1..75: mol_type = other DNA
gcacgcgttcgccgtggtgatgaagcagtgcattcgtctgaagacgtgaggaagtcacttggtctggacgattaa

SEQ ID NO: 580424 - DNA, 75 bp, synthetic construct
  source 1..75: mol_type = other DNA
attagtcgataatgtattaagaatgtttatgccagatgaaaacacaacgaaattaattcataaaacaaatgaatt

SEQ ID NO: 580425 - DNA, 75 bp, synthetic construct
  source 1..75: mol_type = other DNA
tttttacggtgtttgtggatggtgaaaacgaagtgggtaatgtgacctccgtcactccgcccaaactgacgcgca

SEQ ID NO: 580426 - DNA, 75 bp, synthetic construct
  source 1..75: mol_type = other DNA
ggtgatgctgtcttattcgatgagtcgagtgagattgtctataaaacgaaaggaattaacagtttccatgcacaa

SEQ ID NO: 580427 - DNA, 75 bp, synthetic construct
  source 1..75: mol_type = other DNA
ttacaaccagtattgatgatgcacagcgcgttatcgactctaatgcctgtgcagttgctattttaaaggaaccgc

SEQ ID NO: 580428 - DNA, 75 bp, synthetic construct
  source 1..75: mol_type = other DNA
tccggcatcagaagctgggcagttaccaacgaatagcccccttgttcaaaatgaacatgcagccggtacgtcagc

SEQ ID NO: 580429 - DNA, 75 bp, synthetic construct
  source 1..75: mol_type = other DNA
ctggcattattttgtatggcgcttcgccgtccggtcagtggcgtgatatcgccaataccggattacgtccggtga

SEQ ID NO: 580430 - DNA, 75 bp, synthetic construct
  source 1..75: mol_type = other DNA
ggggccaccgatggctttgcattgcttaacctggaagaggcaataacgttacgtgagcgcggctggaaaggaccg

SEQ ID NO: 580431 - DNA, 75 bp, synthetic construct
  source 1..75: mol_type = other DNA
tgcaaaatgcgcggctaaaagcaccgttggatatttatcttaaagtgaacagtgggatgaatcggttgggcttcc

SEQ ID NO: 580432 - DNA, 75 bp, synthetic construct
  source 1..75: mol_type = other DNA
catgtcggaaacaataggctccagtggttttggaatcagtattgcccccctcactcttccggacaaaaaacagtc

SEQ ID NO: 580433 - DNA, 75 bp, synthetic construct
  source 1..75: mol_type = other DNA
tttttacgctgtttgtggatggtgaaaatgaagtgggtaaggtgacgtctgtcaccccgcctaaactgacgcgta

SEQ ID NO: 580434 - DNA, 75 bp, synthetic construct
  source 1..75: mol_type = other DNA
aaattgatatgggggaagccaacagggcgaagccacatcacacacttacgccattaaaaacacctactacaagct

SEQ ID NO: 580435 - DNA, 75 bp, synthetic construct
  source 1..75: mol_type = other DNA
catgaaccaactgaatgactatttccgaaatgccgcgccgcaatcggttaaagacgaggcggcttcactacagca

SEQ ID NO: 580436 - DNA, 75 bp, synthetic construct
  source 1..75: mol_type = other DNA
ggtattgaaggcccgaatgttcaaggtctaccaggtcaggttcaaggtgctgtaggcagtggacctaatatccca

SEQ ID NO: 580437 - DNA, 75 bp, synthetic construct
  source 1..75: mol_type = other DNA
tttcgtctcaaagcacagctcagagccaattgatcaaccaacaagccaagaacttcatggataagttccaagtgg

SEQ ID NO: 580438 - DNA, 75 bp, synthetic construct
  source 1..75: mol_type = other DNA
tttgttgataccggcgctggagcaacgttagttcccggcgatgtgctgtacgttgccgctggcggctggaatttc

SEQ ID NO: 580439 - DNA, 75 bp, synthetic construct
  source 1..75: mol_type = other DNA
gataccggaaggtcaggtaatggtcgcacaagacgtagcagttaaagctcacgttaacgaccagtttggcaaccc

SEQ ID NO: 580440 - DNA, 75 bp, synthetic construct
  source 1..75: mol_type = other DNA
aacgccagaaggggcgacgttaagtggcggaaaagtgagaactaactcttcaggtcaggctccagtcgttctgac

SEQ ID NO: 580441 - DNA, 75 bp, synthetic construct
  source 1..75: mol_type = other DNA
gcggcggcattgattacacggagattggcgcgattcgctgggcttttgccatcgccccggatcacccattagcct

SEQ ID NO: 580442 - DNA, 75 bp, synthetic construct
  source 1..75: mol_type = other DNA
gcgccatgttactggtagctgaagatggcggatttacacttgaaattaacggcagcgaaaaagagctctatctgc

SEQ ID NO: 580443 - DNA, 75 bp, synthetic construct
  source 1..75: mol_type = other DNA
gatacctgaaggtcagctaatggtcgcacaagacgtagcagttaaagctcacgtcaacgaccagtttggcaaccc

SEQ ID NO: 580444 - DNA, 75 bp, synthetic construct
  source 1..75: mol_type = other DNA
cgtatatggtgaaagcatccctgccgaatggagcctcacttgagaaacaactggaggctattgatgaaaaactga

SEQ ID NO: 580445 - DNA, 75 bp, synthetic construct
  source 1..75: mol_type = other DNA
tggaatttgtgcagtcaggtaccaacgtgccctatgtgcaagttagtgcaattgactacagtaaaaatttctcag

SEQ ID NO: 580446 - DNA, 75 bp, synthetic construct
  source 1..75: mol_type = other DNA
gtctcactgtgtacttcgccttaaaaagcggctctgccacattaacgtcattaacagcggtgaccgatcaaaacg

SEQ ID NO: 580447 - DNA, 75 bp, synthetic construct
  source 1..75: mol_type = other DNA
atgctaagacgggattcaggaccaaccggcagtctttttgaacgtatccgtgaggcggcaaatccgccttcatat

SEQ ID NO: 580448 - DNA, 75 bp, synthetic construct
  source 1..75: mol_type = other DNA
ttacccggcaaatccataatccgcgtcaggattcgcgcatgttactggcaacccagcactctgctacgggtcagg

SEQ ID NO: 580449 - DNA, 75 bp, synthetic construct
  source 1..75: mol_type = other DNA
cagattaccgtgacgaccgaagtgtataacggcgtctgggatgcgattattaataatcaggcgaatattgctatc

SEQ ID NO: 580450 - DNA, 75 bp, synthetic construct
  source 1..75: mol_type = other DNA
gccagattctgggcgaagggattggttttttgccggattacatggttcgcgaagcgatggcgcaatcactgctgg

SEQ ID NO: 580451 - DNA, 75 bp, synthetic construct
  source 1..75: mol_type = other DNA
ggggcaaatccacgtcatggcagttatcgcataccttttataacgattcattcagccataaagaacttggcgtaa

SEQ ID NO: 580452 - DNA, 75 bp, synthetic construct
  source 1..75: mol_type = other DNA
ctttatgaagatcctcggcggcgaccttgagccgacgctgggcaacgtttctatcgatccaaatgagcgcattgg

SEQ ID NO: 580453 - DNA, 75 bp, synthetic construct
  source 1..75: mol_type = other DNA
ctgctggctgataacgccaagaagaaagcgcagattgccgagttgcagtcctttgtaagccgctttagcgccaac

SEQ ID NO: 580454 - DNA, 75 bp, synthetic construct
  source 1..75: mol_type = other DNA
ggtccaatgagcgaagtggctccaggctggaaactgcgtgtgttgctggcgcaggcgctgtttgccgatcctgat

SEQ ID NO: 580455 - DNA, 75 bp, synthetic construct
  source 1..75: mol_type = other DNA
tttgttgataccggtacaggtgcaacgttagtttccggcgatgtactgtacgttcccgctggcgggtggaatttc

SEQ ID NO: 580456 - DNA, 75 bp, synthetic construct
  source 1..75: mol_type = other DNA
ataccgaacgctcgccgtcggagtatcgtcggcagtaccacagtcagctaacagaaaaaccgactactccagaat

SEQ ID NO: 580457 - DNA, 75 bp, synthetic construct
  source 1..75: mol_type = other DNA
taaacgacaactggcggagcaggctgaggaactggccatcctccaaaaggccgcgacatacttcgcgaagcgcct

SEQ ID NO: 580458 - DNA, 75 bp, synthetic construct
  source 1..75: mol_type = other DNA
tagcgtaacgccagaaggggcgacgttaagtggcggaaaagtgagaactaactcttcaggtcaggctccagtcgt

SEQ ID NO: 580459 - DNA, 75 bp, synthetic construct
  source 1..75: mol_type = other DNA
atgactgcaagcgtcactgacgctaacggcaacccggtagaaggcataaaagttaatttccgcggaacctccgtc

SEQ ID NO: 580460 - DNA, 75 bp, synthetic construct
  source 1..75: mol_type = other DNA
ctttgcagcttggtcaaagtgacagtgtgttgttcccttatcctggatttcagtctggttttgttgaggttaacg

SEQ ID NO: 580461 - DNA, 75 bp, synthetic construct
  source 1..75: mol_type = other DNA
ctggcgacgcgtattctggaaattacgccagaacgtgtgatcgactttagcggtaattacgaagattacctgcgt

SEQ ID NO: 580462 - DNA, 75 bp, synthetic construct
  source 1..75: mol_type = other DNA
gcctcgaaatcacgtcaggcgacttcgcgcgcgcgtcagattgataagatcaaactggaagaagtgaaagtctcc

SEQ ID NO: 580463 - DNA, 75 bp, synthetic construct
  source 1..75: mol_type = other DNA
ctggcgacccgtattctggaaatcactccggaacgcgtgatcgactttagcggcaactacgaagattatctgcgt

SEQ ID NO: 580464 - DNA, 75 bp, synthetic construct
  source 1..75: mol_type = other DNA
atatcacgcagtctgtggctgttcttcctgattttattagaaaacaaatactttcgaatattagcaggcttgcgg

SEQ ID NO: 580465 - DNA, 75 bp, synthetic construct
  source 1..75: mol_type = other DNA
cctttgaacaaccgctcgcgtcgcttccgtgcacacttcgccagcttattcttgaacgcatccagaacctgaccc

SEQ ID NO: 580466 - DNA, 75 bp, synthetic construct
  source 1..75: mol_type = other DNA
ctccagggagcaaaaacagaacatcagtcgcaaaattttcttgctgcatgagttgttccaaccagtaaatccgat

SEQ ID NO: 580467 - DNA, 75 bp, synthetic construct
  source 1..75: mol_type = other DNA
gatcgggcactggcggtggatgagcatttttaccatcaggtgattggtgaagcttaccggcataaagtgctgttt

SEQ ID NO: 580468 - DNA, 75 bp, synthetic construct
  source 1..75: mol_type = other DNA
agtctttgcaatgccttgtttgtcggcgacgtatcgccggtcagcgatgtggcagcctgtacccgtgaacctttg

SEQ ID NO: 580469 - DNA, 75 bp, synthetic construct
  source 1..75: mol_type = other DNA
ggccagcagcccggtagcggtacagctcagtgccccgcttcgtaccgatgccattaataaaaaagcccgtgacga

SEQ ID NO: 580470 - DNA, 75 bp, synthetic construct
  source 1..75: mol_type = other DNA
accattttgatgccgcgccgcgccttgaattgttggatggcgatgcgacgccgattccggtaaagctggatattc

SEQ ID NO: 580471 - DNA, 75 bp, synthetic construct
  source 1..75: mol_type = other DNA
gaactggataatggaccgcatcagttagtgtttcgcgttgagaagacgattcatctttccaatagtgaagaacgg

SEQ ID NO: 580472 - DNA, 75 bp, synthetic construct
  source 1..75: mol_type = other DNA
tgataccggcccctgttcggacagtcatccagtctgtacgcgacatcgtggtatcggtcgcttgtaaagtctgga

SEQ ID NO: 580473 - DNA, 75 bp, synthetic construct
  source 1..75: mol_type = other DNA
ctggagaatgaacgggaagccaaccatttcgacacaacgccgcgtcttgaattgttagatggcgatgcgacgccg

SEQ ID NO: 580474 - DNA, 75 bp, synthetic construct
  source 1..75: mol_type = other DNA
tagtgtttcgcgtcgagaagactatccatctttccagtagtgaagaacggctttatatctccccgccgctggtcg

SEQ ID NO: 580475 - DNA, 75 bp, synthetic construct
  source 1..75: mol_type = other DNA
ccaggtaaattttcgcctgccccgactggagaatgaacgagaagctaatcattttgatgttgcgcctcgtctcga

SEQ ID NO: 580476 - DNA, 75 bp, synthetic construct
  source 1..75: mol_type = other DNA
tgggggctgcgggtgatgaccgagcgaatgattaagtgtctgccacgcgaagccaccagcccggtggtagcgcaa

SEQ ID NO: 580477 - DNA, 75 bp, synthetic construct
  source 1..75: mol_type = other DNA
tgctgcgggtaataagactcgtctggcgtttgcaggtctgaagttcggtgactttggcagcattgattatggtcg

SEQ ID NO: 580478 - DNA, 75 bp, synthetic construct
  source 1..75: mol_type = other DNA
ggtgatgatggcgataagacctatgcacgtcttggttttaaaggtgagactcagatcaatgatcaactgacaggt

SEQ ID NO: 580479 - DNA, 75 bp, synthetic construct
  source 1..75: mol_type = other DNA
agtttggtggtgatggctggactcagaccgataactttatgactgcccgaacttccggagttctgacttaccgta

SEQ ID NO: 580480 - DNA, 75 bp, synthetic construct
  source 1..75: mol_type = other DNA
tgggcgcgggtttctggcgcaatggggattctgttggacaagcagaatatttttattgatgactcaagcgccctg

SEQ ID NO: 580481 - DNA, 75 bp, synthetic construct
  source 1..75: mol_type = other DNA
tatcgcgacgaagtttatcacccggatagcgaaatgaagggcattgccgaggtaattatcggtaagcaacgaaat

SEQ ID NO: 580482 - DNA, 75 bp, synthetic construct
  source 1..75: mol_type = other DNA
gcaggttaatggcctgaatggtagcaaaactattgaagtcaaagatcctttaacgggggatgtgacggaaaaaga

SEQ ID NO: 580483 - DNA, 75 bp, synthetic construct
  source 1..75: mol_type = other DNA
agccgcaaaatctgcctgttgcatgagctgttccagcccgtgcatccggtgtgtgctgtgtcggtccgtctacag

SEQ ID NO: 580484 - DNA, 75 bp, synthetic construct
  source 1..75: mol_type = other DNA
gctacgagccagtgatcggcattatgggtaaaaccggtgttgggaagagcagtctgtgcaatgccctgtttgccg

SEQ ID NO: 580485 - DNA, 75 bp, synthetic construct
  source 1..75: mol_type = other DNA
gggtgtcggtgaaagtgaacgcagggatgcggaatacgctgcactttaccgtcagcaacttccccgacttgacct

SEQ ID NO: 580486 - DNA, 75 bp, synthetic construct
  source 1..75: mol_type = other DNA
gtgcgtatcaggcataaattatcgcttgctgaagtaagtaaaatgttaggtatctccattaattctctaaaacag

SEQ ID NO: 580487 - DNA, 75 bp, synthetic construct
  source 1..75: mol_type = other DNA
acctcgtcgaaaacgcggcgatgttgcaggataaaccggtacttatcttctcgctggagatgccatcagaacaga

SEQ ID NO: 580488 - DNA, 75 bp, synthetic construct
  source 1..75: mol_type = other DNA
acgagcaaaactggaagcgtgggagcgttacagcgtgttggtttatcgtgtagatacagctaaaccagaatggcc

SEQ ID NO: 580489 - DNA, 75 bp, synthetic construct
  source 1..75: mol_type = other DNA
tgataccgtccccggttcggactgtcatccagtctgtacgcgacatcgtggtatcggtcgctcgtgcagtctgga

SEQ ID NO: 580490 - DNA, 75 bp, synthetic construct
  source 1..75: mol_type = other DNA
cgtaacattggctcgtagccaggctaatcgcgccagcagcgatcttcagcaagctccgggagatgcacaaaaatt

SEQ ID NO: 580491 - DNA, 75 bp, synthetic construct
  source 1..75: mol_type = other DNA
attaccgccggtatgtcgccgttaattgaagaactgaaagcccgtatgaaggagttacaaagcggtatacagaca

SEQ ID NO: 580492 - DNA, 75 bp, synthetic construct
  source 1..75: mol_type = other DNA
tgccagggtgctgacatcggggcaaaaatctgatgcactgcaaggtttatcaaaaattatggaacttattgccta

SEQ ID NO: 580493 - DNA, 75 bp, synthetic construct
  source 1..75: mol_type = other DNA
aagtttggtaactcagaaaaaccatttgctactttagagctaccatctgtgatatcttactttggaactaatgat

SEQ ID NO: 580494 - DNA, 75 bp, synthetic construct
  source 1..75: mol_type = other DNA
ataatacactgtacgattgggtgagtttttactcccagtcatttagtgccatggcagagcaattatctaaggata

SEQ ID NO: 580495 - DNA, 75 bp, synthetic construct
  source 1..75: mol_type = other DNA
ggcaatgttaattgaagccaacatgttacaggattctgacgaagaacagtcctttgatgaatatattcagcatat

SEQ ID NO: 580496 - DNA, 75 bp, synthetic construct
  source 1..75: mol_type = other DNA
tggcttagtgagtttaccaggaatgatgtccgggctgatatttgccgggattgatccggtgaaggcgattaaata

SEQ ID NO: 580497 - DNA, 75 bp, synthetic construct
  source 1..75: mol_type = other DNA
agcggtggcttttgccattaagtgggtggcggttggcatcgccgtgtctccgatactgtatgggctggcaaaatt

SEQ ID NO: 580498 - DNA, 75 bp, synthetic construct
  source 1..75: mol_type = other DNA
caatccggtaccagaaaaattgctgggaaaacgcaggaacgcctgaaaaaattaatctggctggcggcgcaggca

SEQ ID NO: 580499 - DNA, 75 bp, synthetic construct
  source 1..75: mol_type = other DNA
gatgctccgccgggttatgacagcactggaaaagcaggcaaatgcagaactgcaacagaattcctgctcgcgtat

SEQ ID NO: 580500 - DNA, 75 bp, synthetic construct
  source 1..75: mol_type = other DNA
gtgggggcgggagttactctggcggtgctgattttatcgggttcgattgagtttatcccgatgcaggtgatccct

SEQ ID NO: 580501 - DNA, 75 bp, synthetic construct
  source 1..75: mol_type = other DNA
caacggtggattcagcaaaaacggttggcttagtgagtttaccaggaatgatgtccgggttgatatttgccggga

SEQ ID NO: 580502 - DNA, 75 bp, synthetic construct
  source 1..75: mol_type = other DNA
agggaggaacaacttagaaaagcattctccaatgttagacctgattatgttgttaatagtttttcagagctgctg

SEQ ID NO: 580503 - DNA, 75 bp, synthetic construct
  source 1..75: mol_type = other DNA
aaagtggatgcaatgcaggagtctgccacccgtcagcgtgaacaggatactattcggaagtttactgaagggaat

SEQ ID NO: 580504 - DNA, 75 bp, synthetic construct
  source 1..75: mol_type = other DNA
cgatacttgaacgccgctatcaggcacaaatcaatgcgctgaaggcgacgctggacagccaaaaaataacggtat

SEQ ID NO: 580505 - DNA, 75 bp, synthetic construct
  source 1..75: mol_type = other DNA
cagtcaacggaaagaaaccaaaacagtttttttatgttccatgacggagcgccataccgcgtcagtgttgtcgaa

SEQ ID NO: 580506 - DNA, 75 bp, synthetic construct
  source 1..75: mol_type = other DNA
ggggaaaaccgggtcgggtaaatcatcactctgtaatgcgctgtttgccggaaaaatctctccggtcagcgatgt

SEQ ID NO: 580507 - DNA, 75 bp, synthetic construct
  source 1..75: mol_type = other DNA
tggatttcattcttgatgaacatgaccaggcatttttgcgtcagagcaggatagcgacagttcagatcattctgt

SEQ ID NO: 580508 - DNA, 75 bp, synthetic construct
  source 1..75: mol_type = other DNA
ctctggcaggagaaagtggatgcaatgcaggcgtctgccacccgtcagcgtgaacaggataccatccggaagttt

SEQ ID NO: 580509 - DNA, 75 bp, synthetic construct
  source 1..75: mol_type = other DNA
ggagcaattgaaggattaaaagccctcaaaatgggtaatgactccaacttactgatagtgttttatgttcagata

SEQ ID NO: 580510 - DNA, 75 bp, synthetic construct
  source 1..75: mol_type = other DNA
ctcagaaatatatcaatgagttgcaggcgaatccggcgaaaatcgctacccgtaaggcttcgcaaaatacgctta

SEQ ID NO: 580511 - DNA, 75 bp, synthetic construct
  source 1..75: mol_type = other DNA
aagctggcggttgagcgccacaacggaccgacagcactgatcctctccaggcagaatctggcacaggtagaacga

SEQ ID NO: 580512 - DNA, 75 bp, synthetic construct
  source 1..75: mol_type = other DNA
tagttcatcaggagttacgttttacagaaaacggacagcggtcactcagtgcaaacattttatgcaacgatggct

SEQ ID NO: 580513 - DNA, 75 bp, synthetic construct
  source 1..75: mol_type = other DNA
tcttgtagtttcaacaatacacggaagctctgttcagggggctatttatgccttacagcagatagcttctgctga

SEQ ID NO: 580514 - DNA, 75 bp, synthetic construct
  source 1..75: mol_type = other DNA
gctatccgaacagtcagtacaccaccgatgccaccaaacgtctggtattcctgaaagatcgtctggcgaaatatg

SEQ ID NO: 580515 - DNA, 75 bp, synthetic construct
  source 1..75: mol_type = other DNA
tctttgccgccctgcatgttgagggggtgcagcgtgtggagctggcttctcctttggcggatgtggtcctgaaca

SEQ ID NO: 580516 - DNA, 75 bp, synthetic construct
  source 1..75: mol_type = other DNA
gccaccgaactgaaactcggtatgttaggccacacctgttacgccgaaacaatttctgtctatggtacagaacct

SEQ ID NO: 580517 - DNA, 75 bp, synthetic construct
  source 1..75: mol_type = other DNA
atgcctgagcgcaatattgtggaagacatcaagttcgcccaggagattatcaataaaaaccggaacagcctggaa

SEQ ID NO: 580518 - DNA, 75 bp, synthetic construct
  source 1..75: mol_type = other DNA
tctcaggccaaccgtattgcggtggtcagcgacgagctggacgccgatccgtttatgaaaaatatctacctgatg

SEQ ID NO: 580519 - DNA, 75 bp, synthetic construct
  source 1..75: mol_type = other DNA
cctgtctcatctccgctttgggccgcaaaggcccctttttctcttatcggcagcgagtttcgcaccgggcggcag

SEQ ID NO: 580520 - DNA, 75 bp, synthetic construct
  source 1..75: mol_type = other DNA
cagcgagtttcgcgccggacggcagttcgccgtcatcgcgccatccggctatcactcgctctcacagcttcagct

SEQ ID NO: 580521 - DNA, 75 bp, synthetic construct
  source 1..75: mol_type = other DNA
atgaggaagttgaggccgccacttatgctcacggcagcaaagatatgcccgcgcgcaatgtggtggaagatctgg

SEQ ID NO: 580522 - DNA, 75 bp, synthetic construct
  source 1..75: mol_type = other DNA
tcaaagaacgcttacgcaagggtgaagtacaaattggcctgtggttaagttcgacaacttcctatatggcagaaa

SEQ ID NO: 580523 - DNA, 75 bp, synthetic construct
  source 1..75: mol_type = other DNA
ccaaacaccattcaggatctctatcaccagttacaggcgatagcgccctatgcctgccagccggtgattcgccct

SEQ ID NO: 580524 - DNA, 75 bp, synthetic construct
  source 1..75: mol_type = other DNA
aacgattcgctttgtctgttagtgcaggtggaaagtaaaacggcactggataacctggacgagatcctcgacgtc

SEQ ID NO: 580525 - DNA, 75 bp, synthetic construct
  source 1..75: mol_type = other DNA
gccgcatggtagaagaagatccagcgcatccgcgttacattcagaccgtttggggcctgggctacgtctttgtac

SEQ ID NO: 580526 - DNA, 75 bp, synthetic construct
  source 1..75: mol_type = other DNA
gggaagaagcgaacggcgagttcttgatggtgattccgggaaagatgctgttttgcagcttttgcgtgatgacga

SEQ ID NO: 580527 - DNA, 75 bp, synthetic construct
  source 1..75: mol_type = other DNA
gggaagaagcgaacggcgagttcttgatgctggttccgggaaagatgctgttttgcagcttttgcgtgatgctta

SEQ ID NO: 580528 - DNA, 75 bp, synthetic construct
  source 1..75: mol_type = other DNA
gacatgaaggtaagaaacaaaaaaaagagaatattccttatattaccaatgaactgcatatgaaaaagtattcgt

SEQ ID NO: 580529 - DNA, 75 bp, synthetic construct
  source 1..75: mol_type = other DNA
tccggattatcccgcttagtcagtcttccggtaacggaaatcaaaattgacaaaagttttgtcgatcgttgtctg

SEQ ID NO: 580530 - DNA, 75 bp, synthetic construct
  source 1..75: mol_type = other DNA
ggtagatgattttggtacgggcttttccggattatcccgcttagtcagtcttccggtaacggaaatcaaaattga

SEQ ID NO: 580531 - DNA, 75 bp, synthetic construct
  source 1..75: mol_type = other DNA
aatccgaggctgatattgccgccgagtttacgcgtctggagcacatcgaggccacggaaaccgaaggtattaccg

SEQ ID NO: 580532 - DNA, 75 bp, synthetic construct
  source 1..75: mol_type = other DNA
cgaccagtgcgcgaagaagatgttatcgctatccgcaataaagccgcacgcgctttacaggctgtttttgccggt

SEQ ID NO: 580533 - DNA, 75 bp, synthetic construct
  source 1..75: mol_type = other DNA
tgttcactggaggaagccaccgaactgaaactcggtatgttaggccatacctgctacgccgaaacgatttctgtc

SEQ ID NO: 580534 - DNA, 75 bp, synthetic construct
  source 1..75: mol_type = other DNA
ctggatgggaaacctgccagccagtttgacctgatcgaccattttatcgcccgctacggtatcaatctcgcgcgc

SEQ ID NO: 580535 - DNA, 75 bp, synthetic construct
  source 1..75: mol_type = other DNA
tcattctgcatggatacgaaaagatccgctggccggatgcaccggggtgggcgagccgggaaacctggctggaga

SEQ ID NO: 580536 - DNA, 75 bp, synthetic construct
  source 1..75: mol_type = other DNA
gttccttcccgcagtgtgccggatggcgttaatttccttgtggcgacagtggatgtgcaggcgggacgtcatcgc

SEQ ID NO: 580537 - DNA, 75 bp, synthetic construct
  source 1..75: mol_type = other DNA
agtttggcgcattgagtgcatataggcaattctgtcttgtaaatcatctgacactgtccgagcacggtctttatt

SEQ ID NO: 580538 - DNA, 75 bp, synthetic construct
  source 1..75: mol_type = other DNA
ctaacgagaaaatcgcagaatatgctgttgatgatgaaactgacgaacacgatgaagcacttacacaacaagagt

SEQ ID NO: 580539 - DNA, 75 bp, synthetic construct
  source 1..75: mol_type = other DNA
tttctataaagaatggcgcaatggtttagagcataagtttttagttgtacataaaagtgataaacctgaggacat

SEQ ID NO: 580540 - DNA, 75 bp, synthetic construct
  source 1..75: mol_type = other DNA
tcgtgatggccttggtaaacgtatttacctgtttaagggggacagcatccggcgcgcaaaactgatcagccgtac

SEQ ID NO: 580541 - DNA, 75 bp, synthetic construct
  source 1..75: mol_type = other DNA
caggtggaaagtaaaacgggtaatgactccaacttattgatagtgttttatgttcagataatgcccgatgacttt

SEQ ID NO: 580542 - DNA, 75 bp, synthetic construct
  source 1..75: mol_type = other DNA
cctatcgtttctggcgtcgttgccggagtgacggactgggcaacagggtgtttctgttcaagggggatggtcttc

SEQ ID NO: 580543 - DNA, 75 bp, synthetic construct
  source 1..75: mol_type = other DNA
catcacgcagtcattgcgcagtgactgcgacggggagagccagcgaattgatccggccagctatccggaagactg

SEQ ID NO: 580544 - DNA, 75 bp, synthetic construct
  source 1..75: mol_type = other DNA
ccctacatcattgagcccatgaactgcctggcatcgcgtgaatatgatgcggtgatttttgttggtcctgcgcga

SEQ ID NO: 580545 - DNA, 75 bp, synthetic construct
  source 1..75: mol_type = other DNA
atgggtttttcatcagcccgaaatttgggaagggacatatcggcaggattttccccaccacgtcgcatgccgatt

SEQ ID NO: 580546 - DNA, 75 bp, synthetic construct
  source 1..75: mol_type = other DNA
cgatctgtgggcgctgacccagcaggggccagctgaagaactgaataaacctggcaaactcagccagcgctgttg

SEQ ID NO: 580547 - DNA, 75 bp, synthetic construct
  source 1..75: mol_type = other DNA
tctaaaccaaaaccaaaacgtgagaagcccgtaaccgagcaggctaatccgtggtcttcgtcaggaggttgggtg

SEQ ID NO: 580548 - DNA, 75 bp, synthetic construct
  source 1..75: mol_type = other DNA
atgagggcaagggttatcaaaaaagaaggttgtatggacgatgcgcttttaattacacaagggacactttccttc

SEQ ID NO: 580549 - DNA, 75 bp, synthetic construct
  source 1..75: mol_type = other DNA
tccaagttggccgttattaaattatttaaagagaaatgaagcattaaaatataaaaaggtaaaacttttcttgag

SEQ ID NO: 580550 - DNA, 75 bp, synthetic construct
  source 1..75: mol_type = other DNA
cccaatacacggttcgataaaccaggtaaatcgccgtttatggatatggatctggtgccgaaatatgccgatgaa

SEQ ID NO: 580551 - DNA, 75 bp, synthetic construct
  source 1..75: mol_type = other DNA
tgccgaaacagatccacgttctgcatgaatcacagcaacagtccggcattggctccggcctgaatgaaggcgata

SEQ ID NO: 580552 - DNA, 75 bp, synthetic construct
  source 1..75: mol_type = other DNA
cattcagacccgttttaccattaaagcacctattgatggtgtcattactgcatttgacctgcgcaccggcatgaa

SEQ ID NO: 580553 - DNA, 75 bp, synthetic construct
  source 1..75: mol_type = other DNA
ctgcaataattatcagcagcctcatagcgggagggctgatatctgtcactgcctggcagtttgtaaattccgcac

SEQ ID NO: 580554 - DNA, 75 bp, synthetic construct
  source 1..75: mol_type = other DNA
ggcagagccagttccttcccgcagtgtgccggatggcgttaatttccttgtggcgacagtggatgtgcaggcggg

SEQ ID NO: 580555 - DNA, 75 bp, synthetic construct
  source 1..75: mol_type = other DNA
ccgcaccagttactggctggattaatgtccgccactcaggattgccagcaggcgacgcgcgcctttgccgaaaaa

SEQ ID NO: 580556 - DNA, 75 bp, synthetic construct
  source 1..75: mol_type = other DNA
cgactgattacagccatcaccacaaaacccgtgatgtggctgaaagatgcgctggttaatgtggtgatgaaaaac

SEQ ID NO: 580557 - DNA, 75 bp, synthetic construct
  source 1..75: mol_type = other DNA
gtggcaagtaacgctcccggcttatcgtccaggcaaagacaattattatgcgatttctgcggttgcctacgataa

SEQ ID NO: 580558 - DNA, 75 bp, synthetic construct
  source 1..75: mol_type = other DNA
atgaacgcattattaaccaatccctttaaagaacgtttacgcaagggcgaagtgcaaattggtctgtggttaagc

SEQ ID NO: 580559 - DNA, 75 bp, synthetic construct
  source 1..75: mol_type = other DNA
ccgctggccggatgcaccggagtgggcgagccgggaaacctggctggagtgtgtcccggacagtaccgaaccgtc

SEQ ID NO: 580560 - DNA, 75 bp, synthetic construct
  source 1..75: mol_type = other DNA
acgcctgacggcgcaggaagctcaggcagcgaatttaattgatgaagtggtggaaaaagaacaggtggaaagctg

SEQ ID NO: 580561 - DNA, 75 bp, synthetic construct
  source 1..75: mol_type = other DNA
acgcagcgataagttacacctgaaggatgccgccgccctgcttggggtttcagagatgacgattcgtcgcgattt

SEQ ID NO: 580562 - DNA, 75 bp, synthetic construct
  source 1..75: mol_type = other DNA
ttactcggtggctatatcgttctggaaccgcgcagcgccagccattatctgttaagcgatcaaaaatctcgcctg

SEQ ID NO: 580563 - DNA, 75 bp, synthetic construct
  source 1..75: mol_type = other DNA
tcgggcacttgctccaggaattaaaacgcagcgataagttacaccttaaggacgccgccgccctgctcggggttt

SEQ ID NO: 580564 - DNA, 75 bp, synthetic construct
  source 1..75: mol_type = other DNA
cgctcacaacggtaaaactccgatggaacactactttgaacttgctgagaaaacaccatactccgatgccgttca

SEQ ID NO: 580565 - DNA, 75 bp, synthetic construct
  source 1..75: mol_type = other DNA
tcccgatacagcgctctcagacagaccggggaagagaattttttgccgttaaagtgcaggaaagattaaaagaat

SEQ ID NO: 580566 - DNA, 75 bp, synthetic construct
  source 1..75: mol_type = other DNA
tttgatattgtggtgagcgattgttgtccggaagatgagtatgtgaagtatgcgcaggcgcagcgtattaagttg

SEQ ID NO: 580567 - DNA, 75 bp, synthetic construct
  source 1..75: mol_type = other DNA
gactacattccaaaaccgtttaacccgcgtgaactgctggcccgcattcgtgcggtgctgcgtcgtcaggcgaac

SEQ ID NO: 580568 - DNA, 75 bp, synthetic construct
  source 1..75: mol_type = other DNA
cggacggttctaaagcatggggcgattgcgcttctcgccacgaagttcatttgcccgtacgttattgctcatcgt

SEQ ID NO: 580569 - DNA, 75 bp, synthetic construct
  source 1..75: mol_type = other DNA
ccagcgcatccgcgttacattcagaccgtttggggtctgggctacgttttcgtgccggacggttctaaagcatga

SEQ ID NO: 580570 - DNA, 75 bp, synthetic construct
  source 1..75: mol_type = other DNA
aatgccatcaagctgttcccggctgaacaaattacgccagaagttaccaaagcctggcgtgcggttattccacaa

SEQ ID NO: 580571 - DNA, 75 bp, synthetic construct
  source 1..75: mol_type = other DNA
ggtatttcaaagaaaaaaatcaggctctttacgtcatttttcatctggcgctggaaacagcaatgcgacaaggtg

SEQ ID NO: 580572 - DNA, 75 bp, synthetic construct
  source 1..75: mol_type = other DNA
gctgcggacactggccatcgccgcccagaaaggtgagcgcgttccggccccggtgcactccccgtcaatgacccg

SEQ ID NO: 580573 - DNA, 75 bp, synthetic construct
  source 1..75: mol_type = other DNA
tgagccgagttagccatgtatcacagtttgtattggtggcatttgctatttttggatatttttatacagtaagac

SEQ ID NO: 580574 - DNA, 75 bp, synthetic construct
  source 1..75: mol_type = other DNA
gccccgctaattagcattgagcgttttgtgtggttggtggggtatctaaataaccgctgggggactgatcaggat

SEQ ID NO: 580575 - DNA, 75 bp, synthetic construct
  source 1..75: mol_type = other DNA
actcgacaagcattatcgcaaggtcgccccgctaattagcattgagcgttttgtgtggttggtggggtatctaaa

SEQ ID NO: 580576 - DNA, 75 bp, synthetic construct
  source 1..75: mol_type = other DNA
attctttaactgacaggaatgtaaagaaacttctttctgatttttcctcacaactacctagagaagatggtcgaa

SEQ ID NO: 580577 - DNA, 75 bp, synthetic construct
  source 1..75: mol_type = other DNA
caaagatggtaatctggcagctggaacatcaacaggaggtatgacaaataaacgttacggacgcgtaggtgactc

SEQ ID NO: 580578 - DNA, 75 bp, synthetic construct
  source 1..75: mol_type = other DNA
cttatgcagttatgactaaaagccctcatgtattaatgatctctaatggtgcggaactatttgcaaaagagcaag

SEQ ID NO: 580579 - DNA, 75 bp, synthetic construct
  source 1..75: mol_type = other DNA
ttatctgagccacggcgcaaacggctttggcctcggttctgcgctatatcaccccggcatgacgccagagcaagt

SEQ ID NO: 580580 - DNA, 75 bp, synthetic construct
  source 1..75: mol_type = other DNA
acttggtatcctggaagttgtaattatgtaggtattgatattgcttttcctgatttttctgtccactataaatta

SEQ ID NO: 580581 - DNA, 75 bp, synthetic construct
  source 1..75: mol_type = other DNA
ctcgaccatgctatcacttatactgattgttggcttaatgaacaatggaaaaactctattgtaagccagttgaat

SEQ ID NO: 580582 - DNA, 75 bp, synthetic construct
  source 1..75: mol_type = other DNA
gtacacatccccagattactttacggtatggatggattggttgaatgtgctgcgtaatactgtaaattcagagtc

SEQ ID NO: 580583 - DNA, 75 bp, synthetic construct
  source 1..75: mol_type = other DNA
aggagcatttcagacagttcatcatggctgtcgcaagggagcgtaaagattcacattcagggttaatgagtccgc

SEQ ID NO: 580584 - DNA, 75 bp, synthetic construct
  source 1..75: mol_type = other DNA
cctttcaaacctgcactggataataaatatttatttttcagagagtctctttataaaaatatcagatttgatacc

SEQ ID NO: 580585 - DNA, 75 bp, synthetic construct
  source 1..75: mol_type = other DNA
aaaaaaacaagatcctgttgtttcctgataaattgaatgatctaaaacattcactggatatgtttatttccacat

SEQ ID NO: 580586 - DNA, 75 bp, synthetic construct
  source 1..75: mol_type = other DNA
aatggcagattcgagaaaaagtgtgtaatttcggtacgctgcaggttactcaaagcttattatcctttagcctta

SEQ ID NO: 580587 - DNA, 75 bp, synthetic construct
  source 1..75: mol_type = other DNA
cttgggctaaatctgttgatgaaaaactcattcatattcacgatgcagttaaaggccaaaaatattattgtccgt

SEQ ID NO: 580588 - DNA, 75 bp, synthetic construct
  source 1..75: mol_type = other DNA
accccggcatgacgccagagcaagtctatgaaaatgcagtactgtttatgaacgcatggaacaatttaaatagca

SEQ ID NO: 580589 - DNA, 75 bp, synthetic construct
  source 1..75: mol_type = other DNA
tgcctagctgggagaatagtggttggatttccaaagtacctagcgatttaataaaatgtccaacagtacggaagt

SEQ ID NO: 580590 - DNA, 75 bp, synthetic construct
  source 1..75: mol_type = other DNA
ccagtttatagatcaagaattacgtgatatacctgcaagttcagcacaggaatggctttctgatttcagggggct

SEQ ID NO: 580591 - DNA, 75 bp, synthetic construct
  source 1..75: mol_type = other DNA
agcgtgtgcttttttattggatgtagtgcatatagttcatataatgtgtatggtattaaaccaggttcagctgat

SEQ ID NO: 580592 - DNA, 75 bp, synthetic construct
  source 1..75: mol_type = other DNA
gatttcgctcgggttttgggcgttaccgtcgccatggtaaaggaatgggaatcccgacgcgttaagccttcaagt

SEQ ID NO: 580593 - DNA, 75 bp, synthetic construct
  source 1..75: mol_type = other DNA
acgctcaacatccgttttcgtcgggctgattatgtcgggcttgcagtgatcagcagcggtctgggcgtagtttcc

SEQ ID NO: 580594 - DNA, 75 bp, synthetic construct
  source 1..75: mol_type = other DNA
gcagaaaagtccgacgttaacttttcctccgagcttgatgctgcggcaaaagaagctggatacatggttcgctga

SEQ ID NO: 580595 - DNA, 75 bp, synthetic construct
  source 1..75: mol_type = other DNA
cgctgatggaagaatctggcatagatgaaacattggccgagtttggtgaggctgagacgcagatcagagaaatgt

SEQ ID NO: 580596 - DNA, 75 bp, synthetic construct
  source 1..75: mol_type = other DNA
aaaacgtttctggcgttacctcgacagaaccctgccagacgcctttatgcatgctaatatcggcccgtctgattc

SEQ ID NO: 580597 - DNA, 75 bp, synthetic construct
  source 1..75: mol_type = other DNA
ttcttcttcgctggcaacttcttagtgccgtaatgatgtttctggccagcacactcaacatccgttttcgcaaat

SEQ ID NO: 580598 - DNA, 75 bp, synthetic construct
  source 1..75: mol_type = other DNA
gcctgctggttcgctaccggattgctcggtattaccatgatggatattaccgctatctggcacaacattgagtcg

SEQ ID NO: 580599 - DNA, 75 bp, synthetic construct
  source 1..75: mol_type = other DNA
ggaaattatggaagatctctatgatgttgataacgtgattgtgccaatcggcggcggcggtttaattgctggtat

SEQ ID NO: 580600 - DNA, 75 bp, synthetic construct
  source 1..75: mol_type = other DNA
cgctttacaggctgtctttgccggtatgggactaccgcctattaccgatgaagaagtcgaagcggcaacctatgc

SEQ ID NO: 580601 - DNA, 75 bp, synthetic construct
  source 1..75: mol_type = other DNA
ttcacagatgaacgtggtagagatgatgatggcgatgcagaaaatgcgcgcccgtcgaacaccatcacaacaggc

SEQ ID NO: 580602 - DNA, 75 bp, synthetic construct
  source 1..75: mol_type = other DNA
agaccgaaggcggctttttctccggcggagaagcgtcatggggggtggcagatggctggtcgctctacggttgcg

SEQ ID NO: 580603 - DNA, 75 bp, synthetic construct
  source 1..75: mol_type = other DNA
ctgcacggcgataacttcaacgacaccatcgccaaagtgagcgaaattgtcgaaacggaaggtcgcatctttatt

SEQ ID NO: 580604 - DNA, 75 bp, synthetic construct
  source 1..75: mol_type = other DNA
tgaaatattccttaagtttgaaaacatgcagcgtaccgggtcatttaaaattcgtggcgcatttaataaattaag

SEQ ID NO: 580605 - DNA, 75 bp, synthetic construct
  source 1..75: mol_type = other DNA
gtgaatgtagcaaaccgcacatcgccaacggggtccggtgcatgataaaattttcacaaaagggggctacgggat

SEQ ID NO: 580606 - DNA, 75 bp, synthetic construct
  source 1..75: mol_type = other DNA
ctgcacggcgacaactttaacgacactatcgctaaagtgagcgaaattgtcgaaacggaaggccgtatttttatc

SEQ ID NO: 580607 - DNA, 75 bp, synthetic construct
  source 1..75: mol_type = other DNA
tgttgttctacgccagtcccaaagcgtcgtactgcaccgggcagtcgattaatgtcactggcggtcaggtcatgt

SEQ ID NO: 580608 - DNA, 75 bp, synthetic construct
  source 1..75: mol_type = other DNA
ttgatgatccgcgacggcattcagggacgcattattcagatcaactcgaaatccggcaaagtgggcagcaaacac

SEQ ID NO: 580609 - DNA, 75 bp, synthetic construct
  source 1..75: mol_type = other DNA
gtgagcgaaattgtcgaaatggaaggccgtatttttatcccaccttacgatgatccgaaagtgattgctggccag

SEQ ID NO: 580610 - DNA, 75 bp, synthetic construct
  source 1..75: mol_type = other DNA
aattaagttcactgactgatgcggaaaaacgtaaaggtgtagtggcctgttctgcgggcaaccatgcgcaagggg

SEQ ID NO: 580611 - DNA, 75 bp, synthetic construct
  source 1..75: mol_type = other DNA
ggtaaagtggtgatgccaaaaggcgcgccgaaatccaaagtagcggcaacgtgcgactactccgcagaagtcgtt

SEQ ID NO: 580612 - DNA, 75 bp, synthetic construct
  source 1..75: mol_type = other DNA
catggggattttgctttcagtttctgacctgaatgatattgaaagaataaagtatataaaagcagggagatggtt

SEQ ID NO: 580613 - DNA, 75 bp, synthetic construct
  source 1..75: mol_type = other DNA
atggagcctggcattacggtgtcccatgtggcgcgattgcatggtattcagcccagtctgttgtttaagtggaaa

SEQ ID NO: 580614 - DNA, 75 bp, synthetic construct
  source 1..75: mol_type = other DNA
cgtgaagcggcgaaaggtaagcagggtggacgcacaatggaaatccagcgtctgatcgcccgtgctcttcgcgcg

SEQ ID NO: 580615 - DNA, 75 bp, synthetic construct
  source 1..75: mol_type = other DNA
gtgctgacgccactagcgagcaaagcgttctggcgctctctcgtggggtagatgaaatctttggtcgcgtggatt

SEQ ID NO: 580616 - DNA, 75 bp, synthetic construct
  source 1..75: mol_type = other DNA
ttggcgatgcggttgttgatttattgccggagttatctggtgcgttgttgccttgcccgggaggggctccggcca

SEQ ID NO: 580617 - DNA, 75 bp, synthetic construct
  source 1..75: mol_type = other DNA
gaatgatgaagcaggtcgctgcctgattgtcgatcccggagacgcagagccggtattaaaagccattgccgccaa

SEQ ID NO: 580618 - DNA, 75 bp, synthetic construct
  source 1..75: mol_type = other DNA
ataggtatcgccattattgccgtcgccagctttgctttttttacctgcggctttttggccgggctgattttgagt

SEQ ID NO: 580619 - DNA, 75 bp, synthetic construct
  source 1..75: mol_type = other DNA
attattacgataaagccggaaacctgctgaaggacgagtatcagagtgcggtaatggacaaccgcctgccgggct

SEQ ID NO: 580620 - DNA, 75 bp, synthetic construct
  source 1..75: mol_type = other DNA
tcctgttgccggagacagatttcaccctgccgggccgtctgcctgtcacctgctcacgcttttatgccagccact

SEQ ID NO: 580621 - DNA, 75 bp, synthetic construct
  source 1..75: mol_type = other DNA
gctggtgtgggcgggctaccaggcgggatttggagaaaaccggggcgacatcagcaacagcggggcgtactttga

SEQ ID NO: 580622 - DNA, 75 bp, synthetic construct
  source 1..75: mol_type = other DNA
aatccgtaccacataatatcccacttgccttatgaacagagattaaaaatgatgcagaaccaagtaaaatccaga

SEQ ID NO: 580623 - DNA, 75 bp, synthetic construct
  source 1..75: mol_type = other DNA
ctgcattacaccgatcgcagctactacgtgtttgatgagtttgatgaccacggcgtcgcgccgttactttttatg

SEQ ID NO: 580624 - DNA, 75 bp, synthetic construct
  source 1..75: mol_type = other DNA
tagtggatcttccgatcgtacccgcggtatacgcaacaataaccccggcaatcttgaatacagcaaaactaatcc

SEQ ID NO: 580625 - DNA, 75 bp, synthetic construct
  source 1..75: mol_type = other DNA
tgagtatacacagcagtttgatgctcaggtcgaacaactggctatgtcgctgccggatgaacaggctcgtaatgc

SEQ ID NO: 580626 - DNA, 75 bp, synthetic construct
  source 1..75: mol_type = other DNA
gacgccaggtgcaaagtcgtggtgtgcaaaccggtggttttcaaaccttcgatgttcctcaagcaggtcaggtgc

SEQ ID NO: 580627 - DNA, 75 bp, synthetic construct
  source 1..75: mol_type = other DNA
tttctggctgaccagatagcgtccggggtgctacaactgggagaagccatcgggcgctcgatacattccactgcg

SEQ ID NO: 580628 - DNA, 75 bp, synthetic construct
  source 1..75: mol_type = other DNA
gtgatcacgcgcacacaaaaagaggccaaaagttatccacatttcctgtgcataaacggggttttggtatatggg

SEQ ID NO: 580629 - DNA, 75 bp, synthetic construct
  source 1..75: mol_type = other DNA
ggtatcggcggcagccacgaaggtaataacccagaggcagaataatccgtttagtgcagcggtggaaatcggagc

SEQ ID NO: 580630 - DNA, 75 bp, synthetic construct
  source 1..75: mol_type = other DNA
atggcctgatgacagagcaccgcaacgcgacgggcttcacctgtacctaccgctgggaagaggttgaaggtttcc

SEQ ID NO: 580631 - DNA, 75 bp, synthetic construct
  source 1..75: mol_type = other DNA
gctctgaatgggtaatgtgtagtttgctcgatagccgcagtcctctgcaaaaaaatatctccgcagaacaacagc

SEQ ID NO: 580632 - DNA, 75 bp, synthetic construct
  source 1..75: mol_type = other DNA
aaagagctggatccgagggcggtatgccattatctccacggtaaacccgctttgagtacgctgcgccactttatg

SEQ ID NO: 580633 - DNA, 75 bp, synthetic construct
  source 1..75: mol_type = other DNA
cacactctatttatttcgttgtggtaattacgatgcattttcgtggaatattactggatttagacgggacgctgg

SEQ ID NO: 580634 - DNA, 75 bp, synthetic construct
  source 1..75: mol_type = other DNA
gctggaagtgctgtcagaaccgggtgccagcgccattgaccggattctgaaactgatcgaagaagccgaagagcg

SEQ ID NO: 580635 - DNA, 75 bp, synthetic construct
  source 1..75: mol_type = other DNA
aatggttggaaataatatgcgtgcaaatgatttaggcgtacaggcggctatcgctgtgcttaatgatgcacggaa

SEQ ID NO: 580636 - DNA, 75 bp, synthetic construct
  source 1..75: mol_type = other DNA
gctcgatagccgcagctctctgcaaaaaaatatctccgcagaacagcagctccaaatccgtaaacttttcctcgc

SEQ ID NO: 580637 - DNA, 75 bp, synthetic construct
  source 1..75: mol_type = other DNA
ggccccgaatctgaacccatcaggcaggcgtcagagcagaagctgcagagctacatcagcgcgcagcaccgcctc

SEQ ID NO: 580638 - DNA, 75 bp, synthetic construct
  source 1..75: mol_type = other DNA
tttccggtcatcatccagacgcagggcacagaaggcgggatgcgtaatgagcggcaggagcgtgatgagctgggc

SEQ ID NO: 580639 - DNA, 75 bp, synthetic construct
  source 1..75: mol_type = other DNA
gtggaacagccgtacacgccggtggcggctgtcacggggcgcggggaaagccggaaaatctggtattaccacacg

SEQ ID NO: 580640 - DNA, 75 bp, synthetic construct
  source 1..75: mol_type = other DNA
ctatatcacagagcagcgccgtctcggtcgggatattcgcttgtcagctctttatgccgcactgcatgtgcaggg

SEQ ID NO: 580641 - DNA, 75 bp, synthetic construct
  source 1..75: mol_type = other DNA
tctatgccgccctgcacgttgaaggtgtacagcgtgtcgaactggccgcgccactggctgacattgtgctcagta

SEQ ID NO: 580642 - DNA, 75 bp, synthetic construct
  source 1..75: mol_type = other DNA
gaggatgatggcaccgcatccgatgaacttctgaccatcgttgaaaaagcactaaatgctgaagaggtgcgcccg

SEQ ID NO: 580643 - DNA, 75 bp, synthetic construct
  source 1..75: mol_type = other DNA
aaggataactttggacagagcgttgccttgcgtgctgctcaggtcagtgaccttgctaagtcatatggcactcca

SEQ ID NO: 580644 - DNA, 75 bp, synthetic construct
  source 1..75: mol_type = other DNA
cgccgtgaaaaaactggaagcgtatatcacggcacagcaccggctggggcgcgacatccgtctgtctgccattta

SEQ ID NO: 580645 - DNA, 75 bp, synthetic construct
  source 1..75: mol_type = other DNA
aaacgccacgctttacctttaccctggtcccgaaagcgaacccatacgcgctgccgccgtgaaaaaactggaagc

SEQ ID NO: 580646 - DNA, 75 bp, synthetic construct
  source 1..75: mol_type = other DNA
ccgccgccgtgaaaaaactggaagcgtacatcacggcacagcaccggctggggcgcgacatccgtctgtctgcca

SEQ ID NO: 580647 - DNA, 75 bp, synthetic construct
  source 1..75: mol_type = other DNA
gcaaatcagagcgccgcagataatgcagaatctaccgtgtcccacggtggaaatcgcaccacgtctgcaatggca

SEQ ID NO: 580648 - DNA, 75 bp, synthetic construct
  source 1..75: mol_type = other DNA
gttgtacaaaaaaacctgaatatctcacctacgctcgaaattcgaccgggttatcgcttcaatataatggttact

SEQ ID NO: 580649 - DNA, 75 bp, synthetic construct
  source 1..75: mol_type = other DNA
tatgactcagcaacaggcaaataccttcttattcctcatggaactcgtgtgataggtacatattcaagtgatatt

SEQ ID NO: 580650 - DNA, 75 bp, synthetic construct
  source 1..75: mol_type = other DNA
gacacaaaggccatgatgattgcggcttatcccgccgaacagcgtgaagccgtctccgccgcgctggagctggaa

SEQ ID NO: 580651 - DNA, 75 bp, synthetic construct
  source 1..75: mol_type = other DNA
tacccgttcccgatgtggttgaggaactggactatgaaaccatccttgcggaacgcaaagcgacgctgatatcgc

SEQ ID NO: 580652 - DNA, 75 bp, synthetic construct
  source 1..75: mol_type = other DNA
ctgccgccattgttgaataccagataaacgccacgctgtatctttaccctggtccagaaagcgaacccatccgcg

SEQ ID NO: 580653 - DNA, 75 bp, synthetic construct
  source 1..75: mol_type = other DNA
tctgaacccgtcaccaaattgctgcaggagaacgcttaccgtgagttgcttctgcgccagcgcattaacgaagcc

SEQ ID NO: 580654 - DNA, 75 bp, synthetic construct
  source 1..75: mol_type = other DNA
tcggaaccccttaacgttatcgctcaaaccatgtcgtttcgtgaaatgctgttacgccagcgggtcaatgagggt

SEQ ID NO: 580655 - DNA, 75 bp, synthetic construct
  source 1..75: mol_type = other DNA
tcgctgcgcctgatgtggtggatgagctggattatgaaaccattctggcagagcgaaaggcgacgcttgtctcac

SEQ ID NO: 580656 - DNA, 75 bp, synthetic construct
  source 1..75: mol_type = other DNA
aaaaagggcagggcgaccgctggttactggatgagaaagttacagcccctcacagcccgtatgaacttcgtgctg

SEQ ID NO: 580657 - DNA, 75 bp, synthetic construct
  source 1..75: mol_type = other DNA
ttatgaatgcgagtggagcggcaccaggagaatatactgttgacgttattatgaatggtaaaattgttgacagtc

SEQ ID NO: 580658 - DNA, 75 bp, synthetic construct
  source 1..75: mol_type = other DNA
tcaggtatttatacggactcgcgtggatatgccgttgtcccatatttaaatccctataaccgaaatcaaatttcg

SEQ ID NO: 580659 - DNA, 75 bp, synthetic construct
  source 1..75: mol_type = other DNA
cttgatgttaatagtgttaaggataatgttgagctgctaaatacagatgttactgtcggtgatgctgccaactta

SEQ ID NO: 580660 - DNA, 75 bp, synthetic construct
  source 1..75: mol_type = other DNA
agagacttgaaaattgtttatcagacacggagaaattacatttggtcgttctgtcaaaattagaaagtatcatta

SEQ ID NO: 580661 - DNA, 75 bp, synthetic construct
  source 1..75: mol_type = other DNA
tgaggagccttctcaaaagtgtaaagtaaattacaaattgcaaaataaaacagaaaaattcaatgaattgacttt

SEQ ID NO: 580662 - DNA, 75 bp, synthetic construct
  source 1..75: mol_type = other DNA
tcgctcaagttctactttgaataatagtgtgtctgagcctcagtttgttcagtcttcagcagcaatcggattacc

SEQ ID NO: 580663 - DNA, 75 bp, synthetic construct
  source 1..75: mol_type = other DNA
gacatcaaccagttcggtaagaaagggcagggtgacaggtggttactggatgaacaaatttcagcaccacatagc

SEQ ID NO: 580664 - DNA, 75 bp, synthetic construct
  source 1..75: mol_type = other DNA
cacaccgcagctggcgaacgtcaaagcggtggatgatatctacccgatgtatggcgatctgcaaactaatccccc

SEQ ID NO: 580665 - DNA, 75 bp, synthetic construct
  source 1..75: mol_type = other DNA
ttcaaccatgaatgggggcgatggtagcggtatgggtagtgccggtggtggcgatggaggtatgcaactggccgc

SEQ ID NO: 580666 - DNA, 75 bp, synthetic construct
  source 1..75: mol_type = other DNA
ttgaaaggttcattaaaaaaatccttattattgttaaggatcaccatcatatgtccggtattcagttgcgctgcc

SEQ ID NO: 580667 - DNA, 75 bp, synthetic construct
  source 1..75: mol_type = other DNA
agtttattaaaaaaagtccggcattgccctgagccagagaaagttcattactgggaactcaaccatacaaagaac

SEQ ID NO: 580668 - DNA, 75 bp, synthetic construct
  source 1..75: mol_type = other DNA
aaaaagtttcggcaccacacagccagtatgaacttcgtgcgggctgggtcattcctggcgtcatgattagcggta

SEQ ID NO: 580669 - DNA, 75 bp, synthetic construct
  source 1..75: mol_type = other DNA
cagaaattaaagcaaaagcgctcgcaaatcctgaagtaaggaaggcttatgaagaagaaactcaggaagaagagc

SEQ ID NO: 580670 - DNA, 75 bp, synthetic construct
  source 1..75: mol_type = other DNA
gactgattgaacggggcagcagcctacgccagttcgcgcttaacgctggctatgagccacggactgttacccagg

SEQ ID NO: 580671 - DNA, 75 bp, synthetic construct
  source 1..75: mol_type = other DNA
acgcttgaagcactggctggcgctttttccgccacgactgaagatgctcatgaaggcagtcaggcatttactgag

SEQ ID NO: 580672 - DNA, 75 bp, synthetic construct
  source 1..75: mol_type = other DNA
cccgccaggtggcggagatcagcaccatcggtgccagcggcggttcgccgaacagcgccggtaacggcgtacagg

SEQ ID NO: 580673 - DNA, 75 bp, synthetic construct
  source 1..75: mol_type = other DNA
cgaccagggcaactacaacgtcaccctgcaaaacggtcagccgctggtgagcgggcagcaaagctcgaccatcgc

SEQ ID NO: 580674 - DNA, 75 bp, synthetic construct
  source 1..75: mol_type = other DNA
aactattattttattaatccagactatatgtttaatggtgatcgtttaactttcatgaaaacttattacttgaag

SEQ ID NO: 580675 - DNA, 75 bp, synthetic construct
  source 1..75: mol_type = other DNA
tgcgcaatcaaccgcgccacaggaagacagtcgtctgaaagaggcttacagcgcctgtatcaacaccgcgcaagg

SEQ ID NO: 580676 - DNA, 75 bp, synthetic construct
  source 1..75: mol_type = other DNA
aaattgcagaatatgtacagccatccatcagcccggaaaaagccagagaactcaaaaccgccgggatcaacgcct

SEQ ID NO: 580677 - DNA, 75 bp, synthetic construct
  source 1..75: mol_type = other DNA
taaagaaagattagagcaactggtagccagagatctacgtcagcttgaactggccctgacagcttcgccacccca

SEQ ID NO: 580678 - DNA, 75 bp, synthetic construct
  source 1..75: mol_type = other DNA
ttgttaaaaaatctggctgggaagttgtttcatcagagctacctcttatttgtgctgatttaatcgaagaggcaa

SEQ ID NO: 580679 - DNA, 75 bp, synthetic construct
  source 1..75: mol_type = other DNA
agtatgacgtttgatatgcaggatgcggtcgaattcagcgagaaatttcataaaattcagtcgcctgacggctga

SEQ ID NO: 580680 - DNA, 75 bp, synthetic construct
  source 1..75: mol_type = other DNA
cacctttgaacataacggcaggaaatgggactacgggaagtcaacgcaggcccgccttgagccttccgttgctgc

SEQ ID NO: 580681 - DNA, 75 bp, synthetic construct
  source 1..75: mol_type = other DNA
gcagttcgccgatgcggtcaacaaccagctggcgcagggctacgatctcaacggtaaccccggcgagccgctgtt

SEQ ID NO: 580682 - DNA, 75 bp, synthetic construct
  source 1..75: mol_type = other DNA
gccggcgttacctgctgaactggcttgacactgcccgtcagatgcgcgagttcagaggaatggctgaagagttca

SEQ ID NO: 580683 - DNA, 75 bp, synthetic construct
  source 1..75: mol_type = other DNA
cgtcaccgctgcagcggcgcgtgctgattgtgctggcaggtcttgagcacaatgacattacctgtgtccgtaccc

SEQ ID NO: 580684 - DNA, 75 bp, synthetic construct
  source 1..75: mol_type = other DNA
gatacggaggccgcactggctgacctgctggcccgcgcgggtttcgccggcgaccaggtgcatgagctgcagtgg

SEQ ID NO: 580685 - DNA, 75 bp, synthetic construct
  source 1..75: mol_type = other DNA
ttagtcgaattaacggcaaccggcgataaattcttttgtgcgggcggcgatattaaatcgtggtcggcctattcg

SEQ ID NO: 580686 - DNA, 75 bp, synthetic construct
  source 1..75: mol_type = other DNA
tctatcgtccttggcgataatgatactggttttaaacagaatggtgatggcattcttgatgtttacgctaatagt

SEQ ID NO: 580687 - DNA, 75 bp, synthetic construct
  source 1..75: mol_type = other DNA
aaacatgctgtcacgcattcttcatgtggggtattcaggtttaccgaaagccgaatggggcatagatcacagcaa

SEQ ID NO: 580688 - DNA, 75 bp, synthetic construct
  source 1..75: mol_type = other DNA
cgcaaaccggtaacgaccaggcagtgaaagccgattgcgataaagtctggcaggaaattcgcagtaataacgcta

SEQ ID NO: 580689 - DNA, 75 bp, synthetic construct
  source 1..75: mol_type = other DNA
cgcaaaccggtaacgaccaggcagtgaaagccgattgtgataaggtctggcaggaaatacgcagtaataacaaat

SEQ ID NO: 580690 - DNA, 75 bp, synthetic construct
  source 1..75: mol_type = other DNA
gctggaaaccaacgccgacggcacgccgaccatgtcgctgactttcgctggcaccacctcgacgatgaccaccga

SEQ ID NO: 580691 - DNA, 75 bp, synthetic construct
  source 1..75: mol_type = other DNA
aaactttatgttgatggcgtatcggctattgaaggtttgtcttcctccggtaaaaaagtgttcaagatactttat

SEQ ID NO: 580692 - DNA, 75 bp, synthetic construct
  source 1..75: mol_type = other DNA
ttcgccggaaaaaattgaagcctgtcagagtgtgttaaacgtactgaagaaagagaaacaacatcaacagtttgc

SEQ ID NO: 580693 - DNA, 75 bp, synthetic construct
  source 1..75: mol_type = other DNA
atgaaaaaattaattctcatcgccataatggcatcggggctggtggcctgcgcgcagtcgacagcaccaaaggaa

SEQ ID NO: 580694 - DNA, 75 bp, synthetic construct
  source 1..75: mol_type = other DNA
aaagcagcaaagcgcaaacgtgccaatcgccttgcaaaactgccgtatgatgaacagcgaaacgaaattgcacgg

SEQ ID NO: 580695 - DNA, 75 bp, synthetic construct
  source 1..75: mol_type = other DNA
ttgaccgtctggttacgctggaagtgttgtcagaaccgggtgccagcgccattgatcgtattctgaaactgattg

SEQ ID NO: 580696 - DNA, 75 bp, synthetic construct
  source 1..75: mol_type = other DNA
tgctcgccaggcattacggctgatcaagtccggcagttattttgccattgaaacgttaatgagcgtagccgccat

SEQ ID NO: 580697 - DNA, 75 bp, synthetic construct
  source 1..75: mol_type = other DNA
tgaaaacgtctccggcacccgctatagctggaaagtcagcggcatggactgcgccgcctgtgcgcgcaaagtaga

SEQ ID NO: 580698 - DNA, 75 bp, synthetic construct
  source 1..75: mol_type = other DNA
cataaacaagtatttggagacatgggagcaaattttttatcagttactacgtatggagcagaactgttagttttt

SEQ ID NO: 580699 - DNA, 75 bp, synthetic construct
  source 1..75: mol_type = other DNA
cagattacccttgaagaatttttcaaaactttcaaaaggttctctatcacaatttctcgtaaaggtgaatttgag

SEQ ID NO: 580700 - DNA, 75 bp, synthetic construct
  source 1..75: mol_type = other DNA
ctgcacagtatgacgattgggaaggaagtgttgcagcagatgagcttgagaagaaaaatttcagcgacttcttaa

SEQ ID NO: 580701 - DNA, 75 bp, synthetic construct
  source 1..75: mol_type = other DNA
ctctcaccgtttgccagttttgatgaaagcgccctgaccggcgaatccattccggtggagcgcgcaacgggcgat

SEQ ID NO: 580702 - DNA, 75 bp, synthetic construct
  source 1..75: mol_type = other DNA
agctggaaagtcaacggtatggactgtgctgcctgtgcgcgcaaagtagaaaatgccgtgcgccagctttctggc

SEQ ID NO: 580703 - DNA, 75 bp, synthetic construct
  source 1..75: mol_type = other DNA
aaaaagcccctcaatttgccacgttcaaaccgctagccacggcacagaacgccaatgaatgttgctgcgacggcg

SEQ ID NO: 580704 - DNA, 75 bp, synthetic construct
  source 1..75: mol_type = other DNA
gattctgaaactgatcgaagaagccgaagagcgccgcgcccccattgagcggtttatcgaccgtttcagccgtat

SEQ ID NO: 580705 - DNA, 75 bp, synthetic construct
  source 1..75: mol_type = other DNA
cattaacccataaccacctgcgcggtctggtgcaaatggttgaactggcgcgcgccactcacgctaatatccgtc

SEQ ID NO: 580706 - DNA, 75 bp, synthetic construct
  source 1..75: mol_type = other DNA
taacccataaccacctgcgcggcctggtgcaaatgattgaactggcacgcgccactcacgccaatatccgccaga

SEQ ID NO: 580707 - DNA, 75 bp, synthetic construct
  source 1..75: mol_type = other DNA
taaaaaatgactctcttgtaagagaggtgacgtttaaagacggtctgaatctaattgtaaataaaagaacatcag

SEQ ID NO: 580708 - DNA, 75 bp, synthetic construct
  source 1..75: mol_type = other DNA
cggaacaactcgtcgcggctggctggtttaacgccgatgaaatgcagtggcgtgaaggtgaaggattatttatcc

SEQ ID NO: 580709 - DNA, 75 bp, synthetic construct
  source 1..75: mol_type = other DNA
acagcttgacgcccgccagccggttgcggctctgaccactcttcagaccgacaccgtgaccgtgccggataaaaa

SEQ ID NO: 580710 - DNA, 75 bp, synthetic construct
  source 1..75: mol_type = other DNA
caacacggcagcaccacgctggagcagttgctggataaggccgagtccgaaggacgcattttcaaaagcgaacgc

SEQ ID NO: 580711 - DNA, 75 bp, synthetic construct
  source 1..75: mol_type = other DNA
agtcacagtatcgcgcctttcccgtctgctggcagagcaggtttcctttggcacgttgggaacgtcagaaaagac

SEQ ID NO: 580712 - DNA, 75 bp, synthetic construct
  source 1..75: mol_type = other DNA
ctgtcggctgaagatatcgcggccgccaaactgctgggtaaaaccgaagccgagttcctgaaaatgaaagaggaa

SEQ ID NO: 580713 - DNA, 75 bp, synthetic construct
  source 1..75: mol_type = other DNA
ttcagaccgacaccgtaaccgtgccggataaaaagaccgccaccgctgtgctgtcggctgaagatatcgccgccg

SEQ ID NO: 580714 - DNA, 75 bp, synthetic construct
  source 1..75: mol_type = other DNA
ggcgcgctatttgtcgccgtcggcgttgacaccaccctgctcgcccgcgccgccgaagcgctggcagcacggttt

SEQ ID NO: 580715 - DNA, 75 bp, synthetic construct
  source 1..75: mol_type = other DNA
tattaagtgataagttttcagaagatgcggacatgaaaatgatgatgagtaactcgatccttgagttatcttcga

SEQ ID NO: 580716 - DNA, 75 bp, synthetic construct
  source 1..75: mol_type = other DNA
aagaagaaaggtgaaataactgcatttgatttggcttatattaagtttgtggataagattaaattaaagagacct

SEQ ID NO: 580717 - DNA, 75 bp, synthetic construct
  source 1..75: mol_type = other DNA
gcaagctgcttgcgcgtcttggggtgactgtccccgaaaatgcagacatcaccgatgaacaggcaacagcggcac

SEQ ID NO: 580718 - DNA, 75 bp, synthetic construct
  source 1..75: mol_type = other DNA
ctatcgctgcgttatctgccatgcagaccaccacagcgaaaatcccgtcgcaggaaaaaacggcggtggcggtgc

SEQ ID NO: 580719 - DNA, 75 bp, synthetic construct
  source 1..75: mol_type = other DNA
cggcgattacgcaggcgctaatgaacctgagttcggtccagatgtaacacaaacgctttcaggcgtggaggttac

SEQ ID NO: 580720 - DNA, 75 bp, synthetic construct
  source 1..75: mol_type = other DNA
ttgcatcaacaagtgttgaaagcggcacccattgtcgctcagccaacgccaatggatgcggtgtttaaattcgac

SEQ ID NO: 580721 - DNA, 75 bp, synthetic construct
  source 1..75: mol_type = other DNA
ttgcccactctgcactgaccggacgcgatattaatgtcgagaccattatgcgcgttgccttcggagatagtcagc

SEQ ID NO: 580722 - DNA, 75 bp, synthetic construct
  source 1..75: mol_type = other DNA
gtttcttgatgaaagcattgaaaaaatttcaagtttatactttaacttgatgattgctaaaatttataaaaatgg

SEQ ID NO: 580723 - DNA, 75 bp, synthetic construct
  source 1..75: mol_type = other DNA
tgccagttaatagatatcttgtgataatagtttttgtccttttaatcttagcctgtatgcagtttatttatcttt

SEQ ID NO: 580724 - DNA, 75 bp, synthetic construct
  source 1..75: mol_type = other DNA
gaagccgtagcgctacaacttgcgggtcctattgctatggtaatgctggcagtcactggtgggctggcagtaatg

SEQ ID NO: 580725 - DNA, 75 bp, synthetic construct
  source 1..75: mol_type = other DNA
atggcgatcggcgcaatctccgcgctcctgggcgtgctgtatgcactggcggaacaggatatcaaacggctgctg

SEQ ID NO: 580726 - DNA, 75 bp, synthetic construct
  source 1..75: mol_type = other DNA
cccatgcgtttaccaatacccctcccgtcactgtcgccagcggaatagcacttgtacccggcacgtttcatacac

SEQ ID NO: 580727 - DNA, 75 bp, synthetic construct
  source 1..75: mol_type = other DNA
ctcatcgccagtaatcatctccctgttgatgaactacataatacatcacaatttattatagataatatccttcaa

SEQ ID NO: 580728 - DNA, 75 bp, synthetic construct
  source 1..75: mol_type = other DNA
acctatccgatggctgcgacaaatttttgtaatgatcacatatctcaaaattcattcttgagcagattcaagcca

SEQ ID NO: 580729 - DNA, 75 bp, synthetic construct
  source 1..75: mol_type = other DNA
actacttcattgaatacactggatccattaatacttaatcaggaattagtgcaaatcatttcaaataaaaaaatc

SEQ ID NO: 580730 - DNA, 75 bp, synthetic construct
  source 1..75: mol_type = other DNA
gtattgttcagcgggccatgctgatggcgatggagcgatatgggagagtgattttcatacgctctcatatggctt

SEQ ID NO: 580731 - DNA, 75 bp, synthetic construct
  source 1..75: mol_type = other DNA
atgttattgccttctagcggaatgccatatgtctttggcacttcatggaaaaagtgaacttgaacttgctgctca

SEQ ID NO: 580732 - DNA, 75 bp, synthetic construct
  source 1..75: mol_type = other DNA
atatttgatagattacaaaataaaagtgatatacagacgctaaaaacagaatgttattgccttctagcggaatgc

SEQ ID NO: 580733 - DNA, 75 bp, synthetic construct
  source 1..75: mol_type = other DNA
ggcagtaatgtgcttcgtaaaaatgtacggtattactttctgtggtgcgccgcgcagtacacacgctgaagaggc

SEQ ID NO: 580734 - DNA, 75 bp, synthetic construct
  source 1..75: mol_type = other DNA
cagactgagcaaacttatcagcagccagccgctcaggaaccgttgtaccaacagccgcaacctgttgaacagcag

SEQ ID NO: 580735 - DNA, 75 bp, synthetic construct
  source 1..75: mol_type = other DNA
tcagcagccgcaacaaccggttgcgccgccgcagcagtatcagcagccacaacagccagttgcgccacaaccgca

SEQ ID NO: 580736 - DNA, 75 bp, synthetic construct
  source 1..75: mol_type = other DNA
caggaagtccatgccgtggtgcaggactggaaagcgcgtggtcgcccacagtatgttgatggcatcacttccgac

SEQ ID NO: 580737 - DNA, 75 bp, synthetic construct
  source 1..75: mol_type = other DNA
tggcctgtccggtgaatatgcagagaaatcccttgaagaatgggcggaacggcttcgcaaaggaggcaaccagtg

SEQ ID NO: 580738 - DNA, 75 bp, synthetic construct
  source 1..75: mol_type = other DNA
agggataccgttgatggcctcgttttggactggtttaagacggcaaaaagtcgggtgattaatccagacggtacc

SEQ ID NO: 580739 - DNA, 75 bp, synthetic construct
  source 1..75: mol_type = other DNA
ggaaaaaatattgttgctgccgctatgcgtatccgttacgcccaggggtggcagtggaccgttgaagtggatggt

SEQ ID NO: 580740 - DNA, 75 bp, synthetic construct
  source 1..75: mol_type = other DNA
aaacggctgctggcctggagtaccgtcgaaaacgtcggcattattttgctggcggtcggtgtggcgatggtcggt

SEQ ID NO: 580741 - DNA, 75 bp, synthetic construct
  source 1..75: mol_type = other DNA
ccaacggctggccaaagaaatacagcatctgcaaagcggcgactttcgtctctattgcctgtatgtggtcgccgc

SEQ ID NO: 580742 - DNA, 75 bp, synthetic construct
  source 1..75: mol_type = other DNA
gatgcctttgctgcctggcctttactggctgtggtgtcgttcgcgccgcgcagcgtttcgtcgcacaggagatgc

SEQ ID NO: 580743 - DNA, 75 bp, synthetic construct
  source 1..75: mol_type = other DNA
tctgattaaagcgaatattccgacccgtatcgcctttaccgtatccagtaagattgactcacgtaccattcttga

SEQ ID NO: 580744 - DNA, 75 bp, synthetic construct
  source 1..75: mol_type = other DNA
gtggtggggcattctggtgatggcgatcggcgcaatctccgcgctcctggcgtgctgtatgcgctggcggaacag

SEQ ID NO: 580745 - DNA, 75 bp, synthetic construct
  source 1..75: mol_type = other DNA
agaaatacagcatctgcaaagcggcgactttcgtctctattgcctgtatgtggttgccgcactggttgtgctgct

SEQ ID NO: 580746 - DNA, 75 bp, synthetic construct
  source 1..75: mol_type = other DNA
agcgggtactgatatgaccgcggtacagagtacccgtgatattggtgaattagccagttcgatgatgcttgttgg

SEQ ID NO: 580747 - DNA, 75 bp, synthetic construct
  source 1..75: mol_type = other DNA
tcccttcgccggttcacaccagcagtcttcactggcattacaaaatttgcaacgtcaactgggattaatagccgg

SEQ ID NO: 580748 - DNA, 75 bp, synthetic construct
  source 1..75: mol_type = other DNA
tgcctttgcggcaatggggagagttaatctggctaattatacagtaatgcttggtgggatcgtgcaagttttact

SEQ ID NO: 580749 - DNA, 75 bp, synthetic construct
  source 1..75: mol_type = other DNA
cccgccaaccttcatatcataggcaccatgaataccgccgatcgatccatcgcattgctcgacacagcattaagg

SEQ ID NO: 580750 - DNA, 75 bp, synthetic construct
  source 1..75: mol_type = other DNA
aatgagtggggcaacctgctgaatgaagagaacccgcatcagctgcagcagcttatccgcctgccggggcagcag

SEQ ID NO: 580751 - DNA, 75 bp, synthetic construct
  source 1..75: mol_type = other DNA
ggtaataatatgcaatgtaaaaataatcctggttgtacacacttacaaaatagaggtccaatacctcaaggggta

SEQ ID NO: 580752 - DNA, 75 bp, synthetic construct
  source 1..75: mol_type = other DNA
gggaaaaatattgttgctgccgctatgcgtattcgttacgcccagggatggcagtggacggttgaagtggacggt

SEQ ID NO: 580753 - DNA, 75 bp, synthetic construct
  source 1..75: mol_type = other DNA
attatcaccacctacagcaaagtgaaatcccctacccgcgtggtccaaatcctttccatcatcggtttgctggca

SEQ ID NO: 580754 - DNA, 75 bp, synthetic construct
  source 1..75: mol_type = other DNA
gaggattgcctttagtaaacctgtctgtttgatcagagcaaaaggtactgcacctatatttgatatagaccacat

SEQ ID NO: 580755 - DNA, 75 bp, synthetic construct
  source 1..75: mol_type = other DNA
tttgtctgggcgctatttggcgttacttgcgacatgatgaactggccggtcttgctcaagtcggtgagtcgattg

SEQ ID NO: 580756 - DNA, 75 bp, synthetic construct
  source 1..75: mol_type = other DNA
tgagtcatttcagtgatgcctccctgcgtcaggtagagggggggtatggcgcacagactgtggcaggcagcgggg

SEQ ID NO: 580757 - DNA, 75 bp, synthetic construct
  source 1..75: mol_type = other DNA
cccacccgtgtcaattgtgcaattgccgtttgagcaatggctggaacagcagcgcgaaaaaatcgaggttgattg

SEQ ID NO: 580758 - DNA, 75 bp, synthetic construct
  source 1..75: mol_type = other DNA
atcccggtgacgagataaaacaaatcgttgaatatagcggcctgtttcttggtgataacgctgtaagaaccctga

SEQ ID NO: 580759 - DNA, 75 bp, synthetic construct
  source 1..75: mol_type = other DNA
tataactggttcatctaatgacatgcaaaaattaaatgagttaatattttcagagccagatagcacattaacagt

SEQ ID NO: 580760 - DNA, 75 bp, synthetic construct
  source 1..75: mol_type = other DNA
cagtcagactacagcttccccgtgcgttgttggcggcgaaaaatgtatcgtcagcggtggtagaacagacagccg

SEQ ID NO: 580761 - DNA, 75 bp, synthetic construct
  source 1..75: mol_type = other DNA
cgatgcgatggaagggcagacgggaattatcaaaattcgtacctggaatcagcgcgttacccgtagcggcgggca

SEQ ID NO: 580762 - DNA, 75 bp, synthetic construct
  source 1..75: mol_type = other DNA
gcaggcgattattcatcaactggtcggggtaatgtctgcgttgccgacccacagcgatacgccattggttaatac

SEQ ID NO: 580763 - DNA, 75 bp, synthetic construct
  source 1..75: mol_type = other DNA
caatccgttaatggtgtttctattacctttattgtactgtgtattacattcggttcgttatctgcggggatcaca

SEQ ID NO: 580764 - DNA, 75 bp, synthetic construct
  source 1..75: mol_type = other DNA
atcaggaacggggcgcacgcggttcaagtgcttttcaggctgcgctggatgccgagtttaacgtcaggcgcgagg

SEQ ID NO: 580765 - DNA, 75 bp, synthetic construct
  source 1..75: mol_type = other DNA
tgaagcgcagtctccggcgtggcccgcgtggattgacatcagccaactggaaaatgccatcatcaacctggtgat

SEQ ID NO: 580766 - DNA, 75 bp, synthetic construct
  source 1..75: mol_type = other DNA
cacggcgtcagaataacagttggggcagttcacgaatcagtaaccttcaggcgatagtggtgaagaaaaacagcg

SEQ ID NO: 580767 - DNA, 75 bp, synthetic construct
  source 1..75: mol_type = other DNA
gcggatatcagcggagctgtgacagcgaattctggcacgctcaataatgtcaccattaacgagaactgtgtcatc

SEQ ID NO: 580768 - DNA, 75 bp, synthetic construct
  source 1..75: mol_type = other DNA
tatcagcggacatatcagtgcgaactcgggcacgctgaataatgtcgtgatagcggagaactgcacgataaatgg

SEQ ID NO: 580769 - DNA, 75 bp, synthetic construct
  source 1..75: mol_type = other DNA
gcttttgaatttgctggtggtggcggtgacgttgatggtcagcggcgtggcggtaatgggctttcgtcatgccag

SEQ ID NO: 580770 - DNA, 75 bp, synthetic construct
  source 1..75: mol_type = other DNA
cctcttgtcgtcacctcacaatcccccatcaaagatgaatgcaatctggtattgcgcgacaaccagcaggcggca

SEQ ID NO: 580771 - DNA, 75 bp, synthetic construct
  source 1..75: mol_type = other DNA
tgccaaaagcgcaggagtctcagtctctactgtgtcgctggtcctgcgccagaaaggcaaaatttccgaggcaac

SEQ ID NO: 580772 - DNA, 75 bp, synthetic construct
  source 1..75: mol_type = other DNA
cgtgtatataataacggttcatggactacatggattgaaaattataatactaatagtgttattggtttttcaaat

SEQ ID NO: 580773 - DNA, 75 bp, synthetic construct
  source 1..75: mol_type = other DNA
cactcagtctgctgtcattttcttcgctggccgggtcttcacctgttagcgtcagcgtcagcccgggaagctaca

SEQ ID NO: 580774 - DNA, 75 bp, synthetic construct
  source 1..75: mol_type = other DNA
tacggaggacggttgtggcgcacgtctgcactctggccacactggagcgtattctgagcctgctgtcggcctttg

SEQ ID NO: 580775 - DNA, 75 bp, synthetic construct
  source 1..75: mol_type = other DNA
aggcccgtaataatctcgaagtttatgcaaaatctcaaactttaaacaaagatgaagcagcaatagccgcaggtt

SEQ ID NO: 580776 - DNA, 75 bp, synthetic construct
  source 1..75: mol_type = other DNA
aatggttcccgtagttggacgcgtgtatataataacggttcatggactgcatgggtagaaaactataatacaaat

SEQ ID NO: 580777 - DNA, 75 bp, synthetic construct
  source 1..75: mol_type = other DNA
tggcgagcaatttcaaattacgatccactacgtagatcaggaaggggaagtagatattctcattgttaatggtaa

SEQ ID NO: 580778 - DNA, 75 bp, synthetic construct
  source 1..75: mol_type = other DNA
ttcagtcttgggaaacgactcagaaaaaaaacgtctctgtgacaaacgataaggtaaagttaaatacaagatatg

SEQ ID NO: 580779 - DNA, 75 bp, synthetic construct
  source 1..75: mol_type = other DNA
ggtaagcagcagccgaaaaaatacaactacaaaggtcagccagcggttggcccggaaaccaaagaaatcagtcct

SEQ ID NO: 580780 - DNA, 75 bp, synthetic construct
  source 1..75: mol_type = other DNA
gctacggcatttataaccagaatcttcaggcggtgccgccaaccggttctatctcttatatcaaccatgctacgt

SEQ ID NO: 580781 - DNA, 75 bp, synthetic construct
  source 1..75: mol_type = other DNA
ctttggtggtgatgcgccagatgctgatcttctggttgctgtcgttactgctgcaattcacatcaccccaaaccc

SEQ ID NO: 580782 - DNA, 75 bp, synthetic construct
  source 1..75: mol_type = other DNA
ggatctaattatgccgatgtcaaagactttaagcgacggtttaatgatgggcttgaaaaggtacagcaggcatgg

SEQ ID NO: 580783 - DNA, 75 bp, synthetic construct
  source 1..75: mol_type = other DNA
ggccttagatatatattgctgggcgacgtatcgtgtgagttatttaaagcgagtcacaataatcccttggctagg

SEQ ID NO: 580784 - DNA, 75 bp, synthetic construct
  source 1..75: mol_type = other DNA
taagatagaattaatggaaaaaattaaaaacataatcccagggcttattgaaataacttccagtgcattaagaga

SEQ ID NO: 580785 - DNA, 75 bp, synthetic construct
  source 1..75: mol_type = other DNA
agtatgaacgacctttaaaggcttttatttcttcaaaaataaaagaaagtggcttatctgagaagaatttcaaaa

SEQ ID NO: 580786 - DNA, 75 bp, synthetic construct
  source 1..75: mol_type = other DNA
tgtcgttgggaatttattactggggcgcatacacctgtcttcctcgggcgaactttaacggggatgaagaagaat

SEQ ID NO: 580787 - DNA, 75 bp, synthetic construct
  source 1..75: mol_type = other DNA
tcattacgcatcttatgcgacgttcttgaacagttcggcctcagtaaagatcccgatcttaatcgatggattgaa

SEQ ID NO: 580788 - DNA, 75 bp, synthetic construct
  source 1..75: mol_type = other DNA
tcaaagtattcaatattagctaatttccctgaaataaaaagtgaacaaattattgttattgactcaccatatgaa

SEQ ID NO: 580789 - DNA, 75 bp, synthetic construct
  source 1..75: mol_type = other DNA
ttccgtttactggaactggatcaggaccatccggtaatacgaaaattcgttaacgaaacgtaccacattgaaaat

SEQ ID NO: 580790 - DNA, 75 bp, synthetic construct
  source 1..75: mol_type = other DNA
tggtgatgcttatcagcttctatccaatctattccatcgacgcgtcgccccgctggattatcgcgagcctgccgc

SEQ ID NO: 580791 - DNA, 75 bp, synthetic construct
  source 1..75: mol_type = other DNA
tgtcagcattgatgagcagtattatccagcatgaaaatggaagaaatatctattctcgagagctgattaataagg

SEQ ID NO: 580792 - DNA, 75 bp, synthetic construct
  source 1..75: mol_type = other DNA
ggcaggggttatgggataaggctgttgactggtggaatggtgatgccacgcagtacggacaatcagtgaaacgac

SEQ ID NO: 580793 - DNA, 75 bp, synthetic construct
  source 1..75: mol_type = other DNA
gcgtcttagcagcatgccgtactaccgtgcaaaccagtacgcacagatgctgggtattgatgaaaataccctgat

SEQ ID NO: 580794 - DNA, 75 bp, synthetic construct
  source 1..75: mol_type = other DNA
agaaggcaaagaccaatgtcggaatgcgctacaacatggagttggctgatagtgccaatgaatggttacccgctg

SEQ ID NO: 580795 - DNA, 75 bp, synthetic construct
  source 1..75: mol_type = other DNA
cgatggtttttacagaaagagcgggaggtatttcacgccgtagggttatttttcagttcaataatccgatagcgg

SEQ ID NO: 580796 - DNA, 75 bp, synthetic construct
  source 1..75: mol_type = other DNA
aagatacaccactgtcttacgctcagttgttttgataacaaataataaaccgatggtttttacagaaagagcggg

SEQ ID NO: 580797 - DNA, 75 bp, synthetic construct
  source 1..75: mol_type = other DNA
atatccgcagcgtgccgtccatcgaagccggaaatgccgcctcgcacgccatcggactggggcagatgaatttac

SEQ ID NO: 580798 - DNA, 75 bp, synthetic construct
  source 1..75: mol_type = other DNA
aaattgtaatctctggtagagtaccgattagcgctaaaagcaagctattatataatgaaactccatttttaaatt

SEQ ID NO: 580799 - DNA, 75 bp, synthetic construct
  source 1..75: mol_type = other DNA
tcttgacaagtaaatctgtgatagcccttcttaattttctttttctcgctttagtaatagtgatgggagctctgc

SEQ ID NO: 580800 - DNA, 75 bp, synthetic construct
  source 1..75: mol_type = other DNA
ccatcgcatatggcatcttcaaagccggctgcttcatcctattagtggtcaaggggtatcagggctggacattgt

SEQ ID NO: 580801 - DNA, 75 bp, synthetic construct
  source 1..75: mol_type = other DNA
catctcatctcattctgaattcagatgattttaaatctcaggatatagaggagggtatattaaaaatctcaggta

SEQ ID NO: 580802 - DNA, 75 bp, synthetic construct
  source 1..75: mol_type = other DNA
atgatgtgccacatccggcatggtatgccggatgtggcgtatgctgataagacgcgccagcgtcgcatcaggcaa

SEQ ID NO: 580803 - DNA, 75 bp, synthetic construct
  source 1..75: mol_type = other DNA
gaaagcaggcggtgctattaaaacaaccacgcgggccatggaggtattcggaacaaaccgtctcggtcagttcga

SEQ ID NO: 580804 - DNA, 75 bp, synthetic construct
  source 1..75: mol_type = other DNA
agctgaccatttcggcttcggtaacgaacagcgtaggcaataccggtaacggcacgcgtgaaatcaccatcgacg

SEQ ID NO: 580805 - DNA, 75 bp, synthetic construct
  source 1..75: mol_type = other DNA
cagcacggcggaagcggggcagacggtgaccgtcaccctcaatggtgcaaactatactggcaccgtacagacgga

SEQ ID NO: 580806 - DNA, 75 bp, synthetic construct
  source 1..75: mol_type = other DNA
tatcctatgctgcatatcaagttgggaaaactaaaggtgttaaatatttagggttaactgctagccgttttcccg

SEQ ID NO: 580807 - DNA, 75 bp, synthetic construct
  source 1..75: mol_type = other DNA
ttcttggtatcccagttatcgcaagcgttttccttgccattctcgcctcaatagtgaaaaagtatacacacttca

SEQ ID NO: 580808 - DNA, 75 bp, synthetic construct
  source 1..75: mol_type = other DNA
ttcggtaacaaacagcgtaggcaataccggcaacggcacgcgcgaaatcaccatcgacgcgaatctgccaggtct

SEQ ID NO: 580809 - DNA, 75 bp, synthetic construct
  source 1..75: mol_type = other DNA
tgtcagcagcgcgagcggcaacagcgcctcggcgacccatgcgtacagcgttgatgccagcgcgccgacgctcac

SEQ ID NO: 580810 - DNA, 75 bp, synthetic construct
  source 1..75: mol_type = other DNA
tgcggttgacgggatcagcgtaccggaagtgaacgatcagaacggcaacggcaagccggatgcacaggatgcgaa

SEQ ID NO: 580811 - DNA, 75 bp, synthetic construct
  source 1..75: mol_type = other DNA
aaaccttgggtaaagcccatcataagcaacactaacaacgtttttcggattcgctttcgcgatctactagcaaac

SEQ ID NO: 580812 - DNA, 75 bp, synthetic construct
  source 1..75: mol_type = other DNA
tgcagtaccatttatggttagattatctcgatgaggtaattgcgatagatacttccagtgagacggatattattt

SEQ ID NO: 580813 - DNA, 75 bp, synthetic construct
  source 1..75: mol_type = other DNA
gtttggcgaaacgttaattgccgatgatgccttgcgggcatcgttaaatggtcacctggaacaagccgcgcaccg

SEQ ID NO: 580814 - DNA, 75 bp, synthetic construct
  source 1..75: mol_type = other DNA
tcaactttaaaaatagttatgccagttcggtatcgataaggggcagtttggatatcgagaaccacggcagcctga

SEQ ID NO: 580815 - DNA, 75 bp, synthetic construct
  source 1..75: mol_type = other DNA
taccggtatgtgcctaatcctagtgggtatgttgatcctctgggattagcaacgtgtcctatactcagacagtgg

SEQ ID NO: 580816 - DNA, 75 bp, synthetic construct
  source 1..75: mol_type = other DNA
ggaatccggactgtgctataaccggttccggtattacgagccggaaaccgggatgtacctggtgagtgatcccct

SEQ ID NO: 580817 - DNA, 75 bp, synthetic construct
  source 1..75: mol_type = other DNA
gtgaaactgctgaacctggagcaggcgggcaaaccggttgcagacgcggcttccatgcagcgttacagcacggag

SEQ ID NO: 580818 - DNA, 75 bp, synthetic construct
  source 1..75: mol_type = other DNA
actggatgcggttgacgggatcagcgtaccggaagtaaacgatcagaacagcaacggcaagccggatgcagagga

SEQ ID NO: 580819 - DNA, 75 bp, synthetic construct
  source 1..75: mol_type = other DNA
ggcacaggcaggcgctgaaatcatccgcattcctggcccgatgaccacgcaaccgaccggcaaaaccggcgcaac

SEQ ID NO: 580820 - DNA, 75 bp, synthetic construct
  source 1..75: mol_type = other DNA
atgcaaaaggaagtttacaacgaattcattaaaatggttgataaaaaaacgatcgaggctcttgttgatacggca

SEQ ID NO: 580821 - DNA, 75 bp, synthetic construct
  source 1..75: mol_type = other DNA
tgatggaatatactattgatattcctcgaatcgtggttttgccagaacgtgaagtcaattacgggtttaatgatt

SEQ ID NO: 580822 - DNA, 75 bp, synthetic construct
  source 1..75: mol_type = other DNA
tcaccagtggttctacaagagattcccaagtccaatgtttggaaaatattacgctctcgtgaggcaacaaatatt

SEQ ID NO: 580823 - DNA, 75 bp, synthetic construct
  source 1..75: mol_type = other DNA
tgagggctggctgtatctggcggtggtcatcgacctgtggtcgcgtgcggttatcggctggtcaatgtcatcacg

SEQ ID NO: 580824 - DNA, 75 bp, synthetic construct
  source 1..75: mol_type = other DNA
caattccaagcacaaatatccatgcattcattggcagaaatggttgtgggaagacaaccattcttaatgaaatga

SEQ ID NO: 580825 - DNA, 75 bp, synthetic construct
  source 1..75: mol_type = other DNA
tgcctggcctgcgggtcgataccgtggcgggcgatgatgttattaacagcattgagcacaatcaggcgctggtga

SEQ ID NO: 580826 - DNA, 75 bp, synthetic construct
  source 1..75: mol_type = other DNA
ctcagcaatctgaccgccagccagtacacggtcagcgcctcggtaagcgataaagcgggtaacccggcgtccgct

SEQ ID NO: 580827 - DNA, 75 bp, synthetic construct
  source 1..75: mol_type = other DNA
cactattaacggcaacacggcttcggcgacccacgcctacagcgtcgatgccacggccccgacgcttgctattaa

SEQ ID NO: 580828 - DNA, 75 bp, synthetic construct
  source 1..75: mol_type = other DNA
ccaaccattgtgtcgtataccgatgatgtcgggcagcggcaggggacattaagcagttcgcaggccaccgacgac

SEQ ID NO: 580829 - DNA, 75 bp, synthetic construct
  source 1..75: mol_type = other DNA
acactgactgacggcacctggaactacacggtgcgggtggtggatctggcggggaacgttgggcagaccgcaacg

SEQ ID NO: 580830 - DNA, 75 bp, synthetic construct
  source 1..75: mol_type = other DNA
aacaccatcgcgggcgatgatgtgatcaacgcgacggaaaaaggatctgatctggcgctttctggcaccagcgac

SEQ ID NO: 580831 - DNA, 75 bp, synthetic construct
  source 1..75: mol_type = other DNA
agcttatggagattttattaaaacttttgatttatcaccaaaagaaacgattaaactattggatgtaagagataa

SEQ ID NO: 580832 - DNA, 75 bp, synthetic construct
  source 1..75: mol_type = other DNA
ggcacttttgcgacaactaacgtggtcacgctgacgggcgtgcacaccgacctcgccaccttgctggcgaatcat

SEQ ID NO: 580833 - DNA, 75 bp, synthetic construct
  source 1..75: mol_type = other DNA
gcggtggactggaaccatgacggcctgatggatatcgcccgtatcgcccagaccggacaatcgtatctttacacc

SEQ ID NO: 580834 - DNA, 75 bp, synthetic construct
  source 1..75: mol_type = other DNA
caccaatgacatcaccgatgacaccacgccaacctttagcggcagcgggcaggcgggggcgactattcagattaa

SEQ ID NO: 580835 - DNA, 75 bp, synthetic construct
  source 1..75: mol_type = other DNA
ctcagcggtagcgatcatcatgttgctgctgctaattatgccgataatgtggttccacaaacatcagcaaaaaag

SEQ ID NO: 580836 - DNA, 75 bp, synthetic construct
  source 1..75: mol_type = other DNA
agctggagcgtgagcgttccggcggcagatattcaggcgttgggtaatggcgatttaacggtgagcgcctcggtc

SEQ ID NO: 580837 - DNA, 75 bp, synthetic construct
  source 1..75: mol_type = other DNA
accagcgatatcggcaacagcgccactgccagccataacgtgctggtcgacagcgcgctgcccggcgtgaccatt

SEQ ID NO: 580838 - DNA, 75 bp, synthetic construct
  source 1..75: mol_type = other DNA
ttgccagcctgttctcagctcctggcgggaaaggaggagtgaagtcaggcgtgtccaataccgccggcggcgccg

SEQ ID NO: 580839 - DNA, 75 bp, synthetic construct
  source 1..75: mol_type = other DNA
atgatttatatcggtctgccgcaatggtcgcatccaaaatgggtgcggttggggatctccagcctggaagagtac

SEQ ID NO: 580840 - DNA, 75 bp, synthetic construct
  source 1..75: mol_type = other DNA
acagacccggcaggtaaccgcctgcccgacccggagctgcacccggacagcgccctcagcatgtggccggataac

SEQ ID NO: 580841 - DNA, 75 bp, synthetic construct
  source 1..75: mol_type = other DNA
caataccgcgctgcctggcgtcaccattaatccggtggcgagcgacgatattattaacgccgccgaatcgggcgt

SEQ ID NO: 580842 - DNA, 75 bp, synthetic construct
  source 1..75: mol_type = other DNA
agtaatcagcccgcaggcactacaattacggtgacgctgaacgggcaaaattacaccgcgacgaccgatgcttct

SEQ ID NO: 580843 - DNA, 75 bp, synthetic construct
  source 1..75: mol_type = other DNA
tttaaccctttccggcaccaccacaaatgtagaagccgggcaaacggtcaccgtcacctttggcgggaaaaatta

SEQ ID NO: 580844 - DNA, 75 bp, synthetic construct
  source 1..75: mol_type = other DNA
ctttcagcgagtggcacagaatatatcagggagccttgtccgtgtccctcagacactgcagcgtaaataccctga

SEQ ID NO: 580845 - DNA, 75 bp, synthetic construct
  source 1..75: mol_type = other DNA
agcaacgtattcctgccgcaggtattagtacggcttacctgcatgtggatcgttggaatgacttttcattcatta

SEQ ID NO: 580846 - DNA, 75 bp, synthetic construct
  source 1..75: mol_type = other DNA
ggcaactggagtctgggcgttccggcctcggtggtcagtgggctggcggacggcagttatcctgtcagcgtctcg

SEQ ID NO: 580847 - DNA, 75 bp, synthetic construct
  source 1..75: mol_type = other DNA
tattcctttcgctaccacttatgccgtcttcgccacccgtcgcgcctacgattttatccatcaggtgattgctga

SEQ ID NO: 580848 - DNA, 75 bp, synthetic construct
  source 1..75: mol_type = other DNA
atggagcgtcacgcgatacctctaccattgagacggatcagtctaattacatcgccggtaagccgattctcgtta

SEQ ID NO: 580849 - DNA, 75 bp, synthetic construct
  source 1..75: mol_type = other DNA
atccttgagtatcgcaagaaagagttgatacgcctgacgctgaccgatccgctgaaaggcaatccgggtgaagtc

SEQ ID NO: 580850 - DNA, 75 bp, synthetic construct
  source 1..75: mol_type = other DNA
ttatggactgttgttgatggtgatttaattgttgatgcttatctgttcgatgcttttaataatccactcaccaat

SEQ ID NO: 580851 - DNA, 75 bp, synthetic construct
  source 1..75: mol_type = other DNA
ttttgtgaagatagatagaatattagcaaataaaaaaatatccatggtgctcttgattgaaggaacaagagttct

SEQ ID NO: 580852 - DNA, 75 bp, synthetic construct
  source 1..75: mol_type = other DNA
atgcgttcgggaatgcacttgccgggcagacggtcagcgtgttggcggacaacggtgccacgactgctccgacgg

SEQ ID NO: 580853 - DNA, 75 bp, synthetic construct
  source 1..75: mol_type = other DNA
cctgcgcactcggatactgccgcgtcactgatcctgccgaacgttaaaactattccatataccctgggtgcgttg

SEQ ID NO: 580854 - DNA, 75 bp, synthetic construct
  source 1..75: mol_type = other DNA
aataggagggccagttaaactatcttttaacgatatagatatcaaaggatctttttctcgcattaaatatttaat

SEQ ID NO: 580855 - DNA, 75 bp, synthetic construct
  source 1..75: mol_type = other DNA
attaaaatagggccttctagcgatacagatgctttatttgccggtatgactataccttctgttatcttgtctgta

SEQ ID NO: 580856 - DNA, 75 bp, synthetic construct
  source 1..75: mol_type = other DNA
cggataagaggtataaataaagattttattggaatggatgttacttctgtatttcgcccagaaaaaatgaccaat

SEQ ID NO: 580857 - DNA, 75 bp, synthetic construct
  source 1..75: mol_type = other DNA
gacgtttgtggcggataaagacagagcggttgtcgttctacaaacatcgaaagcggaaatcattgggaatggcgt

SEQ ID NO: 580858 - DNA, 75 bp, synthetic construct
  source 1..75: mol_type = other DNA
tatgaaaacctggtcggggggcaacgagacgctatcaacctggctatccagctgccaaatacaaaagcggaaagc

SEQ ID NO: 580859 - DNA, 75 bp, synthetic construct
  source 1..75: mol_type = other DNA
cgatgtcaggacggcgaagatcgcgagtctggaggtgacgcaggataacgcggtcgcagacggttcgatggcgaa

SEQ ID NO: 580860 - DNA, 75 bp, synthetic construct
  source 1..75: mol_type = other DNA
atttatcgcggatgtcagaacggcgcagatcgcggacctggtggtcattaaggacgactcagtggcagacggtgc

SEQ ID NO: 580861 - DNA, 75 bp, synthetic construct
  source 1..75: mol_type = other DNA
tctctaatgatacaaccggtatcaaatgggatattgaaatggtctatagagcaatggataattcacagattggca

SEQ ID NO: 580862 - DNA, 75 bp, synthetic construct
  source 1..75: mol_type = other DNA
agcgcgacggctccctatcttattgatatttctgttgatgacagctacagccagaacggcggcgtgttagtcgat

SEQ ID NO: 580863 - DNA, 75 bp, synthetic construct
  source 1..75: mol_type = other DNA
tcagagttgaaactgccaccggtgaactggccagaacgcagcgccgcagcctggcggatgcgcttcagcagtccg

SEQ ID NO: 580864 - DNA, 75 bp, synthetic construct
  source 1..75: mol_type = other DNA
ccggacgcattccttgatgcaggtgcgcttcccactctgcatgaccgctacggtatttcaaccgccgctatggtg

SEQ ID NO: 580865 - DNA, 75 bp, synthetic construct
  source 1..75: mol_type = other DNA
atgataccggatcgggaaagaaccacaggttctctttttgagcgtatggaagcctcaccggccagaaactggcag

SEQ ID NO: 580866 - DNA, 75 bp, synthetic construct
  source 1..75: mol_type = other DNA
ggagataaccggggtctctagagcatcagtagcaagggcggttaaaatcctgaaggaagatcgatggatgcaggc

SEQ ID NO: 580867 - DNA, 75 bp, synthetic construct
  source 1..75: mol_type = other DNA
gccgggatcagtgcggtcactgccagtatcaacaacagcaccctgagccgggacgtgacgtttattgcagatgtc

SEQ ID NO: 580868 - DNA, 75 bp, synthetic construct
  source 1..75: mol_type = other DNA
gacggcgaacacgctgcgggcgagggtcaccgatgcgttcggtaatgcacttgccggacagacggtcagcgtgtt

SEQ ID NO: 580869 - DNA, 75 bp, synthetic construct
  source 1..75: mol_type = other DNA
gacctggtggttattaaggacggctcagtggcagacggcgcgacggcgaatacgctgcaggtgaaggtcaccgat

SEQ ID NO: 580870 - DNA, 75 bp, synthetic construct
  source 1..75: mol_type = other DNA
aaaaacaagattggcttggaaggtagaaccgttttaaaagcaatggttctgagtcgtgatgcgggagataaaaaa

SEQ ID NO: 580871 - DNA, 75 bp, synthetic construct
  source 1..75: mol_type = other DNA
aacggtgtttacggaaaagcagcaagcgggctgcatcaggtgaagagtggtatctgtcagggaattacgtggggg

SEQ ID NO: 580872 - DNA, 75 bp, synthetic construct
  source 1..75: mol_type = other DNA
tatcaccagccagacagccggaaccagtacaggcactgccagcatcaacaacagcagcctgagccggaacgtaac

SEQ ID NO: 580873 - DNA, 75 bp, synthetic construct
  source 1..75: mol_type = other DNA
cccctggattgaaaaagatgcgttgcgatgcttaatgtctgaacaggatattcaggatgcagaacaaacggctgc

SEQ ID NO: 580874 - DNA, 75 bp, synthetic construct
  source 1..75: mol_type = other DNA
agacgatgatccggatatgaaacaccgcaggaaactgctggaaagcatcccgggtatcggagagaaaacatctgc

SEQ ID NO: 580875 - DNA, 75 bp, synthetic construct
  source 1..75: mol_type = other DNA
tgatctcaataaaaacgatactcatgaagaaaaaactatggatgaaatttccgtttttaccttgtttttctacct

SEQ ID NO: 580876 - DNA, 75 bp, synthetic construct
  source 1..75: mol_type = other DNA
attttttgtgattttcacagaaatattatcaacagatgcgccgatgagattcgcaaagttggcgttaatgtcagc

SEQ ID NO: 580877 - DNA, 75 bp, synthetic construct
  source 1..75: mol_type = other DNA
ccttgccgaatatcagagtgcattagctgagtatacattatatcgaaatgcgcaatctaacgttgtaaaagcgta

SEQ ID NO: 580878 - DNA, 75 bp, synthetic construct
  source 1..75: mol_type = other DNA
ttaacgccgttgctgaggcaggcagcattacccaggctgcggcaaaagtgcatcgtgtaccttctaatctcacga

SEQ ID NO: 580879 - DNA, 75 bp, synthetic construct
  source 1..75: mol_type = other DNA
tgagcccgtccggttcgttagggggctatcaggaagccagtttactgcgtttggatgtcggcaccggttatcagt

SEQ ID NO: 580880 - DNA, 75 bp, synthetic construct
  source 1..75: mol_type = other DNA
gagcatatttcatgggttggacggcagattatcccgtcgacagcagatgaagatgagttgctggagcactgccgg

SEQ ID NO: 580881 - DNA, 75 bp, synthetic construct
  source 1..75: mol_type = other DNA
cagacaagaatccagacggtataccagccgggaagcttcacgccgctcctgagaatcgaaacagagaatggcgaa

SEQ ID NO: 580882 - DNA, 75 bp, synthetic construct
  source 1..75: mol_type = other DNA
tatagtttcaaatattgaagcattagcggagcttatccaagatgtaagatatgcaagaaaattaacaaaagttgc

SEQ ID NO: 580883 - DNA, 75 bp, synthetic construct
  source 1..75: mol_type = other DNA
atttctgagcttacagaaagttattacaacagtatagcgaaagacacagttgaggtagctgtggttagagctaat

SEQ ID NO: 580884 - DNA, 75 bp, synthetic construct
  source 1..75: mol_type = other DNA
taccagcggtggcaacggcgcacaacaagcgggtaaagagctgggcgttgatgtgacctacgacgggccgacaga

SEQ ID NO: 580885 - DNA, 75 bp, synthetic construct
  source 1..75: mol_type = other DNA
tatgatgagggcgaacttcagaaaccagaacttcaaagaaattatgtttgggataaagtcgaagccagtagattt

SEQ ID NO: 580886 - DNA, 75 bp, synthetic construct
  source 1..75: mol_type = other DNA
aaagccaggggaacggataaggcggaaaacgaggggtatctggctggccgcaatgcgcagctgcatcacgcggta

SEQ ID NO: 580887 - DNA, 75 bp, synthetic construct
  source 1..75: mol_type = other DNA
tgtatgtaaatcaggtggtgttgactggattcataactgttggtcaactgttaagtgcgttggtgatgtaataaa

SEQ ID NO: 580888 - DNA, 75 bp, synthetic construct
  source 1..75: mol_type = other DNA
aagtttgataattcaacagttatcggcgaagtgttaggattgagttgcgccagacaacttggaaaaacattagta

SEQ ID NO: 580889 - DNA, 75 bp, synthetic construct
  source 1..75: mol_type = other DNA
tatatattcaggtgtgtctccaagaataaatttaaagttcttggcaatcagtctcgtatctttttcagccatgat

SEQ ID NO: 580890 - DNA, 75 bp, synthetic construct
  source 1..75: mol_type = other DNA
gtgattgccaaccttagccgcgacatacaaccctggcagccagggcaaatccgcggcgactggcaactgttaatg

SEQ ID NO: 580891 - DNA, 75 bp, synthetic construct
  source 1..75: mol_type = other DNA
taccctcacggcgtggccggataaccgcatcgcagaggatgcgcactatgtttaccactatgatgaatacggcag

SEQ ID NO: 580892 - DNA, 75 bp, synthetic construct
  source 1..75: mol_type = other DNA
acgctgcgcctggcaggcataccgcatttgctgctggaatcggaccgccaacgggtcgaagcggggcgtgctatg

SEQ ID NO: 580893 - DNA, 75 bp, synthetic construct
  source 1..75: mol_type = other DNA
gccgctcgggcgcactcggtcagccaccgcaggccgaagaaggcgaagtcgccgagcgggcgcggtcgttgcgcg

SEQ ID NO: 580894 - DNA, 75 bp, synthetic construct
  source 1..75: mol_type = other DNA
tcagcgattgtttcgccagtatggtcgcccgttgaatatcgtgcttgcactattgctggtctattgcgcggtacg

SEQ ID NO: 580895 - DNA, 75 bp, synthetic construct
  source 1..75: mol_type = other DNA
ggtggattatgcgacattccagtggcagcgagcgtctgtccagcgttttattgcactttcggcgaagcaatctgg

SEQ ID NO: 580896 - DNA, 75 bp, synthetic construct
  source 1..75: mol_type = other DNA
gtggtgctgacgttcgcccatgcccagcaagcgttgcgcatcgcccaggcgattgccgagcaccgtccggcgctg

SEQ ID NO: 580897 - DNA, 75 bp, synthetic construct
  source 1..75: mol_type = other DNA
cgccggattggcccatgcccgcctggtggtgctgacgtttgcccgtccgcagacggccctgcgtatcgctcaggc

SEQ ID NO: 580898 - DNA, 75 bp, synthetic construct
  source 1..75: mol_type = other DNA
cttttgtctacgtgctggtgactcatgtaactgaccttagcgagtgggctcccggctatgtgatgctaagcatac

SEQ ID NO: 580899 - DNA, 75 bp, synthetic construct
  source 1..75: mol_type = other DNA
atccagacgatttatcagccggggagcttcacgccactcatcagggttgaaaccgccaccggtgagctggcgaaa

SEQ ID NO: 580900 - DNA, 75 bp, synthetic construct
  source 1..75: mol_type = other DNA
attaccggccgatacggtgacggagactccggtaagtactttaccactggaccaggcgacggttcgtgtcagaca

SEQ ID NO: 580901 - DNA, 75 bp, synthetic construct
  source 1..75: mol_type = other DNA
ccggccggccaatgagtgttcctgtggtggatgcgaaaccgacaaaacgtccgggggtattcagtgtgtcgattc

SEQ ID NO: 580902 - DNA, 75 bp, synthetic construct
  source 1..75: mol_type = other DNA
gccgcgagcatctgttacagacgctgcgcagccgcttgcaggatatacgccagcatcttcactgccagttaccgg

SEQ ID NO: 580903 - DNA, 75 bp, synthetic construct
  source 1..75: mol_type = other DNA
ggaactggtacataccctttgggaagacttacgtaagacacttccagagatcggagcagttccggctattccaca

SEQ ID NO: 580904 - DNA, 75 bp, synthetic construct
  source 1..75: mol_type = other DNA
tgacctggtacggctgggacggcgaccggctgaccacgatacagaacgacagaacccgcatccagacgatttatc

SEQ ID NO: 580905 - DNA, 75 bp, synthetic construct
  source 1..75: mol_type = other DNA
atggttgaactggtttgctttaatgatgatgattgtgctcaggtaagggaattattaaaacaatcaaacggtaat

SEQ ID NO: 580906 - DNA, 75 bp, synthetic construct
  source 1..75: mol_type = other DNA
gcgtatggtcaacgaatgacattgtcgcgaatttaatgaccgccggatcattattatctttcctgcagatcagta

SEQ ID NO: 580907 - DNA, 75 bp, synthetic construct
  source 1..75: mol_type = other DNA
ctgaaattatgcacgttacgtctgtatccggtgacgtgatgacagtaattcgtggtcaggaaggaactacggcgc

SEQ ID NO: 580908 - DNA, 75 bp, synthetic construct
  source 1..75: mol_type = other DNA
tcggcgcattcgatccaaaaacgggtaagcaggttaaaggaccggatccaaaacgaaacattaaaaaatatcttt

SEQ ID NO: 580909 - DNA, 75 bp, synthetic construct
  source 1..75: mol_type = other DNA
ttcccagcacggtgagcttgaagggtaccgtgccagtgatggcgaacacctcggcgcattcgatccaaaaacggg

SEQ ID NO: 580910 - DNA, 75 bp, synthetic construct
  source 1..75: mol_type = other DNA
attggctacattaaggcggtgcaggcaacagataccagcaccgcgccggatgtcatctggcctgaactgccggag

SEQ ID NO: 580911 - DNA, 75 bp, synthetic construct
  source 1..75: mol_type = other DNA
ggttatggccgaatcccttattttcaaggtttttatcattagattctctaatagcattacttgtatttcgtttct

SEQ ID NO: 580912 - DNA, 75 bp, synthetic construct
  source 1..75: mol_type = other DNA
cagacccagccgccggagcactacacggaaggaacgctgattgccgccatgaaaaatgccgcccgttttgtcagc

SEQ ID NO: 580913 - DNA, 75 bp, synthetic construct
  source 1..75: mol_type = other DNA
tggagttctggccgcgaaagcctgagcctggcaaagatacctttcaatatcatgtgcttccttttgattcgatcg

SEQ ID NO: 580914 - DNA, 75 bp, synthetic construct
  source 1..75: mol_type = other DNA
atgagcaaaatccatgagttaaaaattgcacctgagtattttaactctgtgatatctcaggaaaaacgtgctgaa

SEQ ID NO: 580915 - DNA, 75 bp, synthetic construct
  source 1..75: mol_type = other DNA
ccgacccgtaaaacggtggatctggcgcagctgaacgacagcgaacgcaaggtctacggcctggtgcgcagtcat

SEQ ID NO: 580916 - DNA, 75 bp, synthetic construct
  source 1..75: mol_type = other DNA
tgaccatcacctggtgcttcggccatctgctgagcatggccgcgccggaggattacgatccggcgctgaaacact

SEQ ID NO: 580917 - DNA, 75 bp, synthetic construct
  source 1..75: mol_type = other DNA
agccacccgcgccgggattatccagacgctgcttaagcgcggttatctgattaagcagcgacgctttctgctggc

SEQ ID NO: 580918 - DNA, 75 bp, synthetic construct
  source 1..75: mol_type = other DNA
agtgtttccatccctctggggggcgcgtggagcagttatcgcatgactaccgaccagaatggcaagacgtcgcaa

SEQ ID NO: 580919 - DNA, 75 bp, synthetic construct
  source 1..75: mol_type = other DNA
ttgacggtaaggaaaactccttaagcgccggttatcacggtcacattggtcgggtgaattacagcgtggcctata

SEQ ID NO: 580920 - DNA, 75 bp, synthetic construct
  source 1..75: mol_type = other DNA
agccttttccatcggccgttcttgcgctccgctggccccatgttgccaaccttggcgacatgaaaaaacttgcca

SEQ ID NO: 580921 - DNA, 75 bp, synthetic construct
  source 1..75: mol_type = other DNA
tgactatctctgccgattcactgcgcaagatttatgacaatatggactatttctcctgtcgcattgtgttacgtc

SEQ ID NO: 580922 - DNA, 75 bp, synthetic construct
  source 1..75: mol_type = other DNA
ccgccggaatttctgccgctgcaaagtggcgtgggcaatatcaataatgcggtaatggcgcgtctgggggaaaac

SEQ ID NO: 580923 - DNA, 75 bp, synthetic construct
  source 1..75: mol_type = other DNA
tggcccaatttcaaccgaaatataatcagaatcaggaaataatcgacaggaagagttttaataaggcgattgccg

SEQ ID NO: 580924 - DNA, 75 bp, synthetic construct
  source 1..75: mol_type = other DNA
gctgatgacggcggcagattattcacagctgctggatgcatttaacgtttttatgctcccgcccgcgaagcgacc

SEQ ID NO: 580925 - DNA, 75 bp, synthetic construct
  source 1..75: mol_type = other DNA
tgaattacggcgatatattgaggaaattgaaagtgcgcttggaatgtccggtcgtcgccgtggccctgcaggagt

SEQ ID NO: 580926 - DNA, 75 bp, synthetic construct
  source 1..75: mol_type = other DNA
caactgatgaacgcttatctgctcgggcagcagctgccggaagtgtgggactttggcatgttcagcatcgccaaa

SEQ ID NO: 580927 - DNA, 75 bp, synthetic construct
  source 1..75: mol_type = other DNA
gaagaatccgtgccgtttttgatgccccggcagataacaccgggatgaacactggcagcggcgaaattcgtgata

SEQ ID NO: 580928 - DNA, 75 bp, synthetic construct
  source 1..75: mol_type = other DNA
ttctgtggttgatcggtgaagcgatcttcttctacctgccggtcgggatttgctggtcagcggtgaaaaaaatgg

SEQ ID NO: 580929 - DNA, 75 bp, synthetic construct
  source 1..75: mol_type = other DNA
tgtgactatgggggtgatatatttattggatgatggtttttataatgtaaaaaaacagaattattttttgtctgt

SEQ ID NO: 580930 - DNA, 75 bp, synthetic construct
  source 1..75: mol_type = other DNA
atatatgtttttgcttgttctcattatggagtatgtcacttagcgctttacagacttcattgggcgtagcaattg

SEQ ID NO: 580931 - DNA, 75 bp, synthetic construct
  source 1..75: mol_type = other DNA
tcgataatggcgggacagtcactaaggcggctatctacgatcgcaacggcagcgtggtttctatcgcgtcaaaat

SEQ ID NO: 580932 - DNA, 75 bp, synthetic construct
  source 1..75: mol_type = other DNA
gtgatctttccgattctttttggttttgccatcgctttcaccaactacaacctgtaccacacgccgccagcgaag

SEQ ID NO: 580933 - DNA, 75 bp, synthetic construct
  source 1..75: mol_type = other DNA
cgtcgcctttggcgtgctgatctatttcctctcgctgcgtgatgcgtggctcaacggtaaaaaacgtgatgaggg

SEQ ID NO: 580934 - DNA, 75 bp, synthetic construct
  source 1..75: mol_type = other DNA
cgcatgggccgccggtctgaaaaaatatgacagggtcatgatccacggcgaaccctatcaggtagtcgatcccgg

SEQ ID NO: 580935 - DNA, 75 bp, synthetic construct
  source 1..75: mol_type = other DNA
gcgtatcaaccgacgaccagcacctggacctacagcgcgacgcgcttcagcaggccggatgcggcgttatctacg

SEQ ID NO: 580936 - DNA, 75 bp, synthetic construct
  source 1..75: mol_type = other DNA
tgctttgacccgtgccgggtgtgccgacatctacgaagagaaggtcagcgggaagtctgctgatcggcctgctct

SEQ ID NO: 580937 - DNA, 75 bp, synthetic construct
  source 1..75: mol_type = other DNA
tagtcttgcgtgtcatatcacatcccgccagctaaaccacgtcgaagcggcagaactgctgcgtgtgactgctga

SEQ ID NO: 580938 - DNA, 75 bp, synthetic construct
  source 1..75: mol_type = other DNA
cgggtaagacgactgttgagaataatgcgctgtctgagcttgtgccgcctcgcgtacagcaggatacttctctgg

SEQ ID NO: 580939 - DNA, 75 bp, synthetic construct
  source 1..75: mol_type = other DNA
gagctgcggcgatgcccatagaagaaccggcgctgcgcagctggcagcgcccgttccttaaatgggctggcggca

SEQ ID NO: 580940 - DNA, 75 bp, synthetic construct
  source 1..75: mol_type = other DNA
ctgtattcatttaaagcctatggcgcaggccaaggtataaatgagcatagttattttatcaaaatcgatttcgat

SEQ ID NO: 580941 - DNA, 75 bp, synthetic construct
  source 1..75: mol_type = other DNA
atgagtgaagggaagcaacttgccccctgcctgagtccggagcatatgagtgcgatgggggtaaaccgttatgcc

SEQ ID NO: 580942 - DNA, 75 bp, synthetic construct
  source 1..75: mol_type = other DNA
attgccgtatgacaatatgggtggaagcgtctttggtgcaagtgttccggtagcagttaaagaaaaagagaataa

SEQ ID NO: 580943 - DNA, 75 bp, synthetic construct
  source 1..75: mol_type = other DNA
tgatccgagagattgtcccaagggacttacagatctaacccatgttataggtgagcttcacgataacgtttggtc

SEQ ID NO: 580944 - DNA, 75 bp, synthetic construct
  source 1..75: mol_type = other DNA
tacctcccagaaaaagaagatgaagataggatacacaaattaccagatgagcgtgccctattttcaatagcggag

SEQ ID NO: 580945 - DNA, 75 bp, synthetic construct
  source 1..75: mol_type = other DNA
gcagacaaatgggtttcatttcatgaagacgtattaaataatcttgagaaaagaaaccatttcaaaacaggtaaa

SEQ ID NO: 580946 - DNA, 75 bp, synthetic construct
  source 1..75: mol_type = other DNA
ccagcccaagcctggtgagattctgcctgtcgggactggagtgtttaatgattcagagagtggggctattcactt

SEQ ID NO: 580947 - DNA, 75 bp, synthetic construct
  source 1..75: mol_type = other DNA
gtaaaaaaaacctggatctttgcatgctttatgacggtatcaaaggacgcataaaaacccgtaacatccagaata

SEQ ID NO: 580948 - DNA, 75 bp, synthetic construct
  source 1..75: mol_type = other DNA
atcgaaggccaactgactgagcaacaactaatccaggcccaacaagccctggaagatggcgacagcagctttgat

SEQ ID NO: 580949 - DNA, 75 bp, synthetic construct
  source 1..75: mol_type = other DNA
gaaggccaactgaccgagcaacaattaatccaggctcaacaagccctggaagatggcgacaacagctttgatcaa

SEQ ID NO: 580950 - DNA, 75 bp, synthetic construct
  source 1..75: mol_type = other DNA
aacgacgacttcatgaaccgtcgttacaccttcagcggcggacagaaagccggggcagcgattgtgaaccagggg

SEQ ID NO: 580951 - DNA, 75 bp, synthetic construct
  source 1..75: mol_type = other DNA
actcatgtgggttaccgcgttctcttcagagtggtaaatgcagagggtaaaccggtaccttttggagccattgcc

SEQ ID NO: 580952 - DNA, 75 bp, synthetic construct
  source 1..75: mol_type = other DNA
ttatccccttatccagtgcggcaatcaatgcggtgagtattccagactatttcgcctggggcgggattgcactgg

SEQ ID NO: 580953 - DNA, 75 bp, synthetic construct
  source 1..75: mol_type = other DNA
gatgacagaggtgctgattgaacatgtccacaaacatatctcagtcctcggagaaccagaatttaacccagcaga

SEQ ID NO: 580954 - DNA, 75 bp, synthetic construct
  source 1..75: mol_type = other DNA
cagtaaggaaggaacaattacgttgaaatgtgataatcttttcggcgacaaaaaacaagcatcgcggaatatggt

SEQ ID NO: 580955 - DNA, 75 bp, synthetic construct
  source 1..75: mol_type = other DNA
atctgtgcctttatctggctggtggggaaatagctacgctacgtattccgtttcacaaaatgataattccggcag

SEQ ID NO: 580956 - DNA, 75 bp, synthetic construct
  source 1..75: mol_type = other DNA
tgttgaacgattaatgcaatttggctacagcagtagctggaagcgtctctcgtggaacgtctcctggagttattc

SEQ ID NO: 580957 - DNA, 75 bp, synthetic construct
  source 1..75: mol_type = other DNA
caagatgtcgcagagatggagaaaatgaacaacaatatatattgtaatctgtatgatgttgaatacttacttagt

SEQ ID NO: 580958 - DNA, 75 bp, synthetic construct
  source 1..75: mol_type = other DNA
cgcacaacagccagataaacaactctctttaaccgaccctgactcccggttgatgaaaacaaataatatgaatcg

SEQ ID NO: 580959 - DNA, 75 bp, synthetic construct
  source 1..75: mol_type = other DNA
aagcggcagagaacgtcttttttgtcggcgttggccgggtgctgttgtcattgcaggcaatggcaaaacggctgg

SEQ ID NO: 580960 - DNA, 75 bp, synthetic construct
  source 1..75: mol_type = other DNA
aagcacggaggtttcttgtatcgctatcaggatgtgatgaaattctttaaatcaattggactgctttctgacagc

SEQ ID NO: 580961 - DNA, 75 bp, synthetic construct
  source 1..75: mol_type = other DNA
catccacgacaactgatgtcatggtttggtatcacgccatcagaatattcatcgggtggaagcagacatcagggc

SEQ ID NO: 580962 - DNA, 75 bp, synthetic construct
  source 1..75: mol_type = other DNA
cacgtcattgacagagcatgggatgctcaactcaggctttgtaagaggtatcgaaaacttcaggccaaaggaaag

SEQ ID NO: 580963 - DNA, 75 bp, synthetic construct
  source 1..75: mol_type = other DNA
gataaaccaggagtttcattaaatagcaacattattaatataccagtcatggccagttactatgtatatgatgaa

SEQ ID NO: 580964 - DNA, 75 bp, synthetic construct
  source 1..75: mol_type = other DNA
cctttagccaggtcagagcttccgtatcaggaaacgatttatggctactcgcatccaccaaaaaacctattagct

SEQ ID NO: 580965 - DNA, 75 bp, synthetic construct
  source 1..75: mol_type = other DNA
gcgctgaaagtagcgcaggataaatacggacctcttcaggcggatgcgacggaagaacagcggcaggcatatctg

SEQ ID NO: 580966 - DNA, 75 bp, synthetic construct
  source 1..75: mol_type = other DNA
aactttttcctgatgttagacggttgcgaaaaggaactaaatcaaaattcacgttaggtcctaaacctacaaaat

SEQ ID NO: 580967 - DNA, 75 bp, synthetic construct
  source 1..75: mol_type = other DNA
gcaacaacagtggtgacctgaccctgaatctgagcagcgataaaggcgggaactggggcttcagcaacgtttcgg

SEQ ID NO: 580968 - DNA, 75 bp, synthetic construct
  source 1..75: mol_type = other DNA
ctctgtaaacctgaacggtacatctaatactggtgcaggggttaatcttggcggcgcatctaatctcagtggtgc

SEQ ID NO: 580969 - DNA, 75 bp, synthetic construct
  source 1..75: mol_type = other DNA
gaacagccagaacctgatagtgaactggcagagttttgatattggcaagggtaacacggtgcagttttaccagcc

SEQ ID NO: 580970 - DNA, 75 bp, synthetic construct
  source 1..75: mol_type = other DNA
ggtttgaggatcctacaaatatgttctacctctcagataatcgtgtgccgactgctttttattataatgaaaatg

SEQ ID NO: 580971 - DNA, 75 bp, synthetic construct
  source 1..75: mol_type = other DNA
agaagaaattccattaagttatttatattatttaatgaaaacattgaatctgcccagcatgaacaccgatgctgc

SEQ ID NO: 580972 - DNA, 75 bp, synthetic construct
  source 1..75: mol_type = other DNA
ggccagttactatgtatatgatgaaaaaaaagttaaatctggcgcactggaagcaaccgcattaatcaacgtgaa

SEQ ID NO: 580973 - DNA, 75 bp, synthetic construct
  source 1..75: mol_type = other DNA
taaagaatttggtataagtagtaatactgaaattaacggcgggtatcagtacattgaaatgaatggcaccgcaga

SEQ ID NO: 580974 - DNA, 75 bp, synthetic construct
  source 1..75: mol_type = other DNA
tatgggaccgccaataatacgaaaatcaattctggcggagaacagcatattaaagaatttggtataagtagtaat

SEQ ID NO: 580975 - DNA, 75 bp, synthetic construct
  source 1..75: mol_type = other DNA
gcagaattttaaaactagcaacacagcatattcacagctttgtgaaaaattatcatcttttaaaattacgactaa

SEQ ID NO: 580976 - DNA, 75 bp, synthetic construct
  source 1..75: mol_type = other DNA
atgctgccaatgtggtacatggcggaagaccgtctcgcctggtgggataaattctcccagccggccgtgcgcccc

SEQ ID NO: 580977 - DNA, 75 bp, synthetic construct
  source 1..75: mol_type = other DNA
aaaaataaaaggtaaatcggttgaccttaacaaaaaatatcgtatgacaacatttagctttaatgctactggtgg

SEQ ID NO: 580978 - DNA, 75 bp, synthetic construct
  source 1..75: mol_type = other DNA
tatcagttacacccagttaatctcaaaatgagaattaccagagaagatggaaaaacggaattttctttttacacc

SEQ ID NO: 580979 - DNA, 75 bp, synthetic construct
  source 1..75: mol_type = other DNA
gaactgccggaaccatttggtgttaatctgaattatatgcaaatccggcaggggatatcggtggacagtatccgg

SEQ ID NO: 580980 - DNA, 75 bp, synthetic construct
  source 1..75: mol_type = other DNA
tggctggatatactgagtaataaggaaaggcccgcacacaaccgggttgaaatgttacttttacaggagctggga

SEQ ID NO: 580981 - DNA, 75 bp, synthetic construct
  source 1..75: mol_type = other DNA
agaaaatgaaatttcagaagaaactcttaaaaacgtgacttctgatttcaagaagatgttcatgaatgcctatca

SEQ ID NO: 580982 - DNA, 75 bp, synthetic construct
  source 1..75: mol_type = other DNA
acaggaatttactgcctacggcgggacgcaattatctgccaattacaccgcctttttgttagggctggggcgcaa

SEQ ID NO: 580983 - DNA, 75 bp, synthetic construct
  source 1..75: mol_type = other DNA
ggaactggggcgcagtgtcgctggatgtaacgcatgcgcgcagtcagttagccgacgacagtcgtcatgaggggg

SEQ ID NO: 580984 - DNA, 75 bp, synthetic construct
  source 1..75: mol_type = other DNA
tgagggggattctattcgcttcctcggtaatgactccaacttattgatagtgttttatgttcagataatgcccga

SEQ ID NO: 580985 - DNA, 75 bp, synthetic construct
  source 1..75: mol_type = other DNA
gcgtttccatcgctccacggggaacccgattcagggagcggcaaattacatctgaaccctcgcttcgtatcgtga

SEQ ID NO: 580986 - DNA, 75 bp, synthetic construct
  source 1..75: mol_type = other DNA
cgcggggattattatcggtttgatgaaacagtaacggtcagcacaagaggcgacaatgtgtgtttcagtgtcccg

SEQ ID NO: 580987 - DNA, 75 bp, synthetic construct
  source 1..75: mol_type = other DNA
aatggttcgaaaaagcgcatccttgatgatgcgcctgaactgatcttaccctgcaatagtggacgcgcagctaag

SEQ ID NO: 580988 - DNA, 75 bp, synthetic construct
  source 1..75: mol_type = other DNA
tgaagcgtggccgaccaaaaccatttgtgctggcaacgtagtgactggtgaaatgtgtgaggagcttatcctctc

SEQ ID NO: 580989 - DNA, 75 bp, synthetic construct
  source 1..75: mol_type = other DNA
ggctaccgcgcaggagcataataaacaggaaatttactgtgtaaactttagtcacctccatgatgagaatgaggg

SEQ ID NO: 580990 - DNA, 75 bp, synthetic construct
  source 1..75: mol_type = other DNA
ggaagacggcaagattcttgaggcaattgatcgctttgaggacaagttcagaggggaaggactgaagttcgaaag

SEQ ID NO: 580991 - DNA, 75 bp, synthetic construct
  source 1..75: mol_type = other DNA
tttttcgaaggatgagtttagtgaagatattaagacttttgagtcattgcacgacgcatctgaatataaaaataa

SEQ ID NO: 580992 - DNA, 75 bp, synthetic construct
  source 1..75: mol_type = other DNA
gaggattctatgatgcaaacaatcaattgcaaatggacacgaatcagcctggacatgagtttacattcaagcgaa

SEQ ID NO: 580993 - DNA, 75 bp, synthetic construct
  source 1..75: mol_type = other DNA
cgtgaaatggcagaagatgctcttggaaaacaatttgtccaggccagagaagatcatcaggaatcgcagcagcag

SEQ ID NO: 580994 - DNA, 75 bp, synthetic construct
  source 1..75: mol_type = other DNA
tgcataataaacaggaaatttattgtataaactttagtcgcttccatgatttgaatgaaggtatcgtctttcatt

SEQ ID NO: 580995 - DNA, 75 bp, synthetic construct
  source 1..75: mol_type = other DNA
ttattacccagattgtttgaatttatttcccaaaggcaatttccaggcatttatgaaggctgctgtttacagaga

SEQ ID NO: 580996 - DNA, 75 bp, synthetic construct
  source 1..75: mol_type = other DNA
tgtttattattgtaagtccattggcattgatcgccttagtgatttatcggtaaaaatggcttgtgataaatattc

SEQ ID NO: 580997 - DNA, 75 bp, synthetic construct
  source 1..75: mol_type = other DNA
catggttcccgggatatcaacagggtacttgcagagccagacgacaaaccatcagatcatttctggcagccataa

SEQ ID NO: 580998 - DNA, 75 bp, synthetic construct
  source 1..75: mol_type = other DNA
agtgggagatgttaccaaagggcatacaattgaacagcttgatgctatacaggaatttattaataataaatataa

SEQ ID NO: 580999 - DNA, 75 bp, synthetic construct
  source 1..75: mol_type = other DNA
tgtatgacatggcggtggtttcgcgactggcggcggaaagttatctcacgcaaaaagggttatgccttgcgctgg

SEQ ID NO: 581000 - DNA, 75 bp, synthetic construct
  source 1..75: mol_type = other DNA
tttgctgtgtatgtcagttgtactgaagccatgttgggctacggagatttttcagtgaaatcagggagcaacttc

SEQ ID NO: 581001 - DNA, 75 bp, synthetic construct
  source 1..75: mol_type = other DNA
acggcaatgtgccgtggctccgcccgtggcgcgatggcgagccgccgttcccgatcaatgcgttatccggtcgtc

SEQ ID NO: 581002 - DNA, 75 bp, synthetic construct
  source 1..75: mol_type = other DNA
ccatagggggatcagagagaatatagtttgtagatatattccgcaagtactttggaataaggttttttttgcgtt

SEQ ID NO: 581003 - DNA, 75 bp, synthetic construct
  source 1..75: mol_type = other DNA
gttgcagcatttatcatctatttcaaaacaattgcagagtttctgagccttccgccgtcctggaccgaggtgttt

SEQ ID NO: 581004 - DNA, 75 bp, synthetic construct
  source 1..75: mol_type = other DNA
atgagcaagccatttctgaaatgggcaggtggaaagtatacccagctggctgacctgttcgtgcatatcccggca

SEQ ID NO: 581005 - DNA, 75 bp, synthetic construct
  source 1..75: mol_type = other DNA
gccaggatttacgtcagcacgataatctcgcgctggctgccgcctgccgcaattcgtctgcgcgcgtgctggcgt

SEQ ID NO: 581006 - DNA, 75 bp, synthetic construct
  source 1..75: mol_type = other DNA
tgcgaccaccgaaagcctgcgtgcggcaacgcacgacgtgctggctggcctgaccgcgcgtgaagcgaaagttct

SEQ ID NO: 581007 - DNA, 75 bp, synthetic construct
  source 1..75: mol_type = other DNA
ataacgccaacggagcgatattgcctgcagtttattgcgcaaaacagtctttatcagttaactcgacacaatgtt

SEQ ID NO: 581008 - DNA, 75 bp, synthetic construct
  source 1..75: mol_type = other DNA
gcttatcctctccggtgccgatatcgttaaagttggcattggcccaggttctgtttgtacaactcgcgtcaaaac

SEQ ID NO: 581009 - DNA, 75 bp, synthetic construct
  source 1..75: mol_type = other DNA
atggaaggcgaactgatagaaaacaatgggttagacatttatgacaccagcgaaacaccgaaaaagcgcggtcgg

SEQ ID NO: 581010 - DNA, 75 bp, synthetic construct
  source 1..75: mol_type = other DNA
ttaacgaaatccttcgtgaactaaaagacggtatgtcctcaaacccagtatcagtgcgagaattcataagctggt

SEQ ID NO: 581011 - DNA, 75 bp, synthetic construct
  source 1..75: mol_type = other DNA
caatgtgtatctgcctttcaccgtggggctcgggtagtgatttctaactcatctgcaccgaaggttctcgacctg

SEQ ID NO: 581012 - DNA, 75 bp, synthetic construct
  source 1..75: mol_type = other DNA
cctggcgaagcaatgcgtatcagcctttcaccgtggggctcgggtagtgatttctaactcatctgcaccgaaggt

SEQ ID NO: 581013 - DNA, 75 bp, synthetic construct
  source 1..75: mol_type = other DNA
tgcttaccagttcggttatgatatggatgctattgttggcggagctcataatggggccgccgatgcaatgagaca

SEQ ID NO: 581014 - DNA, 75 bp, synthetic construct
  source 1..75: mol_type = other DNA
atgagcgggcgcgggatgtgcaggctgagaggacgctgcgtaacgtggtgtgtgaaggatttgatgacagcgtga

SEQ ID NO: 581015 - DNA, 75 bp, synthetic construct
  source 1..75: mol_type = other DNA
gacccaactctcacccagtgccaccagttatctgctgccattcgccagctcgacggacagatgcaagctcagcgc

SEQ ID NO: 581016 - DNA, 75 bp, synthetic construct
  source 1..75: mol_type = other DNA
aggcagtcagggatattgaattttgcgttctttgcggaagatacggagttcaggccgctcatagaaatgaaggga

SEQ ID NO: 581017 - DNA, 75 bp, synthetic construct
  source 1..75: mol_type = other DNA
atctgtgtcacctgccattcagagattgataacgggaaggggcttagccgtgacgagcgccgccagttaatggat

SEQ ID NO: 581018 - DNA, 75 bp, synthetic construct
  source 1..75: mol_type = other DNA
aagccgtatcaagtaagagatggtgcatccgggaggattactcgccttgcggctcgcccttcgggccgttgctaa

SEQ ID NO: 581019 - DNA, 75 bp, synthetic construct
  source 1..75: mol_type = other DNA
ctctgcggtcaggcagaatcagccgtttctgtgcaggttgatgtttattccagcaccatcactgaagcgcgcacg

SEQ ID NO: 581020 - DNA, 75 bp, synthetic construct
  source 1..75: mol_type = other DNA
tgcaggttctttcacctgtcgaggtgacaaaaattcctggctacgacacgacaacccatcttcatcgggcaaccc

SEQ ID NO: 581021 - DNA, 75 bp, synthetic construct
  source 1..75: mol_type = other DNA
cgttgccggatgcggcgcgagcgccttatccggcttaccgatcacaatacaatcagttctttttcacaaactcag

SEQ ID NO: 581022 - DNA, 75 bp, synthetic construct
  source 1..75: mol_type = other DNA
atggtcgccttcaaccaggcggatgtttttcactttggtgccaattttcagcatcgaagagctacctttcacctt

SEQ ID NO: 581023 - DNA, 75 bp, synthetic construct
  source 1..75: mol_type = other DNA
acatacctaacaatcagaaaggacgatctaataaccgcaaacgtggcaattggtacagtactaatcattgatggt

SEQ ID NO: 581024 - DNA, 75 bp, synthetic construct
  source 1..75: mol_type = other DNA
cagggaggagcgtcggcagcttatggaccgcgcgattgttctgacagtgattgaagttgcccgccgtgggctggt

SEQ ID NO: 581025 - DNA, 75 bp, synthetic construct
  source 1..75: mol_type = other DNA
tgagggccggggatatcgacttaggcattcggttgttactgtatgcgagaactttgacggtgaaattaacgttct

SEQ ID NO: 581026 - DNA, 75 bp, synthetic construct
  source 1..75: mol_type = other DNA
tttcgacgcaaatcttttgccataacgattacccggaaaccattacagattatgtcacactgcaacgaggctccg

SEQ ID NO: 581027 - DNA, 75 bp, synthetic construct
  source 1..75: mol_type = other DNA
acttgcaaaggtgaggctgccagcgagtgatacagagcgtttaaagctatttaaaattgtaaaggatctaatagg

SEQ ID NO: 581028 - DNA, 75 bp, synthetic construct
  source 1..75: mol_type = other DNA
aacaaagcggtaatgagtaaaacgagactacctaaagatgggcgtaaactattcaaaatattacaatacttgata

SEQ ID NO: 581029 - DNA, 75 bp, synthetic construct
  source 1..75: mol_type = other DNA
aaagccgtcatgagcaaaaccagactacctaaagatggtcgaaaattatttaagatccttcaaacattaatagag

SEQ ID NO: 581030 - DNA, 75 bp, synthetic construct
  source 1..75: mol_type = other DNA
gcgacgttgattttgtcatggcgcacatccgcgtcggcaaatacccgatgcgcgaactggatgaaaaaatcccgc

SEQ ID NO: 581031 - DNA, 75 bp, synthetic construct
  source 1..75: mol_type = other DNA
atacacatactgaagcgagctggaacgacacctatgcaaaagcgcgggatgtccaggcactggacccggatacat

SEQ ID NO: 581032 - DNA, 75 bp, synthetic construct
  source 1..75: mol_type = other DNA
caaaccggtatataagcgttatctacgagtttgatgccccacctgactggcaaatgacattcagggaacgcagat

SEQ ID NO: 581033 - DNA, 75 bp, synthetic construct
  source 1..75: mol_type = other DNA
cgtcttggtggcggacagcagtttatcaaggacaaaaacggtaacctcacacagatttatacaaatggtgttttt

SEQ ID NO: 581034 - DNA, 75 bp, synthetic construct
  source 1..75: mol_type = other DNA
cactggcaaactgatggagtgggaatccctgaaatacacgccgtcgtccgttgtcgctacgctgtccgggattac

SEQ ID NO: 581035 - DNA, 75 bp, synthetic construct
  source 1..75: mol_type = other DNA
gcacgggtagccgcaggttatgcccgcgcagctgagcaggcaaaaaacgacattgatgtcctgctggcgaacacc

SEQ ID NO: 581036 - DNA, 75 bp, synthetic construct
  source 1..75: mol_type = other DNA
acgattttagaaacggcattgattagctactttggtttacatcccgactgtttaaataaggcaataatgtgtaag

SEQ ID NO: 581037 - DNA, 75 bp, synthetic construct
  source 1..75: mol_type = other DNA
gtttggtgatatccctctgacattgctgcaaacctggagcgaggacgatttccgccgggtgcaggagaatctgat

SEQ ID NO: 581038 - DNA, 75 bp, synthetic construct
  source 1..75: mol_type = other DNA
aaaaggggatgataagtttatcaccaccgactatttgcaacagtgccaacaataatagtggtcttgatataaaaa

SEQ ID NO: 581039 - DNA, 75 bp, synthetic construct
  source 1..75: mol_type = other DNA
ggatatggcattgcatcaaaacagtattcttcgtaaatctcttaaaataagcctgatgtcaattcgagagagaga

SEQ ID NO: 581040 - DNA, 75 bp, synthetic construct
  source 1..75: mol_type = other DNA
tagccgtattgatggcaaggtctggcaactgcctgcggcagtttatggccgaatggtcaatcttgagccagacat

SEQ ID NO: 581041 - DNA, 75 bp, synthetic construct
  source 1..75: mol_type = other DNA
caatgcggtgagtattccagactattttgcctggggcgggatcgcactggtgattcagttactcgtttttgctgg

SEQ ID NO: 581042 - DNA, 75 bp, synthetic construct
  source 1..75: mol_type = other DNA
aagtattggagtttattagtgcccgttttgctgatatcataatttgtttacatgatggtgataaggaaacatgta

SEQ ID NO: 581043 - DNA, 75 bp, synthetic construct
  source 1..75: mol_type = other DNA
aatctaaatgaatatacagacaatatgttccctatgaagttctttgaatatttagctgctgggaaacctatcgtg

SEQ ID NO: 581044 - DNA, 75 bp, synthetic construct
  source 1..75: mol_type = other DNA
aaaaaagatttaacacgagcaataaaacgtatattcaaaatgtttaaagctccacgccatgtacgagaaaatcta

SEQ ID NO: 581045 - DNA, 75 bp, synthetic construct
  source 1..75: mol_type = other DNA
gggctggatgtcgctgtcacggaaaccgcaagtgacctggtacggctgggacggcgaccggctgaccacaataca

SEQ ID NO: 581046 - DNA, 75 bp, synthetic construct
  source 1..75: mol_type = other DNA
gccaggcgccgtatcagcaggtaacgctgaccgtgcatctcctgaaaactcaggggctgggcgaaagctaccggc

SEQ ID NO: 581047 - DNA, 75 bp, synthetic construct
  source 1..75: mol_type = other DNA
gcgccggaccgtttgtctacattgaaattaaccacgtcgcgccggaaaactttggttattactttgcgctaaaca

SEQ ID NO: 581048 - DNA, 75 bp, synthetic construct
  source 1..75: mol_type = other DNA
atgtatgagtctccttctcggtattattaaagagatcgagcttcgttatccggagaaagatatttacgcccaaga

SEQ ID NO: 581049 - DNA, 75 bp, synthetic construct
  source 1..75: mol_type = other DNA
gtgatgatgctggtcagacactgaccaccgattgggtacaatggaaccgtctggacgaagacgagcagtatcgtg

SEQ ID NO: 581050 - DNA, 75 bp, synthetic construct
  source 1..75: mol_type = other DNA
taaactggatgtgcccattaagttcatctggaactacaaggacttgaagcggacccttagtaggcctgaggtcct

SEQ ID NO: 581051 - DNA, 75 bp, synthetic construct
  source 1..75: mol_type = other DNA
gtcctttagatgaactggttgattataatttaaatgctgatattgcatgtgtaattccagattcgccagaaatgc

SEQ ID NO: 581052 - DNA, 75 bp, synthetic construct
  source 1..75: mol_type = other DNA
agaacatggcgaccacagccgttgctgaaaccgctggtcgacggcccgcagagcgctgtcgtgacaggaccggca

SEQ ID NO: 581053 - DNA, 75 bp, synthetic construct
  source 1..75: mol_type = other DNA
cgtgttgagctggaaggcaaagacaagctgattgcagagcttggaaaacaatgcgccgaatgggagcgaaaagca

SEQ ID NO: 581054 - DNA, 75 bp, synthetic construct
  source 1..75: mol_type = other DNA
cacaataacagtatccaccatatctacccgcgcatcgcccgtgtgcgtagcatggaagagatcctcaacgcgtta

SEQ ID NO: 581055 - DNA, 75 bp, synthetic construct
  source 1..75: mol_type = other DNA
gcgtattattctcccggttcaccgttgctcgatacccgtaaactctatagccaaagttgggacgccgggctgcgc

SEQ ID NO: 581056 - DNA, 75 bp, synthetic construct
  source 1..75: mol_type = other DNA
acataaaatcaactggatttatattagaaaacagaatatcagaaatcctgatcgacaataaatggaatgtaataa

SEQ ID NO: 581057 - DNA, 75 bp, synthetic construct
  source 1..75: mol_type = other DNA
attaactctttgattaaagaacagaaaaatgttatttttcgctcccgaactactaatctaggtgtaattaaaaca

SEQ ID NO: 581058 - DNA, 75 bp, synthetic construct
  source 1..75: mol_type = other DNA
atgtgggtgttgaatttcccatttacgacgctaaaagtagatcgtttaaatcgcaggtggcaaatttaacccgtg

SEQ ID NO: 581059 - DNA, 75 bp, synthetic construct
  source 1..75: mol_type = other DNA
agcaaagaaaagattccaggagttgcaggagagggcaaaggttgttgtgctatcttcccatgacaacaatgtcat

SEQ ID NO: 581060 - DNA, 75 bp, synthetic construct
  source 1..75: mol_type = other DNA
acaaagagattagtgataccgtttttaacaaccagtcaaatcttattattctaaacatttcgcaccattataata

SEQ ID NO: 581061 - DNA, 75 bp, synthetic construct
  source 1..75: mol_type = other DNA
tttggtcgttatgattcgtcggcgacgctcgatgagatgaagcaatacaccgtccagtgggcaaacaatgtcatc

SEQ ID NO: 581062 - DNA, 75 bp, synthetic construct
  source 1..75: mol_type = other DNA
ttctcatatgatatctgtatgcaaagctttttacttccgtttgtcttgagttatttcggaaaagataaaaaagag

SEQ ID NO: 581063 - DNA, 75 bp, synthetic construct
  source 1..75: mol_type = other DNA
ttttatacatcattgatgttttaggtgatgaagatcttgattccccgagtgacatcaaaatcaataataaaccag

SEQ ID NO: 581064 - DNA, 75 bp, synthetic construct
  source 1..75: mol_type = other DNA
gcgataccgtgcgttatctgccggagtcctttgagatcccctggaatccgaacacccgtaccgaggtgagcaccc

SEQ ID NO: 581065 - DNA, 75 bp, synthetic construct
  source 1..75: mol_type = other DNA
atggttggcgggttgaatggcggcaaagtgttacgtgtcgtcggcatggcggcaacgatgcgcttaaacgatcgc

SEQ ID NO: 581066 - DNA, 75 bp, synthetic construct
  source 1..75: mol_type = other DNA
ccagagacctgaagcttcaagttggcgggcaatgatattctccactacatttggcctgatcatcttctcactcaa

SEQ ID NO: 581067 - DNA, 75 bp, synthetic construct
  source 1..75: mol_type = other DNA
ttcgtatacctgctgaaacagtggaatgcgctgaacgtgtatcccggacatacgtccagatgcggcctgtttttg

SEQ ID NO: 581068 - DNA, 75 bp, synthetic construct
  source 1..75: mol_type = other DNA
gaaacaaaaaaacacccgttagggtgttcaataattggttgcgggggccggatttgaaccgacgaccttcgggtt

SEQ ID NO: 581069 - DNA, 75 bp, synthetic construct
  source 1..75: mol_type = other DNA
ccacatgaaagacaaccgctgggtgcctggctggatgtgtgcaccgcatccacagacggatgccactgaacgcac

SEQ ID NO: 581070 - DNA, 75 bp, synthetic construct
  source 1..75: mol_type = other DNA
atgcagagttccacatgaaagacaaccgctgggtgcctggctggatgtgtgcaccacgtccacagacggatgcca

SEQ ID NO: 581071 - DNA, 75 bp, synthetic construct
  source 1..75: mol_type = other DNA
cctcttacttagatcatcgccctcctaccaccatcaaaccggttaacgccgaggttgccgtcttacagcagcaaa

SEQ ID NO: 581072 - DNA, 75 bp, synthetic construct
  source 1..75: mol_type = other DNA
ctcaaattgcacctaactatcatcggaatacgatattgttgggtaatggtgcaagcattgctgtttcaccggtcc

SEQ ID NO: 581073 - DNA, 75 bp, synthetic construct
  source 1..75: mol_type = other DNA
ggaagtggaagtgccgatggccaactccaccgtgaacaccaacgaattcgccaaactgagcccgtctctggcggc

SEQ ID NO: 581074 - DNA, 75 bp, synthetic construct
  source 1..75: mol_type = other DNA
ccacattgctcgcgctcgtccttgccacaaatttcccggttgcgcacgccgccgtaccaaaagatatgctggtga

SEQ ID NO: 581075 - DNA, 75 bp, synthetic construct
  source 1..75: mol_type = other DNA
acggaatgcagatcccccccccagtcctcaacgtggatctgcatgtgcttccggatttcaccggacgcgtggttc

SEQ ID NO: 581076 - DNA, 75 bp, synthetic construct
  source 1..75: mol_type = other DNA
cgtttatcgaaatggcgcgcgaaatggagctgagatttgaggaggtagctggtggcactgacagcgatacgaatt

SEQ ID NO: 581077 - DNA, 75 bp, synthetic construct
  source 1..75: mol_type = other DNA
agccagggccagcgatacctcgagctggcagagcagcgcccggctaacgagtcattcgcgtatggctggatccgg

SEQ ID NO: 581078 - DNA, 75 bp, synthetic construct
  source 1..75: mol_type = other DNA
cgtgagcaggctctggcgatccttgagtctgattactggtatggcccgcgctttgaccaggtggcggaagtatca

SEQ ID NO: 581079 - DNA, 75 bp, synthetic construct
  source 1..75: mol_type = other DNA
cgatgcgtttgcgaaagggaaaacattccactactactctctggcagtcatgatttcagcgaaacaattaataac

SEQ ID NO: 581080 - DNA, 75 bp, synthetic construct
  source 1..75: mol_type = other DNA
gccgtttctgaacttgatttattaggttgggaaagtgatgatataatagtaagtaatgaggaaagaatccagata

SEQ ID NO: 581081 - DNA, 75 bp, synthetic construct
  source 1..75: mol_type = other DNA
aaatcattaagacatttgcaaaagattttaatgacaaaacctacggttttactgaaaaggaacccattcgcccag

SEQ ID NO: 581082 - DNA, 75 bp, synthetic construct
  source 1..75: mol_type = other DNA
atgacagcagaacagattatcgaggggatcctcggcaaagagggtggttatgtcgatcacccctctgataaaggc

SEQ ID NO: 581083 - DNA, 75 bp, synthetic construct
  source 1..75: mol_type = other DNA
gccacgcgggccggtgtgctggaggtgttatttgcccggcagtatctggagaagagcgggaagcatatccggtca

SEQ ID NO: 581084 - DNA, 75 bp, synthetic construct
  source 1..75: mol_type = other DNA
gcaggtacatgcgcttattgaaaaagagggcgtccggttccgggctggctgggtgcccgttgagcagtactgtga

SEQ ID NO: 581085 - DNA, 75 bp, synthetic construct
  source 1..75: mol_type = other DNA
acccctgatagggctgggaaaatcttagcatcgttaagagactcacaagagatatggagcattattgaagggttt

SEQ ID NO: 581086 - DNA, 75 bp, synthetic construct
  source 1..75: mol_type = other DNA
agcgcctgctcggcaagaaaacatggaaaatgaactcctcaaagaagccgttgaatatggacgggcaaaaaagtg

SEQ ID NO: 581087 - DNA, 75 bp, synthetic construct
  source 1..75: mol_type = other DNA
atgacggtcacccttgttgcccggcaacatggtgtggcagccagccagctatttctctggcgtaagcaataccag

SEQ ID NO: 581088 - DNA, 75 bp, synthetic construct
  source 1..75: mol_type = other DNA
gtggtcagacgggatcaggagatcgccacatttgtgccggtttcctggtggcaggtgattgtctggctggaaaag

SEQ ID NO: 581089 - DNA, 75 bp, synthetic construct
  source 1..75: mol_type = other DNA
ggatttccgggggtatacgctggccggttatgcgtcaccgtatcaggagaacgtgctgacactggacccgacgac

SEQ ID NO: 581090 - DNA, 75 bp, synthetic construct
  source 1..75: mol_type = other DNA
gaagcctccagtactcggtgggaagaaatcgatcttcatgcaaagctctggacgattcctgccgaacggatgaag

SEQ ID NO: 581091 - DNA, 75 bp, synthetic construct
  source 1..75: mol_type = other DNA
aaagcatatagtgaaattaaatatgatggtaagtataaagacttactaggaaaagttagaagtcatacacctgag

SEQ ID NO: 581092 - DNA, 75 bp, synthetic construct
  source 1..75: mol_type = other DNA
gctgtaaccgagttcgaacagcatcgcgacgagcacgcctgcaaattgaactcaaccgacgacgcaccctgtcag

SEQ ID NO: 581093 - DNA, 75 bp, synthetic construct
  source 1..75: mol_type = other DNA
atggtggatgtaatacccactgatggcatcgttccgctctatatcaatccacaaggcgtggcgaaactgctgcgt

SEQ ID NO: 581094 - DNA, 75 bp, synthetic construct
  source 1..75: mol_type = other DNA
gcgaagggcaaatctggcgtcgcgaagtgagttcccgatacggccagtatccgaaagcgcaggcggcgcaacccg

SEQ ID NO: 581095 - DNA, 75 bp, synthetic construct
  source 1..75: mol_type = other DNA
catcgggcagtaacgtcgtttcagcctgtaaacagcactatgattattgctgccagatcctggacggcgaagagg

SEQ ID NO: 581096 - DNA, 75 bp, synthetic construct
  source 1..75: mol_type = other DNA
ataccgcgaccatcgttctgaatgggcgaatcatcacggatatcgctgcgggggactacgtcacgctgacgccat

SEQ ID NO: 581097 - DNA, 75 bp, synthetic construct
  source 1..75: mol_type = other DNA
cgctgggtgaggattacacgccttcagacatttttgacagtgtgccgttccgtggggtgatgctggggtcagatg

SEQ ID NO: 581098 - DNA, 75 bp, synthetic construct
  source 1..75: mol_type = other DNA
acgcctgtgctgagttatccgttattccacaggccacggaaacataccagtttgcgtcacagcagttgctgctga

SEQ ID NO: 581099 - DNA, 75 bp, synthetic construct
  source 1..75: mol_type = other DNA
tctccccgactcactctaacccttaatggtcgcaaaattaaagcctgggatcccttcctcagcgggcatccttcc

SEQ ID NO: 581100 - DNA, 75 bp, synthetic construct
  source 1..75: mol_type = other DNA
tatccagaacaatcacagcggcttcctgttctaccatgccagtataactgaacgagcagacggcaagcgctctac

SEQ ID NO: 581101 - DNA, 75 bp, synthetic construct
  source 1..75: mol_type = other DNA
acattgttaaactgaaatcaggcggacctgacatgactatcaggtcattttcatctacccacggtaactcttttc

SEQ ID NO: 581102 - DNA, 75 bp, synthetic construct
  source 1..75: mol_type = other DNA
agacaccggctacccggacccgcgcggggaactggacccggaagccgaccccggcctgctgtatgcaggacagtg

SEQ ID NO: 581103 - DNA, 75 bp, synthetic construct
  source 1..75: mol_type = other DNA
cagtacgccagaaaccgataacacctggccgattgaagtcaccgctgaagatgtcaaaggcaatttgttcgaatc

SEQ ID NO: 581104 - DNA, 75 bp, synthetic construct
  source 1..75: mol_type = other DNA
gcacaagaggtttcaagaaagaagctcaatttaataatacgagttatgtcgaacgagttatgaagaacgcttatg

SEQ ID NO: 581105 - DNA, 75 bp, synthetic construct
  source 1..75: mol_type = other DNA
gcgattggggataaaatcatttatagactcagaagtgtgggggtatttagatgaagcaatgttaaaactgaataa

SEQ ID NO: 581106 - DNA, 75 bp, synthetic construct
  source 1..75: mol_type = other DNA
aggctgacgggtatcttcagcccggacggcacatcacagcgcaccggctatgacgaacgcgggcgggtgaatgtc

SEQ ID NO: 581107 - DNA, 75 bp, synthetic construct
  source 1..75: mol_type = other DNA
ggatcccgacattgaaaaacggtgtctggcagaaggccagccctatgttgcaggcgcgttttgcacattgtggac

SEQ ID NO: 581108 - DNA, 75 bp, synthetic construct
  source 1..75: mol_type = other DNA
gatcccggcactgtgtggaagagactcactcagcctgcaggatattctttccggcatccgggaatgtccgcctga

SEQ ID NO: 581109 - DNA, 75 bp, synthetic construct
  source 1..75: mol_type = other DNA
tgatgatgccgccatcctggtggactgtgccgcaccggtgttcagcgccaaccagctgacactggacgaggtcat

SEQ ID NO: 581110 - DNA, 75 bp, synthetic construct
  source 1..75: mol_type = other DNA
aaaatgatgagtgatgcccgtctgtcggggctggatatcgtcgcactggttgcaggtcatcgcacggcggacggt

SEQ ID NO: 581111 - DNA, 75 bp, synthetic construct
  source 1..75: mol_type = other DNA
atttgatccatgtaccaatattaaaattggtgcggatattctgacaaaaaactatcttgctaaaaaaggaggaaa

SEQ ID NO: 581112 - DNA, 75 bp, synthetic construct
  source 1..75: mol_type = other DNA
ttatggttgctggtgatgctgataatcaggcgcaggttgattatcgcgcgagaaaggccatggctgacgcccgtc

SEQ ID NO: 581113 - DNA, 75 bp, synthetic construct
  source 1..75: mol_type = other DNA
atgagcagaaaaacccaacgttactctaaagagttcaaagccgaagctgtcagtacacctcataaaatggaagac

SEQ ID NO: 581114 - DNA, 75 bp, synthetic construct
  source 1..75: mol_type = other DNA
gcgtggtctggcgttaccgctatgacgctgatggcctgtgtaccgccagggtcaacggcctggaggaaaccatcc

SEQ ID NO: 581115 - DNA, 75 bp, synthetic construct
  source 1..75: mol_type = other DNA
cggagacctcgcgcagcggtgagacaacgcggtacagctatgatgacccggcgagtgagctgccgacagggatac

SEQ ID NO: 581116 - DNA, 75 bp, synthetic construct
  source 1..75: mol_type = other DNA
agcgaaaaaattattaatcacaataccgcagcaggaatgtttatgggaaccccgccgcgctggctggcggtattt

SEQ ID NO: 581117 - DNA, 75 bp, synthetic construct
  source 1..75: mol_type = other DNA
atattattgcagcgaccacattttccacatgggagaatgtttttcttgaggcgcttcatacagacgataacgcta

SEQ ID NO: 581118 - DNA, 75 bp, synthetic construct
  source 1..75: mol_type = other DNA
aatttaaaatcggcgacattgtttatttggtttcaggcggcccggcgatggctgttcaggagccaatcataaaca

SEQ ID NO: 581119 - DNA, 75 bp, synthetic construct
  source 1..75: mol_type = other DNA
gcataaacgtgctgatgaccttttcgattgttacacctatgggttgatcatcgcgcacggtaattacgcggcgtt

SEQ ID NO: 581120 - DNA, 75 bp, synthetic construct
  source 1..75: mol_type = other DNA
acataaacgtgctgatgaccttttcgattgttacacctacggattgattatcgcgcacggtaattacgcggaatt

SEQ ID NO: 581121 - DNA, 75 bp, synthetic construct
  source 1..75: mol_type = other DNA
ctgccatagaaagcactctggccagggacgctgataatctttctaagatctgggcgctggataatgttcaacgct

SEQ ID NO: 581122 - DNA, 75 bp, synthetic construct
  source 1..75: mol_type = other DNA
gcgtgcgctttgtcgatggtgtacagcattttcgcagactaccagacattgaattaagtaaacttatccgggagg

SEQ ID NO: 581123 - DNA, 75 bp, synthetic construct
  source 1..75: mol_type = other DNA
tgtgccgaatccttgtgggtgggttgatccgctgggattggctgcaagttctaaaatcagcagtttgatggacta

SEQ ID NO: 581124 - DNA, 75 bp, synthetic construct
  source 1..75: mol_type = other DNA
gtgggggatgtcagaggttacatcaacggatatctacgtaaaattcccggtggctttcacaagaccaccactgtt

SEQ ID NO: 581125 - DNA, 75 bp, synthetic construct
  source 1..75: mol_type = other DNA
ctgcttcaggttgatggttccgggtcagggcttgatgccgatttggtgcgcgggctacctgctgattttggtagt

SEQ ID NO: 581126 - DNA, 75 bp, synthetic construct
  source 1..75: mol_type = other DNA
ggctctcgaaaaccttggtttaccggaattactgaacctgaagagagataagacagataacagattctcgacttt

SEQ ID NO: 581127 - DNA, 75 bp, synthetic construct
  source 1..75: mol_type = other DNA
tcacaatcacacttgatcagcctgctacatcaaatattacatggaaagcatccctgccgattcgtgttacttacc

SEQ ID NO: 581128 - DNA, 75 bp, synthetic construct
  source 1..75: mol_type = other DNA
tggtgccagaggattacacgtatcaggtgtatgtctgcgatgagtcagggatgcccgcactacgtcgtcgtctgg

SEQ ID NO: 581129 - DNA, 75 bp, synthetic construct
  source 1..75: mol_type = other DNA
gctgcacggcgtagccttgcaagcagccgttatgatctggtggatcgcaacaacaacatcgttctggaatatcgc

SEQ ID NO: 581130 - DNA, 75 bp, synthetic construct
  source 1..75: mol_type = other DNA
atgttttccccctttcgaaaacctgaagtacgtctgctgaaaaataccgctgcgggcgtcattttttcggtgaaa

SEQ ID NO: 581131 - DNA, 75 bp, synthetic construct
  source 1..75: mol_type = other DNA
ctgtggctgcctctgctgcagtatccggttctgcgatggcgtgggctccaaacggcactggtggttctgttgacc

SEQ ID NO: 581132 - DNA, 75 bp, synthetic construct
  source 1..75: mol_type = other DNA
taaccgcaaatatgttttcggctggcattgtttctcgcctgaattctggcgacatgtttagtactttcgcatacg

SEQ ID NO: 581133 - DNA, 75 bp, synthetic construct
  source 1..75: mol_type = other DNA
tcgaagccaacacctacctcagcggtatcggctttgaaagcagcggccttgcgggggcacatgccatccataacg

SEQ ID NO: 581134 - DNA, 75 bp, synthetic construct
  source 1..75: mol_type = other DNA
tggcatttctgtggcaccgatcctgacgactgcgggggtaagcggcatcgcagtggggtttgctgcgcagagcct

SEQ ID NO: 581135 - DNA, 75 bp, synthetic construct
  source 1..75: mol_type = other DNA
ttactgtggttttcctgccttctctcaggtcttggcggcactcttttcgatccgccgcgttcggcgctggtggtc

SEQ ID NO: 581136 - DNA, 75 bp, synthetic construct
  source 1..75: mol_type = other DNA
ttcccggtcaccgcggatagcgtctacgccgccatccttaccgcggacctgcttgggcagcagtggctggcgcgt

SEQ ID NO: 581137 - DNA, 75 bp, synthetic construct
  source 1..75: mol_type = other DNA
tgattgcggatgacttcgtgatgaagctggcgggagagaaggtactaaacggcctgcacagtcatgacattagct

SEQ ID NO: 581138 - DNA, 75 bp, synthetic construct
  source 1..75: mol_type = other DNA
gatcgacgagaaaatcgccgcggtggcgaaagccacctgcgcggaaggggaaaccatccataatatgccgtttgc

SEQ ID NO: 581139 - DNA, 75 bp, synthetic construct
  source 1..75: mol_type = other DNA
gtgtgatttacgatccgcactcgcacggtcttatccattcgctctgctggcaggatgtcccgttaatacgtttct

SEQ ID NO: 581140 - DNA, 75 bp, synthetic construct
  source 1..75: mol_type = other DNA
gattctgcccatcaacatatgcataactgtggtcgggaattaatgctggctattgttgaaaatcacggtaatggt

SEQ ID NO: 581141 - DNA, 75 bp, synthetic construct
  source 1..75: mol_type = other DNA
tgaattaccttacgttcggctaatggattctgcccatcaacatatgcataactgtggtcgggaattaatgctggc

SEQ ID NO: 581142 - DNA, 75 bp, synthetic construct
  source 1..75: mol_type = other DNA
gatggaagcggcaaaagatgctttactgaccgcatttgatttttattttgaagataacgagctaatcccgttacc

SEQ ID NO: 581143 - DNA, 75 bp, synthetic construct
  source 1..75: mol_type = other DNA
cgaattttgacccgcttacgcctcccctttcgtattggtttaattgaagtttataccagctgttcagtaggtatt

SEQ ID NO: 581144 - DNA, 75 bp, synthetic construct
  source 1..75: mol_type = other DNA
aggctatccatatgaattcacttctgcggaacagcttttactggatttctttaaccatgtagacagagtgattgc

SEQ ID NO: 581145 - DNA, 75 bp, synthetic construct
  source 1..75: mol_type = other DNA
gtggaaaacgaagacggctctcacgttcctgttgcacagccaatcgtcatcaatgccgcagggtatccagtatat

SEQ ID NO: 581146 - DNA, 75 bp, synthetic construct
  source 1..75: mol_type = other DNA
ggataatctaacaggaaccaattttattagaataaacggcggcgtctataaatgcactccagttgcaactggaat

SEQ ID NO: 581147 - DNA, 75 bp, synthetic construct
  source 1..75: mol_type = other DNA
cacctattacacgccgaaagaagagtctattaagctgttccacgactatcttgatttgcaccgcagcaacccaaa

SEQ ID NO: 581148 - DNA, 75 bp, synthetic construct
  source 1..75: mol_type = other DNA
ctgtataaattcgtcaggttgcttgttctgtattcagcatcgggatattgagagtgaagatcatgtttggtctct

SEQ ID NO: 581149 - DNA, 75 bp, synthetic construct
  source 1..75: mol_type = other DNA
caaaatctacaaaatacgtttgcattcggacatctgcttgctgatatatgcaaagcactgacctcagaggcaact

SEQ ID NO: 581150 - DNA, 75 bp, synthetic construct
  source 1..75: mol_type = other DNA
acctgacggtatgctttttcctcttacccgcagcggagggaggattaaggaaaaagcccctcaatttgaaaatgt

SEQ ID NO: 581151 - DNA, 75 bp, synthetic construct
  source 1..75: mol_type = other DNA
tgaagactcccgcgtgattcgtcgcagtgcgctgcaatataaagtgcattatgacaccaccctgaacggtggttt

SEQ ID NO: 581152 - DNA, 75 bp, synthetic construct
  source 1..75: mol_type = other DNA
cccgatgaaatactgaccgaagatgcaggacgtctgtttgctgaatttaaacactgggcagatgagaaaatccgt

SEQ ID NO: 581153 - DNA, 75 bp, synthetic construct
  source 1..75: mol_type = other DNA
ccgtctgggtctggcgattggcggcgctattggttatatcggtggcggctggctgtttgacctgggcaaatcggc

SEQ ID NO: 581154 - DNA, 75 bp, synthetic construct
  source 1..75: mol_type = other DNA
atgaaaatatactcaatccttacagttatccttactacatgtcttctaactgcatgtaacagtgaaccatcgcaa

SEQ ID NO: 581155 - DNA, 75 bp, synthetic construct
  source 1..75: mol_type = other DNA
gctgaacaagctggatcgtgcccagaacggacaccttttacttcttgggccaaccggagcgggcaaatccgccac

SEQ ID NO: 581156 - DNA, 75 bp, synthetic construct
  source 1..75: mol_type = other DNA
tttctgtcaggatgaggacgacagcgaggcgtggctggcatcacttgcctcttacgccgcaccggaaatccgcga

SEQ ID NO: 581157 - DNA, 75 bp, synthetic construct
  source 1..75: mol_type = other DNA
agcctttatcacgttccgagtttgttgaacgaataccttattacctgcgacaagcaacagatgtaaacgaagcgc

SEQ ID NO: 581158 - DNA, 75 bp, synthetic construct
  source 1..75: mol_type = other DNA
atgatcaacacttgtcggactaaacgcactttttcccataagttcaagctagaggtggtgatgccaattagtaga

SEQ ID NO: 581159 - DNA, 75 bp, synthetic construct
  source 1..75: mol_type = other DNA
tatatatatctcgtacgtctgatcaaaaaagggcctgtacatgctgaggagcatcaggaggtaacggatggaaca

SEQ ID NO: 581160 - DNA, 75 bp, synthetic construct
  source 1..75: mol_type = other DNA
aaggacacctcacagaccacccgccagtcatttaaatccctcagaaagaaacgcagaaaaggtaagcagaaaaat

SEQ ID NO: 581161 - DNA, 75 bp, synthetic construct
  source 1..75: mol_type = other DNA
ccggcaccgtcctggattagccgggaggatttgtaccggatggcctcaagagccgatccccgtgagaacgctgcg

SEQ ID NO: 581162 - DNA, 75 bp, synthetic construct
  source 1..75: mol_type = other DNA
ctggggagcgccggggtgcgctgtcaccggatgaacggtctgcaggttcacagctggttactccggttatttaat

SEQ ID NO: 581163 - DNA, 75 bp, synthetic construct
  source 1..75: mol_type = other DNA
agccgtggcggggacagcagcggcgaacccgtatggtgatttatcgtcgtatcgcgaagaacaacagtgatccga

SEQ ID NO: 581164 - DNA, 75 bp, synthetic construct
  source 1..75: mol_type = other DNA
tctggcgctggcgatgacagagaaacatgaaaaggccgataggatgcggattatgaaggagacagggtgtagtga

SEQ ID NO: 581165 - DNA, 75 bp, synthetic construct
  source 1..75: mol_type = other DNA
aaaggtaacaatgacatgcggatcttaaccatcgatttagggaatggaaaaactaaaattggatttagtcctgac

SEQ ID NO: 581166 - DNA, 75 bp, synthetic construct
  source 1..75: mol_type = other DNA
ttatggaaggtaacgtgccaggtcatttcactgtcgatgtcagagaacaatattactgcgagtcagattgatggc

SEQ ID NO: 581167 - DNA, 75 bp, synthetic construct
  source 1..75: mol_type = other DNA
atggcgcagataacgacgaccgatgccaatgaattcagcagcagtgctgaattcatccccatgcgcggctttagc

SEQ ID NO: 581168 - DNA, 75 bp, synthetic construct
  source 1..75: mol_type = other DNA
gcccgcagagcgctgtcgtgacaggaccggcaggcgaggaaatcttctgcgacgaacatggtcgcgtgcgggtga

SEQ ID NO: 581169 - DNA, 75 bp, synthetic construct
  source 1..75: mol_type = other DNA
tgggttatgacgtcaaagtcggaaataacgttaccttcaccgttggtaaaacgaaaaaggatgataccgggcagt

SEQ ID NO: 581170 - DNA, 75 bp, synthetic construct
  source 1..75: mol_type = other DNA
tatgcttacgcgcctaatccagtaagctggatagatccgcttggtctgaaatgtggtgaattaagaaaccgtcgt

SEQ ID NO: 581171 - DNA, 75 bp, synthetic construct
  source 1..75: mol_type = other DNA
aagtgaaaccggcagtatctgcagagacgaccgtgtcagcagaatgcgcgcagcattccggaggcggtgatgccg

SEQ ID NO: 581172 - DNA, 75 bp, synthetic construct
  source 1..75: mol_type = other DNA
caagtgatgctgatgctgccaattatggtcaacgacgtggctggcgcgcctctgccgttaaatggatgtatgcca

SEQ ID NO: 581173 - DNA, 75 bp, synthetic construct
  source 1..75: mol_type = other DNA
aagcggtgctgctgtcagccggcaaactgtcggggtgttacacggaaggggtggtactggcgaagaaggtggagg

SEQ ID NO: 581174 - DNA, 75 bp, synthetic construct
  source 1..75: mol_type = other DNA
cttctagggatcaagaacatacggctggcctcccaagatctacatggggtcattctcagttccgaaaccgtcgcc

SEQ ID NO: 581175 - DNA, 75 bp, synthetic construct
  source 1..75: mol_type = other DNA
cggctacgctgtgtgccgtactttcccagatgatggcagtgcaccgtccccggttatttattgccgaagccggaa

SEQ ID NO: 581176 - DNA, 75 bp, synthetic construct
  source 1..75: mol_type = other DNA
actaccgtggatgatgttgggcatcattggcatcatcacttttcttgcgctgggttggcaatttagccaaaaacg

SEQ ID NO: 581177 - DNA, 75 bp, synthetic construct
  source 1..75: mol_type = other DNA
aggagaaatttcatcaaaaccattacgcattgtgatgatggaagtgccaccatgaccgacggagataagtttatt

SEQ ID NO: 581178 - DNA, 75 bp, synthetic construct
  source 1..75: mol_type = other DNA
tacggatgagtattcattttatgcagaagcccatctgccaaaaattaaaaatattgttgataacaaaacaggtga

SEQ ID NO: 581179 - DNA, 75 bp, synthetic construct
  source 1..75: mol_type = other DNA
taaactcaaaaattatcttaataaagaaaatgaaaacagcatttctggggcggaaatagagctatcactggaaaa

SEQ ID NO: 581180 - DNA, 75 bp, synthetic construct
  source 1..75: mol_type = other DNA
agtctatctggttagaggggaataagaaattcaatgcatccgtagatgtatctcctgtggttatcaggaatactg

SEQ ID NO: 581181 - DNA, 75 bp, synthetic construct
  source 1..75: mol_type = other DNA
cttacgaggcgttgatcaaccgtgccaacaaagaagacaaacccgctgccgctctggtatcggaactcataacag

SEQ ID NO: 581182 - DNA, 75 bp, synthetic construct
  source 1..75: mol_type = other DNA
gtatgtctgcgatgaatccggaatgcccgcactgcgccgccgcctggaaacgttgagcaaacttgccgttaaacc

SEQ ID NO: 581183 - DNA, 75 bp, synthetic construct
  source 1..75: mol_type = other DNA
atctcgcgcaccttgatggttttaatatcgaatggctggcacatgatgagcaggcggtagatgcgcgtctggcgc

SEQ ID NO: 581184 - DNA, 75 bp, synthetic construct
  source 1..75: mol_type = other DNA
acagcacccgcctacagattgccgccgctattgctgaagaggtttacgcgctggatctggatgatgaggcgttaa

SEQ ID NO: 581185 - DNA, 75 bp, synthetic construct
  source 1..75: mol_type = other DNA
gtatctggctaaaagtgactcgattgacgccctgctgctggcgcagctggcagcggttatcaacgtccgtcccga

SEQ ID NO: 581186 - DNA, 75 bp, synthetic construct
  source 1..75: mol_type = other DNA
taagaagtattattcgtgcagaaaagaaaaacatgtataatgaattgcgcgaaatgcggcaacagatttattctt

SEQ ID NO: 581187 - DNA, 75 bp, synthetic construct
  source 1..75: mol_type = other DNA
gattttttgactaaatatattaatttatcatggtctgatgctaaaaatttcttgcttaaaacatatggggagcaa

SEQ ID NO: 581188 - DNA, 75 bp, synthetic construct
  source 1..75: mol_type = other DNA
tcacgcaaaattatcggctggtccatgcaatcccggatgacaaaggacattgtcctgaacgcactgctgatggct

SEQ ID NO: 581189 - DNA, 75 bp, synthetic construct
  source 1..75: mol_type = other DNA
acctcggtttgtttatgcattttgaccgcctggagctgctggcgtttgttattccggtatggctggcgaatatcc

SEQ ID NO: 581190 - DNA, 75 bp, synthetic construct
  source 1..75: mol_type = other DNA
aatggtcgggcatcacgccagaaaagttcatgcagcaagtggatgcttacatcagatggtataacgagcggcgta

SEQ ID NO: 581191 - DNA, 75 bp, synthetic construct
  source 1..75: mol_type = other DNA
tcagccgtaaccgtcgtcgtcgctacagctcatattgcggagaaatcggaccggctccggataaccttattgcca

SEQ ID NO: 581192 - DNA, 75 bp, synthetic construct
  source 1..75: mol_type = other DNA
atatcacggagttccagctccctgcaggtaaagtctggctgtcaccggtggtggactgcttcgatggaaaagttg

SEQ ID NO: 581193 - DNA, 75 bp, synthetic construct
  source 1..75: mol_type = other DNA
atgaaaaaacctatttcaggagaaccggtcaacgggaaaatgtatttttccgggagtttacgggatcatgtttgc

SEQ ID NO: 581194 - DNA, 75 bp, synthetic construct
  source 1..75: mol_type = other DNA
cgaggccgccgcacggtttaatatctcaaatgaatccgttgtccggcactgggtgaaggtctacaaagacattag

SEQ ID NO: 581195 - DNA, 75 bp, synthetic construct
  source 1..75: mol_type = other DNA
tgacagaactacagacatgggctggtgaaaatggtctgatctttacgggagcacatgaccctgaggtgtactggc

SEQ ID NO: 581196 - DNA, 75 bp, synthetic construct
  source 1..75: mol_type = other DNA
gccgatccacaaaccctcgacccggcggtaacaatagataataacgactggacagtgacctacccgtcttatcag

SEQ ID NO: 581197 - DNA, 75 bp, synthetic construct
  source 1..75: mol_type = other DNA
aataaaagtttaagatgtactctttttatactatgggcactgagtgctgagggttcaattattttaactgcgaga

SEQ ID NO: 581198 - DNA, 75 bp, synthetic construct
  source 1..75: mol_type = other DNA
cttccgccaggggccggtggaatggctctggcgtcagttaactttgcgtgctgccggaccggcaatatctaaaac

SEQ ID NO: 581199 - DNA, 75 bp, synthetic construct
  source 1..75: mol_type = other DNA
gaaggatttatcgcagaagcgagattgagtcaattgttgagaaagtaaaagaattgatggctatccttccggctt

SEQ ID NO: 581200 - DNA, 75 bp, synthetic construct
  source 1..75: mol_type = other DNA
ccgttgttgaagtctggcgagaaaacaatctttatgattttagcgaagatgctatgctgttgtgtaaacagacac

SEQ ID NO: 581201 - DNA, 75 bp, synthetic construct
  source 1..75: mol_type = other DNA
tcctctacacgctggcgaatgacggtgcatccattatcaatccggcggtcttaaaggaacatgcggcggatgatg

SEQ ID NO: 581202 - DNA, 75 bp, synthetic construct
  source 1..75: mol_type = other DNA
taattattttttatttgtcgcgttttgttagtgataatgctatcgattttttatgtttaattatcaccttacatt

SEQ ID NO: 581203 - DNA, 75 bp, synthetic construct
  source 1..75: mol_type = other DNA
ctgcctggcgcattcatcacagtcgcctgattcgctttgatggcgtcacgctgccatttcagcagaagatgaccg

SEQ ID NO: 581204 - DNA, 75 bp, synthetic construct
  source 1..75: mol_type = other DNA
agacgaagcgccgccaggcatcggcgaacttggcgacaacccgccagagtcgccaggcggagatccgatatcgaa

SEQ ID NO: 581205 - DNA, 75 bp, synthetic construct
  source 1..75: mol_type = other DNA
atgcagatcttgccaactattacgaccgggtgagctcattgcaggagcgccgcttacggctgccgatgcgccgga

SEQ ID NO: 581206 - DNA, 75 bp, synthetic construct
  source 1..75: mol_type = other DNA
agcagatcagcggtgccgttggtatcccgctggtgcgactgttcggtcaatccccgaaaggcttctctactggtg

SEQ ID NO: 581207 - DNA, 75 bp, synthetic construct
  source 1..75: mol_type = other DNA
gtagggatgcagacgcctaaccagcactcagcatcgacctaccgggctaacttcaccagccgcaaccgcatgctg

SEQ ID NO: 581208 - DNA, 75 bp, synthetic construct
  source 1..75: mol_type = other DNA
tggatgatcgacccggtactgacccgccgcattaaagatatggggccggacctgggtaaacctgagttttacgat

SEQ ID NO: 581209 - DNA, 75 bp, synthetic construct
  source 1..75: mol_type = other DNA
ccaggcagccccggaggggctgcattacccaatatcaagagggctgaaagccgagcagatgcgggaactgctgaa

SEQ ID NO: 581210 - DNA, 75 bp, synthetic construct
  source 1..75: mol_type = other DNA
gggatatcgctcaggcgcgcgtttgcgaggtgattgtcggcattttgtgcggcggcatgatgatgatgatcctgc

SEQ ID NO: 581211 - DNA, 75 bp, synthetic construct
  source 1..75: mol_type = other DNA
atggtccttgcgcaatttgccctggttcagggccacgctgacgcaatagcgttatgcgttatgcgttatgcgtta

SEQ ID NO: 581212 - DNA, 75 bp, synthetic construct
  source 1..75: mol_type = other DNA
cggggaaatgaaaatctggaggttaaacagagccgcggtgttcgtgacggtgggcagggaattccggttgcactg

SEQ ID NO: 581213 - DNA, 75 bp, synthetic construct
  source 1..75: mol_type = other DNA
aacgcacacagactggtactgcagggtgaatcaatgaggaaaaagaaaccggtaatggaagaggtggaaaaaaca

SEQ ID NO: 581214 - DNA, 75 bp, synthetic construct
  source 1..75: mol_type = other DNA
tgttcttggcgaacaggcttgtcgccataaacacaatgttcagtactggcgcgccggtcgcctgttcgaaacgct

SEQ ID NO: 581215 - DNA, 75 bp, synthetic construct
  source 1..75: mol_type = other DNA
aatgatgctgatactttggaattcgattccaaaacaaaaaaaatacaagaagaatttgcaaagatatttcctttt

SEQ ID NO: 581216 - DNA, 75 bp, synthetic construct
  source 1..75: mol_type = other DNA
tgcagtaactattcagaaagatttaataatattaagctactttcaaattcagaacggatggggggcgcaagtgct

SEQ ID NO: 581217 - DNA, 75 bp, synthetic construct
  source 1..75: mol_type = other DNA
aaatctattgttttcagttaacttttataagttgcgacgctcatataaagataagatttttattttaatctttat

SEQ ID NO: 581218 - DNA, 75 bp, synthetic construct
  source 1..75: mol_type = other DNA
aattatcgtggagcttacggtaatacgaatgtcggtaatgactccaacttattgatagtgttttatgttcagata

SEQ ID NO: 581219 - DNA, 75 bp, synthetic construct
  source 1..75: mol_type = other DNA
tattacgctgtctggcgtaggcctgataagacgcggcaagcgtcgcatcaggcgttgatgtcggatgcggcgtaa

SEQ ID NO: 581220 - DNA, 75 bp, synthetic construct
  source 1..75: mol_type = other DNA
gggagttatgtttgtcttatgtttattatcgataaaaataccattgtgggattattaaacaatgctttgccaaaa

SEQ ID NO: 581221 - DNA, 75 bp, synthetic construct
  source 1..75: mol_type = other DNA
aatattcttaaagatataacctatcatgattggtttatatatgcttttgcaagatcaaataattataaatggatc

SEQ ID NO: 581222 - DNA, 75 bp, synthetic construct
  source 1..75: mol_type = other DNA
gttgaatcattgcgtggtcagatcctttggatattcagcaaagaaggtcaggaatattttcttgccgaacatcca

SEQ ID NO: 581223 - DNA, 75 bp, synthetic construct
  source 1..75: mol_type = other DNA
gaattcaatccgacacaggaagatcgggaccgtgccgaaatgatgtgccgggaacgggaaagaagaattatggac

SEQ ID NO: 581224 - DNA, 75 bp, synthetic construct
  source 1..75: mol_type = other DNA
gctcattgccacgcgtgagaatatcagatactggataatgccgcaggcggatcgccgtaaccatgccaggaatat

SEQ ID NO: 581225 - DNA, 75 bp, synthetic construct
  source 1..75: mol_type = other DNA
gaactttccatccagggggagaaaacttgtcgttttgagccgttcggtgttcagaacgcacgaaaccgatcgcgc

SEQ ID NO: 581226 - DNA, 75 bp, synthetic construct
  source 1..75: mol_type = other DNA
agatgggatctaaaatcctcgtgcagaactttccatccagggggagaaaacttgtcgttttgagccgttcggtgt

SEQ ID NO: 581227 - DNA, 75 bp, synthetic construct
  source 1..75: mol_type = other DNA
ttttaccaggacactatcaacgctttctacggcaagaagcagtatctgtttaatccaccgtgggaatctctggca

SEQ ID NO: 581228 - DNA, 75 bp, synthetic construct
  source 1..75: mol_type = other DNA
gtgtgagataaagaattgcaattttgacaattcagaaatgaattttatttcatgcgtcgggacaaattttagcgg

SEQ ID NO: 581229 - DNA, 75 bp, synthetic construct
  source 1..75: mol_type = other DNA
caacgacattgttacatttgattttattagtgctgatcaccaccataattttagcacaaccatagctttaacaaa

SEQ ID NO: 581230 - DNA, 75 bp, synthetic construct
  source 1..75: mol_type = other DNA
aacaaccataacgcacaggttataatcgatgaaaacatccatttacatccctatgaattaccagaatcatcacaa

SEQ ID NO: 581231 - DNA, 75 bp, synthetic construct
  source 1..75: mol_type = other DNA
ttagcacaaccatagctttaacaaatgatagcttccatatatcttcaataaacaaccataacgcacaggttatat

SEQ ID NO: 581232 - DNA, 75 bp, synthetic construct
  source 1..75: mol_type = other DNA
tctggattttcttaataatgatttatataaaaatgatggcgagattctttcttataaagaatcaataatgatgtt

SEQ ID NO: 581233 - DNA, 75 bp, synthetic construct
  source 1..75: mol_type = other DNA
caacaaagtggacgaataatactctaaaatattggttctccagttgtaataaacgtaatatcatcttcacactta

SEQ ID NO: 581234 - DNA, 75 bp, synthetic construct
  source 1..75: mol_type = other DNA
atttctgagcaaggtcgccagcgtcggcctcgaacccgctatacaccattacgcaatgcagcaaaaactgaaaga

SEQ ID NO: 581235 - DNA, 75 bp, synthetic construct
  source 1..75: mol_type = other DNA
agtgatatttctccgatcagtttattgtctgggcgcgaaatagatgatttcgatgttaataacatttctttttac

SEQ ID NO: 581236 - DNA, 75 bp, synthetic construct
  source 1..75: mol_type = other DNA
ccctgccggctggcgctcatcagcacggaaggggcaacagcgtggtgcgcagaatatgatgaatggggcaacctg

SEQ ID NO: 581237 - DNA, 75 bp, synthetic construct
  source 1..75: mol_type = other DNA
atgagtgctgatcaccaccataattttagcacaaccatagctttaacaaatgatagcttccatatatcttcaata

SEQ ID NO: 581238 - DNA, 75 bp, synthetic construct
  source 1..75: mol_type = other DNA
cggtgacgaatccgccgaagccctcgcagttgttaaagtccggggcgatgatttctatgggcggcacgacgctga

SEQ ID NO: 581239 - DNA, 75 bp, synthetic construct
  source 1..75: mol_type = other DNA
ttgttacgtataatagagagtctcttttaaaagaagtcctttcatcgataaagcatttaaaagataaaccgaaac

SEQ ID NO: 581240 - DNA, 75 bp, synthetic construct
  source 1..75: mol_type = other DNA
tacaaatatattttagatagctcattttcaaatttacagcatttattccccaaaggagaactacagaagatacaa

SEQ ID NO: 581241 - DNA, 75 bp, synthetic construct
  source 1..75: mol_type = other DNA
cgaaccagaagtgggcgggagacatcacgtacttacgtacagatgaaggctggctgtatctggctgtggtcattg

SEQ ID NO: 581242 - DNA, 75 bp, synthetic construct
  source 1..75: mol_type = other DNA
tagtggtcgaatcttccagataccggaagagacgattaagtgtcagccgttcgagtgtcctgatcacttctacgt

SEQ ID NO: 581243 - DNA, 75 bp, synthetic construct
  source 1..75: mol_type = other DNA
gtcaaattattatgcgtaagtatttgcttttttttaatgagcggatggtatggtgaaaaattatattcgtttggt

SEQ ID NO: 581244 - DNA, 75 bp, synthetic construct
  source 1..75: mol_type = other DNA
cctgcacagtaagaaaatgggcttatgcctatcgggaacatgggataagcatacttacgggtaaaaaaggacgct

SEQ ID NO: 581245 - DNA, 75 bp, synthetic construct
  source 1..75: mol_type = other DNA
actacgatccgttgcaggggcggtatatcactcaggacccgatagggctggagggggggatggagtctgtatgcg

SEQ ID NO: 581246 - DNA, 75 bp, synthetic construct
  source 1..75: mol_type = other DNA
cgtatgaggccagaacgttgaccgatgacggattgattaccattgatccggggaatatatcggtaaccccataca

SEQ ID NO: 581247 - DNA, 75 bp, synthetic construct
  source 1..75: mol_type = other DNA
tatcggcagaccaggtggcggaatttacccggcagctggcgctggccgagtgggtcgacgggcgggttacggtcg

SEQ ID NO: 581248 - DNA, 75 bp, synthetic construct
  source 1..75: mol_type = other DNA
aggtttatcttccggctccaccctgcctctgtttgaacatgctgacgtcgaaattgccgtcgatttcctgcaacg

SEQ ID NO: 581249 - DNA, 75 bp, synthetic construct
  source 1..75: mol_type = other DNA
tatcaacgtattttagattgcgcattttcaaatttacagcatttacttcctaaaggacaattacagaagatacaa

SEQ ID NO: 581250 - DNA, 75 bp, synthetic construct
  source 1..75: mol_type = other DNA
atagggcgctgtatctgattttagttatgtctgcaggacctatcgcagttgcgacatttgttggtttattggtag

SEQ ID NO: 581251 - DNA, 75 bp, synthetic construct
  source 1..75: mol_type = other DNA
gatcatgctattaatcggcatcgtgaagaaaaacgccattatgatggtcgattttgcgcttgaagcccaacggca

SEQ ID NO: 581252 - DNA, 75 bp, synthetic construct
  source 1..75: mol_type = other DNA
atgggctacggtgttgatgaaaaagtgcaggtgccgcaaaaactgtatgaggcgggcgtgccaaccgtgctggtg

SEQ ID NO: 581253 - DNA, 75 bp, synthetic construct
  source 1..75: mol_type = other DNA
ggctggtacggagaacctgaacgaagaacaactggccgcgagagtaaggcgtgattcaatgattggtacgggcct

SEQ ID NO: 581254 - DNA, 75 bp, synthetic construct
  source 1..75: mol_type = other DNA
gggcattaaagggtatctggctttttttctcaccataatcttttttccggtgtttttccggaacagacagctggt

SEQ ID NO: 581255 - DNA, 75 bp, synthetic construct
  source 1..75: mol_type = other DNA
atcatagtgaaacccctggtcgaaaaaatgaaagcatttatgctgcatttaacggtgggatgaatttaggtgcat

SEQ ID NO: 581256 - DNA, 75 bp, synthetic construct
  source 1..75: mol_type = other DNA
aaagtaggcgcaccggtaaatggcctgaatgctgatatccacaaaggcgatacgaaagctaacatccctgtgaag

SEQ ID NO: 581257 - DNA, 75 bp, synthetic construct
  source 1..75: mol_type = other DNA
cgtgtaatgcgtcgagctgaaggtaaaaaactgggttatgtcattcttcctgttgttatccctgcaggtgaagag

SEQ ID NO: 581258 - DNA, 75 bp, synthetic construct
  source 1..75: mol_type = other DNA
tcttggctcgctttccagctgcgtgatgtaccagccgcggctggaatatgcgatggcaaaagacaatctgttctt

SEQ ID NO: 581259 - DNA, 75 bp, synthetic construct
  source 1..75: mol_type = other DNA
tatctgcgccgtcatcgttattgctactggtctgcctgcttacgccttctgggcgaagcgtagccgccagctcaa

SEQ ID NO: 581260 - DNA, 75 bp, synthetic construct
  source 1..75: mol_type = other DNA
atctatttggcagatttatttttcccacaactggaactttatcttgaaattgatgaagggcatcacaacagtgag

SEQ ID NO: 581261 - DNA, 75 bp, synthetic construct
  source 1..75: mol_type = other DNA
gaaagtgccgctgctgggcgatatcccattgattggtaacctgtttaaatcgacggcggataaaaaagaaaacgt

SEQ ID NO: 581262 - DNA, 75 bp, synthetic construct
  source 1..75: mol_type = other DNA
tccaaagagttttcaggacaccacgggtagcggcaccggcgatttacgtggcgttatccaacgcctggactatct

SEQ ID NO: 581263 - DNA, 75 bp, synthetic construct
  source 1..75: mol_type = other DNA
catttttatttgcaattactttgccgccaataatggtatggtttctagttgctaaatttacctacggtattgacg

SEQ ID NO: 581264 - DNA, 75 bp, synthetic construct
  source 1..75: mol_type = other DNA
aacttattttattggaaataaaccagtcagaactcgacaactgattattttgcaggatcccaatggatgttttga

SEQ ID NO: 581265 - DNA, 75 bp, synthetic construct
  source 1..75: mol_type = other DNA
ttggggtgtttgaagctatccctggtcaccatactggcaacatactagagtttcatcgtgtaagtacatcggtca

SEQ ID NO: 581266 - DNA, 75 bp, synthetic construct
  source 1..75: mol_type = other DNA
aagcatgtaagccgccgcatccagtctctactgagggatgaaaataatcagcttaaagtggacgatgctgcaaaa

SEQ ID NO: 581267 - DNA, 75 bp, synthetic construct
  source 1..75: mol_type = other DNA
taaaagcttttatgtatacatgtgcatcgttgcccataactaaagtttattcaaagccatctattccaagaaatg

SEQ ID NO: 581268 - DNA, 75 bp, synthetic construct
  source 1..75: mol_type = other DNA
tccgcaattccggttaccgcaatcagtactggatgcagagatcgcccgtattgaaaaaatgggcgtgaccattaa

SEQ ID NO: 581269 - DNA, 75 bp, synthetic construct
  source 1..75: mol_type = other DNA
tgagcaggatgactcggagaactggtgtgaaattcaaaaattgctgaaaggccaccgcgcccgcaacagtaaact

SEQ ID NO: 581270 - DNA, 75 bp, synthetic construct
  source 1..75: mol_type = other DNA
aaagatatggcgctggaagatttccaccgcagcgcgctggcgattcagggctggctaccccgtttcattgaattt

SEQ ID NO: 581271 - DNA, 75 bp, synthetic construct
  source 1..75: mol_type = other DNA
cccaattggtatggcttgcgaaggtgatatgttccgcgctactgcgggcgtaaacacgcataaaggcagcatttt

SEQ ID NO: 581272 - DNA, 75 bp, synthetic construct
  source 1..75: mol_type = other DNA
tcattcgatatcaattatcctactaaaaatgttattttcaaaaataatactatttattctaccaaaggtggtatc

SEQ ID NO: 581273 - DNA, 75 bp, synthetic construct
  source 1..75: mol_type = other DNA
aaccatgtccgcaaagcggttctgtttattgaagggataacggtaagccacgacccagttgccgtttgtggtggc

SEQ ID NO: 581274 - DNA, 75 bp, synthetic construct
  source 1..75: mol_type = other DNA
agttttggcgagttcattgcactaggcgacaaaaagggtgatgtgcccaagctattcgataacttctcgttgggc

SEQ ID NO: 581275 - DNA, 75 bp, synthetic construct
  source 1..75: mol_type = other DNA
gcgcaaggaaggcggcaagatttttggcagcggtagtcgagcccccatagccatttccctgctgatcaaaaatcc

SEQ ID NO: 581276 - DNA, 75 bp, synthetic construct
  source 1..75: mol_type = other DNA
ttgatcgatgtaccgctggaacctcgcgcctacccacaagggttgtgtaaatcccactggggactaaacgaagtt

SEQ ID NO: 581277 - DNA, 75 bp, synthetic construct
  source 1..75: mol_type = other DNA
ctgatttttggcaactgggataccagcgcaccgggcctgcgtgattacctgggtgacattgcctggtatctggat

SEQ ID NO: 581278 - DNA, 75 bp, synthetic construct
  source 1..75: mol_type = other DNA
ccgcgagttctataagtgcggcgttcaatgaagatacccccttcgatggatcgtatggaattttcgaacttaaca

SEQ ID NO: 581279 - DNA, 75 bp, synthetic construct
  source 1..75: mol_type = other DNA
agcgttggttgatgtcctgcattcaaaagagatccaggactggatccgtactaaatataaaggtgcggtgatccc

SEQ ID NO: 581280 - DNA, 75 bp, synthetic construct
  source 1..75: mol_type = other DNA
ttatgtactgcctgaatactcgggggataaaagaatggatgagtatcgaatttactcaaaccaggtgtcgattga

SEQ ID NO: 581281 - DNA, 75 bp, synthetic construct
  source 1..75: mol_type = other DNA
aaataacaaccttagcctgtgggggaatgtcggtgtgcaactaggtgataaaggctatagcgatactcagggcat

SEQ ID NO: 581282 - DNA, 75 bp, synthetic construct
  source 1..75: mol_type = other DNA
aaactgccgctgacggaataccccgataccggcattgagtacgaacgtttttactggcgcgatctggagcccgag

SEQ ID NO: 581283 - DNA, 75 bp, synthetic construct
  source 1..75: mol_type = other DNA
gtgcaacaacgaagtcggtaacacactcacccttgagcagctgaaagcagaaaaccgcgcggtactggtcaccgt

SEQ ID NO: 581284 - DNA, 75 bp, synthetic construct
  source 1..75: mol_type = other DNA
gcagacaatgcgaaatgccaacattattttgcctactcgatgcttgttcatgtggcaacttctaactatctcacg

SEQ ID NO: 581285 - DNA, 75 bp, synthetic construct
  source 1..75: mol_type = other DNA
gaacgatgcctttgatcccgaaaaagccgctgatgccgccgcgagaaaacttggtggcctgatacgtttttttca

SEQ ID NO: 581286 - DNA, 75 bp, synthetic construct
  source 1..75: mol_type = other DNA
cagggacataacgactaccccatgatatccgggtatacccggtttatgatcaacccggaaacccgggtcatcgct

SEQ ID NO: 581287 - DNA, 75 bp, synthetic construct
  source 1..75: mol_type = other DNA
gtgccctgcgtaaaacactgacaaataagttaggttcagttcgagcacgtaagattctggccgaaaacttcccca

SEQ ID NO: 581288 - DNA, 75 bp, synthetic construct
  source 1..75: mol_type = other DNA
tacgtcaatgaccgcaaaacgggcactttcagtgctgacccgacgaatgccgcgaaggtcctgcccacacccgga

SEQ ID NO: 581289 - DNA, 75 bp, synthetic construct
  source 1..75: mol_type = other DNA
tcactgacaaaagcaattcaaacaatcttctatgcttcattatccctgaatcattatcaatactacaacgaagga

SEQ ID NO: 581290 - DNA, 75 bp, synthetic construct
  source 1..75: mol_type = other DNA
actgcccggcatgagcggccgcgcgacgccagtctgcccgaaagcggcggcgcagtgccagagcgggacgaccaa

SEQ ID NO: 581291 - DNA, 75 bp, synthetic construct
  source 1..75: mol_type = other DNA
gcctcgtggatgcttccgggaaacctgtagccagcggagaatcgaaggaagatctcctccgctggttgcccggtg

SEQ ID NO: 581292 - DNA, 75 bp, synthetic construct
  source 1..75: mol_type = other DNA
cagatgacgtggagccgctacgggcagttgctggcgttcactgactgctcgggctaccagacccgctatgaatac

SEQ ID NO: 581293 - DNA, 75 bp, synthetic construct
  source 1..75: mol_type = other DNA
aatatgatgaaccgggcaggctggtatcggagacatcgcgcagcggggagacagtacgctaccgctacgatgacg

SEQ ID NO: 581294 - DNA, 75 bp, synthetic construct
  source 1..75: mol_type = other DNA
tggtgtcgctacttgccaatgttggcatggggttgcgttatggcgttttgctcgtaccaatcgccacaggcgtga

SEQ ID NO: 581295 - DNA, 75 bp, synthetic construct
  source 1..75: mol_type = other DNA
ggaattattcttgcattatcggcaatgatcggggcaattggttttgcggttgcagtgatagcatatgtttgtaga

SEQ ID NO: 581296 - DNA, 75 bp, synthetic construct
  source 1..75: mol_type = other DNA
cggactcaccggtatcattacgacagccggcaccggctggtgcactacacgcggacacaatatgcagagccgctg

SEQ ID NO: 581297 - DNA, 75 bp, synthetic construct
  source 1..75: mol_type = other DNA
tcaaaaagaattgcagctcgttttcgaactttcacatatagaaacccaaatcgtcagtacgctaaaggggatgct

SEQ ID NO: 581298 - DNA, 75 bp, synthetic construct
  source 1..75: mol_type = other DNA
tcagaaaaggatcttttaagaatagattatgtgaagaaagttagctgttcagaagaagcaaataatgtatataac

SEQ ID NO: 581299 - DNA, 75 bp, synthetic construct
  source 1..75: mol_type = other DNA
ccggctggctaatgaggggcagcaaagcagcaactggtaccggatttcaaaggtgactgttctgtcatcgacgca

SEQ ID NO: 581300 - DNA, 75 bp, synthetic construct
  source 1..75: mol_type = other DNA
tcatggggagagtggcataacagcaacttccctgaactgaaacctctgttggaaagaaacacgacggaggagctc

SEQ ID NO: 581301 - DNA, 75 bp, synthetic construct
  source 1..75: mol_type = other DNA
ctttagcattcgtcagcttttcttctacagcggcaaacaccgcttatatgaagtgtggtccctttactttctcaa

SEQ ID NO: 581302 - DNA, 75 bp, synthetic construct
  source 1..75: mol_type = other DNA
ccggagcaggcacgttttctgagtaaacaagaaaaaacgttgcttatcaaccaactggcaagtgaagaacaacag

SEQ ID NO: 581303 - DNA, 75 bp, synthetic construct
  source 1..75: mol_type = other DNA
gaaacggcaagcctatcctcaacgtcgaagtgatccgcaagaacatggacgagcccagagagttctggacgtacg

SEQ ID NO: 581304 - DNA, 75 bp, synthetic construct
  source 1..75: mol_type = other DNA
cgcgtgaagagttagatgagtttccggcaagcgaaaaagagtttaccagcgcccgggagctgggcgtttcgatca

SEQ ID NO: 581305 - DNA, 75 bp, synthetic construct
  source 1..75: mol_type = other DNA
tgatgctgtacaggatgttaaaaaagttgtcgaaaaactcaaatcagatggtcgtcctgagtatcaagaacatcg

SEQ ID NO: 581306 - DNA, 75 bp, synthetic construct
  source 1..75: mol_type = other DNA
attacaaactgtgagccagttgttatttgtaatgaaagtcatcggtttatcgtcgctgagcagttgttacaaatt

SEQ ID NO: 581307 - DNA, 75 bp, synthetic construct
  source 1..75: mol_type = other DNA
cgatggcggcagacaaaattattctcgccatcggtcaacatgccgaacttaccgcttttgctacactggaacccc

SEQ ID NO: 581308 - DNA, 75 bp, synthetic construct
  source 1..75: mol_type = other DNA
gagcattgggttattctcgccggcaccggtcaggtgacggtcaacggtaagcagttcctgttgtccgagaaccag

SEQ ID NO: 581309 - DNA, 75 bp, synthetic construct
  source 1..75: mol_type = other DNA
ccgtgaaaccggggggcgccttctcgatgcagatgcaccaccaccgcgccgagcactgggtcattctcgccggca

SEQ ID NO: 581310 - DNA, 75 bp, synthetic construct
  source 1..75: mol_type = other DNA
cctggcggcccttcaggccacccgctacggtgacgacccgctgatgctggtcctcgccgccgaccatatcatcaa

SEQ ID NO: 581311 - DNA, 75 bp, synthetic construct
  source 1..75: mol_type = other DNA
accgcgccttatatccccgccctgaaggacggggttttacggcgcaccagataaaccaggccaagcgtatgctgg

SEQ ID NO: 581312 - DNA, 75 bp, synthetic construct
  source 1..75: mol_type = other DNA
atgagtccagtgcttacacaacatgtcagccagcccatcacgctggacgagcaaacgcaaaagatgaagcagcat

SEQ ID NO: 581313 - DNA, 75 bp, synthetic construct
  source 1..75: mol_type = other DNA
aagctgacagaagcagaaccgggtaatgactccaacttactgatagtgttttatgttcagataatgcccgatgac

SEQ ID NO: 581314 - DNA, 75 bp, synthetic construct
  source 1..75: mol_type = other DNA
agcgtaacaccatcgaaacgcaaaattaccagacccgcgacccgcaagtctttgctgctggcgatattgttgagg

SEQ ID NO: 581315 - DNA, 75 bp, synthetic construct
  source 1..75: mol_type = other DNA
gtctggctgcgctgctggtgagcagcagcatgagtagtgtgctgcaggcaggtgagctggtcatgcgggatgact

SEQ ID NO: 581316 - DNA, 75 bp, synthetic construct
  source 1..75: mol_type = other DNA
ttaccttagttcgcgacggcaaaatagtgaataaaatcgagatttcccgcctggacacgctgcttgatgaaaatg

SEQ ID NO: 581317 - DNA, 75 bp, synthetic construct
  source 1..75: mol_type = other DNA
gcaggatgtgaaaaaagtggtcgagcagatcaaagccgatggtcgccatgagcatcgggtacatcgcgaagtcta

SEQ ID NO: 581318 - DNA, 75 bp, synthetic construct
  source 1..75: mol_type = other DNA
gggtaacgatgcatttcacaaacaagtaaccaaagcgcgtaacctgcaaaacccggtcgatttagccaactttgc

SEQ ID NO: 581319 - DNA, 75 bp, synthetic construct
  source 1..75: mol_type = other DNA
ttaccccattaaaagaactgctacagcagcgttttgtgccgcatttaccgccattgcttgggcaaggtgggcgag

SEQ ID NO: 581320 - DNA, 75 bp, synthetic construct
  source 1..75: mol_type = other DNA
tgctcgacagttatgccgagcaggcggataatatgccgttattgcatcgggcgctggtgctggcgtgggcacagg

SEQ ID NO: 581321 - DNA, 75 bp, synthetic construct
  source 1..75: mol_type = other DNA
tgattcgattatcgaaccgctgcgtgtacacggtttattgccaggtaaagacgcggctgcacgcgttgcgtggtt

SEQ ID NO: 581322 - DNA, 75 bp, synthetic construct
  source 1..75: mol_type = other DNA
ctggtaacatcaataatctaatgacacctgatgtaattttgaaccctgaactggaatcaaccccaaatttaatgg

SEQ ID NO: 581323 - DNA, 75 bp, synthetic construct
  source 1..75: mol_type = other DNA
cggcatttaaaagattaatcagccacgcttttgatgaacttcgtcagcaattttttgatagttttacggcattag

SEQ ID NO: 581324 - DNA, 75 bp, synthetic construct
  source 1..75: mol_type = other DNA
aaaaattgattacagtactaatcatgtagcaaatagaataacgatcaatccaggtaagaaaatttctcaacagat

SEQ ID NO: 581325 - DNA, 75 bp, synthetic construct
  source 1..75: mol_type = other DNA
ccaccactgataatttcgaatgaagatcaccggttcttggttgccgagcaagtgaggcaaatacgtgcggatgtt

SEQ ID NO: 581326 - DNA, 75 bp, synthetic construct
  source 1..75: mol_type = other DNA
tgtaaagaactcgcacaatcctatttagaatcaggcgattttttatggaatagtggcatgtttcttttcaaagct

SEQ ID NO: 581327 - DNA, 75 bp, synthetic construct
  source 1..75: mol_type = other DNA
gtcgtaatactgcgcctgctgtagcacttgcagcacttcaggctatggtaactggagacgatcctattcttttgg

SEQ ID NO: 581328 - DNA, 75 bp, synthetic construct
  source 1..75: mol_type = other DNA
ataacttatgattctgacagcagctacctccgttcagattcagggctgcttgctacagttggggtaaaagatctt

SEQ ID NO: 581329 - DNA, 75 bp, synthetic construct
  source 1..75: mol_type = other DNA
gaagcccatcttcttagcgaaaatcaatctgtctatattccgcaaggcaccgttcattgtctggaaaaccccggg

SEQ ID NO: 581330 - DNA, 75 bp, synthetic construct
  source 1..75: mol_type = other DNA
gaagattattgggataatgtagttgaattggctgatcaatacaatcctattgaaattattgagctttcagataat

SEQ ID NO: 581331 - DNA, 75 bp, synthetic construct
  source 1..75: mol_type = other DNA
ggtttgaaattgtaaatgcaaatgttgaagaaattgtacagtttgctttagtcactaaaaatattacggtcatta

SEQ ID NO: 581332 - DNA, 75 bp, synthetic construct
  source 1..75: mol_type = other DNA
gggggttttctctttacctaaagaggcagaggcgctgacgcaaggcaagctggtgtatttcaaagcggatacggc

SEQ ID NO: 581333 - DNA, 75 bp, synthetic construct
  source 1..75: mol_type = other DNA
atggctgaagcggcgcactttgcgccgcatttactggagaaaaaaatgtcaaaaaattttgttcaggacggaaaa

SEQ ID NO: 581334 - DNA, 75 bp, synthetic construct
  source 1..75: mol_type = other DNA
cattttatcggtcttaaagaaccggacaaccgtaaacccgcaaatcactgggggtatattcatcatgctagtgaa

SEQ ID NO: 581335 - DNA, 75 bp, synthetic construct
  source 1..75: mol_type = other DNA
ccttgactacaacgacccccgctcgttttgcctgcaggaaattaaatgcatttctggctcgtcgtgctcttcatc

SEQ ID NO: 581336 - DNA, 75 bp, synthetic construct
  source 1..75: mol_type = other DNA
ggagacacgaatgtattaatcaaagcgcctggcgcgagcggcgtgcgtcttgaaaatcagaccggaattttaacg

SEQ ID NO: 581337 - DNA, 75 bp, synthetic construct
  source 1..75: mol_type = other DNA
atgtttgcagcaaagcccgagagcagtcaaagaagtatttctggattattcagtcctaggtcaaatggtgaaaac

SEQ ID NO: 581338 - DNA, 75 bp, synthetic construct
  source 1..75: mol_type = other DNA
aaaacagtcgcattgtctctggggttaccggttgtgaccgccatgacccatcgtccggtacagcgctgtacattg

SEQ ID NO: 581339 - DNA, 75 bp, synthetic construct
  source 1..75: mol_type = other DNA
ttttaacggaaggacatctgatttctgttcgtctcccctcccagtgtcatcaagaagcccgaaacattccccctc

SEQ ID NO: 581340 - DNA, 75 bp, synthetic construct
  source 1..75: mol_type = other DNA
tggtgtatttcaaagcagatacggcaacactgacggcaacgaaatcaggtaatacgctggtgggaacagtatggg

SEQ ID NO: 581341 - DNA, 75 bp, synthetic construct
  source 1..75: mol_type = other DNA
atgtcaaaaaattatgttcaggacggaaaaaacgtcgactggctgaatgggaccggaaaggcggtgtcatctggc

SEQ ID NO: 581342 - DNA, 75 bp, synthetic construct
  source 1..75: mol_type = other DNA
atgagtgagattgtcgctggaaccattctccagttattacgtcagactcaggataaccaattttctacgttgggg

SEQ ID NO: 581343 - DNA, 75 bp, synthetic construct
  source 1..75: mol_type = other DNA
ttggctccctgacagcgcaaggtttcggtatccctatgacggtaaagacgaaagagctgttggcgcagttcttac

SEQ ID NO: 581344 - DNA, 75 bp, synthetic construct
  source 1..75: mol_type = other DNA
atcatgcgagggaacggagaccgggacctgggcggtgccagtaaatacggttaaccagatcatatccagtctacc

SEQ ID NO: 581345 - DNA, 75 bp, synthetic construct
  source 1..75: mol_type = other DNA
ctctctgattgaagacgtggccagcactgatgtcggcgcacttatcgtctgcgatcaggcgagggttgacctgat

SEQ ID NO: 581346 - DNA, 75 bp, synthetic construct
  source 1..75: mol_type = other DNA
ggtagcgacatgaccagcactggcgtattgccggactggagcctacgcaggtggttggtctgctggctgtggcat

SEQ ID NO: 581347 - DNA, 75 bp, synthetic construct
  source 1..75: mol_type = other DNA
tataatcatttgtttaatagtagcgctatatgtaggtaataaaatctcattaagtaaaatctttattttcacaat

SEQ ID NO: 581348 - DNA, 75 bp, synthetic construct
  source 1..75: mol_type = other DNA
tgagaggtggatggaatatgtatcagtatccgttgaatcccatacaagtgatagacccaatggggttagatgcga

SEQ ID NO: 581349 - DNA, 75 bp, synthetic construct
  source 1..75: mol_type = other DNA
atattcgccgggaaaccgctgaacgttaacaacctgaaagacgcattcttacaggcgattaactcgacaatcgac

SEQ ID NO: 581350 - DNA, 75 bp, synthetic construct
  source 1..75: mol_type = other DNA
tttctgcttctgccggaggagtatggcccagcctttccagcaatcgtcgattgttataccagtccacccacgtga

SEQ ID NO: 581351 - DNA, 75 bp, synthetic construct
  source 1..75: mol_type = other DNA
gggggattaccaccaaaaggtcaagatatgaatcaaattctgtttgaactatcttctctatgtagatggtttagt

SEQ ID NO: 581352 - DNA, 75 bp, synthetic construct
  source 1..75: mol_type = other DNA
ggtaaatctatccttgcgcaggcggatgctaatccgtggcaggcggcgttggattacgcgatgatctatttcctc

SEQ ID NO: 581353 - DNA, 75 bp, synthetic construct
  source 1..75: mol_type = other DNA
cgatacccggctgctcgccgagttgtcagcgatagccagcaccctgaaatcagcgtcactttccgacatcgaaat

SEQ ID NO: 581354 - DNA, 75 bp, synthetic construct
  source 1..75: mol_type = other DNA
atctggatgatgactactttgacatgttgcaggaggagctttgcagcgttgtggaggcatccggtgccagtctcg

SEQ ID NO: 581355 - DNA, 75 bp, synthetic construct
  source 1..75: mol_type = other DNA
ggattacgcgatgatctatttccttgcggtatggaaagcggcggtgctgggggtgatgcttgggtcgttgattca

SEQ ID NO: 581356 - DNA, 75 bp, synthetic construct
  source 1..75: mol_type = other DNA
cgctgctcggcgacccgaccaaagcgcacgaaaaactgggctggaaaccggaaatcaccctcagagagatggtgt

SEQ ID NO: 581357 - DNA, 75 bp, synthetic construct
  source 1..75: mol_type = other DNA
gagtcagtccaaagcggcgttagaactgaatttaagcctcccgactatcaaacgaaactggaacatcaaagaggc

SEQ ID NO: 581358 - DNA, 75 bp, synthetic construct
  source 1..75: mol_type = other DNA
gctggtgcaaaaatgggtgcgtgaaacaccgcaaacgcaggcaccggtcgaaattgacataccggaagcacaggg

SEQ ID NO: 581359 - DNA, 75 bp, synthetic construct
  source 1..75: mol_type = other DNA
agcaatccccattagcgcgccaggcatgcgacatcgcactggctacccaccagcaacgctacggcgactacgggc

SEQ ID NO: 581360 - DNA, 75 bp, synthetic construct
  source 1..75: mol_type = other DNA
atctgtggagacaaaatagattactaccgcatggctgttttgttgctttccacaggggcgcggtggaatgaggct

SEQ ID NO: 581361 - DNA, 75 bp, synthetic construct
  source 1..75: mol_type = other DNA
ggcaaatgtcgcatacctgataaattacactttctattttttatttataattgttaactttaaaaaaatcattaa

SEQ ID NO: 581362 - DNA, 75 bp, synthetic construct
  source 1..75: mol_type = other DNA
atgacaatcacgcctgacgcaaattcagttctgcttgagtaccgttggcctgggaacatctccgagttcaaaaat

SEQ ID NO: 581363 - DNA, 75 bp, synthetic construct
  source 1..75: mol_type = other DNA
tcactgaagaaggaaaacggcgggagcgatcacttttatatcggttcgaataaggagatggcccgcgaatttatc

SEQ ID NO: 581364 - DNA, 75 bp, synthetic construct
  source 1..75: mol_type = other DNA
taccgatgtcggtctggcagcaagcgctgaaaaaggaaaagttacgaaacgcattatcaaattcactggatttaa

SEQ ID NO: 581365 - DNA, 75 bp, synthetic construct
  source 1..75: mol_type = other DNA
caggtcacaaaaaaagtctggtctgtggagggcgaagcggaatggctggctaacctgctgagcgacacggccaca

SEQ ID NO: 581366 - DNA, 75 bp, synthetic construct
  source 1..75: mol_type = other DNA
aaaccggaagaacgcaacgcgcgccgccagatgaagctgacacgcggcctgaaaaatgagggaggtttactgtga

SEQ ID NO: 581367 - DNA, 75 bp, synthetic construct
  source 1..75: mol_type = other DNA
tgcgccactgtctgggggaagactttgcgcgttcgggtgacctgaccgtactggccccggtgacggtgaacgacg

SEQ ID NO: 581368 - DNA, 75 bp, synthetic construct
  source 1..75: mol_type = other DNA
aaccagctgattcaggaaagccgcgcaggcaaaaaagattaccgtattcacaccatcacgctggatgatgcctgc

SEQ ID NO: 581369 - DNA, 75 bp, synthetic construct
  source 1..75: mol_type = other DNA
tcaaaggcttgtggggtcaccaagatataaatattttaatagacagcaaaacaaattttataattggggttaatg

SEQ ID NO: 581370 - DNA, 75 bp, synthetic construct
  source 1..75: mol_type = other DNA
ttgatatgtgtgagcaaagttttattttatcatgtatagctaagcagaagttcttattttttagttcggcagtta

SEQ ID NO: 581371 - DNA, 75 bp, synthetic construct
  source 1..75: mol_type = other DNA
tctttctgctgtttcggatgatccgcaccagttatgtcaagcaggtcgctatttcagtagcgaaaaaagtaaaat

SEQ ID NO: 581372 - DNA, 75 bp, synthetic construct
  source 1..75: mol_type = other DNA
ctggctctggtgctgtataattttatttttgatctcaaggcgtactgggcttataaatgcgtcacgaagaatatc

SEQ ID NO: 581373 - DNA, 75 bp, synthetic construct
  source 1..75: mol_type = other DNA
agtaccgtcaagagttggcacagattatcagcttcaatgattttctgagtgttccacgagaatttagcaaagcac

SEQ ID NO: 581374 - DNA, 75 bp, synthetic construct
  source 1..75: mol_type = other DNA
tgacaacagactaccaataatatacgttagctccaagtattttttcaatgaacatgctcacaatatcatcccaga

SEQ ID NO: 581375 - DNA, 75 bp, synthetic construct
  source 1..75: mol_type = other DNA
tgctgctcattctttgttgttttcaggttgcagcgaaagacagtcttgataatttgatcaagcagcaaaaaaatg

SEQ ID NO: 581376 - DNA, 75 bp, synthetic construct
  source 1..75: mol_type = other DNA
aaccttatggatcaactatgcaagtagttgagtttgacttgtctgagattgataaggttgtggaaaaaatttcac

SEQ ID NO: 581377 - DNA, 75 bp, synthetic construct
  source 1..75: mol_type = other DNA
ttgtacaaacgatgatgctggcaggtatgggaaccgctccggcgctggcattgttgatgacgctcccggcggtga

SEQ ID NO: 581378 - DNA, 75 bp, synthetic construct
  source 1..75: mol_type = other DNA
gacattgaaaagttaataagaattgaattcagtagtattgaagtaaaattaaaagaagttggtggttctcgtcga

SEQ ID NO: 581379 - DNA, 75 bp, synthetic construct
  source 1..75: mol_type = other DNA
cagtgaaaatgcgttgtcgaccttttttgccaagccgctttggcttcggttattcatattgctggttattgaagt

SEQ ID NO: 581380 - DNA, 75 bp, synthetic construct
  source 1..75: mol_type = other DNA
ttattggtagcccaaaattatttgtaagaacaacgttgtttttaagttttgttggaatgatggctttttatgcta

SEQ ID NO: 581381 - DNA, 75 bp, synthetic construct
  source 1..75: mol_type = other DNA
agtgccgtgtcattcaaaaaacatggcgtgtcattcaaatctgttgggatgttattccttgtttttactcatttt

SEQ ID NO: 581382 - DNA, 75 bp, synthetic construct
  source 1..75: mol_type = other DNA
gtgttgccatggtgtccggctccgcgatggcatggagtacaggtgattttaacggcactgttgatatcggcggta

SEQ ID NO: 581383 - DNA, 75 bp, synthetic construct
  source 1..75: mol_type = other DNA
tggcagacggcggaaaaatgcactgcgacattactgcgtgaacgaggggtaaaagctcttccacttcttcagcca

SEQ ID NO: 581384 - DNA, 75 bp, synthetic construct
  source 1..75: mol_type = other DNA
aacgaaaaaatcatgcaataaatttgtttcgtgaagtctcaatcagtaatgatactataagtgtaaaattctaca

SEQ ID NO: 581385 - DNA, 75 bp, synthetic construct
  source 1..75: mol_type = other DNA
gggtggcaaaacgggtatggcgacgtgaacgggacctgacgggctggatgtcgctgtcacggaaaccgcaagtga

SEQ ID NO: 581386 - DNA, 75 bp, synthetic construct
  source 1..75: mol_type = other DNA
atgagctattctgataatgttagggcaaagctaatgggagcttgtattgggtcatataagcaagattttaagctt

SEQ ID NO: 581387 - DNA, 75 bp, synthetic construct
  source 1..75: mol_type = other DNA
actgctgtccgtcaggcatttactgaggcaaaacagcgttatggtgcgccccgtctcgccggagtactgcctgaa

SEQ ID NO: 581388 - DNA, 75 bp, synthetic construct
  source 1..75: mol_type = other DNA
ttgccggtcacgatttgatgagtcagtttgccgggaataaagaagatattgtcggtattggtctgggctccatcc

SEQ ID NO: 581389 - DNA, 75 bp, synthetic construct
  source 1..75: mol_type = other DNA
aggcccgcgccgtcagccggaaaagaatgttttcaccgatgaacagattgagaaactggaagaaatcttccattc

SEQ ID NO: 581390 - DNA, 75 bp, synthetic construct
  source 1..75: mol_type = other DNA
aattctgaaaaaatcgtatgaagtgatgcatggtgagttagggaatgcggattcaatccagagctggtcgaatgc

SEQ ID NO: 581391 - DNA, 75 bp, synthetic construct
  source 1..75: mol_type = other DNA
tcattttataagcccgtggatgatggctacatcgaactgagtgtgacacccggcttctgtgttggattgcccgtc

SEQ ID NO: 581392 - DNA, 75 bp, synthetic construct
  source 1..75: mol_type = other DNA
ctcaacgaccaccgataccggagaaacgccgcgtattgaaggattctccagccgcgacggcaatgtggaatttgc

SEQ ID NO: 581393 - DNA, 75 bp, synthetic construct
  source 1..75: mol_type = other DNA
tttacagatagttcgttagatgttttggcatttatgcgcaacaccggtatcactcaattatttccgtcgcctgac

SEQ ID NO: 581394 - DNA, 75 bp, synthetic construct
  source 1..75: mol_type = other DNA
ggttggtacagcagggcggctttgacgggcggacgcagcgttaccgttatgacctgaccagaaaactcacgcaga

SEQ ID NO: 581395 - DNA, 75 bp, synthetic construct
  source 1..75: mol_type = other DNA
atgaaagccaccggggccagtagcggaatcatcgcgctgaaagagaaatatcaacgggcaataaacgcactcaca

SEQ ID NO: 581396 - DNA, 75 bp, synthetic construct
  source 1..75: mol_type = other DNA
gcgttccgttcgggtgcaattttcacgacataaaagccaaggggatctcagattacgaaggcagcagtcgcgaca

SEQ ID NO: 581397 - DNA, 75 bp, synthetic construct
  source 1..75: mol_type = other DNA
ctggtgggggcgctgattatcgccacgctaaacaacggcatgaccttaatgggcgtctcttacttctggcaactg

SEQ ID NO: 581398 - DNA, 75 bp, synthetic construct
  source 1..75: mol_type = other DNA
gtatgtcgttacaggcgatagcggatagccgttggaatgaaataaaacagcaggcgcaaggacagaccgtctatt

SEQ ID NO: 581399 - DNA, 75 bp, synthetic construct
  source 1..75: mol_type = other DNA
cagggtggcaaaacgggtatggcggcgtgaacgggacctgacgggctggatgtcgctgtcacggaaaccgcaagt

SEQ ID NO: 581400 - DNA, 75 bp, synthetic construct
  source 1..75: mol_type = other DNA
agcaaaaccactggcggattgctggttttacccaactctcattcactgatccaacgtcgaatgcagaatgaccgc

SEQ ID NO: 581401 - DNA, 75 bp, synthetic construct
  source 1..75: mol_type = other DNA
tggtccgggactggccgccgacccacatggctcaaagagctgcttgatagtggtttatcacttgatgatctgaag

SEQ ID NO: 581402 - DNA, 75 bp, synthetic construct
  source 1..75: mol_type = other DNA
acggctgggacggcgacaggctgacgacggtacagaccgacaccacgcgtatccagacggtataccagccgggga

SEQ ID NO: 581403 - DNA, 75 bp, synthetic construct
  source 1..75: mol_type = other DNA
ggggcggtatatcaccccggacccgatagggctggagggggggatggagtctgtatgcgtacccgctgaatccgg

SEQ ID NO: 581404 - DNA, 75 bp, synthetic construct
  source 1..75: mol_type = other DNA
ggtttattctgcgccgcaccacgcttggcgttcatatctacgccgtcggcggcaatatgcaggcggcgcgtctta

SEQ ID NO: 581405 - DNA, 75 bp, synthetic construct
  source 1..75: mol_type = other DNA
aatggataaattctggaccatcttttctaaactttggcctttattttctagggtggcaatagtatggggtgttgg

SEQ ID NO: 581406 - DNA, 75 bp, synthetic construct
  source 1..75: mol_type = other DNA
gtgtgccaatgagttttcttttatcatcgctttatttcccgatgtatttatatccttgttcctttgttctgttta

SEQ ID NO: 581407 - DNA, 75 bp, synthetic construct
  source 1..75: mol_type = other DNA
tcaaaaaactgaccgaacagtacaacgtgacctatatcggcatcgactcaacaggtgtcggtcacggggtttacg

SEQ ID NO: 581408 - DNA, 75 bp, synthetic construct
  source 1..75: mol_type = other DNA
cctgctcccgattgcggcgatggatcgcattatggcggcgctgcgtaaggcttctggtaatgagtctttcaacat

SEQ ID NO: 581409 - DNA, 75 bp, synthetic construct
  source 1..75: mol_type = other DNA
ggccgccacctggacgcagcaggaactggagaagatcgcccgcctgaacatcaacctgcaatccaaaaagcagga

SEQ ID NO: 581410 - DNA, 75 bp, synthetic construct
  source 1..75: mol_type = other DNA
gatttcggcgtgtcagaagtggtcgggtcggttaaagacggcatcattggtaacaaaaccaacagcctgaaaacc

SEQ ID NO: 581411 - DNA, 75 bp, synthetic construct
  source 1..75: mol_type = other DNA
gaaggaagcaacccaatcaatgatcataccgtcacgtttgcggtattaagcggatcggcaacttccttcaacaat

SEQ ID NO: 581412 - DNA, 75 bp, synthetic construct
  source 1..75: mol_type = other DNA
tcatcctcagagaacggttgatgacaatgcagaagcagctggaaggggcacaggactatatccgcactcagtgcc

SEQ ID NO: 581413 - DNA, 75 bp, synthetic construct
  source 1..75: mol_type = other DNA
attacgaagtcaaccagctgttgctggcttcacgtcaggggcctaatccagttcgcaatacatgcatgattatgt

SEQ ID NO: 581414 - DNA, 75 bp, synthetic construct
  source 1..75: mol_type = other DNA
agcccggccagagcgccgcgctgctcggcactgcggcggccatgtcgtccacggcgctggtcagccgacaactgg

SEQ ID NO: 581415 - DNA, 75 bp, synthetic construct
  source 1..75: mol_type = other DNA
ggagacttctggctcgcccgcaggacggtgctgatggcgggcgctctgcagatgatcgccgtggccccgccgctg

SEQ ID NO: 581416 - DNA, 75 bp, synthetic construct
  source 1..75: mol_type = other DNA
taccggacgaagacgcctgcaccggtgggcgttttcggccccggctggaaagcgccttctgatatccgcttacag

SEQ ID NO: 581417 - DNA, 75 bp, synthetic construct
  source 1..75: mol_type = other DNA
ttgctgtccatccacatatgctgagacatgggtgtggttacgcgttggcagataacggcatcgatacacgcctga

SEQ ID NO: 581418 - DNA, 75 bp, synthetic construct
  source 1..75: mol_type = other DNA
caggcatacggtaatttatactgcttctaattcaatgcgatttgaaaaaatgtgggggagaggtgacgcaaaaaa

SEQ ID NO: 581419 - DNA, 75 bp, synthetic construct
  source 1..75: mol_type = other DNA
tatagcgccatttggctcttatgaatatcctattgatatgaattggaaggggggggttacatggagaatagtgac

SEQ ID NO: 581420 - DNA, 75 bp, synthetic construct
  source 1..75: mol_type = other DNA
tgtgcgtctcagcggttatgccttctcagaagatggcgatcaacttgacctttttgtcagcatttatcacggtag

SEQ ID NO: 581421 - DNA, 75 bp, synthetic construct
  source 1..75: mol_type = other DNA
tggacatcgacctgtcccacaacaatctggcccccggccagctgtgcgccgacgggcaataccgccagatagtca

SEQ ID NO: 581422 - DNA, 75 bp, synthetic construct
  source 1..75: mol_type = other DNA
ttcgcggcacgctgctgggaacgctgttttcgctgccgggcatgatgtgtacctgctgtgcggctccggtcgcgg

SEQ ID NO: 581423 - DNA, 75 bp, synthetic construct
  source 1..75: mol_type = other DNA
ggatttaatgagctgaagtttgatgatgcgacagggagagaacaggtctacatccacgcgcagaagaacatggat

SEQ ID NO: 581424 - DNA, 75 bp, synthetic construct
  source 1..75: mol_type = other DNA
tcaaaaaactgaccgaacagtataacgtgacctacatcggcatcgactcaaccggcgttggtcacggggtttacg

SEQ ID NO: 581425 - DNA, 75 bp, synthetic construct
  source 1..75: mol_type = other DNA
gtttaaaagttatgcattgtttaaaatagacaaccatcttgctccttctttggttttaaataaatcaatgataga

SEQ ID NO: 581426 - DNA, 75 bp, synthetic construct
  source 1..75: mol_type = other DNA
cccagtccggcgatctgttgctagtggaagctatagatcgtctgagtcgcctagaacatagcgcatgggtcgaac

SEQ ID NO: 581427 - DNA, 75 bp, synthetic construct
  source 1..75: mol_type = other DNA
tttaacgtgccagctttatttcgagctttacctgctcctatgtggtatttttttgatttatttaagttcaatgaa

SEQ ID NO: 581428 - DNA, 75 bp, synthetic construct
  source 1..75: mol_type = other DNA
tattatttacttttattgatttcaggatttatcagtgataattccttttctggtataatctctcgttctgtatct

SEQ ID NO: 581429 - DNA, 75 bp, synthetic construct
  source 1..75: mol_type = other DNA
gtggcactaacgatatcgtcacgttctctactgagttcaaggtcggtgacgcgagcactatcgaagtgaacgaaa

SEQ ID NO: 581430 - DNA, 75 bp, synthetic construct
  source 1..75: mol_type = other DNA
ctttgcggtgatcccggcagacagaacatggcgaccacagccgttgctgaaaccgctggtcgacggcccgcagag

SEQ ID NO: 581431 - DNA, 75 bp, synthetic construct
  source 1..75: mol_type = other DNA
gtttacatggttgtaggtattgttatgcaacatttaatgaaaatatagtgaaagctaatatgaaaaaacataatc

SEQ ID NO: 581432 - DNA, 75 bp, synthetic construct
  source 1..75: mol_type = other DNA
ttttccagaagatagcctctaatctggttggtcatactgaccgtgtagtgattagtttcgcagatttgtatcaaa

SEQ ID NO: 581433 - DNA, 75 bp, synthetic construct
  source 1..75: mol_type = other DNA
gcaaaaaatgcctccggaggaacaatcaatctgacatccattacccggccttttagcagcggaggatttaacgag

SEQ ID NO: 581434 - DNA, 75 bp, synthetic construct
  source 1..75: mol_type = other DNA
ggaaacgcaaccagaatcagaatggaaggcgggatcaatgtcagcggtggcgcgcatggcattgatgccaccggt

SEQ ID NO: 581435 - DNA, 75 bp, synthetic construct
  source 1..75: mol_type = other DNA
gggacgtttgtcaccatcgtttccactggcgtgactgtaaacgagtatttttgccgcgcttataatggcggcttt

SEQ ID NO: 581436 - DNA, 75 bp, synthetic construct
  source 1..75: mol_type = other DNA
tccagctgtcatcaaacgccaatcctttcctggatggagctgttctcctgttcgaaacgaattcaaatctcatta

SEQ ID NO: 581437 - DNA, 75 bp, synthetic construct
  source 1..75: mol_type = other DNA
tcgtctcgatggcgacggtgcgcagaaagctggcgataatggtgttacaggcggttacagccagttctttggcct

SEQ ID NO: 581438 - DNA, 75 bp, synthetic construct
  source 1..75: mol_type = other DNA
caaaaacgcttataccgatgtggcgaccgatgcttcggtgaatgacgtcgcgaaagcactggatgcgggttacac

SEQ ID NO: 581439 - DNA, 75 bp, synthetic construct
  source 1..75: mol_type = other DNA
ttcagagtaaagaaacaattaattcatctaaggaaaatttagctggtgccgcagcgggtgcaattgttaatgtgg

SEQ ID NO: 581440 - DNA, 75 bp, synthetic construct
  source 1..75: mol_type = other DNA
aacaaaatgcagaaaaaccagaggaccaaactcggataagatcaaaagaagatatggcaaatgcgaaaaccagac

SEQ ID NO: 581441 - DNA, 75 bp, synthetic construct
  source 1..75: mol_type = other DNA
ccaacagaaattaaagacaaatgaagatgtgaaaaaggcaaaagctagacttgctgaaataaataataaattatc

SEQ ID NO: 581442 - DNA, 75 bp, synthetic construct
  source 1..75: mol_type = other DNA
ggtttaccgctgctgcaacttggcgttgcgctgaaaaccatgggtgatgcgacgcgtggtgaagaagcgattgcg

SEQ ID NO: 581443 - DNA, 75 bp, synthetic construct
  source 1..75: mol_type = other DNA
agtgatgagaaacgccgtgcatcggtcgatatcggcatttcccgtttgctgcaaatgcaacgtgataacggcggc

SEQ ID NO: 581444 - DNA, 75 bp, synthetic construct
  source 1..75: mol_type = other DNA
tcgcacgttatatcaaagagttaaaagcgtatccgtacggctgtcttgagcaaaccgccagcggcctgtttccgt

SEQ ID NO: 581445 - DNA, 75 bp, synthetic construct
  source 1..75: mol_type = other DNA
ggcatccacggggccgagtgatgaacttcacgacatgacaagacgcttctggctgggggtgttgctggcgtttcc

SEQ ID NO: 581446 - DNA, 75 bp, synthetic construct
  source 1..75: mol_type = other DNA
actccaattaacatcaatctgtatgagcatgctcgcggaacagtaacggggaacactagatataacgatgggtat

SEQ ID NO: 581447 - DNA, 75 bp, synthetic construct
  source 1..75: mol_type = other DNA
acaacaaccagactgcctctgaacagacattatccccggacgagagtcacgtattgcataaggtgagagatcccg

SEQ ID NO: 581448 - DNA, 75 bp, synthetic construct
  source 1..75: mol_type = other DNA
atgacagcttcagtgatgccgacaccatggtgttggtaaatgcaccaggcgcgaaaggcgctcgcctgaataata

SEQ ID NO: 581449 - DNA, 75 bp, synthetic construct
  source 1..75: mol_type = other DNA
tgattttatcactaatgaactatcgcaagctgatttattaaaatttaagaagctcataaaacgcaaatccacttt

SEQ ID NO: 581450 - DNA, 75 bp, synthetic construct
  source 1..75: mol_type = other DNA
cagtgataacccgactgaaagcgtctggtcatgtggttgcgatggcgggggacggtgtaaatgatgccccggcgc

SEQ ID NO: 581451 - DNA, 75 bp, synthetic construct
  source 1..75: mol_type = other DNA
gttaaccactaccgcgacaacgccatcacctataaagaccagcgcgataaagccactgagaaactcagcctggct

SEQ ID NO: 581452 - DNA, 75 bp, synthetic construct
  source 1..75: mol_type = other DNA
gcggatacgttgcggatggaaggtactaccgttatctatgtggccacagacgggcaccttgcaggcctgatagct

SEQ ID NO: 581453 - DNA, 75 bp, synthetic construct
  source 1..75: mol_type = other DNA
ggcgacaaagcgaaagggtatcagctggctatgaccgtgctggcaatcatcggtatgtgtatgtttttgttctgt

SEQ ID NO: 581454 - DNA, 75 bp, synthetic construct
  source 1..75: mol_type = other DNA
aaacgggtcgtctgtgggtatacgtcagggatgatcgtaatgcgggttcatccctagactggccccctgaatctc

SEQ ID NO: 581455 - DNA, 75 bp, synthetic construct
  source 1..75: mol_type = other DNA
cagtgccctgaaacaggtcagcggtagccaggcgaccacggtattccgcgaagcgcgcgtgctaagcaaccgctt

SEQ ID NO: 581456 - DNA, 75 bp, synthetic construct
  source 1..75: mol_type = other DNA
tctgcattaaccggtgatgcctgggtcaataacgaaggaacctggcgcctcggtagtagcagtggcggcaataac

SEQ ID NO: 581457 - DNA, 75 bp, synthetic construct
  source 1..75: mol_type = other DNA
tgtaatagataatgcgggttcgatgggcaatattgatgctcagggaggtaccctcaataatgagggtaccatcaa

SEQ ID NO: 581458 - DNA, 75 bp, synthetic construct
  source 1..75: mol_type = other DNA
atcgtttttgaacagcttgtcaagcttcagagtgacgaaacaaaaaatgcttcttgggcaaatttaacaggtgca

SEQ ID NO: 581459 - DNA, 75 bp, synthetic construct
  source 1..75: mol_type = other DNA
actgaaaagcggggacattgatcatcaagacgaacgagtcatcgagctcaacattgcgttaagcaaactgcttaa

SEQ ID NO: 581460 - DNA, 75 bp, synthetic construct
  source 1..75: mol_type = other DNA
aaattacgctgatcttcagcgaataataaatccccaattttcttttaacttatctgttgtgttaagatgtcctag

SEQ ID NO: 581461 - DNA, 75 bp, synthetic construct
  source 1..75: mol_type = other DNA
gctggattatctggacgcactggagctggttgatacctccagtgctccagatattgaatggcctacgcctccggc

SEQ ID NO: 581462 - DNA, 75 bp, synthetic construct
  source 1..75: mol_type = other DNA
tggtggtgcaggcacagcagagtgctgaaatcgcagcatcatgtgcagaacaggcagggcaaatattaaataaca

SEQ ID NO: 581463 - DNA, 75 bp, synthetic construct
  source 1..75: mol_type = other DNA
gtatccggacggtactcagactgcgcgggtcagagaaaagctattggcaggcattgcctggctggatacttttct

SEQ ID NO: 581464 - DNA, 75 bp, synthetic construct
  source 1..75: mol_type = other DNA
atgcagggaatagccgatagttttcccggtttgcgctttgagaactttgacgacatcgtgagtcgttgcactact

SEQ ID NO: 581465 - DNA, 75 bp, synthetic construct
  source 1..75: mol_type = other DNA
aaacagctgagcattaccgcaataaaatcgccatttatttgcactggtatcagaaaaaaggcatcgaggttccac

SEQ ID NO: 581466 - DNA, 75 bp, synthetic construct
  source 1..75: mol_type = other DNA
accctaccccgcgtttgtgtctcattttctggcggcaaagactctggtttaatgctgcatctgacagccgaactt

SEQ ID NO: 581467 - DNA, 75 bp, synthetic construct
  source 1..75: mol_type = other DNA
tgccagcatggattgatattccaccgccaactcatgaggaacaaattgccgcagccgaactggaaaagcagcaat

SEQ ID NO: 581468 - DNA, 75 bp, synthetic construct
  source 1..75: mol_type = other DNA
gtggctggattatctggacgcactggaactggtcgatacatccggggcgccagatattgaatggcctacgcctcc

SEQ ID NO: 581469 - DNA, 75 bp, synthetic construct
  source 1..75: mol_type = other DNA
taatctcactcattgaagtagacaagcgtgctggtatgcccaatgcaatgagtctgcaactgtcttatagcggtg

SEQ ID NO: 581470 - DNA, 75 bp, synthetic construct
  source 1..75: mol_type = other DNA
tggcctggtaaagcagctatcggtcgtctgaaaggtgaggaactggcacaatataatttgtggctggattatctg

SEQ ID NO: 581471 - DNA, 75 bp, synthetic construct
  source 1..75: mol_type = other DNA
gctatatggcgtcctatgtgaaatcttcttcaaccgcaaccgtcaccagcggcccggtgaaaaccaacgcaacct

SEQ ID NO: 581472 - DNA, 75 bp, synthetic construct
  source 1..75: mol_type = other DNA
agaaatggcggatctgtacagtcatcgccgggaaattgaactgggatacagggagataaaacagacgatgcaact

SEQ ID NO: 581473 - DNA, 75 bp, synthetic construct
  source 1..75: mol_type = other DNA
ccgtgcgtactatgcagcaatttttaagaaacgccatcgataaaaacctcgatggtgagtatcagctctatgaca

SEQ ID NO: 581474 - DNA, 75 bp, synthetic construct
  source 1..75: mol_type = other DNA
atacagttcccgagtcgttaaccgttgattataagaatcggcgtgagcctgccgtatttaacaaaacagataaca

SEQ ID NO: 581475 - DNA, 75 bp, synthetic construct
  source 1..75: mol_type = other DNA
tagtgatatcaaaacttttgaagatttagtactaaagaaaggtatatcttcagaatttgtaactgatttattatc

SEQ ID NO: 581476 - DNA, 75 bp, synthetic construct
  source 1..75: mol_type = other DNA
cttctggaaaaactacaaaaaactatctcaggaggatgtattttcgttgcccctgtggcaggcatatcgcccgaa

SEQ ID NO: 581477 - DNA, 75 bp, synthetic construct
  source 1..75: mol_type = other DNA
tccggtagacagtaataactactggtatggcgtgctggggatgagtattcccgtgcgtactatgcagcaattttt

SEQ ID NO: 581478 - DNA, 75 bp, synthetic construct
  source 1..75: mol_type = other DNA
gatgcctggcagtttatggcgggcgtcctgcccgccaccctccgggccgttgcttcgcaaagttcaaatccgctc

SEQ ID NO: 581479 - DNA, 75 bp, synthetic construct
  source 1..75: mol_type = other DNA
aactgagtgccgggtatcttcatgcccgttctgatatgtccggcagtgatgatttaaccgggttcaatgtgaaat

SEQ ID NO: 581480 - DNA, 75 bp, synthetic construct
  source 1..75: mol_type = other DNA
ggtgtattctcagatattaagagtatttggaccactgaggaagtcgaagcgcacggtataaatagctggagactg

SEQ ID NO: 581481 - DNA, 75 bp, synthetic construct
  source 1..75: mol_type = other DNA
gtgagccaaaacttgctttggcgcccgtcgatgtaagcgtcatcacccatgacatccacgccgacgtggaatcgg

SEQ ID NO: 581482 - DNA, 75 bp, synthetic construct
  source 1..75: mol_type = other DNA
ggacttcaaacccattttcgatcaggtgaagtccattgagcaaaagtcggctggtggcaaaagcggcaagggatg

SEQ ID NO: 581483 - DNA, 75 bp, synthetic construct
  source 1..75: mol_type = other DNA
agtctttcgactgagccttttgttttatttgatgcctggcagttccctactctcgcatggggagaccccacacta

SEQ ID NO: 581484 - DNA, 75 bp, synthetic construct
  source 1..75: mol_type = other DNA
agataccgttccgtttggttatgccctgatgcatgggcagacttttgacaaatctgcatacccgaaacttgcagc

SEQ ID NO: 581485 - DNA, 75 bp, synthetic construct
  source 1..75: mol_type = other DNA
ctaataataaaattaatgaagattccatagaaaaaattttattagaagggaatattgacttttggaaaaaactga

SEQ ID NO: 581486 - DNA, 75 bp, synthetic construct
  source 1..75: mol_type = other DNA
ggcgggtaccttctgcccgtaaggtgaatggtaaggcgctttcagcggatataacactgacgccgaaagatattg

SEQ ID NO: 581487 - DNA, 75 bp, synthetic construct
  source 1..75: mol_type = other DNA
ccaatgtgaatgtctggaaggaaagcttgaagaagtaaactttgaagaggtagcggaacgtctggtccggcattc

SEQ ID NO: 581488 - DNA, 75 bp, synthetic construct
  source 1..75: mol_type = other DNA
ggcaaccttactacggcaaagcgtttaccgccgccgaaactcacaacatcggtaaatcaatactctcacaggcgg

SEQ ID NO: 581489 - DNA, 75 bp, synthetic construct
  source 1..75: mol_type = other DNA
gcggtatggaaagcggcggtgctgggagtgatcctcgggtcgttgattcaggtgctgatccctcgtgactggctg

SEQ ID NO: 581490 - DNA, 75 bp, synthetic construct
  source 1..75: mol_type = other DNA
cgcatacgcacagtctgagtggctctacggggtctgccggtgttcatactcatggtaatggtattcgttggccag

SEQ ID NO: 581491 - DNA, 75 bp, synthetic construct
  source 1..75: mol_type = other DNA
tgtcgccagttattgcggcggcggccatggctctttcttccgtcagcgtcattgtgaatgcgttgcgtctgaaaa

SEQ ID NO: 581492 - DNA, 75 bp, synthetic construct
  source 1..75: mol_type = other DNA
cacgcagaccaggcaaagaggcgcgtcaccatatcgccgtaatgcgcaacctgcttatgagtgaaatcgacgatt

SEQ ID NO: 581493 - DNA, 75 bp, synthetic construct
  source 1..75: mol_type = other DNA
atagtgtcagcggcacagctgcatctgcaggtgctcacgcacatactgtcggtattggtgctcatacgcactctg

SEQ ID NO: 581494 - DNA, 75 bp, synthetic construct
  source 1..75: mol_type = other DNA
tatcagtctcagtccgggtggggaagcctctcttttgcgtgtaacggccgcagtggaaaaaggctcgcagcatcc

SEQ ID NO: 581495 - DNA, 75 bp, synthetic construct
  source 1..75: mol_type = other DNA
atgagtaaaatttttgaaattaaaagtgtatctacagaaacgttttataatattgcagagcgttcgtttgaggct

SEQ ID NO: 581496 - DNA, 75 bp, synthetic construct
  source 1..75: mol_type = other DNA
ggttattgcagtaaccgcttcggccgtcgtgattcacttaagattgctgctgtcctgttttttatttctggtgta

SEQ ID NO: 581497 - DNA, 75 bp, synthetic construct
  source 1..75: mol_type = other DNA
gtagccggagcacagtcaggtaagacgacagttgagaataatttccttggaacaacatcttcagacaagctcgac

SEQ ID NO: 581498 - DNA, 75 bp, synthetic construct
  source 1..75: mol_type = other DNA
catctttttcgttttatgcttcataacgcttctcaccttacgttcggtgcgctgctgatagctatgtccagcttt

SEQ ID NO: 581499 - DNA, 75 bp, synthetic construct
  source 1..75: mol_type = other DNA
cgcccggcgaaaccggaagaacgcaacgcgcgccgccagatgaagctgacgcgcggcctgaaaaatgagggaggt

SEQ ID NO: 581500 - DNA, 75 bp, synthetic construct
  source 1..75: mol_type = other DNA
agtaaagtcaggattatctccacccataacggcattgagaacctcttcaatacgctcataactgaaagtcgcgcc

SEQ ID NO: 581501 - DNA, 75 bp, synthetic construct
  source 1..75: mol_type = other DNA
agtccctatttatctggcaggttatgtcccggaatttgttatttatcgtattattggcggtattgcgttggttta

SEQ ID NO: 581502 - DNA, 75 bp, synthetic construct
  source 1..75: mol_type = other DNA
tggcaaaaatatcaatgtgaatctagatggggagtccttttcatcgattttaggtgatcttctctgtgatatttc

SEQ ID NO: 581503 - DNA, 75 bp, synthetic construct
  source 1..75: mol_type = other DNA
tggcggctgccctttccgcctgggtttctggggtagtagcggaaatcatcacgccgcaaaaaacggtaatgactc

SEQ ID NO: 581504 - DNA, 75 bp, synthetic construct
  source 1..75: mol_type = other DNA
gtaaatataacagttctctgtttcttccgggctatatgccagaagaactattctggctattggttgaactgtctc

SEQ ID NO: 581505 - DNA, 75 bp, synthetic construct
  source 1..75: mol_type = other DNA
acattttaccgatattgccatcgcagatggaataaattttattatttatatggttttcttttcatatggattgtt

SEQ ID NO: 581506 - DNA, 75 bp, synthetic construct
  source 1..75: mol_type = other DNA
aaaccggcttgaatccatgatcgataagcaagaaacagttttgcagcagatgatgagcaaacagccaggattcct

SEQ ID NO: 581507 - DNA, 75 bp, synthetic construct
  source 1..75: mol_type = other DNA
cagattcacatgctacaaaatggatattaggcaacctgtatgaatccgctcctgaattaaagaaacgtgcacttg

SEQ ID NO: 581508 - DNA, 75 bp, synthetic construct
  source 1..75: mol_type = other DNA
cgatgtcggtccttatctgatttccagtgacgaatgtattcaggtaaaggagttcgagaaaaattattgtgcagg

SEQ ID NO: 581509 - DNA, 75 bp, synthetic construct
  source 1..75: mol_type = other DNA
atgaaaataaaaaaaatcccgcagtgctctgtagctgcgggaagagatacgaagattaactttaaggaatttttc

SEQ ID NO: 581510 - DNA, 75 bp, synthetic construct
  source 1..75: mol_type = other DNA
cagaatctgcatttaattgtggagcaatctggtattcccctcagacctggcagttttttgaggaagcagcagaag

SEQ ID NO: 581511 - DNA, 75 bp, synthetic construct
  source 1..75: mol_type = other DNA
cgttaatgattacaggccatcatactacggctcaaccctgcccaatatgtctcgatttttgttaccgcgtactga

SEQ ID NO: 581512 - DNA, 75 bp, synthetic construct
  source 1..75: mol_type = other DNA
aataaaatttataggaaactggaatgctaatgattatggcattcagttgaagagaaaatattctaaatattcaaa

SEQ ID NO: 581513 - DNA, 75 bp, synthetic construct
  source 1..75: mol_type = other DNA
aaagtagcgttatggctgacgtttaatgaaatcaatatgtcgttacacgcgccattcacgggcgtggggctggca

SEQ ID NO: 581514 - DNA, 75 bp, synthetic construct
  source 1..75: mol_type = other DNA
tacgctgcacgaaatattccccagaacatcccggaaaaagcgttattcggtccggcaatgatggcactgctcgcg

SEQ ID NO: 581515 - DNA, 75 bp, synthetic construct
  source 1..75: mol_type = other DNA
cacgtaagccgcgctgttcgtgctcttcttgatgtaggcgtgatctttgaaggtccgaaagtaggtagatccaaa

SEQ ID NO: 581516 - DNA, 75 bp, synthetic construct
  source 1..75: mol_type = other DNA
acgaaaacttcattcagatcgcccaagcagatattgctgaaactttagggatgcagaaaacgaatgttagtcgcg

SEQ ID NO: 581517 - DNA, 75 bp, synthetic construct
  source 1..75: mol_type = other DNA
gatcaacggcaggtttcggcgatgatgtcgatatttttgctgaacggctgtcggcagagaaaccaggctactact

SEQ ID NO: 581518 - DNA, 75 bp, synthetic construct
  source 1..75: mol_type = other DNA
catcctcggcgggtgtattactcccgacacagtttcatcagttacactggggtttgaaaatcttactaccatgat

SEQ ID NO: 581519 - DNA, 75 bp, synthetic construct
  source 1..75: mol_type = other DNA
gtggaatggcactggaaccgctcgtagccacggcatcgacggggccgagtgatgaacttcgcgacatgacaagac

SEQ ID NO: 581520 - DNA, 75 bp, synthetic construct
  source 1..75: mol_type = other DNA
tcaggacgcgcagaacgcatcacagcgaagcgattaaccgaccgtgaccgcgaggttatggaatgtttccgcaat

SEQ ID NO: 581521 - DNA, 75 bp, synthetic construct
  source 1..75: mol_type = other DNA
actcctcgcgctgctcgggctgtaaaacctgccaggtgagctgtaaggacaacaaagatttagatgtgggaccga

SEQ ID NO: 581522 - DNA, 75 bp, synthetic construct
  source 1..75: mol_type = other DNA
gctgggattagcattttgccccagaatgcagaagacattgcaaaaattaactgacaaggctgttgctgatattat

SEQ ID NO: 581523 - DNA, 75 bp, synthetic construct
  source 1..75: mol_type = other DNA
ctcctcccccgcctgaagcaatacccgaagcctcacagggggagcattcatggggtgacatggcccttgacctgc

SEQ ID NO: 581524 - DNA, 75 bp, synthetic construct
  source 1..75: mol_type = other DNA
acgccagcggcaggcggacggaaaaatgctgccggcaaaaagccatccgcattacatatctgtgggacggcgaca

SEQ ID NO: 581525 - DNA, 75 bp, synthetic construct
  source 1..75: mol_type = other DNA
tctcaccaggcggaatatcttattcataataacgtgacattagttcagggatacttatatgcaaaaccaatgaaa

SEQ ID NO: 581526 - DNA, 75 bp, synthetic construct
  source 1..75: mol_type = other DNA
ctaggaattaaagtaataaggaaagcagataaatatttgccaccaaatgctagggcagcttttgattatggcctt

SEQ ID NO: 581527 - DNA, 75 bp, synthetic construct
  source 1..75: mol_type = other DNA
ttgtatgaaatatacaagggattaagagcacaaggatttaacccagcagaagctagagatctagcaaaatggttc

SEQ ID NO: 581528 - DNA, 75 bp, synthetic construct
  source 1..75: mol_type = other DNA
gcaccaactgatttagaagatcttcgacagcgttatccattcagtggtttaattaatcctgagacgggaaaatca

SEQ ID NO: 581529 - DNA, 75 bp, synthetic construct
  source 1..75: mol_type = other DNA
cgcaatactcgttcgatctttctcaccagtttcggtgagttgtttttaccccaagcgaagcgcctgctggaagat

SEQ ID NO: 581530 - DNA, 75 bp, synthetic construct
  source 1..75: mol_type = other DNA
aataaagatttggatgtcggaccgaagctgcgccgcgtgtatgaatatggtggcggtagctgggtgaaagaaggt

SEQ ID NO: 581531 - DNA, 75 bp, synthetic construct
  source 1..75: mol_type = other DNA
agcggctacctgaaagccattcaccgcacggataacggcatacagacgctggcgacctacgaacaggatgcgcgg

SEQ ID NO: 581532 - DNA, 75 bp, synthetic construct
  source 1..75: mol_type = other DNA
gaaagcgttcgcatacgccctgaaccagtggccggcgctgacgtactatgcagatgatggctgggctgaggcgga

SEQ ID NO: 581533 - DNA, 75 bp, synthetic construct
  source 1..75: mol_type = other DNA
ataaggggaatgacggcggagcagcgccttgccgaacgtcagttgaaaacgaaaccgctgctgaaatccctggaa

SEQ ID NO: 581534 - DNA, 75 bp, synthetic construct
  source 1..75: mol_type = other DNA
atccgctgaatccaataaattatgcagatcctcttggcttagccgtagatataaaccacttcccagtcaacgaag

SEQ ID NO: 581535 - DNA, 75 bp, synthetic construct
  source 1..75: mol_type = other DNA
aatggcagaacagcagctttatatacatggtggttatacctccgccaccagcggtcgcaccttcgagaccattaa

SEQ ID NO: 581536 - DNA, 75 bp, synthetic construct
  source 1..75: mol_type = other DNA
ctggcgtttctttttaagaaactagaaaaaaaatatacattcacccaattgaatatttttcaggtcatcatcgac

SEQ ID NO: 581537 - DNA, 75 bp, synthetic construct
  source 1..75: mol_type = other DNA
ggacggaggccgagttggcgcaggcggcggcgcgcggacagcttgacctgcattaccagccgctggtcgatctgc

SEQ ID NO: 581538 - DNA, 75 bp, synthetic construct
  source 1..75: mol_type = other DNA
aatgataccacgattaaaggcgggcgcttaatcgttgaaaaagatgggggggccgtctttgtcgctatcgaaaag

SEQ ID NO: 581539 - DNA, 75 bp, synthetic construct
  source 1..75: mol_type = other DNA
tgtgctacaggtttatggcgcagcgaatgatcccacgattaaaggcgggcgcttaatcgttgaaaaagatggggg

SEQ ID NO: 581540 - DNA, 75 bp, synthetic construct
  source 1..75: mol_type = other DNA
aacaaaccgtctcggtcagttcgaaatcaagaatggtattgctaacaatatgctgttggaaaacggcggaagttt

SEQ ID NO: 581541 - DNA, 75 bp, synthetic construct
  source 1..75: mol_type = other DNA
attgaatctcagaaagtcacaggcaataaggcaaagcatattcttgaggatatagaaatattctatcgtaacaaa

SEQ ID NO: 581542 - DNA, 75 bp, synthetic construct
  source 1..75: mol_type = other DNA
ccgatgcgctggaagaaactaagcccaaaggcgaaaagttgggccagcgcgcatggtggctgtatcagatagttg

SEQ ID NO: 581543 - DNA, 75 bp, synthetic construct
  source 1..75: mol_type = other DNA
attagtattgtggaaaaaatgattacacctacaggagttattacttattcagaattcaaatctaaatcagagtct

SEQ ID NO: 581544 - DNA, 75 bp, synthetic construct
  source 1..75: mol_type = other DNA
ctagccgggcctctgagccaagagaaagtggcaaggtatatcgcggacaaatataagccatcagaacttgagttt

SEQ ID NO: 581545 - DNA, 75 bp, synthetic construct
  source 1..75: mol_type = other DNA
gatttttgtagaccaggagaggaagtatcaagatctattgcaaataaagtttttcatgcatttattgatttagtt

SEQ ID NO: 581546 - DNA, 75 bp, synthetic construct
  source 1..75: mol_type = other DNA
gaatttaacgatactataattgaatctcagaaagtcacaggcaataaggcaaagcatattcttgaggatatagaa

SEQ ID NO: 581547 - DNA, 75 bp, synthetic construct
  source 1..75: mol_type = other DNA
aaaatagcgtatggaccatcattgccgatatcactacgacgaaccaaaacaccctcctcaacttagccaaccttg

SEQ ID NO: 581548 - DNA, 75 bp, synthetic construct
  source 1..75: mol_type = other DNA
cagcccgcaggcacgaaaaaagtggccgggactgggaaatgaggtgacagcccgcctgctgaccgtgacgcgcaa

SEQ ID NO: 581549 - DNA, 60 bp, synthetic construct
  source 1..60: mol_type = other DNA
cagcaatccgaaaccactggcacgtggagaataagctgcactggcgtctggacgtggtaa

SEQ ID NO: 581550 - DNA, 75 bp, synthetic construct
  source 1..75: mol_type = other DNA
gccacgttggtaacgaactgaaaaaatataccttttctggttccaggctctctgttctgtccagcctgtttacct

SEQ ID NO: 581551 - DNA, 75 bp, synthetic construct
  source 1..75: mol_type = other DNA
caatacaggttcccaaattctgcaaagaattagagctcgatttcaataattatatggtatttccaaaagtatccg

SEQ ID NO: 581552 - DNA, 75 bp, synthetic construct
  source 1..75: mol_type = other DNA
ggcatgcacgatgcaacgatcgcgcagatcgcccgccgtgcaggcgtttctacggggatcatcagccactatttc

SEQ ID NO: 581553 - DNA, 75 bp, synthetic construct
  source 1..75: mol_type = other DNA
cgcgaatccgactaacccttctcggtgagggagccgaacaagaggttttgaaaaagaccataacacaacacgcca

SEQ ID NO: 581554 - DNA, 75 bp, synthetic construct
  source 1..75: mol_type = other DNA
tcacggtatatggcgggatttaatgaagcgctcaggaatgctgtcgattatggacgctcaggctcgtgaccagtg

SEQ ID NO: 581555 - DNA, 75 bp, synthetic construct
  source 1..75: mol_type = other DNA
aacacccgtctcaatttagcaaacctggtgatgtcagacggaactgtcgttatgatggctgagccagcaactcgc

SEQ ID NO: 581556 - DNA, 75 bp, synthetic construct
  source 1..75: mol_type = other DNA
ttgccgctatcgaaaagggaggattactggaggttaaagaggggggattagcgattgcggtagatcagaaagcag

SEQ ID NO: 581557 - DNA, 75 bp, synthetic construct
  source 1..75: mol_type = other DNA
cagcaaatgctatgattttgtttagattggatttaataaaaacactaaccaagaaagggatttcagtctatgctt

SEQ ID NO: 581558 - DNA, 75 bp, synthetic construct
  source 1..75: mol_type = other DNA
aaggatatgagcgctaaataccgtgaaacttatcatggctgtctgagcaaattgcagccaagaaaaaaggatgcg

SEQ ID NO: 581559 - DNA, 75 bp, synthetic construct
  source 1..75: mol_type = other DNA
ccagttggcgggcaggtacaaattccttgtattgaacgaaatgctatttcagctgtgaaagctatcaacgcaacg

SEQ ID NO: 581560 - DNA, 75 bp, synthetic construct
  source 1..75: mol_type = other DNA
acatatgaccgtccggacccgcgtattaagcagctggcgcgtcgcagtacggtgacaccgggcggtgtcgcctgc

SEQ ID NO: 581561 - DNA, 75 bp, synthetic construct
  source 1..75: mol_type = other DNA
tttcatgcagggcgcctggaatatgaccatgggacttgtattaagtacctatggtatggcaaccattattggctc

SEQ ID NO: 581562 - DNA, 75 bp, synthetic construct
  source 1..75: mol_type = other DNA
gaatttcttaactatatgatgaagaaagaacgtgttatttttgaaagagagtttgaacggcttttaggtgaaaaa

SEQ ID NO: 581563 - DNA, 75 bp, synthetic construct
  source 1..75: mol_type = other DNA
actaaagcattcctcattaagtcagtacgctgatgttgtcttactgacgggtgggacgtcaaatccttatcagtc

SEQ ID NO: 581564 - DNA, 75 bp, synthetic construct
  source 1..75: mol_type = other DNA
atgacagcacagatagcggcttacggacggctggtggctgatccgcagttaaagaccaccagcaagggtacacaa

SEQ ID NO: 581565 - DNA, 75 bp, synthetic construct
  source 1..75: mol_type = other DNA
gagatggagtcttatcacggaatgttggcctgtgtgatcgcaggagcaggcattgcgcttattccgcgctctatg

SEQ ID NO: 581566 - DNA, 75 bp, synthetic construct
  source 1..75: mol_type = other DNA
atcttatgctttgcttggtctggcgaccattctttctccactctttattggcatggtagcagaccgttttttttc

SEQ ID NO: 581567 - DNA, 75 bp, synthetic construct
  source 1..75: mol_type = other DNA
aggacagctgttggggctggatatcttcaagacttctgccagctataacatggtcgttggtgcaacgtctggtgc

SEQ ID NO: 581568 - DNA, 75 bp, synthetic construct
  source 1..75: mol_type = other DNA
tgcgacagttgtagccagaccatcgagcctgacgaagtgatcctgacgcgtaagcgtatgaaaatagaactgcct

SEQ ID NO: 581569 - DNA, 75 bp, synthetic construct
  source 1..75: mol_type = other DNA
tcaaagtaaaaatgcctctttaattcaggcatggatcgatgatgggatgatcttacccagcaatagtggacacgc

SEQ ID NO: 581570 - DNA, 75 bp, synthetic construct
  source 1..75: mol_type = other DNA
gccgtcatgccgttgaagtactgtatcaaaaccagggcgcgctacagcgtctgcttcaactgctggaaccttacc

SEQ ID NO: 581571 - DNA, 75 bp, synthetic construct
  source 1..75: mol_type = other DNA
actttggcgttctatctgcccgctctgacctttatcggcagtgaattggtcgccaaaagaaaagacgcggtgaag

SEQ ID NO: 581572 - DNA, 75 bp, synthetic construct
  source 1..75: mol_type = other DNA
gtccgcgttctaataatctgatccattatcgagatacttttgagggattcaaaaacaattcttatgatgcatttg

SEQ ID NO: 581573 - DNA, 75 bp, synthetic construct
  source 1..75: mol_type = other DNA
gttatctccgtcattctgatgttagcgctttattatgctttcctgactatgccgccgttcccgcctcagcactaa

SEQ ID NO: 581574 - DNA, 75 bp, synthetic construct
  source 1..75: mol_type = other DNA
tcaatgttctaaaactgcattacgaacttgtgcagggcctttcaaaatatgctttttgtggtttagatatcttac

SEQ ID NO: 581575 - DNA, 75 bp, synthetic construct
  source 1..75: mol_type = other DNA
aaattattggataggaaaaataaagcatttataatgctctctcttataattttgggcggtgtttctgtcattgca

SEQ ID NO: 581576 - DNA, 75 bp, synthetic construct
  source 1..75: mol_type = other DNA
tatggatgagtggtacaaggattcgcctgatctggtggtgattaccgggcgtaatctgacggttaaccgctcttt

SEQ ID NO: 581577 - DNA, 75 bp, synthetic construct
  source 1..75: mol_type = other DNA
tgtaaatataacgacatcattccggcggaccattgtctgcatgatgtgcaggacatgagccgtcttaaccatccg

SEQ ID NO: 581578 - DNA, 75 bp, synthetic construct
  source 1..75: mol_type = other DNA
taaattactaaaagaaaataatgaaataaccatcaagaatgaaaaattaaagaagaagataagtttttttgaaag

SEQ ID NO: 581579 - DNA, 75 bp, synthetic construct
  source 1..75: mol_type = other DNA
ggcctaactagttttggcatagtgaaagttatgatcgatcgcggattgctgctgcgccaccagcaaaatggtgtt

SEQ ID NO: 581580 - DNA, 75 bp, synthetic construct
  source 1..75: mol_type = other DNA
ctgcagatgaaggctgaggtcagcgcgctgcaaacgctggaggagattcggggttacgtggttggatgggcgcat

SEQ ID NO: 581581 - DNA, 75 bp, synthetic construct
  source 1..75: mol_type = other DNA
gcgcgaccagcaggagagtatcgaatacctgatggagtttaacgggcgccgctgggattacggtaagcgtacaaa

SEQ ID NO: 581582 - DNA, 75 bp, synthetic construct
  source 1..75: mol_type = other DNA
tgcgtgaactgttgtcccaggctccggtgatggcaagaattgccgactgggtggaactgctgtggcaaccgctgg

SEQ ID NO: 581583 - DNA, 75 bp, synthetic construct
  source 1..75: mol_type = other DNA
atcccggtttctgcgctggtatcgcgatttaccgtcaatccatcggtacaacagcgttttgaaaacgcttcaaag

SEQ ID NO: 581584 - DNA, 75 bp, synthetic construct
  source 1..75: mol_type = other DNA
tcggctttaacggcacatcacacgcggaaaaatccaatttcagcaccaacaagctgcttcaggacgttaacgtgg

SEQ ID NO: 581585 - DNA, 75 bp, synthetic construct
  source 1..75: mol_type = other DNA
tcgaaatcacccctttcaacgtcacgccggaacttattgcagcggaaaaggatgccaaaaggcgggaaattgagg

SEQ ID NO: 581586 - DNA, 75 bp, synthetic construct
  source 1..75: mol_type = other DNA
ggctgcaagcctatttgtatataccagccatgtggggaagataaagtctcgatgtaaggaggaaaaaaacatggt

SEQ ID NO: 581587 - DNA, 75 bp, synthetic construct
  source 1..75: mol_type = other DNA
atgcgcagcctgaagggcggtaagccgtttgtgctgatggagtccacgccgggcgccaccaactggcagccgacc

SEQ ID NO: 581588 - DNA, 75 bp, synthetic construct
  source 1..75: mol_type = other DNA
aacaccgctcaggtgaccgatttttgccgccatgaaattgctccgctgaaagcggcgaattccgctctgccagtg

SEQ ID NO: 581589 - DNA, 75 bp, synthetic construct
  source 1..75: mol_type = other DNA
ccggtggttttgagcgaacggactttctcgatgaaaaactttttctacacacatccccgttttatgtagaagcaa

SEQ ID NO: 581590 - DNA, 75 bp, synthetic construct
  source 1..75: mol_type = other DNA
tgaatattcttattctattaaactttttactctatcaagacgctttggggaatctgagttcgaattcgatgatgt

SEQ ID NO: 581591 - DNA, 75 bp, synthetic construct
  source 1..75: mol_type = other DNA
gaatatgaactagatgaaaagaactatgtgtttatcttcgaatatcatgatgatgttcttattcttgatgacgaa

SEQ ID NO: 581592 - DNA, 75 bp, synthetic construct
  source 1..75: mol_type = other DNA
atttagctggccgtaacggctcgcaaatagacctgaaaacttggatccagtaccgggcagacaaggcgccagtag

SEQ ID NO: 581593 - DNA, 75 bp, synthetic construct
  source 1..75: mol_type = other DNA
ttgtcggcaccgacaacgctgaaggcggggccgttgttgagttctgaaaaactgattgcgattggtgcttcaacg

SEQ ID NO: 581594 - DNA, 75 bp, synthetic construct
  source 1..75: mol_type = other DNA
accccagcggccaccctgaaagctacgcctgtggatgcgccgacgcgcccgcgcgtggtgtggccgggggcgatc

SEQ ID NO: 581595 - DNA, 75 bp, synthetic construct
  source 1..75: mol_type = other DNA
tctgaacctcgactggcgccgctttaatacggcgcaggtaacagatttctgccgccatgaggttgcgccgctaaa

SEQ ID NO: 581596 - DNA, 75 bp, synthetic construct
  source 1..75: mol_type = other DNA
atcaggaatgggtttttgtacaaaattacactgctcatgtacaaaatgtggtgcttcctggtgcatggcgagtgg

SEQ ID NO: 581597 - DNA, 75 bp, synthetic construct
  source 1..75: mol_type = other DNA
tggatcattaccgacctttctgggagcagggggtggcggtcgatattatcaacgctgattgtgatcttacgggtt

SEQ ID NO: 581598 - DNA, 75 bp, synthetic construct
  source 1..75: mol_type = other DNA
gacggctttgcgtttcttgctatgggtttcacgggtaaacgtgctgcccagttcaaagaggcatacatcaatgcc

SEQ ID NO: 581599 - DNA, 75 bp, synthetic construct
  source 1..75: mol_type = other DNA
gaagtgcttgatgcatacgacactgatgaaatcagtgagacgggttatatcaacaaactcagacgccttgctcaa

SEQ ID NO: 581600 - DNA, 75 bp, synthetic construct
  source 1..75: mol_type = other DNA
acaacgaatacacaggtaacggtgttacaacggcattcccttataccttcaggattttccagaaatctgatttag

SEQ ID NO: 581601 - DNA, 75 bp, synthetic construct
  source 1..75: mol_type = other DNA
ctttgttctggcaacaaatagaaccgaaaccgttcgtgactttgtcagcatggctttcaaagctgctgggtttac

SEQ ID NO: 581602 - DNA, 75 bp, synthetic construct
  source 1..75: mol_type = other DNA
gcgtggtgttcggcatgccgcgtgaggccatcaatatgggtggtgtctgcgaagtggtcgatcttagccaggtaa

SEQ ID NO: 581603 - DNA, 75 bp, synthetic construct
  source 1..75: mol_type = other DNA
atccttccgtcccgcccgccgctcagcgcaatcggctgttgctgaatgcgattatgactggtggcggttttgtcg

SEQ ID NO: 581604 - DNA, 75 bp, synthetic construct
  source 1..75: mol_type = other DNA
taatcagggtgcccgctggttgttgggctcagaactgttacgaacaggcgatcataagcaagccttcagtgtact

SEQ ID NO: 581605 - DNA, 75 bp, synthetic construct
  source 1..75: mol_type = other DNA
atggaaattttacctcaacgctcagacgctcttgataaacaaaaattaaatctaaactcagatagaaaagaaaaa

SEQ ID NO: 581606 - DNA, 75 bp, synthetic construct
  source 1..75: mol_type = other DNA
aagatggaatcaaatggcatcagtgttatggcagccatattactggtggataaccatgttttgacggtccggcta

SEQ ID NO: 581607 - DNA, 75 bp, synthetic construct
  source 1..75: mol_type = other DNA
ttctcagagaactgtagacaaaatggtcgtcatatctttagcaacaaggattttgtcattaaattttccacgtcc

SEQ ID NO: 581608 - DNA, 75 bp, synthetic construct
  source 1..75: mol_type = other DNA
ggaaccaaaaactacccttgagcagctttgccagatgatggtagaggctgatctacgtcgtaaccaacagggaat

SEQ ID NO: 581609 - DNA, 75 bp, synthetic construct
  source 1..75: mol_type = other DNA
ggtgtggggctaagtctgagctacgataaaggtgaagtaaacggcgtctgggcatcgcttagtggcgaccagtta

SEQ ID NO: 581610 - DNA, 75 bp, synthetic construct
  source 1..75: mol_type = other DNA
tagtggacatatgaacgttattaatactatttttaacgcattacccactctgtttaatacgtttaaattcgataa

SEQ ID NO: 581611 - DNA, 75 bp, synthetic construct
  source 1..75: mol_type = other DNA
atgtctaaagaacagcagaaaaaagcactcgagatgatcaaggcggtctacgatgacggttttgctgaaatcaac

SEQ ID NO: 581612 - DNA, 75 bp, synthetic construct
  source 1..75: mol_type = other DNA
gtggttcttgatggcattaatggccttacagtttatgcggataatgatgttgaatttaatactgatcatcctgtc

SEQ ID NO: 581613 - DNA, 75 bp, synthetic construct
  source 1..75: mol_type = other DNA
ctggtacaccattctcggtacgccgtggctggaaaaactggggggggcagagagagtaaaacatcgtttagctaa

SEQ ID NO: 581614 - DNA, 75 bp, synthetic construct
  source 1..75: mol_type = other DNA
actacatcgagaaatggctgccggaagcctccgtgaaatacaaagacggcagtccggcagtcaatctcggtctga

SEQ ID NO: 581615 - DNA, 75 bp, synthetic construct
  source 1..75: mol_type = other DNA
gctcttcttcgtgattttgataatccgccctttaaaaaagtgccggcttactggtttcatcccggactgacttat

SEQ ID NO: 581616 - DNA, 75 bp, synthetic construct
  source 1..75: mol_type = other DNA
tgacggagctgttgactctattgctggtaccgggttgatcaccaaaacaggttccggcgatctggtacttactgg

SEQ ID NO: 581617 - DNA, 75 bp, synthetic construct
  source 1..75: mol_type = other DNA
cgctggttattggcaatacagagaatgacggagctgttgactctattgctggtaccgggttgatcaccaaaacag

SEQ ID NO: 581618 - DNA, 75 bp, synthetic construct
  source 1..75: mol_type = other DNA
gcacattatcggctttccgtaagggaaaatataaaggcgataacgctgctgtggctgcttccctgcgttcctggt

SEQ ID NO: 581619 - DNA, 75 bp, synthetic construct
  source 1..75: mol_type = other DNA
ctgtgggggctggcactcagcctgcccgcagacaccggctacccggacccgcgcggggaactggacccggaagcc

SEQ ID NO: 581620 - DNA, 75 bp, synthetic construct
  source 1..75: mol_type = other DNA
atgtttccattaaatgatctttcgttaaaaactcagtcggttcaattaaataaagtcacatctaatactgaatct

SEQ ID NO: 581621 - DNA, 75 bp, synthetic construct
  source 1..75: mol_type = other DNA
tggtgggtggtattggtgtaatgaatattatgctggtgtcagtgaccgagcggacgcgggaaattggcattcgca

SEQ ID NO: 581622 - DNA, 75 bp, synthetic construct
  source 1..75: mol_type = other DNA
caatccagcatttgctggagaacggggaagccacgttccgggagctggctgatgctcttggtgtgaccaacaaga

SEQ ID NO: 581623 - DNA, 75 bp, synthetic construct
  source 1..75: mol_type = other DNA
tcgatgtggtggttgggcgaattggcggtcgcgcgttgcagctgccgctgaattatcgcgtgctctacaccgagc

SEQ ID NO: 581624 - DNA, 75 bp, synthetic construct
  source 1..75: mol_type = other DNA
tcttgttgaggttagcatacccggagaactgctgacagatttccggcagatacagaataatggtaagcgccccga

SEQ ID NO: 581625 - DNA, 75 bp, synthetic construct
  source 1..75: mol_type = other DNA
tattcgaaaggcaatttgaacaagaaaaaatccaaatggattatttgattaagaatctttttgacttgggggatt

SEQ ID NO: 581626 - DNA, 75 bp, synthetic construct
  source 1..75: mol_type = other DNA
taagattcaaccgaaagaggaacatatcgatagagacgttgttactacaccaactcacattgtaaaagaaatcat

SEQ ID NO: 581627 - DNA, 75 bp, synthetic construct
  source 1..75: mol_type = other DNA
actggtcattttgacaatgaatggtcagaaattgaaaataagatactgagattcagtgttgatgatctattcctc

SEQ ID NO: 581628 - DNA, 75 bp, synthetic construct
  source 1..75: mol_type = other DNA
acatcagctacgtttccctagatgttaaaatcagtagtcgcagggccaatgctaatgatccacacattgaccgtg

SEQ ID NO: 581629 - DNA, 75 bp, synthetic construct
  source 1..75: mol_type = other DNA
ataagagataatgaaaagaacgatttattgcttaagcagactgattttaaaaacaggctcatcaaaagacgaacc

SEQ ID NO: 581630 - DNA, 75 bp, synthetic construct
  source 1..75: mol_type = other DNA
tggctggccgaaaatgaaggggcgaagttctggctcaatgtgctgactgaaccgccccggttttcctggagagtg

SEQ ID NO: 581631 - DNA, 75 bp, synthetic construct
  source 1..75: mol_type = other DNA
gtcgcgtttttgactggggaggtgacgttcattggcatcaaagcaatcgcatgtcgaatatggtgcgctatgacg

SEQ ID NO: 581632 - DNA, 75 bp, synthetic construct
  source 1..75: mol_type = other DNA
agcatgaaactgaacctcaggatttagattttccagcagaatttgactctctgattaatgcaaatggaaagataa

SEQ ID NO: 581633 - DNA, 75 bp, synthetic construct
  source 1..75: mol_type = other DNA
ctgtaatgaagtcatcactactccctatatgggcggaggaggattactttctttcttgattactaaaccctttat

SEQ ID NO: 581634 - DNA, 75 bp, synthetic construct
  source 1..75: mol_type = other DNA
gccgcgcggatgggtattgccgcgctaccgcattgggtagtagagagttttgagcgccagggtctggtggtgacc

SEQ ID NO: 581635 - DNA, 75 bp, synthetic construct
  source 1..75: mol_type = other DNA
cctgcacccggcacataaaacaccggataacgccattctcgccagcagcctggtactgtttaccggcgtcatcat

SEQ ID NO: 581636 - DNA, 75 bp, synthetic construct
  source 1..75: mol_type = other DNA
gcgttggctactggaatctacacctgagggtgtgcaacttgccgaccagggtgaaatttgtctcggcaccattga

SEQ ID NO: 581637 - DNA, 75 bp, synthetic construct
  source 1..75: mol_type = other DNA
catccctttggcatacaacgagaggatctggttatctatcccagtaatacggggctgatttttctttaccagttg

SEQ ID NO: 581638 - DNA, 75 bp, synthetic construct
  source 1..75: mol_type = other DNA
aaaccattatttatcatgttgttaaccgtcatattcggactcaatatctccgatatcacttagtgggtctactcc

SEQ ID NO: 581639 - DNA, 75 bp, synthetic construct
  source 1..75: mol_type = other DNA
tcagggcggttactacagtccgcaggaatacctgtcgtttgccataccggtgatgtggcgggagcgcacggaaaa

SEQ ID NO: 581640 - DNA, 75 bp, synthetic construct
  source 1..75: mol_type = other DNA
atcgggctaacgttgaccgccaccagcgcgtcgacaaaagaaaattcaagcaccacaatccgctgcggcgtttta

SEQ ID NO: 581641 - DNA, 75 bp, synthetic construct
  source 1..75: mol_type = other DNA
atagaatataaccttccttggattgacaaaatacattttgtgacatgtggtcaaaagccaagttggatggttgga

SEQ ID NO: 581642 - DNA, 75 bp, synthetic construct
  source 1..75: mol_type = other DNA
gggtagatggtaatgatccaaaatggcaggaagaatacaataaatattgtaagccggcctctcgaattgagaatg

SEQ ID NO: 581643 - DNA, 75 bp, synthetic construct
  source 1..75: mol_type = other DNA
aaagtaagttatttagaattgaagaaaatatttctgatacaaagcctattccaaaaagatatttcagcaaagttg

SEQ ID NO: 581644 - DNA, 75 bp, synthetic construct
  source 1..75: mol_type = other DNA
agaatccactgctgcagatgttattgctagcatcaaagacggcagtgctccgacttctgcaattactgcaaccat

SEQ ID NO: 581645 - DNA, 75 bp, synthetic construct
  source 1..75: mol_type = other DNA
tactcccttccaggttaattaatcctggggaattaatttcagactatttatttaaagtaaatggcattaaaatag

SEQ ID NO: 581646 - DNA, 75 bp, synthetic construct
  source 1..75: mol_type = other DNA
cgcctcattgcacaacatggagattcttatcttcatatagccagcctgtatttgcgcaaagcatatgggagataa

SEQ ID NO: 581647 - DNA, 75 bp, synthetic construct
  source 1..75: mol_type = other DNA
tcagattataaaatgattgctgatgatcagcaaaggaaacttgcctgtgtctggaatccctttcttgatggttgg

SEQ ID NO: 581648 - DNA, 75 bp, synthetic construct
  source 1..75: mol_type = other DNA
acacttcatttaacggaacttttaaatgcggtggtaatataattattgaggggcatgttgagggcgatgttattt

SEQ ID NO: 581649 - DNA, 75 bp, synthetic construct
  source 1..75: mol_type = other DNA
cttaatcattggagaagagcattgatagatagtctatccgataatgtggagttccttgacgctggttttattact

SEQ ID NO: 581650 - DNA, 75 bp, synthetic construct
  source 1..75: mol_type = other DNA
atgtgtcgaatgactaagacatttggatcaacaatagctgacgtgataggtaaaaatcatgaggcggcaggggat

SEQ ID NO: 581651 - DNA, 75 bp, synthetic construct
  source 1..75: mol_type = other DNA
cgttggtgggctggcgcaatggatgtgcagcagggaagcgccgccgaaacattccgcattcgctttcatgacgag

SEQ ID NO: 581652 - DNA, 75 bp, synthetic construct
  source 1..75: mol_type = other DNA
ccagcaacgtgctcgcatagaggtgacattgcagggtgacgcgctacagcaacacggcttcggtcttctctccgg

SEQ ID NO: 581653 - DNA, 75 bp, synthetic construct
  source 1..75: mol_type = other DNA
aacctgaatgtctgggggaatgtgggcgttcaggttgccgataggggatataatgacacctctgcaatggttggc

SEQ ID NO: 581654 - DNA, 75 bp, synthetic construct
  source 1..75: mol_type = other DNA
atccagagccgaaccctaacccgacacctacgccgggtccggatctgaatgtggataatgacctgcgaccggagg

SEQ ID NO: 581655 - DNA, 75 bp, synthetic construct
  source 1..75: mol_type = other DNA
atgacacgccaacctttgtacaaagcgctctggatgctggtgccagtggctatttgaccaaacgctgtgggccgg

SEQ ID NO: 581656 - DNA, 75 bp, synthetic construct
  source 1..75: mol_type = other DNA
tcgaaggattaaaaccggcgacctgaaatggcaaaatgacacgtcctgttaccttctggacgtcatgcggaccaa

SEQ ID NO: 581657 - DNA, 75 bp, synthetic construct
  source 1..75: mol_type = other DNA
cccatctgctcctacaagattccctgccttgttaattataatattaattataattgcaccgatatatgaagaatt

SEQ ID NO: 581658 - DNA, 75 bp, synthetic construct
  source 1..75: mol_type = other DNA
cttgtggcttttcattgcccacatcctggcaatattgttaaaggatatgtgcttaaagaagtgaaaaatcttttg

SEQ ID NO: 581659 - DNA, 75 bp, synthetic construct
  source 1..75: mol_type = other DNA
cggagagggagcaaggttgctgttaaggtgtgtttcggccgctacccggatgtagggcttaaggccgcgcgagag

SEQ ID NO: 581660 - DNA, 75 bp, synthetic construct
  source 1..75: mol_type = other DNA
cagaaagggaacaaggccagagtcattaaggtatgcttcggccgttacccggatgtagggcttaagaccgcacga

SEQ ID NO: 581661 - DNA, 75 bp, synthetic construct
  source 1..75: mol_type = other DNA
atatgataaggaattatgaccattgcgatatatcatgttggtctgaaagacgaagacaaactgaagaatgggtaa

SEQ ID NO: 581662 - DNA, 75 bp, synthetic construct
  source 1..75: mol_type = other DNA
gatatctctatctcagcttcgcaaatggcgagcatccttcaggataaagatttcaccttaagtgatggtagtgat

SEQ ID NO: 581663 - DNA, 75 bp, synthetic construct
  source 1..75: mol_type = other DNA
cggaacggcgaaacgtggctggtctggttatcgcagacagcgtaatcagtgcgcgaacggtgcggccgggcggca

SEQ ID NO: 581664 - DNA, 75 bp, synthetic construct
  source 1..75: mol_type = other DNA
aagatcacaccagaattattacgtcacacaccgggatatatccggagtacggtatcgaaatggtccagaggatgg

SEQ ID NO: 581665 - DNA, 75 bp, synthetic construct
  source 1..75: mol_type = other DNA
ttgagtcaaatcatggttagcttaggccatccaaaatacaaccttcgtagaatgtacgaagacttcaagaaataa

SEQ ID NO: 581666 - DNA, 75 bp, synthetic construct
  source 1..75: mol_type = other DNA
gaacaacaccactaccaacctgtccgaagcgcagtcccgtattcaggacgccgactatgcgaccgaagtgtccaa

SEQ ID NO: 581667 - DNA, 75 bp, synthetic construct
  source 1..75: mol_type = other DNA
ctgggcttctcggaaatacggatgcgaatggtactgctgttaaaacaaccatcaagacagaggctggcgtaacag

SEQ ID NO: 581668 - DNA, 75 bp, synthetic construct
  source 1..75: mol_type = other DNA
gtggtagataagcagattcgccgtcaggattttctgacatttttcagtaaccgggagccttgcctgattggcatg

SEQ ID NO: 581669 - DNA, 75 bp, synthetic construct
  source 1..75: mol_type = other DNA
ccaatggatgggatgtcactcccagatgaaaacggctgggatgttggaaatcaagttacccgtactgctgcggat

SEQ ID NO: 581670 - DNA, 75 bp, synthetic construct
  source 1..75: mol_type = other DNA
tcaaaatatcaggcgttggctaaaagaaaatgaaaatatggtgaaagctattaagaaaattgatactaataacat

SEQ ID NO: 581671 - DNA, 75 bp, synthetic construct
  source 1..75: mol_type = other DNA
gcctagagaatggaatcagtacattacctgactggaagatatggattattttgcttggtcgatttacggggatga

SEQ ID NO: 581672 - DNA, 75 bp, synthetic construct
  source 1..75: mol_type = other DNA
aacagtccaaagccgggctaaatcgcatcattaacgatgtgaaagggcgcaaggttgtccgggcgctgcagtcag

SEQ ID NO: 581673 - DNA, 75 bp, synthetic construct
  source 1..75: mol_type = other DNA
ggtggcaatgttactgttaatcaaggtagttttgctggcaccatcgaaggtgctggtcagctcaccattgcgcaa

SEQ ID NO: 581674 - DNA, 75 bp, synthetic construct
  source 1..75: mol_type = other DNA
taggcgtgattcatgggtgtgttgatgttatggaagccaacagcaataaggactttaatgttgttgcgccgtacc

SEQ ID NO: 581675 - DNA, 75 bp, synthetic construct
  source 1..75: mol_type = other DNA
tgcgccgatgcaattcgggctttacgcggcggcgggcaacccgcccaggcactggaaattctcaccccacgagaa

SEQ ID NO: 581676 - DNA, 75 bp, synthetic construct
  source 1..75: mol_type = other DNA
tcagcaggtaatatcaccatcggtggaagccaggcatacgtagacgatgcaggcaacttgacgactaacaacgct

SEQ ID NO: 581677 - DNA, 75 bp, synthetic construct
  source 1..75: mol_type = other DNA
gctaaccgtttcacctctaatattaaaggcctgactcaggcggcccgtaacgccaacgacggtatctccgttgcg

SEQ ID NO: 581678 - DNA, 75 bp, synthetic construct
  source 1..75: mol_type = other DNA
gctaaccgttttacttccaacattaaaggcctgactcaggcggcccgtaacgccaacgacggtatctccgttgcg

SEQ ID NO: 581679 - DNA, 75 bp, synthetic construct
  source 1..75: mol_type = other DNA
cacttctgctggtggtaatgctcaggtgttaaaagacgcggcttataatgccgcatatgcgacctcaattactac

SEQ ID NO: 581680 - DNA, 75 bp, synthetic construct
  source 1..75: mol_type = other DNA
aaggcctgactcaggctgcacgtaacgccaacgacggtatttctgttgcacagaccaccgaaggcgcgctgtccg

SEQ ID NO: 581681 - DNA, 75 bp, synthetic construct
  source 1..75: mol_type = other DNA
acaaattccgttcttccctgggtgctatccagaaccgtctggattccgcggtcaccaacctgaacaacaccacta

SEQ ID NO: 581682 - DNA, 75 bp, synthetic construct
  source 1..75: mol_type = other DNA
agtaatacggttactcagacttatcacgagtttgctaatggtaacatttatgatgataaaggctcgtcactgtat

SEQ ID NO: 581683 - DNA, 75 bp, synthetic construct
  source 1..75: mol_type = other DNA
gctaaccgttttacttctaacattaaaggcctgactcaggctgcacgtaacgccaacgacggtatctccgttgcg

SEQ ID NO: 581684 - DNA, 75 bp, synthetic construct
  source 1..75: mol_type = other DNA
ctgctgcatctaaagctgacttggtagctgctaatgcaactgtggtaggcaacaaatatactgtgagtgcgggtt

SEQ ID NO: 581685 - DNA, 75 bp, synthetic construct
  source 1..75: mol_type = other DNA
gtgtgaacgtactggcgaaagacggttcgatgaaaattcaggttggtgcgaatgacggccagactatcacgattg

SEQ ID NO: 581686 - DNA, 75 bp, synthetic construct
  source 1..75: mol_type = other DNA
ttataactttggtgcagcggcaacttctggcgtaacctacaccaaaactgtaagcgctgatactgtactgagcac

SEQ ID NO: 581687 - DNA, 75 bp, synthetic construct
  source 1..75: mol_type = other DNA
acctgtctgaagcgcagtcccgtattcaggacgccgactatgcgaccgaagtgtccaacatgtcgaaagcgcaga

SEQ ID NO: 581688 - DNA, 75 bp, synthetic construct
  source 1..75: mol_type = other DNA
gaaagagaatgagcaactgcgtaagcgcggcactaatgtatccggtcaggttgacgaggctgtgcaggggctgcg

SEQ ID NO: 581689 - DNA, 75 bp, synthetic construct
  source 1..75: mol_type = other DNA
tacgttaatgaccgcaaagcggggaccttcagcgttgacctgacgaacgctacgaaagcactgccaacattagca

SEQ ID NO: 581690 - DNA, 75 bp, synthetic construct
  source 1..75: mol_type = other DNA
ggttctaaaaacattgagctaacggcggaagatttaaatcttgagcaaaccgtagaattagccgctggatcattg

SEQ ID NO: 581691 - DNA, 75 bp, synthetic construct
  source 1..75: mol_type = other DNA
gcattaccgtttttgccacatctatgacctcaatttttggtccgcttatccgcgggggattcaacaaacttgtaa

SEQ ID NO: 581692 - DNA, 75 bp, synthetic construct
  source 1..75: mol_type = other DNA
cggcacgatccgcacggtgccgaagccggctgaccggacggacggcggcagtcaggccaacagcggacagaatgc

SEQ ID NO: 581693 - DNA, 75 bp, synthetic construct
  source 1..75: mol_type = other DNA
gacactaactacaccatttgccgatccgtggatctgcattagtcagtgtcctggcaacttatcggatgacggggc

SEQ ID NO: 581694 - DNA, 75 bp, synthetic construct
  source 1..75: mol_type = other DNA
tgctttcctggtgcatcgctctatgaagctggtacaggccgttttatgctatctaataatactaatgcaatgacg

SEQ ID NO: 581695 - DNA, 75 bp, synthetic construct
  source 1..75: mol_type = other DNA
tctctttacagtatgtgaataaaaaccagaagacatatcgccaggcaatggggaacagcggatttcaaattgctt

SEQ ID NO: 581696 - DNA, 75 bp, synthetic construct
  source 1..75: mol_type = other DNA
aaacatggaacttccagtgcccttcaggtcatgtattgtctggtataaatgttcaggatacagggtcaaattctg

SEQ ID NO: 581697 - DNA, 75 bp, synthetic construct
  source 1..75: mol_type = other DNA
aataccgctgcccgtaatgcatcatttaacttgtggggaaattcgtcaagaccaactgttgcagagcttggtgat

SEQ ID NO: 581698 - DNA, 75 bp, synthetic construct
  source 1..75: mol_type = other DNA
acggttattgttccaactcaggattataccgtcggtcaaacaacatataagtggggagcaactaatcccgcgaca

SEQ ID NO: 581699 - DNA, 75 bp, synthetic construct
  source 1..75: mol_type = other DNA
gggtattcaggctggggaaagtaagttcttcacactttcaagtgcaaataccgctgcccgtaatgcatcatttaa

SEQ ID NO: 581700 - DNA, 75 bp, synthetic construct
  source 1..75: mol_type = other DNA
agtgattttgactgggaacacgagcgtttaactataaccagcactaaacagatcagaagaaaaaggattttcccg

SEQ ID NO: 581701 - DNA, 75 bp, synthetic construct
  source 1..75: mol_type = other DNA
tttaacaccgaaggaatgtatcgcgcctggggctacgcaggcgatacgccaaccaccggtatctaccgtgaaaaa

SEQ ID NO: 581702 - DNA, 75 bp, synthetic construct
  source 1..75: mol_type = other DNA
catggctggcgtggcattcagaaaactggacgccaccctcaacgtggaataacggtattcctggcttcctgatgg

SEQ ID NO: 581703 - DNA, 75 bp, synthetic construct
  source 1..75: mol_type = other DNA
ggattgctggatgatttttctaaagagcaagtgtcaaaggttcctctgcttggcgatattcctttagtggggcaa

SEQ ID NO: 581704 - DNA, 75 bp, synthetic construct
  source 1..75: mol_type = other DNA
ttccaatccctgtaagtcctgaaggaaccccgctccgctttattcgcagcgaaattctcgagtatttctacagag

SEQ ID NO: 581705 - DNA, 75 bp, synthetic construct
  source 1..75: mol_type = other DNA
ccgctttactcttgcgtcataccagtcgccgggtaacagacatatcactaatgtatgatttcagttccccccaag

SEQ ID NO: 581706 - DNA, 75 bp, synthetic construct
  source 1..75: mol_type = other DNA
tttcagaatatccagccgtacatttcagcagatattttcccagggaaaatacttagaatcagcggcacgatgaag

SEQ ID NO: 581707 - DNA, 75 bp, synthetic construct
  source 1..75: mol_type = other DNA
ttctagatgcgtttgagtatgtaaaaaacgatgacaatttcaggagagggacaaaaacaactctctcagaaaaca

SEQ ID NO: 581708 - DNA, 75 bp, synthetic construct
  source 1..75: mol_type = other DNA
atgcctgtcccggtggctctgactgatacgccagagccgaccagaccagttacaaatcccttctggcgtaacaag

SEQ ID NO: 581709 - DNA, 75 bp, synthetic construct
  source 1..75: mol_type = other DNA
ccggaaacgtcccacggtgcgagctgcatcttaaatcaggtgtggtaaaactgtttgaccctctcactccggaaa

SEQ ID NO: 581710 - DNA, 75 bp, synthetic construct
  source 1..75: mol_type = other DNA
tctatgatcccggggaccctatggggaagatgttttttaacgttctggcaacctttgctgaatttgagggagacc

SEQ ID NO: 581711 - DNA, 75 bp, synthetic construct
  source 1..75: mol_type = other DNA
ggatctgattgtcgctaccgcgtcacttgaggtcggatttaacgacccgaacgtcggtgccgttatccagcataa

SEQ ID NO: 581712 - DNA, 75 bp, synthetic construct
  source 1..75: mol_type = other DNA
gccgtcttgcccgtacaaaacaacttcgcaaggccaaaaaggcagatgtgctggccattgccagggcatggggta

SEQ ID NO: 581713 - DNA, 75 bp, synthetic construct
  source 1..75: mol_type = other DNA
agataactcggtgacatttgctgtaaacggtcagatacaaccaagcaactggggtaacattgattcccgatatgt

SEQ ID NO: 581714 - DNA, 75 bp, synthetic construct
  source 1..75: mol_type = other DNA
taagtggcctgcaggaactcaggattggtgagtattatggtgatgccaaagggttgatggttattgatggggaaa

SEQ ID NO: 581715 - DNA, 75 bp, synthetic construct
  source 1..75: mol_type = other DNA
ccggcgagtatctgcccagtgaaaaatatcactctgacggtatcaccgccgccattgaggcgggttataccttcc

SEQ ID NO: 581716 - DNA, 75 bp, synthetic construct
  source 1..75: mol_type = other DNA
gttttcagtaaagaggggcgtattgttgccggtccctatgattacaacgtgaccaaaagcgacaaccagaactgg

SEQ ID NO: 581717 - DNA, 75 bp, synthetic construct
  source 1..75: mol_type = other DNA
ataacagcggtgtgatgtcgggaaatgtcaccactgcaggtgatatgaacgttatgcctgggggggcactgcgtg

SEQ ID NO: 581718 - DNA, 75 bp, synthetic construct
  source 1..75: mol_type = other DNA
ggtggtctttttaccacaatacgcccatgccttcattgaagccgacccttatggtgtactgacttatggcgatgg

SEQ ID NO: 581719 - DNA, 75 bp, synthetic construct
  source 1..75: mol_type = other DNA
gtgattatcaccgggatgtctggaacgcgcttaatgagcagctaaaccgactgtatactaccaatcccgatgccg

SEQ ID NO: 581720 - DNA, 75 bp, synthetic construct
  source 1..75: mol_type = other DNA
gagtcaaagccgataagcaccgcgaaagcaacggaaccctcgttcatagcaacggtgatggcaatgttcaaaccc

SEQ ID NO: 581721 - DNA, 75 bp, synthetic construct
  source 1..75: mol_type = other DNA
taaatcaaaaggatttaccgcttcactggaagctggatacaaacacaaattagctgaatttaatggcagccaggg

SEQ ID NO: 581722 - DNA, 75 bp, synthetic construct
  source 1..75: mol_type = other DNA
cgtactataccgacatggtgacgggtgagcagaaacaaaccactatgtggatgcgccatgaaggtggtcataata

SEQ ID NO: 581723 - DNA, 75 bp, synthetic construct
  source 1..75: mol_type = other DNA
gtaccgattttctcctggcctcacctatacagggaaacggccaggttaaccaggtcggctccgggacgacaacat

SEQ ID NO: 581724 - DNA, 75 bp, synthetic construct
  source 1..75: mol_type = other DNA
tgccagtctggcgctgatttcagtggctggtgagtatgcggcggagctggcgaacctcgatgattgccgccacgc

SEQ ID NO: 581725 - DNA, 75 bp, synthetic construct
  source 1..75: mol_type = other DNA
ggcgcaggggtcaggcagcagccaggcgttgacgcaggtgcgtcgctgggacagtgcctgtcagaaattacccga

SEQ ID NO: 581726 - DNA, 75 bp, synthetic construct
  source 1..75: mol_type = other DNA
tcagttttacttcattagatctaatgtttaatgcttacaggcaagcatttgcatttatatttatttataactctt

SEQ ID NO: 581727 - DNA, 75 bp, synthetic construct
  source 1..75: mol_type = other DNA
tatgaccttgctaacgggaaatatactgcacaggacgccaccaccgcgcgaaaaggccttgttcagctcagtagt

SEQ ID NO: 581728 - DNA, 75 bp, synthetic construct
  source 1..75: mol_type = other DNA
cacatccatttatttccaacctttcaggaaatgctgcaacagcctcaaaactcgaaacaccgaggaaaatagcag

SEQ ID NO: 581729 - DNA, 75 bp, synthetic construct
  source 1..75: mol_type = other DNA
aaagggttttcaccattgccttgagcattgtcgttgtgcgcttagccagaagagttttccgtacatttccctgaa

SEQ ID NO: 581730 - DNA, 75 bp, synthetic construct
  source 1..75: mol_type = other DNA
gaaaatataccgctcaggacgccacgacggcacgaaaagggatagtccagctcagtagtgccaccaacagcacgt

SEQ ID NO: 581731 - DNA, 75 bp, synthetic construct
  source 1..75: mol_type = other DNA
cagcactacattgatctcgtggaaaagttcaccagcagtagccgggggctgccgaaaaccattgaagaatttgag

SEQ ID NO: 581732 - DNA, 75 bp, synthetic construct
  source 1..75: mol_type = other DNA
agtcgggcgggatattctggctaaatcgaccgttgccgccgttatcgaatatctcggtttgcaggaaacggtaaa

SEQ ID NO: 581733 - DNA, 75 bp, synthetic construct
  source 1..75: mol_type = other DNA
cataccgtgattaaagccggtgtctctgcggatacgcaatctgatttcggcgcgggtgtcggcgtgggatattct

SEQ ID NO: 581734 - DNA, 75 bp, synthetic construct
  source 1..75: mol_type = other DNA
aaagaagccaatgcgggaactgcatcagccatcgctatcgcctcacaaccacaggtgaaagccggtgactttatg

SEQ ID NO: 581735 - DNA, 75 bp, synthetic construct
  source 1..75: mol_type = other DNA
aatagatactctggcgactaaccaggcaacgcaacagcatatcgatagtgtgcagtacggggagcaaattcagcg

SEQ ID NO: 581736 - DNA, 75 bp, synthetic construct
  source 1..75: mol_type = other DNA
tctcctcagggggttggtatattgacctggaacagttatgtcagcactcggttgggtattgccagttttttttat

SEQ ID NO: 581737 - DNA, 75 bp, synthetic construct
  source 1..75: mol_type = other DNA
ccggtagagggacagactactgacactttcagtaaagccaatacgcagtcaggtgataagggggcttatacctgc

SEQ ID NO: 581738 - DNA, 75 bp, synthetic construct
  source 1..75: mol_type = other DNA
cgctgacgatctgtttaaatatgagtcagtatgcatcgccgcgatggaacatttaaaaagtaaagcaacggcccc

SEQ ID NO: 581739 - DNA, 75 bp, synthetic construct
  source 1..75: mol_type = other DNA
aacgacttagagaatgttacaagcattcttaaagaacaacatgtctctaaaagaaccctttatttcaagataatg

SEQ ID NO: 581740 - DNA, 75 bp, synthetic construct
  source 1..75: mol_type = other DNA
tggctgccaggctatatccagtaacgaaacgtttttcggtgctggcggtggggccggagggacagtaatcaccat

SEQ ID NO: 581741 - DNA, 75 bp, synthetic construct
  source 1..75: mol_type = other DNA
gggccggtggaacaataatttcaataattaccccgacacagaatagttatcctgtcactatcggcgcaggtgggg

SEQ ID NO: 581742 - DNA, 75 bp, synthetic construct
  source 1..75: mol_type = other DNA
gaattgggcgaagtacctgaggattgggaggttgtggagtttggctgcacattgaaggaatttcgaaatgggtat

SEQ ID NO: 581743 - DNA, 75 bp, synthetic construct
  source 1..75: mol_type = other DNA
tgatgagtccctgacaagatgtatctattctttgcgctgcatttttgaaaaaattggctatgatcgttgctttgc

SEQ ID NO: 581744 - DNA, 75 bp, synthetic construct
  source 1..75: mol_type = other DNA
atgttctgtacgcacaggcgctggaaatggctgatccgggtatggataaatcagatattttccgtgaagctgtga

SEQ ID NO: 581745 - DNA, 75 bp, synthetic construct
  source 1..75: mol_type = other DNA
ttgaccactaacacttcgtcaatctctataaccgcgattgctgcggaggtaaaaaatcctgaacgtgttgcgggg

SEQ ID NO: 581746 - DNA, 75 bp, synthetic construct
  source 1..75: mol_type = other DNA
gttgcatatgctattaacattcctgactatgaactggcagctgatgtatataatattaacgtaacgtcaccttcc

SEQ ID NO: 581747 - DNA, 75 bp, synthetic construct
  source 1..75: mol_type = other DNA
aaatattattaattcttgtggagtttatcctcaggaattaaaagacagagaaattatatcaacttttcacgcaga

SEQ ID NO: 581748 - DNA, 75 bp, synthetic construct
  source 1..75: mol_type = other DNA
tactgctttttgccggtcagggtaatccggttattggtatgggcagcgatctttgggatctcaacgccagtacaa

SEQ ID NO: 581749 - DNA, 75 bp, synthetic construct
  source 1..75: mol_type = other DNA
tttggaaaacatattgtaagggtgttgcttcgttaggggtgcaggcaaatatcggtacgtcagatatcagaaaag

SEQ ID NO: 581750 - DNA, 75 bp, synthetic construct
  source 1..75: mol_type = other DNA
aacagttccggcagaagctgaaacaggttgccgcgaacctttcattgggtaaaaaactcaaagtgggttttcttg

SEQ ID NO: 581751 - DNA, 75 bp, synthetic construct
  source 1..75: mol_type = other DNA
attcaggcgctggaacaacgccttggcaaaacccgccaaatcaaacaaggcatgatgcaagaactgctcacgggt

SEQ ID NO: 581752 - DNA, 75 bp, synthetic construct
  source 1..75: mol_type = other DNA
agtatccaattgttctcattatcattgttgccatagttgtaggcggtattgttagcgccattgaagcactaatga

SEQ ID NO: 581753 - DNA, 75 bp, synthetic construct
  source 1..75: mol_type = other DNA
taaagaatgcattgatgataatatatggcatgtcaaaagtagatgccaatgattgtagagacatgtcaagaaaaa

SEQ ID NO: 581754 - DNA, 75 bp, synthetic construct
  source 1..75: mol_type = other DNA
agttgctttattttatttcaagacagcaagacagaagaaaaatcgtcgaatctatttatatttcatctgtcactc

SEQ ID NO: 581755 - DNA, 75 bp, synthetic construct
  source 1..75: mol_type = other DNA
cagacgccgctcaaacatatgggaacgaatatctttgcggtaattatcctgggggctgtgggtaatttcctgtgg

SEQ ID NO: 581756 - DNA, 75 bp, synthetic construct
  source 1..75: mol_type = other DNA
gatcttgtaggcctgataagacgcgccagcgtcgcatcaggcactgaatgccggatgcggcgtgaacgccttatc

SEQ ID NO: 581757 - DNA, 75 bp, synthetic construct
  source 1..75: mol_type = other DNA
tttatgaaagggattcttagttgggtaggaggcaagacggatattgttgagtattctcgtgcggaacgagtagct

SEQ ID NO: 581758 - DNA, 75 bp, synthetic construct
  source 1..75: mol_type = other DNA
agcttcgatctcggtgaaaaacacaaagtggcggtgctctcggtcactgagggtgaagataagcctctgaaatat

SEQ ID NO: 581759 - DNA, 75 bp, synthetic construct
  source 1..75: mol_type = other DNA
tacaggcgttgttctgcctggtctacattcttggggccagcctgctggccaccgatatcaggactgatgcaccgc

SEQ ID NO: 581760 - DNA, 75 bp, synthetic construct
  source 1..75: mol_type = other DNA
acaactggcgattcgggcgataaaatcggtcttgcgccaggactacagcaactgggagatgatcatcgtggatga

SEQ ID NO: 581761 - DNA, 75 bp, synthetic construct
  source 1..75: mol_type = other DNA
cagagttgcaggtggtttcagtgactgccggaacgtatgagatcacggcatcggcagggaatagccagccttcga

SEQ ID NO: 581762 - DNA, 75 bp, synthetic construct
  source 1..75: mol_type = other DNA
cgtcatatcaacaaccagcctgaatatcaaagacattgaggcacactgggatgaggtattgcgcctggcaacctc

SEQ ID NO: 581763 - DNA, 75 bp, synthetic construct
  source 1..75: mol_type = other DNA
ttacatatccaaaaggcacaaaaggctgaaagttgtaaatatacgaaggttgccagaggttgcggatagaacgcg

SEQ ID NO: 581764 - DNA, 75 bp, synthetic construct
  source 1..75: mol_type = other DNA
gacccgcagaagcggcagaagctcgttgggatgagatcgattttgaagctaaagaatggaaaattcctgcagctc

SEQ ID NO: 581765 - DNA, 75 bp, synthetic construct
  source 1..75: mol_type = other DNA
tgcgcagcttttagttccgacccggttaaatttatatccagagccagtactccaggtctcggcgcttcattttta

SEQ ID NO: 581766 - DNA, 75 bp, synthetic construct
  source 1..75: mol_type = other DNA
aataacaaataaaaatattgttgtttattctgatgataaaaaagaagaaaaaatattaaatcttgtttatcttgg

SEQ ID NO: 581767 - DNA, 75 bp, synthetic construct
  source 1..75: mol_type = other DNA
ctacgttacaaagaaatggcatcagtattgaaaacatcgttaaaaccgactcagtcgtgacaatttataatcttg

SEQ ID NO: 581768 - DNA, 75 bp, synthetic construct
  source 1..75: mol_type = other DNA
atttttaatgaaggggacggagctcgtgtgcgggacgaacggctattgtcgtttgcccgtggagagaacgcggag

SEQ ID NO: 581769 - DNA, 75 bp, synthetic construct
  source 1..75: mol_type = other DNA
tttttacctgaaaaggttgtttggcgaattgtagagcgaatgtgtagtgagagcgttcgcgagaagattaacgta

SEQ ID NO: 581770 - DNA, 75 bp, synthetic construct
  source 1..75: mol_type = other DNA
ttgatgcaaatagtagttatataactcttactggagcaactacattatcaggtaatatgaatatatatcaaaatg

SEQ ID NO: 581771 - DNA, 75 bp, synthetic construct
  source 1..75: mol_type = other DNA
atggggggatggcacatctgctggtgaagcatcagatgcaatcaaagcattcgtggcttcgcttgtatggctggc

SEQ ID NO: 581772 - DNA, 75 bp, synthetic construct
  source 1..75: mol_type = other DNA
ctgggcaacggcgagctgaccatttcggcttcggtaacgaacagcgtaggtaataccggtaacggcacgcgtgaa

SEQ ID NO: 581773 - DNA, 75 bp, synthetic construct
  source 1..75: mol_type = other DNA
aatcggccctcggcggcagccagagcggtaccaccagcggcgtggcggcaatggactacgactgggacggcgcgg

SEQ ID NO: 581774 - DNA, 75 bp, synthetic construct
  source 1..75: mol_type = other DNA
ggcaatgcctacgtgattaacgcctcggtgagcaacgccattggcaacaccggcagcagcaatcacaccattact

SEQ ID NO: 581775 - DNA, 75 bp, synthetic construct
  source 1..75: mol_type = other DNA
gcgatcaccaccgataccggattgattactaacgattttgtcaccagcgacacgacgcttgcggtgagcggctct

SEQ ID NO: 581776 - DNA, 75 bp, synthetic construct
  source 1..75: mol_type = other DNA
ttacgatctcagcgccgaagcaggcaccgcaagcaacaacggcaagttcgtcggcacgggctataacgacacctt

SEQ ID NO: 581777 - DNA, 75 bp, synthetic construct
  source 1..75: mol_type = other DNA
ccagcggcgtggcggcaatggactacgactgggacggcgcggtggatgtgctggtgactaaacagtcgggcagcg

SEQ ID NO: 581778 - DNA, 75 bp, synthetic construct
  source 1..75: mol_type = other DNA
caacttttctctctggttgctgggcgtttatcacgtctatttcgatcgccatctttagtttcggtagcacagcgt

SEQ ID NO: 581779 - DNA, 75 bp, synthetic construct
  source 1..75: mol_type = other DNA
tttcattcttttcaggatcaggttttcttgacctaggcttcgaaaatgccgggtatgaggtggttttcgtcaatg

SEQ ID NO: 581780 - DNA, 75 bp, synthetic construct
  source 1..75: mol_type = other DNA
aagcatgtgtttactgcaagggccgggttagttcgctttaaagctgtggctgaaggagacgatagcaaaaaatct

SEQ ID NO: 581781 - DNA, 75 bp, synthetic construct
  source 1..75: mol_type = other DNA
catcgatataattgttgaaatgaagcctgacttcttcttgtttgagaacgtcaaaggtctttatcgcacactcaa

SEQ ID NO: 581782 - DNA, 75 bp, synthetic construct
  source 1..75: mol_type = other DNA
caagaagtgcgcgcaaagcgccagaaaaaatcttctttcgaccctgcatggctaaaacctgaaaacgtcagcgct

SEQ ID NO: 581783 - DNA, 75 bp, synthetic construct
  source 1..75: mol_type = other DNA
tcaaaatgttatcagtgctcttaaccataatggcaaggttgacttaaaaccgaatgatttccatacagatttaga

SEQ ID NO: 581784 - DNA, 75 bp, synthetic construct
  source 1..75: mol_type = other DNA
gcgttgcagcactggatcaacattatccaggcaacaactacaacaacgcctatgccgaaataagacggttcttag

SEQ ID NO: 581785 - DNA, 75 bp, synthetic construct
  source 1..75: mol_type = other DNA
ctgccattaacgttgcggcagaagtctccggtaaaagcgttaaccagtggattaacgatacactgatgaaggctg

SEQ ID NO: 581786 - DNA, 75 bp, synthetic construct
  source 1..75: mol_type = other DNA
aggcttagtgtgtaaggataaaaataataaatatttctatacgccacctaaacagggaaatgtgaatacatctta

SEQ ID NO: 581787 - DNA, 75 bp, synthetic construct
  source 1..75: mol_type = other DNA
catcaggcactggaagtcggtttggggctaaaatacctaaacaattcgttaaacttgcaggaaaacctgtaattc

SEQ ID NO: 581788 - DNA, 75 bp, synthetic construct
  source 1..75: mol_type = other DNA
accatgcccggatttctctgtagcgggtaaaaataaaggtcgagatggtgaaaacggtcggctttcacaaagcta

SEQ ID NO: 581789 - DNA, 75 bp, synthetic construct
  source 1..75: mol_type = other DNA
tatgaacaatccgatatcgtaacagaccctataactggctcggtttctttatcattcacgataaatattcaagtt

SEQ ID NO: 581790 - DNA, 75 bp, synthetic construct
  source 1..75: mol_type = other DNA
tatgaacaaagcgacatagtaacagattccatatctggctctgtaagtctgtcattcacgataaatattcaagtt

SEQ ID NO: 581791 - DNA, 75 bp, synthetic construct
  source 1..75: mol_type = other DNA
attctgcgttagctgcaaccggtgatgtaattatgggacaggggcaggaaactcagacagacctgacgctaagcc

SEQ ID NO: 581792 - DNA, 75 bp, synthetic construct
  source 1..75: mol_type = other DNA
tcctgagccaggtgcgtttataaacaatagtaaaagtatgttagatatgtttgctctacaacggtatgacatacc

SEQ ID NO: 581793 - DNA, 75 bp, synthetic construct
  source 1..75: mol_type = other DNA
gttcaggagcttctgtcagcagcaaaaataccttcactgttgcaaaaggtaataatgcatcagcgacgctgaatt

SEQ ID NO: 581794 - DNA, 75 bp, synthetic construct
  source 1..75: mol_type = other DNA
gcatcagcaacagacgctggtgcaggagattatcgccctgcgccagcagttactgggtatggcagaagacgatgc

SEQ ID NO: 581795 - DNA, 75 bp, synthetic construct
  source 1..75: mol_type = other DNA
ggttttatcataatccagtttgtaatggcagaaccctacaaaaaatgtcacatttaatgcccgttttcgcgtata

SEQ ID NO: 581796 - DNA, 75 bp, synthetic construct
  source 1..75: mol_type = other DNA
cagctggataaaacagctactgcaggcacttcctgctcaccagacggacttgtaggccgcgacagcaaaggagca

SEQ ID NO: 581797 - DNA, 75 bp, synthetic construct
  source 1..75: mol_type = other DNA
cggtcgtaataacacctcagcctttggctcagcggacctgaaagccaataatcgggcgctgggtggtgagctctt

SEQ ID NO: 581798 - DNA, 75 bp, synthetic construct
  source 1..75: mol_type = other DNA
ggccgggaaacagatactggatgtgacaccgcaggacagtaatgaactgtgtctgacagaggcatggctgatgaa

SEQ ID NO: 581799 - DNA, 75 bp, synthetic construct
  source 1..75: mol_type = other DNA
tttagcaatgtttgtgcttctgatgattacgtccggttgttcaacgaaagtgcagatcaagccgaacgaaaatta

SEQ ID NO: 581800 - DNA, 75 bp, synthetic construct
  source 1..75: mol_type = other DNA
tcgataatattacattagcttctccggctgtatctatggaacaggctattgaggcagccagacttgcaggtgccc

SEQ ID NO: 581801 - DNA, 75 bp, synthetic construct
  source 1..75: mol_type = other DNA
tggatgcgccacaggtacagaccatcacctccgggcgtgacctgctcgaccaggcgaaagtgctggcccgttatc

SEQ ID NO: 581802 - DNA, 75 bp, synthetic construct
  source 1..75: mol_type = other DNA
gtgttgccgaaggggatgaaagccgaaacgaactggacgaaggacaacggcaaactgaacgcagtgagactggtg

SEQ ID NO: 581803 - DNA, 75 bp, synthetic construct
  source 1..75: mol_type = other DNA
gcatattttctaatgcctcggccagtgttcttataaaattagcaataacccctcccagaaggctcccaagtctgg

SEQ ID NO: 581804 - DNA, 75 bp, synthetic construct
  source 1..75: mol_type = other DNA
ttacagcggtatccagtttggtggggataaacgtctctctgatgtaatgccgttgtatgtcggtctgtatattgg

SEQ ID NO: 581805 - DNA, 75 bp, synthetic construct
  source 1..75: mol_type = other DNA
ctgacggggcggcctcgttcagcgcgtcttctcaggttgagttggggggatatctgtatgatgtgcgtaaaaatg

SEQ ID NO: 581806 - DNA, 75 bp, synthetic construct
  source 1..75: mol_type = other DNA
atgaatatgatgatctcatatcaggaacttgttcgcaccttccttaagagtaacgatgacggcatcattattggg

SEQ ID NO: 581807 - DNA, 75 bp, synthetic construct
  source 1..75: mol_type = other DNA
atggaggctggagataaagaaatcaataacttgcctgtaaatggcaacaggttagcgcgaaaacgggctaagtat

SEQ ID NO: 581808 - DNA, 75 bp, synthetic construct
  source 1..75: mol_type = other DNA
gtcttctcaggttgagttggggggatatctgtacgatgtgcgtaaaaatggcactgaaccgccccgggtttcctg

SEQ ID NO: 581809 - DNA, 75 bp, synthetic construct
  source 1..75: mol_type = other DNA
gttcaacctgtcccctactggttatgggttctatatagagccgcaaacccagctcacatacagccaccagaatga

SEQ ID NO: 581810 - DNA, 75 bp, synthetic construct
  source 1..75: mol_type = other DNA
atgataaaacgttggcactggcgctgtgggcagagtgagtttctcatggcggttgaaaacacaaattcaaccgcc

SEQ ID NO: 581811 - DNA, 75 bp, synthetic construct
  source 1..75: mol_type = other DNA
tggttgatcagatgatcgataaggcggcagagctggaaaagtatggaagcgcacttgaaaaaattgttcaggata

SEQ ID NO: 581812 - DNA, 75 bp, synthetic construct
  source 1..75: mol_type = other DNA
tgacgccggaaaaaatgcacgcaattggtatggagtgcatcaggagatctgaggctatggcgcaggcggggatga

SEQ ID NO: 581813 - DNA, 75 bp, synthetic construct
  source 1..75: mol_type = other DNA
aacccgatcctacgcctaaccccactcccacacctaaacccaccacgaccgcagatgctggcggcaattatctca

SEQ ID NO: 581814 - DNA, 75 bp, synthetic construct
  source 1..75: mol_type = other DNA
acatgaaacgctttgcactgatagctgtgaaactcgttgcctttactggttctgcatctgctgcaaccgaagaaa

SEQ ID NO: 581815 - DNA, 75 bp, synthetic construct
  source 1..75: mol_type = other DNA
gcgctttgcttaattgtattagtaagcctgttgatgcactctgtgaatgggctaaagaaccattgaaagataggg

SEQ ID NO: 581816 - DNA, 75 bp, synthetic construct
  source 1..75: mol_type = other DNA
cctgcgcgagatgcgcggctttgacctttcgctgatccgtgactgttacgctcaagagaactactacgacgcacg

SEQ ID NO: 581817 - DNA, 75 bp, synthetic construct
  source 1..75: mol_type = other DNA
cgagcgtcatcaaggtaatgatatgaaaatactggcggccagaaaagcagtataccagctagcacgcgaacagca

SEQ ID NO: 581818 - DNA, 75 bp, synthetic construct
  source 1..75: mol_type = other DNA
tcagcaggactgccagaaagttaaggatgaggcaaagcgccttgaggctgtgctgaatgttgattgccggtcggt

SEQ ID NO: 581819 - DNA, 75 bp, synthetic construct
  source 1..75: mol_type = other DNA
ccgcgctggccgcgtggcaaaaatatcagcaggactgccagaaagttaaggatgaggcaaagcgccttgaggctg

SEQ ID NO: 581820 - DNA, 75 bp, synthetic construct
  source 1..75: mol_type = other DNA
aacgcagcaagagtttgtggttgcaaaaggcaatggtgcacatgcaacactggattacacgagctcggagttgac

SEQ ID NO: 581821 - DNA, 75 bp, synthetic construct
  source 1..75: mol_type = other DNA
atttcaccctgccaggaaactggcaggacagcagtatgaatattctgacaccgatattaagtgcgattgccgggg

SEQ ID NO: 581822 - DNA, 75 bp, synthetic construct
  source 1..75: mol_type = other DNA
gttactccggatgaacgccatcgcggaattgatgcacaaatactggaagccagaaaaaagtttatcgcgaagctc

SEQ ID NO: 581823 - DNA, 75 bp, synthetic construct
  source 1..75: mol_type = other DNA
ctgacgacggtgcagactgacaccacacgtatccagacggtatacgagccgggaagcttcacgccgctcatccgg

SEQ ID NO: 581824 - DNA, 75 bp, synthetic construct
  source 1..75: mol_type = other DNA
cggctgccggacccggagctgcacccggacagtacactcacagtgtggccggataaccgcatcgcggaggatgcg

SEQ ID NO: 581825 - DNA, 75 bp, synthetic construct
  source 1..75: mol_type = other DNA
gcatcagcggcccgcgacagacgcgggaatacggctacagcgccacgggcaggctggagagtgtgcgcaccctcg

SEQ ID NO: 581826 - DNA, 75 bp, synthetic construct
  source 1..75: mol_type = other DNA
caaaagaatagtctcaaaaacagggccgaaatgtattataccaaagctgagttcgaagctcgctgcccgcggtta

SEQ ID NO: 581827 - DNA, 75 bp, synthetic construct
  source 1..75: mol_type = other DNA
tatcgcacttgtgtccagaagtgtgatggaaaattttcaggcgcttttttattacggaacggaaacggtctcgga

SEQ ID NO: 581828 - DNA, 75 bp, synthetic construct
  source 1..75: mol_type = other DNA
tcttgacgcacagatgattgccgacgccgcaccgcgcctgccactggacgataacggtattctgtttatcgaaaa

SEQ ID NO: 581829 - DNA, 75 bp, synthetic construct
  source 1..75: mol_type = other DNA
actttaacggatactcgcagcatatgacagggatagacaataaagggatgatttatctttctgacggaagtgctt

SEQ ID NO: 581830 - DNA, 75 bp, synthetic construct
  source 1..75: mol_type = other DNA
tactacaagtcgtattgacgtcgaactgggtgctaagttattcagacatttgcttgcattgcctgtttcatattt

SEQ ID NO: 581831 - DNA, 75 bp, synthetic construct
  source 1..75: mol_type = other DNA
gtttctgaactcgatgagtctggtgttaataaattaattgaaaacattaaaaataataaaagtgaatgttcatac

SEQ ID NO: 581832 - DNA, 75 bp, synthetic construct
  source 1..75: mol_type = other DNA
cttcgtatgtgggtgacgcgcgaagattaccggagtgcgtgccacatatcagcccctgtttcccccttcgcatac

SEQ ID NO: 581833 - DNA, 75 bp, synthetic construct
  source 1..75: mol_type = other DNA
gcagaggaaatggcagatgcagcgcagagcgcaatgcttgccactaccggctttgatgtcgatctgctgctgcag

SEQ ID NO: 581834 - DNA, 75 bp, synthetic construct
  source 1..75: mol_type = other DNA
tggagctgctgccgaagtacgccgcctgggcggagggtgtcctggctgccggaggcgcacagcaggatgacgtgc

SEQ ID NO: 581835 - DNA, 75 bp, synthetic construct
  source 1..75: mol_type = other DNA
taaatccatggcagtatcgccacagatgattgctacatgggataaacaactggccgggtatgttgcttccagttt

SEQ ID NO: 581836 - DNA, 75 bp, synthetic construct
  source 1..75: mol_type = other DNA
aggcgcgtcctgtggggtgatgaggaaacttacgattacggcgcagagcccgactcgcctgatacccctccgcac

SEQ ID NO: 581837 - DNA, 75 bp, synthetic construct
  source 1..75: mol_type = other DNA
aaccatttcttgagatagatctacttgacttagacgaaacagttgttcccgagataaagaagcttactaaatcag

SEQ ID NO: 581838 - DNA, 75 bp, synthetic construct
  source 1..75: mol_type = other DNA
acaagaaaaggaagaactggtatctgagtgtggatatgcgtcctgagccaggtgcgtttataaacaatagtaaaa

SEQ ID NO: 581839 - DNA, 75 bp, synthetic construct
  source 1..75: mol_type = other DNA
cgccgccgggataacgggcattcgtgcgggtgactggacggcatacgacaacgcccccgacagtgaagacggcat

SEQ ID NO: 581840 - DNA, 75 bp, synthetic construct
  source 1..75: mol_type = other DNA
cagcgagggagtcaggcctctccgacttcgtatgtgggtagcgcgcgaagatttccgatgtgcgcgccgcgcatc

SEQ ID NO: 581841 - DNA, 75 bp, synthetic construct
  source 1..75: mol_type = other DNA
aaacttacgattacggcgcagagcccgactcgcctgatacccctccgcaccgtattcggctgtttgccggtggta

SEQ ID NO: 581842 - DNA, 75 bp, synthetic construct
  source 1..75: mol_type = other DNA
ttcatgtcaagaaggtgacgctggcccaggatgtagacctcgaacaggtagccgcactgaccacgggcttttccg

SEQ ID NO: 581843 - DNA, 75 bp, synthetic construct
  source 1..75: mol_type = other DNA
ggagctggtggaccggcccgacaagaaggggcggctggacatcctgaaggttcatgtcaagaaggtgacgctggc

SEQ ID NO: 581844 - DNA, 75 bp, synthetic construct
  source 1..75: mol_type = other DNA
aagtgtggaaattaattaccgagcatacccataacaaccgctatttccgcaagatacacgtgttcagaggtgcaa

SEQ ID NO: 581845 - DNA, 75 bp, synthetic construct
  source 1..75: mol_type = other DNA
tacgatgctggctacatagtgtcagtcattaatcctgcgctgggtaaagctttcgctcagagtgaaggactgcgt

SEQ ID NO: 581846 - DNA, 75 bp, synthetic construct
  source 1..75: mol_type = other DNA
cgacgcttacctttctcagggagtttagtctccaggatttccggggcggttcacctctgcctgcatattcagtcc

SEQ ID NO: 581847 - DNA, 75 bp, synthetic construct
  source 1..75: mol_type = other DNA
ttcatggatagcgtccaccatatttggtgtccactattctctcaggaatttcaggatctgccagacggtgctgag

SEQ ID NO: 581848 - DNA, 75 bp, synthetic construct
  source 1..75: mol_type = other DNA
ggcgtaaatactcgtacccggccacgtttgaagaaggtggtaaggacaaaatctcgcagtatctgctggggttgg

SEQ ID NO: 581849 - DNA, 75 bp, synthetic construct
  source 1..75: mol_type = other DNA
ccggatgccacaatgaacagcaagcctaaagtcggtgcagtgcaattagggcgtacagccgtaatgcgtccactg

SEQ ID NO: 581850 - DNA, 75 bp, synthetic construct
  source 1..75: mol_type = other DNA
acagggcggggagcagtcacccttgatcaccaggaaaatttttgtttgtggaccaggctggtggagctttccggt

SEQ ID NO: 581851 - DNA, 75 bp, synthetic construct
  source 1..75: mol_type = other DNA
cagattgccgggaatgctatggccagtaagggggcttatattcagggggatttgttcgccatgatggcgaatgac

SEQ ID NO: 581852 - DNA, 75 bp, synthetic construct
  source 1..75: mol_type = other DNA
aatgacccaataattggtatagaagcctatcccggtaccgcggagatccatgcaaaaatgggatataaagttatc

SEQ ID NO: 581853 - DNA, 75 bp, synthetic construct
  source 1..75: mol_type = other DNA
ccggatgtccggctcagttgccgaccggcagccggtagtccgcaactggggcgcacggctgtaatgagaacacag

SEQ ID NO: 581854 - DNA, 75 bp, synthetic construct
  source 1..75: mol_type = other DNA
ttcagcctgactggtgggaaaccaccagtcagaatgtgttagcgcatgttgacaaaaataccattagtcacatta

SEQ ID NO: 581855 - DNA, 75 bp, synthetic construct
  source 1..75: mol_type = other DNA
aggatggcggtatacagcaaggttatcaggtagtagccgacagtgtaatcagcgccagaacggtacgccctggcg

SEQ ID NO: 581856 - DNA, 75 bp, synthetic construct
  source 1..75: mol_type = other DNA
atgacagcacagatagcagcttacgggcggctggtggctgacccgcagttaaagaccaccagcaagggcacacaa

SEQ ID NO: 581857 - DNA, 75 bp, synthetic construct
  source 1..75: mol_type = other DNA
ggtttgcaaccctgccgccgaactatcagagcgcagcacgagccatgtatgaaagcgcccgcaagacgggaacac

SEQ ID NO: 581858 - DNA, 75 bp, synthetic construct
  source 1..75: mol_type = other DNA
atgaccaaagatgaagctttgaaaatgaatgataaagacaacttacacagagtatttatgcttgtactgaacgaa

SEQ ID NO: 581859 - DNA, 75 bp, synthetic construct
  source 1..75: mol_type = other DNA
attgccttctgatgcgggaagcaatattacttaccgaacaataaatgattatggcgcacttacccccaaaatgac

SEQ ID NO: 581860 - DNA, 75 bp, synthetic construct
  source 1..75: mol_type = other DNA
ttcacgccgctcatccgggtcgagacagagaacggcgagcgggagaaagcgcagtgccgcagcctggcggagaag

SEQ ID NO: 581861 - DNA, 75 bp, synthetic construct
  source 1..75: mol_type = other DNA
aagtgcctcaaccaaagaataaacggatccgctggctggagccccatgaagcacaaaggctgattgatgaatgtc

SEQ ID NO: 581862 - DNA, 75 bp, synthetic construct
  source 1..75: mol_type = other DNA
atgtctgcaccaggctggaaattacaccctctgaagggagctgatcttaaaggccattgggctatatctgtaaac

SEQ ID NO: 581863 - DNA, 75 bp, synthetic construct
  source 1..75: mol_type = other DNA
cgctggcaatcggtaaatttaatgagctgtatcccaatattaaagtgcggattctggtgatgctgccaacttact

SEQ ID NO: 581864 - DNA, 75 bp, synthetic construct
  source 1..75: mol_type = other DNA
acaccgcatctagcctcgccttgattaaagaccttgtagaagattcgattaactttgatggagagttccagcatg

SEQ ID NO: 581865 - DNA, 75 bp, synthetic construct
  source 1..75: mol_type = other DNA
ggttttcctcgctgcctgaaaaataccagcgcgtagcccgttccatgtacgacgacgcccgcaagacgggaacac

SEQ ID NO: 581866 - DNA, 75 bp, synthetic construct
  source 1..75: mol_type = other DNA
atgacgccacaacactttcgccagtggttcgcctcactgcctgagaagtaccagaagcaggccaaagccatgtac

SEQ ID NO: 581867 - DNA, 75 bp, synthetic construct
  source 1..75: mol_type = other DNA
tccgggagacattgtctatgggctatcctctcccagagaaaaacttgtcaacagcatcaaactggttaacgactt

SEQ ID NO: 581868 - DNA, 75 bp, synthetic construct
  source 1..75: mol_type = other DNA
tcgaattatttgatcaccaaggtgcagagccagccttcttattcggccttgaattgatcatatgcggattagaaa

SEQ ID NO: 581869 - DNA, 75 bp, synthetic construct
  source 1..75: mol_type = other DNA
aacaatctcgacctggcgttagccagtggcaaaaatgacaatccgggcagcacaggaacagcatcaattagggaa

SEQ ID NO: 581870 - DNA, 75 bp, synthetic construct
  source 1..75: mol_type = other DNA
actaaatcagtaagttggcagcatcaccctaacgataaaataagaattatgagcgaaagcaaagagaatattaaa

SEQ ID NO: 581871 - DNA, 75 bp, synthetic construct
  source 1..75: mol_type = other DNA
aaagcatcctgaactaaaatataatcgtttgcacgtaggtaaagtatttgatggtattgagccctgctcaaccac

SEQ ID NO: 581872 - DNA, 75 bp, synthetic construct
  source 1..75: mol_type = other DNA
atggagtattgagccctgctcaaccactaataagaatatggacaggggaattgaatctttggttagggaaggtgc

SEQ ID NO: 581873 - DNA, 75 bp, synthetic construct
  source 1..75: mol_type = other DNA
tgcgcgtcttgatggtggcaatgttctgtcgtttcacagtaatgccctgagtgcgttttataacctgataaagga

SEQ ID NO: 581874 - DNA, 75 bp, synthetic construct
  source 1..75: mol_type = other DNA
ataaaataactttcaatgagtctaataactatgaatcgatctgtagagcatttgattttataaagccaagaattg

SEQ ID NO: 581875 - DNA, 75 bp, synthetic construct
  source 1..75: mol_type = other DNA
tccaataaaacatttgaatgaggagtctatgaatgttaccaattatcagaaatctacaagaaaatcaatattcgg

SEQ ID NO: 581876 - DNA, 75 bp, synthetic construct
  source 1..75: mol_type = other DNA
tcaatagcaaattctttgctattgtttgaaagatacaatacagaaaaaaaggtatctttgtttaattctttacat

SEQ ID NO: 581877 - DNA, 75 bp, synthetic construct
  source 1..75: mol_type = other DNA
ttaacctgccaggtttatatttggctataaattatggtaatgcggatatcgttgagactattttcaattcattgt

SEQ ID NO: 581878 - DNA, 75 bp, synthetic construct
  source 1..75: mol_type = other DNA
ccacgtatcagtatgctgcgtatcgtcgccagcaatgagcatcatgcacgtctttcactggtccatgagtatgtg

SEQ ID NO: 581879 - DNA, 75 bp, synthetic construct
  source 1..75: mol_type = other DNA
aactggatcaccactcctccaacgccgactatttggtaatggatttggagctatgattgataatgcatttgaagt

SEQ ID NO: 581880 - DNA, 75 bp, synthetic construct
  source 1..75: mol_type = other DNA
ttgggacatgagtttgctcatgcgcagtattaccttcttgataaggaaaatttcatggctcttttaagccgaaca

SEQ ID NO: 581881 - DNA, 75 bp, synthetic construct
  source 1..75: mol_type = other DNA
accagcgacatcgccgaagcaactttcgataaagccacaacgttggttgagcaggcacgtacaacggtacagcaa

SEQ ID NO: 581882 - DNA, 75 bp, synthetic construct
  source 1..75: mol_type = other DNA
agatattgaacgccattgaagaaggtatgcgcaaagccaaagagatgctcgatgaactggcgcaaaccattgaag

SEQ ID NO: 581883 - DNA, 75 bp, synthetic construct
  source 1..75: mol_type = other DNA
taagaagggtgaacaagtttatcaaaaaatcgttgcacttggtttgacaattcaagtcttaaaatgtggtaattt

SEQ ID NO: 581884 - DNA, 75 bp, synthetic construct
  source 1..75: mol_type = other DNA
atcaggtgtgggtcaccgacatcacctacagtgtgcccggagttcagggcgggcatggatgcttaaatgaaccgc

SEQ ID NO: 581885 - DNA, 75 bp, synthetic construct
  source 1..75: mol_type = other DNA
tcctcgccgcatacctgggcgtgatgattattttccttgcctcgcatatggatgcagtggcctacaccatggcgg

SEQ ID NO: 581886 - DNA, 75 bp, synthetic construct
  source 1..75: mol_type = other DNA
gacattccggctcatcaagttgaacattatctcccgcagacaccggttgaagccctggaaaaaacgccagtgctc

SEQ ID NO: 581887 - DNA, 75 bp, synthetic construct
  source 1..75: mol_type = other DNA
tcggggttaaagaagccgaagacggagaacgtgtcttgccggggcatgcctatatcgcgccgggcgatcggcata

SEQ ID NO: 581888 - DNA, 75 bp, synthetic construct
  source 1..75: mol_type = other DNA
ataaaaaataataatacatttaagcttcatggcttaagttatagcatatatatatgctatgaagcactgtttcct

SEQ ID NO: 581889 - DNA, 75 bp, synthetic construct
  source 1..75: mol_type = other DNA
aggacggtacggtatggctataacagccagcggcaggtgacgtcggtgacgtacccggacgggcttcgcagcagc

SEQ ID NO: 581890 - DNA, 75 bp, synthetic construct
  source 1..75: mol_type = other DNA
agagggtattttgggttttgaaaaagatgaagggcagggcgatgcttggctggaaaaagctagtgacattaaata

SEQ ID NO: 581891 - DNA, 75 bp, synthetic construct
  source 1..75: mol_type = other DNA
ctgattatttcattccgcttgcgacaattggtaagcaaagaaatattcctgccgcattaaatttagttgctcttg

SEQ ID NO: 581892 - DNA, 75 bp, synthetic construct
  source 1..75: mol_type = other DNA
cccgccggcctggaaggcaaaaaaagagaaacttgagaaggttaaacaagcggccgaagccgccgcgcgcaacgc

SEQ ID NO: 581893 - DNA, 75 bp, synthetic construct
  source 1..75: mol_type = other DNA
acaggttggcattcaggcactccaaacccgcaagatgttcatgatctacaagcaaagattcaagatgcgatatct

SEQ ID NO: 581894 - DNA, 75 bp, synthetic construct
  source 1..75: mol_type = other DNA
cgtttgaagcgagcacaagacgaaataagacgccttcctacatccttgcaaggtattcagaggggaacgaaaccc

SEQ ID NO: 581895 - DNA, 75 bp, synthetic construct
  source 1..75: mol_type = other DNA
tcttgacgcaaaaggcccagatgctgatatccgccaacttctcgttgaggcacaaaaaaacttaactcttacgaa

SEQ ID NO: 581896 - DNA, 75 bp, synthetic construct
  source 1..75: mol_type = other DNA
tatcaccagcgtcagtccggtagtggtcaacggctcgctcaccgccgcgcttgccagtaacgagacggcgcaaat

SEQ ID NO: 581897 - DNA, 75 bp, synthetic construct
  source 1..75: mol_type = other DNA
cacggtggcgggcgacgatattatcaacaacgctgaacagcttgccgggcagaccatcagcggcaccaccaccgc

SEQ ID NO: 581898 - DNA, 75 bp, synthetic construct
  source 1..75: mol_type = other DNA
tacctgccgccgactggcaggcgctgggtaacggtgagttaacggttaatgcctcggtgaccaacgccgttggca

SEQ ID NO: 581899 - DNA, 75 bp, synthetic construct
  source 1..75: mol_type = other DNA
aacacgcatatattataacgtagtttattttatatcaggtgttttattaaccatttttataagttattcatgcaa

SEQ ID NO: 581900 - DNA, 75 bp, synthetic construct
  source 1..75: mol_type = other DNA
aatactctgcttgaatatcccccttccttgaatataaggctttcaaatttatataacaatgagtataccgataaa

SEQ ID NO: 581901 - DNA, 75 bp, synthetic construct
  source 1..75: mol_type = other DNA
taatattaacaagttcaattgtgagattggctatttaaggctgagaaatgagggactattaaaggataaggttag

SEQ ID NO: 581902 - DNA, 75 bp, synthetic construct
  source 1..75: mol_type = other DNA
catactggcatgtcacaaactgagaataatactcatgaagtagctatgaagattactgcagatattatgcaacac

SEQ ID NO: 581903 - DNA, 75 bp, synthetic construct
  source 1..75: mol_type = other DNA
ggacagttcagcacgacgtattacgatggccgcattccacctgagatgataaaaaataggttggttgtcgtgctc

SEQ ID NO: 581904 - DNA, 75 bp, synthetic construct
  source 1..75: mol_type = other DNA
gtggcgattaatttcagccctaaggttggtgaaatactggaatgcaactttggtaactatcctgttagccagaat

SEQ ID NO: 581905 - DNA, 75 bp, synthetic construct
  source 1..75: mol_type = other DNA
gaatgtggtgatcgacactaccgcgccagatcccgcggtgaaaaccatcgccatcagcgcgatcaccaccgatac

SEQ ID NO: 581906 - DNA, 75 bp, synthetic construct
  source 1..75: mol_type = other DNA
gcagtatgttgaagtggtgatcaacggcaaaacctacacctctgaaccgggcggtgcggtggtggtcgatccggc

SEQ ID NO: 581907 - DNA, 75 bp, synthetic construct
  source 1..75: mol_type = other DNA
aacgacacgctcaacatcggcaacggcggccacgacaccttgctctataaactgctcaacgccagcgacgcgacc

SEQ ID NO: 581908 - DNA, 75 bp, synthetic construct
  source 1..75: mol_type = other DNA
aaatcagcctcgacggcggtgtcacctggaccacgttaaccgttatcggcaccagctggagctatgccgatggtc

SEQ ID NO: 581909 - DNA, 75 bp, synthetic construct
  source 1..75: mol_type = other DNA
gggtggataccgtcgcgggtgatgatgtggtcaatatcatcgaacacagtcaggcgcaggtgatcaccggtagca

SEQ ID NO: 581910 - DNA, 75 bp, synthetic construct
  source 1..75: mol_type = other DNA
aaccaggggaatgggacgtttgtctgggggcagaacaccaccaataccttcctgagcggggcgggtagtggcgct

SEQ ID NO: 581911 - DNA, 75 bp, synthetic construct
  source 1..75: mol_type = other DNA
cggaagccatagtgaagggatatatcacccgtctggaaaatcagccggtgcagggcgaagcgtcgtctccggtaa

SEQ ID NO: 581912 - DNA, 75 bp, synthetic construct
  source 1..75: mol_type = other DNA
cctacaccaccacgctggatgcctccggcaactggagcgtcggcattccggcggcggatgttacggcgctgggta

SEQ ID NO: 581913 - DNA, 75 bp, synthetic construct
  source 1..75: mol_type = other DNA
gggcatcaccattaatccggtggcgacggacgatattatcaacgcttcagaggcaggcagcgcgcaaactatcag

SEQ ID NO: 581914 - DNA, 75 bp, synthetic construct
  source 1..75: mol_type = other DNA
aagcgtcgccgccaacggaagctggagcgtgaacgttccagcggcagatctggcaactctgccagacggcgcggc

SEQ ID NO: 581915 - DNA, 75 bp, synthetic construct
  source 1..75: mol_type = other DNA
aaccatcgccattgcgggcattagcgatgacaccgggttaagcagcagcgattttgttactcgcgacactacgct

SEQ ID NO: 581916 - DNA, 75 bp, synthetic construct
  source 1..75: mol_type = other DNA
aatttactggtcgacagcggcctgccgggcgtcaccattaacaccgtggcgggcgacgatattatcaatgccgcc

SEQ ID NO: 581917 - DNA, 75 bp, synthetic construct
  source 1..75: mol_type = other DNA
cggacttggcgctttctggcaccagcgatcagcctgcgggcacggcgatcactgtcacgctgaacggacaaaact

SEQ ID NO: 581918 - DNA, 75 bp, synthetic construct
  source 1..75: mol_type = other DNA
gtacagttgttttaaatgaaatcgatgctcaatgccatttatcagaaaaattaaaatatgcaattagagatggac

SEQ ID NO: 581919 - DNA, 75 bp, synthetic construct
  source 1..75: mol_type = other DNA
tcggcaattcgagaaaccgttttttctgaggctaatctggagaatctctcctgggccgctcaacacggcactacc

SEQ ID NO: 581920 - DNA, 75 bp, synthetic construct
  source 1..75: mol_type = other DNA
taaaaatgtggcgaaactgattaatcaaattaagagagagcacgtaaaattgtactttatcgaaaaccagaccga

SEQ ID NO: 581921 - DNA, 75 bp, synthetic construct
  source 1..75: mol_type = other DNA
gtgcaaccggatggtgatccacatgaatttgaaccgtcgccgaaagacagcaaaacgctggcacaggcggatgtt

SEQ ID NO: 581922 - DNA, 75 bp, synthetic construct
  source 1..75: mol_type = other DNA
gaagaattaggcctttctgttgagctagagcacgacttaatttcggttgcacaataccatgtcaacaagaacaac

SEQ ID NO: 581923 - DNA, 75 bp, synthetic construct
  source 1..75: mol_type = other DNA
atgaacagggcggcagcgggattttacctggcagttgtgctggggagttgcagtatgaacggtgtctcacaggcg

SEQ ID NO: 581924 - DNA, 75 bp, synthetic construct
  source 1..75: mol_type = other DNA
aagcgatgggcaaagccacttctgtggagctggcggcgcgtcttcaggtcagccgggaggaagtgctgaatgaac

SEQ ID NO: 581925 - DNA, 75 bp, synthetic construct
  source 1..75: mol_type = other DNA
cggaaaacggcgcgaggatgctggaatcggtcatcgacggcaatatgctgccgccgctctccctgctgctgttgc

SEQ ID NO: 581926 - DNA, 75 bp, synthetic construct
  source 1..75: mol_type = other DNA
ttgctggtctccccgcacgtcgataaaaaacagattgcggcggtgattgccgaatggaccggcgtgccgctcaac

SEQ ID NO: 581927 - DNA, 75 bp, synthetic construct
  source 1..75: mol_type = other DNA
tatttatctctgccggaagagtatcacattggtaggtatgatcaacaatactttaatgaaaatgatattacaata

SEQ ID NO: 581928 - DNA, 75 bp, synthetic construct
  source 1..75: mol_type = other DNA
cctgaaggcgctcaacggtgtaatagctggaatgctgaaagacggaaagagcctacatgagtgttcaccgcaaga

SEQ ID NO: 581929 - DNA, 75 bp, synthetic construct
  source 1..75: mol_type = other DNA
gtgccaaagagatcgccgagcgcgtcgcctatctgaagcactgcgactatagccaaatgccacagcaccgcgtca

SEQ ID NO: 581930 - DNA, 75 bp, synthetic construct
  source 1..75: mol_type = other DNA
tcagagtcagagtcagagtcagagtcagagtcagagtcagagtcagagtcagaacaggataataccggtgccgta

SEQ ID NO: 581931 - DNA, 75 bp, synthetic construct
  source 1..75: mol_type = other DNA
gcattcaggctgtattagtaaacgagtacgatgatattccacttatattgaaagagattgagagtcgcttcctca

SEQ ID NO: 581932 - DNA, 75 bp, synthetic construct
  source 1..75: mol_type = other DNA
ctatctcactcatggagcacgaaaaattccgtagagtgattgcagaacgctttccaatcattctggtcgatgagt

SEQ ID NO: 581933 - DNA, 75 bp, synthetic construct
  source 1..75: mol_type = other DNA
tatttaaagaagcatcaggccggatttttattcggcaaaacgaccgttttttttggggcgttttcaggacggttt

SEQ ID NO: 581934 - DNA, 75 bp, synthetic construct
  source 1..75: mol_type = other DNA
ttaaatacatgcgagcgcgctacaagcacctgcgttttgcgcaacggctgtatttaaagaagcatcaggccggat

SEQ ID NO: 581935 - DNA, 75 bp, synthetic construct
  source 1..75: mol_type = other DNA
atgtggcttatgaagacattactaacatcggggtgtactaatcaacggggagcaggtcacagcccctggctttta

SEQ ID NO: 581936 - DNA, 75 bp, synthetic construct
  source 1..75: mol_type = other DNA
ctcagcacccttatcttaacgacgtcccactcattgatgagttaaggcatcagaacactcatcatgttattctct

SEQ ID NO: 581937 - DNA, 75 bp, synthetic construct
  source 1..75: mol_type = other DNA
gaaatcagtcgatactcgcagtatatatcgcgaactgggcgcaacgctgagttacaacatgcgtctggggaacgg

SEQ ID NO: 581938 - DNA, 75 bp, synthetic construct
  source 1..75: mol_type = other DNA
ccgtaaccaggggaagttctttgctgaggtgcatgaggatgcgtttgataagctgacaatgttgattcagcaggt

SEQ ID NO: 581939 - DNA, 75 bp, synthetic construct
  source 1..75: mol_type = other DNA
ccctcaaacaactagttgggttaaatgcgacatggttcaaacagtaagtaatcagcgacttaacagacctatggc

SEQ ID NO: 581940 - DNA, 75 bp, synthetic construct
  source 1..75: mol_type = other DNA
tcgccagatgatccacaaagttcgactggaaaaggccaccgagttacttgccggaactacgccgattaccgatat

SEQ ID NO: 581941 - DNA, 75 bp, synthetic construct
  source 1..75: mol_type = other DNA
gatcttcacgccgcatttaatagcatattcaacagcggaacatcttctatcaccgcattttcaggaccattagca

SEQ ID NO: 581942 - DNA, 75 bp, synthetic construct
  source 1..75: mol_type = other DNA
acgcaatcaaacaaggataagttattattttctgataaagtatcgagacatgggtgtacaatcggccttgttcta

SEQ ID NO: 581943 - DNA, 75 bp, synthetic construct
  source 1..75: mol_type = other DNA
atggaataactgcgggaacaagcggggtaacgatggagataggaaacccaggtggggcaccaagctatccattca

SEQ ID NO: 581944 - DNA, 75 bp, synthetic construct
  source 1..75: mol_type = other DNA
aagccaatctgaatcatgcagtcgccgcgctgactcaatcgtgggtaacagcaatcagggaggccgccaccacag

SEQ ID NO: 581945 - DNA, 75 bp, synthetic construct
  source 1..75: mol_type = other DNA
gggatgccaacggaaatccaaataactacggaatcaaaccttcagtagttgttggttatatttcgctatcctcag

SEQ ID NO: 581946 - DNA, 75 bp, synthetic construct
  source 1..75: mol_type = other DNA
aatcgccagctcaaaagacggtctggcagtgatggttatcatcgacagctttctgagctaccgcacagacacaca

SEQ ID NO: 581947 - DNA, 75 bp, synthetic construct
  source 1..75: mol_type = other DNA
aaaatcccgtcattgtggtgaaaaaacgtcgctctttttcaccgccttccttagccgaaaaaaaagatgttatcg

SEQ ID NO: 581948 - DNA, 75 bp, synthetic construct
  source 1..75: mol_type = other DNA
ggtctcagactctgaagcacagagtgccggtcgcagactggcgacattagaacaaaagtggctcaggacgcaggc

SEQ ID NO: 581949 - DNA, 75 bp, synthetic construct
  source 1..75: mol_type = other DNA
ctgaacttgaggtcaccaatgccattttcggtactaatgagttccgggcgtcagactttgagatcaccacagcac

SEQ ID NO: 581950 - DNA, 75 bp, synthetic construct
  source 1..75: mol_type = other DNA
gcaaagtgcgctttgtttatgccagatgcgacgctggcgcatctggcctacaaagggctaacgagcaggttttgt

SEQ ID NO: 581951 - DNA, 75 bp, synthetic construct
  source 1..75: mol_type = other DNA
agttaaatgagttaaaaattaaaattagtgaagtttctatcatactatcatctttggagtttaagcaaaaattaa

SEQ ID NO: 581952 - DNA, 75 bp, synthetic construct
  source 1..75: mol_type = other DNA
agtctttaatcgctcaaagtattaatggacagttaatttctgatgtccctcttggcgcttttcttagtggtggaa

SEQ ID NO: 581953 - DNA, 75 bp, synthetic construct
  source 1..75: mol_type = other DNA
aaacgtctgcgtcttaactacaacggcataattgcattgttagtcgaaggctttaaaacacttcgtcatgagatt

SEQ ID NO: 581954 - DNA, 75 bp, synthetic construct
  source 1..75: mol_type = other DNA
cgctgggctttgttgaagcgccacgcggtgaagacgtgcactggagcatgctcggtgataaccaaaaattgttcc

SEQ ID NO: 581955 - DNA, 75 bp, synthetic construct
  source 1..75: mol_type = other DNA
aaaacagagtttgttgttatccatattcccgatcagattggcgatgctatggccggtgatgctgccaacttactg

SEQ ID NO: 581956 - DNA, 75 bp, synthetic construct
  source 1..75: mol_type = other DNA
ttgcaaagtgtctcctggatgggccggattcagtcgcgccaattatggcgatggttacaacgatgctaagtggag

SEQ ID NO: 581957 - DNA, 75 bp, synthetic construct
  source 1..75: mol_type = other DNA
accgctattatgacccgctgcgggggaggtatatcactcaggatccgattgggctgaaggggggatggaattttt

SEQ ID NO: 581958 - DNA, 75 bp, synthetic construct
  source 1..75: mol_type = other DNA
tgcactttaaagaacgctatgacgttgttatctcgcgcctgaaccgtgccggggttgaactggtcgccagtggcg

SEQ ID NO: 581959 - DNA, 75 bp, synthetic construct
  source 1..75: mol_type = other DNA
ggcggagaagctgcagcaggaagggagcgaggacgggcacggcgtggtatttccggctgaactggtgcggctgct

SEQ ID NO: 581960 - DNA, 75 bp, synthetic construct
  source 1..75: mol_type = other DNA
gtgtccgttaaactcaggctacctcaccctgtttgtctgggtcttccagtacaggcggaacttcgatgtgttgca

SEQ ID NO: 581961 - DNA, 75 bp, synthetic construct
  source 1..75: mol_type = other DNA
gccataagctggagctgcatgtggggaatctggcgcagcggctggccgcctgtcgcgaacgcccctacaagggga

SEQ ID NO: 581962 - DNA, 75 bp, synthetic construct
  source 1..75: mol_type = other DNA
gcgcatttgtcgctgcaatacagctaaatcctaagggataccagtgtttacgcacggacgactttattcgagaac

SEQ ID NO: 581963 - DNA, 75 bp, synthetic construct
  source 1..75: mol_type = other DNA
atggatgccgcggcagcgaaaaaagtggatgtgattaacgaaccggaaagtgctgcgcagtctccggatatggca

SEQ ID NO: 581964 - DNA, 75 bp, synthetic construct
  source 1..75: mol_type = other DNA
taatattgatatgtcacaaaaacttgaagaacgtttttatgcatggtctgaaaatcccgaagtatttgatgtacg

SEQ ID NO: 581965 - DNA, 75 bp, synthetic construct
  source 1..75: mol_type = other DNA
gtgttacggcactgtcaacgtttgttctgccgcaaacacaggcgctaagctgggtagttggcgtcagcgttttgc

SEQ ID NO: 581966 - DNA, 75 bp, synthetic construct
  source 1..75: mol_type = other DNA
tagtaaaggcctcaaaaaacattgcctctgtgattacgacaaactatgataattttatcgaaagtgcaattggtt

SEQ ID NO: 581967 - DNA, 75 bp, synthetic construct
  source 1..75: mol_type = other DNA
cggcttttttggcggccatacaacagaatccgaagggctatctttgtcttaatacaaataaatttattgctgaat

SEQ ID NO: 581968 - DNA, 75 bp, synthetic construct
  source 1..75: mol_type = other DNA
aatcaaatttaaatgataataatagtgctaaagttttacattcgatgggtgaatccatataccgaaggggaccag

SEQ ID NO: 581969 - DNA, 75 bp, synthetic construct
  source 1..75: mol_type = other DNA
aaataaaggagctgaacctgaaatttttatggcaggtgatggtggtttagttacttatatcgaaaatgaaattat

SEQ ID NO: 581970 - DNA, 75 bp, synthetic construct
  source 1..75: mol_type = other DNA
cttaatactggcgttccttttgtcagtttaaatggagttacggggataacagtaactgctgggaatcctgatgat

SEQ ID NO: 581971 - DNA, 75 bp, synthetic construct
  source 1..75: mol_type = other DNA
cgagagatgatgttacagttaaaataaatgaaaagccagcttctggcgttgagcttgtatttttcggccgccttg

SEQ ID NO: 581972 - DNA, 75 bp, synthetic construct
  source 1..75: mol_type = other DNA
ggctttttgtcgtcactgccttgctcagtggctgcgcgacaacctcctcgcctctcttgccttcacccattaaag

SEQ ID NO: 581973 - DNA, 75 bp, synthetic construct
  source 1..75: mol_type = other DNA
tgttataccagtccacccacgttagtgtggccagttccacttctgtccggtttttccagctcttacggtgtatta

SEQ ID NO: 581974 - DNA, 75 bp, synthetic construct
  source 1..75: mol_type = other DNA
ctcagcaacagagtgacaataccgcacgtctgacagcctatggcacattaaaaatgtgcattagaaaaattccag

SEQ ID NO: 581975 - DNA, 75 bp, synthetic construct
  source 1..75: mol_type = other DNA
gaatttgaaaggtttacactcgaatgggcctctgaatacttagctggtcagcaatatgtcaacgaagtacaacaa

SEQ ID NO: 581976 - DNA, 75 bp, synthetic construct
  source 1..75: mol_type = other DNA
tttacggccgtttttatctggtgaatttcgataacgtcaggacagtttctgtgtccgacgatgaagaatgtggcg

SEQ ID NO: 581977 - DNA, 75 bp, synthetic construct
  source 1..75: mol_type = other DNA
tgccgggcgccggtgctgtgtggaaatcgcccatcttcatgacaaaaatttgtcaaatgacaggctcatgtgtgc

SEQ ID NO: 581978 - DNA, 75 bp, synthetic construct
  source 1..75: mol_type = other DNA
atgacggaacaatatcaacatctaagcattgctaaagaatctcttcagaaccctagacgcacacgccagttcaag

SEQ ID NO: 581979 - DNA, 75 bp, synthetic construct
  source 1..75: mol_type = other DNA
cactcgcgcaagcggaacacctattagctcatcgggacgttaggtttattgatttgccaccgtctagtggcatta

SEQ ID NO: 581980 - DNA, 75 bp, synthetic construct
  source 1..75: mol_type = other DNA
gaggcaatagatctgttgctgaaattccatcaccttccacatattattgaaatcattaatgacaacataaaatat

SEQ ID NO: 581981 - DNA, 75 bp, synthetic construct
  source 1..75: mol_type = other DNA
tggaccggatgcgctgggccttcatgggcgctttgagcgcggcgaagcattcggtgcgcatctggacaccttact

SEQ ID NO: 581982 - DNA, 75 bp, synthetic construct
  source 1..75: mol_type = other DNA
cggtatcgtaggtattctactcgcagcagttgtaggtgcattaattgatgacaagtttgcagatgcactaaataa

SEQ ID NO: 581983 - DNA, 75 bp, synthetic construct
  source 1..75: mol_type = other DNA
tgttcgtcagcaaaaaaaattctatatcagaactataaatgttggtaatgctgaaatatctaaccttagtgtatc

SEQ ID NO: 581984 - DNA, 75 bp, synthetic construct
  source 1..75: mol_type = other DNA
atgcgcataacttaaggtctggggatgaagtttatggtattgaagtagatactaatattgatggtgatgttaccg

SEQ ID NO: 581985 - DNA, 75 bp, synthetic construct
  source 1..75: mol_type = other DNA
ttgcaaggtccgaccgttgacggcaacgagctacgcgaagaaactcgctatcttaatgttgactactccgccgtg

SEQ ID NO: 581986 - DNA, 75 bp, synthetic construct
  source 1..75: mol_type = other DNA
aatcgttttgttttacagaactcaggtaatgcagaactaccgttttctgtcagggtgtggggttccagtactcga

SEQ ID NO: 581987 - DNA, 75 bp, synthetic construct
  source 1..75: mol_type = other DNA
tcgtccttatgtagggagtgaaaaagctaaggctggtattatggataaagtcgaccataagaccccggaagagat

SEQ ID NO: 581988 - DNA, 75 bp, synthetic construct
  source 1..75: mol_type = other DNA
cactttcgtctgcgcgggccggtggtagagcatctgatgcggagcttcaccgatgattggtgcgataccacgggc

SEQ ID NO: 581989 - DNA, 75 bp, synthetic construct
  source 1..75: mol_type = other DNA
tatgcccgctggacgccccgcagcgcctaccgcgccttgcagcgcgccggcgttccggtggcgacgttcaacccg

SEQ ID NO: 581990 - DNA, 75 bp, synthetic construct
  source 1..75: mol_type = other DNA
cgcggtacagcgtcgccttgacctcgtacatcttcgacagccaaggcatcggggcgcagttcgtcgatgcgctgc

SEQ ID NO: 581991 - DNA, 75 bp, synthetic construct
  source 1..75: mol_type = other DNA
ctgaacggggacccggaccagccgataatcatggggcggacgtaccatgaggacaaccgttcgccggggagcctg

SEQ ID NO: 581992 - DNA, 75 bp, synthetic construct
  source 1..75: mol_type = other DNA
gccgggatgacgttaagtagcgatatgttgcatgtcattcaggagtttggcctgatcttgttcgtttataccatt

SEQ ID NO: 581993 - DNA, 75 bp, synthetic construct
  source 1..75: mol_type = other DNA
tatcgtccgcatttgttcacatccagattatggtgggctggacgggggcaccgaaaggtgcgccggtctccgttg

SEQ ID NO: 581994 - DNA, 75 bp, synthetic construct
  source 1..75: mol_type = other DNA
attgataaatagtgtatcaaaaacagctcagactgagttaagagatgagggggattcaattattactataaattt

SEQ ID NO: 581995 - DNA, 75 bp, synthetic construct
  source 1..75: mol_type = other DNA
gtcagcatgaagaaatgtgccaggtggtgggcaatatcgtttttgccttggccgaagccgggcacgactcacatc

SEQ ID NO: 581996 - DNA, 75 bp, synthetic construct
  source 1..75: mol_type = other DNA
tacaccctgccggtataccagagagaagccagaacaatgaaacggggtctgtgggcagacaaaaaacctgttcca

SEQ ID NO: 581997 - DNA, 75 bp, synthetic construct
  source 1..75: mol_type = other DNA
taattagttttattgatgcaaaaagagctgttgataatgtattgaatcgattttcattgttgacaaatattattt

SEQ ID NO: 581998 - DNA, 75 bp, synthetic construct
  source 1..75: mol_type = other DNA
attttggaatgcaagaaaaaaactcagtagctatacgtgataataattcttttgagaataagaaaaaaatcattt

SEQ ID NO: 581999 - DNA, 75 bp, synthetic construct
  source 1..75: mol_type = other DNA
ttcttatgcgtatacaatattagattgagttattcacttttttcgaaagatttatccatattaattaaagaaaga

SEQ ID NO: 582000 - DNA, 75 bp, synthetic construct
  source 1..75: mol_type = other DNA
ggaaataatattaatcaggtgcctatgcaggtaaataatgcattatcttttaataaaaactctgtaatcttaaag

SEQ ID NO: 582001 - DNA, 75 bp, synthetic construct
  source 1..75: mol_type = other DNA
gtattttagctagtgaccaaaataataagataagcaatgtcatgatatctgacattactctcgatggtaatagcg

SEQ ID NO: 582002 - DNA, 75 bp, synthetic construct
  source 1..75: mol_type = other DNA
gttaatgggggccactttatacccgtggttgcgcgcgttaacacccgctaaacgctacgggatcatgatggtcgt

SEQ ID NO: 582003 - DNA, 75 bp, synthetic construct
  source 1..75: mol_type = other DNA
catacacacagacagaccgctacgggcgtattcttggacgtgtatataccgaagacggcatggaagttaaccgct

SEQ ID NO: 582004 - DNA, 75 bp, synthetic construct
  source 1..75: mol_type = other DNA
cactcaaaaactggtgttgaaatcgtcagaccagtacctgaaattctacgacagtgggtaacggatgttcacgaa

SEQ ID NO: 582005 - DNA, 75 bp, synthetic construct
  source 1..75: mol_type = other DNA
atgttaaaaccgagctatatcagacctaaaaatcttgctgaagaattaggtatttcaatgccctcattgtggcgt

SEQ ID NO: 582006 - DNA, 75 bp, synthetic construct
  source 1..75: mol_type = other DNA
ttagacccggaacagccgccgaaaacctggcaggatctggcggactatgccgcgaaactgaaagcctccggtatg

SEQ ID NO: 582007 - DNA, 75 bp, synthetic construct
  source 1..75: mol_type = other DNA
catcactatcggctttaacggcgtgagccgggcggcgacttctgaccgtgctcagaatccgctgcttcaggacgt

SEQ ID NO: 582008 - DNA, 75 bp, synthetic construct
  source 1..75: mol_type = other DNA
ttacaaaacgagaagtcgcaaatcttcttcgccttagtacaacgagcattgacacaatggttaaggctggtgaat

SEQ ID NO: 582009 - DNA, 75 bp, synthetic construct
  source 1..75: mol_type = other DNA
tcaccaaacgcgaggttgctgcgcgtctgcgccttcgttccactaccagcattgacgacatgattcgggctggcg

SEQ ID NO: 582010 - DNA, 75 bp, synthetic construct
  source 1..75: mol_type = other DNA
atctggtgggacagcctgcggatttgcataatgcacagttggtgattggtcaggaggtggatacttcgctatcaa

SEQ ID NO: 582011 - DNA, 75 bp, synthetic construct
  source 1..75: mol_type = other DNA
atgcgtaaagagacccgttttaaattcaatcagtacctgagccgtatcgccgagctgaacggcatcgcgaccagc

SEQ ID NO: 582012 - DNA, 75 bp, synthetic construct
  source 1..75: mol_type = other DNA
accgctccggccagcgcgcctgtcgctgacggcgaaacttccccggctgaaaccggcaccactgacggcgtggag

SEQ ID NO: 582013 - DNA, 75 bp, synthetic construct
  source 1..75: mol_type = other DNA
gacacaatatgcagagccgctggtcgaaagtcgctatctttacgacccgctgggccgcagggtggcaaaacgggt

SEQ ID NO: 582014 - DNA, 75 bp, synthetic construct
  source 1..75: mol_type = other DNA
acaacggcgaactcattcgcatcagcagcccgcgccagacccggagttacagctacagcgactccggcaggctga

SEQ ID NO: 582015 - DNA, 75 bp, synthetic construct
  source 1..75: mol_type = other DNA
acgctgcgcagcttcggccgttatgaactcaccaccgcttacacccctgccgggcagttacagagccagcacctg

SEQ ID NO: 582016 - DNA, 75 bp, synthetic construct
  source 1..75: mol_type = other DNA
tacgctaccgtatctgatagttatgaccgtaagaatcatgatcatctttcggcctttacgggcacttatagctct

SEQ ID NO: 582017 - DNA, 75 bp, synthetic construct
  source 1..75: mol_type = other DNA
tggtggtcgtaatcctgggcactatcgctggtgcattcggcattggtcacgctcgcgggaccaataaggcggaag

SEQ ID NO: 582018 - DNA, 75 bp, synthetic construct
  source 1..75: mol_type = other DNA
cggaagtgacctggtacggctgggacggcgaccggctgaccacgatacagaacgacagaacccgcatccagacgg

SEQ ID NO: 582019 - DNA, 75 bp, synthetic construct
  source 1..75: mol_type = other DNA
atgttttatgtggataacccgacgggtgtgccggtgatgccacctgtcgcggcggtatcaagcctggcgacgctt

SEQ ID NO: 582020 - DNA, 75 bp, synthetic construct
  source 1..75: mol_type = other DNA
aagtcatccggtgccggcgggtgccggtcagagggatcacgctgacggtgggggggttctttgatggtaccggga

SEQ ID NO: 582021 - DNA, 75 bp, synthetic construct
  source 1..75: mol_type = other DNA
aggcgacactaccaatctgtatattgaggtgaaggataattacggcaacggtgtaccccagcaggaggtaccctc

SEQ ID NO: 582022 - DNA, 75 bp, synthetic construct
  source 1..75: mol_type = other DNA
gcaacggttaaagatcagttcgacaatgaggtgaataatcttccggtaacattcagctcagcctcttcaggactc

SEQ ID NO: 582023 - DNA, 75 bp, synthetic construct
  source 1..75: mol_type = other DNA
ttgcgctggcgctggctgcaaccttcggcaccatctggatacgccgtctgcaaaaagacattaccgacctggaaa

SEQ ID NO: 582024 - DNA, 75 bp, synthetic construct
  source 1..75: mol_type = other DNA
ccggcgtggcgcggagcctgagggcttcacggcggaggatatgcggaccatcgggcgttacctgcattgctcggc

SEQ ID NO: 582025 - DNA, 75 bp, synthetic construct
  source 1..75: mol_type = other DNA
atgctggatgcggcacaagacgccggggctgtgtttactccgatactcagcagtaacaaagagctggcgttgccg

SEQ ID NO: 582026 - DNA, 75 bp, synthetic construct
  source 1..75: mol_type = other DNA
ctgcaaaaaaaaacacgaatcagtagttgataactacctgaaagaaatggaggaggggatttctggcgctcgtgg

SEQ ID NO: 582027 - DNA, 75 bp, synthetic construct
  source 1..75: mol_type = other DNA
atcagtactgaaggtgcaacggagtggcgcggggagtatgatgagtgggggaaccagatgaatgaggagaacccg

SEQ ID NO: 582028 - DNA, 75 bp, synthetic construct
  source 1..75: mol_type = other DNA
gggcgtggcttgcgcagtgcgggctgacggtggagcggctggcggcacagatagagccggtttatttgcctgagc

SEQ ID NO: 582029 - DNA, 75 bp, synthetic construct
  source 1..75: mol_type = other DNA
gctatgcccaaaattataagagagtatggagaaatagatttacttattattggcgaaggacaacttcgcaatgat

SEQ ID NO: 582030 - DNA, 75 bp, synthetic construct
  source 1..75: mol_type = other DNA
aattgcgtcatttagctgcagcacataagtatgctcaaatgcttgccgattatatttcaaagggttcccagttct

SEQ ID NO: 582031 - DNA, 75 bp, synthetic construct
  source 1..75: mol_type = other DNA
gctgcggattaatggctggattaacatcgcttttggcgtcactggcattattgccacatttgtggtctccccgtg

SEQ ID NO: 582032 - DNA, 75 bp, synthetic construct
  source 1..75: mol_type = other DNA
attcgccagatcaagggtgacaagcaaggtaagattgctaatatttatcaacttaatgcaaaagatgcttctgct

SEQ ID NO: 582033 - DNA, 75 bp, synthetic construct
  source 1..75: mol_type = other DNA
cactacagcacctttggtacgctggaatcgagtaatctctcaattagtaccaactataacaggtgtacatgatat

SEQ ID NO: 582034 - DNA, 75 bp, synthetic construct
  source 1..75: mol_type = other DNA
atgaccttagccgaggcaattggtaatgctgaaggcatgtcacaagcattcagtgatgcaacaggcgtttttgtt

SEQ ID NO: 582035 - DNA, 75 bp, synthetic construct
  source 1..75: mol_type = other DNA
aacagttatggatgcgatcaatgctgcaggtggactggcgcctgatgctgattggcgcaatgttgtattaactca

SEQ ID NO: 582036 - DNA, 75 bp, synthetic construct
  source 1..75: mol_type = other DNA
accctgggcgcagatatacaccactgcgcacaagccgacagcatcggaagtaggtgcgcttcctgcgaacagtaa

SEQ ID NO: 582037 - DNA, 75 bp, synthetic construct
  source 1..75: mol_type = other DNA
ctctatgctctaatgcaaaaaggggatttaaccgagaaccggttgctatatccaggagatattctatttgttcca

SEQ ID NO: 582038 - DNA, 75 bp, synthetic construct
  source 1..75: mol_type = other DNA
taactgggttcattccgacggtacgatattctacccatatataggcaaagttcaggttgcaggaaaaacaatcag

SEQ ID NO: 582039 - DNA, 75 bp, synthetic construct
  source 1..75: mol_type = other DNA
taactgggtgaactcagatggcaccattttctatccttatattggtaaggtgcaggtagcaggcaaaacgcttag

SEQ ID NO: 582040 - DNA, 75 bp, synthetic construct
  source 1..75: mol_type = other DNA
agaacgtggttgagcttccggatagcgactacgatctggataaattggttaatgtttaccctatgactccagggc

SEQ ID NO: 582041 - DNA, 75 bp, synthetic construct
  source 1..75: mol_type = other DNA
aatgtatatcctatgacgccgagtcttatcgatcagctccgtcctgaggccgtgttggctcgaccaaatccacaa

SEQ ID NO: 582042 - DNA, 75 bp, synthetic construct
  source 1..75: mol_type = other DNA
ctcaggttgacgtaagtattgctgcatttcgctcgcaaaaagcctatgtgactggggaagttgcaaaatcaggac

SEQ ID NO: 582043 - DNA, 75 bp, synthetic construct
  source 1..75: mol_type = other DNA
aataccgcagcgccagcgacaccggtaactgggtcaactccgatggcaccattttctatccttatatcggtaagg

SEQ ID NO: 582044 - DNA, 75 bp, synthetic construct
  source 1..75: mol_type = other DNA
gcaggtggcttatcagaagacgctgactggcgtaatgtggtgctgacgcataatggtaaggataccaaaatctcg

SEQ ID NO: 582045 - DNA, 75 bp, synthetic construct
  source 1..75: mol_type = other DNA
caggtccctggcacagtccacaaatccgcagccattacattgattcctggtacggcagatgaaagtaaatcaaca

SEQ ID NO: 582046 - DNA, 75 bp, synthetic construct
  source 1..75: mol_type = other DNA
ttcaaacctgccttcgcacttacccaaattctcccttcagtatggcttacttcgtggcgagtattgtttagagag

SEQ ID NO: 582047 - DNA, 75 bp, synthetic construct
  source 1..75: mol_type = other DNA
ttcataccagccttcgcacttacccaaatcctcccttcaacatggcttacttcatggcgagtattgtttagagag

SEQ ID NO: 582048 - DNA, 75 bp, synthetic construct
  source 1..75: mol_type = other DNA
cggattattaaaagaaccgtgcacaacgccatgaaagccgctgtagaacgtcacaaaagaaggtttaactgcaaa

SEQ ID NO: 582049 - DNA, 75 bp, synthetic construct
  source 1..75: mol_type = other DNA
aagcagataatgggcaagatgtccagtctgagacaatcggatctgatggaagtgccacattgcgttatatggccc

SEQ ID NO: 582050 - DNA, 75 bp, synthetic construct
  source 1..75: mol_type = other DNA
tgcaaagccagatggacccggtatacacgccggcgcgaaaaattcacctgtaccactgcgaccatcgcggcctgc

SEQ ID NO: 582051 - DNA, 75 bp, synthetic construct
  source 1..75: mol_type = other DNA
atttgctttatgggggtgggatagagttgttaaagaatatatttctcactataacgaatgtatcgctacttttga

SEQ ID NO: 582052 - DNA, 75 bp, synthetic construct
  source 1..75: mol_type = other DNA
agctgaactgaccgacaaaggttataacgaagcggatctggcatttgctacccgtggtgttgttaaagctgaact

SEQ ID NO: 582053 - DNA, 75 bp, synthetic construct
  source 1..75: mol_type = other DNA
actggtcctgtttctctgccgtctctgacttccagcaatctggaaaacttcggttttgttgcagaaggtcaatcc

SEQ ID NO: 582054 - DNA, 75 bp, synthetic construct
  source 1..75: mol_type = other DNA
atatggtctataccgttgtgctcattgtgatcggtggaactttatttacccataaggtgggtaaacgtattcgtc

SEQ ID NO: 582055 - DNA, 75 bp, synthetic construct
  source 1..75: mol_type = other DNA
gacaagctgccgactgagataaaggcggccaacccggcgagtaatgactcttctggtgagctcgtctttaagaag

SEQ ID NO: 582056 - DNA, 75 bp, synthetic construct
  source 1..75: mol_type = other DNA
aacaaacggatcggccaaatccctgataactcgcacctcccggtacacacgttctgggatatcggtgtgggtgac

SEQ ID NO: 582057 - DNA, 75 bp, synthetic construct
  source 1..75: mol_type = other DNA
tattaagcgtcgttatgcgcaactggtaaaaaattgccgcccggaagatgatcctgcagcctggcaacaattgca

SEQ ID NO: 582058 - DNA, 75 bp, synthetic construct
  source 1..75: mol_type = other DNA
ccacccctgcggcctgtttcccgctgtggactttccggggggcagacgtaaccccctcccgttccatctgtccag

SEQ ID NO: 582059 - DNA, 75 bp, synthetic construct
  source 1..75: mol_type = other DNA
cacgccgcgtattcaactgaactacaacgatgcgatcaaaagcctagtggcggccggttatggtgcgacgttgtt

SEQ ID NO: 582060 - DNA, 75 bp, synthetic construct
  source 1..75: mol_type = other DNA
aaaaaaaaataatgaaagtagtcctgaaagcatgaatagtagcaattactgctgtgaattgtgttgtaatcctgc

SEQ ID NO: 582061 - DNA, 75 bp, synthetic construct
  source 1..75: mol_type = other DNA
tcggcagaacaagggtacgctgaagcacaatatcaccttgccacaatgtacatagacggtcggggcgttgatgtg

SEQ ID NO: 582062 - DNA, 75 bp, synthetic construct
  source 1..75: mol_type = other DNA
gtaaaaaattgccgcccggaagatgatcctgcagcctggcaacaattgcacgatgcttatgaacaggctttacgt

SEQ ID NO: 582063 - DNA, 75 bp, synthetic construct
  source 1..75: mol_type = other DNA
tggtatggtgcaattgagactgaggtcgatggatacttctctggtgttaaatataattctggtggaggacgaatt

SEQ ID NO: 582064 - DNA, 75 bp, synthetic construct
  source 1..75: mol_type = other DNA
ccgtgatagagcggttattgaacaaaaagttgatatatatggtacggctataaatattgttatgaataaatatat

SEQ ID NO: 582065 - DNA, 75 bp, synthetic construct
  source 1..75: mol_type = other DNA
cagtgctgcactgagactttatccgcaaagtccaagcgcagggtttgagttactgcgctttggtcgggttatcaa

SEQ ID NO: 582066 - DNA, 75 bp, synthetic construct
  source 1..75: mol_type = other DNA
ttgtcgcgcacacgtgggcgcattcagccttcggcgattggagaaacgctggtggagcgcgcgcggcgcctgttg

SEQ ID NO: 582067 - DNA, 75 bp, synthetic construct
  source 1..75: mol_type = other DNA
tcttagaaaaataagtagagaaagtctcatcgaacagatgtttttttattattcaagatttattgaggctaggat

SEQ ID NO: 582068 - DNA, 75 bp, synthetic construct
  source 1..75: mol_type = other DNA
tttacatgcgcaatatcatactgccaggttgtatagcggaagtgagagtattccacaggaccaggaaaaagcgct

SEQ ID NO: 582069 - DNA, 75 bp, synthetic construct
  source 1..75: mol_type = other DNA
gaaaccagtagttggtgaagaaatccgccatgattgcttcgttgatatgatcatggaacgttctattctgggtaa

SEQ ID NO: 582070 - DNA, 75 bp, synthetic construct
  source 1..75: mol_type = other DNA
ttataaatctgtttttttattttgggaaaaatataattcttatgtttctgggaggttactaaaaaaatttattac

SEQ ID NO: 582071 - DNA, 75 bp, synthetic construct
  source 1..75: mol_type = other DNA
aatttcagaaacagtttcaataaggccaaggcgcagcgcaagtacaaaaaaatgcaggaagataaagtcaatgta

SEQ ID NO: 582072 - DNA, 75 bp, synthetic construct
  source 1..75: mol_type = other DNA
attaacctattgaacaagatgggggatctggctggtcgtatcgttgcagagcagtatttaggcatgagttttgag

SEQ ID NO: 582073 - DNA, 75 bp, synthetic construct
  source 1..75: mol_type = other DNA
gcagccatgtttgatagcgccatgtcatttgcgctaatccgcggcggtcatattgatgcctgcgtgctcggcggt

SEQ ID NO: 582074 - DNA, 75 bp, synthetic construct
  source 1..75: mol_type = other DNA
atcgcgattgatggaaaagcacttccacactcctatgataaaagtggtcgcaggagagcgggctttcgtagtctt

SEQ ID NO: 582075 - DNA, 75 bp, synthetic construct
  source 1..75: mol_type = other DNA
gcggtgatgcagcgccatatcgagcatgataaacgccgaccgctaccgctggtcatcccgatgctgttttatcac

SEQ ID NO: 582076 - DNA, 75 bp, synthetic construct
  source 1..75: mol_type = other DNA
ggttgataccaaaattttgctaggccattcgaatcaaaaaatgaccgatatttacaacgacgcacgcggtaagga

SEQ ID NO: 582077 - DNA, 75 bp, synthetic construct
  source 1..75: mol_type = other DNA
gctggagcgggaactgcgtgcgggtgcggtgagtgcggagagtgaggcatggcttgcgcagtgcgggctgacggt

SEQ ID NO: 582078 - DNA, 75 bp, synthetic construct
  source 1..75: mol_type = other DNA
acaggtgaagtcgttggttgtgagacaaatggatcaggaatatcggcagcatatggcacaacgaagatctatact

SEQ ID NO: 582079 - DNA, 75 bp, synthetic construct
  source 1..75: mol_type = other DNA
aatagcacccataatgatgaattaaatcaggggcagggaaatactaaaaattcattattcgaaaaatacaagaat

SEQ ID NO: 582080 - DNA, 75 bp, synthetic construct
  source 1..75: mol_type = other DNA
cgcacggtctgggcgggatgatcgtcagcgatggcggttgcaccacgccgggcgatgtagctaaagcctttggtg

SEQ ID NO: 582081 - DNA, 75 bp, synthetic construct
  source 1..75: mol_type = other DNA
ctctccggtaactccggatggttggataagctgtagtgagcgaatgccacctcaagatgattggattttaattta

SEQ ID NO: 582082 - DNA, 75 bp, synthetic construct
  source 1..75: mol_type = other DNA
tcgcgaactgggtagtgcctgggaaaatggtgcccggtatgggtggcgcgatggatctggtgaccgggtcacgca

SEQ ID NO: 582083 - DNA, 75 bp, synthetic construct
  source 1..75: mol_type = other DNA
cggtgcaacgttgtctccgacggtcatcacagggccggacggcacggtggagatcagtgtcaccagccagacggc

SEQ ID NO: 582084 - DNA, 75 bp, synthetic construct
  source 1..75: mol_type = other DNA
ccgggcagacggtgagcgtgttgggaggcaacggcgcaacgactgccccgacggtcatcacagggccagacggga

SEQ ID NO: 582085 - DNA, 75 bp, synthetic construct
  source 1..75: mol_type = other DNA
agtgtcaccagccagacggcggggatcagtacagtcaccgcaaccatcaacagcagcagtcagagccgggatgtg

SEQ ID NO: 582086 - DNA, 75 bp, synthetic construct
  source 1..75: mol_type = other DNA
ggcgcagaagctgaatattctcaggaagaagcacgtaaagccgcagcgcgtggtcgtgcgcagcgttctaactcc

SEQ ID NO: 582087 - DNA, 75 bp, synthetic construct
  source 1..75: mol_type = other DNA
gtgttgcggtagatacccctgattttatcgaagaaaaagacgaacgaattattgaattggctttctcaagcgagg

SEQ ID NO: 582088 - DNA, 75 bp, synthetic construct
  source 1..75: mol_type = other DNA
acggcgcaatggcgaacacgctgcgggtgaaggtcaccgatgcgttcggcaatgcgcttgccggacagacggtca

SEQ ID NO: 582089 - DNA, 75 bp, synthetic construct
  source 1..75: mol_type = other DNA
tttcggcgttgggacaatgcaatattgacaaagcggggattcgaagtatcgagatgcgccgtaacgctttgctgg

SEQ ID NO: 582090 - DNA, 75 bp, synthetic construct
  source 1..75: mol_type = other DNA
ttgcacaggggcattttgacaatattcacgtagttttttctctgcgccgtatcaaccttgccaacaaagaaaact

SEQ ID NO: 582091 - DNA, 75 bp, synthetic construct
  source 1..75: mol_type = other DNA
tttggcctgcagcggggagaacgactgcgtttccgggccaattttacccaggccaccatcagggggctcagtacg

SEQ ID NO: 582092 - DNA, 75 bp, synthetic construct
  source 1..75: mol_type = other DNA
gttcctgatgcggagttcataacccagtgtacccaatgtagtcagtgcattgatgtctgcccaatgggagtcctg

SEQ ID NO: 582093 - DNA, 75 bp, synthetic construct
  source 1..75: mol_type = other DNA
atgatgacattaggtcagatgtttcagttaatcacgattgacaacaataccgcctcgctgcagctgcgttataca

SEQ ID NO: 582094 - DNA, 75 bp, synthetic construct
  source 1..75: mol_type = other DNA
atcgatgctgcaatatgtaatggttgcggtgaatgtttggttcagtgtggttatgacgcggtaaaacttgagatg

SEQ ID NO: 582095 - DNA, 75 bp, synthetic construct
  source 1..75: mol_type = other DNA
tgtgttagccgtgctcaacagggggatcttttcaccactggtaccgagttctcttaaaccaaggtttaggattga

SEQ ID NO: 582096 - DNA, 75 bp, synthetic construct
  source 1..75: mol_type = other DNA
acccatgtaaacgacggctttgttatcaggtaattacagtgaaagcaaaatcgatatggttgatatattcaacca

SEQ ID NO: 582097 - DNA, 75 bp, synthetic construct
  source 1..75: mol_type = other DNA
ttgtgattttcaaaacgcgtatgtcggcaatgatcgcgacggtggttgtcgtactggtggtgacatttgcgaacg

SEQ ID NO: 582098 - DNA, 75 bp, synthetic construct
  source 1..75: mol_type = other DNA
gttgcacggaaggcagagtctttaaatgctattaaacaaagactgtatggtcgtaatcagcttgatgatgctgaa

SEQ ID NO: 582099 - DNA, 75 bp, synthetic construct
  source 1..75: mol_type = other DNA
catccaaatggtgacagcctagttctcttggttatcaagggacccagcatgatggaccttgtccacgagctctac

SEQ ID NO: 582100 - DNA, 75 bp, synthetic construct
  source 1..75: mol_type = other DNA
gtgctgtttggtgggatcatcgtcggccattttgtttctcaggcggggatgacattaagtagcgatatgctgcat

SEQ ID NO: 582101 - DNA, 75 bp, synthetic construct
  source 1..75: mol_type = other DNA
atggcctatttattagcgtcagtaattgtttattttaaaataaacacatttgatttcaattggagtgaggctctt

SEQ ID NO: 582102 - DNA, 75 bp, synthetic construct
  source 1..75: mol_type = other DNA
gatgatgcacagaggctgacatttttggctatggatgaatccgaactggcgttagcttgtagccgtcggggactt

SEQ ID NO: 582103 - DNA, 75 bp, synthetic construct
  source 1..75: mol_type = other DNA
cagtaccttcgtcaggcatcactgctcgcggccaatgactgcatcactgatgccatagagaaactgcccgttttt

SEQ ID NO: 582104 - DNA, 75 bp, synthetic construct
  source 1..75: mol_type = other DNA
gggacgccgaaagcattgtggccggaaccgatgacgcgcctgaatgcgatggggatgccgtctatcgccatgtgg

SEQ ID NO: 582105 - DNA, 75 bp, synthetic construct
  source 1..75: mol_type = other DNA
attctgtattacattgaacacgagggacgaaaccatatccgcagcaggcgctttatacaaaacgaaccgacaact

SEQ ID NO: 582106 - DNA, 75 bp, synthetic construct
  source 1..75: mol_type = other DNA
gtatatcatcgtgaccttctgggggatgcgaaccggtaggttactgacagttgaggcggtcagccgggagtttca

SEQ ID NO: 582107 - DNA, 75 bp, synthetic construct
  source 1..75: mol_type = other DNA
cgactcatggggtaatgcagccacgcaagatttgagctattgttcttctcttttaaccagaatacaagccgtaac

SEQ ID NO: 582108 - DNA, 75 bp, synthetic construct
  source 1..75: mol_type = other DNA
gagggctctccgtatttatctgcggggtacattactccttgggttattgggtatatcactggcattttggatgcg

SEQ ID NO: 582109 - DNA, 75 bp, synthetic construct
  source 1..75: mol_type = other DNA
acgtatgagctttatatgtctggtctagcgaaagcgtttaatgaggtatgtgaggataaacctgcgataggactt

SEQ ID NO: 582110 - DNA, 75 bp, synthetic construct
  source 1..75: mol_type = other DNA
atgagcgaacagtacctgataacgctcgatgagtggaaaccaaaacggttcagtctcccaataacaaacactacc

SEQ ID NO: 582111 - DNA, 75 bp, synthetic construct
  source 1..75: mol_type = other DNA
aaatccgcccaccttgccgcgcgccggtgctgtgtggaaatccgcccaccttaccgggcgccggtgccgtgtggg

SEQ ID NO: 582112 - DNA, 75 bp, synthetic construct
  source 1..75: mol_type = other DNA
cgccagtaaccgtaaggtacgcaataaggggactcaggctgatatgaagaaggcgattgaatctttcaagaaact

SEQ ID NO: 582113 - DNA, 75 bp, synthetic construct
  source 1..75: mol_type = other DNA
atgcatagcgtaacgggctgccagtttcaggataacggaaaccgccgagtctggttcttccgcgataacagccag

SEQ ID NO: 582114 - DNA, 75 bp, synthetic construct
  source 1..75: mol_type = other DNA
gcaaccattcaggctggcttttatgacgaataccagatgcctgacggcagccgtcgtcgtgtcgcaaagtcgatc

SEQ ID NO: 582115 - DNA, 75 bp, synthetic construct
  source 1..75: mol_type = other DNA
gggagaactgctgtgcataaatgcacttttgtttttagtcctcaggtaacaaaacagcagcagttgtccgggcct

SEQ ID NO: 582116 - DNA, 75 bp, synthetic construct
  source 1..75: mol_type = other DNA
tgtttgatccttcaggtaaagttcagggaccaaaactgaaggaagcgattaaaagtttaagattagttgcgatcg

SEQ ID NO: 582117 - DNA, 75 bp, synthetic construct
  source 1..75: mol_type = other DNA
cttcgactgggagaatttaggtagtgccaatgatggtgatgttaaatatttcacctatcagtccactgatattcc

SEQ ID NO: 582118 - DNA, 75 bp, synthetic construct
  source 1..75: mol_type = other DNA
ttcggcacattccatgtacttgacactctgacgactggccccaaaggaagtgcaacgtttaattttactgattgt

SEQ ID NO: 582119 - DNA, 75 bp, synthetic construct
  source 1..75: mol_type = other DNA
tggacgcaatcgacgacaacctgatttccggcccgcagccgatggttatcgacccgaatcaactcaggagaattt

SEQ ID NO: 582120 - DNA, 75 bp, synthetic construct
  source 1..75: mol_type = other DNA
gcagggaaaactgaagcatctggaatacgacacagaaacgcggaagctgaactggcataaatcggtagtcagtcg

SEQ ID NO: 582121 - DNA, 75 bp, synthetic construct
  source 1..75: mol_type = other DNA
agttttatgatcttttagtgatagattacttcttggtaaaaaattcctccaagcatactttaccttttatcaaaa

SEQ ID NO: 582122 - DNA, 75 bp, synthetic construct
  source 1..75: mol_type = other DNA
atttatgtcccaaggccgtactggtatccttgtcttacttggggtacaaggagccatcttgacaggtattgcatt

SEQ ID NO: 582123 - DNA, 75 bp, synthetic construct
  source 1..75: mol_type = other DNA
aagagtcagagaacagatatcatttttactgtaaaaccgtggccagtattacttgaccactacagtatcctctgc

SEQ ID NO: 582124 - DNA, 75 bp, synthetic construct
  source 1..75: mol_type = other DNA
aataacaggactgcacttatcaactgcttacaaccaaaccggcgtgtggaggtagaggtggatggtatcattaga

SEQ ID NO: 582125 - DNA, 75 bp, synthetic construct
  source 1..75: mol_type = other DNA
agcctggataatctggctatgaaactgaattcttttgagcaactcaatagcatcagggttattggctatacggat

SEQ ID NO: 582126 - DNA, 75 bp, synthetic construct
  source 1..75: mol_type = other DNA
ttactggcattctgttattcctgaaagaggagtatgtcctccacaagtgccattgagtccaaagacgtcgataca

SEQ ID NO: 582127 - DNA, 75 bp, synthetic construct
  source 1..75: mol_type = other DNA
aagatctggcatcagtcagggaaaaattaaccaaaaaatcagccgccggaaaagcatctgttcaggccagaagaa

SEQ ID NO: 582128 - DNA, 75 bp, synthetic construct
  source 1..75: mol_type = other DNA
taaatataggtattaattattgcaaatataatattataatgagaatggatactgatgattattgtattaatacaa

SEQ ID NO: 582129 - DNA, 75 bp, synthetic construct
  source 1..75: mol_type = other DNA
tgtttgagaatacgatccctccagatgatgtggtcattgtcgttgatggacctatcccggaaggtattacggatg

SEQ ID NO: 582130 - DNA, 75 bp, synthetic construct
  source 1..75: mol_type = other DNA
tatttcgatatcatcgaccccattatttacaatgaattttctatctactattattggtgaatatctttataaata

SEQ ID NO: 582131 - DNA, 75 bp, synthetic construct
  source 1..75: mol_type = other DNA
atgctggcggtggtggttatcggcatattcctcgcgcatcgtacccgttttggtaatcaggtatacgccattggc

SEQ ID NO: 582132 - DNA, 75 bp, synthetic construct
  source 1..75: mol_type = other DNA
attaaccaaaaaatcagccgccggaaaagcatctgttcaggccagaagaagcagaaaggaagcatatgttcaaac

SEQ ID NO: 582133 - DNA, 75 bp, synthetic construct
  source 1..75: mol_type = other DNA
tttagataaatcaacgctggctgatgtcaaaaagcagttgatctggcaaggttttggcgcactggcacccagcct

SEQ ID NO: 582134 - DNA, 75 bp, synthetic construct
  source 1..75: mol_type = other DNA
atagtaacaatatggatggcttaatcagcaagctcaaactgagtaagactgagtcaacgaaactaaaagagctac

SEQ ID NO: 582135 - DNA, 75 bp, synthetic construct
  source 1..75: mol_type = other DNA
aatacctgcggacgcatcaaaatctatcgggagaaaacacacattgatgtaccgatgtatgcgatccctaaagaa

SEQ ID NO: 582136 - DNA, 75 bp, synthetic construct
  source 1..75: mol_type = other DNA
cctacatgcccatgacggtgtttgaatccgaaccgagcattggacacactctgcttctccttctcgtggatacat

SEQ ID NO: 582137 - DNA, 75 bp, synthetic construct
  source 1..75: mol_type = other DNA
ggtgaacagtctgcggttctggccgaaatgaaaatcccctttctgcaaaagtctataaaaacacagttaaaggca

SEQ ID NO: 582138 - DNA, 75 bp, synthetic construct
  source 1..75: mol_type = other DNA
agtcgttataaagaacagaaccgacgtttttacgggcaactgccgttctgtgatattacagacgttttccgtttt

SEQ ID NO: 582139 - DNA, 75 bp, synthetic construct
  source 1..75: mol_type = other DNA
agttccagactaaacaaacagccgctgattctgcacatatactaaagtcagaatctatatttgagtctgtagctc

SEQ ID NO: 582140 - DNA, 75 bp, synthetic construct
  source 1..75: mol_type = other DNA
atcgcattccccctttacttattcgggcgctaaaaagcggagtctcctccgtagtggagtttcatctcagcaggg

SEQ ID NO: 582141 - DNA, 75 bp, synthetic construct
  source 1..75: mol_type = other DNA
atcgcatcccccctttacttattcgggcgctaaaaagcggggtcgcctccgtggtggagtttcatctcagcaagg

SEQ ID NO: 582142 - DNA, 75 bp, synthetic construct
  source 1..75: mol_type = other DNA
gccgatgtacagacacttttgcatgaagcgggggtggcggataacgtgatttgttttgaagcgcaaataccactg

SEQ ID NO: 582143 - DNA, 75 bp, synthetic construct
  source 1..75: mol_type = other DNA
ggtgatgccagcggttgctcgctgcgggttggagtatttggtgctgagccgtggacacaggccatgcgtaaagag

SEQ ID NO: 582144 - DNA, 75 bp, synthetic construct
  source 1..75: mol_type = other DNA
aaaacaccttccgaaacctcaacctcaatcagcgcgtgtctaccgtatcgccgtttatctcccgcagcgtgtggg

SEQ ID NO: 582145 - DNA, 75 bp, synthetic construct
  source 1..75: mol_type = other DNA
tatgggcccggctgtagacacccttgagtcactgatgcttaacgggcgggtgaggcatggcatgcacccggtgtt

SEQ ID NO: 582146 - DNA, 75 bp, synthetic construct
  source 1..75: mol_type = other DNA
tgcattttaaggagcgctatgatgtcgtcatttcgcgactgaatcgtgccggggttgaactggtcgccagtggcg

SEQ ID NO: 582147 - DNA, 75 bp, synthetic construct
  source 1..75: mol_type = other DNA
gcatgtactaatggtctttgcggcacactatccgctatgataggtccagataaatttgattctatagatagcacc

SEQ ID NO: 582148 - DNA, 75 bp, synthetic construct
  source 1..75: mol_type = other DNA
caatttattgagaaaccgcccggcaagttacgcattttcgaaatttatccgccgaaaccgttgcatagcatcgcg

SEQ ID NO: 582149 - DNA, 75 bp, synthetic construct
  source 1..75: mol_type = other DNA
caacatgcaattgtaaaaatccagatacctgcactcatatggtaaacattgatgcagacggaaaacagtatagct

SEQ ID NO: 582150 - DNA, 75 bp, synthetic construct
  source 1..75: mol_type = other DNA
actaatggtctttgcggcacactatccgctatgataggtccagataaatttgattctatagatagcaccgcatat

SEQ ID NO: 582151 - DNA, 75 bp, synthetic construct
  source 1..75: mol_type = other DNA
tatttttgcgattgcgattggcctgagtttccttgaaactgcagcgaacacatacagttcaatgatcggtccaaa

SEQ ID NO: 582152 - DNA, 75 bp, synthetic construct
  source 1..75: mol_type = other DNA
gcagagggtaaaagctttataagtcattacccggagagtaaagatgaagcagtgaaaataatcaggaggattgag

SEQ ID NO: 582153 - DNA, 75 bp, synthetic construct
  source 1..75: mol_type = other DNA
acatcagtattccatttggcagatcaaacaccgccacactgtatactcgccatgacgatcataaaacccactatg

SEQ ID NO: 582154 - DNA, 75 bp, synthetic construct
  source 1..75: mol_type = other DNA
attccgccagcgcccgtcgccaacgatacgctggttgctggagtgagcgacgctccgcaggcgaatgacccgaca

SEQ ID NO: 582155 - DNA, 75 bp, synthetic construct
  source 1..75: mol_type = other DNA
tggtggagatgagctactaaatatcagtctttattcaggaatgccttattttgatcaggtgctcggtactgtatc

SEQ ID NO: 582156 - DNA, 75 bp, synthetic construct
  source 1..75: mol_type = other DNA
caggggttgtctggtaaggcgtctcgatacgccaggaaagataaagaggttatattaactaacggtattccacct

SEQ ID NO: 582157 - DNA, 75 bp, synthetic construct
  source 1..75: mol_type = other DNA
tgctgcgtatccatctgtgcagaactggttcggctacagcgatccggccatggaagaagcgctgtacgagacgac

SEQ ID NO: 582158 - DNA, 75 bp, synthetic construct
  source 1..75: mol_type = other DNA
cgctggtttaatatgtaaggataatagtggcagatatttctcaacagcacctaaccgaggagaaagaaaaggatc

SEQ ID NO: 582159 - DNA, 75 bp, synthetic construct
  source 1..75: mol_type = other DNA
ataaagaatcattaagattcattcaagtacctcatcatggtagccggagaaatgtaggccctgatgttctcgata

SEQ ID NO: 582160 - DNA, 75 bp, synthetic construct
  source 1..75: mol_type = other DNA
gcgcagttccggcacgcaagcctgtattgaagtctgcccaacacaggcgttacgactgatggacgataaagggtt

SEQ ID NO: 582161 - DNA, 75 bp, synthetic construct
  source 1..75: mol_type = other DNA
agcaaaaatgtattggctgtatgaaccgccccgggtttcctggagagtgttttatctgtgaactcaggctgccag

SEQ ID NO: 582162 - DNA, 75 bp, synthetic construct
  source 1..75: mol_type = other DNA
gaaagcttccagttttccgacgatgccttatggatcggtgatgagttcggtccttacctgatcaagaccgacctg

SEQ ID NO: 582163 - DNA, 75 bp, synthetic construct
  source 1..75: mol_type = other DNA
ctcccagccgtggcattttattgttgccagcacggaagaaggtaaagcgcgtgttgccaaatccgctgccggtaa

SEQ ID NO: 582164 - DNA, 75 bp, synthetic construct
  source 1..75: mol_type = other DNA
gtaagtaccatttttataatgctcctgaaagggcaggatggaaaacagccactccacgatcatacattagtaact

SEQ ID NO: 582165 - DNA, 75 bp, synthetic construct
  source 1..75: mol_type = other DNA
tatagtattaaaatatattcagggttttactaacgataaaacatatgatgcaaaccagttctggattaatggaat

SEQ ID NO: 582166 - DNA, 75 bp, synthetic construct
  source 1..75: mol_type = other DNA
ctgccgcagaagaacaaaaaattcccggtaactgttacccggtcgataaagttattcaccaggataataacgaaa

SEQ ID NO: 582167 - DNA, 75 bp, synthetic construct
  source 1..75: mol_type = other DNA
tcagcacggaaggggcaacagaatggtgcgcagaatacgatgaatggggcaacctgctgaatgaagagaacccgc

SEQ ID NO: 582168 - DNA, 75 bp, synthetic construct
  source 1..75: mol_type = other DNA
ttgcactggctccaagtttcagcgcggtctatgtcgccgtcctggtaagtgttttgtttggcccttgctgggcga

SEQ ID NO: 582169 - DNA, 75 bp, synthetic construct
  source 1..75: mol_type = other DNA
tactgcggttatgcattttgatggtgattgcgaaacagtattagcattggcggttcgatttgcactggcgcagct

SEQ ID NO: 582170 - DNA, 75 bp, synthetic construct
  source 1..75: mol_type = other DNA
agggcagcagcatcagcgccggcggtaacctggcgatggctgcaggccataatctggatgtcacggcatcctctg

SEQ ID NO: 582171 - DNA, 75 bp, synthetic construct
  source 1..75: mol_type = other DNA
attaatgattaaaaacaggattcctctggcgaattgcctcattattattgagaaaaatgcgaatcgatggcttaa

SEQ ID NO: 582172 - DNA, 75 bp, synthetic construct
  source 1..75: mol_type = other DNA
tatgatttgctatcgcttactctcagaggtgtgattaagcgtgatatggaaaacccagagggtaagttcccagca

SEQ ID NO: 582173 - DNA, 75 bp, synthetic construct
  source 1..75: mol_type = other DNA
attacccgcacgccacaaacgtttgtcgaacaggttgtccacgccgccggtcagactgacattcttggtcacatc

SEQ ID NO: 582174 - DNA, 75 bp, synthetic construct
  source 1..75: mol_type = other DNA
atattgttaatagattcgcacttaaataccggtaagttaactataactactccatgttatccttattacgcaata

SEQ ID NO: 582175 - DNA, 75 bp, synthetic construct
  source 1..75: mol_type = other DNA
taacacaacgccgtgcattactcagtatcacactttccgacggcaaaaaactgcccagaggcgttgcgattgaag

SEQ ID NO: 582176 - DNA, 75 bp, synthetic construct
  source 1..75: mol_type = other DNA
ggagttttaattcattccattctggttcctgcgggcgcattcactatccctgatgtacctgttcgcaatggtaat

SEQ ID NO: 582177 - DNA, 75 bp, synthetic construct
  source 1..75: mol_type = other DNA
aatgatcaaacaaggccgtggtgcagtagggaaagtcggattcagtgcgataacacaacgccgtgctggatttgc

SEQ ID NO: 582178 - DNA, 75 bp, synthetic construct
  source 1..75: mol_type = other DNA
cactcaagttggcacttatttatgaaaatgagcagtggaatgacgtgctagcattggctcatcagcaacaaatgc

SEQ ID NO: 582179 - DNA, 75 bp, synthetic construct
  source 1..75: mol_type = other DNA
catgctcttacagcatgttttacgcctttttctgttacatcagcaacgcgatgatatcagcaaaatcctagacaa

SEQ ID NO: 582180 - DNA, 75 bp, synthetic construct
  source 1..75: mol_type = other DNA
cacttgctcaactcattgatgaaaaacgacttttcaatattcctatctatcaacgcctctatgtatggggtagtg

SEQ ID NO: 582181 - DNA, 75 bp, synthetic construct
  source 1..75: mol_type = other DNA
gggttagtatcatttcgaaaggtaataataaatgtgaaatttattttgatgcttttggtgagtgtggaagtgtga

SEQ ID NO: 582182 - DNA, 75 bp, synthetic construct
  source 1..75: mol_type = other DNA
tgtacacggcagggcttctgtgtgatatcgtttttcatatcgaggggggggcctccagagatgaatggaataata

SEQ ID NO: 582183 - DNA, 75 bp, synthetic construct
  source 1..75: mol_type = other DNA
gtgagaaatcagaacaagccaatcagatacgtcgctttattgagttgttgtggcgttgccgctatctgtttgaca

SEQ ID NO: 582184 - DNA, 75 bp, synthetic construct
  source 1..75: mol_type = other DNA
tatattcagccaaccggtcagacgctgttagcgcctcactggagctttatgccgggggtgatgctgccaacttac

SEQ ID NO: 582185 - DNA, 75 bp, synthetic construct
  source 1..75: mol_type = other DNA
cccgttgctgtgggatatccagcggctttacccgaaagagttccagctagggaaggtgcgaataagcaggtcatt

SEQ ID NO: 582186 - DNA, 75 bp, synthetic construct
  source 1..75: mol_type = other DNA
tgaaaccagctatcgtgccatccagcaatttattgagaaaccgccaggcaagctacgcattttcgaaatttatcc

SEQ ID NO: 582187 - DNA, 75 bp, synthetic construct
  source 1..75: mol_type = other DNA
ttccctatggcgtcataaaaggggatggaaataaaatcatctcgatggaagagaagcctgtacaccgatttttcg

SEQ ID NO: 582188 - DNA, 75 bp, synthetic construct
  source 1..75: mol_type = other DNA
ttactcctatttttcaattcctcctcgcggagcggctgctgttgaaacgtggatgtatcaggttgctcagcgtac

SEQ ID NO: 582189 - DNA, 75 bp, synthetic construct
  source 1..75: mol_type = other DNA
aagttaattgcgatcaagatttcattagcaatttacgcaaaaataaagtgccagagtatcgtgaatggttcaaga

SEQ ID NO: 582190 - DNA, 75 bp, synthetic construct
  source 1..75: mol_type = other DNA
atgaaaaaaacgatgttaagcgcgtgttttttactggtggccgggaatgcggtcgccaatgatggcaccatccat

SEQ ID NO: 582191 - DNA, 75 bp, synthetic construct
  source 1..75: mol_type = other DNA
agcgaatctaagcagtgtgaattgcttagaaaggtttttggcgaagatttccctgagcatgcttcgacatctact

SEQ ID NO: 582192 - DNA, 75 bp, synthetic construct
  source 1..75: mol_type = other DNA
tcctgagtgcgcagaaacatcatctgcatcgtcaactgctgttaaaactgttttcgcatctgccggagtagtggg

SEQ ID NO: 582193 - DNA, 75 bp, synthetic construct
  source 1..75: mol_type = other DNA
tgtgtttacggcgattgaaatggcggaaaacggcgacagctcccacccgaacgaaatcgcgttttcgaaaaagta

SEQ ID NO: 582194 - DNA, 75 bp, synthetic construct
  source 1..75: mol_type = other DNA
gaataaagagatactaatgttcccgattcatgagtattggcttgatatagggcgaatagatgattttaatcgggc

SEQ ID NO: 582195 - DNA, 75 bp, synthetic construct
  source 1..75: mol_type = other DNA
aaaaaccatcgaattgatatgccgacgttactcgaacaatttatgagtaagaataaagagatactaatgttcccg

SEQ ID NO: 582196 - DNA, 75 bp, synthetic construct
  source 1..75: mol_type = other DNA
attggtcgcttcaatcaatgatgaaggtttcccagatgacctgtcagccttacgcgcaactattcgtcatatttt

SEQ ID NO: 582197 - DNA, 75 bp, synthetic construct
  source 1..75: mol_type = other DNA
ggttattacaataccttgctagttcaggtgtgattgcaattctaacagccttgattggttgggtttttgtatata

SEQ ID NO: 582198 - DNA, 75 bp, synthetic construct
  source 1..75: mol_type = other DNA
aattctgcgtgcgctggagcgtggtgaaggtcagccgggcgatatcgaaacacttgagcaactgtgtcgattctt

SEQ ID NO: 582199 - DNA, 75 bp, synthetic construct
  source 1..75: mol_type = other DNA
gacttgattgatggcacgaatatactgccgttccaggctcgttatattgctctcgggcagtcagtagctggtact

SEQ ID NO: 582200 - DNA, 75 bp, synthetic construct
  source 1..75: mol_type = other DNA
cgggtatcacgacacgaatgccatttgcccctatacatccatcggcaatgttgttaataatggccacaggccaga

SEQ ID NO: 582201 - DNA, 75 bp, synthetic construct
  source 1..75: mol_type = other DNA
gacctgggctgataggtatgttcgcaactgtgcaattgctattctgcccctattacctgagggagttccaggggc

SEQ ID NO: 582202 - DNA, 75 bp, synthetic construct
  source 1..75: mol_type = other DNA
tctctgcgccattttatggcgggcaaatccgaggctgatattgccgccgagtttacgcgtctggagcacatcgag

SEQ ID NO: 582203 - DNA, 75 bp, synthetic construct
  source 1..75: mol_type = other DNA
acaacgaatacaccggtaacggcgttacgacatcgtttccgtatgcctttagggttttcaataaatctgatttga

SEQ ID NO: 582204 - DNA, 75 bp, synthetic construct
  source 1..75: mol_type = other DNA
cttagaattgataattttaaacctgtatattatggtatagtggtcttatttattattattgttgttagattcgat

SEQ ID NO: 582205 - DNA, 75 bp, synthetic construct
  source 1..75: mol_type = other DNA
tccggccagtgatgtcagacgggagtttgccatctgggcaaaagcggtcgtgcaggtgctggttccgtctggggc

SEQ ID NO: 582206 - DNA, 75 bp, synthetic construct
  source 1..75: mol_type = other DNA
aaatcaaaatgtactcgctgattatattatcgccacgcctatacgtgatggagaacagatatacgggcttcgatt

SEQ ID NO: 582207 - DNA, 75 bp, synthetic construct
  source 1..75: mol_type = other DNA
ggaaacgtatctgatattctttcctttgtttctggtgaccttatttattcctattcatcagatattttagaaggg

SEQ ID NO: 582208 - DNA, 75 bp, synthetic construct
  source 1..75: mol_type = other DNA
tggactcgttcatatgcgcagtatgttggcgctgggcttattgattttaatcgttactttaatgcagtacgtgat

SEQ ID NO: 582209 - DNA, 75 bp, synthetic construct
  source 1..75: mol_type = other DNA
ggaacccctgctttatacatcgccatgagcaagggtaataaagacgtcgtgttatcttatatatcaacgctgggt

SEQ ID NO: 582210 - DNA, 75 bp, synthetic construct
  source 1..75: mol_type = other DNA
atttattaaaaggcgctacagcacagggaacccctgcattatacatcgccatgagcaagggtaatgaagacgtcg

SEQ ID NO: 582211 - DNA, 75 bp, synthetic construct
  source 1..75: mol_type = other DNA
cgcccttgattcactgagaaatggaaaaggcaaagtcaatctgattaaacattactcctccgttgaatccataca

SEQ ID NO: 582212 - DNA, 75 bp, synthetic construct
  source 1..75: mol_type = other DNA
atcagttatttacactattggccgctaaaaatcatgacaacatgtcagctgttcatatagccattcatcataagc

SEQ ID NO: 582213 - DNA, 75 bp, synthetic construct
  source 1..75: mol_type = other DNA
gatatcaatgcagacatcgtggagatcaaggctgagcccaagctgtttgaactctaccacatggacaggcgggtc

SEQ ID NO: 582214 - DNA, 75 bp, synthetic construct
  source 1..75: mol_type = other DNA
ggatgcgtgaccggctgaatctcacctcaaatgtctatacgcagaaccacacggtgcgtaaggcgatggagcagc

SEQ ID NO: 582215 - DNA, 75 bp, synthetic construct
  source 1..75: mol_type = other DNA
gaaggcaccgcgcagggaggaagaggagaaggcgccagagcagaattatgacgaagtcattaaggcactgaaggc

SEQ ID NO: 582216 - DNA, 75 bp, synthetic construct
  source 1..75: mol_type = other DNA
acgtgatggtgaaccagggttatttgctgcaatggaaaataatcaccctttgtgtgtcacacggttcctctctaa

SEQ ID NO: 582217 - DNA, 75 bp, synthetic construct
  source 1..75: mol_type = other DNA
cgctattttttgtcgccatctgtcattacaatacgcccttgattcattgggaaatggaaaaggcaaagtcaacct

SEQ ID NO: 582218 - DNA, 75 bp, synthetic construct
  source 1..75: mol_type = other DNA
tcacaaaattgttattccactgccctttttaccattaactttgccacttcacccatccatgcagaaaatatactc

SEQ ID NO: 582219 - DNA, 75 bp, synthetic construct
  source 1..75: mol_type = other DNA
attatgttgtgtccgtttacgacccgaacgataccaacgttgccgtcagagacacccacaggacagcacggggct

SEQ ID NO: 582220 - DNA, 75 bp, synthetic construct
  source 1..75: mol_type = other DNA
tggcaaacaatgtcagtcatatgtccgcgattttatatatagacaatcatactttgtcagtaaggctacgaataa

SEQ ID NO: 582221 - DNA, 75 bp, synthetic construct
  source 1..75: mol_type = other DNA
tttgtcgccatctgtcattgcaatacgcccttgattcattgagaaatggaaaaggcaaagtcaacctgattaaac

SEQ ID NO: 582222 - DNA, 75 bp, synthetic construct
  source 1..75: mol_type = other DNA
atctggcgaatcataataaagatgctgccatcaatatattgattatatttataagcatagggttgattattttta

SEQ ID NO: 582223 - DNA, 75 bp, synthetic construct
  source 1..75: mol_type = other DNA
cgaaatgccgtgcggcgattgcagaacgggccaaagaagaacagtccaatgatacagcggcagaagaggtgaaat

SEQ ID NO: 582224 - DNA, 75 bp, synthetic construct
  source 1..75: mol_type = other DNA
ttttctctgcccgcttttctaccgattcgcgcaattctctcagttactggtgcctccctgttaacgcttctgctc

SEQ ID NO: 582225 - DNA, 75 bp, synthetic construct
  source 1..75: mol_type = other DNA
gggttggagagagttttgtctcaggtctgggattttcatggtttgtgacatttattataagtgctctatttttac

SEQ ID NO: 582226 - DNA, 75 bp, synthetic construct
  source 1..75: mol_type = other DNA
cggccccggctggaaaatgcctgcggacatcagagttgaaactgccaccggtgaactggccagaacgcagcgccg

SEQ ID NO: 582227 - DNA, 75 bp, synthetic construct
  source 1..75: mol_type = other DNA
tatgatgaatggggcaacctgctgaatgaagagaacccgcatcagctgcagcagcttatccggctgccggggcag

SEQ ID NO: 582228 - DNA, 75 bp, synthetic construct
  source 1..75: mol_type = other DNA
atgtcttttattcgtaataagcctctggcaatgaccgtcgggatttggtgttttgcctttaccgcctttgcctgc

SEQ ID NO: 582229 - DNA, 75 bp, synthetic construct
  source 1..75: mol_type = other DNA
cgcacctacagcagctaccggactacgactcctgccccggtgggcgtattgggccccggctggaaagcgccttct

SEQ ID NO: 582230 - DNA, 75 bp, synthetic construct
  source 1..75: mol_type = other DNA
cgcacctacagcagctaccggactatgactcctgccccggtgggcgtgtttggccccggctggaaagcgccttct

SEQ ID NO: 582231 - DNA, 75 bp, synthetic construct
  source 1..75: mol_type = other DNA
cgcacctacagcagctaccggactatgactcctgccccggtgggcgttttaggccccggctggaaagcgccttct

SEQ ID NO: 582232 - DNA, 75 bp, synthetic construct
  source 1..75: mol_type = other DNA
cggacctggacatccgcatcccgtatgccacggacccggcgggcaaccggctgccggacccggagctgcacccgg

SEQ ID NO: 582233 - DNA, 75 bp, synthetic construct
  source 1..75: mol_type = other DNA
gtacgggtgggacggcgaccggctgacgacggtacagaccgacaccacgcgtatccagacggtatatcagccggg

SEQ ID NO: 582234 - DNA, 75 bp, synthetic construct
  source 1..75: mol_type = other DNA
cgcacctacagcagctaccggactaggactcctgccccggtgggcgtattcggccccggctggaaagcgccttct

SEQ ID NO: 582235 - DNA, 75 bp, synthetic construct
  source 1..75: mol_type = other DNA
ccacgccggccattgcgctgcgtgaggggtacctgaagtacaacgtcacggcgggtcagtaccgttcaccggatg

SEQ ID NO: 582236 - DNA, 75 bp, synthetic construct
  source 1..75: mol_type = other DNA
gaccgcagagaaaaagcgaaatcaggcttatgaagatgagcttcgtaaattagaacttgagaaaatgaagcttga

SEQ ID NO: 582237 - DNA, 75 bp, synthetic construct
  source 1..75: mol_type = other DNA
aacgccagtgcgcagaaaaacggtaatccagctgcagggttctcgcctctggtcattgagccgaaaaccacggta

SEQ ID NO: 582238 - DNA, 75 bp, synthetic construct
  source 1..75: mol_type = other DNA
accatgtggtggtgcgctctggcttcgcacagttactctctctggaagacgatctggaggtcattggtcagtaca

SEQ ID NO: 582239 - DNA, 75 bp, synthetic construct
  source 1..75: mol_type = other DNA
caattgatggtatggtcaatggtggtaattctggcgggccaattatagatcgagcctctggcgaactggtgggtg

SEQ ID NO: 582240 - DNA, 75 bp, synthetic construct
  source 1..75: mol_type = other DNA
gccttccgttggtttttcacccaccagaggcaaaaaaattatctttgccggttatccacacggaataccgcagtt

SEQ ID NO: 582241 - DNA, 75 bp, synthetic construct
  source 1..75: mol_type = other DNA
catgatgtcgcagaatgctaactccggaattggtattggattttcaatccagcccatcgttgatgtgatcacatc

SEQ ID NO: 582242 - DNA, 75 bp, synthetic construct
  source 1..75: mol_type = other DNA
caggcgaaggcgcggcaccggagcctggcggaggtgttgcaggaggacacgggggggacgcttccggcggagctg

SEQ ID NO: 582243 - DNA, 75 bp, synthetic construct
  source 1..75: mol_type = other DNA
ggcaggttacagctatgtatggtctgggatgggggatgactgcatttagtggtgttcagatggctaagaattact

SEQ ID NO: 582244 - DNA, 75 bp, synthetic construct
  source 1..75: mol_type = other DNA
acgtgctgacactggacccgacgacgttcccggaggatgcggaagtgccgcagacggacagtcgtgtggtgccga

SEQ ID NO: 582245 - DNA, 75 bp, synthetic construct
  source 1..75: mol_type = other DNA
atgaatgaacacatgatatttgtgcttaatgtcgattccagtattcttcaggcctacaataaaagaataacagat

SEQ ID NO: 582246 - DNA, 75 bp, synthetic construct
  source 1..75: mol_type = other DNA
tgtacacgccggcgcgaaaaatccacctgtaccactgcgaccatcgcggcctgccgctggcgctcatcagcacgg

SEQ ID NO: 582247 - DNA, 75 bp, synthetic construct
  source 1..75: mol_type = other DNA
ctatactggttggctgcatggctctgagcgccaacctgtgggccaaagcgcagccggtgcaggcaacgctggccg

SEQ ID NO: 582248 - DNA, 75 bp, synthetic construct
  source 1..75: mol_type = other DNA
ctggaacactatgctttggcaaaaggcggtcaacttttaaatttctttgtgcatattccagaacaaattcccgtt

SEQ ID NO: 582249 - DNA, 75 bp, synthetic construct
  source 1..75: mol_type = other DNA
tcggggttcactttctcacccagatattgcccgttatttgtttgagcgccaggaaggaaaatgctttgatgccgc

SEQ ID NO: 582250 - DNA, 75 bp, synthetic construct
  source 1..75: mol_type = other DNA
aaagacgcgacgccgaaatttggttcgatacaggtggatattaccgaagatgcgaacctgatccagacggaaccc

SEQ ID NO: 582251 - DNA, 75 bp, synthetic construct
  source 1..75: mol_type = other DNA
cagataacattgtgttgctggagcatgagcttgaaaaaacaggcagagaaaagcatcatcttttattaaagctcc

SEQ ID NO: 582252 - DNA, 75 bp, synthetic construct
  source 1..75: mol_type = other DNA
atttcggagacctgaaaaaggcagtcgatcgcacttatgccgaaatgggtatagatgctgctggtgatgaaatat

SEQ ID NO: 582253 - DNA, 75 bp, synthetic construct
  source 1..75: mol_type = other DNA
tgtatgcctcatgtcatgactgtaacacgatggctgaggcaattacctaccgccagaaattcaacgaacgtgagg

SEQ ID NO: 582254 - DNA, 75 bp, synthetic construct
  source 1..75: mol_type = other DNA
cgcaccgctgaaaaaaggtcaggttgtcggcaccattgatttccagcttaacggtaaatccattgaacagcgtcc

SEQ ID NO: 582255 - DNA, 75 bp, synthetic construct
  source 1..75: mol_type = other DNA
tcagatgacgataaaccgatattcggagtcatcacatacatcatcaacgatgctcgttatggtgagtttgatgac

SEQ ID NO: 582256 - DNA, 75 bp, synthetic construct
  source 1..75: mol_type = other DNA
atgttgttgaatatcaatgaaatacaaaaaaaaattgacgcattgactttgaaagctggtctctcaagatattca

SEQ ID NO: 582257 - DNA, 75 bp, synthetic construct
  source 1..75: mol_type = other DNA
acaaggggcagtgtgtggcacaacatccgcgcggcacacatgaatataaacacacaaccaatccgcttcacatgc

SEQ ID NO: 582258 - DNA, 75 bp, synthetic construct
  source 1..75: mol_type = other DNA
actgttacaggccaggctggaacaaattcggtatcaaattctgagcaggtcaattgaattaaataaactacctga

SEQ ID NO: 582259 - DNA, 75 bp, synthetic construct
  source 1..75: mol_type = other DNA
ataaacaaatatcgcattgaaataaaattcgatcctgttacaacaaacctaaagaagaagtctatcagatatcgt

SEQ ID NO: 582260 - DNA, 75 bp, synthetic construct
  source 1..75: mol_type = other DNA
ctgatattttaaaatcagaagcatctttgttgtatgaaaaaacagaacaatatcgctacgcaattctttctgaat

SEQ ID NO: 582261 - DNA, 75 bp, synthetic construct
  source 1..75: mol_type = other DNA
atgtactcgaccggctgatacaggaaaccggctttgacggccgcacacagcgttatcaccacgacctgaccggta

SEQ ID NO: 582262 - DNA, 75 bp, synthetic construct
  source 1..75: mol_type = other DNA
acgcaggcgcagcgggcagaagaagcccggcagcaggccatttccggcgggacggaaccgtccgtttttcctgat

SEQ ID NO: 582263 - DNA, 75 bp, synthetic construct
  source 1..75: mol_type = other DNA
cacatttcgctgaactgcaacaagttgatcaaatcatcaacgctgaactgtttgcactggcaggtctggatgcac

SEQ ID NO: 582264 - DNA, 75 bp, synthetic construct
  source 1..75: mol_type = other DNA
tcagccagttacagacccggctcgcggtaaaaataaatctgagtgcgcttatggaggaaagaacggagaccgtca

SEQ ID NO: 582265 - DNA, 75 bp, synthetic construct
  source 1..75: mol_type = other DNA
agaaattgttatttagataaatatggcgatgcaaatatcaatcattattatagaaacttagaaataaaatattca

SEQ ID NO: 582266 - DNA, 75 bp, synthetic construct
  source 1..75: mol_type = other DNA
catttttacatgccgatcttcagcaatacttaagccaaagttgcggtgcatttgtgtgcatggcagccaaagaag

SEQ ID NO: 582267 - DNA, 75 bp, synthetic construct
  source 1..75: mol_type = other DNA
catttatacccatcgctggcggatcgaggagttccataaggcatggaaaaccggagcaggagccgagaggcaacg

SEQ ID NO: 582268 - DNA, 75 bp, synthetic construct
  source 1..75: mol_type = other DNA
aatatcacgctcaacgcggtgctggccgaggagattaacccgcccaagggtgagaccccgttgaaatggttgttg

SEQ ID NO: 582269 - DNA, 75 bp, synthetic construct
  source 1..75: mol_type = other DNA
atagcttatgttttaccacagcacttagaaatagacagcataaaataccacacggagaaagttgttctcccatca

SEQ ID NO: 582270 - DNA, 75 bp, synthetic construct
  source 1..75: mol_type = other DNA
ggcagtcacagcgacttcagctacgatgcgctggaccggctggtacagcagcgcggctttgacgggcggacgcaa

SEQ ID NO: 582271 - DNA, 75 bp, synthetic construct
  source 1..75: mol_type = other DNA
gccggacccggagctgcacccggacagtacactcacagtgtggccggataaccgcatcgcggaggatgcgcacta

SEQ ID NO: 582272 - DNA, 75 bp, synthetic construct
  source 1..75: mol_type = other DNA
ttgcggtcaggctgttacagctcagagaaagcttcacgctgccgcaagcactcagggcgcaagggctgctaaagg

SEQ ID NO: 582273 - DNA, 75 bp, synthetic construct
  source 1..75: mol_type = other DNA
agagatacctgttcacgatgacggcacaagcccggatgcgatatttggggtgatcacgtacaccatcaacgatgc

SEQ ID NO: 582274 - DNA, 75 bp, synthetic construct
  source 1..75: mol_type = other DNA
actaatgtaaatggcctaccgttgatgataaggcataacacaagtcgtatattcaacaccccgggatttataaaa

SEQ ID NO: 582275 - DNA, 75 bp, synthetic construct
  source 1..75: mol_type = other DNA
tctaatatcatccatttatgcttcatcgactttaactcctgaaataaaaataagaatatgtaataatgatctttt

SEQ ID NO: 582276 - DNA, 75 bp, synthetic construct
  source 1..75: mol_type = other DNA
gagaaagaagagaagataaaaataagaattagcggcatatatcccggaagaataatacatttcattgaagattat

SEQ ID NO: 582277 - DNA, 75 bp, synthetic construct
  source 1..75: mol_type = other DNA
acagagcgcgaaaaaatctggggtctcctccgggacctgaagaggttgcgaccagccttaattcaccggaagtgg

SEQ ID NO: 582278 - DNA, 75 bp, synthetic construct
  source 1..75: mol_type = other DNA
gtgcagattatttaatcactgattttaccattgatctggagtattctataaatgcaaagaaatactcaaagcata

SEQ ID NO: 582279 - DNA, 75 bp, synthetic construct
  source 1..75: mol_type = other DNA
tagtcgtattaagtgcttgtgatacaagcccagccgatagaaatcattttaatgcagcaaatgcttttctatgtg

SEQ ID NO: 582280 - DNA, 75 bp, synthetic construct
  source 1..75: mol_type = other DNA
attgccgccgttcagaaactgatggacgccgaaagttatatcggtggcagcgatgctgtggcgaagggactggca

SEQ ID NO: 582281 - DNA, 75 bp, synthetic construct
  source 1..75: mol_type = other DNA
ggacaggactactggggcgaaggggtgacagccaagcgtattgccggagcacttcgggcgatgaatggtgccgac

SEQ ID NO: 582282 - DNA, 75 bp, synthetic construct
  source 1..75: mol_type = other DNA
aaaggtggtgaatatgccaacctggacgccgtggtgatggatgccgttaatgagcttatcgacgtggtctatcag

SEQ ID NO: 582283 - DNA, 75 bp, synthetic construct
  source 1..75: mol_type = other DNA
gccggaatacacaccggcgcgaaaagttcatttttaccactgcgaccaccggggcctgccgctggcgctcatcag

SEQ ID NO: 582284 - DNA, 75 bp, synthetic construct
  source 1..75: mol_type = other DNA
attcagattggccgcggtgccttcctgatgatccacaactgctgggtatatgcgatgggaaaccgccatgatttt

SEQ ID NO: 582285 - DNA, 75 bp, synthetic construct
  source 1..75: mol_type = other DNA
cagtatttctgtttttgatgttatcgggcaggactactggggcgaaggggtaacagctaaacgtattgctggtgc

SEQ ID NO: 582286 - DNA, 75 bp, synthetic construct
  source 1..75: mol_type = other DNA
tgcgaccagggtaacccctgaatttgataatgagattcgtgacattgccgatcgcgaaggtattaaactggtcga

SEQ ID NO: 582287 - DNA, 75 bp, synthetic construct
  source 1..75: mol_type = other DNA
gtacactttacaatataccgggaaaaagtatcaagatttgctcgatagtataaaaacaaacggagagcaaaattg

SEQ ID NO: 582288 - DNA, 75 bp, synthetic construct
  source 1..75: mol_type = other DNA
atgacggtcagatattatatcagttctgctgatttaaccgcagagaagttcgccgcagcgatccgaaatcactgg

SEQ ID NO: 582289 - DNA, 75 bp, synthetic construct
  source 1..75: mol_type = other DNA
ttaagacgtaagctgagaaaagctgctatggacagagactacctcgcatcagtccttgtggggagccgactttcg

SEQ ID NO: 582290 - DNA, 75 bp, synthetic construct
  source 1..75: mol_type = other DNA
ggcatattatgtgttggaagatttgaaccaataaaaaatcagttatctgtatgcaaagcattattaaatacagaa

SEQ ID NO: 582291 - DNA, 75 bp, synthetic construct
  source 1..75: mol_type = other DNA
aacaagccttgaaagtcagatcctgacacaggcggctgaatttgaaaaccggatttatcagatggagatgcagcg

SEQ ID NO: 582292 - DNA, 75 bp, synthetic construct
  source 1..75: mol_type = other DNA
taagcctagataacggaatgaaagctcaggcaaccctttttctggaaaaaagaaaaatttatcagtggatgctat

SEQ ID NO: 582293 - DNA, 75 bp, synthetic construct
  source 1..75: mol_type = other DNA
gttggacaggcactgaaagccgataagattaaactcaccgatatggtgacgatcggcaaagatgcctgggcgaca

SEQ ID NO: 582294 - DNA, 75 bp, synthetic construct
  source 1..75: mol_type = other DNA
ggcatcgtgcggcctgacggtgaagcagatgcaaaaccagatggacccggtgtacacgccggcgcgaaaaatcca

SEQ ID NO: 582295 - DNA, 75 bp, synthetic construct
  source 1..75: mol_type = other DNA
tttgggattagatctattatcattaccttctcccagacaaaaacctgtaagtcaatcctgtactattgatcctat

SEQ ID NO: 582296 - DNA, 75 bp, synthetic construct
  source 1..75: mol_type = other DNA
ctgctgatttaaccgcagaaaagtttacgacagcgattcgaaatcactggcacgtggagaataagttgcactggc

SEQ ID NO: 582297 - DNA, 75 bp, synthetic construct
  source 1..75: mol_type = other DNA
acttgttcgcaccttccttagtacttcccccaataattggctggtgtttatgcaaaatggtcaagaagtggtaat

SEQ ID NO: 582298 - DNA, 75 bp, synthetic construct
  source 1..75: mol_type = other DNA
attgggacgaaatattttcaggtaaagatgagaaaatagttaaaagtaaagataacaatatcaagtcattttatt

SEQ ID NO: 582299 - DNA, 75 bp, synthetic construct
  source 1..75: mol_type = other DNA
tggcgtacttgtcgaagatggacttgttaccttcgacgataaattattgcccgtaggcttcgataatctacatgt

SEQ ID NO: 582300 - DNA, 75 bp, synthetic construct
  source 1..75: mol_type = other DNA
ataattcagtgtgcgctagagacaggcgtctcactcaaatggctagtaacagggaatggttctaaaactcttggc

SEQ ID NO: 582301 - DNA, 75 bp, synthetic construct
  source 1..75: mol_type = other DNA
aaaatggccgaaatggactatatcgacatgcgtctggctgagaacgtctggaacggcgaagttatcctggcggaa

SEQ ID NO: 582302 - DNA, 75 bp, synthetic construct
  source 1..75: mol_type = other DNA
ttacagatgatgattatttccctgatgtagatattgtcatttcgtatccttccactttggcatatcaatacaaag

SEQ ID NO: 582303 - DNA, 75 bp, synthetic construct
  source 1..75: mol_type = other DNA
gcggcgacacgattagggatgaagcgcaccacgctgctgtcacgaatgcagcgtctggggatctcggttcgcgag

SEQ ID NO: 582304 - DNA, 75 bp, synthetic construct
  source 1..75: mol_type = other DNA
agctaaaaattgaaaacaacctaacaagctttataagtaacgttagtgatatttcgttaaaaggtcgcgttgtat

SEQ ID NO: 582305 - DNA, 75 bp, synthetic construct
  source 1..75: mol_type = other DNA
aacagttcggcaatatttaattgccaagggattacctgcagaaaaaattacttccatcggcatggggaaaagcca

SEQ ID NO: 582306 - DNA, 75 bp, synthetic construct
  source 1..75: mol_type = other DNA
cctgggcctgacgcaattgttattaataaaagaaatgggattttaataacccctaaaaatattgatagccttatg

SEQ ID NO: 582307 - DNA, 75 bp, synthetic construct
  source 1..75: mol_type = other DNA
tcagtcatcaaatggaatatattggggggaaatatattaaagaagatattaataaagctacaaggaggctttctc

SEQ ID NO: 582308 - DNA, 75 bp, synthetic construct
  source 1..75: mol_type = other DNA
gggtagaccctgtagtggcggaacgctgcctgaaccaccgaattaaaggcgttgagggtatctataaccgccatc

SEQ ID NO: 582309 - DNA, 75 bp, synthetic construct
  source 1..75: mol_type = other DNA
aaaaacggggatgctattgatatcccactaccaccaccagcggtggcatggttgcgtgaattacacagcatttca

SEQ ID NO: 582310 - DNA, 75 bp, synthetic construct
  source 1..75: mol_type = other DNA
atgactgatttcggcgggtcgaaaactccaaaaaatgaacgtgactactggcaaacaccgattgaaattttcaac

SEQ ID NO: 582311 - DNA, 75 bp, synthetic construct
  source 1..75: mol_type = other DNA
ttatcaaaaagcattacaaaaaaaatgccaccacttcccaggacaagtaaatgggcaggggaaaggtggagttca

SEQ ID NO: 582312 - DNA, 75 bp, synthetic construct
  source 1..75: mol_type = other DNA
gctacacgtatcagtatgagaaagaccacatcaccatcaccgacagcctggaccgccgtgaagtgctgcacacgc

SEQ ID NO: 582313 - DNA, 75 bp, synthetic construct
  source 1..75: mol_type = other DNA
ccatattgtttccgctgacaagggatatgacggtattgtccggacactgcaggcgcgcgggattcgttgccgtcg

SEQ ID NO: 582314 - DNA, 75 bp, synthetic construct
  source 1..75: mol_type = other DNA
tggatttaattacatagttgatgccttgtcagaaggtaagcaagatgatgtgaaaaaattccttggttatataaa

SEQ ID NO: 582315 - DNA, 75 bp, synthetic construct
  source 1..75: mol_type = other DNA
caggtgttgtcgtattgggtgataaaatgcttgttaagaaaggacctaattggaaggaacctcaatttgtttctg

SEQ ID NO: 582316 - DNA, 75 bp, synthetic construct
  source 1..75: mol_type = other DNA
gcgaatcgacagcgcttggtattggctactcattcagtattatgggaaagaagcgctacgtccactgcaaatgtg

SEQ ID NO: 582317 - DNA, 75 bp, synthetic construct
  source 1..75: mol_type = other DNA
tagctgtagaggaagagttatcagacttgatcgcaactaccaatgcagatggttttaccattgaagacctagaga

SEQ ID NO: 582318 - DNA, 75 bp, synthetic construct
  source 1..75: mol_type = other DNA
ttacccggtttatccccgctggcgcggggaacactgcctcggcggcggctctgcgcaaccgcgaaacggtttatc

SEQ ID NO: 582319 - DNA, 75 bp, synthetic construct
  source 1..75: mol_type = other DNA
taatgctaatgctgccattgcctgggaggcgatgcttgcaggttcgaaaggtttttgtggcgtctttgccaactt

SEQ ID NO: 582320 - DNA, 75 bp, synthetic construct
  source 1..75: mol_type = other DNA
ttagagcatataatctcacaggctaatgattacaatataaaaattcatttctatcaacagccattttatgtttca

SEQ ID NO: 582321 - DNA, 75 bp, synthetic construct
  source 1..75: mol_type = other DNA
tgcgccagcaagccggtgtcgatatcggaaacaccattattgccgatggttcagggctttcgcggcataacctga

SEQ ID NO: 582322 - DNA, 75 bp, synthetic construct
  source 1..75: mol_type = other DNA
tacgaccggtggtggcggaatggtcctctgtcgctcgtcagaagcgggtgttcgtgcgaaacatgtcactacgac

SEQ ID NO: 582323 - DNA, 75 bp, synthetic construct
  source 1..75: mol_type = other DNA
ttgtccgagacgtatacaaaacgaatgagtttattcctttgcatgcgccagtttttgatggcaatgaaaaaaaat

SEQ ID NO: 582324 - DNA, 75 bp, synthetic construct
  source 1..75: mol_type = other DNA
aatcaatcatgagaaaacagtattttcttcaaaagggcataaccgtcacgttactggtataactctaacaaacga

SEQ ID NO: 582325 - DNA, 75 bp, synthetic construct
  source 1..75: mol_type = other DNA
tatgcttgagcgatatacaataaatctttctacatcggctgaagaaggaaggatcgatccggtaattggaagaga

SEQ ID NO: 582326 - DNA, 75 bp, synthetic construct
  source 1..75: mol_type = other DNA
gcgcccttgtacctgcatttattagccaccataatgttgatattactgaaggtgcaatcaaggcggcgaccaacc

SEQ ID NO: 582327 - DNA, 75 bp, synthetic construct
  source 1..75: mol_type = other DNA
gtttgtgacaacatttctggaaaaaagaaattctggcaacggaacattgccggatatcgagacacggattcagag

SEQ ID NO: 582328 - DNA, 75 bp, synthetic construct
  source 1..75: mol_type = other DNA
ttggcggccagttcggtcaggatgattttgaagtgacctgtgaaaaacttacgattgatactcagttaagttcgc

SEQ ID NO: 582329 - DNA, 75 bp, synthetic construct
  source 1..75: mol_type = other DNA
aatgcattgcgcttggtactacttatgttgcccgggtcatttcaatcaatggtgggcaggtcatggttaaggtct

SEQ ID NO: 582330 - DNA, 75 bp, synthetic construct
  source 1..75: mol_type = other DNA
gtggaaaaatacatcccggcttatgagcaagatgatgggcccttgaccgaagctcaattccggacactacatgaa

SEQ ID NO: 582331 - DNA, 75 bp, synthetic construct
  source 1..75: mol_type = other DNA
ttgcagcaatcgtattctccggtagcgctctggcaggtgttgttcctcagtacggcggcggcggtaaccacggtg

SEQ ID NO: 582332 - DNA, 75 bp, synthetic construct
  source 1..75: mol_type = other DNA
taagccagctacagactaatctttctatcagaactcgtatggccagtcttctggaggaaaaaaccttcagtgaaa

SEQ ID NO: 582333 - DNA, 75 bp, synthetic construct
  source 1..75: mol_type = other DNA
ggctaaccgcgcccgcagcgtgataagccaagccggaacgctgtctggtcaggaagactgggtgaaggattttgc

SEQ ID NO: 582334 - DNA, 75 bp, synthetic construct
  source 1..75: mol_type = other DNA
acagatcaatcgacgattggaaaattctttaatcccttcagtaaaaacgaatacagcggtgttatctcagcacaa

SEQ ID NO: 582335 - DNA, 75 bp, synthetic construct
  source 1..75: mol_type = other DNA
tggttcaactgcaatgatgaagatctctgagatttcaggaaaaaatgatttagcttgtaaaattgtttttgatag

SEQ ID NO: 582336 - DNA, 75 bp, synthetic construct
  source 1..75: mol_type = other DNA
cctgatgataataaccatcgctcgttaataaatgagtgggaaaaagcacgaaaaatattccataaaaacaccatt

SEQ ID NO: 582337 - DNA, 75 bp, synthetic construct
  source 1..75: mol_type = other DNA
tggaaatcagaacaaacagtcatataccgcgagcctggaatgcaagcggaacactgactggcgaaatcagagtgg

SEQ ID NO: 582338 - DNA, 75 bp, synthetic construct
  source 1..75: mol_type = other DNA
acaaccggaatgaacagtcctttattgtttctgaagatgaatacaaataattcgaggctgacacaaaaaaccggg

SEQ ID NO: 582339 - DNA, 75 bp, synthetic construct
  source 1..75: mol_type = other DNA
tgttggcgacgccttaacgggcctggacaataatacgttacaatgggactcccttaaaaaggcatatagtgcggc

SEQ ID NO: 582340 - DNA, 75 bp, synthetic construct
  source 1..75: mol_type = other DNA
cagcactaccagtactgatgccatcaatggatcacagctttatgctatcagtaagtcagtagcggacaatcttgg

SEQ ID NO: 582341 - DNA, 75 bp, synthetic construct
  source 1..75: mol_type = other DNA
gattgttggtgttggtgcaattcctttaattgcgttcagtgattatgaagggaacggagttgccttacagagttc

SEQ ID NO: 582342 - DNA, 75 bp, synthetic construct
  source 1..75: mol_type = other DNA
ttgggatttctttatttagacatgaaaatgttgctataaagatttttacagtaatgccttcagcagaaaataatt

SEQ ID NO: 582343 - DNA, 75 bp, synthetic construct
  source 1..75: mol_type = other DNA
ttggctcaatgaaaacccaggtcatggttgcggatgtatccggcttaccgacgaattataaccctgtggagataa

SEQ ID NO: 582344 - DNA, 75 bp, synthetic construct
  source 1..75: mol_type = other DNA
ttccattccaactgtctctcatcctcgatgtttatgacggccagcgcgccaaatgcactcattgtatctctggcg

SEQ ID NO: 582345 - DNA, 75 bp, synthetic construct
  source 1..75: mol_type = other DNA
aaagactatttttcaatagtattataatgtatttacgtatgattttgttaatgttgattacgttatatatatcca

SEQ ID NO: 582346 - DNA, 75 bp, synthetic construct
  source 1..75: mol_type = other DNA
gcgtccgcaggttttgacagacgcgtacaacaaatcgtctataaccccaatgacgtaaccattgtcaaaacaaaa

SEQ ID NO: 582347 - DNA, 75 bp, synthetic construct
  source 1..75: mol_type = other DNA
gaacaccactaacatcaccaacctgactgacgctgttgacagcctcggtgacgattccctgctgtggaacgctac

SEQ ID NO: 582348 - DNA, 75 bp, synthetic construct
  source 1..75: mol_type = other DNA
attgcgttaggaaatacggctcaagcttacgaaattatgagcatcgccctcggtgatcatgctaatgcctcgaaa

SEQ ID NO: 582349 - DNA, 75 bp, synthetic construct
  source 1..75: mol_type = other DNA
aaaaccactaacgatgccgtggcagccaacaccaccaatatcgccacgaacaccactaacatcaccaacctgact

SEQ ID NO: 582350 - DNA, 75 bp, synthetic construct
  source 1..75: mol_type = other DNA
ataattggattggtggaggcgcagctcctgtaagattaatgacagggtcgtcagaaaccccactgagaacaacac

SEQ ID NO: 582351 - DNA, 75 bp, synthetic construct
  source 1..75: mol_type = other DNA
taaacaaaatggcgatggtaatctggatgtttatgctaataacgtccatgttatgcgctttgtttccggcagcat

SEQ ID NO: 582352 - DNA, 75 bp, synthetic construct
  source 1..75: mol_type = other DNA
cgggcagggcggaatgggaaccaaagcacatgatctctttgtgttgcctttgtgcagaaagcatcacgacgagct

SEQ ID NO: 582353 - DNA, 75 bp, synthetic construct
  source 1..75: mol_type = other DNA
gtgccggtattgagaatacgccagcaggaatgcagagtcaggtgctgctggcggtcagacaggattgcgatgatt

SEQ ID NO: 582354 - DNA, 75 bp, synthetic construct
  source 1..75: mol_type = other DNA
tgaaaaaatccgctcagtataccgcgagagcgacatcgtaccgggagagcagaccgccatcagcatactgaagca

SEQ ID NO: 582355 - DNA, 75 bp, synthetic construct
  source 1..75: mol_type = other DNA
gtgcggatattacttcgacctgttctggtaccggaactcgggctggtggtcgttaagccgggccgtgaatccatg

SEQ ID NO: 582356 - DNA, 75 bp, synthetic construct
  source 1..75: mol_type = other DNA
tatttcaggaaatccgggaagccgcacgatcacggcaagacgagtaccaatcattgacgaagcccagacatgggg

SEQ ID NO: 582357 - DNA, 75 bp, synthetic construct
  source 1..75: mol_type = other DNA
tttgtagagccagaggaaacagaccagacggtttaaatgagccggttacgttttttagtaacgaacgggtgattc

SEQ ID NO: 582358 - DNA, 75 bp, synthetic construct
  source 1..75: mol_type = other DNA
cacgggtgattcgtgctgctggtggtgctggtgcattgtctgactggctgttgcgccatattaaatcctgccagt

SEQ ID NO: 582359 - DNA, 75 bp, synthetic construct
  source 1..75: mol_type = other DNA
tggtgttgtgctggcactgtgacaaccagctgcgcgaccagacatcagaatcactcgatcaacttgctcagcaga

SEQ ID NO: 582360 - DNA, 75 bp, synthetic construct
  source 1..75: mol_type = other DNA
actggctattacgtcatgttacatcctgccagtggcctaatggcgattaccatcacactgaaacagtcattcacc

SEQ ID NO: 582361 - DNA, 75 bp, synthetic construct
  source 1..75: mol_type = other DNA
agtcaccgcagacagcggggaataccaggtgctggcgcgctgggacacgccgaaggtggtgaagggcgtgagctt

SEQ ID NO: 582362 - DNA, 75 bp, synthetic construct
  source 1..75: mol_type = other DNA
ttgagagcactgctgacccctgaaatagccccgcgtatggggatcgtcttgttcagacccggttcagagctgatg

SEQ ID NO: 582363 - DNA, 75 bp, synthetic construct
  source 1..75: mol_type = other DNA
tgttacgcccaaaacgtcaccgctgggttaatgaaaagtacacgcgctgggttaagacgcagccgtgcgcatgtt

SEQ ID NO: 582364 - DNA, 75 bp, synthetic construct
  source 1..75: mol_type = other DNA
gcgatcgtccacttgcacagccactatctgaccgcgctctcctgcctgcaggggctcgggcactgttgcaaagtt

SEQ ID NO: 582365 - DNA, 75 bp, synthetic construct
  source 1..75: mol_type = other DNA
tacgtcgttctctggggttacgtgcggaaaaaatccgctcggtgtatcgcgaaagcgacatcataccgggagagc

SEQ ID NO: 582366 - DNA, 75 bp, synthetic construct
  source 1..75: mol_type = other DNA
gtcttttatgttacgccccaaacgtcgccgctgggttaatgaaaagtacacgcgctgggttaagacgcagccgtg

SEQ ID NO: 582367 - DNA, 75 bp, synthetic construct
  source 1..75: mol_type = other DNA
ttgccccgcgtatggggatcgtattgttcaggcctggttcagagctgatgcccctatttatgcaggggcgtgtcc

SEQ ID NO: 582368 - DNA, 75 bp, synthetic construct
  source 1..75: mol_type = other DNA
caccacaggaaaagacggtggtcagcattgccgttgatccggaggctccggaatctttcatgaaacgacctaaac

SEQ ID NO: 582369 - DNA, 75 bp, synthetic construct
  source 1..75: mol_type = other DNA
cggtttatggtccggttgacgggctgaaaagtgtccgcctgaatggtacgccggtactggacagcggggggaata

SEQ ID NO: 582370 - DNA, 75 bp, synthetic construct
  source 1..75: mol_type = other DNA
cacggcgattatcatcacagcgaaaccgtcattcaccgttatggtacaggcgcgatggtgttgtgctggcactgc

SEQ ID NO: 582371 - DNA, 75 bp, synthetic construct
  source 1..75: mol_type = other DNA
gcgtggtctgccgtccggagtcgttcctgccgttcgccagccgctggcagaggataaaacattactgccattttt

SEQ ID NO: 582372 - DNA, 75 bp, synthetic construct
  source 1..75: mol_type = other DNA
atgaagcgtaaaagagtggctttgttgcaagccattggctcggttatagccctgagcccagcggtcgtttcagca

SEQ ID NO: 582373 - DNA, 75 bp, synthetic construct
  source 1..75: mol_type = other DNA
gtatgccagccgacgatccgcatcatctgattggtcacgggcagggcggaatgggaacaaaagcacatgatctct

SEQ ID NO: 582374 - DNA, 75 bp, synthetic construct
  source 1..75: mol_type = other DNA
gctggtggcgtggaatgtcttgaaagctggttacttcgtgaaaagggctgtcagtggcctcattccaactggcac

SEQ ID NO: 582375 - DNA, 75 bp, synthetic construct
  source 1..75: mol_type = other DNA
gtttttcgtctatttgcgaacaattaacgtcagttggcgacaatatctggattattcccggattatgtgtctctc

SEQ ID NO: 582376 - DNA, 75 bp, synthetic construct
  source 1..75: mol_type = other DNA
tgggttgcgacgtgacggcggtggcgggcgacacggcatttcaggctggtataaggagcatcgctcatgcagtgg

SEQ ID NO: 582377 - DNA, 75 bp, synthetic construct
  source 1..75: mol_type = other DNA
ccgctggagtttgagaaaaagtacgggtcccaggttgagttaatttttcattttcttgatcacgcctttgcaact

SEQ ID NO: 582378 - DNA, 75 bp, synthetic construct
  source 1..75: mol_type = other DNA
cggaagcgttcaaagtaataaaaccataaatattacggggcgtgttaatccctcggattacggtaactttgattc

SEQ ID NO: 582379 - DNA, 75 bp, synthetic construct
  source 1..75: mol_type = other DNA
cgcatgacctctttgtgttgcctttgtgcagaaagcatcacgacgagctgcatgcggataccgtggcatttgaag

SEQ ID NO: 582380 - DNA, 75 bp, synthetic construct
  source 1..75: mol_type = other DNA
ggggaatcagctgttcatgaacgacgtgttcctgaaacgactgtttgcggtgagcatcacgtcatccggcaatcc

SEQ ID NO: 582381 - DNA, 75 bp, synthetic construct
  source 1..75: mol_type = other DNA
aacgtgacgattgcggaagactgcaccattaatggaacgatgagcgctgaccgaatcattggtgatatcgtcaag

SEQ ID NO: 582382 - DNA, 75 bp, synthetic construct
  source 1..75: mol_type = other DNA
cagccagtggagcgtctccggcagccagattaaacccgggaaagttttctggttttacgtgcgcagcgtcaatct

SEQ ID NO: 582383 - DNA, 75 bp, synthetic construct
  source 1..75: mol_type = other DNA
gctgcttactgcttatcttattagaatgattgcagcgccctatgggcttatgttagtcgcttatggcaaacaatt

SEQ ID NO: 582384 - DNA, 75 bp, synthetic construct
  source 1..75: mol_type = other DNA
accagacggtcccggatggtttcgggggcacagagccgcggatgactttcaatgcgtacctgtcacaacagcgta

SEQ ID NO: 582385 - DNA, 75 bp, synthetic construct
  source 1..75: mol_type = other DNA
ccgccatgaggcggtgatccgtcgtgctggtggcgtggaatgccttgagagctggttacttcgtgaaaagggctg

SEQ ID NO: 582386 - DNA, 75 bp, synthetic construct
  source 1..75: mol_type = other DNA
gtaccgggagagcagaccgccaccagcatactgaagcagcgcacaaaaaatcttgcgccgctgcctcacgcccac

SEQ ID NO: 582387 - DNA, 75 bp, synthetic construct
  source 1..75: mol_type = other DNA
cagcgtggaggtccagtctgtcaccgacggcgtgcaggtgaaagtgaaccgtatccctgacggcgttgccggata

SEQ ID NO: 582388 - DNA, 75 bp, synthetic construct
  source 1..75: mol_type = other DNA
tggtggagccggaaccgaaaagcatgcgtaatctgccgtccggggtcgttcctgccgctcgccagccgctggtgg

SEQ ID NO: 582389 - DNA, 75 bp, synthetic construct
  source 1..75: mol_type = other DNA
tgttacgcccaaaatgtcgccgctgggttaatgaaaagtacacgcgctgggttaagacacagccgtgtgcatgtt

SEQ ID NO: 582390 - DNA, 75 bp, synthetic construct
  source 1..75: mol_type = other DNA
ttatcctggtgggcggtctgcaatcaggtggtggatgcactacctgaggctgtatcgcgtcgttcgctgggatta

SEQ ID NO: 582391 - DNA, 75 bp, synthetic construct
  source 1..75: mol_type = other DNA
tgttacgcccaaaacgtcgccgctgggttaatgaaaagtacacgcgctgggttaagacacagccgtgcgcatgtt

SEQ ID NO: 582392 - DNA, 75 bp, synthetic construct
  source 1..75: mol_type = other DNA
ggaacatccagtgctcttggcggtaattcgattgttttgggtgataatgacacgggctttaaacaaaatggtgat

SEQ ID NO: 582393 - DNA, 75 bp, synthetic construct
  source 1..75: mol_type = other DNA
acgccggaatcattcatgctgcgaccaaagcgccgccgctgggtaaacgagagctggacgcgctgggttaagtcc

SEQ ID NO: 582394 - DNA, 75 bp, synthetic construct
  source 1..75: mol_type = other DNA
gtcaaaacggtgggaaaagcctttccgagaaatggcagttatgccagcggtacaataacggtcactgtgtacgat

SEQ ID NO: 582395 - DNA, 75 bp, synthetic construct
  source 1..75: mol_type = other DNA
tgcgacacgcgccgggcgcaatccgtctgtgctggcactgcgataaccagctgcgcgatcagttcacggaacggc

SEQ ID NO: 582396 - DNA, 75 bp, synthetic construct
  source 1..75: mol_type = other DNA
atctgctcggtgtaccgcgaaagcgacatcgtaccgggagagcagaccgccaccagcatattgaaacagcgcaca

SEQ ID NO: 582397 - DNA, 75 bp, synthetic construct
  source 1..75: mol_type = other DNA
ttcacgtccaccagcaacaaaatccaccacagaaaaaaacggttgtcagtatcgctgttgatccggagtctcctg

SEQ ID NO: 582398 - DNA, 75 bp, synthetic construct
  source 1..75: mol_type = other DNA
cgtcgccgctgggttaacgagaaatacacacgctgggtgaagacacagccgtgtgcgtgttgtggtaagccagcc

SEQ ID NO: 582399 - DNA, 75 bp, synthetic construct
  source 1..75: mol_type = other DNA
cggtcagggcggaatgggaacaaaggcccacgatatttttacgttaccgttgtgtcgtaaacatcataacgagct

SEQ ID NO: 582400 - DNA, 75 bp, synthetic construct
  source 1..75: mol_type = other DNA
gtgcgggtattacttcgacctgttctggtgccggaactcgggatggtggtccttaagccgggccgtgaatcaatg

SEQ ID NO: 582401 - DNA, 75 bp, synthetic construct
  source 1..75: mol_type = other DNA
ggaaaagacggtggtaagcatcaccgttgatccagagtctccggaatctttcatgaagctgcctaaacgtcaccg

SEQ ID NO: 582402 - DNA, 75 bp, synthetic construct
  source 1..75: mol_type = other DNA
gtgagttatcgctggccgaattatcctggtgggcggcctgcaatcaggtggtggatgcactacctgaggcagtag

SEQ ID NO: 582403 - DNA, 75 bp, synthetic construct
  source 1..75: mol_type = other DNA
cacgcgctgggtaaagacacagccgtgtgcgtgttgtggtaagccagctgacgatccgcatcacctgattggtca

SEQ ID NO: 582404 - DNA, 75 bp, synthetic construct
  source 1..75: mol_type = other DNA
gaaagcgacatcataccgggagaacagaccgccaccagcatcctgaagcagcgcacaaaaaacatagcgctaccg

SEQ ID NO: 582405 - DNA, 75 bp, synthetic construct
  source 1..75: mol_type = other DNA
gggggaatggggacaaaggcccacgatattttcacgctaccgttgtgccgggaacatcacaacgaacttcatgca

SEQ ID NO: 582406 - DNA, 75 bp, synthetic construct
  source 1..75: mol_type = other DNA
ttcgctgggattaccggtggaaaaaatccgctccgtataccgtgagagtgacatcgtaccgggagaacagacagc

SEQ ID NO: 582407 - DNA, 75 bp, synthetic construct
  source 1..75: mol_type = other DNA
tggtggagccggaaccgaaaagcatgcgtaatctgccgtccggagtcgttcctgccgttcgacagccgctggcag

SEQ ID NO: 582408 - DNA, 75 bp, synthetic construct
  source 1..75: mol_type = other DNA
cacgcccaccagcaacagaacccaccacaggaaaagacggtggtcagcattgccgttgatccggagtcaccggaa

SEQ ID NO: 582409 - DNA, 75 bp, synthetic construct
  source 1..75: mol_type = other DNA
gtgctggcactgcgacaaccagctgcgtgaccagaccttagaatcacttgagcaacttgctcaacaaaacctgac

SEQ ID NO: 582410 - DNA, 75 bp, synthetic construct
  source 1..75: mol_type = other DNA
gaatctttcatgaaacggcctaaacgtcgtcgctgggttaatgaaaagtacatgcgctgggtaaagacacagccg

SEQ ID NO: 582411 - DNA, 75 bp, synthetic construct
  source 1..75: mol_type = other DNA
cctaaacgtcgccgctgggttaatgagaaatacacgcgctgggtaaagacacagccgtgtgcgtgttgtggtaag

SEQ ID NO: 582412 - DNA, 75 bp, synthetic construct
  source 1..75: mol_type = other DNA
cctgctgttagccagctgctggcagaggataaaacattactgccatttttcagcgacgaacgagtgattcgtgct

SEQ ID NO: 582413 - DNA, 75 bp, synthetic construct
  source 1..75: mol_type = other DNA
tgctggcactgcgacaaccagctgcgtgaccagacatccgaatcacttgagcaacttgctcaacaaaaccaggca

SEQ ID NO: 582414 - DNA, 75 bp, synthetic construct
  source 1..75: mol_type = other DNA
gagagtgacatcgtaccgggagaacagactgccaccagcatactgaagcagcgcacaaaaaatattgcgctgcca

SEQ ID NO: 582415 - DNA, 75 bp, synthetic construct
  source 1..75: mol_type = other DNA
ggaaaaaatccgctcggtgtaccgcgaaagcgacatcgtacagggagagcggaccgccaccagcatactgaagca

SEQ ID NO: 582416 - DNA, 75 bp, synthetic construct
  source 1..75: mol_type = other DNA
catcacagcgaaaccgtcatacatcgttacggtgctggcgcgatggtgttgtgctggcactgcgacaaccagctg

SEQ ID NO: 582417 - DNA, 75 bp, synthetic construct
  source 1..75: mol_type = other DNA
gtgcgggtattacttcgacctgttctggtgccggaacttggcctggtggtccttaagcctggacgcgaatcacgg

SEQ ID NO: 582418 - DNA, 75 bp, synthetic construct
  source 1..75: mol_type = other DNA
catcaccgttgatccggagtcccctgaatctttcattaaacggcctaaacgtcggcgctgggttaacgagaaata

SEQ ID NO: 582419 - DNA, 75 bp, synthetic construct
  source 1..75: mol_type = other DNA
agaccgccaccagcatactgaagcagcgcacaaaaaatattgcgctaccgcatcacgtccaccagcaacaaaacc

SEQ ID NO: 582420 - DNA, 75 bp, synthetic construct
  source 1..75: mol_type = other DNA
caccacagtgaaaccgtcattcaccgttatgactctggcgcgatggtgttgtgctggcactgcgacaaccagttg

SEQ ID NO: 582421 - DNA, 75 bp, synthetic construct
  source 1..75: mol_type = other DNA
aaatggtgcagattggcgcctcgttgtttagccgcggctatgccaccggctccgctggcaatctgtcgctgctgc

SEQ ID NO: 582422 - DNA, 75 bp, synthetic construct
  source 1..75: mol_type = other DNA
cctgccaccagcatcatccaggataaggcgaaaaaggtgctggcgctgaaagtggatccggagtcgccggagtct

SEQ ID NO: 582423 - DNA, 75 bp, synthetic construct
  source 1..75: mol_type = other DNA
gtcgccgctgggtaaatgagaaatacacacgctgggtaaagacacagccgtgtgcgtgttgtggtaagccagccg

SEQ ID NO: 582424 - DNA, 75 bp, synthetic construct
  source 1..75: mol_type = other DNA
gacgagatacctgaagccgtagcccataaagcccttcgtctgaaggaggagactaaccagtcggtaacacgtgaa

SEQ ID NO: 582425 - DNA, 75 bp, synthetic construct
  source 1..75: mol_type = other DNA
aagattttgaagaaaaacacggcagccagctgttgttgctgattcgttttttaatgcacgcgagaaattcgggtg

SEQ ID NO: 582426 - DNA, 75 bp, synthetic construct
  source 1..75: mol_type = other DNA
gatgagatacctgaagccgtagcacataaagctcttcgtctgaagaaagagtcccaccagtcggtaacacgtgaa

SEQ ID NO: 582427 - DNA, 75 bp, synthetic construct
  source 1..75: mol_type = other DNA
gaatctttcatgaagctgcctaaacgtcgccgctgggttaaggagaaatacacacgttgggttaagacacagccg

SEQ ID NO: 582428 - DNA, 75 bp, synthetic construct
  source 1..75: mol_type = other DNA
accgtggcatttgaagagaagtatggctcccaactggagctgatatttcgttttatcgatcgtgcgctggcaact

SEQ ID NO: 582429 - DNA, 75 bp, synthetic construct
  source 1..75: mol_type = other DNA
tgttacgcccaaaacgtcgccgctgggttaacgaaaagtacacgcgctgggttaagacacagccgtgtgcatgtt

SEQ ID NO: 582430 - DNA, 75 bp, synthetic construct
  source 1..75: mol_type = other DNA
actggctgttgcgtcatgtcaaatcctgccagtggcctcatggtgactatcatcacagtgaaaccgtcatacatc

SEQ ID NO: 582431 - DNA, 75 bp, synthetic construct
  source 1..75: mol_type = other DNA
cggaagcggtattacgtcgttcgctggggttgcgtgcggaaaaaatccgctccgtataccgtgaaagcgacatca

SEQ ID NO: 582432 - DNA, 75 bp, synthetic construct
  source 1..75: mol_type = other DNA
ccgcaatgaggcagtgatccgtcgtgctggtggagtggaatgtcttgaacgctggttacttcgtgaaaaaggttg

SEQ ID NO: 582433 - DNA, 75 bp, synthetic construct
  source 1..75: mol_type = other DNA
ggaatgggaacaaaagcgcatgacctttttgtgttgcctttgtgcagaaagcatcacgacgagctgcatgcggat

SEQ ID NO: 582434 - DNA, 75 bp, synthetic construct
  source 1..75: mol_type = other DNA
taatctgccgtccggggtcgttcctgccgttcgccagccgctggaggaagataaagcattactgccctttttcag

SEQ ID NO: 582435 - DNA, 75 bp, synthetic construct
  source 1..75: mol_type = other DNA
gtgagggtattagtgactcctgaaattgctcaccgtctggggattgtacttttcaggcctggtcctgatgcgatg

SEQ ID NO: 582436 - DNA, 75 bp, synthetic construct
  source 1..75: mol_type = other DNA
ggaaaaaatccgctccgtataccgtgagagtgacatcgtaccgggagaacagacagccaccagcatactgaagca

SEQ ID NO: 582437 - DNA, 75 bp, synthetic construct
  source 1..75: mol_type = other DNA
cctcacgcccaccagcaacagaacccaccacaggaaaagacggtggtcagcattgccgttgatccggaatctccg

SEQ ID NO: 582438 - DNA, 75 bp, synthetic construct
  source 1..75: mol_type = other DNA
agacggtggtcagcattgccgttgatcctgagtctccggaatctttcatgaaacgacctaaacgtcgccgctggg

SEQ ID NO: 582439 - DNA, 75 bp, synthetic construct
  source 1..75: mol_type = other DNA
actggctgttacgccatgttaaatcctgccagtggcctcatggtgactaccaccacagtgaaaccgtcatacatc

SEQ ID NO: 582440 - DNA, 75 bp, synthetic construct
  source 1..75: mol_type = other DNA
aggataaaacattactgccatttttcagcaacgaacgggtgattcgtgctgcgggtggcgctggtgcactgtctg

SEQ ID NO: 582441 - DNA, 75 bp, synthetic construct
  source 1..75: mol_type = other DNA
taatctgccgtccggggtcgttcctgccgttcgccagccgctggaggaggataaagcatttctgccttttttcag

SEQ ID NO: 582442 - DNA, 75 bp, synthetic construct
  source 1..75: mol_type = other DNA
taatctgccgtccggggtcgttcctgccgttcgccagccgctggaggacgataaagcattcctgccgtttttcag

SEQ ID NO: 582443 - DNA, 75 bp, synthetic construct
  source 1..75: mol_type = other DNA
taatctgccgtccggggtcgttcctgccgttcgccagccgctggaggatgataaagcattgctgccttttttcag

SEQ ID NO: 582444 - DNA, 75 bp, synthetic construct
  source 1..75: mol_type = other DNA
tgtaccgtgaaagcgacatcgtaccgggagagcagaccgccaccagcatactgaaacagcgcacaaaaaatcttg

SEQ ID NO: 582445 - DNA, 75 bp, synthetic construct
  source 1..75: mol_type = other DNA
gctgatgatccccaccacctgataggtcacggtcagggtggaatgggaacaaaagcgcatgacctttttgtgttg

SEQ ID NO: 582446 - DNA, 75 bp, synthetic construct
  source 1..75: mol_type = other DNA
atgttacgcccaaaacgtcgccgctgggttaatgaaaagtacacgcgctgggttaagacacagccgtgtgcatgt

SEQ ID NO: 582447 - DNA, 75 bp, synthetic construct
  source 1..75: mol_type = other DNA
tgaagatggatgcgttcggctgtaccagtcgcggtcaggcccaccgtgccgggctgtgggtgataaagaccggac

SEQ ID NO: 582448 - DNA, 75 bp, synthetic construct
  source 1..75: mol_type = other DNA
ctggcggcagacaggattgcgatgattaatcctgcgaatggcaacacaaaaccgatgtttgttggtcagggtgat

SEQ ID NO: 582449 - DNA, 75 bp, synthetic construct
  source 1..75: mol_type = other DNA
tcacacagaccgtcaataagaaactggaagaccagagtgcagcgatccagcagatacagaaggttcaggttgata

SEQ ID NO: 582450 - DNA, 75 bp, synthetic construct
  source 1..75: mol_type = other DNA
cggacaggattgcgatggttaatcctgcgaatggcaacacaaagccgatgtttgttggtcagggcgatcagatat

SEQ ID NO: 582451 - DNA, 75 bp, synthetic construct
  source 1..75: mol_type = other DNA
gccaccaccaccttccggattaacgcacctgcaaaacccgccaccattgagctgacgccggggtattttcagata

SEQ ID NO: 582452 - DNA, 75 bp, synthetic construct
  source 1..75: mol_type = other DNA
acaccgccggagggatttgaatcatcaggttccgagacggtactgggtacggaagtgaaatacgacacgccgatt

SEQ ID NO: 582453 - DNA, 75 bp, synthetic construct
  source 1..75: mol_type = other DNA
aacatactgctgctggctgaccgtatcgcgatgataaatccggagagcggcaacagcacgccgttatttgtggcg

SEQ ID NO: 582454 - DNA, 75 bp, synthetic construct
  source 1..75: mol_type = other DNA
tggtatcccacagcaagcatcagcgatttgctggttgtggtgatgaagaaatccacagcaggtatcacgattagc

SEQ ID NO: 582455 - DNA, 75 bp, synthetic construct
  source 1..75: mol_type = other DNA
acaagaatcgccagcttacccgttacagcgatacccgctggcatgaagattccgttcgtaaccgctggttcagcg

SEQ ID NO: 582456 - DNA, 75 bp, synthetic construct
  source 1..75: mol_type = other DNA
ttcagtctgcgtctgaccaacggaagcggagaagacagccgtctggtgaccaccgccatcactgcggatacagag

SEQ ID NO: 582457 - DNA, 75 bp, synthetic construct
  source 1..75: mol_type = other DNA
tgcgaactccgggacgctcaacaacgtcacgattaatgagaactgtcagattaaggggaaactgtcagccaatca

SEQ ID NO: 582458 - DNA, 75 bp, synthetic construct
  source 1..75: mol_type = other DNA
gccgcgggtggtgaagggtgtgcgcttcagtctgcgcctgaccagtggaagcggtcaggacagccgtctggtgac

SEQ ID NO: 582459 - DNA, 75 bp, synthetic construct
  source 1..75: mol_type = other DNA
cgtggggctgcaggtggatgcagaacagttcggcagccagcaggtgacggtgaattaccatatccggggacgtat

SEQ ID NO: 582460 - DNA, 75 bp, synthetic construct
  source 1..75: mol_type = other DNA
ctgtccggctgctgatccagcttgagcacaacggtcactgggtgacggagaaagatatcaccattaacggcaaga

SEQ ID NO: 582461 - DNA, 75 bp, synthetic construct
  source 1..75: mol_type = other DNA
acacaaagccgatgtttgttggtcagggcgatcagatatttatgaatgaagtgttcctgaaatatctgacggctc

SEQ ID NO: 582462 - DNA, 75 bp, synthetic construct
  source 1..75: mol_type = other DNA
catcacggtaagaatcagtgatgatcagaaatttgaccggcaggtcatgataccgccagtgttattccgcggtgg

SEQ ID NO: 582463 - DNA, 75 bp, synthetic construct
  source 1..75: mol_type = other DNA
gtcctgtccattgatgccgccagccgcaccctgacactggaccgtgaggtgaccctgccggagacaggtgccgcc

SEQ ID NO: 582464 - DNA, 75 bp, synthetic construct
  source 1..75: mol_type = other DNA
ctggtatcccacagcaagtatcagcgatctgctggttgtggtgatgaagaaagccaccgcaggcatcagtatcag

SEQ ID NO: 582465 - DNA, 75 bp, synthetic construct
  source 1..75: mol_type = other DNA
tacggacgcaacctgctgaagatggatgcgttcggctgtaccagtcgcggtcaggctcaccgcgccgggctgtgg

SEQ ID NO: 582466 - DNA, 75 bp, synthetic construct
  source 1..75: mol_type = other DNA
tcctgaaatatctgacggctcccaccattaccagcggtggcaatcccccaacgttttcactgacacctgatggtc

SEQ ID NO: 582467 - DNA, 75 bp, synthetic construct
  source 1..75: mol_type = other DNA
aaatgactggtatcccacagcaagtatcagcgatttgctggttgtggtgatgaagaaagccaccgcaggcatcag

SEQ ID NO: 582468 - DNA, 75 bp, synthetic construct
  source 1..75: mol_type = other DNA
ttgttaaaggaaccattagcgcagacagaatcatcggtgatatcgtcaagggctattccttcgaacctcgtgatg

SEQ ID NO: 582469 - DNA, 75 bp, synthetic construct
  source 1..75: mol_type = other DNA
ccctatgtggccgggataggtgcggggattgaggatactgatggtcagacgctgagcaacatactgctgcaggct

SEQ ID NO: 582470 - DNA, 75 bp, synthetic construct
  source 1..75: mol_type = other DNA
caggaacgcggatatcagcggagcaattaccgcgaataccggcacgctcaataatgtcaccattaacgagaactg

SEQ ID NO: 582471 - DNA, 75 bp, synthetic construct
  source 1..75: mol_type = other DNA
acatctggcccaggagctgtggacgcagattgataacggtcagcttgcgccggacctggctgaaatcaggacgtc

SEQ ID NO: 582472 - DNA, 75 bp, synthetic construct
  source 1..75: mol_type = other DNA
atttcacgctcgggtcacaggggctgcgtcacacacccggtgacattattgaaatctgtgataacgactatgccg

SEQ ID NO: 582473 - DNA, 75 bp, synthetic construct
  source 1..75: mol_type = other DNA
gtacagtttgagttctggttttcggagacaaaaatcgcagacatatctcaggtggaaacctctgcccgttatctg

SEQ ID NO: 582474 - DNA, 75 bp, synthetic construct
  source 1..75: mol_type = other DNA
cctgacggcatgcagagtcaggtgctgctggcggcagacaggattgcgatgattaatcctgcgaatggcaacaca

SEQ ID NO: 582475 - DNA, 75 bp, synthetic construct
  source 1..75: mol_type = other DNA
cagaccctgagtaacattctgctgcaggccgatcgcattgcgatgattaccccggagaacggcaacaccacgccg

SEQ ID NO: 582476 - DNA, 75 bp, synthetic construct
  source 1..75: mol_type = other DNA
gtaacgtgaatgcgaactccgggacgctcaacaacgtcacgattaacgagaactgtcgggttctgggaaaattgt

SEQ ID NO: 582477 - DNA, 75 bp, synthetic construct
  source 1..75: mol_type = other DNA
ggattacagtgacaatgagagttgaaggtggtcctggcaatatgggggatgtggaagggagaaagagagagctgg

SEQ ID NO: 582478 - DNA, 75 bp, synthetic construct
  source 1..75: mol_type = other DNA
ccttttaacatccggatggtccgggagacagcggacagcaccccggaccagctgcagaataagacgctctggtcg

SEQ ID NO: 582479 - DNA, 75 bp, synthetic construct
  source 1..75: mol_type = other DNA
ggaataacagttatgccagtgggacggtaaccgtcacagtttacgatgaccagggattcgaccggcagattatca

SEQ ID NO: 582480 - DNA, 75 bp, synthetic construct
  source 1..75: mol_type = other DNA
gtgggtaaaggtggcggcaaggcgcacacgccggtagaggcaaaggacaatcttaagtccacgcagatgatgagc

SEQ ID NO: 582481 - DNA, 75 bp, synthetic construct
  source 1..75: mol_type = other DNA
taataatctgaacagcatgtgggctgtgaagctgcaacagatgaaggacggacgcctttatattgcgggtatcgg

SEQ ID NO: 582482 - DNA, 75 bp, synthetic construct
  source 1..75: mol_type = other DNA
atcccccatgcactgaagaacaggccgagtggctaattcagtgctaccgcagacacggatacgagattaagaaag

SEQ ID NO: 582483 - DNA, 75 bp, synthetic construct
  source 1..75: mol_type = other DNA
attcggataactctgccgcccctgccagcaggcacgggcggcgttcccgcactttcaaatctgactggttccagc

SEQ ID NO: 582484 - DNA, 75 bp, synthetic construct
  source 1..75: mol_type = other DNA
ggtatctcttgctgatgatgtttcgtttgatcgcaagttgatactccttcccttcactttctattcaggaacact

SEQ ID NO: 582485 - DNA, 75 bp, synthetic construct
  source 1..75: mol_type = other DNA
accggaaaaagaagccatcgtggataacggggcgcactttgacggcgaccagagcggcaccctgaacagcgttat

SEQ ID NO: 582486 - DNA, 75 bp, synthetic construct
  source 1..75: mol_type = other DNA
accgtttcagtggcctgcctctgggggaatacaccctgacggtcagggcgataaacagctacggccagcagggcg

SEQ ID NO: 582487 - DNA, 75 bp, synthetic construct
  source 1..75: mol_type = other DNA
tgggtaaagggggcggcaaggggcacacaccgcgtgaggcgaaggacaatctcaaatccacgcagatgatgagcg

SEQ ID NO: 582488 - DNA, 75 bp, synthetic construct
  source 1..75: mol_type = other DNA
ggcaatcctccgacgttttccctgacgccggatggcaggctgacagcccgcaatgcggatatcagtggagccatc

SEQ ID NO: 582489 - DNA, 75 bp, synthetic construct
  source 1..75: mol_type = other DNA
tgccggatggtgtggagacatacggggtgtggggactctccctgccgtcactgcgccgtcgcctgttccgctgtg

SEQ ID NO: 582490 - DNA, 75 bp, synthetic construct
  source 1..75: mol_type = other DNA
ggcagtgcagcacctgacggtggaggtgagcgcagctgacggtcagtatctggcacaggcgaaatgggacacgcc

SEQ ID NO: 582491 - DNA, 75 bp, synthetic construct
  source 1..75: mol_type = other DNA
gccgcgggtggtgaagggggtgcacttcagtctgcgcctgaccagcggaagcggtgagagcagccgtctggtgac

SEQ ID NO: 582492 - DNA, 75 bp, synthetic construct
  source 1..75: mol_type = other DNA
ataccccgcgcgaagcgaaggacaacctgaagtccacgcagctgctgagcgtgctcgaatccaacagcgacagac

SEQ ID NO: 582493 - DNA, 75 bp, synthetic construct
  source 1..75: mol_type = other DNA
tacaataacggtcactgtgtacgatgaccaggcttttgaccgtcagatagtagtcccccccgttctgtttcgtgg

SEQ ID NO: 582494 - DNA, 75 bp, synthetic construct
  source 1..75: mol_type = other DNA
aaaatggcataccctatgttgccggtattggagcggggattgaggatactgatggccagcccctgagcaacatac

SEQ ID NO: 582495 - DNA, 75 bp, synthetic construct
  source 1..75: mol_type = other DNA
gaagacggtggggaaagcctttccccggaataacagttatgccagcgggacggtaaccgtcacagtttacgatga

SEQ ID NO: 582496 - DNA, 75 bp, synthetic construct
  source 1..75: mol_type = other DNA
caggccagtaatgatggtgaagggtatctggaaattttccgggaaaaaataggaaaactgcatctggctcagggg

SEQ ID NO: 582497 - DNA, 75 bp, synthetic construct
  source 1..75: mol_type = other DNA
ccctgccgtcactgcgtcgtcgcctgttccgctgtgtctccatccgggaaaacacggacggcacttttgccatca

SEQ ID NO: 582498 - DNA, 75 bp, synthetic construct
  source 1..75: mol_type = other DNA
ccgcacattaagcccgggaaggatttctggttttacgtgcgcagcgtcaacctggtgggtaaatctgcttttgtg

SEQ ID NO: 582499 - DNA, 75 bp, synthetic construct
  source 1..75: mol_type = other DNA
ttcgcaaaaacggcgtattaatcgcatccagagaaactaaaggggccattcccggtagttacagtgcggttattg

SEQ ID NO: 582500 - DNA, 75 bp, synthetic construct
  source 1..75: mol_type = other DNA
gccgcgggtggtgaagggcgtgcgcttcagtctgcgcctgaccagtggaagcggtgagaacagccgcctgctgac

SEQ ID NO: 582501 - DNA, 75 bp, synthetic construct
  source 1..75: mol_type = other DNA
aaggatgtcaccattaacggcaagaccacctcacagttcctggcctcggtgattctggataatctgccgccccgg

SEQ ID NO: 582502 - DNA, 75 bp, synthetic construct
  source 1..75: mol_type = other DNA
tctggttttcggaggcaaaaattgcagacgccgcacaggtggaaacctctgcccgttatctggggaccggcagtc

SEQ ID NO: 582503 - DNA, 75 bp, synthetic construct
  source 1..75: mol_type = other DNA
agcggtaagccggtgagcgtggccatcactgcacaccccgcgccggaccggatacaggtcagcaccctgcctgat

SEQ ID NO: 582504 - DNA, 75 bp, synthetic construct
  source 1..75: mol_type = other DNA
gggggcggcagacgtggacaaatgggcgctgtatgccattgcgcagtactgcgaccagacggtcccggatggttt

SEQ ID NO: 582505 - DNA, 75 bp, synthetic construct
  source 1..75: mol_type = other DNA
cggcattttccctgacaccggacgggcggctgacggcgagaaatgctgatatcagcggtaacgtgaatgcgaact

SEQ ID NO: 582506 - DNA, 75 bp, synthetic construct
  source 1..75: mol_type = other DNA
gaaatgctgatatcagcggtaacgtgaatgcgaattccgggacgctcaacaacgtcacgattaatgagaactgtc

SEQ ID NO: 582507 - DNA, 75 bp, synthetic construct
  source 1..75: mol_type = other DNA
agacggcggacagcaccccggaccagctgcagaacagaacgctgtggtcgtcatacaccgaaatcatcgatgtga

SEQ ID NO: 582508 - DNA, 75 bp, synthetic construct
  source 1..75: mol_type = other DNA
cggacaggaaatctttcagcaacccgcgacggatgtcagcagggtattttcatcagtcattgatatgcctgccgg

SEQ ID NO: 582509 - DNA, 75 bp, synthetic construct
  source 1..75: mol_type = other DNA
ctggtatcccacagcaagtatcagcgatttgctggttgtggtgatgaagaaagccaccgcaggcatcagtattcg

SEQ ID NO: 582510 - DNA, 75 bp, synthetic construct
  source 1..75: mol_type = other DNA
gccatcagggaccattaccgtcaggatttatgacgatcagccttttgacaggcaaattgttattccggcggtggc

SEQ ID NO: 582511 - DNA, 75 bp, synthetic construct
  source 1..75: mol_type = other DNA
gatccgtctaatggcaacacaagaccaatgtttgttggtcagggcgatcagatattcatgaacgacgtgttcctg

SEQ ID NO: 582512 - DNA, 75 bp, synthetic construct
  source 1..75: mol_type = other DNA
aaaacggcgtattaatcgcatccagagaaactaaaggggccattcccggtagttacagtgcagttattgatatgc

SEQ ID NO: 582513 - DNA, 75 bp, synthetic construct
  source 1..75: mol_type = other DNA
tcgcggccacgtgacgctggagttttcggtgtcagcatggctggtaaataactggtatcccacagcaagtatcag

SEQ ID NO: 582514 - DNA, 75 bp, synthetic construct
  source 1..75: mol_type = other DNA
acgtttaatgtgtcgtcggccggtgcgaacaactggacgccgacaacgtacatcagtgatttactggttgtggtc

SEQ ID NO: 582515 - DNA, 75 bp, synthetic construct
  source 1..75: mol_type = other DNA
agcatcacggaaacccgcaatgaaatcacacagacggtcaacaaaacactggagaaccagagcgccaccatacag

SEQ ID NO: 582516 - DNA, 75 bp, synthetic construct
  source 1..75: mol_type = other DNA
caccgccatcaccgcggatacagagcaccgtttcagcggtctgccgccgggggaatacaccctgacggtcagggc

SEQ ID NO: 582517 - DNA, 75 bp, synthetic construct
  source 1..75: mol_type = other DNA
cggcaatcctccggcattttccctgacgccggacgggcgactgacggcgaaaaatgcggatatcagtggcagtgt

SEQ ID NO: 582518 - DNA, 75 bp, synthetic construct
  source 1..75: mol_type = other DNA
cggacgtgtcctgtccattgatgccgccagccgcaccctgacactggaccgtgaggtgaccctgccggagacagg

SEQ ID NO: 582519 - DNA, 75 bp, synthetic construct
  source 1..75: mol_type = other DNA
agttctggttttcggagacaaaaatcgcagacatatctcaggtggaaacctctgcccgttatctggggaccggca

SEQ ID NO: 582520 - DNA, 75 bp, synthetic construct
  source 1..75: mol_type = other DNA
gggaccattaccgtcaggatttatgacgatcagccgtttgaccgacagattgttattccggcggtggcattcagc

SEQ ID NO: 582521 - DNA, 75 bp, synthetic construct
  source 1..75: mol_type = other DNA
gatcagccgtttgaccggcaaattgttatcccggcggtggcattcagtggcgctaaacatgagcaagatcatact

SEQ ID NO: 582522 - DNA, 75 bp, synthetic construct
  source 1..75: mol_type = other DNA
ccattaccgtcaggatttatgacgatcagccgtttgaccggcagattgttattccggcggtggcattcagcggcg

SEQ ID NO: 582523 - DNA, 75 bp, synthetic construct
  source 1..75: mol_type = other DNA
aacagtgggcaaagctttcccccgggactcccgtgcaccggaacggtggccatcagggaccattaccgtcagggt

SEQ ID NO: 582524 - DNA, 75 bp, synthetic construct
  source 1..75: mol_type = other DNA
tggctgcgctgtacatgctgaaggttcaaaaaacgaaagacggcattccctatgtggccgggattggtgcaggga

SEQ ID NO: 582525 - DNA, 75 bp, synthetic construct
  source 1..75: mol_type = other DNA
ttgctgcactttacatgctgaaggtacagaaaacaaaaaatggcataccctatgttgccggtattggagcgggga

SEQ ID NO: 582526 - DNA, 75 bp, synthetic construct
  source 1..75: mol_type = other DNA
gtggaatgtcttgaaagctggttacttcgtgaaaagggctgtcagtggcctcattccaactggcacagcgagaac

SEQ ID NO: 582527 - DNA, 75 bp, synthetic construct
  source 1..75: mol_type = other DNA
tgttcaatgccatgaacggtaaccgcgctgaaatgagtccggaagccgccggcattgcggcctgtctgatgacgt

SEQ ID NO: 582528 - DNA, 75 bp, synthetic construct
  source 1..75: mol_type = other DNA
atctgtacaccctgaacaacggtggcgcatttatggcacccgaaccggatgaagatgatggaaaaacctgggtac

SEQ ID NO: 582529 - DNA, 75 bp, synthetic construct
  source 1..75: mol_type = other DNA
gatttttaagaagcagaaagtggatgacaaggtgctgtttatcgatgccagccgtgaatataaggcgggcaaaaa

SEQ ID NO: 582530 - DNA, 75 bp, synthetic construct
  source 1..75: mol_type = other DNA
aaatgagcccggaagccgccggcattgccgcctgtctgatggcgtacagtcatcacgcctgtcgtacggagtgtt

SEQ ID NO: 582531 - DNA, 75 bp, synthetic construct
  source 1..75: mol_type = other DNA
gttcaatgtcatgaacggtaaccgcgctgaaatgagcccagaagccgccggcattgctgcctgtctgatgacgta

SEQ ID NO: 582532 - DNA, 75 bp, synthetic construct
  source 1..75: mol_type = other DNA
tcgcgtcactcagatacggcaaaagcgttcgcatacctgctgaaacagtgggatgcactgaacgtgtactgcagt

SEQ ID NO: 582533 - DNA, 75 bp, synthetic construct
  source 1..75: mol_type = other DNA
agatccggaagcgtatctgcgccatatcctgggtgtactgccggaatggccttccaaccgtgttgacgagctcct

SEQ ID NO: 582534 - DNA, 75 bp, synthetic construct
  source 1..75: mol_type = other DNA
gcatcccgtctttttccgttctgtaccggcaaataccgctggcacggcagcactgaagcgtataccggtcgtgaa

SEQ ID NO: 582535 - DNA, 75 bp, synthetic construct
  source 1..75: mol_type = other DNA
caaccacatcacacctgttttcacttttatcttctgtcttcagaggtatcccattatgaaaattatcacccgtgg

SEQ ID NO: 582536 - DNA, 75 bp, synthetic construct
  source 1..75: mol_type = other DNA
cggtggtatctggaatctgtacaccctgaacaacggtggcgcatttatggcccccgaaccggatgacgatgatga

SEQ ID NO: 582537 - DNA, 75 bp, synthetic construct
  source 1..75: mol_type = other DNA
ccattcacaacatcgacaccatcagcttctggccgcagcactttggcctcattccacagtgggtgaccctggagc

SEQ ID NO: 582538 - DNA, 75 bp, synthetic construct
  source 1..75: mol_type = other DNA
cctgaaactaatcggtgaactgtacgccatcgagcacgatatacgcgggttaccggtgtctgaacacctggcggt

SEQ ID NO: 582539 - DNA, 75 bp, synthetic construct
  source 1..75: mol_type = other DNA
ccggaagccgctggcattgctgcctgtctgatgacgtacagtcatcatgcctgtcgtacggagtgttatgccatg

SEQ ID NO: 582540 - DNA, 75 bp, synthetic construct
  source 1..75: mol_type = other DNA
tgtactgaatcagtgggacgccctctgttattacagtgatgacggtctggcggaggcggacaataacacagcgga

SEQ ID NO: 582541 - DNA, 75 bp, synthetic construct
  source 1..75: mol_type = other DNA
aacatcttcgggctcagatagaaaaactgcgccggatgctgttcggtacccgttctgaaaaactgcagcgtgagg

SEQ ID NO: 582542 - DNA, 75 bp, synthetic construct
  source 1..75: mol_type = other DNA
gcggcgagcgtggagcactgctgtacgggctgatcggcacctgccgtctgaacggtatcgatccggaagcgtatc

SEQ ID NO: 582543 - DNA, 75 bp, synthetic construct
  source 1..75: mol_type = other DNA
tatctggaatctgtacaccctgaacaacggtggcgcatttatggcccccgaaccggatgatgatgacgaaacatg

SEQ ID NO: 582544 - DNA, 75 bp, synthetic construct
  source 1..75: mol_type = other DNA
cctgagcgtactgccggaatggccttccaaccgagttgatgaactcctgccatggaacgtagtactcaccaataa

SEQ ID NO: 582545 - DNA, 75 bp, synthetic construct
  source 1..75: mol_type = other DNA
ccggagttagagcgtcttgccgtcaggcagcagcgaagcaaagtgttactgacgtcgctgcatgaatggatggtg

SEQ ID NO: 582546 - DNA, 75 bp, synthetic construct
  source 1..75: mol_type = other DNA
ccacaccttctgtttccgtaaccactgcatcagggaataaccagtctcagttggttgccaccatagtccctgatg

SEQ ID NO: 582547 - DNA, 75 bp, synthetic construct
  source 1..75: mol_type = other DNA
tacgtgttcttcggtagcgatcacggcggcgagcgtggtgcactgctatacgggctgatcggcacctgccgtctg

SEQ ID NO: 582548 - DNA, 75 bp, synthetic construct
  source 1..75: mol_type = other DNA
tgcagtctgtcttggaaagaaaaattacgtgttcttcggtagcgatcacggcggcgagcgtggtgcactgctata

SEQ ID NO: 582549 - DNA, 75 bp, synthetic construct
  source 1..75: mol_type = other DNA
catcttccccgtgaaatacactgcctggagcctgaagaaagttgttgcctggagtgtggcagtgagctggattat

SEQ ID NO: 582550 - DNA, 75 bp, synthetic construct
  source 1..75: mol_type = other DNA
gggccccggattacttgcccgcgtgttaacgggaaaatactgcgaacacctgccactgtatcgtcagagtgaaat

SEQ ID NO: 582551 - DNA, 75 bp, synthetic construct
  source 1..75: mol_type = other DNA
gaagaagccctgaagcgaatcagtgaactgtacgccatcgagaatgaaatacggggattaccagagtcagagcgt

SEQ ID NO: 582552 - DNA, 75 bp, synthetic construct
  source 1..75: mol_type = other DNA
ggtctgctttaacccgtcacaaccacatcacacctgttttcacttttatcttctgtcttcagaggtatcccacta

SEQ ID NO: 582553 - DNA, 75 bp, synthetic construct
  source 1..75: mol_type = other DNA
gtcgctggaccggtgccgttgctgaactgctggagccgctgtatgacgtcctgcgccagtatgtgctgatgcccg

SEQ ID NO: 582554 - DNA, 75 bp, synthetic construct
  source 1..75: mol_type = other DNA
gtatctggaatctgtacaccctgaacaacggcggggcatttatggcgcccgaaccggatgacgatgatgacgaaa

SEQ ID NO: 582555 - DNA, 75 bp, synthetic construct
  source 1..75: mol_type = other DNA
gtatctggaatctgtacaccctgaacaacggcggggcatttatggcacccgaaccggatgacgatgatggcgaaa

SEQ ID NO: 582556 - DNA, 75 bp, synthetic construct
  source 1..75: mol_type = other DNA
gtgaaggcgataacgtcgagaaatacgcctatctcgccagcctgaaggagattcaggacaacgactataacctca

SEQ ID NO: 582557 - DNA, 75 bp, synthetic construct
  source 1..75: mol_type = other DNA
ggttcacacctgaataaccagccgctttgcgctgcccaacgtcgtacccgagtattaatcctcggcgttaatggt

SEQ ID NO: 582558 - DNA, 75 bp, synthetic construct
  source 1..75: mol_type = other DNA
tctggccggttacagcggagtgcttcaggccgatgcttacggtggttaccgggcgttgtacgaatccggcagaat

SEQ ID NO: 582559 - DNA, 75 bp, synthetic construct
  source 1..75: mol_type = other DNA
tttatgttctttggcagcgatcacggcggcgagcgtggagcactgttgtacgggctgatcggcacctgccgtctg

SEQ ID NO: 582560 - DNA, 75 bp, synthetic construct
  source 1..75: mol_type = other DNA
ttggttgccactcccgtccctgatgaacaccggatcagcttctggccgcagcattttggcctcattccacagtgg

SEQ ID NO: 582561 - DNA, 75 bp, synthetic construct
  source 1..75: mol_type = other DNA
gcccggaagccgccggcattgctgcctgtctgatgacgtacagtcatcacgcctgccgtacggagtgttatgcca

SEQ ID NO: 582562 - DNA, 75 bp, synthetic construct
  source 1..75: mol_type = other DNA
gtatctggaatctgtacacactgaacaacggcggggcatttatggcccccgaaccggatgacgatgatgccgaaa

SEQ ID NO: 582563 - DNA, 75 bp, synthetic construct
  source 1..75: mol_type = other DNA
agcagaacagcgtctggcggcaagaaaagccagagccgcgccactgatgcagtcactgtatgactggatacagac

SEQ ID NO: 582564 - DNA, 75 bp, synthetic construct
  source 1..75: mol_type = other DNA
aagaagacgaagaccgagcggttgtgggcgtatgttcgtgatgaccgcaatgccgggtcagcgttggcacctgca

SEQ ID NO: 582565 - DNA, 75 bp, synthetic construct
  source 1..75: mol_type = other DNA
tggggccatgacgaggccgagaacgataagtttggtcgtttccgtcgcggtgtaccgccgaagactaaaggagat

SEQ ID NO: 582566 - DNA, 75 bp, synthetic construct
  source 1..75: mol_type = other DNA
tcgctgcgctggaagacgcgcttcgccagaaagacagccagctcagtctcgttgctgagactgagtcgttcctgc

SEQ ID NO: 582567 - DNA, 75 bp, synthetic construct
  source 1..75: mol_type = other DNA
ctcagacccatcttgcaggcttcagtggcgtactgcaggctgatgcctacgccgggttcaacgagctctaccgcg

SEQ ID NO: 582568 - DNA, 75 bp, synthetic construct
  source 1..75: mol_type = other DNA
ccggttcgcagatggcaggagaacgcgccgcgcaaataatgagcttgctggaaaccgcgaaacgcaacggtctgg

SEQ ID NO: 582569 - DNA, 75 bp, synthetic construct
  source 1..75: mol_type = other DNA
atgaaaatcatcacccgtggcgaagccatgcgtattcaccgtcagcaaccggcatcccgtctttttccgttctgt

SEQ ID NO: 582570 - DNA, 75 bp, synthetic construct
  source 1..75: mol_type = other DNA
atgacaacctcttcgcataattccaccacatcttctgtttccgtaactactgcatcagggaataacccacctcag

SEQ ID NO: 582571 - DNA, 75 bp, synthetic construct
  source 1..75: mol_type = other DNA
aactgtacgccatcgaggatgaaatacggggattaccagagtcagagcgtcttgcagtcaggcagcagcgaagca

SEQ ID NO: 582572 - DNA, 75 bp, synthetic construct
  source 1..75: mol_type = other DNA
atgaaaatcatcacctgtggtgaagccatgcgtattcaccgtcagcatcctgcatcccgtctttttccgttctgt

SEQ ID NO: 582573 - DNA, 75 bp, synthetic construct
  source 1..75: mol_type = other DNA
agtacaggatattcccggtgtgctggccgagtttgcagaacgtcgtaaggacagttttggcccgtatgtccggct

SEQ ID NO: 582574 - DNA, 75 bp, synthetic construct
  source 1..75: mol_type = other DNA
tgaagaagaggatgagattgacctgctggcggtgcgagcagaacgcgagcaactgaaggcggaattggcgaagct

SEQ ID NO: 582575 - DNA, 75 bp, synthetic construct
  source 1..75: mol_type = other DNA
ccgacgagaagccggccatatggcaacgaaccggaaaagccgacaaaacccactgggttattttcgtcaaaggtg

SEQ ID NO: 582576 - DNA, 75 bp, synthetic construct
  source 1..75: mol_type = other DNA
ctggttcgataagaaggacgaccgggcgatatttagcgatatcagaaaggaagagcacacattgtgtgatggacg

SEQ ID NO: 582577 - DNA, 75 bp, synthetic construct
  source 1..75: mol_type = other DNA
tacccgttctgaaaaactgcgtcgtgaagttgaacaggctgaggccctgctgaaacaacgcgaacaggacagcga

SEQ ID NO: 582578 - DNA, 75 bp, synthetic construct
  source 1..75: mol_type = other DNA
ctgtcgcgtcactcagatacggcaaaagcgttcgcatacctgctgaaacagtgggatgcactgaacgtgtactgc

SEQ ID NO: 582579 - DNA, 75 bp, synthetic construct
  source 1..75: mol_type = other DNA
gcggaaagagcgcttcgtgcagtctgtctcggaaagaaaaattacgtgttcttcggtagcgatcacggcggcgag

SEQ ID NO: 582580 - DNA, 75 bp, synthetic construct
  source 1..75: mol_type = other DNA
atcagaaagcactgggttgcgttgtgcaacttctgtgatgatggtctggcggaggcggataataatgccgcggaa

SEQ ID NO: 582581 - DNA, 75 bp, synthetic construct
  source 1..75: mol_type = other DNA
ctgagcaggcagcaattactgcctcggtggtccctgacgagctacgcatcggcttttggccgcagcactttggct

SEQ ID NO: 582582 - DNA, 75 bp, synthetic construct
  source 1..75: mol_type = other DNA
gttgaagcaccggcgccgtcccgcccgatagagcgtggtatcgcgggccccggattacttgcccgcgtgttaacg

SEQ ID NO: 582583 - DNA, 75 bp, synthetic construct
  source 1..75: mol_type = other DNA
ggttcgcctactcaccagacaggcagggaaaacatccggtacaacaccttcgtcccttccggggtatcctgcagg

SEQ ID NO: 582584 - DNA, 75 bp, synthetic construct
  source 1..75: mol_type = other DNA
ttgcacgcagttatgccggagcggggctcttggcccatgtcgtcaccggaaaatatgcagaccatctgccgttat

SEQ ID NO: 582585 - DNA, 75 bp, synthetic construct
  source 1..75: mol_type = other DNA
gtctgtctagggaaaaagaattacatgttcttcggcaacgatcatggaggcgatcgaggagctctgctgtacgga

SEQ ID NO: 582586 - DNA, 75 bp, synthetic construct
  source 1..75: mol_type = other DNA
atcctgcaggcggatgcgttcacaggttacgacaggttgttcagtgcagaacgtgaaggtggtgcactgacagaa

SEQ ID NO: 582587 - DNA, 75 bp, synthetic construct
  source 1..75: mol_type = other DNA
ctgccgtctgaacggtatcgatccggaagcgtatctgcgccatattctgagcgtactgccggaatggccttccaa

SEQ ID NO: 582588 - DNA, 75 bp, synthetic construct
  source 1..75: mol_type = other DNA
cacgatgtatatatcagtaccaaaagcgcgacggcggaagaagccctgaaactaatcggtgaactgtacgccatt

SEQ ID NO: 582589 - DNA, 75 bp, synthetic construct
  source 1..75: mol_type = other DNA
gtgaagccatgcgtattcaccaacaacatccgacatcccgtcttttcccgttctgtaccggcaaataccgctggc

SEQ ID NO: 582590 - DNA, 75 bp, synthetic construct
  source 1..75: mol_type = other DNA
tacacactgaacaacggtggcgcatttatggcctccgaaccggatgacgatgatggcgaaaactgggtactgttc

SEQ ID NO: 582591 - DNA, 75 bp, synthetic construct
  source 1..75: mol_type = other DNA
tggctcttcgcgggttccgacagcggtggcgaacatgcggcggtgttgtactcgctgatcggcacatgccgtctg

SEQ ID NO: 582592 - DNA, 75 bp, synthetic construct
  source 1..75: mol_type = other DNA
ggtgcgaccatatcgtgcaggctccggtgccttcaaaacccattgcacgcagttatgccggagcggggcttctgg

SEQ ID NO: 582593 - DNA, 75 bp, synthetic construct
  source 1..75: mol_type = other DNA
cgaaaaaatccagactgggcgaagcgtgcagctatgtactgaatcagtgggatgccctctgttattacagtgatg

SEQ ID NO: 582594 - DNA, 75 bp, synthetic construct
  source 1..75: mol_type = other DNA
ctactgcggtggtatctggaatctgtacagtctgaacaacggcggggcatttatagcgcccgaaccggatgacga

SEQ ID NO: 582595 - DNA, 75 bp, synthetic construct
  source 1..75: mol_type = other DNA
aatgccgtgaacggtaaccgcgctgaaatgagcccggaagctgccggcattgccgcctgtctgatggcgtacagt

SEQ ID NO: 582596 - DNA, 75 bp, synthetic construct
  source 1..75: mol_type = other DNA
atgacaaccgtctcgcataattccaccacaccttctgtttccgtaaccgctgcatcagggaaggaccagcctcag

SEQ ID NO: 582597 - DNA, 75 bp, synthetic construct
  source 1..75: mol_type = other DNA
gtccattattaccgtctgcgggactacgccctgcagcatccggaatgcaacgccattatgcgcatcattgactga

SEQ ID NO: 582598 - DNA, 75 bp, synthetic construct
  source 1..75: mol_type = other DNA
aaagaccagctactgagtctggttgaagagacggaagtcttcctgcgctctgcactgacacgtgccgaagaaaag

SEQ ID NO: 582599 - DNA, 75 bp, synthetic construct
  source 1..75: mol_type = other DNA
atcacggcggcgagcgtggagcactgttgtacgggctgatcggcacctgccgtctgaacggtatcgatccggaag

SEQ ID NO: 582600 - DNA, 75 bp, synthetic construct
  source 1..75: mol_type = other DNA
ccacgatgtgcatgcaagagtgccaaccgacatcaccacggaagccctgcagcgtatcggtgaactgtatgtcat

SEQ ID NO: 582601 - DNA, 75 bp, synthetic construct
  source 1..75: mol_type = other DNA
gggagtggccgtaggccggaaaaactggctctgtgtgtcacgaaggagtacttatggcaacaatgtgaaaattgc

SEQ ID NO: 582602 - DNA, 75 bp, synthetic construct
  source 1..75: mol_type = other DNA
tatacgggctgatcggcacctgccgtctgaacggtatcgatccggaagcgtatctgcgccatattctgagcgtac

SEQ ID NO: 582603 - DNA, 75 bp, synthetic construct
  source 1..75: mol_type = other DNA
tttttccgttctgtaccggtaaataccgctggcacggcagtgctgaagcgtataccggtcgtgaagtgcaggata

SEQ ID NO: 582604 - DNA, 75 bp, synthetic construct
  source 1..75: mol_type = other DNA
gacatcccgtctttttccgttctgtaccggtaaataccgctggcacggcagtgctgaaacgtataccggtcgtga

SEQ ID NO: 582605 - DNA, 75 bp, synthetic construct
  source 1..75: mol_type = other DNA
catacctgtcgtgaagtgcaggatattcccggcgtgctggctgtgtttgccgaacgccgtaaggacagttttggc

SEQ ID NO: 582606 - DNA, 75 bp, synthetic construct
  source 1..75: mol_type = other DNA
gaagttgaacaggctgaggccctgctgaaacaacgcgaacaggacagcgatcgttacagtgggcgggaagacgat

SEQ ID NO: 582607 - DNA, 75 bp, synthetic construct
  source 1..75: mol_type = other DNA
gcactgctatacgggctgatcggcacctgccgtctgaacggtatcgatccggaagcgtatctgcgccatattctg

SEQ ID NO: 582608 - DNA, 75 bp, synthetic construct
  source 1..75: mol_type = other DNA
tggcctgcaacaactggttgccaccatagtccctgatgaacagcgcatcagattctggccgcagcattttggcct

SEQ ID NO: 582609 - DNA, 75 bp, synthetic construct
  source 1..75: mol_type = other DNA
gtccaggtactgatgccgggtaataagaagacgaagaccgggcggttgtgggcgtatgttcgtgatgaccgcaat

SEQ ID NO: 582610 - DNA, 75 bp, synthetic construct
  source 1..75: mol_type = other DNA
gctgatcggcacctgccgtctgaacggtatcgatccggaagcgtatctgcgccatatcctgagcgtactgccaga

SEQ ID NO: 582611 - DNA, 75 bp, synthetic construct
  source 1..75: mol_type = other DNA
cggttcattattgatgaagtgtgggcgtaaaattgtctccgggcatgatagtcgtaactatgccttgttcggtca

SEQ ID NO: 582612 - DNA, 75 bp, synthetic construct
  source 1..75: mol_type = other DNA
gtccattattaccggctgcgggattacgccctgcagcatccggaatgcagcgccattatgcgcatcatcgattga

SEQ ID NO: 582613 - DNA, 75 bp, synthetic construct
  source 1..75: mol_type = other DNA
ggcggtaagtctgggtcgtaaaaacttcctgttcttcggctctggccatggtggtgagcggggagcgctactgta

SEQ ID NO: 582614 - DNA, 75 bp, synthetic construct
  source 1..75: mol_type = other DNA
ttgttgaccacttcagaaagccagttccgtcagaaagaccagcaactaagtctggttgaagagacggaggccttc

SEQ ID NO: 582615 - DNA, 75 bp, synthetic construct
  source 1..75: mol_type = other DNA
tgcatcattgaagcaccggcgccgtcccgcccgatagagcgtggtatcgcgggccccggattacttgcccgcgtg

SEQ ID NO: 582616 - DNA, 75 bp, synthetic construct
  source 1..75: mol_type = other DNA
cgagcgtggagcactgctgtacgggctgatcggcacctgccgactgaacggtatcgatccggaagcgtatctgcg

SEQ ID NO: 582617 - DNA, 75 bp, synthetic construct
  source 1..75: mol_type = other DNA
aaccgcgctgaaatgagcccggaagccgccggcattgctgcctgtctgatgacgtacagtcatcatgcctgtcgt

SEQ ID NO: 582618 - DNA, 75 bp, synthetic construct
  source 1..75: mol_type = other DNA
aatgtcatgaacggtaaccgcgctgaaatgagcccggaagccgccggcattgctgcctgtctgatggcgtacagc

SEQ ID NO: 582619 - DNA, 75 bp, synthetic construct
  source 1..75: mol_type = other DNA
gggtaacggtgagcgtatcgatcaggctctgcatgcaatcgaagaagccaacggaaccaaactgaaagatgccgg

SEQ ID NO: 582620 - DNA, 75 bp, synthetic construct
  source 1..75: mol_type = other DNA
atgaacggtaaccgcgctgaaatgagcccggaagccgccggcattgctgcctgtctgatgacatacagccatcat

SEQ ID NO: 582621 - DNA, 75 bp, synthetic construct
  source 1..75: mol_type = other DNA
atgaacggcaaccgcgctgaaatgagcccggaagccgccggtattgccgcctgtctgatgacgtacagtcatcat

SEQ ID NO: 582622 - DNA, 75 bp, synthetic construct
  source 1..75: mol_type = other DNA
gaagtgcaggatattcccggtgtgctggccgtgtttgcagaacgccgtaaggacagttttggtccgtatgtccgg

SEQ ID NO: 582623 - DNA, 75 bp, synthetic construct
  source 1..75: mol_type = other DNA
accgccagtcagaaatataccttcgtcagggcgtggaactgagtcgtgccacgctggggcgctggacaggtgctg

SEQ ID NO: 582624 - DNA, 75 bp, synthetic construct
  source 1..75: mol_type = other DNA
atgcccgcctgcgggcgctgttgcagacgcaacaggacaccatccgccagatggccgaatataaccgcctgctct

SEQ ID NO: 582625 - DNA, 75 bp, synthetic construct
  source 1..75: mol_type = other DNA
gaactgtatgccatagaggcagaagtccggggatgttcagcagaacagcgtctggcagcaagaaaagccagagcc

SEQ ID NO: 582626 - DNA, 75 bp, synthetic construct
  source 1..75: mol_type = other DNA
attttcgcctggatggaccgcttctgtgacgagtacaacagtggtatctggtccttttacacgctcagcaatggc

SEQ ID NO: 582627 - DNA, 75 bp, synthetic construct
  source 1..75: mol_type = other DNA
tacaccctgaacaacggcgggcatttatggcacccgaaccggatgacgatgatgacgaaacatgggtactgttca

SEQ ID NO: 582628 - DNA, 75 bp, synthetic construct
  source 1..75: mol_type = other DNA
ccccgtgtcttcggctggatggaccgtctgtatgaagactactgcggtggtatctggaatctgtacaccctgaac

SEQ ID NO: 582629 - DNA, 75 bp, synthetic construct
  source 1..75: mol_type = other DNA
ctgctatcggggttttggggagcctgtgtctggggttcctgacatacctgacgaatctgtatttcaagattaaag

SEQ ID NO: 582630 - DNA, 75 bp, synthetic construct
  source 1..75: mol_type = other DNA
caacaggtgtgtcatacaccacgtcagcggtagggacgggatactggttactgcaactgctggacaaagtctctc

SEQ ID NO: 582631 - DNA, 75 bp, synthetic construct
  source 1..75: mol_type = other DNA
gtgtgtgccggtggtctttatattgttgtgagcttccggattgcgggagacggggtatgtaccagatggaaaaaa

SEQ ID NO: 582632 - DNA, 75 bp, synthetic construct
  source 1..75: mol_type = other DNA
cgatccggaagcgtatctgcgccatatcctgagcgtactgccggaatggccttccaaccgagttgacgaactcct

SEQ ID NO: 582633 - DNA, 75 bp, synthetic construct
  source 1..75: mol_type = other DNA
tcggcgtcattggttacgccattattcagcttactccagccatgcaactgacgccgtttatggcgggaatgatcg

SEQ ID NO: 582634 - DNA, 75 bp, synthetic construct
  source 1..75: mol_type = other DNA
tattcagcttacgccagcgatgcacctgacgccgtttatggcaggaatgattggcagctcagcgctccttggttt

SEQ ID NO: 582635 - DNA, 75 bp, synthetic construct
  source 1..75: mol_type = other DNA
ctggcattgcctacggaacatccgctggtagtgcgggatactggtttttaaagtggttggatcaggtcagtccgt

SEQ ID NO: 582636 - DNA, 75 bp, synthetic construct
  source 1..75: mol_type = other DNA
ggcttcctgacttatctgacaaatctgtacttcaaaatcagagaagacagaagaaaggctgcgagaggtgaataa

SEQ ID NO: 582637 - DNA, 75 bp, synthetic construct
  source 1..75: mol_type = other DNA
gtgtgctggggagtctgctgtttggcctgctgacgtatctgactaacctttatttcaagattaaagaagataagc

SEQ ID NO: 582638 - DNA, 75 bp, synthetic construct
  source 1..75: mol_type = other DNA
atgtaccagatggaaaaaatcacaacaggtgtgtcatacaccacgtctgcggtggggacgggatactggttcctg

SEQ ID NO: 582639 - DNA, 75 bp, synthetic construct
  source 1..75: mol_type = other DNA
ctggggagtctgctgtttggcctgctgacgtatctgactaacctgtatttcaaaatcagagaggaccggcgtaag

SEQ ID NO: 582640 - DNA, 66 bp, synthetic construct
  source 1..66: mol_type = other DNA
atggaaaaaatcacaacaggtgtgtcatacaccacgtcagcggtggggacgggatactggttactg

SEQ ID NO: 582641 - DNA, 75 bp, synthetic construct
  source 1..75: mol_type = other DNA
taatgacgccgctgaatgatgccctgtaccgttatgtgatgaatacccgcaagcttcacactgacgacacaccgg

SEQ ID NO: 582642 - DNA, 75 bp, synthetic construct
  source 1..75: mol_type = other DNA
cgccgatgcagaatcttctcaggtacatgcacaaggtctggtgattcgcgatctgccgctgattgccagcaactt

SEQ ID NO: 582643 - DNA, 75 bp, synthetic construct
  source 1..75: mol_type = other DNA
acggtatcttcctctccaacggtcctggcgacccggcaccgtgtgattacgctattactgccatccagaaattcc

SEQ ID NO: 582644 - DNA, 75 bp, synthetic construct
  source 1..75: mol_type = other DNA
catcagctgctggcgctggcgagcggtgcgaagactgtcaaaatgaaatttggtcaccacggcggcaaccatccg

SEQ ID NO: 582645 - DNA, 75 bp, synthetic construct
  source 1..75: mol_type = other DNA
gcgccatcgtcgtccgttcccggcacaccttccccgtgaaatacaccgtctggagtctgaagaaagctgttgccc

SEQ ID NO: 582646 - DNA, 75 bp, synthetic construct
  source 1..75: mol_type = other DNA
accgcctggagcctgaagaaagctgttgcccggagtgtggcggtgagctggattatctgggggaagtcagcgcag

SEQ ID NO: 582647 - DNA, 75 bp, synthetic construct
  source 1..75: mol_type = other DNA
cggcaaccatccggttaaagatgttgagaaaaacgtggtgatgatcaccgcccagaaccacggttttgcggtgga

SEQ ID NO: 582648 - DNA, 75 bp, synthetic construct
  source 1..75: mol_type = other DNA
caggcaccagtactttcaaaacccattgcacgcagttatgccggagcggggctcctggcccatgtcgtcaccgga

SEQ ID NO: 582649 - DNA, 75 bp, synthetic construct
  source 1..75: mol_type = other DNA
tgaagtgcaggatattcccggtgtgctggccgtgtttgctgaacgccgtaaggacagttttggcccttatgtccg

SEQ ID NO: 582650 - DNA, 75 bp, synthetic construct
  source 1..75: mol_type = other DNA
attcgcattgcagaactggaaagccagctccgtcagaaagaccagcaactgagtctggttgaagagacggaggcc

SEQ ID NO: 582651 - DNA, 75 bp, synthetic construct
  source 1..75: mol_type = other DNA
ccgcttcggcctgtgcaccggagactgacctgcaacaactggttgccaccctcgtccctgatgaacagcgcatca

SEQ ID NO: 582652 - DNA, 75 bp, synthetic construct
  source 1..75: mol_type = other DNA
aagctgccggtattgccgcctgtctgatggcatacagccatcatgcctgccgtacggaatgttatgccatgacgg

SEQ ID NO: 582653 - DNA, 75 bp, synthetic construct
  source 1..75: mol_type = other DNA
cgttgttgattacgttattacgctggggaacgccagaatcaccacgctggctactgcgccaggggcgttttgcag

SEQ ID NO: 582654 - DNA, 75 bp, synthetic construct
  source 1..75: mol_type = other DNA
ggtgtgtcatacaccacgtctgcggtggggacgggatactggtttctgcagttgctggacatggtatccccgtcc

SEQ ID NO: 582655 - DNA, 75 bp, synthetic construct
  source 1..75: mol_type = other DNA
ctggcactgcgataaccagttgcgcgatcagttcacggaacggctggaatcaatggcaacggataactgtgcccg

SEQ ID NO: 582656 - DNA, 75 bp, synthetic construct
  source 1..75: mol_type = other DNA
aacagacagccatcagcatactgaagcagcgcacaaaaaatattgcgctgccacttcacgtccaccagcaacaaa

SEQ ID NO: 582657 - DNA, 75 bp, synthetic construct
  source 1..75: mol_type = other DNA
atggcccgaaaactgaagccgttaagtcgcggagaacgggccgtcgtgcggcagctagcgtactgtcttgtgctc

SEQ ID NO: 582658 - DNA, 75 bp, synthetic construct
  source 1..75: mol_type = other DNA
cacagtgggcagcaataggtgtgctgggtagcttggtatttggcctgctgacgtacctgacaaacctttatttca

SEQ ID NO: 582659 - DNA, 75 bp, synthetic construct
  source 1..75: mol_type = other DNA
cccagtgggtggcgataggtgtgctggggagtctgctgtttggtctgctgacgtacctgacgaacctgtatttca

SEQ ID NO: 582660 - DNA, 75 bp, synthetic construct
  source 1..75: mol_type = other DNA
gaaaagtacacgcgctgggttaagacacagccttgcgcgtgttgtggtaagccagccgacgatccacatcacctg

SEQ ID NO: 582661 - DNA, 75 bp, synthetic construct
  source 1..75: mol_type = other DNA
agcatggatgattgacgtcatccgccacgcaatgaatggcacacaggaacgggaattatcgctggctgaattatc

SEQ ID NO: 582662 - DNA, 75 bp, synthetic construct
  source 1..75: mol_type = other DNA
gtgccttcggttactgccaccagcatcatccaggataaggcgaaaaaggtgctggcgctgaaagtggatccggag

SEQ ID NO: 582663 - DNA, 75 bp, synthetic construct
  source 1..75: mol_type = other DNA
tgccggaactgtgctggtggctgattcgtaatgatctggcggatgccttatcggaaagtgcagcccgtaaggcac

SEQ ID NO: 582664 - DNA, 75 bp, synthetic construct
  source 1..75: mol_type = other DNA
aagaaaagcatggttctcaggttgatttaatttttcgtttcttgatcacgcctttgcaactggcgtgcttgggta

SEQ ID NO: 582665 - DNA, 75 bp, synthetic construct
  source 1..75: mol_type = other DNA
ccggtattccacaatacccgggtattggtggagccggaaccgaaaagcatgcgtaatctgccgtccggggtcgtt

SEQ ID NO: 582666 - DNA, 75 bp, synthetic construct
  source 1..75: mol_type = other DNA
cctcacgcccaccagcaaaacccgccacaggaaaagacggtggtcagtattgccgttgatccggagtctcctgaa

SEQ ID NO: 582667 - DNA, 75 bp, synthetic construct
  source 1..75: mol_type = other DNA
atggacaaaatttcaacgggtattgcctatggtacttctgcaggcagtgccggctactggtttttacagtggctt

SEQ ID NO: 582668 - DNA, 75 bp, synthetic construct
  source 1..75: mol_type = other DNA
tggcaataggtgtgctgggaagtctgctgtttggcctgctgacgtatctgacaaacctttatttcaagattaaag

SEQ ID NO: 582669 - DNA, 75 bp, synthetic construct
  source 1..75: mol_type = other DNA
gctgtttggcctgttgacgtatcttactaacctgtatttcaaaatcagagaggaccgtcgtaaggcggcgcgggg

SEQ ID NO: 582670 - DNA, 75 bp, synthetic construct
  source 1..75: mol_type = other DNA
aatgtcaacctgacggaatgttgaaaggatggagtgagcagccagacacacaaaaaacggagtccggctccggtt

SEQ ID NO: 582671 - DNA, 75 bp, synthetic construct
  source 1..75: mol_type = other DNA
ggggagtctgctgtttgggttgctgacgtacctgacaaacctgtatttcaaaattaaagaggaccggcgcaaggc

SEQ ID NO: 582672 - DNA, 75 bp, synthetic construct
  source 1..75: mol_type = other DNA
gggtagcctggtgtttggcttgctgacgtacctgacaaacctttatttcaaaattaaagaagacaggcgtaaggc

SEQ ID NO: 582673 - DNA, 75 bp, synthetic construct
  source 1..75: mol_type = other DNA
atgacggggcgttgccttttcggcttctcaaccgggaagccgttcttattaccggacaatgaaggggtaaagatg

SEQ ID NO: 582674 - DNA, 75 bp, synthetic construct
  source 1..75: mol_type = other DNA
atgtgtcaggcagcgttccgcggttgccttttcggcttctcaggcgagaagccgttcttattaccggacaatgaa

SEQ ID NO: 582675 - DNA, 75 bp, synthetic construct
  source 1..75: mol_type = other DNA
aagtcacgccctcacagtgggcagcaataggtgtgctgggtagcttggtatttggcctgctgacgtacctgacaa

SEQ ID NO: 582676 - DNA, 75 bp, synthetic construct
  source 1..75: mol_type = other DNA
atgatctggcagcctgagttcacagataaaacactctccaggaaacccggggcggttcagtgggcagcaataggt

SEQ ID NO: 582677 - DNA, 75 bp, synthetic construct
  source 1..75: mol_type = other DNA
cgctgttgattacgttgttacgttggggcacaccggaatcgccgcgctggctgctgcgacaggggcgttttgcag

SEQ ID NO: 582678 - DNA, 75 bp, synthetic construct
  source 1..75: mol_type = other DNA
agggagtctgctgtttgggctgctgacatatctgacgaacctgtatttcaaaatcaaagaggaccggcgtaaggc

SEQ ID NO: 582679 - DNA, 75 bp, synthetic construct
  source 1..75: mol_type = other DNA
gtctgctgtttggcctgctgacgtatctgactaacctgtatttcaaaatcagagaggaccgtcgtaaggcggcgc

SEQ ID NO: 582680 - DNA, 75 bp, synthetic construct
  source 1..75: mol_type = other DNA
actggatacagactcagatgaaaacactgtcgcgtcactcggatacggcaaaagcgttcgcatacctgctgaaac

SEQ ID NO: 582681 - DNA, 75 bp, synthetic construct
  source 1..75: mol_type = other DNA
accggtaaataccgctggcacggcagtgctgagacgtataccggtagtgaagtgcaggatattcccggtgtgctg

SEQ ID NO: 582682 - DNA, 75 bp, synthetic construct
  source 1..75: mol_type = other DNA
tgaaaagtctggcgcgtaaaaatgggtcttcaactgatgagaaggaagacgacctggatctggattttgaaatta

SEQ ID NO: 582683 - DNA, 75 bp, synthetic construct
  source 1..75: mol_type = other DNA
ttatcggcacttgccttctgaacgacattgatccggaagcgtatctgcgccatatactgagcgtactgccggaat

SEQ ID NO: 582684 - DNA, 75 bp, synthetic construct
  source 1..75: mol_type = other DNA
cgggaaaatactgcgaacacctgccactgtatcgtcagagtgaaatctttgcccgacagggtgccgaactgagcc

SEQ ID NO: 582685 - DNA, 75 bp, synthetic construct
  source 1..75: mol_type = other DNA
gtcccggtgctgttgccaggcaataagaaaacaaagaccgggcggttatggacctgcgttcgtgacgaccgtaac

SEQ ID NO: 582686 - DNA, 75 bp, synthetic construct
  source 1..75: mol_type = other DNA
ccggttagccagatattggcactaaccaacgcgaaaccagttatcagccagcgtaccggcaagaacgataaaaca

SEQ ID NO: 582687 - DNA, 75 bp, synthetic construct
  source 1..75: mol_type = other DNA
aaaaaaagcctgtacaaaatgtgactgcatcgttgaagcaccggcgccgtcccgcccgatagaacgaggtatcgc

SEQ ID NO: 582688 - DNA, 75 bp, synthetic construct
  source 1..75: mol_type = other DNA
ttaccgtgatgacggtctggcggaggcggacaataacacagcggaaagagcgcttcgtgcagtctgtctcggaaa

SEQ ID NO: 582689 - DNA, 75 bp, synthetic construct
  source 1..75: mol_type = other DNA
atgttggcggtgatcatgggcctgatgttggccttcgatatgggcggtccggtcaacaaagtggcctatgccttc

SEQ ID NO: 582690 - DNA, 75 bp, synthetic construct
  source 1..75: mol_type = other DNA
cacggcggcgagcgtggagcactgttgtacgggctgatcggcacctgccggttgaatggtatcgatccggaagcg

SEQ ID NO: 582691 - DNA, 75 bp, synthetic construct
  source 1..75: mol_type = other DNA
accggaccatcagggtaaacatccggagcaacaccttcgtcccttccggggtatcctgcaggcagatgcgttcgc

SEQ ID NO: 582692 - DNA, 75 bp, synthetic construct
  source 1..75: mol_type = other DNA
acggtctggcggaggcggacaataacacagcggaaagagcgcttcgtgcagtctgtctcggaaagaaaaattacg

SEQ ID NO: 582693 - DNA, 75 bp, synthetic construct
  source 1..75: mol_type = other DNA
cgcattatcttcccgtcgacctcagaagtttacggaatgtgtagcgataaatacttcgatgaagatcattctaat

SEQ ID NO: 582694 - DNA, 75 bp, synthetic construct
  source 1..75: mol_type = other DNA
ataagctgatgcaggagaaaggtaagcgtgcagcaagaaccgtattgacggggatgtgttattcagtcggcagtg

SEQ ID NO: 582695 - DNA, 75 bp, synthetic construct
  source 1..75: mol_type = other DNA
agcatctgcgggctcagatagaaaaactgcgccggatgctgttcggaacccgttctgaaaactgcgtcgtgaggt

SEQ ID NO: 582696 - DNA, 75 bp, synthetic construct
  source 1..75: mol_type = other DNA
ctgtctgatgacgtacagtcatcatgcctgtcgtacggagtgttatgccatgacggtccattattaccggctgcg

SEQ ID NO: 582697 - DNA, 75 bp, synthetic construct
  source 1..75: mol_type = other DNA
atgaaaatcatcacccgtggcgaagccatgcttattcaccgtcagcatccggcatcccgtctttttccgttctgt

SEQ ID NO: 582698 - DNA, 75 bp, synthetic construct
  source 1..75: mol_type = other DNA
attcccggtgtgctggccgtgtttgctgaacgccgtaaggacagttttggtccgtatgtccggctgatgagcgtc

SEQ ID NO: 582699 - DNA, 75 bp, synthetic construct
  source 1..75: mol_type = other DNA
catgtccctgaaggcgtgattcaggcaccagaatcacccgacgccccggaggcgctgccggggtgtcgttccatt

SEQ ID NO: 582700 - DNA, 75 bp, synthetic construct
  source 1..75: mol_type = other DNA
agcccagacgctggggctggtgcaaggttcacgcttgaatagccagccggtctgcgccgcccgacgccgtacccg

SEQ ID NO: 582701 - DNA, 75 bp, synthetic construct
  source 1..75: mol_type = other DNA
atatccccgttccggtccaggagccgggcagtggtaaaacaagaactgcccggctgtgggtttacgtccgtgatg

SEQ ID NO: 582702 - DNA, 75 bp, synthetic construct
  source 1..75: mol_type = other DNA
tggtatcgaggcgttgtaccgcattatcgaaaatgcgggaaatcgctgcgacggcgaaattatcaacattggcaa

SEQ ID NO: 582703 - DNA, 75 bp, synthetic construct
  source 1..75: mol_type = other DNA
agagaataatccgcctcagttggttgccactcccgtccctgatgaacagcgcatcagcttctggccgcagcattt

SEQ ID NO: 582704 - DNA, 75 bp, synthetic construct
  source 1..75: mol_type = other DNA
gccattgcgccagacgatatcgccattacgctgcatcataaattgtgccatgccgcgcgccagctactggaacag

SEQ ID NO: 582705 - DNA, 75 bp, synthetic construct
  source 1..75: mol_type = other DNA
gtatgtccgggatgaccggaatgcgggctcatcagacaggcagggaaaacatccggtacaacaccttcgtccctt

SEQ ID NO: 582706 - DNA, 75 bp, synthetic construct
  source 1..75: mol_type = other DNA
tggaccgtctgtgcgaagactactgcggaggaatctggaatctgtacaccctgaacaacggcggagcatttatgg

SEQ ID NO: 582707 - DNA, 75 bp, synthetic construct
  source 1..75: mol_type = other DNA
atctgctggtcctggaactggcccgtgaggagtttgattacctttccgctgaagagattgcagaagaaatacgcc

SEQ ID NO: 582708 - DNA, 75 bp, synthetic construct
  source 1..75: mol_type = other DNA
tctactggtcctggaactggcccgtgaggagtttgattactgcaaaatggcatctgaatcgatcgcagtttggca

SEQ ID NO: 582709 - DNA, 75 bp, synthetic construct
  source 1..75: mol_type = other DNA
tggaccgtctgtgcgaagactactgcggaggcatctggaatctgtacaccctgaacaacgggggcgcatttatgg

SEQ ID NO: 582710 - DNA, 75 bp, synthetic construct
  source 1..75: mol_type = other DNA
tggaccgtctgtgcgaagactactgcggaggtatctggaatctgtacaccctgaacaacggtggggcatttatgg

SEQ ID NO: 582711 - DNA, 75 bp, synthetic construct
  source 1..75: mol_type = other DNA
tggaccgtctgtgcgaagactactgcggaggtatctggaatctgtacaccctgaacaacggaggtgcatttatgg

SEQ ID NO: 582712 - DNA, 75 bp, synthetic construct
  source 1..75: mol_type = other DNA
acgctgaccggcggcctgccagaagcgaagaaagaagacgagctgccgttccatgttgtggcttatgattttggt

SEQ ID NO: 582713 - DNA, 75 bp, synthetic construct
  source 1..75: mol_type = other DNA
tgctgcctgtctgatgacgtacagtcatcatgcctgtcgtacggagtgttatgccatgacggtccactattaccg

SEQ ID NO: 582714 - DNA, 75 bp, synthetic construct
  source 1..75: mol_type = other DNA
acaacgtccgaaacgggcctgttgccggtgcgaccatatcgtgcaggctccggtgccttcaaaacccattgcacg

SEQ ID NO: 582715 - DNA, 75 bp, synthetic construct
  source 1..75: mol_type = other DNA
ttcgcctggatggaccgcttctgtgatgagtacagcggtgggatctggtccttttacacgctcagcaatggcggc

SEQ ID NO: 582716 - DNA, 75 bp, synthetic construct
  source 1..75: mol_type = other DNA
cgaaaaaagaagacgagctgccgttccatgtggtggcttatgatttcggcgccaaacgcaatatcctgcgtatgc

SEQ ID NO: 582717 - DNA, 75 bp, synthetic construct
  source 1..75: mol_type = other DNA
tgtacaccctgaacaacggtggggcatttatggcccccgaaccggatgacgatgatgaaacctggatactgttca

SEQ ID NO: 582718 - DNA, 75 bp, synthetic construct
  source 1..75: mol_type = other DNA
gcatcagcttctggccgcagcaatttggcctcattccacagtgggtaaccctggaaccccgtgtcttcggctgga

SEQ ID NO: 582719 - DNA, 75 bp, synthetic construct
  source 1..75: mol_type = other DNA
gttcattattaccgtctgcgggattacgccctgcagcatccggaatgcagcgccattatgcgtatcatcgactga

SEQ ID NO: 582720 - DNA, 75 bp, synthetic construct
  source 1..75: mol_type = other DNA
tggcacccgaaccggatgacgatgatgacgaaacatgggtactgttcaatgccatgaacggtaaccgtgctgaaa

SEQ ID NO: 582721 - DNA, 75 bp, synthetic construct
  source 1..75: mol_type = other DNA
acatcacattaatcgaatgtggctggagaaaatgccggtgccagccatcgtaaccgcggcccggtcgctggccgc

SEQ ID NO: 582722 - DNA, 75 bp, synthetic construct
  source 1..75: mol_type = other DNA
cggtgtctgaacgcctggcggtcaggcaaatgcagagtaaaccgctactgacttccctgtataagctgatgcagg

SEQ ID NO: 582723 - DNA, 75 bp, synthetic construct
  source 1..75: mol_type = other DNA
ctgcaggaaaagctgaacgagcgtgaacgcgaaatagaccatctgcaggcacagctggataatgggagacgcttg

SEQ ID NO: 582724 - DNA, 75 bp, synthetic construct
  source 1..75: mol_type = other DNA
gccatgaacggtaaccgcgctgaaatgagcccggaagccgccggtattgccgcctgtctgatggcgtacagtcat

SEQ ID NO: 582725 - DNA, 75 bp, synthetic construct
  source 1..75: mol_type = other DNA
gcatcagcttctggccgcagcaatttggcctcattccacagtgggtgaccctggagccccgtgtcttcggctgga

SEQ ID NO: 582726 - DNA, 75 bp, synthetic construct
  source 1..75: mol_type = other DNA
gcatcagcttctggccgcagcaatttggcctcattccacagtgggtcaccctggacccccgtgtcttcggctgga

SEQ ID NO: 582727 - DNA, 75 bp, synthetic construct
  source 1..75: mol_type = other DNA
gcatcagcttctggccgcagcaatttggcctcattccacagtgggttaccctggatccccgtgtcttcggctgga

SEQ ID NO: 582728 - DNA, 75 bp, synthetic construct
  source 1..75: mol_type = other DNA
tgacggttcattattaccgtctacgggattacgccctgcagcatccggaatgcagcgccattatgcgcatcattg

SEQ ID NO: 582729 - DNA, 75 bp, synthetic construct
  source 1..75: mol_type = other DNA
gcatcagcttctggccgcagcagtttggcctcattccacagtgggtaaccctggagccccgtgtcttcggctgga

SEQ ID NO: 582730 - DNA, 75 bp, synthetic construct
  source 1..75: mol_type = other DNA
gcatcagcttctggccgcagcactttggcctcattccacagtgggtaaccctggacccccgtgtcttcggctgga

SEQ ID NO: 582731 - DNA, 75 bp, synthetic construct
  source 1..75: mol_type = other DNA
gctcaataatgtcacgattaatgagaactgtcagattctggggaaactgtcagctaatcagattgaaggcgatat

SEQ ID NO: 582732 - DNA, 75 bp, synthetic construct
  source 1..75: mol_type = other DNA
ataataacctgaacagcatgtgggctgtgaagctgcagcagatgcaggacggacgcctttatatcgcgggtatcg

SEQ ID NO: 582733 - DNA, 75 bp, synthetic construct
  source 1..75: mol_type = other DNA
cccgtgccagcgtcaccgtggagggagaagtgacgggcgaaattggcgcgggacttttggtgttattgggtgtcg

SEQ ID NO: 582734 - DNA, 75 bp, synthetic construct
  source 1..75: mol_type = other DNA
attacgaatgtcagcaatgaaatcacgcagaccgtcaataaaaaactggaaaatcagagtgcggcaatccagcag

SEQ ID NO: 582735 - DNA, 75 bp, synthetic construct
  source 1..75: mol_type = other DNA
tcgcaaaaacggtgtattaatcgcatccagagaaactaaaggggccattcccggtagttacagtgcagttattga

SEQ ID NO: 582736 - DNA, 75 bp, synthetic construct
  source 1..75: mol_type = other DNA
tcagcgtgggcgcagaagggcttcgccatgtgccgggcgatgtcattgaaatctgtgatgatgactatgccggta

SEQ ID NO: 582737 - DNA, 75 bp, synthetic construct
  source 1..75: mol_type = other DNA
ctcatttcgcggagatcttcttcccgttgctgcccgcgctgattagcggcggtttgatcctcggttttcgcaatg

SEQ ID NO: 582738 - DNA, 75 bp, synthetic construct
  source 1..75: mol_type = other DNA
aatatcaggtgctggcgcgctgggacacgccgaaggtggtgaagggcgtgagctttatgcttcgcctgaccgtgg

SEQ ID NO: 582739 - DNA, 75 bp, synthetic construct
  source 1..75: mol_type = other DNA
cgccgaaggtggtgaagggcgtgagctttatgcttcgcctgaccgtggcagcggatgacggcagtgagcggctgg

SEQ ID NO: 582740 - DNA, 75 bp, synthetic construct
  source 1..75: mol_type = other DNA
ctgggttgataaactccggcggtgctgcgggcggtgaaactgacctcagcgatgcagtgcgtactgcggttatca

SEQ ID NO: 582741 - DNA, 75 bp, synthetic construct
  source 1..75: mol_type = other DNA
gccgaaggtggtgaagggcgtgagctttatgcttcgcctgaccgtggtcgcggatgacggcagtgagcggctggt

SEQ ID NO: 582742 - DNA, 75 bp, synthetic construct
  source 1..75: mol_type = other DNA
gtacgtggataaaaaagggagtgaaattacctcgaccacggataaaaagctgggtgaccaggccgtgaccataca

SEQ ID NO: 582743 - DNA, 75 bp, synthetic construct
  source 1..75: mol_type = other DNA
ggccagcagatgacggtgaactaccatatccgcggtcgcatcatccaggtgccgtcaaactatgacccggaaaaa

SEQ ID NO: 582744 - DNA, 75 bp, synthetic construct
  source 1..75: mol_type = other DNA
ggtgacattattgaaatctgtgataacgactatgccgggaccctgaccggcggacgtatcctgtccatcgatgcc

SEQ ID NO: 582745 - DNA, 75 bp, synthetic construct
  source 1..75: mol_type = other DNA
cccgattgatctggtgcgttatcagttagctaactgctatatgggccgggctgggttgataaactccggcggtgc

SEQ ID NO: 582746 - DNA, 75 bp, synthetic construct
  source 1..75: mol_type = other DNA
gaaggaccggcacacggcagtggaggtgaattacaccgacccgcagaacggctggcagacctccacggaactggt

SEQ ID NO: 582747 - DNA, 75 bp, synthetic construct
  source 1..75: mol_type = other DNA
aattacggttacaccgacgtaaggcgtttacactgcatccggcaacctatgcctgatgcgacgcggaagcgtctt

SEQ ID NO: 582748 - DNA, 75 bp, synthetic construct
  source 1..75: mol_type = other DNA
aggttcagtccgtcaccgacggacttaaggtgaaagtgaaccgggttcctgacggcgttgccgaatacagcgtgt

SEQ ID NO: 582749 - DNA, 75 bp, synthetic construct
  source 1..75: mol_type = other DNA
agcacggaggaaaacgccaggcagatagcgcaggtccgccagtacgtggatgacaaagggagtgaaatcacctcg

SEQ ID NO: 582750 - DNA, 75 bp, synthetic construct
  source 1..75: mol_type = other DNA
tgaccggcggacgcatcctgtccatggatgccgccagtcgcaccctgacgctggaccgtgaggtgaccctgccgg

SEQ ID NO: 582751 - DNA, 75 bp, synthetic construct
  source 1..75: mol_type = other DNA
cgcatcacgaacacagcacaggtggaaaaatctgcccgttatctggggaccggcagtcagtggactgtccagggg

SEQ ID NO: 582752 - DNA, 75 bp, synthetic construct
  source 1..75: mol_type = other DNA
cgttatggcgaatggcatcggcgttggtggtctgcctggtattctctccattcagccgagctactggcaggtatt

SEQ ID NO: 582753 - DNA, 75 bp, synthetic construct
  source 1..75: mol_type = other DNA
actacgccggaaccctgaccggcgggcgtattctgtccatcgacagcgccagccgtaccctgacgctggaccgtg

SEQ ID NO: 582754 - DNA, 75 bp, synthetic construct
  source 1..75: mol_type = other DNA
cggtgagtatcacgtcatccggcaatcccccgacgttctccctgacgccggagggcaggctgacggcccgcaatg

SEQ ID NO: 582755 - DNA, 75 bp, synthetic construct
  source 1..75: mol_type = other DNA
ctctgctgtttaaaggaagcaggaaggaaaattatggcagtaataatcaacagtcttatgtttattctgtatgcc

SEQ ID NO: 582756 - DNA, 75 bp, synthetic construct
  source 1..75: mol_type = other DNA
aatatcaggtgctggcgcgctgggacacgccgaaggtggtgaagggcgtgagcttcctgcttcgtctgaccgtga

SEQ ID NO: 582757 - DNA, 75 bp, synthetic construct
  source 1..75: mol_type = other DNA
ggtacgtcacctgatgaccggcagctttgcacctattggcgcagcattgtttggcttcctgtacgccccgctggt

SEQ ID NO: 582758 - DNA, 75 bp, synthetic construct
  source 1..75: mol_type = other DNA
gacgatcagccttttgaccggcaaattgttattccggcggtggcattcagcggtgctaaacatgagcgggaacat

SEQ ID NO: 582759 - DNA, 75 bp, synthetic construct
  source 1..75: mol_type = other DNA
ccaatgtgggtgattactatcaagcactgattgcgtcaaccggacaggcgcaggttgataaagagcaggtaaaaa

SEQ ID NO: 582760 - DNA, 75 bp, synthetic construct
  source 1..75: mol_type = other DNA
aagcgggttgcggatatcaggcaggttgaaactacagcccgctatcttggcacggcgctgtactggatagctgcc

SEQ ID NO: 582761 - DNA, 75 bp, synthetic construct
  source 1..75: mol_type = other DNA
ctgtatgtcatcggccagtattgcgatcagtcagtgccggatggctttggtggtacggagccgcgcatcacctgt

SEQ ID NO: 582762 - DNA, 75 bp, synthetic construct
  source 1..75: mol_type = other DNA
tgacaccggacgggcggctgacggcgagaaatgctgatatcagcggtaacgttaatgcgaattctgggacgctca

SEQ ID NO: 582763 - DNA, 75 bp, synthetic construct
  source 1..75: mol_type = other DNA
ctggacaccaacaaccagtatcagcgatctgctggttgtggtgatgaagaaagccaccgcaggcatcagtatcag

SEQ ID NO: 582764 - DNA, 75 bp, synthetic construct
  source 1..75: mol_type = other DNA
ggtcaggagatttttaatcagtccacgacggatgctcagggcgtattttcctcagttatagatatgcctgccgga

SEQ ID NO: 582765 - DNA, 75 bp, synthetic construct
  source 1..75: mol_type = other DNA
tgatatcagcggtaacgtgaatgcgaattccgggacgctcaacaacgtcacgattaatcagaactgccggatcct

SEQ ID NO: 582766 - DNA, 75 bp, synthetic construct
  source 1..75: mol_type = other DNA
acgactatgccgggaccctgaccggcggacgtatcctgtccatcgatgccgccagccgtaccctgacactggacc

SEQ ID NO: 582767 - DNA, 75 bp, synthetic construct
  source 1..75: mol_type = other DNA
gatcaccggcgtacaccagaccacgcttgctattgatttgcagatgattcaaagcatgggtggcacgccagtgtg

SEQ ID NO: 582768 - DNA, 75 bp, synthetic construct
  source 1..75: mol_type = other DNA
atgaccagagataaaatcatttttatcgcaccattattggcattgttaactgggtgtaattcggttagctcacgg

SEQ ID NO: 582769 - DNA, 75 bp, synthetic construct
  source 1..75: mol_type = other DNA
tctgcgcctgaccagcggaagcggagaagacagccgtctggtgaccaccgccatcactgcggatacagagcatcg

SEQ ID NO: 582770 - DNA, 75 bp, synthetic construct
  source 1..75: mol_type = other DNA
atagatatgccggcagggcggggtcatgtcaccctgacgtttaatgtgtcgtcggccggtgcgaacaactggacg

SEQ ID NO: 582771 - DNA, 75 bp, synthetic construct
  source 1..75: mol_type = other DNA
tacagcttcagcgccctgaaggaccgccacacggcggtggaggtgaattacaccgacccgcagaacggctggtag

SEQ ID NO: 582772 - DNA, 75 bp, synthetic construct
  source 1..75: mol_type = other DNA
agacagcggacagcacctcggaccagctgcagaataagacgctctggtcgtcatacaccgaaatcatcgatgtga

SEQ ID NO: 582773 - DNA, 75 bp, synthetic construct
  source 1..75: mol_type = other DNA
caggttgaaacctccgcccgctatcttggcacggcgctgtactggacagccgccagtaatatcaggccgggccat

SEQ ID NO: 582774 - DNA, 75 bp, synthetic construct
  source 1..75: mol_type = other DNA
aacggcgtggggttccgctacagcttcagtgccctgaaggaccggcacacggcggtggaggtgaattacaccgac

SEQ ID NO: 582775 - DNA, 75 bp, synthetic construct
  source 1..75: mol_type = other DNA
caaatgggcgctgtatgccatcgggcagtactgtgaccagcgtgtaccagacggcttcggaggaacagagccgcg

SEQ ID NO: 582776 - DNA, 75 bp, synthetic construct
  source 1..75: mol_type = other DNA
gctcaacaacgtcacgattaacgagaactgccgggttctgggaaaactgtccgcgaaccagattgaaggcgatct

SEQ ID NO: 582777 - DNA, 75 bp, synthetic construct
  source 1..75: mol_type = other DNA
gatttctggttttatgtgcgcagcgtcaacctggtggggaaatctgcttttgtggaggccagcggacgggccagc

SEQ ID NO: 582778 - DNA, 75 bp, synthetic construct
  source 1..75: mol_type = other DNA
caccgtttcagtggcctgccactgggggaatacaccctgacggtgcgggcgataaacagttatggccagcagggt

SEQ ID NO: 582779 - DNA, 75 bp, synthetic construct
  source 1..75: mol_type = other DNA
gacgtgttcctgaagcgactgtttgcggtgagcatcacgtcatccggcaatcctcctacgttttccctgacgccg

SEQ ID NO: 582780 - DNA, 75 bp, synthetic construct
  source 1..75: mol_type = other DNA
acggcattccctatgtggccgggattggtgcagggattgaggatactgatggccagccactgagcaacatactgc

SEQ ID NO: 582781 - DNA, 75 bp, synthetic construct
  source 1..75: mol_type = other DNA
gtattgagaatacgccagcaggaatgcagagtcaggtgctgctggcggcagacaggattgcgatgattaatcctg

SEQ ID NO: 582782 - DNA, 75 bp, synthetic construct
  source 1..75: mol_type = other DNA
tgagttctggttctcggaaaagcggattgcggatatcaggcaggttgaaaccgcagcccgctatcttggctcggc

SEQ ID NO: 582783 - DNA, 75 bp, synthetic construct
  source 1..75: mol_type = other DNA
attgcgatgattaatcctgcaaatggcaacacaaaaccgatgtttgttggtcagggtgatcagatattcatgaat

SEQ ID NO: 582784 - DNA, 75 bp, synthetic construct
  source 1..75: mol_type = other DNA
tggaggatacggaggaaggcaaactgagccagttcctggttgccgctaaccgtatcgcgtttattgaaccgtcta

SEQ ID NO: 582785 - DNA, 75 bp, synthetic construct
  source 1..75: mol_type = other DNA
gtacaataacggtcactgtgtacgatgatcaggcttttgaccgtcagatagtaatcccacccgttctgtttcgcg

SEQ ID NO: 582786 - DNA, 75 bp, synthetic construct
  source 1..75: mol_type = other DNA
gtgaactggactgacccggacaacggctgggagacggcaacagagcttgtggaggacacgcaggccattgcccgt

SEQ ID NO: 582787 - DNA, 75 bp, synthetic construct
  source 1..75: mol_type = other DNA
ggaagtgaaatacgacacgccgatcatccggaccatcacgtctgcaaacatcgaccgtctgcgttttaccttcgg

SEQ ID NO: 582788 - DNA, 75 bp, synthetic construct
  source 1..75: mol_type = other DNA
catctggcggcaaccataggtgcagatatcgtcaaacaaaaaatggcggaaaataacggcggctataaagcaatt

SEQ ID NO: 582789 - DNA, 75 bp, synthetic construct
  source 1..75: mol_type = other DNA
cgtcagggtttatgacgatcagccgtttgaccggcagattgttattccggcggtggcattcagtggcgctaaaca

SEQ ID NO: 582790 - DNA, 75 bp, synthetic construct
  source 1..75: mol_type = other DNA
ctgtatgtcatcggccagtgtgcgatcagtcggtgccggatggctttggtggcacggagccgcgcatcacctgta

SEQ ID NO: 582791 - DNA, 75 bp, synthetic construct
  source 1..75: mol_type = other DNA
gaaggtaaaagtgagccgggttcctgatggcgttgccgagtacagcgtgtgggggctgaagctgccgacgctgcg

SEQ ID NO: 582792 - DNA, 75 bp, synthetic construct
  source 1..75: mol_type = other DNA
caccaacaaccagtatcagcgatctgctggttgtggtgatgaaaaaatccacagcaggtatcagtatcagctgca

SEQ ID NO: 582793 - DNA, 75 bp, synthetic construct
  source 1..75: mol_type = other DNA
tcactgtgtacgatgaccaggcttttgaccgtcagatagtaatcccccccgttctgtttcgcggtggtaagcatg

SEQ ID NO: 582794 - DNA, 75 bp, synthetic construct
  source 1..75: mol_type = other DNA
tggcacggagccgcgcatcacctgtaacgcttacctgaccacgcagcgtaaggcgtgggatgttctcagcgattt

SEQ ID NO: 582795 - DNA, 75 bp, synthetic construct
  source 1..75: mol_type = other DNA
gatcagccgtttgaccggcagattgttattcctgcggtggcattcagcggcgctaaacatgagagagagcatact

SEQ ID NO: 582796 - DNA, 75 bp, synthetic construct
  source 1..75: mol_type = other DNA
gagcacttatgccagtggcaccatcacggtaagaatcagtgatgatcagaagtttgaccggcaggtcatgatacc

SEQ ID NO: 582797 - DNA, 75 bp, synthetic construct
  source 1..75: mol_type = other DNA
gccagcgtggagcaggcgttcaacatgggcgcggtggcggttggtgcgactatctattttggctcggaagagtca

SEQ ID NO: 582798 - DNA, 75 bp, synthetic construct
  source 1..75: mol_type = other DNA
atcctgcgaatggcaatacaaagccgatgtttgttggtcagggcgatcagatatttatgaatgaagtgttcctga

SEQ ID NO: 582799 - DNA, 75 bp, synthetic construct
  source 1..75: mol_type = other DNA
tgacccgaaaaacattgttgaactggcgatcgaagcgggctgtaactgtgtggcgtcaacttacggcgtgctggc

SEQ ID NO: 582800 - DNA, 75 bp, synthetic construct
  source 1..75: mol_type = other DNA
ccgctgatggacacggacggtaatcccgtgatacacggtgtgactgcggtctggcgtgccggggagcaggagcag

SEQ ID NO: 582801 - DNA, 75 bp, synthetic construct
  source 1..75: mol_type = other DNA
aacggggcgcactttgacggcgaccagagcggcacggtgaatggtgtcactccgccagcagtgcaacacctgacc

SEQ ID NO: 582802 - DNA, 75 bp, synthetic construct
  source 1..75: mol_type = other DNA
gacggcgttgcagaatacagcgtgtgggggctgaagctgccgacgctgcgccagcgcctgttccgctgcgtgagt

SEQ ID NO: 582803 - DNA, 75 bp, synthetic construct
  source 1..75: mol_type = other DNA
caggacagccgtctggtgaccaccgccatcactgcggatacagagcatcgtttcagtggtctgccgctcggggaa

SEQ ID NO: 582804 - DNA, 75 bp, synthetic construct
  source 1..75: mol_type = other DNA
ttacggaccgaaaggtcaaggagaagcaggctatgaagcagcaaaaggcgatgttagtcgccctgatcgtcatct

SEQ ID NO: 582805 - DNA, 75 bp, synthetic construct
  source 1..75: mol_type = other DNA
ggtaacgaggaaagacctctgcgaggtgcgaatccgaaccggtcagacggaggtcgctgtcttcgtagcttacga

SEQ ID NO: 582806 - DNA, 75 bp, synthetic construct
  source 1..75: mol_type = other DNA
aacggggccagctttgagccgcagtcaggttccctgaacagcgttattccaccggcagtgcagcacctgacggtg

SEQ ID NO: 582807 - DNA, 75 bp, synthetic construct
  source 1..75: mol_type = other DNA
acctatgttctcggaatggcaaacgctgatgagtcgagtatcgtgtctaccaattatagcgtgtcatcaggtatt

SEQ ID NO: 582808 - DNA, 75 bp, synthetic construct
  source 1..75: mol_type = other DNA
cgaactggttgaacctcatggcaagtgtgtagagctggcgctagtgccgcactttatcaaaagaaagcccaaaaa

SEQ ID NO: 582809 - DNA, 75 bp, synthetic construct
  source 1..75: mol_type = other DNA
aaagacttctgcgaggtacaaatccgaaccggtcagacggaggtcgctgtcttcacagcttacgaacctgaggag

SEQ ID NO: 582810 - DNA, 75 bp, synthetic construct
  source 1..75: mol_type = other DNA
atgaagcagcaaaaggcgatgttaatcgccctgatcgtcatctgtttaaccgtcatagtgacggcgctggtaacg

SEQ ID NO: 582811 - DNA, 75 bp, synthetic construct
  source 1..75: mol_type = other DNA
aggtcgctgtcttcacagcttacgaacctgaggagttagagaccaggcgagggagaaatccctcgccacctctga

SEQ ID NO: 582812 - DNA, 75 bp, synthetic construct
  source 1..75: mol_type = other DNA
atgttaatcgccctgatcgtcatctgtatcaccgtcatagtgacggcactggtaacgaggaaagacctctgcgag

SEQ ID NO: 582813 - DNA, 75 bp, synthetic construct
  source 1..75: mol_type = other DNA
gtttaaccgtcatagtgacggcactggtaacgaggaaagacctttgcgaggtacgaattcgaaccggccagacgg

SEQ ID NO: 582814 - DNA, 75 bp, synthetic construct
  source 1..75: mol_type = other DNA
atctgtttaaccgtcatagtgacggcactggtaacgaggaaagacctctgcgaggtacgaatccgaaccggccag

SEQ ID NO: 582815 - DNA, 75 bp, synthetic construct
  source 1..75: mol_type = other DNA
gccgcgggtggtgaagggtgtgcgcttcagtctgcgcctgaccaacggaagcggagaagacagccgtctggtgac

SEQ ID NO: 582816 - DNA, 75 bp, synthetic construct
  source 1..75: mol_type = other DNA
ccctgacgccggagggcaggctgacggcccgcaatgcggacatcagcggacatatcagtgcgaactcgggcacgc

SEQ ID NO: 582817 - DNA, 75 bp, synthetic construct
  source 1..75: mol_type = other DNA
tgaattctggttctcagaaaaacgcatcacgaacacggcacaggtggaaacctctgcccgttatctgggtagcgg

SEQ ID NO: 582818 - DNA, 75 bp, synthetic construct
  source 1..75: mol_type = other DNA
ggtgacatcattgaaatctgtgataacgactatgccgggaccctgaccggcggacgtgtcctgtccatcgatgct

SEQ ID NO: 582819 - DNA, 75 bp, synthetic construct
  source 1..75: mol_type = other DNA
tggtgggtaaatggctggtatcccacagcaagtatcagcgatttgctggttgtggtgatgaagaaagccaccgca

SEQ ID NO: 582820 - DNA, 75 bp, synthetic construct
  source 1..75: mol_type = other DNA
ccttaataaagaaactagaatttatacatctgaatacgagtttacagatgctttaaaagactttggacaaaacag

SEQ ID NO: 582821 - DNA, 75 bp, synthetic construct
  source 1..75: mol_type = other DNA
aacagtgctacccgaacacggcgattgtggggttgcaggtggatgcggagcagttcggcggccagcagatgacgg

SEQ ID NO: 582822 - DNA, 75 bp, synthetic construct
  source 1..75: mol_type = other DNA
gatggcaggctggcagcccgcaatgcggatatcagtggagccatcacggcgaataccggcacgctcaataatgtc

SEQ ID NO: 582823 - DNA, 75 bp, synthetic construct
  source 1..75: mol_type = other DNA
ttgataatgacaatcaaccaaatgaagaacgaattgaaaggaaaaaggcaaatgttctccgtgaaatatctctga

SEQ ID NO: 582824 - DNA, 75 bp, synthetic construct
  source 1..75: mol_type = other DNA
cagttctgttatataggctaagcacagtctctttggatgaggtatcacttgatgagagagtggagtcatctgtat

SEQ ID NO: 582825 - DNA, 75 bp, synthetic construct
  source 1..75: mol_type = other DNA
acctttattcttggggggaggggatgtatcctgccaaaaacctgaaagctgaaaacacttcagactggaaagata

SEQ ID NO: 582826 - DNA, 75 bp, synthetic construct
  source 1..75: mol_type = other DNA
atcagcgatgatcataactttgaccgtcaaatcattattccgcccattatctttaacggaatagcgtatagctat

SEQ ID NO: 582827 - DNA, 75 bp, synthetic construct
  source 1..75: mol_type = other DNA
attcattcatattccagatcaaaacccttcataaggaaactggaatttatacatccgaatatgagtttacagatg

SEQ ID NO: 582828 - DNA, 75 bp, synthetic construct
  source 1..75: mol_type = other DNA
atgaagcagcgaaaggcgatgttaatcgccctgatcgtcatctgtttaaccgtcatagtgacggcactggtaacg

SEQ ID NO: 582829 - DNA, 75 bp, synthetic construct
  source 1..75: mol_type = other DNA
caacaaatgaccagaacacggcattacagcgtaatgcgctggaatgtgcaggatgtgagctgatttttgaagaca

SEQ ID NO: 582830 - DNA, 75 bp, synthetic construct
  source 1..75: mol_type = other DNA
tatcaacaatcgaccagaacagcgatttacagcgtaatgccctcacaagcgcaaactgtgaccgcatttttgaag

SEQ ID NO: 582831 - DNA, 75 bp, synthetic construct
  source 1..75: mol_type = other DNA
gtaaccgtccagaaagacatatcagggatttggttttccccgttgcccacattccgttttgccgcttctcccaaa

SEQ ID NO: 582832 - DNA, 75 bp, synthetic construct
  source 1..75: mol_type = other DNA
actgatagttgaacgtaccagggcggggattgctgcagctcgcgacaaaggcagagtaggtggacgtcgtcctaa

SEQ ID NO: 582833 - DNA, 75 bp, synthetic construct
  source 1..75: mol_type = other DNA
gggctggctgcagctcgtgccaaaggcagagtaggtgggcgtcgtcctaagttgaccaccgaacagtgggcacag

SEQ ID NO: 582834 - DNA, 75 bp, synthetic construct
  source 1..75: mol_type = other DNA
cagcatagatacttcatcgccaatggggcgcttcttttttcatgttatgggggcattggccgagatggaacgtga

SEQ ID NO: 582835 - DNA, 75 bp, synthetic construct
  source 1..75: mol_type = other DNA
gtgtccgacagaccaggattaaaaaaagtgctcaggacgctatcagaaggcgatacgctggtggtatggaagctg

SEQ ID NO: 582836 - DNA, 75 bp, synthetic construct
  source 1..75: mol_type = other DNA
caacaaatgaccagaacactgcattgcagagaaatgcacttgatagcgcaggatgtgagctgattttcgaagata

SEQ ID NO: 582837 - DNA, 75 bp, synthetic construct
  source 1..75: mol_type = other DNA
tgctgcgggctatggctttatttatggattatggccaattgcgtggattattgtcgcggcggtgttcctgtataa

SEQ ID NO: 582838 - DNA, 75 bp, synthetic construct
  source 1..75: mol_type = other DNA
ttgcccgttacccacatcccgttttgccgcttctcccaaaccaacgtttatgaaaatgcagagataacgggcaac

SEQ ID NO: 582839 - DNA, 75 bp, synthetic construct
  source 1..75: mol_type = other DNA
cagagcctggatgaggcgatgaccgacccgaacgttcatgccgtattgatcgcctccgcgaccgacacccacgcg

SEQ ID NO: 582840 - DNA, 75 bp, synthetic construct
  source 1..75: mol_type = other DNA
tgctgcaggtgagtctagaaaacgtgtggctataatttatgatgtaggggtgtcgacgctatacaaaaaatttcc

SEQ ID NO: 582841 - DNA, 75 bp, synthetic construct
  source 1..75: mol_type = other DNA
gggcgctttttctttcatgtgatgggggccctggctgaaatggaacgagaactgattgttgaacgaacaaaagct

SEQ ID NO: 582842 - DNA, 75 bp, synthetic construct
  source 1..75: mol_type = other DNA
tcagctgtggatagtgctttagttttagcaaaaacctatcaaaaactgccaacgtcaatgcaacatgatctagat

SEQ ID NO: 582843 - DNA, 75 bp, synthetic construct
  source 1..75: mol_type = other DNA
cctggccgctacctgagtctggtcgcactcgacaatgtaacgtttgaacaggtccataaaattagtgagatccta

SEQ ID NO: 582844 - DNA, 75 bp, synthetic construct
  source 1..75: mol_type = other DNA
gcgtgtcaacaaatgaccagaacacggaattgcagagtaatgcgctggagtgtgcaggatgtgagctgatttttg

SEQ ID NO: 582845 - DNA, 75 bp, synthetic construct
  source 1..75: mol_type = other DNA
tcgccccgatcgtcatctgtttaagcgtcatagtgacggcactggtaacgaggaaaggcctctgcgaggtacgga

SEQ ID NO: 582846 - DNA, 75 bp, synthetic construct
  source 1..75: mol_type = other DNA
cccttacttatccggaggcaattgcaatatctctgtgaacttacacaggagaagcaggctatgaagcagcaaaag

SEQ ID NO: 582847 - DNA, 75 bp, synthetic construct
  source 1..75: mol_type = other DNA
cagctattctgatggacatgctgaagtctgaaccgcgtctgacaggctggattcgaggagtagatgccgcagcta

SEQ ID NO: 582848 - DNA, 75 bp, synthetic construct
  source 1..75: mol_type = other DNA
cgagttcgagcgggatctgatccgagagcgcaccatggcgggtctcgcctccgcgagagcgcgcggtcgcaaggg

SEQ ID NO: 582849 - DNA, 75 bp, synthetic construct
  source 1..75: mol_type = other DNA
actgatttttgaaagaacaaaagccgggctggaagctgctcgtgtacagggacgaattggtggacgtcgtcccaa

SEQ ID NO: 582850 - DNA, 75 bp, synthetic construct
  source 1..75: mol_type = other DNA
acttacaccagaacaatgggcgcaggccgggcgattaattgcatcaggcgttcctcgccaaaaggtggcgatcat

SEQ ID NO: 582851 - DNA, 75 bp, synthetic construct
  source 1..75: mol_type = other DNA
ttttgatattggcctgtccacgctctataaaaaatttccctcatcagcgataaagaataaattgtgtcatccctt

SEQ ID NO: 582852 - DNA, 75 bp, synthetic construct
  source 1..75: mol_type = other DNA
gtgccctggctgaaatggaacgtgaattaattgttgaacgtacactggccggactggcagcagcgcgcgcacggg

SEQ ID NO: 582853 - DNA, 75 bp, synthetic construct
  source 1..75: mol_type = other DNA
ggatgtgagcgaatttttgaggataaaatcagtggcactaagtccgacagaccagggttgaaaaaactgctcagg

SEQ ID NO: 582854 - DNA, 75 bp, synthetic construct
  source 1..75: mol_type = other DNA
tggaggatacggaggaaggcaaactgagccagttcctggttgccgctaaccgtatcgcgtttattgacccggcaa

SEQ ID NO: 582855 - DNA, 75 bp, synthetic construct
  source 1..75: mol_type = other DNA
tgcggcagatgtggataaatgggcactgtatgtcatcggtcagtactgcgaccagttggtgccggacggctctgg

SEQ ID NO: 582856 - DNA, 75 bp, synthetic construct
  source 1..75: mol_type = other DNA
gtgaactggactgacccgaacaacggctgggaaacggcaacagagcttgtggaggacacgcaggccattgcccgt

SEQ ID NO: 582857 - DNA, 75 bp, synthetic construct
  source 1..75: mol_type = other DNA
gtgaaagccgccctgtggccccgaatgacacggcggaaggtcgtgcgcgtaaccgccgtgttgaaatcagtctgg

SEQ ID NO: 582858 - DNA, 75 bp, synthetic construct
  source 1..75: mol_type = other DNA
cagtatgacggggcaaaatatttataccctagttcatttgctcttgatgatgataataatatttatattcagtat

SEQ ID NO: 582859 - DNA, 75 bp, synthetic construct
  source 1..75: mol_type = other DNA
gtggccatcaggaaccattaccgtcagggtttatgacgatcagccgtttgaccggcagattgttattccggcggt

SEQ ID NO: 582860 - DNA, 75 bp, synthetic construct
  source 1..75: mol_type = other DNA
gcttggcgtaacgctggtttctccacaactgatgaacgcctatctactcgggcagcaggtgccggaagtgtggga

SEQ ID NO: 582861 - DNA, 75 bp, synthetic construct
  source 1..75: mol_type = other DNA
atacagaaagttcaggttgatacaaataataacctgaacagcatgtgggccgtgaaactgcagcagatgaaggac

SEQ ID NO: 582862 - DNA, 75 bp, synthetic construct
  source 1..75: mol_type = other DNA
agcctgctatgtacggcatcaacctgaaatatcgcttcccgatgctgtgcgcgatgattggttctggtctggcag

SEQ ID NO: 582863 - DNA, 75 bp, synthetic construct
  source 1..75: mol_type = other DNA
gtgaaagtgaaccgggttcctgacggcgttgcagaatacagtgtgtgggggctgaagctgccgacgctgcgccag

SEQ ID NO: 582864 - DNA, 75 bp, synthetic construct
  source 1..75: mol_type = other DNA
gatcaccggggtacaccagaccacgcttgctattgatttgcagagattcaaagcatgggtggtacgccagtgtgg

SEQ ID NO: 582865 - DNA, 75 bp, synthetic construct
  source 1..75: mol_type = other DNA
gaacggcgttatggcgaatggcatcggcgtaggcggcctgccgggaattctctcgattcaaccgagctactggca

SEQ ID NO: 582866 - DNA, 75 bp, synthetic construct
  source 1..75: mol_type = other DNA
gaccggcagattatcattcccccggtgctgtttcgcgggacgaaacaccagaatttcaacagcccgaatcagcag

SEQ ID NO: 582867 - DNA, 75 bp, synthetic construct
  source 1..75: mol_type = other DNA
gagggaaactgtctgcaaaccagattgaaggcgacctggtgaagacggtggggaaagcctttccccggaataaca

SEQ ID NO: 582868 - DNA, 75 bp, synthetic construct
  source 1..75: mol_type = other DNA
cgagaaatagcagttatgccagcggtacaataacggtcacggtgtacgatgaccaggcttttgaccgtcagatag

SEQ ID NO: 582869 - DNA, 75 bp, synthetic construct
  source 1..75: mol_type = other DNA
aaatacccgacagatagcacaggtccgccagtacgtggacaaaaagcaaagtgaaatcaagcagacagtcagcca

SEQ ID NO: 582870 - DNA, 75 bp, synthetic construct
  source 1..75: mol_type = other DNA
acacgcaccatcacgtcagcgaacattgaccgcctgcgggtgaccttcggggtgcagtcactggtggagaccacg

SEQ ID NO: 582871 - DNA, 75 bp, synthetic construct
  source 1..75: mol_type = other DNA
cacctgcggcgagatcgtgctgaccagtgatttctacgcctacgacaccaagtacattgatgaagatggcgcgaa

SEQ ID NO: 582872 - DNA, 75 bp, synthetic construct
  source 1..75: mol_type = other DNA
caactgtatgccctgcgcatcaaattaagcaacccagctgaatggattgtcttaccggaagttatctctaaagaa

SEQ ID NO: 582873 - DNA, 75 bp, synthetic construct
  source 1..75: mol_type = other DNA
ttattccggcggtggcattcagcggcgctaaacatgagagagagcatactgatatttactcctcatgccgtctga

SEQ ID NO: 582874 - DNA, 75 bp, synthetic construct
  source 1..75: mol_type = other DNA
gcgatgacgaatggttttctattgtgcgctggaccctgttcgccatgctgaatgctgaagagatgggcgttaatt

SEQ ID NO: 582875 - DNA, 75 bp, synthetic construct
  source 1..75: mol_type = other DNA
ggtccgccagtacgtggataaaaaagggagtgaaattacctcgaccacggataaaaagctgggtgaccaggccgt

SEQ ID NO: 582876 - DNA, 75 bp, synthetic construct
  source 1..75: mol_type = other DNA
caacagtaataaccaacagtcatactggtattcaacctgccggttaagagtgacccgcaatggtcaggagatttt

SEQ ID NO: 582877 - DNA, 75 bp, synthetic construct
  source 1..75: mol_type = other DNA
ggcgtgagcttcctgctccgtctgaccgtgacagcggatgacggcagtgagcggctggtcagcacagcccggacg

SEQ ID NO: 582878 - DNA, 75 bp, synthetic construct
  source 1..75: mol_type = other DNA
tcacagacacgcgacagaacgaacggttactgtcattgatgatcagtcgtttgaccggaacattgttatcccgcc

SEQ ID NO: 582879 - DNA, 75 bp, synthetic construct
  source 1..75: mol_type = other DNA
ccggggcagaaaccgcactgggcgtggaggtgacgaaggcaaagccggtgacgcgcaccatcacgtcagcgaaca

SEQ ID NO: 582880 - DNA, 75 bp, synthetic construct
  source 1..75: mol_type = other DNA
ctgctaaaaatgcggatatcagtggcagtgtgaatgcgaacgccggggcgctcaacaacgtcacgattaatgaga

SEQ ID NO: 582881 - DNA, 75 bp, synthetic construct
  source 1..75: mol_type = other DNA
cgctgggcgaagatggttccttgcagggaatgctgcgggtcgccaatttaccgtttgtaggttctgatgttctgg

SEQ ID NO: 582882 - DNA, 75 bp, synthetic construct
  source 1..75: mol_type = other DNA
cgtgaatgcgaactccgggacgctcaacaacgtcacgattaacgagaactgtcgggttctgggaaaactgtccgc

SEQ ID NO: 582883 - DNA, 75 bp, synthetic construct
  source 1..75: mol_type = other DNA
catcgtttcagtggtctgccgctcggggaatacaccctgacggtcagggcgattaacagttatggccagcagggg

SEQ ID NO: 582884 - DNA, 75 bp, synthetic construct
  source 1..75: mol_type = other DNA
agaactggtggaagacccggaagccatactgcgctacggacgcaacctgctgaagatggacgcgttcggctgtac

SEQ ID NO: 582885 - DNA, 75 bp, synthetic construct
  source 1..75: mol_type = other DNA
caacatcagttttgccgaagtggagtctaaactggggttaccactgtttgtaaaaccggctaatcagggctcttc

SEQ ID NO: 582886 - DNA, 75 bp, synthetic construct
  source 1..75: mol_type = other DNA
gtgaacctgattaacggcagcggtaagccggtgagcgtggccatcactgcacaccccgcgccggaccggatacag

SEQ ID NO: 582887 - DNA, 75 bp, synthetic construct
  source 1..75: mol_type = other DNA
tgcagtttgaattctggttctcagaaaaacgcatcacgaacacagcacaggtggaaaaatctgcccgttatctgg

SEQ ID NO: 582888 - DNA, 75 bp, synthetic construct
  source 1..75: mol_type = other DNA
tgaccggcaggtcatgatacctccagtgttattccgcggtggtaagcatgagaatttcaacagtaataaccaaca

SEQ ID NO: 582889 - DNA, 75 bp, synthetic construct
  source 1..75: mol_type = other DNA
ggaagtgaaatatgacacaccgatcaccaggaccatcacgtcggcaaacatcgatcgtctgcgctttactttcgg

SEQ ID NO: 582890 - DNA, 75 bp, synthetic construct
  source 1..75: mol_type = other DNA
acttttatatccgcagcgtgaacaccgttggtaaatcggcatttgtggaggccgttggtcgggcgagcgatgatg

SEQ ID NO: 582891 - DNA, 75 bp, synthetic construct
  source 1..75: mol_type = other DNA
gagaacggcaacaccacgccgctgtttgtggcgcaggggaatcagctgttcatgaacgacgtgttcctgaagcga

SEQ ID NO: 582892 - DNA, 75 bp, synthetic construct
  source 1..75: mol_type = other DNA
tggtatcccacagcaagtatcagcgatttgctggttgtggtgatgaagaaatccacagcaggcatcagtatcagc

SEQ ID NO: 582893 - DNA, 75 bp, synthetic construct
  source 1..75: mol_type = other DNA
ctgattaaaactgaactgctggagacgcagaccgtggatttcagcgtaggagctgaagggcttcgccatgtaccg

SEQ ID NO: 582894 - DNA, 75 bp, synthetic construct
  source 1..75: mol_type = other DNA
ctgattaaaactgaactgctggagacgcagaccgtggatttcagcgtgggggctgaagggcttcgccatgtaccg

SEQ ID NO: 582895 - DNA, 75 bp, synthetic construct
  source 1..75: mol_type = other DNA
ctgattaaaactgaactgctggagacgcagaccgtggatttcagcgttggtgctgaagggcttcgccatgtaccg

SEQ ID NO: 582896 - DNA, 75 bp, synthetic construct
  source 1..75: mol_type = other DNA
tgaacaccgtcggcaaatcagcattcgtggaggctgtcggtcggcgagcgatgatgcgaaggttacctggatttt

SEQ ID NO: 582897 - DNA, 75 bp, synthetic construct
  source 1..75: mol_type = other DNA
gcaacatactgctgctggctgaccgtatcgcgatgataaatccggagagcggcaacagcacgccgttatttgtgg

SEQ ID NO: 582898 - DNA, 75 bp, synthetic construct
  source 1..75: mol_type = other DNA
ttgctgcacgcttacgattttttcaaaggagaaatcgggaaaacacatctggcccaggagctgtggacgcagatt

SEQ ID NO: 582899 - DNA, 75 bp, synthetic construct
  source 1..75: mol_type = other DNA
aaaacgcatcacgaacacagcacaggtggaaaaatctgcccgttatctggggaccggcagtcagtggactgtcca

SEQ ID NO: 582900 - DNA, 75 bp, synthetic construct
  source 1..75: mol_type = other DNA
tgacagccaggaacgcggatatcagcggagcaattaccgcgaataccggcacgctcaataatgtcaccattaacg

SEQ ID NO: 582901 - DNA, 75 bp, synthetic construct
  source 1..75: mol_type = other DNA
ccggcgctgaaaccggactgggcgtggaagtgacgaaggcaaaaccggtgacgcgcaccattacgtccgcgaaca

SEQ ID NO: 582902 - DNA, 75 bp, synthetic construct
  source 1..75: mol_type = other DNA
cgctcggggaatacaccctgacagtcagggcaattaacagttatggccagcagggcgaaccggccaccaccacct

SEQ ID NO: 582903 - DNA, 75 bp, synthetic construct
  source 1..75: mol_type = other DNA
ccttcccgaaaaaagtcggtacgtggggtaacacggaaacaccaaacggtacggttacagtaaccatcagcgatg

SEQ ID NO: 582904 - DNA, 75 bp, synthetic construct
  source 1..75: mol_type = other DNA
ctgtatgtcatcggccagtattgcgaccagtcggtgccggatggctttggtggcacggagccgcgcatcacctgt

SEQ ID NO: 582905 - DNA, 75 bp, synthetic construct
  source 1..75: mol_type = other DNA
gcagatgcaggatggtcgcctttatattgcgggtatcggtgccggtattgagaacacccccgacggcatgcagag

SEQ ID NO: 582906 - DNA, 75 bp, synthetic construct
  source 1..75: mol_type = other DNA
tgaaggcgatattgtcaaaacggtcagcaagtctttcccccgcacgaacagttatgccagtggcaccatcacggt

SEQ ID NO: 582907 - DNA, 75 bp, synthetic construct
  source 1..75: mol_type = other DNA
gctggcagacctccactgaactggtggaagacccggaagccatactgcgctacggacgcaatctgctgaagatgg

SEQ ID NO: 582908 - DNA, 75 bp, synthetic construct
  source 1..75: mol_type = other DNA
agtgatgatcagaagtttgaccggcaggtcatgataccgccagtgttattccgcggtggtaagcatgagaatttc

SEQ ID NO: 582909 - DNA, 75 bp, synthetic construct
  source 1..75: mol_type = other DNA
atccggcaatcccccgacgttctccctgacgccggagggcaggctgacggcccgcaatgcggatatcagcggaca

SEQ ID NO: 582910 - DNA, 75 bp, synthetic construct
  source 1..75: mol_type = other DNA
agcgtattgatgcgtcagccctgcgtactgaggtcacgcaactggaagaagacatccgccagcgactggagacgg

SEQ ID NO: 582911 - DNA, 75 bp, synthetic construct
  source 1..75: mol_type = other DNA
ccagatagaaggcgacctggtgaagacggtggggaaagcctttccccggaataacagttatgccagcgggacggt

SEQ ID NO: 582912 - DNA, 75 bp, synthetic construct
  source 1..75: mol_type = other DNA
gccgttatttgtggcgcaggggaatcagttgttcatgaacgatgtgttcctgaagcggctgtttgcggtgagtat

SEQ ID NO: 582913 - DNA, 75 bp, synthetic construct
  source 1..75: mol_type = other DNA
ctgattaacggcagcggtaagccggtgagcgtggccatcactgcacaccccgcgccggaccggatacaggtcagc

SEQ ID NO: 582914 - DNA, 75 bp, synthetic construct
  source 1..75: mol_type = other DNA
ctacagcttcagtgccctgaaggaccggcacacggcggtggaggtgaattacaccgacccgcagaacggctggca

SEQ ID NO: 582915 - DNA, 75 bp, synthetic construct
  source 1..75: mol_type = other DNA
taagggcatgctggaggcgactcaggtcagaggtgacttcgttaaagctgtatccaaatcattcccgaaacaggc

SEQ ID NO: 582916 - DNA, 75 bp, synthetic construct
  source 1..75: mol_type = other DNA
tcaataatgtcaccattaacgagaactgtgtcatcagagggaaactgtctgcaaaccagattgaaggcgacctgg

SEQ ID NO: 582917 - DNA, 75 bp, synthetic construct
  source 1..75: mol_type = other DNA
gtggaggtgagcgcggctgacggtcagtatctggcacaggcgaaatgggacacgccgcgggtggtgaagggtgtg

SEQ ID NO: 582918 - DNA, 75 bp, synthetic construct
  source 1..75: mol_type = other DNA
atccgggaaaacacggacggcacttttgccatcacggcagtgcagcatgtgccggaaaaagaagccatcgtggat

SEQ ID NO: 582919 - DNA, 75 bp, synthetic construct
  source 1..75: mol_type = other DNA
tctgggacggcagcctgaaaccggcatacagcaacaacccggcctggtgcctgtgggacatgctgacccacccgc

SEQ ID NO: 582920 - DNA, 75 bp, synthetic construct
  source 1..75: mol_type = other DNA
cagataacagcggtcccgcgtcttgcggtgtatgacccgacggtacagtttgaattctggttctccgaaaaacgc

SEQ ID NO: 582921 - DNA, 75 bp, synthetic construct
  source 1..75: mol_type = other DNA
ttaaccagaactgtacgattaagggcatgctggaggcgactcaggtcagaggtgacttcgttaaagctgtatcca

SEQ ID NO: 582922 - DNA, 75 bp, synthetic construct
  source 1..75: mol_type = other DNA
acggtacagtttgagttctggttctcggaaaagcggattaccgatatcaggcaggttgaaaccacagcccgctat

SEQ ID NO: 582923 - DNA, 75 bp, synthetic construct
  source 1..75: mol_type = other DNA
ctgttccgctgtgtctccatccgggaaaacacggacggcacctttgccatcacggcggtgcagcacgtaccggaa

SEQ ID NO: 582924 - DNA, 75 bp, synthetic construct
  source 1..75: mol_type = other DNA
gttcctgacggcgttgcagaatacagtgtgtgggggctgaagttgccgacgttgcgtcagcgcctgttccgctgt

SEQ ID NO: 582925 - DNA, 75 bp, synthetic construct
  source 1..75: mol_type = other DNA
gccgcggtcaggcccaccgtgccgggctgtgggtgataaagaccgaactgctggaaacgcagacggtggatttca

SEQ ID NO: 582926 - DNA, 75 bp, synthetic construct
  source 1..75: mol_type = other DNA
aaatctgcttttgtggaagccagtggacgggcgagcaatgatgctgcgggctatctggaacttttccgggaaaag

SEQ ID NO: 582927 - DNA, 75 bp, synthetic construct
  source 1..75: mol_type = other DNA
gaccctgccggagacaggtgccgccacggtgaacctgattaacggcagcggtaagccggtgagcgtggccatcac

SEQ ID NO: 582928 - DNA, 75 bp, synthetic construct
  source 1..75: mol_type = other DNA
caggacggacgcctttatattgcgggtatcggtgccggtattgagaatacgccagcaggaatgcagagtcaggtg

SEQ ID NO: 582929 - DNA, 75 bp, synthetic construct
  source 1..75: mol_type = other DNA
ttaccgtcagggtttatgacgatcagccgtttgaccggcagattgttattccggcggtggctttcagcggtgcca

SEQ ID NO: 582930 - DNA, 75 bp, synthetic construct
  source 1..75: mol_type = other DNA
ggcagcggtaagccggtgagtgtggacatcaccgcacaccccgcgccggaccggatacaggtcagcaccctgccg

SEQ ID NO: 582931 - DNA, 75 bp, synthetic construct
  source 1..75: mol_type = other DNA
acaccaccggaaggctttgagtcctccggagctgaaaccgcactgggcgtggaagtgacgaaggcaaagccggtg

SEQ ID NO: 582932 - DNA, 75 bp, synthetic construct
  source 1..75: mol_type = other DNA
attccgtatgttgccggtataggtgcggggattgaggatgctgatggccagcccctgagcaatattctgctgcag

SEQ ID NO: 582933 - DNA, 75 bp, synthetic construct
  source 1..75: mol_type = other DNA
aaataataacctgaacagcatgtgggccgtgaaactgcagcagatgcaggacggacgcctttatattgcgggtat

SEQ ID NO: 582934 - DNA, 75 bp, synthetic construct
  source 1..75: mol_type = other DNA
attattccgcccattatctttaacggaatagcgtatagcgatccgggaagtggtaataacccgggaggtacaaga

SEQ ID NO: 582935 - DNA, 75 bp, synthetic construct
  source 1..75: mol_type = other DNA
gcaggacggacgcctttatatcgcgggtattggtgccggtattgagaatacccctgacggtatgcagagtcaggt

SEQ ID NO: 582936 - DNA, 75 bp, synthetic construct
  source 1..75: mol_type = other DNA
cggtggccatcaggaaccattaccgtcagggtttatgacgatcagccgtttgaccggcaaattgttatcccggcg

SEQ ID NO: 582937 - DNA, 75 bp, synthetic construct
  source 1..75: mol_type = other DNA
ctttcaatgtttcttcatatggtgcaaataactggacgccaacgaccagtatcagcgaccttcttgttgtcgtga

SEQ ID NO: 582938 - DNA, 75 bp, synthetic construct
  source 1..75: mol_type = other DNA
cagagaaactaaaggggccattcccggtagctacagtgcggttattgatatgccgagtggcaggggaagcgtcac

SEQ ID NO: 582939 - DNA, 75 bp, synthetic construct
  source 1..75: mol_type = other DNA
ggcccgctgggatacgccgaaggtggtgaagggcgtgagtttcatgcttcgcctgaccgtggccgcggatgacgg

SEQ ID NO: 582940 - DNA, 75 bp, synthetic construct
  source 1..75: mol_type = other DNA
gtggggaaatctgcttttgtggaagccagtggccgggccagcaatgatgcagaagggtatctggggctgtttcgg

SEQ ID NO: 582941 - DNA, 75 bp, synthetic construct
  source 1..75: mol_type = other DNA
aatgaaatcacacagacggtcagtaaaacgctggaggaccagagcgccaccatacagcagatacagcgcgtgcag

SEQ ID NO: 582942 - DNA, 75 bp, synthetic construct
  source 1..75: mol_type = other DNA
aacagtgctacccgaacacggccattgtggggctgcaggtggatgcggagcagttcggcggccggcctggtgtct

SEQ ID NO: 582943 - DNA, 75 bp, synthetic construct
  source 1..75: mol_type = other DNA
tgagtatccgtgagaacgatgacggtacgtatgccatcactgccgtgcagcatgtaccggagaaagaagccatcg

SEQ ID NO: 582944 - DNA, 75 bp, synthetic construct
  source 1..75: mol_type = other DNA
cggtacgtggggtaacacggaaacaccaaacggtacggttacagtaaccatcagcgatgatcataactttgaccg

SEQ ID NO: 582945 - DNA, 75 bp, synthetic construct
  source 1..75: mol_type = other DNA
taccacgctgataagcctggttgacggccaggggattccggtcagcgtggaggtacagtccgtcaccgacggcgt

SEQ ID NO: 582946 - DNA, 75 bp, synthetic construct
  source 1..75: mol_type = other DNA
taccacgctgataagcctggttgacggtcaggggactccggtcagcgtggaggtacagtccgtcaccgacggcgt

SEQ ID NO: 582947 - DNA, 75 bp, synthetic construct
  source 1..75: mol_type = other DNA
tacacgggttatggttttgaagttcgcaaaaacggcgtattaatcgcatccagagaaactaaaggggccattccc

SEQ ID NO: 582948 - DNA, 75 bp, synthetic construct
  source 1..75: mol_type = other DNA
actgtcggattctgggaaaactgtcagccaaccagattgaaggtgatattgtcaaaacggtgggaaaagcctttc

SEQ ID NO: 582949 - DNA, 75 bp, synthetic construct
  source 1..75: mol_type = other DNA
aaaaacggtgctgaaatttataaccgaacggctctggataatacgctgatatatacgggtgttattgatatgcct

SEQ ID NO: 582950 - DNA, 75 bp, synthetic construct
  source 1..75: mol_type = other DNA
gccacccgcaccctgacgctggaccgtgaggtgaccctgccggagacaggtgccgccacggtgaacctgattaac

SEQ ID NO: 582951 - DNA, 75 bp, synthetic construct
  source 1..75: mol_type = other DNA
ctctggataatactctgatttacacgggtgttattgatatgcctgcaggcagtggtgtaatgacactggagtttt

SEQ ID NO: 582952 - DNA, 75 bp, synthetic construct
  source 1..75: mol_type = other DNA
ccagtactggacagcggggggaataccaacttttccggtgtcacggtggtgttccgttccggtgaacaggagcag

SEQ ID NO: 582953 - DNA, 75 bp, synthetic construct
  source 1..75: mol_type = other DNA
ctgtatgccatcgggcagtactgtgaccagacggtcccggatggtttcgggggaacagagccgcggatgactttc

SEQ ID NO: 582954 - DNA, 75 bp, synthetic construct
  source 1..75: mol_type = other DNA
accggaaaaagaagccattgtggataacggagcccgctttgagccgcagtcaggcaccctgaacagcgtcattcc

SEQ ID NO: 582955 - DNA, 75 bp, synthetic construct
  source 1..75: mol_type = other DNA
ctggtatcccacagcaagtatcagcgatttgctggttgtggtgatgaagaaagccactacaggcatcacgattag

SEQ ID NO: 582956 - DNA, 75 bp, synthetic construct
  source 1..75: mol_type = other DNA
cagtcgtactggtattccacctgtaagctgcaggtgctgaagaacggggttgagattttccatgaaccggcaacg

SEQ ID NO: 582957 - DNA, 75 bp, synthetic construct
  source 1..75: mol_type = other DNA
gaaacccgcaatgaaatcacgcagacggtcagtaaaaccctggaagaccagagtgccaccatacagcagatacag

SEQ ID NO: 582958 - DNA, 75 bp, synthetic construct
  source 1..75: mol_type = other DNA
acgcaaacggtcagtcagagtaatgaggagaatgcacgccagattgcgcaggttcgtcagtatgtggatgaaaaa

SEQ ID NO: 582959 - DNA, 75 bp, synthetic construct
  source 1..75: mol_type = other DNA
cggctgacggcgaaaaatgccgatatcagcggtaacgtgaatgcgaactccgggacgctcaataatgtcacgatt

SEQ ID NO: 582960 - DNA, 75 bp, synthetic construct
  source 1..75: mol_type = other DNA
tggaggagacgcaggccattgcccgttacggtcgtaacgtcacgaagatggatgcttttggctgtaccagccggg

SEQ ID NO: 582961 - DNA, 75 bp, synthetic construct
  source 1..75: mol_type = other DNA
tgatagtgaagaaaaacggggctgaaatttataaccgaacggctctggataatacgctgatatacacgggtgtta

SEQ ID NO: 582962 - DNA, 75 bp, synthetic construct
  source 1..75: mol_type = other DNA
taccgatatcaggcaggttgaaaccacagcccgctatcttggcacggcgctgtactggatagctgccagtatcaa

SEQ ID NO: 582963 - DNA, 75 bp, synthetic construct
  source 1..75: mol_type = other DNA
aggcacgcgatacacgggttatggttttgaagttcgcaaaaacggcgtattaatcgcatccagagaaactaaagg

SEQ ID NO: 582964 - DNA, 75 bp, synthetic construct
  source 1..75: mol_type = other DNA
tgaaaacagcctcacgcagctggttgctaaaaaaaatgatgagcagtcactggccatatcccaggtgagtcagaa

SEQ ID NO: 582965 - DNA, 75 bp, synthetic construct
  source 1..75: mol_type = other DNA
aaagagcatactgatatttactcctcatgccgtctgatagtgcggaaaaacggtgctgaaatttataaccgtacc

SEQ ID NO: 582966 - DNA, 75 bp, synthetic construct
  source 1..75: mol_type = other DNA
tcactctgagttttaccgtaagttcacgacgtcagaacgggagttttggcagttcacgtatcagtaaccttcagg

SEQ ID NO: 582967 - DNA, 75 bp, synthetic construct
  source 1..75: mol_type = other DNA
gagccgatgtccggctcactgaacagcgtcatcccgccggcagtgcagcacctcacggtggaggtgagtgcctca

SEQ ID NO: 582968 - DNA, 75 bp, synthetic construct
  source 1..75: mol_type = other DNA
ggtgacatcattgaaatctgtgataacgactatgccgggaccctgaccggcggacgtatcctgtccattgatgcc

SEQ ID NO: 582969 - DNA, 75 bp, synthetic construct
  source 1..75: mol_type = other DNA
tcgttcaggacagtccgtcggatgtggtgtggcctacaccagcagtgatgtggtggtggatgataacggcgtggg

SEQ ID NO: 582970 - DNA, 75 bp, synthetic construct
  source 1..75: mol_type = other DNA
ggcaccggagcggtggccatcagggaccattaccgtcaggatttatgacgatcagccgtttgaccggcagattgt

SEQ ID NO: 582971 - DNA, 75 bp, synthetic construct
  source 1..75: mol_type = other DNA
tgctgaagaacggacaggaaatctttcagcaacccgcgacggatgtcagcagggtattttcatcagtcattgata

SEQ ID NO: 582972 - DNA, 75 bp, synthetic construct
  source 1..75: mol_type = other DNA
tggctcctgaagggaaggtaagagtctggctgggagatcgcggtaatccggtggtacctcagttggatgctaaaa

SEQ ID NO: 582973 - DNA, 75 bp, synthetic construct
  source 1..75: mol_type = other DNA
cagttatgccagcggtacaataacggtcactgtgtacgatgaccaggcttttgaccgtcagatagtagtcccccc

SEQ ID NO: 582974 - DNA, 75 bp, synthetic construct
  source 1..75: mol_type = other DNA
ggtcaaggcgatatcgtcaaaacggtcagcaagtctttcccccgcacgaacagttatgccagtggcaccatcacg

SEQ ID NO: 582975 - DNA, 75 bp, synthetic construct
  source 1..75: mol_type = other DNA
gtttcgggaaaaaataggaaaactgcatctggctcaggggctgtgggagctgatagacaacagccagcttgcgga

SEQ ID NO: 582976 - DNA, 75 bp, synthetic construct
  source 1..75: mol_type = other DNA
ggcccgcacattaagcccgggaaggatttctggttttacgtgcgcagcgtcaacctggtggggaaatctgctttt

SEQ ID NO: 582977 - DNA, 75 bp, synthetic construct
  source 1..75: mol_type = other DNA
ggcaatcagggcgcaggtaacatcacagactgtacggtgattgtgaccaaaaaagctgcttccggtatcagtatc

SEQ ID NO: 582978 - DNA, 75 bp, synthetic construct
  source 1..75: mol_type = other DNA
cagagaaactaaaggagccattcccggtagttacagtgcggttattgatatgccgagtggtggtggtaacgtcac

SEQ ID NO: 582979 - DNA, 75 bp, synthetic construct
  source 1..75: mol_type = other DNA
accggcagattatcattcccccggtgctgtttcgcgggacgaaacaccagaatttcaacagtccgaatcagcagt

SEQ ID NO: 582980 - DNA, 75 bp, synthetic construct
  source 1..75: mol_type = other DNA
aagccgatgtttgttggtcagggcgatcagatattcatgaatgaagtgttcctgaaacgcctgacggcccccacc

SEQ ID NO: 582981 - DNA, 75 bp, synthetic construct
  source 1..75: mol_type = other DNA
attttccagaaaggcaatcagggggcaggcaatatcaccgactgtacggtgattgtgaccaaaaaagctgcttcc

SEQ ID NO: 582982 - DNA, 75 bp, synthetic construct
  source 1..75: mol_type = other DNA
tcagcttgcgccggacctggctgaaatcaggacgtccattacgaatgtcagcaatgaaatcacgcagaccgtcaa

SEQ ID NO: 582983 - DNA, 75 bp, synthetic construct
  source 1..75: mol_type = other DNA
gcgatgataaatccggagagcggcaacagcacgccgttatttgtggcgcaggggaatcagctgttcatgaacgac

SEQ ID NO: 582984 - DNA, 75 bp, synthetic construct
  source 1..75: mol_type = other DNA
cggcagatcatcattcccccggtgctgtttcgcgggacgaaacaccagaatttcaacagcccgaatcagcagtcg

SEQ ID NO: 582985 - DNA, 75 bp, synthetic construct
  source 1..75: mol_type = other DNA
atttacagtggtgttattgatatgcctgccggtcacggtcacatgacactggagttttcggtgtcagcatggctg

SEQ ID NO: 582986 - DNA, 75 bp, synthetic construct
  source 1..75: mol_type = other DNA
tcaggttgatacaaataataacctgaacagcatgtgggctgtgaagctgcagcagatgcaggacggacgccttta

SEQ ID NO: 582987 - DNA, 75 bp, synthetic construct
  source 1..75: mol_type = other DNA
cgaactcaggaacgctcaacaatgtcacgattaaccagaactgtacgattaagggcatgctggaggcgacccagg

SEQ ID NO: 582988 - DNA, 75 bp, synthetic construct
  source 1..75: mol_type = other DNA
agctttatgcttcgcctgaccgtggcagcggatgacggcagtgagcggctggtcagcacggcccggacggcggaa

SEQ ID NO: 582989 - DNA, 75 bp, synthetic construct
  source 1..75: mol_type = other DNA
cgcagaccgtggatttcagcgtgggtgccgaagggcttcgccatgtgccgggggatgttattgaaatctgcgatg

SEQ ID NO: 582990 - DNA, 75 bp, synthetic construct
  source 1..75: mol_type = other DNA
gacgaaacaccagaatttcaacagtccgaatcagcagtcgtactggtattccacctgtaagctgcaggtgctgaa

SEQ ID NO: 582991 - DNA, 75 bp, synthetic construct
  source 1..75: mol_type = other DNA
atgcaggacggacgcctttatattgcgggtatcggtgccggtattgagaatacgccagcaggaatgcagagtcag

SEQ ID NO: 582992 - DNA, 75 bp, synthetic construct
  source 1..75: mol_type = other DNA
gataacagcggtcccgaaactggctgtatatgacccgacggtgcagtttgagttctggttctcggaaaagcggat

SEQ ID NO: 582993 - DNA, 75 bp, synthetic construct
  source 1..75: mol_type = other DNA
tccataaaggcaatcagcgggcaggtaatatcaccgactgtacggtgattgtgaccaaaaaagcggcttccggca

SEQ ID NO: 582994 - DNA, 75 bp, synthetic construct
  source 1..75: mol_type = other DNA
cagggggcaggcaatatcaccgactgtacggtgattgtgaccaaaaaagcggcttccggcatcagtattcgttga

SEQ ID NO: 582995 - DNA, 75 bp, synthetic construct
  source 1..75: mol_type = other DNA
acgactatgccgggaccatgaccggcggacgtgtcctgtccattgatgccgccagccgcaccctgacgctggacc

SEQ ID NO: 582996 - DNA, 75 bp, synthetic construct
  source 1..75: mol_type = other DNA
aacaatgtcacaattaatgagaactgtcagattaaggggaaactgtcagccaaccagattgaaggcgatatagtc

SEQ ID NO: 582997 - DNA, 75 bp, synthetic construct
  source 1..75: mol_type = other DNA
atgggtaaaggcagcagtgaggggaataccaacatctccggcgtcacggtggtgttccgggcaggtgagcaggag

SEQ ID NO: 582998 - DNA, 75 bp, synthetic construct
  source 1..75: mol_type = other DNA
ggcgcaggatagccgttgtctgttgctcgacgaaccgacctcggcgctggatatcgcccaccaggttgatgtgct

SEQ ID NO: 582999 - DNA, 75 bp, synthetic construct
  source 1..75: mol_type = other DNA
cagtgtgaatgcgaacgccgggacgctcaacaacgttacgataaatgagaactgtcagattaaagggaaactgtc

SEQ ID NO: 583000 - DNA, 75 bp, synthetic construct
  source 1..75: mol_type = other DNA
cgtcggtcgggcgagcgatgatgcggaaggttatctgagtttttataaagggttgatcaataaaacgcatctcgg

SEQ ID NO: 583001 - DNA, 75 bp, synthetic construct
  source 1..75: mol_type = other DNA
atgactatgcgggtatcagcaccggcgggcgcgtgctggcggtgaacagccagacgcggacactgacgctcgacc

SEQ ID NO: 583002 - DNA, 75 bp, synthetic construct
  source 1..75: mol_type = other DNA
ataccacttttgcactgcgtaatatctcctttcgtgtgcccgggcgcacgcttttgcatccgctgtcgttaacct

SEQ ID NO: 583003 - DNA, 75 bp, synthetic construct
  source 1..75: mol_type = other DNA
tcgtgcaggacagaccgtcggataaggtgtggacctataaccgcagcaatgtggtgataccggatgatggcgcgc

SEQ ID NO: 583004 - DNA, 75 bp, synthetic construct
  source 1..75: mol_type = other DNA
ggcagcggaggtggataaatggaccctgtatgttatcggtcagtactgtgaccagtcagtaccggatggctatgg

SEQ ID NO: 583005 - DNA, 75 bp, synthetic construct
  source 1..75: mol_type = other DNA
ggaccagagcgccaccatacagcagatacagcgcgtgcagaaggacacaaatgatgaccttgctgcactttacat

SEQ ID NO: 583006 - DNA, 75 bp, synthetic construct
  source 1..75: mol_type = other DNA
gaggataacgccagcagactggatgagttttcgaaagagtggaaggacgctaacgataaatggaatgccatgtgg

SEQ ID NO: 583007 - DNA, 75 bp, synthetic construct
  source 1..75: mol_type = other DNA
ggtgaacgtcagcgagcgtggatcgccatgctggtggcgcaggatagccgatgcctgctgctggatgaaccgacc

SEQ ID NO: 583008 - DNA, 75 bp, synthetic construct
  source 1..75: mol_type = other DNA
gtggccgtcagggaccattaccgtcagggtttatgacgatcagccttttgaccggcaaattgtcattccggcggt

SEQ ID NO: 583009 - DNA, 75 bp, synthetic construct
  source 1..75: mol_type = other DNA
atgttgatcagaatggacgccggatttattcaggcaggtcagtgacagagccgggaattttcagcgggatcatcg

SEQ ID NO: 583010 - DNA, 75 bp, synthetic construct
  source 1..75: mol_type = other DNA
acacaccgcgtgaggcgaaggacaatctcaaatccacgcagatgatgagcgtgattgatgccatcggtgagggac

SEQ ID NO: 583011 - DNA, 75 bp, synthetic construct
  source 1..75: mol_type = other DNA
aaaggcaatcagtgggcaggtaatattaccgactgtacggtgattgtgaccaaaaaagccgcttccggcatcagt

SEQ ID NO: 583012 - DNA, 75 bp, synthetic construct
  source 1..75: mol_type = other DNA
cgatgatcataactttgaccgtcaaatcattattccgcccattatctttaacggaatagcgtatagcgatccggg

SEQ ID NO: 583013 - DNA, 75 bp, synthetic construct
  source 1..75: mol_type = other DNA
cggcccccaccattaccagtggtggcaatcctccggcattttccctgacaccggacgggcgactgacggcgagaa

SEQ ID NO: 583014 - DNA, 75 bp, synthetic construct
  source 1..75: mol_type = other DNA
ataacctgaacagcatgtgggccgtgaaactgcagcagatgcaggacggacgcctttatattgcgggtatcggtg

SEQ ID NO: 583015 - DNA, 75 bp, synthetic construct
  source 1..75: mol_type = other DNA
cagactgaccgcaaaaaatgcggatatcagcggcaacgtgaatgcgaactcagggacgctcaacaacgtcacgat

SEQ ID NO: 583016 - DNA, 75 bp, synthetic construct
  source 1..75: mol_type = other DNA
ttaacgcgccagcaaaacccgccaccattgaactgacgccgggctattttcagataaccgcaacgccgcatcttg

SEQ ID NO: 583017 - DNA, 75 bp, synthetic construct
  source 1..75: mol_type = other DNA
cgtgggcgcagaagggcttcgccatgtgccgggcgatgtcattgaaatctgtgatgatgactatgccggtatcag

SEQ ID NO: 583018 - DNA, 75 bp, synthetic construct
  source 1..75: mol_type = other DNA
aaggatgtcaccattaacggcaagaccacctcgcagtttctggcgtcggtgattctggataatctgcctgagcgg

SEQ ID NO: 583019 - DNA, 75 bp, synthetic construct
  source 1..75: mol_type = other DNA
gaaaaacggtgctgaaatttataaccgtaccgcgttggataatacgctgttttacagtggtgttattgatatgcc

SEQ ID NO: 583020 - DNA, 75 bp, synthetic construct
  source 1..75: mol_type = other DNA
caccgccatcactgcggatacagagcatcgtttcagtggtctgccgctcggggaatacaccctgacggtcagggc

SEQ ID NO: 583021 - DNA, 75 bp, synthetic construct
  source 1..75: mol_type = other DNA
agattgttattccggcggtggcattcagcggcgctaaacatgagcgggagaataacgatatttattcgtcatgcc

SEQ ID NO: 583022 - DNA, 75 bp, synthetic construct
  source 1..75: mol_type = other DNA
atcagggaccatcaccgtcagggtttatgacgatcagccgtttgaccggcagattgttattccggcggtggcatt

SEQ ID NO: 583023 - DNA, 75 bp, synthetic construct
  source 1..75: mol_type = other DNA
ggagagcagcttcgcccgctgtatgatgaactgaagcactatgtgctgatgccgggtaaagtgcatgccgatgac

SEQ ID NO: 583024 - DNA, 75 bp, synthetic construct
  source 1..75: mol_type = other DNA
gtgatgaagaactgattgccggtaaccgcaccgtaaaacctcgcgccgggattatgtcgccggaaatggaccctt

SEQ ID NO: 583025 - DNA, 75 bp, synthetic construct
  source 1..75: mol_type = other DNA
tgatcaacagcgtttaagttttgacgagttgttgtcggtattaaaagccaacttcgcaacgcccgaaggcgaaaa

SEQ ID NO: 583026 - DNA, 75 bp, synthetic construct
  source 1..75: mol_type = other DNA
agcttcattatcattgctggattgctctaccatactttcaagttagaacggcaggttttgcggatacaggtatag

SEQ ID NO: 583027 - DNA, 75 bp, synthetic construct
  source 1..75: mol_type = other DNA
gcccatattgtcgctggaaaatatgcagaccatctgccgttataccgccagtcagagatataccgtcgtcagggc

SEQ ID NO: 583028 - DNA, 75 bp, synthetic construct
  source 1..75: mol_type = other DNA
acggtcgttttgccggggaacaactggcagacggcggcttgtcacctatgctgggtcaggacgcacaagggccaa

SEQ ID NO: 583029 - DNA, 75 bp, synthetic construct
  source 1..75: mol_type = other DNA
gttgtctcactgttctgatgcagaggcgttacgcattgatggggtgataagtaaagcgcttgcacgttatcctgg

SEQ ID NO: 583030 - DNA, 75 bp, synthetic construct
  source 1..75: mol_type = other DNA
tcccaaaagcaaaaggcctagtcaagaatgcaattcttgcatgtaccggaaaggatcagaatgaaaaggtagttc

SEQ ID NO: 583031 - DNA, 75 bp, synthetic construct
  source 1..75: mol_type = other DNA
ttcgtgcaagaacaagttggtccagagcaaatagaccaaataactggtatcctttatacgtctcttccgacttaa

SEQ ID NO: 583032 - DNA, 75 bp, synthetic construct
  source 1..75: mol_type = other DNA
gaattatataatcttggtaagatcaaggatgaaatctatggagaacaaaacaggatagcagttgttactgttcag

SEQ ID NO: 583033 - DNA, 75 bp, synthetic construct
  source 1..75: mol_type = other DNA
cagcataactctcgggatatgaaatttctcaagagttcaccatatctgatggttgatactactttttttgattct

SEQ ID NO: 583034 - DNA, 75 bp, synthetic construct
  source 1..75: mol_type = other DNA
aatagggatgataatggttttcgaaaatttagcttggtcgaacaaggtgaatatttttattctgttaccttgcct

SEQ ID NO: 583035 - DNA, 75 bp, synthetic construct
  source 1..75: mol_type = other DNA
tttcttttccaaaaagtatttatgcggttaaggaatgtttagagtcgcttagtaattcgaagtatgctcatttct

SEQ ID NO: 583036 - DNA, 75 bp, synthetic construct
  source 1..75: mol_type = other DNA
caggccgatgcttacggtggttaccgggcgttatacgaatccggcagaataacggaagcagagtctctggcgtac

SEQ ID NO: 583037 - DNA, 75 bp, synthetic construct
  source 1..75: mol_type = other DNA
agataaaattcatgagtattgcataaaaaaatcaaagtctggaaaggatacacgtttaggtgatatcgtttatgt

SEQ ID NO: 583038 - DNA, 75 bp, synthetic construct
  source 1..75: mol_type = other DNA
accttttctgtcaggtaattccctgcccggaaaatatggtactgctcgtcggcactcaaccggtaaatgacgaac

SEQ ID NO: 583039 - DNA, 75 bp, synthetic construct
  source 1..75: mol_type = other DNA
cggccccacatttgctggtttcgagcactggcgatgtgatggggtattttgtggcaaccgcctattcagataaca

SEQ ID NO: 583040 - DNA, 75 bp, synthetic construct
  source 1..75: mol_type = other DNA
tttcaagaaaataactcaactaatcagcgttataatataaccgtcttagagccgcatgaggtccggataagaata

SEQ ID NO: 583041 - DNA, 75 bp, synthetic construct
  source 1..75: mol_type = other DNA
cgggctgggggagctggtggcacagatgcagcaacattgccagcaacagccggagaatcacttttatcaggctgc

SEQ ID NO: 583042 - DNA, 75 bp, synthetic construct
  source 1..75: mol_type = other DNA
aatcagcgcctgatacacggcgtgtttggctacagccgctggaaaaacggtgagtttctcgcggctattgcccac

SEQ ID NO: 583043 - DNA, 75 bp, synthetic construct
  source 1..75: mol_type = other DNA
ccgaagaacttaaggcagtctatcttacctacaatggcctgaatcgtcctgcaatgatcaaaggaatgccaatca

SEQ ID NO: 583044 - DNA, 75 bp, synthetic construct
  source 1..75: mol_type = other DNA
ctggctgccggtcataaaacgctgatcccggaactggtcgaagcgctgaaaaaatggggacgcgaagatatctgc

SEQ ID NO: 583045 - DNA, 75 bp, synthetic construct
  source 1..75: mol_type = other DNA
acttgccgcccattgtgagtcatattcggcctgactttccagaaccatacgaactgcccgttgacggacttcggg

SEQ ID NO: 583046 - DNA, 75 bp, synthetic construct
  source 1..75: mol_type = other DNA
gcgcaaacatgattgagcgcaaggcatgggacaggattggttcattaaccgatgtggcctcgcgggtcatgctgt

SEQ ID NO: 583047 - DNA, 75 bp, synthetic construct
  source 1..75: mol_type = other DNA
tgccgccgtcttaatgctatggtgcgctcaaaccgctgcttatagcgggcagtgtcatactactcaggggaatcc

SEQ ID NO: 583048 - DNA, 75 bp, synthetic construct
  source 1..75: mol_type = other DNA
gcaatgatcaaaggaatgccaatcattccttttattctgtgtctgcttgctctcatggtttctttttttattggc

SEQ ID NO: 583049 - DNA, 75 bp, synthetic construct
  source 1..75: mol_type = other DNA
gtacgaacaagaatataagccagtagaagtggtgaaaaactcatctgtggtggacggtaaactcgttgaaacaga

SEQ ID NO: 583050 - DNA, 75 bp, synthetic construct
  source 1..75: mol_type = other DNA
atgcatctggctcgagtcactggcgcggtagtatccacgcaaaaatcaccttctctgatcgggaaaaaactgctg

SEQ ID NO: 583051 - DNA, 75 bp, synthetic construct
  source 1..75: mol_type = other DNA
ggccatcaggtggcggtgcattacggttatgatgataagggccgcctggccggggagcgccagacggtgcataac

SEQ ID NO: 583052 - DNA, 75 bp, synthetic construct
  source 1..75: mol_type = other DNA
agcgattgtctggaaaaaggccgcgatattaccgatggcggtgcgcgttataacttctccggcgtacaggggatc

SEQ ID NO: 583053 - DNA, 75 bp, synthetic construct
  source 1..75: mol_type = other DNA
cagctaactttactccatgtttagaagcgctacgcatccacctagatgattgtaagatacgcatagcccgcctag

SEQ ID NO: 583054 - DNA, 75 bp, synthetic construct
  source 1..75: mol_type = other DNA
gcaatgtctaatgagcttagaaaaacagcactaccagactttgtaagtcgaaaaatatgggatgaatctcttgaa

SEQ ID NO: 583055 - DNA, 75 bp, synthetic construct
  source 1..75: mol_type = other DNA
cccgcatcacctgtaccagccgtaccgcctgccggggcagcagtacgatgatgaatcggggctgtgctataaccg

SEQ ID NO: 583056 - DNA, 75 bp, synthetic construct
  source 1..75: mol_type = other DNA
tctctaggcttgctggagtgatagtgctgggtgaaagattaaagagtatttataatggaattattgaaagtgata

SEQ ID NO: 583057 - DNA, 75 bp, synthetic construct
  source 1..75: mol_type = other DNA
attgatatatctttttatgtttgcaaagctaaagaaaatgtatattcacttgcatggcggtgcaggcatgaaaaa

SEQ ID NO: 583058 - DNA, 75 bp, synthetic construct
  source 1..75: mol_type = other DNA
gtgtttgaaccttggcgtaatggaatagaagttgataaaaaaagcacatctgatttagtaaatgcaataaattat

SEQ ID NO: 583059 - DNA, 75 bp, synthetic construct
  source 1..75: mol_type = other DNA
cagccaagttaattgaagaaaatcgcacctcgttaaagcttgatgaaagcacttgggccgcaattgacatgctgg

SEQ ID NO: 583060 - DNA, 75 bp, synthetic construct
  source 1..75: mol_type = other DNA
tttatcagcgattgtctggaaaaaggccgcgatattaccgatggcggcgcgcgttataacttctccggcgtacag

SEQ ID NO: 583061 - DNA, 75 bp, synthetic construct
  source 1..75: mol_type = other DNA
ataacgcaagccgagagtatttagatatttgttgggatactttcttcaaaagtaaaaatagaggcctcgatcttg

SEQ ID NO: 583062 - DNA, 75 bp, synthetic construct
  source 1..75: mol_type = other DNA
cgtccatcctgatgcgattattatagcaacaaggctatggtcttttggtgtgctaataggcaataccgatatgca

SEQ ID NO: 583063 - DNA, 75 bp, synthetic construct
  source 1..75: mol_type = other DNA
ttagtcatgggagagcgaatcctactggtataccgtatttatatcttggatctaaaccagatacagctttgtctg

SEQ ID NO: 583064 - DNA, 75 bp, synthetic construct
  source 1..75: mol_type = other DNA
tgggcataactaccctataaaatttaaagaaaaattcaccgtcggaaattataaatatgaagtaagggctcatga

SEQ ID NO: 583065 - DNA, 75 bp, synthetic construct
  source 1..75: mol_type = other DNA
atgagtatcgtcgtgatgacgatatggcgttatggagttctgcagatctgacttattccattacatacgagatgt

SEQ ID NO: 583066 - DNA, 75 bp, synthetic construct
  source 1..75: mol_type = other DNA
agaagctaaaagaaatttttcagattgatcgaccagaactggatttcggtatttatcgtattttaaatgcgcgtg

SEQ ID NO: 583067 - DNA, 75 bp, synthetic construct
  source 1..75: mol_type = other DNA
gagcttccagggaagtcatcttataatttagaagagatgccatctgcgataaatttcaccatactctatcgcatt

SEQ ID NO: 583068 - DNA, 75 bp, synthetic construct
  source 1..75: mol_type = other DNA
gtctggaactacgcgtactggctgaccggcgcggccggtctggcccttctgggggggctggttgtcgccgtgttt

SEQ ID NO: 583069 - DNA, 75 bp, synthetic construct
  source 1..75: mol_type = other DNA
acgtctgagaacggaatctgatggctggttctttgatgtatggcagccggatcatatcgatacgactgaatgctg

SEQ ID NO: 583070 - DNA, 75 bp, synthetic construct
  source 1..75: mol_type = other DNA
atcgcttacacctggtggcgtcaggccatcaagtacgtacgcatctcccccgagtgggttaaggggcaggcatca

SEQ ID NO: 583071 - DNA, 75 bp, synthetic construct
  source 1..75: mol_type = other DNA
gacgcttgccagcggcgaactggcgctggtgtacaacgcgatgagtgcggcaggcgcagtagaacgtcgcgcgtc

SEQ ID NO: 583072 - DNA, 75 bp, synthetic construct
  source 1..75: mol_type = other DNA
gatgcgtaagggcgtttatcaggcagatggtgctattaaagcggaagatatgatgaatgttgctgatgttgcagc

SEQ ID NO: 583073 - DNA, 75 bp, synthetic construct
  source 1..75: mol_type = other DNA
atggtggtttatccccactggcgcggggaactcctcgactttaattttttcgctgcccgcttttgcggtttatcc

SEQ ID NO: 583074 - DNA, 75 bp, synthetic construct
  source 1..75: mol_type = other DNA
tatcgataagaccaaagcactgagcctgctgcgtgctctgactgacttcaaacgtgcgttcgacctgaacctgcg

SEQ ID NO: 583075 - DNA, 75 bp, synthetic construct
  source 1..75: mol_type = other DNA
gcgccgcccgcaaaagctcgctaaagggccttttaaaggcctttaagggtaagggagagctgcgagcgctggtgc

SEQ ID NO: 583076 - DNA, 75 bp, synthetic construct
  source 1..75: mol_type = other DNA
attaccatcggtaacccgggaattgtcgccccggcgtcatggtggggtgattggttcggcctggacctcagtgct

SEQ ID NO: 583077 - DNA, 75 bp, synthetic construct
  source 1..75: mol_type = other DNA
ttatggacgcacccgcgccgggcgggcttggtggtacctacgccgggaacccgctggcggtggctgccgcgcacg

SEQ ID NO: 583078 - DNA, 75 bp, synthetic construct
  source 1..75: mol_type = other DNA
aaggtggtgtaatggactggaaaattaaagataatgttgatccaaaagatatagtaaatcgagggaaagtcagga

SEQ ID NO: 583079 - DNA, 75 bp, synthetic construct
  source 1..75: mol_type = other DNA
ctgctgtcttttatgatggtgatattattaatactggcaactctgtcaagatggaccggaaggttgcgtctcttc

SEQ ID NO: 583080 - DNA, 75 bp, synthetic construct
  source 1..75: mol_type = other DNA
atccagcttgctgagcaatggcaggatatagacggttttccacgcatcatctcaggtattagccatggcgaaatc

SEQ ID NO: 583081 - DNA, 75 bp, synthetic construct
  source 1..75: mol_type = other DNA
gtgacgttgggtaatccgggcctgaaggcctcagcctcttggtggggcgcatttttcgggctgagtctttcagcc

SEQ ID NO: 583082 - DNA, 75 bp, synthetic construct
  source 1..75: mol_type = other DNA
ccggtatttataatgctactcccggcacgaaaaaagtaattgttgaaatggttggcgggggaggggggggcgctg

SEQ ID NO: 583083 - DNA, 75 bp, synthetic construct
  source 1..75: mol_type = other DNA
gcccatcatccgttacagcgggcaatgctgctgtggctggtggtgatggcgcacctgggctggttattatttggg

SEQ ID NO: 583084 - DNA, 75 bp, synthetic construct
  source 1..75: mol_type = other DNA
gcaactgcaacagtttacccacaccgcgtatcagattgtgccgtatgaaagctacgtcaccctggcggagaaaat

SEQ ID NO: 583085 - DNA, 75 bp, synthetic construct
  source 1..75: mol_type = other DNA
ggtgaaaattgctcgcgcccataccggacgccctggcgtgattgcgtttagcggcggcttccacggtcgtacata

SEQ ID NO: 583086 - DNA, 75 bp, synthetic construct
  source 1..75: mol_type = other DNA
gcggtacgcggcctggggtcgatgattgcggcagagtttaacgatccgcaaacgggcgagccgtcagcggcgatt

SEQ ID NO: 583087 - DNA, 75 bp, synthetic construct
  source 1..75: mol_type = other DNA
ggggattataacgtcaaagcggtacattacgggcgtcagcctaaagcctcggagaaggttcctatgccagaattt

SEQ ID NO: 583088 - DNA, 75 bp, synthetic construct
  source 1..75: mol_type = other DNA
tgccaggaaccaacaatgggaactggacatacggaacaccttatggtgttcctgctctgccgattggtgaaaatc

SEQ ID NO: 583089 - DNA, 75 bp, synthetic construct
  source 1..75: mol_type = other DNA
acactctcaccagtcatctgccgtcgccgttggcgaaagggaacccgcagcataccaacctggttgaaatcaaac

SEQ ID NO: 583090 - DNA, 75 bp, synthetic construct
  source 1..75: mol_type = other DNA
cttgctgatttccgccatgacccggttgccagtccactgacgacaccttccgggaagattgagatttactcgcac

SEQ ID NO: 583091 - DNA, 75 bp, synthetic construct
  source 1..75: mol_type = other DNA
gccgcccccacgctggcggcatggagccagttaatgctcagccggtcgccggagaacgcagaagaagaaacgccg

SEQ ID NO: 583092 - DNA, 75 bp, synthetic construct
  source 1..75: mol_type = other DNA
gaagtccgtaatacccgacgccgcatgattgtcccggcaacacgctggcacgcctttagcaaccgggccggcgag

SEQ ID NO: 583093 - DNA, 75 bp, synthetic construct
  source 1..75: mol_type = other DNA
cctgctctgccgattggtgaaaatcccgttaaggtgtcaatcccctgctatctgtggacagatgcgattcaaagt

SEQ ID NO: 583094 - DNA, 75 bp, synthetic construct
  source 1..75: mol_type = other DNA
caccgaagttgctaattccgatttagtggtactttttggtcttaacctgtcagaaacgcgtatgtccggtggtgg

SEQ ID NO: 583095 - DNA, 75 bp, synthetic construct
  source 1..75: mol_type = other DNA
tctcccgacgtgatgcggtgactacaactgcaaaattgggagctgccgttgcactaagcaacgccatcactttgc

SEQ ID NO: 583096 - DNA, 75 bp, synthetic construct
  source 1..75: mol_type = other DNA
aagcaaattttcaattttttttacgctcttcattttggatatatatatatatagcatattgttattggaaagcca

SEQ ID NO: 583097 - DNA, 75 bp, synthetic construct
  source 1..75: mol_type = other DNA
actatcgtggttattgataaccatatgactgccagtgcccgctttgccgatatccttcttccagaaactagctac

SEQ ID NO: 583098 - DNA, 75 bp, synthetic construct
  source 1..75: mol_type = other DNA
taaatatacaaatctcacggcgggagactgtcacgacagcagcaaaaattggttctgccgttgtattaagcaacg

SEQ ID NO: 583099 - DNA, 75 bp, synthetic construct
  source 1..75: mol_type = other DNA
ccgtgaaaaacgcccgtacctgccggaatggcaggtagcaaaagagatgggcgttatcgaccagcgtatcgcgac

SEQ ID NO: 583100 - DNA, 75 bp, synthetic construct
  source 1..75: mol_type = other DNA
tacgacatcatcaatcccaccactaatgggcagacggttgtatacgatcctgtcaaaaaaaattgtctggtaatc

SEQ ID NO: 583101 - DNA, 75 bp, synthetic construct
  source 1..75: mol_type = other DNA
aagccatcacgctgaaaatcgacccgtcggtggttctggcaacccgcaaatatgtggatgataaaatctcagagc

SEQ ID NO: 583102 - DNA, 75 bp, synthetic construct
  source 1..75: mol_type = other DNA
gcgcgttatttcgcaggtttcccgaccggctataccgcactgctcggcgggttaaccgagaacggacgtagcgcg

SEQ ID NO: 583103 - DNA, 75 bp, synthetic construct
  source 1..75: mol_type = other DNA
agcacaaaattttataccctgctgacggatattggcgcggcgaaacttgccagcgccgccgcgctcggtgtgccg

SEQ ID NO: 583104 - DNA, 75 bp, synthetic construct
  source 1..75: mol_type = other DNA
ttgctgtcggtattaaaagccaactttgcaacgccagaaggcgaaaaagtccgtgctcgcttaattaaccgcttc

SEQ ID NO: 583105 - DNA, 75 bp, synthetic construct
  source 1..75: mol_type = other DNA
taattgctcctggtggcgaaggtggcgggaaagcgggtgttacaaacacaaacggcggtaacggaggtgtgccga

SEQ ID NO: 583106 - DNA, 75 bp, synthetic construct
  source 1..75: mol_type = other DNA
cggtactgaagtcagtcagtaagctcgataatacgctgctgtctaacggtacgttgctgaaccactccggcgacc

SEQ ID NO: 583107 - DNA, 75 bp, synthetic construct
  source 1..75: mol_type = other DNA
atatgaccttgcagcaggtaaggcacctgtcagtcacacgcacccgtggagccagataacggatgtgcctgcagc

SEQ ID NO: 583108 - DNA, 75 bp, synthetic construct
  source 1..75: mol_type = other DNA
cgcaggtggggccggtggtgttagtgcgacgaacggcaccaggggcgggaatagcgtattcgcatcgttaattgc

SEQ ID NO: 583109 - DNA, 75 bp, synthetic construct
  source 1..75: mol_type = other DNA
aaaaatcgttcgccgtaaacatgtgcccgacccggtcaggcttgcaggtcatgatgaagcaatagaatttgattt

SEQ ID NO: 583110 - DNA, 75 bp, synthetic construct
  source 1..75: mol_type = other DNA
gtgaatggtaaggcgctttcggcggatataacactgacgccgaaagatattggtacgcttaactcaacaacaatg

SEQ ID NO: 583111 - DNA, 75 bp, synthetic construct
  source 1..75: mol_type = other DNA
ggatacagcgccttctttgtcgaactgtcgaaggagatccaggatgacatcatccgccggacagcgcatcagctg

SEQ ID NO: 583112 - DNA, 75 bp, synthetic construct
  source 1..75: mol_type = other DNA
gcccacaagattatgccgggctggtggtgcgcgttgccggatacagcgccttctttgtcgaactgtcgaaggaga

SEQ ID NO: 583113 - DNA, 75 bp, synthetic construct
  source 1..75: mol_type = other DNA
gttggcttgctgtagatccttttaatggtgggatgtataccttgaagccaaaagaggcaaacgcatctcttatac

SEQ ID NO: 583114 - DNA, 75 bp, synthetic construct
  source 1..75: mol_type = other DNA
acctacggcctgccagtggtggtgacaaactgctccaacaactacggtccgtatcacttcccggaaaaactgatc

SEQ ID NO: 583115 - DNA, 75 bp, synthetic construct
  source 1..75: mol_type = other DNA
tcgtcatatcattgaaaataccctggacgaagtccgtgtgatggactgcctgacctacgccggcaatcttgaatc

SEQ ID NO: 583116 - DNA, 75 bp, synthetic construct
  source 1..75: mol_type = other DNA
gtcatgtggatcgctccattgatggcccggccgccttcatccagaccaacgtgatcggtaccttcactctgctgg

SEQ ID NO: 583117 - DNA, 75 bp, synthetic construct
  source 1..75: mol_type = other DNA
atgccatttgctcgttatttctgcattttcataaacgttggtttgggagaaggctcatttggattcagaaatctg

SEQ ID NO: 583118 - DNA, 75 bp, synthetic construct
  source 1..75: mol_type = other DNA
acaggcgttgattaatgcgtgtgaagctaaggggagcggtacgctcattcaccccacgctgggggaaatgaccgt

SEQ ID NO: 583119 - DNA, 75 bp, synthetic construct
  source 1..75: mol_type = other DNA
cagcaatgtcctgaactccacgttcgggaatacccggtacggacgttacagtaaaggctctgtgggcggtagttc

SEQ ID NO: 583120 - DNA, 75 bp, synthetic construct
  source 1..75: mol_type = other DNA
ccgctgactatccttaatgccctggcgggtaaacccctgccggtgtatggcaacggggagcagatccgtgactgg

SEQ ID NO: 583121 - DNA, 75 bp, synthetic construct
  source 1..75: mol_type = other DNA
tcgccagctcactgtcactcgtgacggcgatattatgatcctccgcacgccgattatttctgagagttactcccc

SEQ ID NO: 583122 - DNA, 75 bp, synthetic construct
  source 1..75: mol_type = other DNA
gcatcgttaattgctcctggtggcgcaggtggcgggaaagtgggagttacaaatacaaacggcggtaacggaggt

SEQ ID NO: 583123 - DNA, 75 bp, synthetic construct
  source 1..75: mol_type = other DNA
cgggctttatcggctctgccgtggttcgtcatatcattgaaaataccctggacgaagtccgtgtgatggactgcc

SEQ ID NO: 583124 - DNA, 75 bp, synthetic construct
  source 1..75: mol_type = other DNA
gtatcactttccggagaaactgatcccgctgactatcctcaacgccctggcgggtaaaccgctgccggtgtatgg

SEQ ID NO: 583125 - DNA, 75 bp, synthetic construct
  source 1..75: mol_type = other DNA
gccattgatgccgcaaaaattcagcgcgatctgggctgggtgccgcaggagacattcgagagcgggattgagaaa

SEQ ID NO: 583126 - DNA, 75 bp, synthetic construct
  source 1..75: mol_type = other DNA
gtttgaaatcagggacatgctgcatatggctggcaatatccccgcagcccagcgggcacactaccaggccatgcc

SEQ ID NO: 583127 - DNA, 75 bp, synthetic construct
  source 1..75: mol_type = other DNA
cagaacatcctgacgacgatttatgggcatcattatgttttgccggtcacgatttgatgagtcagtttgccggga

SEQ ID NO: 583128 - DNA, 75 bp, synthetic construct
  source 1..75: mol_type = other DNA
tcacaccggaaaagaacttcatggtctccgtcctctgtgcattgtgtgtggataccggcaccggtcagccctgta

SEQ ID NO: 583129 - DNA, 75 bp, synthetic construct
  source 1..75: mol_type = other DNA
tttgtgagccaaacgtcgacacgttttggtctggcggcctggcgttattcgtcgcgtgattatcggacatttaat

SEQ ID NO: 583130 - DNA, 75 bp, synthetic construct
  source 1..75: mol_type = other DNA
gctgcggcagcacaaggggtggtaaacgccgcaacccaacaaccagttcctgcacaaattgccattgcaaatgcc

SEQ ID NO: 583131 - DNA, 75 bp, synthetic construct
  source 1..75: mol_type = other DNA
tattccacgcaccgtcgctgaatctgcagttattcaccacacagcctgaaacacacggcagcctgattcaggccg

SEQ ID NO: 583132 - DNA, 75 bp, synthetic construct
  source 1..75: mol_type = other DNA
taccgtcattcttcaccggaaaactgatcgaccgatttggcgtcattaacattatgctggcgggcattcttctca

SEQ ID NO: 583133 - DNA, 75 bp, synthetic construct
  source 1..75: mol_type = other DNA
caggcgtgggcaggcaccggttttggccacctggcgataccgcgtgtgggtcaggaggtgattgtagacttcctc

SEQ ID NO: 583134 - DNA, 75 bp, synthetic construct
  source 1..75: mol_type = other DNA
tgcagaatttaccaccggactgacaaatattatttgtgaaaacccaaaagaaaaaaatagtctggtctttatata

SEQ ID NO: 583135 - DNA, 75 bp, synthetic construct
  source 1..75: mol_type = other DNA
cacgcatccttttttcatcgcattgcccgcttacggttctgcgctcaccagtgataatcgcgtcgagagtgaagc

SEQ ID NO: 583136 - DNA, 75 bp, synthetic construct
  source 1..75: mol_type = other DNA
tctgcccaatgccgattgcccattcgttgatggagccagccactatcaggtgcaacctcactcatccagcctgca

SEQ ID NO: 583137 - DNA, 75 bp, synthetic construct
  source 1..75: mol_type = other DNA
cagttctgattaatacgttgtcggaaatacagatatcatctgctcagaaaaacctgcccttcattgcctatatcg

SEQ ID NO: 583138 - DNA, 75 bp, synthetic construct
  source 1..75: mol_type = other DNA
actcactcgtcaattaagattgataaggaccgttatctctccggcaatcctatcgaggtgacggtagaactgaga

SEQ ID NO: 583139 - DNA, 75 bp, synthetic construct
  source 1..75: mol_type = other DNA
ctggacagctggacgcctgccgacctgctagccgccgtagaacttgctaataatcagctctatatcaccgtttta

SEQ ID NO: 583140 - DNA, 75 bp, synthetic construct
  source 1..75: mol_type = other DNA
atcagaacgatcgtgatgcacggaataccaaaaacgagcatcaggaccaggacgacaacctgatcgcctttccca

SEQ ID NO: 583141 - DNA, 75 bp, synthetic construct
  source 1..75: mol_type = other DNA
caatcgcattgatgctgattttctgtcgcttaatcctgataagatttgtgttgatgatattataacgcaagttca

SEQ ID NO: 583142 - DNA, 75 bp, synthetic construct
  source 1..75: mol_type = other DNA
ttggaatgcagggaaccaattatttactgccgctaataatacttccttatttagtacgtgttcttggaccagagc

SEQ ID NO: 583143 - DNA, 75 bp, synthetic construct
  source 1..75: mol_type = other DNA
gcgtccatccgcaatcagattattgacgacatgcgcagtgcgctcacccgatatgatgaaatgaatggagaaaca

SEQ ID NO: 583144 - DNA, 75 bp, synthetic construct
  source 1..75: mol_type = other DNA
ccggacgacctttaacccgtctggctgttgagctcacgttattaatctttattcgttcaagtgagttgcgctttg

SEQ ID NO: 583145 - DNA, 75 bp, synthetic construct
  source 1..75: mol_type = other DNA
gaaaccgcagatggcgtctataaggcgacctataccgcctataccaaaggcagtggacttactgcgaagctattg

SEQ ID NO: 583146 - DNA, 75 bp, synthetic construct
  source 1..75: mol_type = other DNA
cgcaacaacaatatcgttctggaatatcgcaaaaaagaactggttcgcctgcccctgacagaccccgtgacaggg

SEQ ID NO: 583147 - DNA, 75 bp, synthetic construct
  source 1..75: mol_type = other DNA
gattctgaaaaaatcgtatgaagtgatgcatggtgagttagggaatgcagattcaatccagagctggtcgaatgc

SEQ ID NO: 583148 - DNA, 75 bp, synthetic construct
  source 1..75: mol_type = other DNA
tacgcaacggctgttgataagatggttcgcgtgaaagatatctttataccgattgagagcaatgccaaacgctac

SEQ ID NO: 583149 - DNA, 75 bp, synthetic construct
  source 1..75: mol_type = other DNA
atcctgcgtctcgatgatcgggattatcgtgcaaatgtcgccagattagagggatttcgcagcagtttgcgatga

SEQ ID NO: 583150 - DNA, 75 bp, synthetic construct
  source 1..75: mol_type = other DNA
cgatggcacgcctgccgcaccgttgattagctggcaggatgcccgtgtcacccgcccttacgaacacactaattc

SEQ ID NO: 583151 - DNA, 75 bp, synthetic construct
  source 1..75: mol_type = other DNA
ttaactttggagtgtcagggttgagtggtaatttatggttgatggagaagtgggagttaaaaaatatatttaact

SEQ ID NO: 583152 - DNA, 75 bp, synthetic construct
  source 1..75: mol_type = other DNA
gatttcttagaggcaaaggtagtaaatctttcatttgatgacatattaaaatataagcaagagttcaaaaaaata

SEQ ID NO: 583153 - DNA, 75 bp, synthetic construct
  source 1..75: mol_type = other DNA
atgtcaattgactttaccccaggtataataaatacatataacggtgacatttataaccgcacaacaaataccgac

SEQ ID NO: 583154 - DNA, 75 bp, synthetic construct
  source 1..75: mol_type = other DNA
ctgaacaatttgatttagcgcaacaacaactccaacaaattaatgcatgccacacgaacaccacatatacaaatg

SEQ ID NO: 583155 - DNA, 75 bp, synthetic construct
  source 1..75: mol_type = other DNA
ctagtcctaaccttatcaaatttttattttgaagatctacttaatataaatttcactgacgcaaatttatttaac

SEQ ID NO: 583156 - DNA, 75 bp, synthetic construct
  source 1..75: mol_type = other DNA
gaattattagaaaccagggtaaataatctttcatacaacaacataataaaatatcagaaagaattccaaaaagaa

SEQ ID NO: 583157 - DNA, 75 bp, synthetic construct
  source 1..75: mol_type = other DNA
gacttaccaactgatataagagacattcaaagcttgtacttaaaaatggcgaagctgtatattgagcacagtgaa

SEQ ID NO: 583158 - DNA, 75 bp, synthetic construct
  source 1..75: mol_type = other DNA
tcagtactatcaaaaatatgtgaagcaaatgataaaaaaggaatatgccatcatttggttaatgatggtgaagta

SEQ ID NO: 583159 - DNA, 75 bp, synthetic construct
  source 1..75: mol_type = other DNA
tattcaaagcattgaaatgttacatttcatcttcaattgaacccgtcttttatgaagaccataattatgcattta

SEQ ID NO: 583160 - DNA, 75 bp, synthetic construct
  source 1..75: mol_type = other DNA
ttgccgaccgtgacgagaacagtgccaccgggctggctgcggcctacgaatgcgcccatgccaatttgctggcaa

SEQ ID NO: 583161 - DNA, 75 bp, synthetic construct
  source 1..75: mol_type = other DNA
atgtcaattgactttaccccaggtataataaatacatatcacggcgatatttataactgcacaacaaataccgat

SEQ ID NO: 583162 - DNA, 75 bp, synthetic construct
  source 1..75: mol_type = other DNA
ggcaattgcggatgtgcgtggactgggttcaatggtggcagtggagtttaacaatccgcaaagcggtgagccgtc

SEQ ID NO: 583163 - DNA, 75 bp, synthetic construct
  source 1..75: mol_type = other DNA
tcacctcacgggcgcatcgtgctctaccgtgattcgctggacgacgccatcagtatgctgcgagtacgtgaagct

SEQ ID NO: 583164 - DNA, 75 bp, synthetic construct
  source 1..75: mol_type = other DNA
gattcggtaagcttgcttctaatgctgctgctgaaacgatgaaaaaagccaatttcaatgtgtgggataaaataa

SEQ ID NO: 583165 - DNA, 75 bp, synthetic construct
  source 1..75: mol_type = other DNA
tgcctgcactgacgccactgatgctggatgacgccaccggtaaactggtggcatgggatggtcagaaagccggaa

SEQ ID NO: 583166 - DNA, 75 bp, synthetic construct
  source 1..75: mol_type = other DNA
cacctgcactgacgccactgatgctggatgacgccaccggaaaactggttgtctgggatggtcagaaagccggaa

SEQ ID NO: 583167 - DNA, 75 bp, synthetic construct
  source 1..75: mol_type = other DNA
cttgaaattgttgaacgtactgactcaataaaagaccaggatattgaaataaaaaaaatatttaaagcactattg

SEQ ID NO: 583168 - DNA, 75 bp, synthetic construct
  source 1..75: mol_type = other DNA
ttagaaaatcagatcttattattgtagattatcatcttgataataatgcacctgataaaacacttaaactattac

SEQ ID NO: 583169 - DNA, 75 bp, synthetic construct
  source 1..75: mol_type = other DNA
cgcctgcactgacgccactgatgctggatgacgccagcggaaaactggtggcatgggatggtcagaaagccggaa

SEQ ID NO: 583170 - DNA, 75 bp, synthetic construct
  source 1..75: mol_type = other DNA
cgccagcactgacaccgctgatgctggatgacaccaccggtaaaatggtggcatgggatggtcagaaagccggaa

SEQ ID NO: 583171 - DNA, 75 bp, synthetic construct
  source 1..75: mol_type = other DNA
gattattagagatttatcgtcctttattaagcctgtcgttatcagactttactgaactggtagaaaaagaacggg

SEQ ID NO: 583172 - DNA, 75 bp, synthetic construct
  source 1..75: mol_type = other DNA
taccgttgccgcctgctgcaggattatatcagcggtatgaccgacctctatgcctgggatgaataccgacgtctg

SEQ ID NO: 583173 - DNA, 75 bp, synthetic construct
  source 1..75: mol_type = other DNA
tgccgactggatacacgataccggctacggctggctgctccggctcaatgcccgatgtcacccgtcgctgcgcct

SEQ ID NO: 583174 - DNA, 75 bp, synthetic construct
  source 1..75: mol_type = other DNA
aagaattttccggcgttcctgatgatgcggctgatgcgctttcgtcaatgccagaacttattagagcggcttttt

SEQ ID NO: 583175 - DNA, 75 bp, synthetic construct
  source 1..75: mol_type = other DNA
atctggctgaagtggtgaaaaccatgaccacagacccggttaccggtgaggtgaataaggctgcaaatgtggctg

SEQ ID NO: 583176 - DNA, 75 bp, synthetic construct
  source 1..75: mol_type = other DNA
agcgagacagagaagcagacggtctcgacactggcaacggttgctgccggcctggccggtggtctggtgggagac

SEQ ID NO: 583177 - DNA, 75 bp, synthetic construct
  source 1..75: mol_type = other DNA
aattacgatccctccaacgtgattatgctcaccggacgcgcctccgttgtggagcgccttcacgaccggtatacg

SEQ ID NO: 583178 - DNA, 75 bp, synthetic construct
  source 1..75: mol_type = other DNA
cttcagcactgccgtgccagcggtatttaccggtacagaacggaaaaagacgggatgtcggatgttgttggtgaa

SEQ ID NO: 583179 - DNA, 75 bp, synthetic construct
  source 1..75: mol_type = other DNA
gccagcgaaggcgaagaacagcgatttcccgggtaactggtggattatcgagacaaaacacaacgtggcggacgt

SEQ ID NO: 583180 - DNA, 75 bp, synthetic construct
  source 1..75: mol_type = other DNA
gtcgacccgtatacagcgtatggtgccggattcgttcaggcgcattgtgagttgatgccgtttgatgggggaact

SEQ ID NO: 583181 - DNA, 75 bp, synthetic construct
  source 1..75: mol_type = other DNA
atggaaaaaaacatatcagtagttataattacatttaatcccaaagtggaaattttgaaggaaaatataattaat

SEQ ID NO: 583182 - DNA, 75 bp, synthetic construct
  source 1..75: mol_type = other DNA
tcctcaattagtgtttttgatactctttgtgcatcatcatatctgaaagaaggcgaggctgcttatttacctcgt

SEQ ID NO: 583183 - DNA, 75 bp, synthetic construct
  source 1..75: mol_type = other DNA
aatacaaaggcttataaagcaattcgacgtgatattgaatacacatggactgaaaattataacaccttgcatctt

SEQ ID NO: 583184 - DNA, 75 bp, synthetic construct
  source 1..75: mol_type = other DNA
caatctgcgtaaggagtttgagcagaagaataccgatcttctccgccagcgtcaggctggtgaaatcgacgagac

SEQ ID NO: 583185 - DNA, 75 bp, synthetic construct
  source 1..75: mol_type = other DNA
gcttatcaatcacttctgttgatgaatgggcagcacgatgaacttaatcgattactcggcctgggtaaccagctc

SEQ ID NO: 583186 - DNA, 75 bp, synthetic construct
  source 1..75: mol_type = other DNA
tcagtggtggcgtctccatcgccgggattaacgacatcatttcctgtgacgatttctaccgtttccagcagcgcg

SEQ ID NO: 583187 - DNA, 75 bp, synthetic construct
  source 1..75: mol_type = other DNA
cgtactcagaaggccgcgacggatatcaaacgcctgcgcccgctggtggaggatgcaataaataaaggcattctg

SEQ ID NO: 583188 - DNA, 75 bp, synthetic construct
  source 1..75: mol_type = other DNA
tgaaaattataatactttgcatctcatctccaacaaaataaacaaatttgatattattgatcaagttgaggatga

SEQ ID NO: 583189 - DNA, 75 bp, synthetic construct
  source 1..75: mol_type = other DNA
gtagcgatgtggtgctggtgtccggtattcaccgtggcgaaccgaaaatagttggtcgttatgacagtcttggaa

SEQ ID NO: 583190 - DNA, 75 bp, synthetic construct
  source 1..75: mol_type = other DNA
acgtcaccaacataaaaggcgatgtcgcacatgcccagtcaacggctgaccatgccagcgctaacgccaacaccg

SEQ ID NO: 583191 - DNA, 75 bp, synthetic construct
  source 1..75: mol_type = other DNA
tggctgtcgttgttgctaccgccgtaagtccatctgcgtttgcgggtgatactgttgaggcggcaacgacagaat

SEQ ID NO: 583192 - DNA, 75 bp, synthetic construct
  source 1..75: mol_type = other DNA
cggtgatgttcagaccgccgcccgttatcagggaatggtcaacgctaaactggctgcggaaaatgaagccagcac

SEQ ID NO: 583193 - DNA, 75 bp, synthetic construct
  source 1..75: mol_type = other DNA
cgccagaaggcgaaaaagtccgcgctcgcttaattaaccgcttcgagaaatacggtaacgatatcgacgaggtgg

SEQ ID NO: 583194 - DNA, 75 bp, synthetic construct
  source 1..75: mol_type = other DNA
tttaaatacagagataaatggtgggttattaatattgcaggtaatcatttacggcttatcgcatatattgatttc

SEQ ID NO: 583195 - DNA, 75 bp, synthetic construct
  source 1..75: mol_type = other DNA
cggtgctgtgacagaaaacaaaaataatatcgaacagaaccgcagcgatattgctgaccagcagcaacaactcga

SEQ ID NO: 583196 - DNA, 75 bp, synthetic construct
  source 1..75: mol_type = other DNA
tatcaaatgtgccataaggccggcgtggttctggctgacggtggtgaataccctgcgttacacaggaatgcgtct

SEQ ID NO: 583197 - DNA, 75 bp, synthetic construct
  source 1..75: mol_type = other DNA
tggttctggctgacggtggtgaataccctgcgttacaccggtatgcgtctgaatcagttgctgcatttacgcctg

SEQ ID NO: 583198 - DNA, 75 bp, synthetic construct
  source 1..75: mol_type = other DNA
taagtatatagttgaattattaaaaaagaaaaataggccagaaattatatcaggtcttaaagaacttagatattg

SEQ ID NO: 583199 - DNA, 75 bp, synthetic construct
  source 1..75: mol_type = other DNA
atgaaaactgtaaagatatctttactggctgtcgttattgctactgctgtcagtccatctgcctttgcgggtgat

SEQ ID NO: 583200 - DNA, 75 bp, synthetic construct
  source 1..75: mol_type = other DNA
ttcgacgcctgtcaaaggagtgcggttttgccgtttcaccgcaccgtttcagacacactcttgccacggaactga

SEQ ID NO: 583201 - DNA, 75 bp, synthetic construct
  source 1..75: mol_type = other DNA
tatcaaagcgtgcaattaccgcaaccgaacctcggcgtgcgcactaacgccttgatcgacacgccgttcctgatg

SEQ ID NO: 583202 - DNA, 75 bp, synthetic construct
  source 1..75: mol_type = other DNA
agtctgccgttgccgcctcaagggcggaggtttatagggctcagcaagctgtacagagatcgcgtagcgcagatg

SEQ ID NO: 583203 - DNA, 75 bp, synthetic construct
  source 1..75: mol_type = other DNA
cctcggacgcgaaacactggatgagttcgaagatttgctggcagctcaggcggcagaaaatgaattcctgccctg

SEQ ID NO: 583204 - DNA, 75 bp, synthetic construct
  source 1..75: mol_type = other DNA
tgtagaaacatattatgctgctataaacgtaatcagccaaagcctgagttttagtgctgatgaactaaagacgta

SEQ ID NO: 583205 - DNA, 75 bp, synthetic construct
  source 1..75: mol_type = other DNA
acgccgaatatcggtgatatgtgcgaagtggcgctggcggcgaagcgcggcggcgaagcgcggcggcgcagatgg

SEQ ID NO: 583206 - DNA, 75 bp, synthetic construct
  source 1..75: mol_type = other DNA
ctgttcaaccacggcgagcctgtcagtatcgatgacctgaatcaccatcagtgcgttgtcggctttcgccgtaac

SEQ ID NO: 583207 - DNA, 75 bp, synthetic construct
  source 1..75: mol_type = other DNA
ggcctgctgacgtatctgactaacctgtatttcaaaatcagagaggaccgtcgtaaggcggcgcggggagagtag

SEQ ID NO: 583208 - DNA, 75 bp, synthetic construct
  source 1..75: mol_type = other DNA
ggcctgctgacgtatctgacaaatctttatttcaagattaaagaagataagcgtaaggctgcgagaggtgaataa

SEQ ID NO: 583209 - DNA, 75 bp, synthetic construct
  source 1..75: mol_type = other DNA
agctataagtctatatactctcagtactgctgtaattttaggccttgttgcatcaaattatgatgtaggtatttt

SEQ ID NO: 583210 - DNA, 75 bp, synthetic construct
  source 1..75: mol_type = other DNA
tttgctatatccggagtgattgcgtttattttaattagacagatgggagttagactagttaaaattaaattgtcg

SEQ ID NO: 583211 - DNA, 75 bp, synthetic construct
  source 1..75: mol_type = other DNA
tatttttcagttccacttatagttcgttattatttaggtgagcaatattatgattgtattagattgttaaaagtc

SEQ ID NO: 583212 - DNA, 75 bp, synthetic construct
  source 1..75: mol_type = other DNA
atacgcataaagatgattgttctgaaaaaaataataaagaaaaattacaggggggcttatcatgcggccataaaa

SEQ ID NO: 583213 - DNA, 75 bp, synthetic construct
  source 1..75: mol_type = other DNA
tgaagaggctctgattctggaatctgcgatgatgagacgcagggttaaaaagctggaagagcaagttttgcaatt

SEQ ID NO: 583214 - DNA, 75 bp, synthetic construct
  source 1..75: mol_type = other DNA
gggctggcgtatcagaaaaatggcaacatcgcggaagcaatttgggcaaatcgtaaagcgatctcgttggccagt

SEQ ID NO: 583215 - DNA, 75 bp, synthetic construct
  source 1..75: mol_type = other DNA
gtaatatcaccctatgccgtctagaggcgcaacacggatttgaatatgctttaagcgtactattatctaaaaagc

SEQ ID NO: 583216 - DNA, 75 bp, synthetic construct
  source 1..75: mol_type = other DNA
tgacggaaatccgcgcttcggctgtcggaatgaccggtgcgtttgccggtgcctttgccaccggacacctgattt

SEQ ID NO: 583217 - DNA, 75 bp, synthetic construct
  source 1..75: mol_type = other DNA
ctatccaggacccggcaaacaccttcaatgttctgaatacagctggcatttctcgttcaatttatccggtgatgt

SEQ ID NO: 583218 - DNA, 75 bp, synthetic construct
  source 1..75: mol_type = other DNA
agaaaaaaacaggtctgttcctggcattcatattcactacttccttttcggccttcgctgggcaggatattaatt

SEQ ID NO: 583219 - DNA, 75 bp, synthetic construct
  source 1..75: mol_type = other DNA
tgctgtcggaatggctggcgcatttgccggtgcctttgccaccggacacctgatttcgctggccgatgagtgggg

SEQ ID NO: 583220 - DNA, 75 bp, synthetic construct
  source 1..75: mol_type = other DNA
ggcctggtgtattccccggtctaccatatcgccattcagaatgacgggactaatggccagatagggccggaggcg

SEQ ID NO: 583221 - DNA, 75 bp, synthetic construct
  source 1..75: mol_type = other DNA
aacaggccagtcgggtgaaatccctgcaggaaaaaatcgcaggatatcagtatgttctggcgaacccgggctgga

SEQ ID NO: 583222 - DNA, 75 bp, synthetic construct
  source 1..75: mol_type = other DNA
ctgtgtggaattatctattcccggcagaacctacggcttgcatgacatcgcgatgtttaatctgctgaaagtgat

SEQ ID NO: 583223 - DNA, 75 bp, synthetic construct
  source 1..75: mol_type = other DNA
tacatcacagcgggacagctactattctctgaatgccagttggaacggttcattcactgcaactcgccacggcgc

SEQ ID NO: 583224 - DNA, 75 bp, synthetic construct
  source 1..75: mol_type = other DNA
tggtgactggaaatatgtaccgaaaaaagaggattgtaacgacaggccgaactatgaaattcaggccttattcac

SEQ ID NO: 583225 - DNA, 75 bp, synthetic construct
  source 1..75: mol_type = other DNA
ccagcatatacatccggtcgtcggggttgtgtgccaggtgtcatatcaagttggccttacggaatttcaactgcc

SEQ ID NO: 583226 - DNA, 75 bp, synthetic construct
  source 1..75: mol_type = other DNA
agaaattggttatctggaatatcaggaaatgaggagtggcagggacatcgcgtttaatatcatcaaacgtaatcc

SEQ ID NO: 583227 - DNA, 75 bp, synthetic construct
  source 1..75: mol_type = other DNA
aggacatacaaaaatgaaagcaatacgctgcctgaagcgctatatttcatgcgaagtttattcaaaacagcaggt

SEQ ID NO: 583228 - DNA, 75 bp, synthetic construct
  source 1..75: mol_type = other DNA
attaaaaacagcgcatctagtataaaaagtaagatattgctgagtttggtaaaggaactaaaaaataactctatt

SEQ ID NO: 583229 - DNA, 75 bp, synthetic construct
  source 1..75: mol_type = other DNA
attggagatgatgaagccgaggctaatagtaaccttaaaaactttattgagtattacaaagtaattccgtggtat

SEQ ID NO: 583230 - DNA, 75 bp, synthetic construct
  source 1..75: mol_type = other DNA
aatgagcggagacttcatcaatcgctataactttgacgataaaacgatcatatggttagattatgcaacgccttc

SEQ ID NO: 583231 - DNA, 75 bp, synthetic construct
  source 1..75: mol_type = other DNA
caggggggtgagcagacttaccggtatgtacataaccccaatgaatctattgatccacttggattggctccatgc

SEQ ID NO: 583232 - DNA, 75 bp, synthetic construct
  source 1..75: mol_type = other DNA
cgcgcctgaaagctatcgacacccgacgaataaagcctgtctatggtgagcatcgtcgagtgagtggaagcgcaa

SEQ ID NO: 583233 - DNA, 75 bp, synthetic construct
  source 1..75: mol_type = other DNA
tgacgatgattgactacgtgccgcaagaacaaatccagaaagaaagcgtgctatcgggtctgttcttcgggattt

SEQ ID NO: 583234 - DNA, 75 bp, synthetic construct
  source 1..75: mol_type = other DNA
actctggaagttattgcgcgagtggtattctggtttattggctaccagagtgtaattacggtgttggtttgtttt

SEQ ID NO: 583235 - DNA, 75 bp, synthetic construct
  source 1..75: mol_type = other DNA
gattgcatccggtgaaagcagtcttacggggtttattagtcaggtagatggaacaccagcgtatacaggtgtatt

SEQ ID NO: 583236 - DNA, 75 bp, synthetic construct
  source 1..75: mol_type = other DNA
ttgaacggcaatacccgcgatggcgtgatccatttcccgaatatccgcacctccactctctggggtcaggtgcac

SEQ ID NO: 583237 - DNA, 75 bp, synthetic construct
  source 1..75: mol_type = other DNA
ggtgtttgcgcaggtctggcagtccatcacagacggctgggccgtggtggttgatttctttgccggtctttcccc

SEQ ID NO: 583238 - DNA, 75 bp, synthetic construct
  source 1..75: mol_type = other DNA
cctgcccgcagacaccggctacccggacccgcggggggaactggacccggaagccgaccccggcctgctgtatgc

SEQ ID NO: 583239 - DNA, 75 bp, synthetic construct
  source 1..75: mol_type = other DNA
acagtgaacagcagaccggtaaatattttgataagggagagcatgcctggcaatgggatggctacagtaatcaag

SEQ ID NO: 583240 - DNA, 75 bp, synthetic construct
  source 1..75: mol_type = other DNA
ggtgacgtaggtggttctgctttctccgaaataacaggcaaaggaatcgaaaaaatttcgtcttcaaatgctaat

SEQ ID NO: 583241 - DNA, 75 bp, synthetic construct
  source 1..75: mol_type = other DNA
gtgtggatcactattgcaccgttcgtgacaagtaacagcgatatgcagtcagccgtgaacattaacagtgcagca

SEQ ID NO: 583242 - DNA, 75 bp, synthetic construct
  source 1..75: mol_type = other DNA
ggtaatacacttgctgtggtgggttatgtaagaaccattaccgattatccagtgttcgcatatatttcaacattt

SEQ ID NO: 583243 - DNA, 75 bp, synthetic construct
  source 1..75: mol_type = other DNA
agcatcagtggattgatcagtggctccagttgtggggtgcatggtcgcagaccgggaagatagacaaggcgatga

SEQ ID NO: 583244 - DNA, 75 bp, synthetic construct
  source 1..75: mol_type = other DNA
gcaaaatgcctttatcagccgcgataatgtgaacaaagttgcaaaaaatgttcacaacgtgcttgcttttcaatg

SEQ ID NO: 583245 - DNA, 75 bp, synthetic construct
  source 1..75: mol_type = other DNA
cgcccgacgattctgcgtgacggtatggcggcagacggcgtgtcgcagcgcaaatataactatatgcgcgccgag

SEQ ID NO: 583246 - DNA, 75 bp, synthetic construct
  source 1..75: mol_type = other DNA
tctcatataaccttactgagcgcccattagcatcaatggtaaagagcatgctattagatgcggtagaacaactca

SEQ ID NO: 583247 - DNA, 75 bp, synthetic construct
  source 1..75: mol_type = other DNA
gactgtacgaaggaataataatcgagctaagatgaatgttgagttcgactcatggatatgcaccagatgttgttg

SEQ ID NO: 583248 - DNA, 75 bp, synthetic construct
  source 1..75: mol_type = other DNA
cagctcatcctgtcatcgcgcaccattggcgggctgggcgtgttccttgcgccgttcttcccggatgcaacgatg

SEQ ID NO: 583249 - DNA, 75 bp, synthetic construct
  source 1..75: mol_type = other DNA
atattcatctcgccggagctgtcattgaagtaatggggataaagtcagcgatgacgatccgcattaccacaccga

SEQ ID NO: 583250 - DNA, 75 bp, synthetic construct
  source 1..75: mol_type = other DNA
ggggagctacattctcgattttgcctgctgctcggcgcgtgtagttgttgagctggatggtgggcagcatgattc

SEQ ID NO: 583251 - DNA, 75 bp, synthetic construct
  source 1..75: mol_type = other DNA
tgaagaacaatgcgcaacctcctgtaccggtttatattccattcgatttgaaatgcccaggtacaaatataaagt

SEQ ID NO: 583252 - DNA, 75 bp, synthetic construct
  source 1..75: mol_type = other DNA
tacgccgagtataagaaggaattccccaaaaatgccgatgagcaagattttaaagagtatgtaactaaatcatac

SEQ ID NO: 583253 - DNA, 75 bp, synthetic construct
  source 1..75: mol_type = other DNA
taaacgacgcacttgtgccggcacataatagcaagcaccataatagatcagattcgattcttgctgtaagtgata

SEQ ID NO: 583254 - DNA, 75 bp, synthetic construct
  source 1..75: mol_type = other DNA
gccgggctggcacttctggccgtgggggtctggtatgtcatcacccactgggaagaactggcggcagcaatcatg

SEQ ID NO: 583255 - DNA, 75 bp, synthetic construct
  source 1..75: mol_type = other DNA
cgggaatgcgcctgcgccacccggtgactgacgatacctgcgatgaccgtctggcacacagccccgcagaccgga

SEQ ID NO: 583256 - DNA, 75 bp, synthetic construct
  source 1..75: mol_type = other DNA
ctgatgtcggcggggagctatgcacatttaaaaaatggaactaatttatatgcagccagttttggtaaggctgtt

SEQ ID NO: 583257 - DNA, 75 bp, synthetic construct
  source 1..75: mol_type = other DNA
cggcagtaccaccacgtatgaatgggatgaattccatcacctgctggcccgccactcccctgccggacgggtgga

SEQ ID NO: 583258 - DNA, 75 bp, synthetic construct
  source 1..75: mol_type = other DNA
cgagcttcagtccctgaatgaggacatctcgtgcacggctttgcagctggaagcaatgctccgccgcagaagtga

SEQ ID NO: 583259 - DNA, 75 bp, synthetic construct
  source 1..75: mol_type = other DNA
cgttgggaacgcaatgatgaaagagtaaaggctgcatttgagggaacggtgaagcaaaaaatctctggcaagaag

SEQ ID NO: 583260 - DNA, 75 bp, synthetic construct
  source 1..75: mol_type = other DNA
gcccctcccggcgtgaacggtgtgcgactgacaccgcgaggctggtttgaatttaccgaagcctggcttcccgcg

SEQ ID NO: 583261 - DNA, 75 bp, synthetic construct
  source 1..75: mol_type = other DNA
gacagtggcaggatgcggaatccgggctgtgctataaccggttccggtattacgagtcggaaaccgggatgtacc

SEQ ID NO: 583262 - DNA, 75 bp, synthetic construct
  source 1..75: mol_type = other DNA
ccgcctggcagaagtcatcacgccggaaggcaaaacgcagtatgcctatgacaaatccggcaggctgacgggtat

SEQ ID NO: 583263 - DNA, 75 bp, synthetic construct
  source 1..75: mol_type = other DNA
tacggacgggaaacacggcgggagtaccggctggaccggaacggccaggtcatggcggtgacagcctcaggcacc

SEQ ID NO: 583264 - DNA, 75 bp, synthetic construct
  source 1..75: mol_type = other DNA
gcggtgacagcctcaggcaccgggctgggctatggcgaaggcgatgagacttatggctatgacagctgcggctac

SEQ ID NO: 583265 - DNA, 75 bp, synthetic construct
  source 1..75: mol_type = other DNA
catccggatatccggaatattgctgttaccgggccgtatggggcagggaaaagctcagtattaaaaacatggtgc

SEQ ID NO: 583266 - DNA, 75 bp, synthetic construct
  source 1..75: mol_type = other DNA
caccttatatgaggtgtatcatgaagtgattcatgctaagcaatttgcgaaaattggacgagaagcatacgaagc

SEQ ID NO: 583267 - DNA, 75 bp, synthetic construct
  source 1..75: mol_type = other DNA
gggacagaccagcctgtgggggctggcactcagcctgcccgcagacaccggctacccggacccgcgcggggaact

SEQ ID NO: 583268 - DNA, 75 bp, synthetic construct
  source 1..75: mol_type = other DNA
ggttcgtcatggacaacggctgtcactttcgggatagatgagattccggttctggatgtgtcggatatcagtgtg

SEQ ID NO: 583269 - DNA, 75 bp, synthetic construct
  source 1..75: mol_type = other DNA
tcgcggcggccatctggcgtaaggctccgccgggtattgatatgaatggcaacacaacgttcactgttgcagata

SEQ ID NO: 583270 - DNA, 75 bp, synthetic construct
  source 1..75: mol_type = other DNA
ttcaaggaacactttgtcttactagtgcgagccgataaacttcagcctgaactccatcctcttatgctctgtgag

SEQ ID NO: 583271 - DNA, 75 bp, synthetic construct
  source 1..75: mol_type = other DNA
tgccggtcgcttatgttaccgctttttttaatgatgccgatattaagcgggtcactgaaatggtgattacggaaa

SEQ ID NO: 583272 - DNA, 75 bp, synthetic construct
  source 1..75: mol_type = other DNA
aaagagatgaacgcgggttatacgctgatttctgcggcccacgcgggctatctcacgccgcctaacgttatctga

SEQ ID NO: 583273 - DNA, 75 bp, synthetic construct
  source 1..75: mol_type = other DNA
gccaccagcggctgcctattgaacatgcattccgtgatgcaagcgagctgggttacgatggcatcgaaatttggg

SEQ ID NO: 583274 - DNA, 75 bp, synthetic construct
  source 1..75: mol_type = other DNA
aacgagctgttctccttctctggaataatatttttaagtagcattatattgttctgtggcgtactgtttctaccc

SEQ ID NO: 583275 - DNA, 75 bp, synthetic construct
  source 1..75: mol_type = other DNA
caaactgggaaacctgctggggaaaagcgggaagctgctgggggcaaagctcggcgcgttgctggggaaaacagg

SEQ ID NO: 583276 - DNA, 75 bp, synthetic construct
  source 1..75: mol_type = other DNA
accgctacgataaagacacgctgcagctcacagaagtcattaacccgcagggcgagtcataccgttatattctgg

SEQ ID NO: 583277 - DNA, 75 bp, synthetic construct
  source 1..75: mol_type = other DNA
tgggattttggcggtagaatagagcgagaagccaaaattgaatctataaaaaatatcgccatagcaaatggaggt

SEQ ID NO: 583278 - DNA, 75 bp, synthetic construct
  source 1..75: mol_type = other DNA
tggggacatggcacttcggttgcgggagttgcagtttttggagacttacgacatcaactggctcagaaccaactg

SEQ ID NO: 583279 - DNA, 75 bp, synthetic construct
  source 1..75: mol_type = other DNA
gaaatagaaaaaaaggctagagaagaaataaaaaaatcagcccagcaatgtattgcagtggataaaagtgtttta

SEQ ID NO: 583280 - DNA, 75 bp, synthetic construct
  source 1..75: mol_type = other DNA
ctatgaggcgcgtctgtcgcaccgttttgatggtacatacctgagtggctcttactggcgtcaggattactggat

SEQ ID NO: 583281 - DNA, 75 bp, synthetic construct
  source 1..75: mol_type = other DNA
catgctggatgccagtaaatatgatgatgtttataacagagaaaaaaaatgttatgagctggctaaaaaaaatca

SEQ ID NO: 583282 - DNA, 75 bp, synthetic construct
  source 1..75: mol_type = other DNA
gaaagtgagcctggatggcggcaaaacctgccgtatttccatggcaggcattaaacctggaacagaacgagtgca

SEQ ID NO: 583283 - DNA, 75 bp, synthetic construct
  source 1..75: mol_type = other DNA
caggctatatctacagtcatattacttttttcaatttcaaatactgggaaaaaaagtttagtatacttattgcta

SEQ ID NO: 583284 - DNA, 75 bp, synthetic construct
  source 1..75: mol_type = other DNA
ctcaggcctatctgttgagtaaaacggaccccgcacgttgggattatggtgtgaatggcggacggctgaaatatt

SEQ ID NO: 583285 - DNA, 75 bp, synthetic construct
  source 1..75: mol_type = other DNA
tatctctgttggcactgagtatatattctcattttagtgtcgcgacagaattaaacctggattttatccagggaa

SEQ ID NO: 583286 - DNA, 75 bp, synthetic construct
  source 1..75: mol_type = other DNA
cgcaactcgcttggctccatcggtggcggtaaccacttcgtagaactgcaacagattgatcaaattatcgacgcg

SEQ ID NO: 583287 - DNA, 75 bp, synthetic construct
  source 1..75: mol_type = other DNA
cagctcccggggggacatgagcatgggtacagccgcagccggcagtaacatgacgttctcaccgtcacagaatgg

SEQ ID NO: 583288 - DNA, 75 bp, synthetic construct
  source 1..75: mol_type = other DNA
atctattactgagcggcgataacgcattgcaaagttataatgagccgatgaccatgcgcaaagatttaatcgctg

SEQ ID NO: 583289 - DNA, 75 bp, synthetic construct
  source 1..75: mol_type = other DNA
cagttacaacgcgggattttccggttcggtggtggccacggcagaaagtggtctgctgtttaccagggaccagag

SEQ ID NO: 583290 - DNA, 75 bp, synthetic construct
  source 1..75: mol_type = other DNA
cattatattgtagatgtagtcgtcaacaatgaacgtagtggacgaacaaatctggttattacaagtgaggatgaa

SEQ ID NO: 583291 - DNA, 75 bp, synthetic construct
  source 1..75: mol_type = other DNA
cccgcgataacagccgcacgccaatgcaatggaacaacggcgataacgccgggtttactaccgccgaaccgtgga

SEQ ID NO: 583292 - DNA, 75 bp, synthetic construct
  source 1..75: mol_type = other DNA
atggtggcacctgtcgtttctctatgaccggaatcaaaccagaagcaaccagagtgcaggaggttcgctgtgaat

SEQ ID NO: 583293 - DNA, 75 bp, synthetic construct
  source 1..75: mol_type = other DNA
taaaattttattgccttatgaaactttatgaatttaaaaatataaaaattgatttagtgcttacagaagatatca

SEQ ID NO: 583294 - DNA, 75 bp, synthetic construct
  source 1..75: mol_type = other DNA
cccgggagcacaggacgtgttgcgcaacgcagaaagacgtctggataagctggatgacccgttcacgggtaaagg

SEQ ID NO: 583295 - DNA, 75 bp, synthetic construct
  source 1..75: mol_type = other DNA
accaaacatctcatctcctgcggcgcaaagcgtatcgcacacatcaccggagagagttggatggaggcctctcga

SEQ ID NO: 583296 - DNA, 75 bp, synthetic construct
  source 1..75: mol_type = other DNA
tagcaatgggcgtgatgccgacgagttattagcaatccttgccagtaaatctcgcgacaacagtcgtacgccgat

SEQ ID NO: 583297 - DNA, 75 bp, synthetic construct
  source 1..75: mol_type = other DNA
acgccgctcagcacgcagttggtgaagtttcagcgcaacaaaaagaaagtcggcctggtcgtcaacgagtatgga

SEQ ID NO: 583298 - DNA, 75 bp, synthetic construct
  source 1..75: mol_type = other DNA
aaaaaaggaaatgctgtcctcattgaatacaatttaaaagtgatcttacccagcaatagtggacacgcggctaag

SEQ ID NO: 583299 - DNA, 75 bp, synthetic construct
  source 1..75: mol_type = other DNA
cacctttttggataaaaatataaatatcgctgctgagcttgatattacaaataacgagaaaaaatattcgcccgg

SEQ ID NO: 583300 - DNA, 75 bp, synthetic construct
  source 1..75: mol_type = other DNA
aaaaagattcaaattatagtcaaaagacacctgaacaattggttgcacaggtttgctttaatgatgatgattgtg

SEQ ID NO: 583301 - DNA, 75 bp, synthetic construct
  source 1..75: mol_type = other DNA
tgctaaatatgttaatgaaatggattttactataaatagttttagccaaaagatgtatgtagcgatggtgaaaaa

SEQ ID NO: 583302 - DNA, 75 bp, synthetic construct
  source 1..75: mol_type = other DNA
gcgcaacgaaaccttactcactatctacgactatggtgatgacatcgagttggcactgaacatcatccgtcagtt

SEQ ID NO: 583303 - DNA, 75 bp, synthetic construct
  source 1..75: mol_type = other DNA
aaccacgccgcttaataccattcatgcggcgctgaaacgtattgctcaacgttgccaacgcggcggacctggtgc

SEQ ID NO: 583304 - DNA, 75 bp, synthetic construct
  source 1..75: mol_type = other DNA
attcaacttcccgctttaatgcagctgtaacaaactgccctgtactttcgccgggcatttttaccgcctcaacat

SEQ ID NO: 583305 - DNA, 75 bp, synthetic construct
  source 1..75: mol_type = other DNA
gcgcgacagtgcaaaacacagtgtgcgtgaactgccggtgaactggtgggtacagccttctgttatccgcacctt

SEQ ID NO: 583306 - DNA, 75 bp, synthetic construct
  source 1..75: mol_type = other DNA
gaagcaataaaagatgtcgggatgtcatcacttaaattaattaatgatgtcgttctctttccacgaacaattccc

SEQ ID NO: 583307 - DNA, 75 bp, synthetic construct
  source 1..75: mol_type = other DNA
ttgatactgaagacgaaagaataattgatagtattttcgacaggcttaacagaaatggtgaacgacttaacggac

SEQ ID NO: 583308 - DNA, 75 bp, synthetic construct
  source 1..75: mol_type = other DNA
aataacatcagcaagtgaggaagaagatgatgaattgactggtgtgtttttttccgatttatcaacttctaaata

SEQ ID NO: 583309 - DNA, 75 bp, synthetic construct
  source 1..75: mol_type = other DNA
ctccagtatttatcggctttgttattgtgccgttgttggtatggccgacggtggttgcgctggctgtttgtgtta

SEQ ID NO: 583310 - DNA, 75 bp, synthetic construct
  source 1..75: mol_type = other DNA
gccaccttgaacagctcgacagcgtagggagtgccgccgtggtgtgccaccagggacagctgtatgcctttatca

SEQ ID NO: 583311 - DNA, 75 bp, synthetic construct
  source 1..75: mol_type = other DNA
gtgctgactgtcgtaatggtaccggtgggtgcgctcatcatccgtgcggataaccccttccgggatgaggtcggt

SEQ ID NO: 583312 - DNA, 75 bp, synthetic construct
  source 1..75: mol_type = other DNA
agagatggaggctcgatttttctggcagacaaaaaatccctgacggtcagatacattgatataaaaccccgtgac

SEQ ID NO: 583313 - DNA, 75 bp, synthetic construct
  source 1..75: mol_type = other DNA
ttaagaagtagttatggaataaataaattaaatggtcacagtcttctgattcgccttatatcagaatttggatat

SEQ ID NO: 583314 - DNA, 75 bp, synthetic construct
  source 1..75: mol_type = other DNA
agatgccggattaatgcagtttgctaatggtacgcagatccctatcggtacgctgggggcagccatttctcaggc

SEQ ID NO: 583315 - DNA, 75 bp, synthetic construct
  source 1..75: mol_type = other DNA
ttcgtaatcttgaaatattcggagacagcggctctggagcatacttatatgataacaaactagaaaaatgggtat

SEQ ID NO: 583316 - DNA, 75 bp, synthetic construct
  source 1..75: mol_type = other DNA
agcgcccccggtcctcgctgaaaatattgtgggttcagtcagaacctggaagtccatgcaggcagatggctggaa

SEQ ID NO: 583317 - DNA, 75 bp, synthetic construct
  source 1..75: mol_type = other DNA
ttgttgaagatcgtcttctctatcaggacccacctgttgaagacgtcgatgcgaaagcagctgagcttagaaaac

SEQ ID NO: 583318 - DNA, 75 bp, synthetic construct
  source 1..75: mol_type = other DNA
tcagctatgagcagctgttgcaggaagccgaggagtcgatacagaaatgtgatctcaacaaggaaggcccttact

SEQ ID NO: 583319 - DNA, 75 bp, synthetic construct
  source 1..75: mol_type = other DNA
tcgatacggttctgaatactggtctggccctgtttggttatttttacatcatgttcagcgcagggaagtgggcgg

SEQ ID NO: 583320 - DNA, 75 bp, synthetic construct
  source 1..75: mol_type = other DNA
atgaagttaagcttgagtgctctcgttattttactaaaggtgtgattaaagaagagtccaccgataattcatttt

SEQ ID NO: 583321 - DNA, 75 bp, synthetic construct
  source 1..75: mol_type = other DNA
ctgacggggctggcggaccgcttcgggcggacgctgacgtaccggcgtgaggccgccggtgacctgaccggggaa

SEQ ID NO: 583322 - DNA, 75 bp, synthetic construct
  source 1..75: mol_type = other DNA
tgccagagggggctcgctggcgggcaccaccacgctgaataacggtgccacgcttactctttccgggaaaacggt

SEQ ID NO: 583323 - DNA, 75 bp, synthetic construct
  source 1..75: mol_type = other DNA
tctttatatctttaaacgtgagccacgctttttaggtcctctggttcctattccggcaatgcaccaggtgccgga

SEQ ID NO: 583324 - DNA, 75 bp, synthetic construct
  source 1..75: mol_type = other DNA
atgtcccgtacatggcgatggctgggttccattttcctaaaacagtggaaaaaacggcgcaaacaggaactacgc

SEQ ID NO: 583325 - DNA, 75 bp, synthetic construct
  source 1..75: mol_type = other DNA
aatacttcggcggatataactttggtgcaggcaatgcatggctggactttaaaaatatgaaatttgatttcagtt

SEQ ID NO: 583326 - DNA, 75 bp, synthetic construct
  source 1..75: mol_type = other DNA
cagcggtatatgggatgaacagcgtgccgcgttaatgctgccgctactgcgccgcattctggctttgccaccaca

SEQ ID NO: 583327 - DNA, 75 bp, synthetic construct
  source 1..75: mol_type = other DNA
gaccagcagacgcgagtatatacgagcgtatcgaagccgactgggagcgtctggacgcgcttatccggaacggga

SEQ ID NO: 583328 - DNA, 75 bp, synthetic construct
  source 1..75: mol_type = other DNA
aaatacatctttaccactgtgaccaccggggactgccgcaggcgcttatcagcccggaaggggaaacggcgtggt

SEQ ID NO: 583329 - DNA, 75 bp, synthetic construct
  source 1..75: mol_type = other DNA
ctggaaaacatttatattgatcataataatctggaaagtttagatttaaaaaatcagcattcattggttaatctg

SEQ ID NO: 583330 - DNA, 75 bp, synthetic construct
  source 1..75: mol_type = other DNA
ttttactaacccagtacgagttcaacggcccattttgcgagccacctgaacttatacctgaccactatcgcgacc

SEQ ID NO: 583331 - DNA, 75 bp, synthetic construct
  source 1..75: mol_type = other DNA
gatttatggcaaataaggccgccgtaaaagcaatacgcgaggcactaggaaacgaagagttccagcgtttagcaa

SEQ ID NO: 583332 - DNA, 75 bp, synthetic construct
  source 1..75: mol_type = other DNA
ctgatgctgcaaatcaggagggcgactttgcacaaaatgctgccattaacggtggtatcaatattggtgctcaag

SEQ ID NO: 583333 - DNA, 75 bp, synthetic construct
  source 1..75: mol_type = other DNA
aggatcgatagcgaaattatccgcaaccagaagtggtcgttacgctattgaaaaggctgttcaagaggcgacaaa

SEQ ID NO: 583334 - DNA, 75 bp, synthetic construct
  source 1..75: mol_type = other DNA
cagttttagagagcgtattgtctggcgcttttccaaccgctggcgctatcgcagggttctctggaggaggtgtta

SEQ ID NO: 583335 - DNA, 75 bp, synthetic construct
  source 1..75: mol_type = other DNA
cagtcaggggcttggtggccccaaggttttggatgatgtttatcgccctgtcgatcgaccgacagacccttacgc

SEQ ID NO: 583336 - DNA, 75 bp, synthetic construct
  source 1..75: mol_type = other DNA
aaaagcaatacgcgaggcactaggaaacgaagagttccagcgtttagcaagggctggaattgtggcatcgctaag

SEQ ID NO: 583337 - DNA, 75 bp, synthetic construct
  source 1..75: mol_type = other DNA
cgtgataccgtcggaaacgaagagtttcagcgcttagcgaggggtgggattgtggcatcgctaagcggaatggag

SEQ ID NO: 583338 - DNA, 75 bp, synthetic construct
  source 1..75: mol_type = other DNA
gatagagaaagcagttcaggaagcaactaaagcagtaagagcaggcggaagcaaagaagcattagtggcggctga

SEQ ID NO: 583339 - DNA, 75 bp, synthetic construct
  source 1..75: mol_type = other DNA
atctaaaattgccaccacacgtagtggtcggtatgcgatagagaaagcagttcaggaagccacgaaagcagtaag

SEQ ID NO: 583340 - DNA, 75 bp, synthetic construct
  source 1..75: mol_type = other DNA
ggcgaatggctgagcttcgtgatgcagcaacggaagatatgcgcataatggctcaaaatggcggttttcttgatg

SEQ ID NO: 583341 - DNA, 75 bp, synthetic construct
  source 1..75: mol_type = other DNA
gtgaaatagagtcgaaatttaactcagcattggatgagtttggggctgaagcaggaactgcatcagaaaaaagtg

SEQ ID NO: 583342 - DNA, 75 bp, synthetic construct
  source 1..75: mol_type = other DNA
gtctggtacaggaagagagattattgccagacagtcagctaacgtgtcagacgaaatagcaaaagcagcagatac

SEQ ID NO: 583343 - DNA, 75 bp, synthetic construct
  source 1..75: mol_type = other DNA
gaccacaatgagttatgctcattcgggcggacacgtattgtttgctgactcaatctatgaacctgtacgaaagat

SEQ ID NO: 583344 - DNA, 75 bp, synthetic construct
  source 1..75: mol_type = other DNA
actgtaaatctgggtgaagtagcagataccgtactgaaaagcggtcaaaaatctttggctgaacctttcactatt

SEQ ID NO: 583345 - DNA, 75 bp, synthetic construct
  source 1..75: mol_type = other DNA
aggaagtccaatctcaaattttcactgattgtgtagcattttcccagagactcaaatgtaatcttgttatatcct

SEQ ID NO: 583346 - DNA, 75 bp, synthetic construct
  source 1..75: mol_type = other DNA
tttagtttttcagaacccagttcaggttggaagaatggttgtttatcttaccgagaaacttgttataacaaggat

SEQ ID NO: 583347 - DNA, 75 bp, synthetic construct
  source 1..75: mol_type = other DNA
aagctttggctaaaggctttcgctggggtcaaaagtggaaagatcagaagcgcctcccagttacgcaaaggaggt

SEQ ID NO: 583348 - DNA, 75 bp, synthetic construct
  source 1..75: mol_type = other DNA
ctcgtgctgtgggggccgaacggtccactgccgctgcactacaccgaactggcgcgtaaccggactgaaagccga

SEQ ID NO: 583349 - DNA, 75 bp, synthetic construct
  source 1..75: mol_type = other DNA
aatgattttctgtatgccgaggcgtatgtgtacgcgctggcgcaaaaaatgatgccggaatatcagggaggcttc

SEQ ID NO: 583350 - DNA, 75 bp, synthetic construct
  source 1..75: mol_type = other DNA
tttaggttcatttttagatcaactccaaaacaatcagttaggaaataaaaatctaaaaataactcttgagttact

SEQ ID NO: 583351 - DNA, 75 bp, synthetic construct
  source 1..75: mol_type = other DNA
attatcgaataaaaataatgccgatcagtttttgaatgcgctaaaagaaatgaatagaaccttttcgataatata

SEQ ID NO: 583352 - DNA, 75 bp, synthetic construct
  source 1..75: mol_type = other DNA
aaaatgtgttttctgaaactaaaaaattatcgaataaaaataatgccgatcagttttttgaatgcgctaaaagaa

SEQ ID NO: 583353 - DNA, 75 bp, synthetic construct
  source 1..75: mol_type = other DNA
ggaccaagaggagctgataaagggtatgaaaggaaaatatttaatgatgcaaaggatggcatcaaattcatcatt

SEQ ID NO: 583354 - DNA, 75 bp, synthetic construct
  source 1..75: mol_type = other DNA
attacccgatttctcacattatgaactgtatgacaaaccggaagcagttcaggaggcgctggaaaaagttattcc

SEQ ID NO: 583355 - DNA, 75 bp, synthetic construct
  source 1..75: mol_type = other DNA
ccacgatagaacatatcgttaattcattaacaccatttttaaacctgaattatattgaagacctagtaaggaatc

SEQ ID NO: 583356 - DNA, 75 bp, synthetic construct
  source 1..75: mol_type = other DNA
aatttaccttccctgatggtacgagcacggaagatattggtaccgccattgatgagtattttgctggtcaggctg

SEQ ID NO: 583357 - DNA, 75 bp, synthetic construct
  source 1..75: mol_type = other DNA
aaaaataacaaagataacgaacatttggcaaatgagtatcatttgccaaagtttgaagcaaacgaccttatcgga

SEQ ID NO: 583358 - DNA, 75 bp, synthetic construct
  source 1..75: mol_type = other DNA
ggaaattacttggggggggacccaaatggatcccgatacactggcgttcctgcagaaggaggtatttccgatggt

SEQ ID NO: 583359 - DNA, 75 bp, synthetic construct
  source 1..75: mol_type = other DNA
agcccccggaaagtccacagcgggaaacaggccaggggtggcgcggaagggttgactgcgccatcaggcgcagtg

SEQ ID NO: 583360 - DNA, 75 bp, synthetic construct
  source 1..75: mol_type = other DNA
cagtacacgcatcatgggtgcataaaacgggggcgaccggcggatttggtagctatgtcgcgtttattccagaaa

SEQ ID NO: 583361 - DNA, 75 bp, synthetic construct
  source 1..75: mol_type = other DNA
gtggaaaccatcacgccggagggaaagactcgcagtatcacactggctgatttttatcacccaccggggaaaacg

SEQ ID NO: 583362 - DNA, 75 bp, synthetic construct
  source 1..75: mol_type = other DNA
aagattatagtttatacgattcaaaagacagagccgcgccagttgaacataacgcaatattatacaaagacactc

SEQ ID NO: 583363 - DNA, 75 bp, synthetic construct
  source 1..75: mol_type = other DNA
gccggactctggctttattctgttgcgctgggtgccgccggcatagcaatgaaaatctacaccgcagtcaccagc

SEQ ID NO: 583364 - DNA, 75 bp, synthetic construct
  source 1..75: mol_type = other DNA
ggcagtctttccggcgtgcggatacattccggtatcatctgtctcaccgtattcgccggatggttgggaatgaaa

SEQ ID NO: 583365 - DNA, 75 bp, synthetic construct
  source 1..75: mol_type = other DNA
aggcaattgtccctacatattatgaagcctgcaagagtaataaaataaataaaaataaaatatattttttattct

SEQ ID NO: 583366 - DNA, 75 bp, synthetic construct
  source 1..75: mol_type = other DNA
aggcaacgggcgcgggcgctttatcctgcaaaagggctgccaggtgatcggcagcggtgaagccagcctctacaa

SEQ ID NO: 583367 - DNA, 75 bp, synthetic construct
  source 1..75: mol_type = other DNA
catttttgttaaacgccacagccccagcattgaataaaataacatcgcaatatcatatagctcaaactttggagt

SEQ ID NO: 583368 - DNA, 75 bp, synthetic construct
  source 1..75: mol_type = other DNA
gcagcaggcagcttgcacagcaacagtgattggactggaaggaaatgtatccggggaaactatttacatgctcca

SEQ ID NO: 583369 - DNA, 75 bp, synthetic construct
  source 1..75: mol_type = other DNA
aactaaagctcttttggattcaagagaacgttgcagtgatctcaaatgtgttgatgaatggtatgatactgcgtt

SEQ ID NO: 583370 - DNA, 75 bp, synthetic construct
  source 1..75: mol_type = other DNA
ttccggaggccacactggcgatatgccaaaggaaaccaaccaccgggggcacaggcgtcagcgagtttacagaga

SEQ ID NO: 583371 - DNA, 75 bp, synthetic construct
  source 1..75: mol_type = other DNA
taaaactatccatatgctgacttacctcgatgatgaaaacaaacgacggagaacgttacaacaactcaaccgtgg

SEQ ID NO: 583372 - DNA, 75 bp, synthetic construct
  source 1..75: mol_type = other DNA
gtttactgactcccgagttgttttttcactgacccgctggttatattctttatgctggacaggaacaagccgacc

SEQ ID NO: 583373 - DNA, 75 bp, synthetic construct
  source 1..75: mol_type = other DNA
tcaacaatgccaaatcaaaaagcaagaatgctaaatggtaatgccgttattcaggcagagcgatctgccggcata

SEQ ID NO: 583374 - DNA, 75 bp, synthetic construct
  source 1..75: mol_type = other DNA
ctggttacgtcaggcattagcggggcgatgggctccgtggctctgacctatttctgggaacgtctgacggggatg

SEQ ID NO: 583375 - DNA, 75 bp, synthetic construct
  source 1..75: mol_type = other DNA
ccctggcgacagggctgccgttgcgacgatcaccagcagctggtcggtttgctgcgggataaagccctgcagccg

SEQ ID NO: 583376 - DNA, 75 bp, synthetic construct
  source 1..75: mol_type = other DNA
atggggtttcgatgaacataaaaaaacgataatagatgctattgattttcaacaggtagaatttacaaagcctcg

SEQ ID NO: 583377 - DNA, 75 bp, synthetic construct
  source 1..75: mol_type = other DNA
ctctgtccgcaacagatggggagaccctgacattggcgggctgattattgctgcgtaccagggagaagctgacgg

SEQ ID NO: 583378 - DNA, 75 bp, synthetic construct
  source 1..75: mol_type = other DNA
gacaaaaggccgtctggcgatacccggcgcattcggctttgggtgtgcttttctgcctgaagatgttatccgttt

SEQ ID NO: 583379 - DNA, 75 bp, synthetic construct
  source 1..75: mol_type = other DNA
tctggatgtccaccgctggcgctgttatttcgtctaaatcacagcttgctctggccgcaggtataaatacgccgg

SEQ ID NO: 583380 - DNA, 75 bp, synthetic construct
  source 1..75: mol_type = other DNA
gtgctgatggcagtgtggtggcaaatgctgcatttgactgtgcaatttttaattacacagcaggagaccgctgga

SEQ ID NO: 583381 - DNA, 75 bp, synthetic construct
  source 1..75: mol_type = other DNA
cgatacctggcgccagatgatggcgaaaaacgatgaggtcaggcagaacctgatcccgctcagtaagcaatacca

SEQ ID NO: 583382 - DNA, 75 bp, synthetic construct
  source 1..75: mol_type = other DNA
gcttaacgagaatggcggtacagacaagggcaccatgtacagaggccacaacggtggcatgacaatctacctgaa

SEQ ID NO: 583383 - DNA, 75 bp, synthetic construct
  source 1..75: mol_type = other DNA
gttgcttgagttcgtgtaaattggacagccataacgagtttatgacaaaaaaaagaatcattatcagcggatcat

SEQ ID NO: 583384 - DNA, 75 bp, synthetic construct
  source 1..75: mol_type = other DNA
attctcaatgtttcttttattttccctttaccaaatctaattgaaagatgttcagaaccaagatttgatttttcg

SEQ ID NO: 583385 - DNA, 75 bp, synthetic construct
  source 1..75: mol_type = other DNA
cagcaaaagctggccttaatcgtttttataccggtaaagaatgccgaaatggtcaccgtgctgagcgctacgttc

SEQ ID NO: 583386 - DNA, 75 bp, synthetic construct
  source 1..75: mol_type = other DNA
agtgaagcagaagaaaaaggcatgacaggtgagctcgcgccggaaaagacaatcatgtactggcgctggctttat

SEQ ID NO: 583387 - DNA, 75 bp, synthetic construct
  source 1..75: mol_type = other DNA
acagccgactgcgccgctggcgcgctatacgtacacggccagcggagaactgcgggcggtgtatgaccgcagcgg

SEQ ID NO: 583388 - DNA, 75 bp, synthetic construct
  source 1..75: mol_type = other DNA
atggaaaccggatgacgcaccgggaagaactacaacggtgctattgctcaagcaactgaaagacgcgggccatat

SEQ ID NO: 583389 - DNA, 75 bp, synthetic construct
  source 1..75: mol_type = other DNA
gagtcggcttatttccagtggctgtggctggaggatgcccggcgcagcggcattattccgcgtgatgccgattag

SEQ ID NO: 583390 - DNA, 75 bp, synthetic construct
  source 1..75: mol_type = other DNA
tcatcagcatgtcagcgaacgtcgcagtgtcgccatcagtctgttgctgattgccgtcggtgcattgatgcgtga

SEQ ID NO: 583391 - DNA, 75 bp, synthetic construct
  source 1..75: mol_type = other DNA
atctttctgaatacattagccactccaatagcactaagagcttttaaacaaaaaactggtgatgagtattttagc

SEQ ID NO: 583392 - DNA, 75 bp, synthetic construct
  source 1..75: mol_type = other DNA
gcgacgtcgtgttccggttattcatcagacggagaccgctgaatgtggactggcctgcctggcaatatatgcggt

SEQ ID NO: 583393 - DNA, 75 bp, synthetic construct
  source 1..75: mol_type = other DNA
tgcgccactcgcctacggctggtactggttgacgacacacttgccgatcaacatgccattggccagattgatgga

SEQ ID NO: 583394 - DNA, 75 bp, synthetic construct
  source 1..75: mol_type = other DNA
atggagattattactcgccttgacgctgcaaaggcaggtcttaagcgttattacaccggaaaacagtgtaagcat

SEQ ID NO: 583395 - DNA, 75 bp, synthetic construct
  source 1..75: mol_type = other DNA
ccagcctgtgggggctggcactcagcctgcccgcagacaccggctacccggacccgcgcggggaactggacgcgg

SEQ ID NO: 583396 - DNA, 75 bp, synthetic construct
  source 1..75: mol_type = other DNA
tggacacagcagtgtgatgaacgcggcctgccggtaagtctggtgtcgccacagggcgaagagacccggctggca

SEQ ID NO: 583397 - DNA, 75 bp, synthetic construct
  source 1..75: mol_type = other DNA
tctgggaattggtattgatcgtatgataatgttatttacaaactgtcataccattcgcgatgttattatgtttcc

SEQ ID NO: 583398 - DNA, 75 bp, synthetic construct
  source 1..75: mol_type = other DNA
tgccgggggatgagacgctgacgttcagccgtgatgaggcgggacgtgaagtgctccggcacagtaaccggggtt

SEQ ID NO: 583399 - DNA, 75 bp, synthetic construct
  source 1..75: mol_type = other DNA
tgaatgttggcggctgggaactagtatttagtcaagctaaatctgactcggctttatcagttattaaacatgctc

SEQ ID NO: 583400 - DNA, 75 bp, synthetic construct
  source 1..75: mol_type = other DNA
cctgcccgcagacaccggctacccggacccgcgcggggaactggacgcggaagccgaccccggcctgctgtatgc

SEQ ID NO: 583401 - DNA, 75 bp, synthetic construct
  source 1..75: mol_type = other DNA
cgtcatggtacacccagcgacgttgaagggcagaagcttttagtgaaaaaaggccagataatttttggcaagcgt

SEQ ID NO: 583402 - DNA, 75 bp, synthetic construct
  source 1..75: mol_type = other DNA
gcagaaagtgattactcgtttagagcatctaccgtgtgaagttctctctattccgggtatggtcgatttagtcga

SEQ ID NO: 583403 - DNA, 75 bp, synthetic construct
  source 1..75: mol_type = other DNA
gcagttgaaaaatgccagacaggagaaggggttctggtattcacagacgttgctggaggttcaccttgtaaccga

SEQ ID NO: 583404 - DNA, 75 bp, synthetic construct
  source 1..75: mol_type = other DNA
gtgtactacaactctattccaaggggttaatcttccagcaaaaaatgtttttattgatacacctactcgagggaa

SEQ ID NO: 583405 - DNA, 75 bp, synthetic construct
  source 1..75: mol_type = other DNA
gataattttgaagaaaaaatagacttggtagttattgacgaagcacaatcaatttctgacgaaattaggggaatg

SEQ ID NO: 583406 - DNA, 75 bp, synthetic construct
  source 1..75: mol_type = other DNA
aacacagcgtcaaagtgatcatcaccgaacaagggatcgccgatctgcgcggtctttccccgcttcaacgcgccc

SEQ ID NO: 583407 - DNA, 75 bp, synthetic construct
  source 1..75: mol_type = other DNA
ctatgaggtgctctatctgcctgcgctctctgtcaacagcatgagcaaaattgcgctgggcattcgcgataatct

SEQ ID NO: 583408 - DNA, 75 bp, synthetic construct
  source 1..75: mol_type = other DNA
agcccggctatgattactttgaaaaaaatcgccgattgccaaccatcaccgttgaaaaccggcgttataaaatca

SEQ ID NO: 583409 - DNA, 75 bp, synthetic construct
  source 1..75: mol_type = other DNA
gcgggctgctatgccatgaccgataccggtattgaagagatttatcaactggtagcacaggcgctaaacagcggg

SEQ ID NO: 583410 - DNA, 75 bp, synthetic construct
  source 1..75: mol_type = other DNA
aaaggcgctgcgcaacgtctggggctgaaacgcacgactctgctgtcacgaatgaagcgactgggaattgataaa

SEQ ID NO: 583411 - DNA, 75 bp, synthetic construct
  source 1..75: mol_type = other DNA
gggggagtgaaacttcaggttttcacttccttacccactgatatgaatgttctgactgacagtagcatcgtgata

SEQ ID NO: 583412 - DNA, 75 bp, synthetic construct
  source 1..75: mol_type = other DNA
gttggcttgctgttgatccatttaatggtgggatgtatacactgaagccaaaagaggcaaatgcatctcttatac

SEQ ID NO: 583413 - DNA, 75 bp, synthetic construct
  source 1..75: mol_type = other DNA
atgttactcaccgatctccttcacggtaatacgcagctacagcaacttcaatatattaaaatagatgatcattat

SEQ ID NO: 583414 - DNA, 75 bp, synthetic construct
  source 1..75: mol_type = other DNA
tgcagggtgattattactggtcatctctggcaggaagtaccgggcagcaccacgcggctgatgtgtctaaccgca

SEQ ID NO: 583415 - DNA, 75 bp, synthetic construct
  source 1..75: mol_type = other DNA
tattgtctcgccagtagtggttgatgcaggaatgtccgatgaagcgtcactgaatgactctgccaccgcatacgc

SEQ ID NO: 583416 - DNA, 75 bp, synthetic construct
  source 1..75: mol_type = other DNA
ggtggagccgccaacggcagttatcgcagcaacgggctgggcggtcacattgaaaccgggatgcgatttaccgat

SEQ ID NO: 583417 - DNA, 75 bp, synthetic construct
  source 1..75: mol_type = other DNA
aacaatgtcgactatgagttgttatgccgggagcgcgataacttccgcatcctggttgccattaccaacgcggtg

SEQ ID NO: 583418 - DNA, 75 bp, synthetic construct
  source 1..75: mol_type = other DNA
caggatcctaaccaatcacggctggcctacggtatttaaagagtactggagcagcacgccgattgataaagtccc

SEQ ID NO: 583419 - DNA, 75 bp, synthetic construct
  source 1..75: mol_type = other DNA
ggcctgacggcacgttaacgtttaccatttatcaaaattatcaggggataggtggacgtattccactaacggcga

SEQ ID NO: 583420 - DNA, 75 bp, synthetic construct
  source 1..75: mol_type = other DNA
gaaggtttgtcgtcgataccgtctgatgcggcaactcgttattagcgatgctattcctgaaggaatgacgaatga

SEQ ID NO: 583421 - DNA, 75 bp, synthetic construct
  source 1..75: mol_type = other DNA
tgcgggggtgttgcgccatgtgaaggacggacagccggcgtatgccggtgtgtatgacgaccttaatgtgaatgg

SEQ ID NO: 583422 - DNA, 75 bp, synthetic construct
  source 1..75: mol_type = other DNA
tttcaacaaaaggccgagaagacaaaaaacggcattgttgcggatgttaatgccagacagaaaatgttcagtaac

SEQ ID NO: 583423 - DNA, 75 bp, synthetic construct
  source 1..75: mol_type = other DNA
tagctgctgcgtttagcactgctaccgctagggtattcggtctaggatattcatacggtactagcgaagtacaaa

SEQ ID NO: 583424 - DNA, 75 bp, synthetic construct
  source 1..75: mol_type = other DNA
atatctggctacgacaaaatcgttgtcaaatataataactggatcaccaaagataatggcgagtttgaactggcg

SEQ ID NO: 583425 - DNA, 75 bp, synthetic construct
  source 1..75: mol_type = other DNA
tatacatgcctgacagagatacgaatgaaagcctcataaaagtatacaacatagaacatagtgtcgatattcctt

SEQ ID NO: 583426 - DNA, 75 bp, synthetic construct
  source 1..75: mol_type = other DNA
tcaacgtattaccactgtcagcaacagcgacatcatccggataaacgcagtgcccgtgcgcagcgcgatgactgg

SEQ ID NO: 583427 - DNA, 75 bp, synthetic construct
  source 1..75: mol_type = other DNA
tacgcaacctctggtggcaggatttctgtcgctaatcatgttgagtgcaatgagttgggggctataccagcttct

SEQ ID NO: 583428 - DNA, 75 bp, synthetic construct
  source 1..75: mol_type = other DNA
ttggcaacgcttgtggaatggcggatttggtttgaagtctattttttactctgctatgtaccatgcttaatttac

SEQ ID NO: 583429 - DNA, 75 bp, synthetic construct
  source 1..75: mol_type = other DNA
ataaattaggcgaagtggccaatcttcgcgtgacattcagcattcgtcgcccatccgataaggagattaaccaaa

SEQ ID NO: 583430 - DNA, 75 bp, synthetic construct
  source 1..75: mol_type = other DNA
gtatatataaaaaaagcatcaaaagaatcgaaattcgatttgattagatttgttttattttttgccgtccctgta

SEQ ID NO: 583431 - DNA, 75 bp, synthetic construct
  source 1..75: mol_type = other DNA
atgagattgcaggtatcatttccagtagaatttttgatgagttaggctggaaaacccaaaatacaacggatataa

SEQ ID NO: 583432 - DNA, 75 bp, synthetic construct
  source 1..75: mol_type = other DNA
ctgtcgctaatcatgttgagtgcaatgagttgggggctataccagcttctaccctcgttatatgcgctgttcctg

SEQ ID NO: 583433 - DNA, 75 bp, synthetic construct
  source 1..75: mol_type = other DNA
gagcggcataacctgaatctgagacaacatctggcaaggctgggacggaagttactgtcgttctcaaaatcggtg

SEQ ID NO: 583434 - DNA, 75 bp, synthetic construct
  source 1..75: mol_type = other DNA
catctggcaaggctgggacggaagttactgtcgttctcaaaatcggtggagttgcatgacaaggtcatcgggcat

SEQ ID NO: 583435 - DNA, 75 bp, synthetic construct
  source 1..75: mol_type = other DNA
gcactctggccacactggcgcgtcttctgagcctgctgtcggcctttgaggtcgtggtatggatgacggatggct

SEQ ID NO: 583436 - DNA, 75 bp, synthetic construct
  source 1..75: mol_type = other DNA
cggaagtgtctagattatccgtggcgattcaggagcgtcttccgggcctgctgtcggcctttgaggtcgtggtat

SEQ ID NO: 583437 - DNA, 75 bp, synthetic construct
  source 1..75: mol_type = other DNA
taaaaaactcaggccgcagtctagtaacctcgcgcatacaaccgggcagtgatgtgattgtctgcgctgaaatgg

SEQ ID NO: 583438 - DNA, 75 bp, synthetic construct
  source 1..75: mol_type = other DNA
gagcggcataatctgaggcagcatctggcaaggccgggacggaagtcactgtcgttctcaaaatcggtggagctg

SEQ ID NO: 583439 - DNA, 75 bp, synthetic construct
  source 1..75: mol_type = other DNA
agcgcattgagcgacataatctgaatctgagacaacatctggcaaggctgggacggaagtcactgtcgttctcaa

SEQ ID NO: 583440 - DNA, 75 bp, synthetic construct
  source 1..75: mol_type = other DNA
gtggcgcatgtattcagtgaacgcacgttggccacgctggagcgtcttctgagcctgctgtcggcctttgaggtc

SEQ ID NO: 583441 - DNA, 75 bp, synthetic construct
  source 1..75: mol_type = other DNA
gttttacgcatatgacaggctccggaagacggttgtggcgcacgttttcggtgaacgcactatggccacactgga

SEQ ID NO: 583442 - DNA, 75 bp, synthetic construct
  source 1..75: mol_type = other DNA
aatcacgcctgaagggaaagctgcacgttatcagcaagcgttacactcagcgcattgagcgacataacctgaatc

SEQ ID NO: 583443 - DNA, 75 bp, synthetic construct
  source 1..75: mol_type = other DNA
gcacctggcacggctgggacggaagtcgctgtcgttctcaaaatcggtggagctgcatgacagtaaccgtctcat

SEQ ID NO: 583444 - DNA, 75 bp, synthetic construct
  source 1..75: mol_type = other DNA
gacaggatacggaggacagttgtggcgcacgttttcggtgaacgcactctggccacactggcgcgtcttctgagc

SEQ ID NO: 583445 - DNA, 75 bp, synthetic construct
  source 1..75: mol_type = other DNA
gtgaacgcactctggccacactggagcgtcttctgagcctgctgtcggcttttgaggtcgtggtatggatgacgg

SEQ ID NO: 583446 - DNA, 75 bp, synthetic construct
  source 1..75: mol_type = other DNA
attgagcgacataacctgaatctgagacaacatctggcaaggctgggacggaagtcactgtcgttctcaaaatcg

SEQ ID NO: 583447 - DNA, 75 bp, synthetic construct
  source 1..75: mol_type = other DNA
attccttacgctattgaacgttatcaggttgaaactcagcgtctttaccatgtactgaacaagcggctggaaaac

SEQ ID NO: 583448 - DNA, 75 bp, synthetic construct
  source 1..75: mol_type = other DNA
agacaacatctggcaaggctgggacggaagtcactgtcgttctcaaaatcggtggagttgcatgacaaggtcatc

SEQ ID NO: 583449 - DNA, 75 bp, synthetic construct
  source 1..75: mol_type = other DNA
gttacactcagcgcattgagcgacataatctgaatctgagacaacatctggcaaggctgggacggaagtcactgt

SEQ ID NO: 583450 - DNA, 75 bp, synthetic construct
  source 1..75: mol_type = other DNA
cggcggtaaagaactggtatgagcgaatccgttctcgtccggctaccaaccaggcacagctaaaagctcaactca

SEQ ID NO: 583451 - DNA, 75 bp, synthetic construct
  source 1..75: mol_type = other DNA
cagcaagcgttacactcagcgcattgagcgacataatctgaatctgagacaacatctggcaaggccgggacggaa

SEQ ID NO: 583452 - DNA, 75 bp, synthetic construct
  source 1..75: mol_type = other DNA
agccgggcagtgatgtgattgtctgcgctgaaatggacgaacagtggggctacgtcggtgctaaatcacgtcagc

SEQ ID NO: 583453 - DNA, 75 bp, synthetic construct
  source 1..75: mol_type = other DNA
gatgtgattgtctgcgctgaaatggacgaacagtggggctacgtcggtgctaaatcacgtcagcgctggctgttt

SEQ ID NO: 583454 - DNA, 75 bp, synthetic construct
  source 1..75: mol_type = other DNA
acatctggcaaggctgggacggaagtcactgtcgttctcaaaatcggtgtagctgcatgacaaagtcatcgggca

SEQ ID NO: 583455 - DNA, 75 bp, synthetic construct
  source 1..75: mol_type = other DNA
gtgtggatcactattgcaccgttcgtgacagttgttggcgtggcaatggtctttttcccggctattgcgcatccg

SEQ ID NO: 583456 - DNA, 75 bp, synthetic construct
  source 1..75: mol_type = other DNA
gacaacatctggcaaggccgggacggaagtcactgtcgttctcaaaatcggtagagctgcatgacaaggtcatcg

SEQ ID NO: 583457 - DNA, 75 bp, synthetic construct
  source 1..75: mol_type = other DNA
aaactggcctgagccttacattaagatcaacggtaattgctctataattggtactgtgattttctcaggaaaacc

SEQ ID NO: 583458 - DNA, 75 bp, synthetic construct
  source 1..75: mol_type = other DNA
gggtctacgtccgtgatgaccgtaacgccggttcacagatgcccccggcggtctggttcgcgtacagtccggacc

SEQ ID NO: 583459 - DNA, 75 bp, synthetic construct
  source 1..75: mol_type = other DNA
gatgatttcggcatgggttacgcagggctgcgtcagttgcagcatatgaaatcgttgccaatagacgtgctgaaa

SEQ ID NO: 583460 - DNA, 75 bp, synthetic construct
  source 1..75: mol_type = other DNA
acgaccagtacacgacgaatatgacccgcagccatgaatatgctgaaatggcatcccgtactgaaagcatgagtg

SEQ ID NO: 583461 - DNA, 75 bp, synthetic construct
  source 1..75: mol_type = other DNA
taaataatgtacccgatgctaaagccgattgggtgcgtagttttgcatttatgcttctcaagtgccgcaaccatc

SEQ ID NO: 583462 - DNA, 75 bp, synthetic construct
  source 1..75: mol_type = other DNA
gcttcattgacagcgaaaggcatcactcagctcagtagtgccactaacagcacgtccgaagtgctggccgccaca

SEQ ID NO: 583463 - DNA, 75 bp, synthetic construct
  source 1..75: mol_type = other DNA
aggtaactattcagcagcgtaaggatatttctcttgcacttagcgcaggtaagaaatatgcaattgtgctgaagg

SEQ ID NO: 583464 - DNA, 75 bp, synthetic construct
  source 1..75: mol_type = other DNA
tcgggcgatcccggccagtgcgcaagattccacctggctggagcacagcctggcaacgcttgccgagcaactgaa

SEQ ID NO: 583465 - DNA, 75 bp, synthetic construct
  source 1..75: mol_type = other DNA
gggaccgttataacccgtcaaaccaggacagttcatgctggatccgtgtggcacaggcgtgggcaggcaccggat

SEQ ID NO: 583466 - DNA, 75 bp, synthetic construct
  source 1..75: mol_type = other DNA
tttaccactgcgaccaccggggcctgccgctggcgctcatcagcgaagacggcaatacggcgtggcgcggggagt

SEQ ID NO: 583467 - DNA, 75 bp, synthetic construct
  source 1..75: mol_type = other DNA
gcggcgataaggtgtttgcggggaattaccgtagcgattatttgtggtacgcagtgctgggtggaacaaacagtc

SEQ ID NO: 583468 - DNA, 75 bp, synthetic construct
  source 1..75: mol_type = other DNA
ccggaggaaatcagagagggattattaacgttagagggttttatcacacagttaataacgctgtatgaagatttc

SEQ ID NO: 583469 - DNA, 75 bp, synthetic construct
  source 1..75: mol_type = other DNA
taaagacgtcatcgcaattgatggaaaaacactccggcattcttatgacaagagtcgccgcaggggagcgattca

SEQ ID NO: 583470 - DNA, 75 bp, synthetic construct
  source 1..75: mol_type = other DNA
atgagcaagaaggagttgagacccgaactgataacagtagggaagctattcacgggctattatctgattcctatt

SEQ ID NO: 583471 - DNA, 75 bp, synthetic construct
  source 1..75: mol_type = other DNA
tgccagtaataatgacagttcagcaatatggttcttggtgaattgttataaaaaccagggaaataaaaaagaagc

SEQ ID NO: 583472 - DNA, 75 bp, synthetic construct
  source 1..75: mol_type = other DNA
taagacgttagaagataaaaatataaaacaatacattcatctcttgaatcactttatgaatataaagacaatctt

SEQ ID NO: 583473 - DNA, 75 bp, synthetic construct
  source 1..75: mol_type = other DNA
tgaccaacgagaacggcagccagtccacgttccggtatgacccggtggacaggctgactgaacagcgcggttttg

SEQ ID NO: 583474 - DNA, 75 bp, synthetic construct
  source 1..75: mol_type = other DNA
gtgtgtcagttgaaaatgttccggcctggcgctggcaaaaacaggtaagtgtggaaacagcggtgggtacagtta

SEQ ID NO: 583475 - DNA, 75 bp, synthetic construct
  source 1..75: mol_type = other DNA
gcctggaaaaacagccgctctatacgatgtcgataaaacgctgaaaaatgcgcgggtcgaactcaaaactagtcc

SEQ ID NO: 583476 - DNA, 75 bp, synthetic construct
  source 1..75: mol_type = other DNA
agatgatactaactccttagcagaaaaaccaaataaaaaagcaagatgttttttaaaaaatcaaattgcaaatat

SEQ ID NO: 583477 - DNA, 75 bp, synthetic construct
  source 1..75: mol_type = other DNA
aaataaacgtgtgcatctcgccattataggtaatggtcctgatagaaataaactcatagaatatgcttctcgatt

SEQ ID NO: 583478 - DNA, 75 bp, synthetic construct
  source 1..75: mol_type = other DNA
agacggtgagggtgggaagccgtcgattggccatgcaggccacttgcaatatgagtcgcgcgcacgggcaacgga

SEQ ID NO: 583479 - DNA, 75 bp, synthetic construct
  source 1..75: mol_type = other DNA
ccgagatgtattgctgcttcagtccatgcttcggattacctacacttctccgcgaacgatgcactggattaccaa

SEQ ID NO: 583480 - DNA, 75 bp, synthetic construct
  source 1..75: mol_type = other DNA
gacccggcagagcagtggcagtatgatgagcacgggtggttaaccaccctcagccatacctgtgaaggccaccgc

SEQ ID NO: 583481 - DNA, 75 bp, synthetic construct
  source 1..75: mol_type = other DNA
ttgagattgaactgcatttctcctccggtgaggataaggttaaatcaataaaggtgaaactaagacatgcccggg

SEQ ID NO: 583482 - DNA, 75 bp, synthetic construct
  source 1..75: mol_type = other DNA
gaacctgcgcctgcccggcgctccgtagagcaactcagaggtatagaaggcagtcgcgtgcgggcacccacgcac

SEQ ID NO: 583483 - DNA, 75 bp, synthetic construct
  source 1..75: mol_type = other DNA
gccctgaatctttcttcagtattattcagaatcagcgattatggctaagctctatggatcatatgaacgattaca

SEQ ID NO: 583484 - DNA, 66 bp, synthetic construct
  source 1..66: mol_type = other DNA
gtggtaagaccgctgcaaattctgcatgctgacgggacgtgggaaaatattggcgggatgaagtaa

SEQ ID NO: 583485 - DNA, 75 bp, synthetic construct
  source 1..75: mol_type = other DNA
ggtgaacgcactctggccacactggagcgtcttctgagcctgctgccggcctttgaggtcgtggtatggatgacg

SEQ ID NO: 583486 - DNA, 75 bp, synthetic construct
  source 1..75: mol_type = other DNA
tgttttacgcgtatgacaggatacggaggacggttgtggcgcacgtcttcggtgaacctctggccacactggagc

SEQ ID NO: 583487 - DNA, 75 bp, synthetic construct
  source 1..75: mol_type = other DNA
cgccagtgcacgcattatgggcgttggcctcaacacggttttacgtcacttaaaaaacttcaggccgcagtcggt

SEQ ID NO: 583488 - DNA, 75 bp, synthetic construct
  source 1..75: mol_type = other DNA
cgcggaatatgatgaatggggcaaccagcttaatgaggagaccccgcatcccctgccccagccgtaccggctgcc

SEQ ID NO: 583489 - DNA, 75 bp, synthetic construct
  source 1..75: mol_type = other DNA
aagtcatgctcgatgagcgtcagattgccgaggccgtcaatcagtataatggcgatcaatccgttcgcggctcaa

SEQ ID NO: 583490 - DNA, 75 bp, synthetic construct
  source 1..75: mol_type = other DNA
tggtccgttattcgtggcggagctggcaagatattagctccactggctctttatcagggtatgcaggatgcccca

SEQ ID NO: 583491 - DNA, 75 bp, synthetic construct
  source 1..75: mol_type = other DNA
gaaggttctggtataggtaaaattattgctgaccagcaggcgctattagctctattagggtatagagggaataaa

SEQ ID NO: 583492 - DNA, 75 bp, synthetic construct
  source 1..75: mol_type = other DNA
ttgcaggattaagtcttaacgcgtttgcaggagggagtggatggaatccagacgaagtcgatccaagtcgttgtg

SEQ ID NO: 583493 - DNA, 75 bp, synthetic construct
  source 1..75: mol_type = other DNA
aaacggatgaatccggggaggcccgggggcaggcctccgtttttccggagtcagtccggtctgtggtttatgcga

SEQ ID NO: 583494 - DNA, 75 bp, synthetic construct
  source 1..75: mol_type = other DNA
ctatcatcggcgagtatacccctggtgcatgtaccccagttgttacgggcggcggcattgttgactatgggaaac

SEQ ID NO: 583495 - DNA, 75 bp, synthetic construct
  source 1..75: mol_type = other DNA
aggtacaaggatgaacagcacggcaaggatttcacgctgtaccagatggagagcctgcgcagtgatgcggaaaag

SEQ ID NO: 583496 - DNA, 75 bp, synthetic construct
  source 1..75: mol_type = other DNA
tggcttgaagcagagctgaagcgtcttgagaagcagataaaagacctgacagacgatgatccggatatgaaacac

SEQ ID NO: 583497 - DNA, 75 bp, synthetic construct
  source 1..75: mol_type = other DNA
aatggtttaggtggtggtgagacaaattactttggttatgcattggctagttatttggaaccataccgagaaaat

SEQ ID NO: 583498 - DNA, 75 bp, synthetic construct
  source 1..75: mol_type = other DNA
ccgttcctgctcatttaccgtccgtcagcgcagacagggcggtatcgtttgtgtggatagaaccggagaacaaaa

SEQ ID NO: 583499 - DNA, 75 bp, synthetic construct
  source 1..75: mol_type = other DNA
ctataaaaaactttgacattgatccgaaagacttacctactgtttatgataagtcgattcgttcaggagaaaatg

SEQ ID NO: 583500 - DNA, 75 bp, synthetic construct
  source 1..75: mol_type = other DNA
cggacgtgaaattgcatcagctgttaatgaatacaacggcgaacaatccgttcgcggctcaacaggaggcccgca

SEQ ID NO: 583501 - DNA, 75 bp, synthetic construct
  source 1..75: mol_type = other DNA
gaaggtgaaagtgagccgggttcctgacggaatagccgaatacagcgtgtgggggctgaagctgccgacactgcg

SEQ ID NO: 583502 - DNA, 75 bp, synthetic construct
  source 1..75: mol_type = other DNA
tgcactggcacgtgccgaagaaaagatcgaagaagatgagcgagtgtcaacgccacgatgtttgaccgttatttg

SEQ ID NO: 583503 - DNA, 75 bp, synthetic construct
  source 1..75: mol_type = other DNA
accgtaacgccggttcacagatgcctgcggcggtctggttcgcgtacagcccggaccggaacggcatccatccac

SEQ ID NO: 583504 - DNA, 75 bp, synthetic construct
  source 1..75: mol_type = other DNA
gacgatcagccgtttgaccggcaaattgttattcctgcggtggctttcagcggtgccagacatgagcgggagaat

SEQ ID NO: 583505 - DNA, 75 bp, synthetic construct
  source 1..75: mol_type = other DNA
cgggttatccggactgtacgtgaaaagcatgcctgtactcagtgcgatgccatcgtgcaggcccccgcgccttca

SEQ ID NO: 583506 - DNA, 75 bp, synthetic construct
  source 1..75: mol_type = other DNA
gatgatgacgaaacatgggtactgttcaatgccatgaacggtaaccgcgctgaaatgagtccggaagctgccggc

SEQ ID NO: 583507 - DNA, 75 bp, synthetic construct
  source 1..75: mol_type = other DNA
cattccacagtgggtgaccctggatccccgtgtcttcggctggatggaccgtctatgcgaaaactactgcggtgg

SEQ ID NO: 583508 - DNA, 75 bp, synthetic construct
  source 1..75: mol_type = other DNA
tgatgacgaaacatgggtactgttcaatgccatgaacggtaaccgcgctgaaatgagcccggaagctgccggcat

SEQ ID NO: 583509 - DNA, 75 bp, synthetic construct
  source 1..75: mol_type = other DNA
tgccgcctgtctgatggcgtacagccatcacgcctgtcgtacagagaattatgccatgacggttcattattaccg

SEQ ID NO: 583510 - DNA, 75 bp, synthetic construct
  source 1..75: mol_type = other DNA
tgcatcagggaataacccacctcagctggttgccactctcgtccctgatgaacagcgcatcagcttctggccgca

SEQ ID NO: 583511 - DNA, 75 bp, synthetic construct
  source 1..75: mol_type = other DNA
gtggaggccgtcggtcagcccagcgatgatgcggaaggttatctgaatttttacaaggggctgattaataaaacg

SEQ ID NO: 583512 - DNA, 75 bp, synthetic construct
  source 1..75: mol_type = other DNA
atacagcaacaatccggcctggtgtctgtgggacatgctgactcacccgcgctacggcatgggaaaacgtctggg

SEQ ID NO: 583513 - DNA, 75 bp, synthetic construct
  source 1..75: mol_type = other DNA
agaaagctgttgcccggagtgtggcggtaagctggattatctgggggaagtcagcgctgaacagctggaactggt

SEQ ID NO: 583514 - DNA, 75 bp, synthetic construct
  source 1..75: mol_type = other DNA
ttgcacgcagttatgcaggcgcggggcttctggcccatgttgtcgctggaaaatatgcagaccatctgccgttat

SEQ ID NO: 583515 - DNA, 75 bp, synthetic construct
  source 1..75: mol_type = other DNA
ctgttgtcggtgcgaccatatcgtgcaggcaccagtaccttcaaaacccattgcacgcagttatgccggagcggg

SEQ ID NO: 583516 - DNA, 75 bp, synthetic construct
  source 1..75: mol_type = other DNA
gacggttacagtcaccatcagcgatgatcataactttgaccgtcaaatcattattccgcccattatctttaacgg

SEQ ID NO: 583517 - DNA, 75 bp, synthetic construct
  source 1..75: mol_type = other DNA
ctgattaaaacggaactgctggaaacgcagaccgtggacttcagcgtgggtgccgaagggcttcgccatgtgccg

SEQ ID NO: 583518 - DNA, 75 bp, synthetic construct
  source 1..75: mol_type = other DNA
cattccacagtgggtcaccctggacccccgtgtcttcggctggatggaccgtctttgcgaaaactactgcggtgg

SEQ ID NO: 583519 - DNA, 75 bp, synthetic construct
  source 1..75: mol_type = other DNA
tgaaacaacgtgaacaggacagcgatcgttacagtgggcgggaagacgatcctcaggttccccgccagttgcgac

SEQ ID NO: 583520 - DNA, 75 bp, synthetic construct
  source 1..75: mol_type = other DNA
ggatggtggagaagaatggtacgctgtcgaaaaaatccagactgggcgaagcgttcagctatgtactgaatcagt

SEQ ID NO: 583521 - DNA, 75 bp, synthetic construct
  source 1..75: mol_type = other DNA
cgccatattctgagcgtactgccggaatggccctccaaccgtgttgacgaactcctgccatggaacgtagttctc

SEQ ID NO: 583522 - DNA, 75 bp, synthetic construct
  source 1..75: mol_type = other DNA
tcggtaaaagctcagaaaaacttcgcgctaaaaccgaacggcagatacaggaagcccaggagcgaatcagcgcac

SEQ ID NO: 583523 - DNA, 75 bp, synthetic construct
  source 1..75: mol_type = other DNA
ctgcgccagtcttcagcccgtaaaccgttaccggcctcacttccccgtgaaacccgggttatccggccggaagag

SEQ ID NO: 583524 - DNA, 75 bp, synthetic construct
  source 1..75: mol_type = other DNA
gcacgggagcgaatcagcgcacttcaggaagaaatggcggaaacgctgggtgagcaatatgacccggtactgcca

SEQ ID NO: 583525 - DNA, 75 bp, synthetic construct
  source 1..75: mol_type = other DNA
ttgcacgcagttatgccggagcggggcttctggcccatgttgtcgctggaaaatatgcagaccatctgccgttat

SEQ ID NO: 583526 - DNA, 75 bp, synthetic construct
  source 1..75: mol_type = other DNA
ggcgctggacaggtgctgttgctgaactgctggagccgctgtatgacgtcctgcgccagtatgtgctgatgcccg

SEQ ID NO: 583527 - DNA, 75 bp, synthetic construct
  source 1..75: mol_type = other DNA
cgtctgaacaatgtggagccggaaaaatggctgagttacgtcattgagaatatccaggactggccggcaaaccgg

SEQ ID NO: 583528 - DNA, 75 bp, synthetic construct
  source 1..75: mol_type = other DNA
atacaccgcctggagccagaagaaagctgttgcccggagtgtggcggtgagctggattatctgggggaagtcagc

SEQ ID NO: 583529 - DNA, 75 bp, synthetic construct
  source 1..75: mol_type = other DNA
aaatgagcccggaagccgccggcattgctgcctgtctgatgacgtacagtcatcatgcctgtcgtacggagtgtt

SEQ ID NO: 583530 - DNA, 75 bp, synthetic construct
  source 1..75: mol_type = other DNA
tgcgctacgtcattgaacatatccaggattggccggcaaaccgggtacgcgatctgttgccctggaaagttgatc

SEQ ID NO: 583531 - DNA, 75 bp, synthetic construct
  source 1..75: mol_type = other DNA
aagtccggggatgttcagcagaacagcgtctggcagcaagaaaagccagagctgcgccgctgatgcagtcactgt

SEQ ID NO: 583532 - DNA, 75 bp, synthetic construct
  source 1..75: mol_type = other DNA
acggtatagatccggaagcgtatctgcgccatatcctgagtgtactgccagaatggccttccaaccgtgttgacg

SEQ ID NO: 583533 - DNA, 75 bp, synthetic construct
  source 1..75: mol_type = other DNA
agtgggaggccctgaacttgtactgcagtaatggctgggtggaaatcgacaacaacatcgcagagaacgccttac

SEQ ID NO: 583534 - DNA, 75 bp, synthetic construct
  source 1..75: mol_type = other DNA
ctcgggaaaaagaattacatgttcttcggcaacgatcatggaggcgagcgcggagctctgctgtacggactaatc

SEQ ID NO: 583535 - DNA, 75 bp, synthetic construct
  source 1..75: mol_type = other DNA
cattccacagtgggttaccctggaaccccgtgtcttcggctggatggaccgtctctgcgaaaactactgcggtgg

SEQ ID NO: 583536 - DNA, 75 bp, synthetic construct
  source 1..75: mol_type = other DNA
gtctttgcgaaaactactgcggtggtatctggaatctgtacaccctgaacaacggcggggcatttatggcacccg

SEQ ID NO: 583537 - DNA, 75 bp, synthetic construct
  source 1..75: mol_type = other DNA
acatccgacatcccgtctttttccgttctgtaccggcaaataccgctggcacggcagtgctgaagcgtataccgg

SEQ ID NO: 583538 - DNA, 75 bp, synthetic construct
  source 1..75: mol_type = other DNA
aaaatcacctggccggtaacagcggtgtgcttcaggccgatgcttacggtggttaccgggtgtttgtagtggtca

SEQ ID NO: 583539 - DNA, 75 bp, synthetic construct
  source 1..75: mol_type = other DNA
cgttctgaaaaactgcgtcgtgaggttgaacaggctgaagccctgctgaaacaaacgcgagcaggaaagcgatcg

SEQ ID NO: 583540 - DNA, 75 bp, synthetic construct
  source 1..75: mol_type = other DNA
acagtgggcgtgaggatgacccgctggttccccgccagttgcgacagtcgcgccatcgtcgtccgttaccggcac

SEQ ID NO: 583541 - DNA, 75 bp, synthetic construct
  source 1..75: mol_type = other DNA
ctgggtgaagtcagtgctgagcagctggaactggtgagtagcgccctgaaagtgatccgcactagttcgggtaaa

SEQ ID NO: 583542 - DNA, 75 bp, synthetic construct
  source 1..75: mol_type = other DNA
aaccggatgacgatgatgacgaaacatgggtactgttcaatgccatgaacggtagtgccattaaccacagaaaca

SEQ ID NO: 583543 - DNA, 75 bp, synthetic construct
  source 1..75: mol_type = other DNA
tggagcactgttgtacgggctgatcggcacctgccgtctgaacggtatcgatccggaagcgtatctgcgccatat

SEQ ID NO: 583544 - DNA, 75 bp, synthetic construct
  source 1..75: mol_type = other DNA
gcattgagcgacataacctgaatctgagacaacatctggcaaggctgggacggaagtcactgtcgttctcaaaat

SEQ ID NO: 583545 - DNA, 75 bp, synthetic construct
  source 1..75: mol_type = other DNA
tcggtaacctcgtgcatacaaccgggcagtgatgtgattgtctgcgctgaaatggacgaacagtggggctatgtc

SEQ ID NO: 583546 - DNA, 75 bp, synthetic construct
  source 1..75: mol_type = other DNA
aaaattccggcaattgtcgatcactccccaattgacggcggcaaaccattaagcatgtttgagtcgggggctatt

SEQ ID NO: 583547 - DNA, 75 bp, synthetic construct
  source 1..75: mol_type = other DNA
gtcgatccagaagtaccagcctgccacggtgatgacgttattgcattgatgcacgatacaggtgaaaccaccttc

SEQ ID NO: 583548 - DNA, 75 bp, synthetic construct
  source 1..75: mol_type = other DNA
cagcaagcgatacactcagcgaattgagcgacataacctgaatctgagacagcacctggcacggctgggacggaa

SEQ ID NO: 583549 - DNA, 75 bp, synthetic construct
  source 1..75: mol_type = other DNA
gaggacagttgtggcgcacgttttcggtgaacgcactctggccacactggcgcgtcttctgagcctgctgtcacc

SEQ ID NO: 583550 - DNA, 75 bp, synthetic construct
  source 1..75: mol_type = other DNA
atcggtagctgcaaacttaacggaatcgagccggaaacgtggctacgccacgtgatcagtgtcatcaacacctgg

SEQ ID NO: 583551 - DNA, 75 bp, synthetic construct
  source 1..75: mol_type = other DNA
catcgaggatgaaatacggggattaccggagtcagagcgtcttgccgtcaggcagcagcgaagcaaagtgttact

SEQ ID NO: 583552 - DNA, 75 bp, synthetic construct
  source 1..75: mol_type = other DNA
ggtgtcgccggaccggggctgctggcccgtgtgctgacctcgaagtatgcagagcataccccgctgtatcgccag

SEQ ID NO: 583553 - DNA, 75 bp, synthetic construct
  source 1..75: mol_type = other DNA
agatacggcaaaagcgttcgcatacctgctgaaacagtgggatgcactgaacgtgtactgcagtaatggctgggt

SEQ ID NO: 583554 - DNA, 75 bp, synthetic construct
  source 1..75: mol_type = other DNA
tctatataagcactcacacagcgacagcggaagaagccctgaaacgtatcggtgagctgtacgcgatagaagaag

SEQ ID NO: 583555 - DNA, 75 bp, synthetic construct
  source 1..75: mol_type = other DNA
aaaaccgggcgtatctggacgtatgtacgtgacgacagaagcgcaggttcatcagatccgccagcggcatggttc

SEQ ID NO: 583556 - DNA, 75 bp, synthetic construct
  source 1..75: mol_type = other DNA
ttatggcccccgaaccggatgatgatgatgacgaaacatgggtactgttcaatgccatgaacggtaaccgcgctg

SEQ ID NO: 583557 - DNA, 75 bp, synthetic construct
  source 1..75: mol_type = other DNA
tccggaagcgtatctgcgccatatcctgagcgtactgccggaatggccttccaaccgagttgacgaactcctgcc

SEQ ID NO: 583558 - DNA, 75 bp, synthetic construct
  source 1..75: mol_type = other DNA
ctgctgggctcatgcccgccgcaagatccacgatgtgcacgttcgcaccccgtcagcgctgacggaggaagccct

SEQ ID NO: 583559 - DNA, 75 bp, synthetic construct
  source 1..75: mol_type = other DNA
gggtaaacatccggagcaacaccttcgtcccttccggggtatcctgcaggcagatgcgttcgcaggttacgatcg

SEQ ID NO: 583560 - DNA, 75 bp, synthetic construct
  source 1..75: mol_type = other DNA
atgaaaacactgtctcgtcactcggatacggcaaaagcgttcgcatacctgctgaaacagtgggaggccctgaac

SEQ ID NO: 583561 - DNA, 75 bp, synthetic construct
  source 1..75: mol_type = other DNA
ggctgggtggaaatcgacaacaacatcgcagagaacgccttacggggagtggccgtaggccggaaaaactggatg

SEQ ID NO: 583562 - DNA, 75 bp, synthetic construct
  source 1..75: mol_type = other DNA
atgaaaatcatcacccgtggtgaagccatgcgtattcaccaacagcatccggcctcccgtctttttccgttctgc

SEQ ID NO: 583563 - DNA, 75 bp, synthetic construct
  source 1..75: mol_type = other DNA
agcaaaccactgctggcatcgctgcatgaatggctggtagaaaaaaatgagacgctgtcgaaaaagtcccgtctg

SEQ ID NO: 583564 - DNA, 75 bp, synthetic construct
  source 1..75: mol_type = other DNA
ccgcttcagcctgtgcaccggagactggcctgcaacaactggttgccaccatagtccctgatgaacagcgcatca

SEQ ID NO: 583565 - DNA, 75 bp, synthetic construct
  source 1..75: mol_type = other DNA
aaatgagtccggaagccgccggcattgctgcctgtctgatgacgtacagtcatcacgcctgtcgtacggagtgtt

SEQ ID NO: 583566 - DNA, 75 bp, synthetic construct
  source 1..75: mol_type = other DNA
ccatgcgtattcaccaacaacatccggcattccgtctttttccgttctgtaccggtaaataccgctggcacggcg

SEQ ID NO: 583567 - DNA, 75 bp, synthetic construct
  source 1..75: mol_type = other DNA
aaagcctgtacaaaatgtgactgtatagttgaagcgccagcgccgtcccgcccgatagagcgcggcatcgcgggc

SEQ ID NO: 583568 - DNA, 75 bp, synthetic construct
  source 1..75: mol_type = other DNA
agagcgcttcgtgcagtctgtctcggaaagaaaaattacgtgttcttcggtagcgatcacggcggcgagcgtggt

SEQ ID NO: 583569 - DNA, 75 bp, synthetic construct
  source 1..75: mol_type = other DNA
tgacctgcaacaactggtagccactcccgtccctgatgaacggcgcatcagcttctggccgcagcactttggcct

SEQ ID NO: 583570 - DNA, 75 bp, synthetic construct
  source 1..75: mol_type = other DNA
tggttccccgccagttgcgacagtcgcgccatcgtcgtccgttaccggcacatctcccccgtgaaactataccgc

SEQ ID NO: 583571 - DNA, 75 bp, synthetic construct
  source 1..75: mol_type = other DNA
tccggcactatgttctgaccgatggcaaacttcatgctgacgatacgcctgtaccggtcctgctaccgggcaata

SEQ ID NO: 583572 - DNA, 75 bp, synthetic construct
  source 1..75: mol_type = other DNA
agtaaaccgttgctgatatccctgcatgactggttggtggagaaaagagccactctgtcgaaaaaatcccggtta

SEQ ID NO: 583573 - DNA, 75 bp, synthetic construct
  source 1..75: mol_type = other DNA
gacggcaaactccatgccgatgataccccggtccaggtactgctgccgggtaataagaagacgaagaccgggcgg

SEQ ID NO: 583574 - DNA, 75 bp, synthetic construct
  source 1..75: mol_type = other DNA
catcagcagcaaaagtgcgacggcagaagaagccctgaagcgaatcagtgaactgtacgccatcgagaatgaaat

SEQ ID NO: 583575 - DNA, 75 bp, synthetic construct
  source 1..75: mol_type = other DNA
ttcgcctactcaccggatcatcaggggaaacatccggagcagcactttcgtcccttccggggtatcctgcaggca

SEQ ID NO: 583576 - DNA, 75 bp, synthetic construct
  source 1..75: mol_type = other DNA
gtagtaaagaaaaagaatcatttaatacacaaggtgttttagtagccaatgctgaaattgataacccactaagtt

SEQ ID NO: 583577 - DNA, 75 bp, synthetic construct
  source 1..75: mol_type = other DNA
cgagattgcgtcaattgtactgagcaggtttgtatcaaaggcgaggatacagaaatattggatcgaattaagaaa

SEQ ID NO: 583578 - DNA, 75 bp, synthetic construct
  source 1..75: mol_type = other DNA
tattttagagaatccagacattgaaaatggtgcccagattaagctccggggcaatgatttcagccagcttcgccg

SEQ ID NO: 583579 - DNA, 75 bp, synthetic construct
  source 1..75: mol_type = other DNA
cggctggtgaagtcggaacgattattttcgcttgccgaaacggctgtggcaagcggtgagatgggggctgaccgt

SEQ ID NO: 583580 - DNA, 75 bp, synthetic construct
  source 1..75: mol_type = other DNA
cgctattaccgctggagcatggtgccgaagaagaaattcatgctgctatgcgtgcagctgacctgccgcgcgtta

SEQ ID NO: 583581 - DNA, 75 bp, synthetic construct
  source 1..75: mol_type = other DNA
ttctaattcaatctaaagtaatggacgagggtagtaaagataatgcggattttattgttacccccctctttttag

SEQ ID NO: 583582 - DNA, 75 bp, synthetic construct
  source 1..75: mol_type = other DNA
atgcagggagttgctgtttttgaaacgagatgaggtccatcgcagaactggaaaatgggtagaatggaaagattt

SEQ ID NO: 583583 - DNA, 75 bp, synthetic construct
  source 1..75: mol_type = other DNA
gcagtacgaaacgggtcgaacgtcagccagcaccacttcattcagatgtctgacacgaactacccatacatgatt

SEQ ID NO: 583584 - DNA, 75 bp, synthetic construct
  source 1..75: mol_type = other DNA
ttaaaggtggttctggatttgataccttggttattcatcagggtaatgccacaagcaacacattctctggttttg

SEQ ID NO: 583585 - DNA, 75 bp, synthetic construct
  source 1..75: mol_type = other DNA
gccgcagtggcagaaggcactatcaccatccgggacagggacaatcagaagcagaatctggcgaacctgagccgt

SEQ ID NO: 583586 - DNA, 75 bp, synthetic construct
  source 1..75: mol_type = other DNA
caacgtttcaaaccggagattgtggtgctgaacaccggttatgcggtaaatgacctttacggtccgattatcatg

SEQ ID NO: 583587 - DNA, 75 bp, synthetic construct
  source 1..75: mol_type = other DNA
caaaggctattctgaaggcagcagagaaccttgaagcattcatagttaagtgtcgagatgagttgacggtattcg

SEQ ID NO: 583588 - DNA, 75 bp, synthetic construct
  source 1..75: mol_type = other DNA
taacttttttctttgttatcttttcagttaatgtggtggcgaaggaatttaccttagacttctcgactgcaaaga

SEQ ID NO: 583589 - DNA, 75 bp, synthetic construct
  source 1..75: mol_type = other DNA
atggcgagccgattaaactgacccgcgcagagtatgaaatgctggtggcatttgtgactaatccgggcgaaattc

SEQ ID NO: 583590 - DNA, 75 bp, synthetic construct
  source 1..75: mol_type = other DNA
catttcagcgcctgggcacgcctgggattatttccgaccgtctggcaacggcgattttgcgccatgcgggaagag

SEQ ID NO: 583591 - DNA, 75 bp, synthetic construct
  source 1..75: mol_type = other DNA
gctctgctggcggtgttccctggatatgtggagatacgacgtatttctggaagcagaagaacgaatcctcgtacc

SEQ ID NO: 583592 - DNA, 75 bp, synthetic construct
  source 1..75: mol_type = other DNA
gttggtattgccgctgacgtttaccacatctggtgggatcccgatatcgtcacgcaacttcagcgagcagccaat

SEQ ID NO: 583593 - DNA, 75 bp, synthetic construct
  source 1..75: mol_type = other DNA
agttactgcgtagtgaaagcccacgcccgattacgttcaagattactcatggtaagggacgtaaaggcatcatca

SEQ ID NO: 583594 - DNA, 75 bp, synthetic construct
  source 1..75: mol_type = other DNA
atgactttccagttccgtaatccaaactttggtggtaacccaaataatggcgcttttttattaaatagcgctcag

SEQ ID NO: 583595 - DNA, 75 bp, synthetic construct
  source 1..75: mol_type = other DNA
cgcgactaaccgacaatgcccgccctctggcatatccgcgtgcaacctttgcccgtatttgccgggatgccgaca

SEQ ID NO: 583596 - DNA, 75 bp, synthetic construct
  source 1..75: mol_type = other DNA
aatctgctttcttttattttaaagcagggattgttatgtttaatataaaatatattgtatctgggattatttctt

SEQ ID NO: 583597 - DNA, 75 bp, synthetic construct
  source 1..75: mol_type = other DNA
gctaccgctgattagcggcgtggtgctggtggcgattatttctccggttatgctggggggctggtatttagcgga

SEQ ID NO: 583598 - DNA, 75 bp, synthetic construct
  source 1..75: mol_type = other DNA
caattatattatctgtggcaagtggctccgtgctggctgacaaccattcgttttctgtcggttatgcacagagta

SEQ ID NO: 583599 - DNA, 75 bp, synthetic construct
  source 1..75: mol_type = other DNA
atgattaatcttgtcgatccagtacatccaggggtttttatccgtgagatgtttatggaaccgtttgaaatatca

SEQ ID NO: 583600 - DNA, 75 bp, synthetic construct
  source 1..75: mol_type = other DNA
acaaattaggaaaagcaacagccgacagcatttctaaaggtctcaatattgatttgaatgacgtcattgatacgc

SEQ ID NO: 583601 - DNA, 75 bp, synthetic construct
  source 1..75: mol_type = other DNA
gtattgttagtcgttacaatagaaaagcagttttgttctcaatgcttttctttgtctttatgtccataatgggat

SEQ ID NO: 583602 - DNA, 75 bp, synthetic construct
  source 1..75: mol_type = other DNA
caggaacatccattccaaaatcttttgaattacatgttaacggacaaaccgtttgggtaaacccaaatgcaacta

SEQ ID NO: 583603 - DNA, 75 bp, synthetic construct
  source 1..75: mol_type = other DNA
tgacactgcctaaaccgaataacacgatcatgattcagaataaagcgactatcatgattcgtcagaatgttggat

SEQ ID NO: 583604 - DNA, 75 bp, synthetic construct
  source 1..75: mol_type = other DNA
tcgggctgggttatgacgtcaaagtcggaaataacgttaccttcaccgttggtaaaacgaaaaaggatgataccg

SEQ ID NO: 583605 - DNA, 75 bp, synthetic construct
  source 1..75: mol_type = other DNA
gctatgagggtgatatcaaatggataccaaccgtgatggtcgacatcgctaaaatagccgtagctagagttagag

SEQ ID NO: 583606 - DNA, 75 bp, synthetic construct
  source 1..75: mol_type = other DNA
accaggaaagttattgcattttcatcacacattgccgttgaagaaatatacaagacattgagggttctttgtgac

SEQ ID NO: 583607 - DNA, 75 bp, synthetic construct
  source 1..75: mol_type = other DNA
acaatgagctggccactgccgttgatgatatcgctgaacgtatacgctcgctcggatgcttcgcgcccggcacat

SEQ ID NO: 583608 - DNA, 75 bp, synthetic construct
  source 1..75: mol_type = other DNA
ttacgaaaaagactacatccttccagtattttgccaatacaaggatgttctagaaaaaaactcaatattgaaaat

SEQ ID NO: 583609 - DNA, 75 bp, synthetic construct
  source 1..75: mol_type = other DNA
attatcgacgcggaactgtttgcactggcaggtctggatgcgcagcatctgcaactgctggttcatagcggatcg

SEQ ID NO: 583610 - DNA, 75 bp, synthetic construct
  source 1..75: mol_type = other DNA
gcggaaaccacttcgcagaactgcaacaagttgatgaaattatcgacgctgaactgtttgcactgacaggtctgg

SEQ ID NO: 583611 - DNA, 75 bp, synthetic construct
  source 1..75: mol_type = other DNA
tctgtgctggatgacgttgctgaagaaagctggctggaggaaaacctgccgtcagcgtttgcacagcatccgtgg

SEQ ID NO: 583612 - DNA, 75 bp, synthetic construct
  source 1..75: mol_type = other DNA
tgtttgcgaaaatcaccccgaccgatgaccttatcgcgatgaacaaggccgcgcagaaggtctatacctcaatgg

SEQ ID NO: 583613 - DNA, 75 bp, synthetic construct
  source 1..75: mol_type = other DNA
caagcaggcgagcgatgacgggcgtctggcagatgtgcatgaggcggtcactacagtcactgagcaggtgcagac

SEQ ID NO: 583614 - DNA, 75 bp, synthetic construct
  source 1..75: mol_type = other DNA
cacttcttcgtaggtgcagctgcaggggtattcggtaatgcaacgggtggacgtcgtggtgcgattttgggtgcc

SEQ ID NO: 583615 - DNA, 75 bp, synthetic construct
  source 1..75: mol_type = other DNA
agaaaggattttctttgcgtgagttgattgattttcgcgcatggacggatctgcaactttcagagttatggaggc

SEQ ID NO: 583616 - DNA, 75 bp, synthetic construct
  source 1..75: mol_type = other DNA
tgacacgaaactctgtcgcaatggggtctctgttcgggagttcagtcagcagtacccagtctcaagcaaatgttg

SEQ ID NO: 583617 - DNA, 75 bp, synthetic construct
  source 1..75: mol_type = other DNA
aataaatggcatgcgagtgcccgttcggcgctgacgctggggctcgacagccacgcgtcgacagaaacctttgcg

SEQ ID NO: 583618 - DNA, 75 bp, synthetic construct
  source 1..75: mol_type = other DNA
gctacattttggcaagtacgatcgctacgacgacaaatacacctatccggcaatggatgaacggttacatccagt

SEQ ID NO: 583619 - DNA, 75 bp, synthetic construct
  source 1..75: mol_type = other DNA
caattatggggaatttaggtgattcttttgtttcaggagtagccggcgatactttgaagaaaaatgtatctggag

SEQ ID NO: 583620 - DNA, 75 bp, synthetic construct
  source 1..75: mol_type = other DNA
gcgacaggcgcagcaacaggagagctggcagccagagcgattgccggaatgctgtatccgggcgtgaagcagtca

SEQ ID NO: 583621 - DNA, 75 bp, synthetic construct
  source 1..75: mol_type = other DNA
agatcttaaattcctaaaagataaccttacggaaggtgaccgtttgctgtccgtaataagcgatccaacttcctg

SEQ ID NO: 583622 - DNA, 75 bp, synthetic construct
  source 1..75: mol_type = other DNA
tggggggttagtatcatttcgaaaggtaataataaatgtgaaatttattttgatgcttttggtgaatgtggaagt

SEQ ID NO: 583623 - DNA, 75 bp, synthetic construct
  source 1..75: mol_type = other DNA
taaagtggtggtgaatgaaattagcgatctttatgctggtaagataattgatttattgcaaatgaagtatttcag

SEQ ID NO: 583624 - DNA, 75 bp, synthetic construct
  source 1..75: mol_type = other DNA
tgtggaatagatagcgtgaaaacgatagagataattaatcttccatcgtatgttaccacgttagttccgcttagc

SEQ ID NO: 583625 - DNA, 75 bp, synthetic construct
  source 1..75: mol_type = other DNA
cgtatcgcagtatggaagattagcgcacaggaggcttaatcaccctcactggtcactgcatgacatccggcgcac

SEQ ID NO: 583626 - DNA, 75 bp, synthetic construct
  source 1..75: mol_type = other DNA
cacagcaaaacgaaggttgcaatattccggcccataccggaagcgatcctgccgttcgtcacgcggctggtggac

SEQ ID NO: 583627 - DNA, 75 bp, synthetic construct
  source 1..75: mol_type = other DNA
gtattattattggcatggcgggctattggcccgcaacgcctctggtccccataaatagctcaggtatatatattg

SEQ ID NO: 583628 - DNA, 75 bp, synthetic construct
  source 1..75: mol_type = other DNA
accacaccgattgcagcaccgaacaggccgacgaactggtcaagcgttacaaagcgcgcggcgtgcgcgttgagc

SEQ ID NO: 583629 - DNA, 75 bp, synthetic construct
  source 1..75: mol_type = other DNA
ctggaccgtcagcgcccggctgccggaggcgcaccggcaggaacgtacgccgcggtcactccgtcagaaggtctg

SEQ ID NO: 583630 - DNA, 75 bp, synthetic construct
  source 1..75: mol_type = other DNA
tgccatgttgatgtcggcaccttcacgtattactgaggtgttagcactgcctgtggattgcgaggtttttgaaac

SEQ ID NO: 583631 - DNA, 75 bp, synthetic construct
  source 1..75: mol_type = other DNA
gataaagcgaataaaagtagttggcaggctgcgttgggtcatttgcggtatctctatgttcaccagcaagaaaaa

SEQ ID NO: 583632 - DNA, 75 bp, synthetic construct
  source 1..75: mol_type = other DNA
aattataaactttgtgtttcagcttgagtatcatataccaagaatgctaagtacagataacttcaaaaaaataaa

SEQ ID NO: 583633 - DNA, 75 bp, synthetic construct
  source 1..75: mol_type = other DNA
tcgcctgagagtacgagatttgattgacaggaccgtgccggaaggaaagttagccgagttttataatcggtttta

SEQ ID NO: 583634 - DNA, 75 bp, synthetic construct
  source 1..75: mol_type = other DNA
ataatttcttcaacagtgatctgacgcctcgtctgtccttgaaaggaaaacatgccagtatctttgatcgccatg

SEQ ID NO: 583635 - DNA, 75 bp, synthetic construct
  source 1..75: mol_type = other DNA
attttggtacgctacaatttttgagaatgatggcctttgtttaaacccaattaacactatggtgaaaaatattgg

SEQ ID NO: 583636 - DNA, 75 bp, synthetic construct
  source 1..75: mol_type = other DNA
tgcaacaatttttaaaaatcatggtctatgtttaaacccaataaaaacacatgtcaaaaatattggtcatgatgg

SEQ ID NO: 583637 - DNA, 75 bp, synthetic construct
  source 1..75: mol_type = other DNA
agaaagaagtattcgaattactgggcaagaaaaaaacagcagtatggcgtttacgtaaagatcataatttcccaa

SEQ ID NO: 583638 - DNA, 75 bp, synthetic construct
  source 1..75: mol_type = other DNA
ggatcgtgaagggatagaacgatatggttggcgtttttttgcggggaaaggctatgagggtgatatcaaatggat

SEQ ID NO: 583639 - DNA, 75 bp, synthetic construct
  source 1..75: mol_type = other DNA
aaacttaacgaagaaatatggctgtgcttatttaacaaacatttttcacctgaactccagcgatgggcgcagcaa

SEQ ID NO: 583640 - DNA, 75 bp, synthetic construct
  source 1..75: mol_type = other DNA
ttcatgatattttatctaaatatgttggatttatctccgatgatgcaaataactctctttgtgatgttattttaa

SEQ ID NO: 583641 - DNA, 75 bp, synthetic construct
  source 1..75: mol_type = other DNA
aatcccacttggcattctgaccgcttttgttggtgcaccgtttttcctgtttttgttgttacgcggaggtcgcca

SEQ ID NO: 583642 - DNA, 75 bp, synthetic construct
  source 1..75: mol_type = other DNA
acgacctggatcagattggtgcgaattttcaggtgcaacgtctggtgattaccccggcagatgacagcaccatcc

SEQ ID NO: 583643 - DNA, 75 bp, synthetic construct
  source 1..75: mol_type = other DNA
tttcgccgcgcatggctgcgtttataaactgccccgtgctttcaccttcttctttcacgttctccatgccttcaa

SEQ ID NO: 583644 - DNA, 75 bp, synthetic construct
  source 1..75: mol_type = other DNA
gccctgcacgcggacaatacgatgatcaaactcttctatcgcgaacatcaccgttacggatgccactcaatgaac

SEQ ID NO: 583645 - DNA, 75 bp, synthetic construct
  source 1..75: mol_type = other DNA
ggtgtgcatacgctaaatagcctgtggcaacacactatgaaacgtttgcccgaaggcttcccgtggtttgataaa

SEQ ID NO: 583646 - DNA, 75 bp, synthetic construct
  source 1..75: mol_type = other DNA
caccatcattacaaccaataggatggctattgcagctggaagtgatactaggcagtttgagattcatggaaacta

SEQ ID NO: 583647 - DNA, 75 bp, synthetic construct
  source 1..75: mol_type = other DNA
cttagccgcactaaatgccttggaaattaattcagaatctatcttacttgtattgcctgcagatcattttataaa

SEQ ID NO: 583648 - DNA, 75 bp, synthetic construct
  source 1..75: mol_type = other DNA
ctaaatggacatattctaaattcacacagcaatctttcgatgaatatgttaagaaaacacactcagctgaatgtc

SEQ ID NO: 583649 - DNA, 75 bp, synthetic construct
  source 1..75: mol_type = other DNA
ttatcaggttcagcggctggttattaccccggcagacgacagcaccattccgcccacgccggcggtgtatgaaga

SEQ ID NO: 583650 - DNA, 75 bp, synthetic construct
  source 1..75: mol_type = other DNA
gatctggtggctatcttccgtaaacgggaataccagccctggcgggtccagtatgtgctggatgaaatgctgcgt

SEQ ID NO: 583651 - DNA, 75 bp, synthetic construct
  source 1..75: mol_type = other DNA
acaccgcttcaaatttcaaggtatataataacaatattatcggatttgctgcacgatacttcattcaaggcgctg

SEQ ID NO: 583652 - DNA, 75 bp, synthetic construct
  source 1..75: mol_type = other DNA
taaactacatatgtacaactaatatatctccttgcggtctgagtggccaaatttcccaaggtttatcgatagaaa

SEQ ID NO: 583653 - DNA, 75 bp, synthetic construct
  source 1..75: mol_type = other DNA
ctatgaagatccggtggaatacattctgggcggagagaatgaccttctgcctccccatcaggccgaaatcgggcg

SEQ ID NO: 583654 - DNA, 75 bp, synthetic construct
  source 1..75: mol_type = other DNA
caacagtacgtcactgccctcaacgatccgcgtatcacttacatccacaacgacattaacagcggggcgtgcgcg

SEQ ID NO: 583655 - DNA, 75 bp, synthetic construct
  source 1..75: mol_type = other DNA
ggatattgtgcagggttcagcgggggtgctgataggtgcgccgacgggagtggcctgttcggtatgtcccaacag

SEQ ID NO: 583656 - DNA, 75 bp, synthetic construct
  source 1..75: mol_type = other DNA
gaagcaatggtctgcaaaagcggtctgggatttgtatgtggtgaaacagggtcaggaaaatcaacgctgtgtgca

SEQ ID NO: 583657 - DNA, 75 bp, synthetic construct
  source 1..75: mol_type = other DNA
tagccggggcctagctaaggaagatggtgtgcatacgctaaatagcttgtggcaacacactatggaacgtttgcc

SEQ ID NO: 583658 - DNA, 75 bp, synthetic construct
  source 1..75: mol_type = other DNA
atgtggatggcaggtcagggaaccattcaaatctctgaccaaatgaatatcaaagccaagaccgtttcatcgcat

SEQ ID NO: 583659 - DNA, 75 bp, synthetic construct
  source 1..75: mol_type = other DNA
tcgtagaatttttatccttgactattatgaattattttttcaatcatggagttattctgaaagttcatagaggtg

SEQ ID NO: 583660 - DNA, 75 bp, synthetic construct
  source 1..75: mol_type = other DNA
gaagaatttcgtgctgtcagggttgtccctctttttgatttatccggaacagattcagatgaggaaaaagccagt

SEQ ID NO: 583661 - DNA, 75 bp, synthetic construct
  source 1..75: mol_type = other DNA
actacaatggttccatttatcataaggctttatttcatacctaaaatacgcaatatcaagctcaagtataagagg

SEQ ID NO: 583662 - DNA, 75 bp, synthetic construct
  source 1..75: mol_type = other DNA
tgacgggggtgacggacggcgcgggccgccgttttcacctggcgctgaccacgcaggcgcagcgggcggaagcct

SEQ ID NO: 583663 - DNA, 75 bp, synthetic construct
  source 1..75: mol_type = other DNA
tgaaggccaccgcgtgtcggtccactacgggtacgacgataagggccgcctgacgggcgaacggcagacggtgga

SEQ ID NO: 583664 - DNA, 75 bp, synthetic construct
  source 1..75: mol_type = other DNA
atatttccccaaacttcaagccgatgaattgaagtacagctcgctgaaaagaagagattccaaccgcaagcgttt

SEQ ID NO: 583665 - DNA, 75 bp, synthetic construct
  source 1..75: mol_type = other DNA
caacgcaagaaacccaacgacaaagactttgcgtaacgccagaggaataccgccttgctgtcaatgcccttgtcg

SEQ ID NO: 583666 - DNA, 75 bp, synthetic construct
  source 1..75: mol_type = other DNA
cggcgatcctttcctcaatagcctcaatgggtacggcggcggcgatcggtctcggcgcggtggccggcgttattg

SEQ ID NO: 583667 - DNA, 75 bp, synthetic construct
  source 1..75: mol_type = other DNA
ccactacgcaatacagacactaaagaacaaatcgaacaagaacgattgaagaagatggcagccgagcgacaactt

SEQ ID NO: 583668 - DNA, 75 bp, synthetic construct
  source 1..75: mol_type = other DNA
ccaacctgtcaatttcgtatagcgagttatcacgccgctatggttatgacgtttccgttattagtcgtgagtggg

SEQ ID NO: 583669 - DNA, 75 bp, synthetic construct
  source 1..75: mol_type = other DNA
gatacccctaaccaggggctttcaggtcgccaggaaccgcgccagccccctgcaaagaccgtcggtgttacagcg

SEQ ID NO: 583670 - DNA, 75 bp, synthetic construct
  source 1..75: mol_type = other DNA
gcagagatgttcgagcgaagggcgaggacatggtcttggctgggcctggatggttgggaggctcaaagcaaggcg

SEQ ID NO: 583671 - DNA, 75 bp, synthetic construct
  source 1..75: mol_type = other DNA
atccggtagcttctgcccgagccgaagttgacccggtacagcaactggtgaacgaaaataaccagaagttagccc

SEQ ID NO: 583672 - DNA, 75 bp, synthetic construct
  source 1..75: mol_type = other DNA
atgcctaaaacaagaacaaataaaaccaatctgtcaatttcgtatagcgagttatcacgccgctatggttatgac

SEQ ID NO: 583673 - DNA, 75 bp, synthetic construct
  source 1..75: mol_type = other DNA
acaagaaaccaagattgtttatcgtgatcaaaaaacagagtcccccgtatttactgataagggtgattttgttgt

SEQ ID NO: 583674 - DNA, 75 bp, synthetic construct
  source 1..75: mol_type = other DNA
ttgtcagttacacccgctggcctgcgctatcagggctgcaatggtttttattttggcaacgagtcaccgacattc

SEQ ID NO: 583675 - DNA, 75 bp, synthetic construct
  source 1..75: mol_type = other DNA
cggatgaagaaatattagagtatggaaacgaacaagataaaatttacgaggatattacagaaagtactaccgaca

SEQ ID NO: 583676 - DNA, 75 bp, synthetic construct
  source 1..75: mol_type = other DNA
gatagataaaacattatatcaattaggttcaatggaatttgaactacccacggatgaagaaatattagagtatgg

SEQ ID NO: 583677 - DNA, 75 bp, synthetic construct
  source 1..75: mol_type = other DNA
ccaatctgtcaatttcgtatagcgagttatcacgccgctatggttatgacatttctgttattagtcgtgagtggg

SEQ ID NO: 583678 - DNA, 75 bp, synthetic construct
  source 1..75: mol_type = other DNA
aaggtgagaagggaaaaaaactgcaggcgttggcgcaacagcttcgtgatatcgcacatcagcttggcgatatgt

SEQ ID NO: 583679 - DNA, 75 bp, synthetic construct
  source 1..75: mol_type = other DNA
gaggcggtgcgccgcattcttgacagtggcgaagacaatgccgtgcgcatgtcatccattttgcctgcccggctg

SEQ ID NO: 583680 - DNA, 75 bp, synthetic construct
  source 1..75: mol_type = other DNA
attgagtgtaacgaaaactgccagtttgtcggaaaggtcatcaagtcgcagtggaatgatgagacttttgattga

SEQ ID NO: 583681 - DNA, 75 bp, synthetic construct
  source 1..75: mol_type = other DNA
gcgggcaggatggaatgggaaagaccagtttgtttatctcgtgaaagggggaaaattagcgtctgcgttgggtta

SEQ ID NO: 583682 - DNA, 75 bp, synthetic construct
  source 1..75: mol_type = other DNA
atatcgttaccgcagaacataaacagcgggcgttgggcgcagagttagggaaggtgcgaataagcggggaaattc

SEQ ID NO: 583683 - DNA, 75 bp, synthetic construct
  source 1..75: mol_type = other DNA
ttaatgaagattaaagggggtgatacaattattggtatatttactgattcctcgcgttgcttgtattccaatatc

SEQ ID NO: 583684 - DNA, 75 bp, synthetic construct
  source 1..75: mol_type = other DNA
ccgatgttgctcgtcatgccaatgtttcttatcagacagtgtcgcgggtgcttaacaattcagcgaacgtgtctg

SEQ ID NO: 583685 - DNA, 75 bp, synthetic construct
  source 1..75: mol_type = other DNA
tttggtttgaagcctattttttactctgctatgtaccgtgcttaatttactatttttccattgtcgattcctctg

SEQ ID NO: 583686 - DNA, 75 bp, synthetic construct
  source 1..75: mol_type = other DNA
cgatacaggcaacaagcggattattgacggcgaactctatgctattaaccagggcgatttaaagcgcataaagca

SEQ ID NO: 583687 - DNA, 75 bp, synthetic construct
  source 1..75: mol_type = other DNA
gtcgttctggctggaggtcaaggggcattcaatgaccgcgccacagggaggtaaacccagcttccctgaaggtat

SEQ ID NO: 583688 - DNA, 75 bp, synthetic construct
  source 1..75: mol_type = other DNA
tcattacggtagttgggacgctcaaagcggctatctggcgacgttacagatgctacgtgaaacgccacaggcgac

SEQ ID NO: 583689 - DNA, 75 bp, synthetic construct
  source 1..75: mol_type = other DNA
catgccccctcgcaaattgcggcagcagtgaaaaaatatgccggagaacatggatatcaggtgctgatatccatg

SEQ ID NO: 583690 - DNA, 75 bp, synthetic construct
  source 1..75: mol_type = other DNA
tttccagtgcccgtcaggtcatgtattgtctggtattaatgttcaggatacagggtccaactctgccgataatat

SEQ ID NO: 583691 - DNA, 75 bp, synthetic construct
  source 1..75: mol_type = other DNA
atgagtgagattgtcgctggaaccattctccagttattacgtcagactcaggatagccaattttctacattgggg

SEQ ID NO: 583692 - DNA, 75 bp, synthetic construct
  source 1..75: mol_type = other DNA
aactggcctgtcgccggtgcgaccatatcgtgcaggcaccggtgccttcaaaacccattgcacgcagttatgccg

SEQ ID NO: 583693 - DNA, 75 bp, synthetic construct
  source 1..75: mol_type = other DNA
ccacaccgtatgcaaatcgagtcgctcaagagcggctttttttgtgtctgaaatcacccatatccgtgcagtata

SEQ ID NO: 583694 - DNA, 75 bp, synthetic construct
  source 1..75: mol_type = other DNA
agtatataaaatatgaaatcagacggggagtggagcctagccacatggagaagtacacgtttattgatcgatatt

SEQ ID NO: 583695 - DNA, 75 bp, synthetic construct
  source 1..75: mol_type = other DNA
atgcgagattgccattccttaagtgataaagacgtcatttctattgatgaaaaaacgctctgcaactcttatgac

SEQ ID NO: 583696 - DNA, 75 bp, synthetic construct
  source 1..75: mol_type = other DNA
gccacaggtcgagatgaccagcggtaaactggtcagtgcggaagtgttactgcgtatccagcaaccggatggcag

SEQ ID NO: 583697 - DNA, 75 bp, synthetic construct
  source 1..75: mol_type = other DNA
caccgcaagagattgtcggtcatcaactggccttgccgcgtctgcaccaggacgacgaaatcggtatgctggtgc

SEQ ID NO: 583698 - DNA, 75 bp, synthetic construct
  source 1..75: mol_type = other DNA
ggtgatggtgttcatattaataacggttcagatggtggtggtgatttcatttttaaaacagatgggggatttgcg

SEQ ID NO: 583699 - DNA, 75 bp, synthetic construct
  source 1..75: mol_type = other DNA
acagggccaggaacgccgtgcaaaagaatggcgataccttgtccggtgggcttacttttgaaaacgactcaatcc

SEQ ID NO: 583700 - DNA, 75 bp, synthetic construct
  source 1..75: mol_type = other DNA
aagacaaattgccgtggtgataacttacctgataatacccgccgctggcagttgtcaggcgggaacgaaaaataa

SEQ ID NO: 583701 - DNA, 75 bp, synthetic construct
  source 1..75: mol_type = other DNA
gaaaccggcgtggaagtgcagtttgttacgggcggcaccatcgaccgtctgaacaaagccaaactggcgggcggc

SEQ ID NO: 583702 - DNA, 75 bp, synthetic construct
  source 1..75: mol_type = other DNA
ctggcgaaactgccgggtatgctgactacgcctgagcagtggaacgccaccatcaatactgatccgaaactacgc

SEQ ID NO: 583703 - DNA, 75 bp, synthetic construct
  source 1..75: mol_type = other DNA
gatcacttgctgtgatatctaattatctggaaaactataaccgggtatttgcattacgtgctgatctgaggtttg

SEQ ID NO: 583704 - DNA, 75 bp, synthetic construct
  source 1..75: mol_type = other DNA
tggatccggaaggcccatcagtttatcgcccggaggccggaagctatatcagcaacattgccgcagccaactcgc

SEQ ID NO: 583705 - DNA, 75 bp, synthetic construct
  source 1..75: mol_type = other DNA
gttgcagcgccattatgaagaacagtgcgaaaacgcgatgcgtttcccggtgtcggatttgccaaacaaagcctt

SEQ ID NO: 583706 - DNA, 75 bp, synthetic construct
  source 1..75: mol_type = other DNA
ttgcgcgtaagtcgctcgttaacaatcaagcagatggcaatggtggcagccgttgtcctggtgttcgtttttatt

SEQ ID NO: 583707 - DNA, 75 bp, synthetic construct
  source 1..75: mol_type = other DNA
aggagaagatgcaccggtttatctgacctggcaaaccgatgcaccgttatttgataagaaggaacagggtatggt

SEQ ID NO: 583708 - DNA, 75 bp, synthetic construct
  source 1..75: mol_type = other DNA
cataactaaagataaagctttagatatggcaatggttctaaaacaaaagtattgtcagaaagttgtggatattta

SEQ ID NO: 583709 - DNA, 75 bp, synthetic construct
  source 1..75: mol_type = other DNA
gtgcgacagatgaaacacagcgtcagcacgctgaaccaagagatgacgcaactcaataaagaaacggtcaaaatc

SEQ ID NO: 583710 - DNA, 75 bp, synthetic construct
  source 1..75: mol_type = other DNA
gagagagtggctgagcggatcgataacatctctgtatttggcggtctggatcaggttctgcatgggttggttaat

SEQ ID NO: 583711 - DNA, 75 bp, synthetic construct
  source 1..75: mol_type = other DNA
gctacctgattttgcagctcatgcacaagggcaccacgaagggcaaaaatactctgatattttcaataatgttct

SEQ ID NO: 583712 - DNA, 75 bp, synthetic construct
  source 1..75: mol_type = other DNA
ttacccacaagaatccatcgagcaatgcgtcgtgccagctcattactcacaggaagtaaaagagcaggtacgggc

SEQ ID NO: 583713 - DNA, 75 bp, synthetic construct
  source 1..75: mol_type = other DNA
ttagccatcgtttacacgaccgtttgggtgagccgcagtatacagattcactgcattctcaggggtcggcaagca

SEQ ID NO: 583714 - DNA, 75 bp, synthetic construct
  source 1..75: mol_type = other DNA
ctcgttatcgtattcagcctggaacattgatcctggaggtcacggaaagccgacgcattgatgaccctcacgcgg

SEQ ID NO: 583715 - DNA, 75 bp, synthetic construct
  source 1..75: mol_type = other DNA
gtcaaaaggatttcttgcagcatcaaggaaccttataagctttgataaactaaatgaacttgggaatggaaaaaa

SEQ ID NO: 583716 - DNA, 75 bp, synthetic construct
  source 1..75: mol_type = other DNA
ataactgatttttcattcgtcactctggttgttagcgaattttttcatactggtaatgtacaaaaaaaactgctg

SEQ ID NO: 583717 - DNA, 75 bp, synthetic construct
  source 1..75: mol_type = other DNA
gacaaggtgaacaactaatatctaatttgggtcaatcaatatggtgggttggcaagttgctgttccagagtgctt

SEQ ID NO: 583718 - DNA, 75 bp, synthetic construct
  source 1..75: mol_type = other DNA
attgatgagaacagttcatacttaagacaaggtgaacaactaatatctaatttgggtcaatcaatatggtgggtt

SEQ ID NO: 583719 - DNA, 75 bp, synthetic construct
  source 1..75: mol_type = other DNA
actcgacattgccaacgcggcaggaattaaaaagcccgtatacagtaatggtcaggccgttaaagatgaccccga

SEQ ID NO: 583720 - DNA, 75 bp, synthetic construct
  source 1..75: mol_type = other DNA
gagaatcacagtgcctggttcacccggcaggatgcgttaacgttaagtcccgattattacgacttcctgctgcgg

SEQ ID NO: 583721 - DNA, 75 bp, synthetic construct
  source 1..75: mol_type = other DNA
tagctggtatactgcagaaactggtaacatacaatccacctctggatattctattcactttggaataaattcttc

SEQ ID NO: 583722 - DNA, 75 bp, synthetic construct
  source 1..75: mol_type = other DNA
gcgttctccccacaatatcgtgaaatcgcggagaaattaagttggagcaacattggaatcagtagcacaattgca

SEQ ID NO: 583723 - DNA, 75 bp, synthetic construct
  source 1..75: mol_type = other DNA
gatacagtgtgattttcctgtcggtgctgctcgtttctggatgcgcaaatgcaggcttcaattctgataagaatg

SEQ ID NO: 583724 - DNA, 75 bp, synthetic construct
  source 1..75: mol_type = other DNA
ggtctagtgcgctgactatggggatagatcaggaaccgaccctcgatgcgacaaacatcataacggaggcggtaa

SEQ ID NO: 583725 - DNA, 75 bp, synthetic construct
  source 1..75: mol_type = other DNA
ctatgggcaatggaacgtgcaacaagtggaggtgtttctctgaagaccgtggccagcaacatgaatggtcttttg

SEQ ID NO: 583726 - DNA, 75 bp, synthetic construct
  source 1..75: mol_type = other DNA
gggtggcattctcatctacaccgggcagccgtggcacccacaactggagctgattgccggggtgttaaccagtca

SEQ ID NO: 583727 - DNA, 75 bp, synthetic construct
  source 1..75: mol_type = other DNA
tctggaataaccaatgcaactgcaggcgttcttggtaatgaagtggaaagccgggcaaacttcgaatatcgccgt

SEQ ID NO: 583728 - DNA, 75 bp, synthetic construct
  source 1..75: mol_type = other DNA
tgcatatcatgagtacggtaccggtggcgttggggctatcgatgtaagagataattccccgctaaattaccttaa

SEQ ID NO: 583729 - DNA, 75 bp, synthetic construct
  source 1..75: mol_type = other DNA
aaacgaaaaattcaggctggcgtactggcagggcaggatattactgaactgcgaaagcagtatgaaaagctgggc

SEQ ID NO: 583730 - DNA, 75 bp, synthetic construct
  source 1..75: mol_type = other DNA
acctggatgcgtctgtcagggaaaacttaccgggagcttatcagtgagcagaaacgctataacctggtgacaaag

SEQ ID NO: 583731 - DNA, 75 bp, synthetic construct
  source 1..75: mol_type = other DNA
gacggatgaccttgcggcctggtttaaggatggtggactggaaaaaatccgggcatttatccgtgatgatgccct

SEQ ID NO: 583732 - DNA, 75 bp, synthetic construct
  source 1..75: mol_type = other DNA
tatacagacacacgcggtttcctgagtgatgacgataaaaaatttgaggcgtccctcgagccttttctggggcca

SEQ ID NO: 583733 - DNA, 75 bp, synthetic construct
  source 1..75: mol_type = other DNA
aatatctggcaaaaacaggctcaccagagctggcaagggcagtggcgaagaggaacgggcaggataaatggtttg

SEQ ID NO: 583734 - DNA, 75 bp, synthetic construct
  source 1..75: mol_type = other DNA
ggcacgtgcggaacgtctggaacgctggaaagggcgtggaaagaccgctctgaaagcggggttagggctttcggt

SEQ ID NO: 583735 - DNA, 75 bp, synthetic construct
  source 1..75: mol_type = other DNA
atagagtttccttcaaaccatgaattattcgaaaaaattgaaaaggaaaaagtcacccttaaaataaatgaaata

SEQ ID NO: 583736 - DNA, 75 bp, synthetic construct
  source 1..75: mol_type = other DNA
acgaaaggcatagcaaaattataaatagcgttatgggcttttattctaaggcaaaagctagcttttattctgaga

SEQ ID NO: 583737 - DNA, 75 bp, synthetic construct
  source 1..75: mol_type = other DNA
ttctatcattattagttgatggactaaaatgggaaagatcgcatggggtggcaatattatataattcacacttaa

SEQ ID NO: 583738 - DNA, 75 bp, synthetic construct
  source 1..75: mol_type = other DNA
ggcatgtggcgctgtcaaatctccgtaatgttttgagttcttccattgatgaaatcagcggacaactgggtaatg

SEQ ID NO: 583739 - DNA, 75 bp, synthetic construct
  source 1..75: mol_type = other DNA
tgtgttttctattttcccaccttcgctccctaagtggggcatggctatctggaacgcttcgggggaactggtgct

SEQ ID NO: 583740 - DNA, 75 bp, synthetic construct
  source 1..75: mol_type = other DNA
gctggcgggaaaacagcctggcgacatcgatttttacgtggtcaggaaaacaccgaaggcgaatattcctcgctc

SEQ ID NO: 583741 - DNA, 75 bp, synthetic construct
  source 1..75: mol_type = other DNA
cttaccgggagcttattgaggagcagaagcgctataacctggtgaccagggaaggggcggatggtgccgtccggg

SEQ ID NO: 583742 - DNA, 75 bp, synthetic construct
  source 1..75: mol_type = other DNA
attatgcaattttttgtttcttattgctgttttcacttaattcaattgccgatgacttactgatttttaagaagt

SEQ ID NO: 583743 - DNA, 75 bp, synthetic construct
  source 1..75: mol_type = other DNA
agtttatggggatgtagttatttccattgaagatcctcctgaattgcctgttcagggtagctataataacagagg

SEQ ID NO: 583744 - DNA, 75 bp, synthetic construct
  source 1..75: mol_type = other DNA
aagctttagcggttagtattctgatgtatagttgtagactatggattaatgataaaaaattaaattctattatca

SEQ ID NO: 583745 - DNA, 75 bp, synthetic construct
  source 1..75: mol_type = other DNA
caatgtctgctgcaggccggtttaattattcctgtcgcgcggctgcgtccggtgctaacgctcaaaaacagtgga

SEQ ID NO: 583746 - DNA, 75 bp, synthetic construct
  source 1..75: mol_type = other DNA
tgaaggcagtgacgacgcgctacggtatattgcggaacatgacgatgcgctggcgtttgcgcgtattaatcgcca

SEQ ID NO: 583747 - DNA, 75 bp, synthetic construct
  source 1..75: mol_type = other DNA
gtcagtatttatttgaataaatctttatatgcttttccgccgggtttacggcgttacaaggtaggtactcttgaa

SEQ ID NO: 583748 - DNA, 75 bp, synthetic construct
  source 1..75: mol_type = other DNA
aggatatcgctacgctggctggcgtaacaaaaatgaccgtgagtcgttatatccgctcgccgaaaaaggtggcaa

SEQ ID NO: 583749 - DNA, 75 bp, synthetic construct
  source 1..75: mol_type = other DNA
tgacaaaatggtggaacgatacagcatcacaaagaatatttgactctctaatattgaataatccgggactaaata

SEQ ID NO: 583750 - DNA, 75 bp, synthetic construct
  source 1..75: mol_type = other DNA
ccggaacgatcttcactatgttaagggatactggcggcataaaaccccatgagcgtaagcgggctgtagctcacc

SEQ ID NO: 583751 - DNA, 75 bp, synthetic construct
  source 1..75: mol_type = other DNA
tggcagggcgatgacgtacagctccgggtgaaaggtgtggtgacctggtttgaactgggggagaacgacaaaaac

SEQ ID NO: 583752 - DNA, 75 bp, synthetic construct
  source 1..75: mol_type = other DNA
tgccagccaatcttatgatgaaaataataaagaagaggagcgttttaatctgtttatctctattcctttctactg

SEQ ID NO: 583753 - DNA, 75 bp, synthetic construct
  source 1..75: mol_type = other DNA
aggattacaggacattcagcgaccatctttacgaaaatgataaacactatcatcagagtgattataatgattttt

SEQ ID NO: 583754 - DNA, 75 bp, synthetic construct
  source 1..75: mol_type = other DNA
taagtaagtttaggaaatttttgtatgatatatatttttcaaattatatcgctgctttagttttaacgtggggaa

SEQ ID NO: 583755 - DNA, 75 bp, synthetic construct
  source 1..75: mol_type = other DNA
aattttcttgttgaaaatccacattatgaacatgttgattttgttctctatatatcagtgatcttacccaccaat

SEQ ID NO: 583756 - DNA, 75 bp, synthetic construct
  source 1..75: mol_type = other DNA
tgaacatgttgattttgtgctctatatatcagagctacgtagatcaacacataatatgattgatatttcagcaat

SEQ ID NO: 583757 - DNA, 75 bp, synthetic construct
  source 1..75: mol_type = other DNA
cttgattttattcgatctaagaaaaataatatagtattggacgatatgaaggatgatttcaaaaaagacgatggc

SEQ ID NO: 583758 - DNA, 75 bp, synthetic construct
  source 1..75: mol_type = other DNA
actggttggatacgggcgatgacaatgccgatcccagccagatcaaagtgccgtttaccgcgaccccaccagttt

SEQ ID NO: 583759 - DNA, 75 bp, synthetic construct
  source 1..75: mol_type = other DNA
gcaaaaggccctggtggcggtggtgcagggttagcgacggaaaaggcaggcggagttaccggtgctggatatagt

SEQ ID NO: 583760 - DNA, 75 bp, synthetic construct
  source 1..75: mol_type = other DNA
ggcgaaagtcaaaatacgtcagcaagaaatggaaatcctggcggcaccagtagttttggcgcatatctctcggca

SEQ ID NO: 583761 - DNA, 75 bp, synthetic construct
  source 1..75: mol_type = other DNA
ggacggcgtaccggaagctgcactggatgaagtcatggccacgctgaccacgccggcacgcagcagtgttatcag

SEQ ID NO: 583762 - DNA, 75 bp, synthetic construct
  source 1..75: mol_type = other DNA
cgagtttttcaccaagcttcgagcgatcccggcccagttcagtcgtgaaaactacctggcctgtgccctactgat

SEQ ID NO: 583763 - DNA, 75 bp, synthetic construct
  source 1..75: mol_type = other DNA
gtcatcttgaactagataaaatcaggccgctggatatcagtgaaatcctgcgcgatatcaccaacggatatggcg

SEQ ID NO: 583764 - DNA, 75 bp, synthetic construct
  source 1..75: mol_type = other DNA
gctgttccatctggtccaacagaatcgctataacacggctacgcaactggaaagcattgctcgctctgtccgcga

SEQ ID NO: 583765 - DNA, 75 bp, synthetic construct
  source 1..75: mol_type = other DNA
gccacacttccggcctatatgccgaagcgcggtcaggcctctgacgtacgcgggccgcgcactgaacaacgtccc

SEQ ID NO: 583766 - DNA, 75 bp, synthetic construct
  source 1..75: mol_type = other DNA
ctggtactacaggcggattccttccgtatgtataagttcgtgatgagcaccctctcaacgttagtgaccatttac

SEQ ID NO: 583767 - DNA, 75 bp, synthetic construct
  source 1..75: mol_type = other DNA
atggtgaattactgtcttatatcattggcgctgacaatggacagttctgttgttgttccccccactaatgaaaac

SEQ ID NO: 583768 - DNA, 75 bp, synthetic construct
  source 1..75: mol_type = other DNA
gctgggcgctatcggcgcgctgattggcatgtgggctcagtcgttcccggatgctgcgctgcacgcctgggcggt

SEQ ID NO: 583769 - DNA, 75 bp, synthetic construct
  source 1..75: mol_type = other DNA
gcaaagctattggagccgcaccgccatcgctttcactgtcaccagcaacatctgatgttctggccgagcgccagc

SEQ ID NO: 583770 - DNA, 75 bp, synthetic construct
  source 1..75: mol_type = other DNA
ggccagaataagcctcaataagaactacaatggtggggattttgaccaaactgtacgtcgtagagactttgactt

SEQ ID NO: 583771 - DNA, 75 bp, synthetic construct
  source 1..75: mol_type = other DNA
gccgcgagcgaaacctcgccgtgccagaacaaatttccattgcgggttttcatgggctggagattggcaggcaaa

SEQ ID NO: 583772 - DNA, 75 bp, synthetic construct
  source 1..75: mol_type = other DNA
ccatcgcggcctgccgctggcgctcatcagcacggaaggggcaacagcgtggtgcgcagaatatgatgaatgggg

SEQ ID NO: 583773 - DNA, 75 bp, synthetic construct
  source 1..75: mol_type = other DNA
tccactctgctcaaaatgcttggtcgtcaccagccaccgtcggaaggggagattctccttgatgcccagccgctg

SEQ ID NO: 583774 - DNA, 75 bp, synthetic construct
  source 1..75: mol_type = other DNA
taaggaaattacgtatagacgtcggtgtcacgctgaaaagcatggctgatgctatgggcgtgacctcgtcttacc

SEQ ID NO: 583775 - DNA, 75 bp, synthetic construct
  source 1..75: mol_type = other DNA
acagtttttactgaaaagtaatcccagacgaaacagagcgaagtttacgataagtcccttcccggcactcagggt

SEQ ID NO: 583776 - DNA, 75 bp, synthetic construct
  source 1..75: mol_type = other DNA
tctgcggtttgccacggggtttccatcgcaaccgaagattgtcggtcccagagaaaagccgatgcgcaccgtgca

SEQ ID NO: 583777 - DNA, 75 bp, synthetic construct
  source 1..75: mol_type = other DNA
aaagttctcccgccgcgagaagaggggcatagtgcgcctagacatgttttagaccaaatggataaatataaaaaa

SEQ ID NO: 583778 - DNA, 75 bp, synthetic construct
  source 1..75: mol_type = other DNA
agttatttcaaacgtgctcttggggaacataaggatgtatcagggtttgagtcatttgttaaaacatggatttta

SEQ ID NO: 583779 - DNA, 75 bp, synthetic construct
  source 1..75: mol_type = other DNA
ttacagaggcatacgaaattgccagagatatgccaccagctcagggaacaatcgtcaaagagctggcggctatcc

SEQ ID NO: 583780 - DNA, 75 bp, synthetic construct
  source 1..75: mol_type = other DNA
tgccattccatccgccctgctcaacgaatccgccacgctgttccgccgtaagtattacatcaacggcagccatgc

SEQ ID NO: 583781 - DNA, 75 bp, synthetic construct
  source 1..75: mol_type = other DNA
acgcgcaccgcgtaccgttccagctcatgggcggcaagcccgagaatatcggctcaaccggcgacgttgagaagg

SEQ ID NO: 583782 - DNA, 75 bp, synthetic construct
  source 1..75: mol_type = other DNA
gacgcgcaccgcgtgccgttccagcttatgggtggtaagcccgagaatatcggctcacttggtgacgttgagaag

SEQ ID NO: 583783 - DNA, 75 bp, synthetic construct
  source 1..75: mol_type = other DNA
caataatgccgagtttgaaccggaacctgcaccggtcgctccgccgaagccgaaaccggtggaaccgcctaaacc

SEQ ID NO: 583784 - DNA, 75 bp, synthetic construct
  source 1..75: mol_type = other DNA
acaactggattaacgaggctattgccacgcagttaccggaactccggatgtcgctgagcctggaggacagtgaac

SEQ ID NO: 583785 - DNA, 75 bp, synthetic construct
  source 1..75: mol_type = other DNA
ctatgtggaatgcgtacagatggaccgctggtatgagccgcccgtcagctttgacggactggcacgaaccttccg

SEQ ID NO: 583786 - DNA, 75 bp, synthetic construct
  source 1..75: mol_type = other DNA
tgatctacggcgcgaagaaaatgccgattatcaaaaaggccaatactaccatcggtattccgggcacctttagcg

SEQ ID NO: 583787 - DNA, 75 bp, synthetic construct
  source 1..75: mol_type = other DNA
cgcgtaactacgggctggcacgtcattacgatccgtttatcgtcaacaccgtagtgggctttattgggccagagt

SEQ ID NO: 583788 - DNA, 75 bp, synthetic construct
  source 1..75: mol_type = other DNA
gggtaggcgatgcggtgattggcgtcaacccggtgacggacgacgtggaaaacttaagccgtgtgctggatacca

SEQ ID NO: 583789 - DNA, 75 bp, synthetic construct
  source 1..75: mol_type = other DNA
ttttatttttatttttatttcttatgcacaagaataaattatatgcatatgataatttctcattcaatgcggatg

SEQ ID NO: 583790 - DNA, 75 bp, synthetic construct
  source 1..75: mol_type = other DNA
aaggagggggtgaaaatatatttcaaataagaacaaatcaagtaaatataaacattaatggagataaaattaaat

SEQ ID NO: 583791 - DNA, 75 bp, synthetic construct
  source 1..75: mol_type = other DNA
caaatctacgaagggctttccttcggggtaggtgatgcggtgatcggcgttaacccggtgacggacgacgtggaa

SEQ ID NO: 583792 - DNA, 75 bp, synthetic construct
  source 1..75: mol_type = other DNA
cgctcgatccggcaattattgcggccaataataccgagtttgaaccggaacctgcaccggtcgctccaccgaagc

SEQ ID NO: 583793 - DNA, 75 bp, synthetic construct
  source 1..75: mol_type = other DNA
ggcaacctcgataaagcagggaaccgtgacagcatctctgatgctgaaaaagctggccagctacccgaagcaaaa

SEQ ID NO: 583794 - DNA, 75 bp, synthetic construct
  source 1..75: mol_type = other DNA
attatcatgaatatattacaaatcgaatgatactgcttcagtcaaaactggaagaggtcaacaaaatggccgcac

SEQ ID NO: 583795 - DNA, 75 bp, synthetic construct
  source 1..75: mol_type = other DNA
ggccgaagagttactggtctggctccggcagaacaacgtgataattcccgcgattgatgtcgtggagcggacctg

SEQ ID NO: 583796 - DNA, 75 bp, synthetic construct
  source 1..75: mol_type = other DNA
acccgtcccgatacccgccagctcctcaccaccatccttgcggatggcatcaatcttggcctgaccaaaatggcg

SEQ ID NO: 583797 - DNA, 75 bp, synthetic construct
  source 1..75: mol_type = other DNA
aaaatcgtatttcagaccctgaatgccccgttaactccggctcacagggatgccctggatcgtttacttgagtcc

SEQ ID NO: 583798 - DNA, 75 bp, synthetic construct
  source 1..75: mol_type = other DNA
cgattgatgtcgtggagcgtacctgtgcggaggccatggctggcggcgataaaatcgtatttcagaccctgaatg

SEQ ID NO: 583799 - DNA, 75 bp, synthetic construct
  source 1..75: mol_type = other DNA
atctgtggtctaccatgtatagtcaccaatattccaggtaataatagcttaatagaagacggctataatggttgt

SEQ ID NO: 583800 - DNA, 75 bp, synthetic construct
  source 1..75: mol_type = other DNA
taaggggctatccaaggatcaggtagcgggactgatccggcaggcggtgaaattgcggcaggagaacgagcagga

SEQ ID NO: 583801 - DNA, 75 bp, synthetic construct
  source 1..75: mol_type = other DNA
gtgtcactggccgagaaggtgttcggagccgtggagacggtcgaaggggtggcgcaaaggttgaacgccaaaata

SEQ ID NO: 583802 - DNA, 75 bp, synthetic construct
  source 1..75: mol_type = other DNA
cgttttcatgcatcgtctgggcgaaataagggatcgaggtctggaaaaccagagttaccgggccagtggactgac

SEQ ID NO: 583803 - DNA, 75 bp, synthetic construct
  source 1..75: mol_type = other DNA
ccagaacggacagaggcatacttatcgcagaggagttactgaagtacctgcatcaacagcgaattattattccag

SEQ ID NO: 583804 - DNA, 75 bp, synthetic construct
  source 1..75: mol_type = other DNA
tagtagcaccttgaatctagtaatggttggtagattatccaagcaaaaagatcctgagacattattgcttgctgt

SEQ ID NO: 583805 - DNA, 75 bp, synthetic construct
  source 1..75: mol_type = other DNA
ggtgatcaaaaaggccaataccaccatcggtatcccaggcactttcagcgcccgtttgcagccaaatgatacccg

SEQ ID NO: 583806 - DNA, 75 bp, synthetic construct
  source 1..75: mol_type = other DNA
ataaaaaattttgaatcaattaatgtcaatgttatttggtgtaagaatcttaagagaaatattggtaaatctgat

SEQ ID NO: 583807 - DNA, 75 bp, synthetic construct
  source 1..75: mol_type = other DNA
ggtcttatggcagaggtgctcgagagccacatacgggaaacctttgaccagaatgacagctacagccatgaaatc

SEQ ID NO: 583808 - DNA, 75 bp, synthetic construct
  source 1..75: mol_type = other DNA
gtccggcatgttcagcagtctgatacagatgatggccagcctcaacggctggcaggatatcccgtcacgccgtct

SEQ ID NO: 583809 - DNA, 75 bp, synthetic construct
  source 1..75: mol_type = other DNA
cgttgtgtcgtactctgcgaacccggaggaacgccactttttaataatgttgcaaaacttgaagctcgtcttcag

SEQ ID NO: 583810 - DNA, 75 bp, synthetic construct
  source 1..75: mol_type = other DNA
cggacacggataatctgcatgtgcatgttgccgtgaatcgtgtacatcctgaaactggttatattaactggcttt

SEQ ID NO: 583811 - DNA, 75 bp, synthetic construct
  source 1..75: mol_type = other DNA
aaaaaatattttactatttagttgaagctatagcattacaatttggcagctataatgttactgtgaacaactatt

SEQ ID NO: 583812 - DNA, 75 bp, synthetic construct
  source 1..75: mol_type = other DNA
cctgattgatgtgatgaaagacggcagtcagtgggtgaatttctatggtgtgacctgctttcataactgtttgtc

SEQ ID NO: 583813 - DNA, 75 bp, synthetic construct
  source 1..75: mol_type = other DNA
tttctaaggctgattcagatcctgtatttcattacattctatcctggcctgcgcatgagagtccgcgtccggagc

SEQ ID NO: 583814 - DNA, 75 bp, synthetic construct
  source 1..75: mol_type = other DNA
ctgagcaaggggcaaagccctgatgaggcactggatatcattgctgcgagttatcctcagctggatgatgcgcag

SEQ ID NO: 583815 - DNA, 75 bp, synthetic construct
  source 1..75: mol_type = other DNA
actctggcagaggcgggattatggatggggattcaacacgggcatctggtactgcatgatggatttgataaacaa

SEQ ID NO: 583816 - DNA, 75 bp, synthetic construct
  source 1..75: mol_type = other DNA
atgtctgtacggattacggagatcgggttgtgttctaccatcacacggaccgaaatgaactggcagagaagcttg

SEQ ID NO: 583817 - DNA, 75 bp, synthetic construct
  source 1..75: mol_type = other DNA
cactttgtaatcagccgccctgatgtggatttacatcgtcagcgtagtgaacagtactaccacgaatatatcagg

SEQ ID NO: 583818 - DNA, 75 bp, synthetic construct
  source 1..75: mol_type = other DNA
tgcgcgtaaagggcttatgctgcagaaacagcatcatggtcttgtgattgtggatgcgtttaatcatgagctcac

SEQ ID NO: 583819 - DNA, 75 bp, synthetic construct
  source 1..75: mol_type = other DNA
gatacttaccagggcgacttcgagaatttaaaacagacctttattaattttctgcacaacttgccgttttatgga

SEQ ID NO: 583820 - DNA, 75 bp, synthetic construct
  source 1..75: mol_type = other DNA
gactcaaaagggctggggaattttaagaacctgtttttctacgcgcccaacggaaagccagacgggatcaagatt

SEQ ID NO: 583821 - DNA, 75 bp, synthetic construct
  source 1..75: mol_type = other DNA
tgacaccgttgcaggagcgatttaaagaaattaatgactggctgggaatggaagtggtccgcttcaaggattaca

SEQ ID NO: 583822 - DNA, 75 bp, synthetic construct
  source 1..75: mol_type = other DNA
caacccggtaacggacgacgtggaaaacttaagccgcgtgctggacaccatttacggtgtgatcgacaaattcaa

SEQ ID NO: 583823 - DNA, 75 bp, synthetic construct
  source 1..75: mol_type = other DNA
actcagggctgcgtactggcgcacgtcaccacccagatcgaagcgattcgtcgcggcgcaccgggcgggctgatt

SEQ ID NO: 583824 - DNA, 75 bp, synthetic construct
  source 1..75: mol_type = other DNA
gcgaagatttgctctaacgcggatctgatctacggcgcaaagaaaatgccgattatcaaaaaggccaataccacc

SEQ ID NO: 583825 - DNA, 75 bp, synthetic construct
  source 1..75: mol_type = other DNA
aaatgactgctacagccgcgaagtcagccaatccgttgatgacacgattgaactggttcgagcctatcttaagta

SEQ ID NO: 583826 - DNA, 75 bp, synthetic construct
  source 1..75: mol_type = other DNA
ccgccgagtatgtaaagcgtctgcgtgaagagtgcctgcgggagaataaacccctgcaccgtcatacccgcttca

SEQ ID NO: 583827 - DNA, 75 bp, synthetic construct
  source 1..75: mol_type = other DNA
tgaagagtgcctgcgggagaataaacccctgcaccgccatacccgcttcagacgccaggagctggcacaggatga

SEQ ID NO: 583828 - DNA, 75 bp, synthetic construct
  source 1..75: mol_type = other DNA
gcgggttacatcatgtatgtgaccgatgcggcacaaagcagcacggatgttgatgcgctgcgctcggccatgcgt

SEQ ID NO: 583829 - DNA, 75 bp, synthetic construct
  source 1..75: mol_type = other DNA
gcgatgcgtgattcaaagggactcgggaattttaaaaacctgtttttctacgcaccgaacgggaaaccggatggt

SEQ ID NO: 583830 - DNA, 75 bp, synthetic construct
  source 1..75: mol_type = other DNA
gcgatatcctcgattatgtcgagtgcatcaataacggtaagtggtacgagccgccggtcaacttctctggtctgg

SEQ ID NO: 583831 - DNA, 75 bp, synthetic construct
  source 1..75: mol_type = other DNA
ccgctggcgcggggaacacctcaccgcttttgacgccagggaaatcggcggcggtttatccccgctggcgcgggg

SEQ ID NO: 583832 - DNA, 75 bp, synthetic construct
  source 1..75: mol_type = other DNA
ttatccccgctggcgcggggaacactatttctgtaatgctcaaagatatagccggatcggtttatccccgctggc

SEQ ID NO: 583833 - DNA, 75 bp, synthetic construct
  source 1..75: mol_type = other DNA
gcggggaactctttacgcagccatcaccgaaattaactattcccggtttatccccgctggcgcggggaactcggc

SEQ ID NO: 583834 - DNA, 75 bp, synthetic construct
  source 1..75: mol_type = other DNA
ttcctcttaacagaatttggtctggtgaatattctgaacgcgttcaatgaatatgccatcaagtcagatgaaaat

SEQ ID NO: 583835 - DNA, 75 bp, synthetic construct
  source 1..75: mol_type = other DNA
gcctgcgcgatgccggtgagcctgtcgacctcgcattactgctgaccccccttagcctgaccgacggcgctgacg

SEQ ID NO: 583836 - DNA, 75 bp, synthetic construct
  source 1..75: mol_type = other DNA
atgtatgaccggaaaacctcagactggcgcggtttatccccgctggcgcggggaactcgccgcgttattttccct

SEQ ID NO: 583837 - DNA, 75 bp, synthetic construct
  source 1..75: mol_type = other DNA
tatccccgctggcgcggggaacacatatcgcggcctggcgaactctcaaccagggtcggtttatccccgctggcg

SEQ ID NO: 583838 - DNA, 75 bp, synthetic construct
  source 1..75: mol_type = other DNA
tgcggggaacaccagcgtcaggcgtgaaatctcaccgtcgttgccggtttatccctgctggcgcggggaactctc

SEQ ID NO: 583839 - DNA, 75 bp, synthetic construct
  source 1..75: mol_type = other DNA
ggctctgcaacagcagcacccatgaccacgtcggtttatccccgctggcgcggggaacacgaaatgctggtgagc

SEQ ID NO: 583840 - DNA, 75 bp, synthetic construct
  source 1..75: mol_type = other DNA
atccccgctgacgcggggaactcgattttttccgcttctgacaaatggtttttatcggtttatccccgctggcgc

SEQ ID NO: 583841 - DNA, 75 bp, synthetic construct
  source 1..75: mol_type = other DNA
gaagcggcgcgtgttatagctgatggccggtttatccccgctggcgcggggaactctctaaaagtatacatttgt

SEQ ID NO: 583842 - DNA, 75 bp, synthetic construct
  source 1..75: mol_type = other DNA
tttatccccgctggcgcggggaacaccgccgcggactcacgagcaggccatcacagaccggtttatccccgctgg

SEQ ID NO: 583843 - DNA, 75 bp, synthetic construct
  source 1..75: mol_type = other DNA
ggacgcaagaggcgctaaaggcggagatgatagatcacggggttaacctaagccctcgacatctcgataaatatt

SEQ ID NO: 583844 - DNA, 75 bp, synthetic construct
  source 1..75: mol_type = other DNA
tcgcccgcttgcagcgcaaagctgagcttaacccgcagcgtgccgaaagtttttatggtggcggtgctgaaggtt

SEQ ID NO: 583845 - DNA, 75 bp, synthetic construct
  source 1..75: mol_type = other DNA
cttcgaacgtctgatggagggcgctaaactgctgaaatgttcagagtttggtgacgcgatcatcaagaatatgta

SEQ ID NO: 583846 - DNA, 75 bp, synthetic construct
  source 1..75: mol_type = other DNA
cttcgaacgtctgatggaaggcgctaaactgttgaaatgttcagagtttggtgacgcgatcatcaagaacatgta

SEQ ID NO: 583847 - DNA, 75 bp, synthetic construct
  source 1..75: mol_type = other DNA
gcggtattcgctctctgaacgttgccctgcgtcaggaactggatctctacatctgcctgcgtccggtacgttact

SEQ ID NO: 583848 - DNA, 75 bp, synthetic construct
  source 1..75: mol_type = other DNA
ggttcgtgagcatgacaaagcgacagcgcagcactatcactgtgtgctcatggtggacgggaaccacatacgtac

SEQ ID NO: 583849 - DNA, 75 bp, synthetic construct
  source 1..75: mol_type = other DNA
ctggccgatacttcatgcagagggagattatgattccaggatcatggaagccctttttgatacggtgaatcaaac

SEQ ID NO: 583850 - DNA, 75 bp, synthetic construct
  source 1..75: mol_type = other DNA
gcgtgaagaaaattcgtttcccggaacattgcggtatcggtattaagccgtgttctgaagaaggcaccaaacgtc

SEQ ID NO: 583851 - DNA, 75 bp, synthetic construct
  source 1..75: mol_type = other DNA
gccacccgtgccacgcgtaagacccggagtgcgacaccggcaaaacgtggacgcccgaaaaagaaagccagttaa

SEQ ID NO: 583852 - DNA, 75 bp, synthetic construct
  source 1..75: mol_type = other DNA
ggtgcgctggctcacctgcaacgtgcgacacagctcgactgtcaggcaggcgtcaaaaaagagattgaacgactg

SEQ ID NO: 583853 - DNA, 75 bp, synthetic construct
  source 1..75: mol_type = other DNA
tcaactactccggtagccaggatgagattcgcctgcagtgtctgcgccaggcacaaagctccggcaatatggaca

SEQ ID NO: 583854 - DNA, 75 bp, synthetic construct
  source 1..75: mol_type = other DNA
ttatttaccggatcatgccgcactgcaaacctatcgcgtactggcaccaatggcctacgcgaagatcaaaaacat

SEQ ID NO: 583855 - DNA, 75 bp, synthetic construct
  source 1..75: mol_type = other DNA
ccgctgagatgatgttacgccatatgggctggactgaagctgctgacctgattgttaaaggtatggaaggcgcaa

SEQ ID NO: 583856 - DNA, 75 bp, synthetic construct
  source 1..75: mol_type = other DNA
ccagtcacaatctaccaactttatagtatcacacaaacaacacatccattatgttaaagagcacttaatccattg

SEQ ID NO: 583857 - DNA, 75 bp, synthetic construct
  source 1..75: mol_type = other DNA
gaactgacaaaggatttatgctggcggaagaaatgctcagctggctacataacaataatgttattttcccttctg

SEQ ID NO: 583858 - DNA, 75 bp, synthetic construct
  source 1..75: mol_type = other DNA
gcgatagattctttgagacgaaaagggatcccgattaatgagcaactgattacccatctgtcaccactgggatgg

SEQ ID NO: 583859 - DNA, 75 bp, synthetic construct
  source 1..75: mol_type = other DNA
atacggtcaggatccaggcgtgcagatttatacgcatatttcggaccaatacagcccgttttacaccaaagttat

SEQ ID NO: 583860 - DNA, 75 bp, synthetic construct
  source 1..75: mol_type = other DNA
cggccgcgcaaggcgtgctggcagccgtgcagaccctgcgtgagatgaacgccgacaacctgcgcaaggtgccgg

SEQ ID NO: 583861 - DNA, 75 bp, synthetic construct
  source 1..75: mol_type = other DNA
ggtttatggcatgctgcctcaccctaaaattactgaaatgctggatgaagtggacggctggaccggttttacccg

SEQ ID NO: 583862 - DNA, 75 bp, synthetic construct
  source 1..75: mol_type = other DNA
ggcagtctgttcagcagggcaaaacgtacgcaggccgaacgactccagcaaacgggaaagctgattcagagtaag

SEQ ID NO: 583863 - DNA, 75 bp, synthetic construct
  source 1..75: mol_type = other DNA
caccggcaaaatacagcaggactgtattacacacctgctttcgatggcgacgcgcaccgataaaggtattctcct

SEQ ID NO: 583864 - DNA, 75 bp, synthetic construct
  source 1..75: mol_type = other DNA
cgcgtactgataaaggtattctcctggccgaagagatgctggtctggctccggcagaacaacgtaataatccccg

SEQ ID NO: 583865 - DNA, 75 bp, synthetic construct
  source 1..75: mol_type = other DNA
tcatcagatggacagaatttcagaacaggcagctcaggccgctacgcagggcaggttaacccgaaatatgggcaa

SEQ ID NO: 583866 - DNA, 75 bp, synthetic construct
  source 1..75: mol_type = other DNA
gagccttacgttcaggtgacatctgggtaaaggggtcacgccgctacaggaatttcgatgattatctgatcccgt

SEQ ID NO: 583867 - DNA, 75 bp, synthetic construct
  source 1..75: mol_type = other DNA
cggattcgcttttgcgccaaggatccgggatcttcatgacaagcggctgtttattcatggtaaagccgagttgta

SEQ ID NO: 583868 - DNA, 75 bp, synthetic construct
  source 1..75: mol_type = other DNA
agccgaagagttacttgtctatctccggcagaacaacgtgataatccccgcgattgatgtcgtggagcgtacctg

SEQ ID NO: 583869 - DNA, 75 bp, synthetic construct
  source 1..75: mol_type = other DNA
tggagtatagggcagtagcccgcagtatggatcgtcaccgacgtcatttcagcatcaggccttttaacgcctacc

SEQ ID NO: 583870 - DNA, 75 bp, synthetic construct
  source 1..75: mol_type = other DNA
cgcccggtttatccccgctggcgcggggaacacacatgaatgtcggttcagaccgtgtttttacccggtttatcc

SEQ ID NO: 583871 - DNA, 75 bp, synthetic construct
  source 1..75: mol_type = other DNA
gcgcggggaacacatgtcgagcgcgttgacagctatattcgccgtcggtttatccccgctggcgcggggaacaca

SEQ ID NO: 583872 - DNA, 75 bp, synthetic construct
  source 1..75: mol_type = other DNA
gtatccagaattgcttcaagactgaagcttcagcccgatttatggcatgaatatgcagccagagagcaaacccgc

SEQ ID NO: 583873 - DNA, 75 bp, synthetic construct
  source 1..75: mol_type = other DNA
atccccgctggcgcggggaacacgcggtaatttgccgggggataatgtttatggtcggtttatccccgctggcgc

SEQ ID NO: 583874 - DNA, 75 bp, synthetic construct
  source 1..75: mol_type = other DNA
gtttatccccgctggcgcggggaacacaacaggccgtatgaggatcactggcacggcggcggtttatccccgctg

SEQ ID NO: 583875 - DNA, 75 bp, synthetic construct
  source 1..75: mol_type = other DNA
ctggcgcggggaactccaacccggcggcacggtcaatcgttgcgtcagcggtttatccccgctggcgcggggaac

SEQ ID NO: 583876 - DNA, 75 bp, synthetic construct
  source 1..75: mol_type = other DNA
aatttcgaaccgcttcatcttattactgaaaaattcagcacgctgcgcaaatattcttcccggttgttatcagcc

SEQ ID NO: 583877 - DNA, 75 bp, synthetic construct
  source 1..75: mol_type = other DNA
tgcatccagtatctgctccctctgtctaccaggactgatcggggcatacttatcgcagaggaattactgaagcat

SEQ ID NO: 583878 - DNA, 75 bp, synthetic construct
  source 1..75: mol_type = other DNA
cttgaaataacggaacattacaccgatacagcaggtttcacggagcatgtttttgcactaatgcatctgctggga

SEQ ID NO: 583879 - DNA, 75 bp, synthetic construct
  source 1..75: mol_type = other DNA
agttaacaggtaaacttatccagagcaagttaaaacaatatgttactgtcggtcaggcgctactgcatgccagaa

SEQ ID NO: 583880 - DNA, 75 bp, synthetic construct
  source 1..75: mol_type = other DNA
aaaactggtactcacgccttcaggaatcgaccgcaagtactacgagttttgcgtactgaatgagctcaagggggc

SEQ ID NO: 583881 - DNA, 75 bp, synthetic construct
  source 1..75: mol_type = other DNA
ggaccgacaaaggcctgattcttgctgaagagatgctcgcttggttgcacaacaacaacgttattttcccttccg

SEQ ID NO: 583882 - DNA, 75 bp, synthetic construct
  source 1..75: mol_type = other DNA
gtctcattgatgcctgccatcatcaacagaccaaaaacctctggacagtggctgtttttacagggatgcgacacg

SEQ ID NO: 583883 - DNA, 75 bp, synthetic construct
  source 1..75: mol_type = other DNA
gcaggagcgaatccaagcttcatagcaaaccaaatgggccatgcaaatgcacaaatggtattcaacgtttacgga

SEQ ID NO: 583884 - DNA, 75 bp, synthetic construct
  source 1..75: mol_type = other DNA
cgtgaagcagagcaggatcgccagatgaacatactgacgggtgcttctgcacctgcaagacagcaactgagtgtt

SEQ ID NO: 583885 - DNA, 75 bp, synthetic construct
  source 1..75: mol_type = other DNA
cagtaattaaaaacatgttgcctatgttgggagaaaaaaaactagtttcatccataacaaaagaggatttacttt

SEQ ID NO: 583886 - DNA, 75 bp, synthetic construct
  source 1..75: mol_type = other DNA
cagtaattaaaaacatgttaccaatgttaggtgaaaaaaaactggtttcatccataacaaaagaggatttacttt

SEQ ID NO: 583887 - DNA, 75 bp, synthetic construct
  source 1..75: mol_type = other DNA
ataacagtgcgacgaaattttacaaaaataggtgattttacgctaccaaagaccgacgcaggcactaaccgggtt

SEQ ID NO: 583888 - DNA, 75 bp, synthetic construct
  source 1..75: mol_type = other DNA
ttgcaagatacggttataccggagcagcccgccctcagggggactggcaggcatccgcagcgctgacccgccagc

SEQ ID NO: 583889 - DNA, 75 bp, synthetic construct
  source 1..75: mol_type = other DNA
ggaagcagagcaggatcgccagatgaacatactgactggtgcttctgcacctgcaagacagcaactgagtgttgg

SEQ ID NO: 583890 - DNA, 75 bp, synthetic construct
  source 1..75: mol_type = other DNA
gaataaattgaatgttgactctggcaactccattgttagccgtccacgtaatatcgcatttaattatattgtgag

SEQ ID NO: 583891 - DNA, 75 bp, synthetic construct
  source 1..75: mol_type = other DNA
tgaatgcacagcttgcacgggtgggaggccttgccacttccagtctccgtacagcgcagatggcgcaggataacc

SEQ ID NO: 583892 - DNA, 75 bp, synthetic construct
  source 1..75: mol_type = other DNA
acagcgcagatggcacaggataaccagatggcgagatacggggtaaaccgcccggataatcccaacagtaacacg

SEQ ID NO: 583893 - DNA, 75 bp, synthetic construct
  source 1..75: mol_type = other DNA
tcgcaagggctggttattcaggagcagcccgcccacagggtgactggcagacgtcagcagcgctgacacgccaac

SEQ ID NO: 583894 - DNA, 75 bp, synthetic construct
  source 1..75: mol_type = other DNA
taccgccgttgctggtttgcaggctgcttatgctcgcgacgaaaatgatgaattcgtgaaagcgaccgttatccg

SEQ ID NO: 583895 - DNA, 75 bp, synthetic construct
  source 1..75: mol_type = other DNA
cgacgccaccactgacatattatccgcatcccggacaacagcatgaaaatgatccacccggcagtaccacgacat

SEQ ID NO: 583896 - DNA, 75 bp, synthetic construct
  source 1..75: mol_type = other DNA
ttgatgctcttaaaagccaggcggaaatgaccatgcttggaaagcaacattctgtagaggtaaagcagagggaat

SEQ ID NO: 583897 - DNA, 75 bp, synthetic construct
  source 1..75: mol_type = other DNA
ccaaaacatcactcaacacataccgtgccgtcatcaaaaatatcctgagcataatcggtgaaaaaaatcttgcct

SEQ ID NO: 583898 - DNA, 75 bp, synthetic construct
  source 1..75: mol_type = other DNA
aaggacgccttatggtctgatattcagatcgggtattgggctgagaacaaaaactcgtgtcactacgtctttgtc

SEQ ID NO: 583899 - DNA, 75 bp, synthetic construct
  source 1..75: mol_type = other DNA
tgtgtgaatgatgcgatcctcagcagaatgaataagtccgaacgtcgtgatctaatgaaagcgcaagaagatttc

SEQ ID NO: 583900 - DNA, 75 bp, synthetic construct
  source 1..75: mol_type = other DNA
gatcgctggtgaacttcgcacttccgtttgttttgcaatcagaatggggagtttcgactacgccgcgcagttccc

SEQ ID NO: 583901 - DNA, 75 bp, synthetic construct
  source 1..75: mol_type = other DNA
gcaaactttctgacatcgcgccgaccatgctctctttaatgggtatggaaatcccgcaagagatgactggtaagc

SEQ ID NO: 583902 - DNA, 75 bp, synthetic construct
  source 1..75: mol_type = other DNA
tttcttcgctaacccggtactgactggcgcggtagataaagcgaaaaacgcaggcaaagcagttcacattatggg

SEQ ID NO: 583903 - DNA, 75 bp, synthetic construct
  source 1..75: mol_type = other DNA
cgcagaaaaaatctacctgcacgcattccttgacggtcgcgacactccgccgcgcagtgctgaatcctcgctgaa

SEQ ID NO: 583904 - DNA, 75 bp, synthetic construct
  source 1..75: mol_type = other DNA
cgggaaatggatgtctgaaaacaataatgcacaggtagccctgctaaatacacagctaagcgagtttgccccaac

SEQ ID NO: 583905 - DNA, 75 bp, synthetic construct
  source 1..75: mol_type = other DNA
ggcgcggtagataaagcgaaaaacgcaggcaaagcagttcacattatgggtctgctctccgcaggcggcgtacac

SEQ ID NO: 583906 - DNA, 75 bp, synthetic construct
  source 1..75: mol_type = other DNA
cgtgatgctgaccgaatacgccgccgacatcaaaacctcagtggcttacccaccagcctctctggttaacacctt

SEQ ID NO: 583907 - DNA, 75 bp, synthetic construct
  source 1..75: mol_type = other DNA
tcgtggtacttggggcaggccccgcaggttactccgctgccttccgttgcgctgatttaggtctggaaaccgtaa

SEQ ID NO: 583908 - DNA, 75 bp, synthetic construct
  source 1..75: mol_type = other DNA
gcgggcaatgctcctcgataagctggactggcggcagccaaaaacatcccgcgttaacggactgacaatgttgta

SEQ ID NO: 583909 - DNA, 75 bp, synthetic construct
  source 1..75: mol_type = other DNA
aggtatccattacccgctcgcaactggcaatgctcctcgataagctggactggcgtcagccaaaaacatccagcc

SEQ ID NO: 583910 - DNA, 75 bp, synthetic construct
  source 1..75: mol_type = other DNA
aactggcaatgctcctcgataagctggactggcgtcagccaaaaacatccagccgtaactcactgacaatgttgt

SEQ ID NO: 583911 - DNA, 75 bp, synthetic construct
  source 1..75: mol_type = other DNA
ggtgacactgttaaaatactctgggctgatggtctgtgtcttttcaccaagcgccaggaggaaggcaatttatct

SEQ ID NO: 583912 - DNA, 75 bp, synthetic construct
  source 1..75: mol_type = other DNA
cctgtttatcttccgtggccgacggggtgacacagttaaaattctttgggctgatgctgatggtctgtgcctgtt

SEQ ID NO: 583913 - DNA, 75 bp, synthetic construct
  source 1..75: mol_type = other DNA
gatggtctgtgcctgttcaccaaacgccttgaggaaggtcagtttatctggcctgcggtgcgtgacggtaagata

SEQ ID NO: 583914 - DNA, 75 bp, synthetic construct
  source 1..75: mol_type = other DNA
ctcgcaactggcaatgctcctcgataagctggactggcgtcagccaaaaacatccagccgtaactcactgacaat

SEQ ID NO: 583915 - DNA, 75 bp, synthetic construct
  source 1..75: mol_type = other DNA
aaagtgttcctcacaccggcacagctggcgatgctccttgaaggtatcgactggcggcagcctaaaagactgctt

SEQ ID NO: 583916 - DNA, 75 bp, synthetic construct
  source 1..75: mol_type = other DNA
taaaaatgcagtggatgatgctgcaacaggaacagccggaagatttcgttattgctaccggcgttcagtactccg

SEQ ID NO: 583917 - DNA, 75 bp, synthetic construct
  source 1..75: mol_type = other DNA
gggtgacaccgtcaaaattctttgggctgatgctgatggtctgtgcctgttcaccaaacgcctggaggaaggcca

SEQ ID NO: 583918 - DNA, 75 bp, synthetic construct
  source 1..75: mol_type = other DNA
ccgatatgcgtaaatccttcaacggactgggagaacaggtacaacatgtgctgaatgataatcccttctccggtc

SEQ ID NO: 583919 - DNA, 75 bp, synthetic construct
  source 1..75: mol_type = other DNA
tagatgataaccccttctccggtcacctgtttatcttccgtggccgacggggagacacgattaaaatcctgtggg

SEQ ID NO: 583920 - DNA, 75 bp, synthetic construct
  source 1..75: mol_type = other DNA
ggtgacaccgttaaaattctttgggctgatgctgatggcctgttcaccaaacgcctggaggaaggccagtttatc

SEQ ID NO: 583921 - DNA, 75 bp, synthetic construct
  source 1..75: mol_type = other DNA
cagtttatctggcctgcggtacgtgacggcaaggtatccattaccccgctcgcaactggcaatgctcctcgataa

SEQ ID NO: 583922 - DNA, 75 bp, synthetic construct
  source 1..75: mol_type = other DNA
caccttactccggctcagttgtccatgcttcctgagggcatcaactggaagcacccgaaacgaacggaacgcgct

SEQ ID NO: 583923 - DNA, 75 bp, synthetic construct
  source 1..75: mol_type = other DNA
taaaacattaattaatggcctgaatgtttgccagaaactggagattaatgttccggtttatgcggggatgccgca

SEQ ID NO: 583924 - DNA, 75 bp, synthetic construct
  source 1..75: mol_type = other DNA
caaccactaatcatgttttcacattcgaacgagtaacgctttgcactattatccttatgcataaggatacgggac

SEQ ID NO: 583925 - DNA, 75 bp, synthetic construct
  source 1..75: mol_type = other DNA
ctggttgcccggtggtgtcctccataccgatttgctggtcctgctgcgcgtttatcttggctaccgcagtgacgt

SEQ ID NO: 583926 - DNA, 75 bp, synthetic construct
  source 1..75: mol_type = other DNA
ataaatctatcctaattgaattactaaacaccaatcgccaaattatcgtcgttcatggcgacgatattgatgatt

SEQ ID NO: 583927 - DNA, 75 bp, synthetic construct
  source 1..75: mol_type = other DNA
tgcgtatgcaacccgcgatcctgcccaaaatccgtgaaattgtgctaatgggcggcgcttacggtacaggcaact

SEQ ID NO: 583928 - DNA, 75 bp, synthetic construct
  source 1..75: mol_type = other DNA
atggaaaagagaaaaattattctggattgtgatccgggtcatgatgatgctattgcaatgatgatggcagcgaaa

SEQ ID NO: 583929 - DNA, 75 bp, synthetic construct
  source 1..75: mol_type = other DNA
tgaatgataatcccttctccggtcacttgtttatcttccgtggccgacggggtgacaccgtcaaaattctttggg

SEQ ID NO: 583930 - DNA, 75 bp, synthetic construct
  source 1..75: mol_type = other DNA
ggagagctgttcagcgacatcatgaacttcactctcaaaacgcagttcgaaaactacggcctggctggcggcccg

SEQ ID NO: 583931 - DNA, 75 bp, synthetic construct
  source 1..75: mol_type = other DNA
acccagttcgaaaactacggcctggctggcggcccggtgcatgacgccacctgcataggttatctgatcaactct

SEQ ID NO: 583932 - DNA, 75 bp, synthetic construct
  source 1..75: mol_type = other DNA
gtggtgttcacctccggcgttccattagtgatgatgggcctcgatctcaccaaccagaccgtttgcaccccggac

SEQ ID NO: 583933 - DNA, 75 bp, synthetic construct
  source 1..75: mol_type = other DNA
cgcggcgtcgggtttgatgctggtgaagtgggtgtggttaacaaaacgctcggtttactggcgaccattgttggt

SEQ ID NO: 583934 - DNA, 75 bp, synthetic construct
  source 1..75: mol_type = other DNA
gcttgcgccagaaccaaccgacaccattcctgtacccaaaacgctggagcaagctgttgttgcgccactacgtga

SEQ ID NO: 583935 - DNA, 75 bp, synthetic construct
  source 1..75: mol_type = other DNA
caatatgctcggccattattccttcacgctggcagaactggtgaccaaaggacatctgagaccattaaaagaggc

SEQ ID NO: 583936 - DNA, 75 bp, synthetic construct
  source 1..75: mol_type = other DNA
ttgtttccgggaatggaaaggagcgtgacgctgctggaaggcggtgagatgctccttgaaagtactaaccgtttt

SEQ ID NO: 583937 - DNA, 75 bp, synthetic construct
  source 1..75: mol_type = other DNA
ttgtttccgggcatggaaaggagtgtgacgctgttggaaggtggcgagatgctccttgaaagcgcaggccatttt

SEQ ID NO: 583938 - DNA, 75 bp, synthetic construct
  source 1..75: mol_type = other DNA
tttactacctttggctcacgcggcggggtggtgtttgtgattaacggggcgtggcaactgggcgataaattgctc

SEQ ID NO: 583939 - DNA, 75 bp, synthetic construct
  source 1..75: mol_type = other DNA
gggctgaatccaaccgaaattatgaccgatacagcaggtgccagcgaacttgtctttggccttttctggctgctg

SEQ ID NO: 583940 - DNA, 75 bp, synthetic construct
  source 1..75: mol_type = other DNA
gatggacgtaaaggtgtgcaacaactggctattcagctggatgagacctggaaagccgtggcatcacgatttgaa

SEQ ID NO: 583941 - DNA, 75 bp, synthetic construct
  source 1..75: mol_type = other DNA
aaagcgaactatctgcgggctgaaactatcaccagcgctaatgccagactggttgattttcaggcaacgctgcca

SEQ ID NO: 583942 - DNA, 75 bp, synthetic construct
  source 1..75: mol_type = other DNA
atcatattccttccggcgtccggcattttaccgccagacagctcgggattcgtgatatcaccgttcttgcagaat

SEQ ID NO: 583943 - DNA, 75 bp, synthetic construct
  source 1..75: mol_type = other DNA
ctgctcgaaattaacgcccataccggatttgctgatgagtttttccatgctagtgaagccagtgccagagttgat

SEQ ID NO: 583944 - DNA, 75 bp, synthetic construct
  source 1..75: mol_type = other DNA
ctggtcactaacgccgtcgtgttatggaacactatttatatgcaggcagctctggatcatctccgggcgcagggt

SEQ ID NO: 583945 - DNA, 75 bp, synthetic construct
  source 1..75: mol_type = other DNA
tgacgcgccttgatgcctgtaaggcgaaagtcagaattgccgatcgcacgttcaccacttttggctcacgcggtg

SEQ ID NO: 583946 - DNA, 75 bp, synthetic construct
  source 1..75: mol_type = other DNA
cctgatttgacgttatcccgtgccgagcctcaggccgggccatttgaaattgcggctgcagatattttcgaacgg

SEQ ID NO: 583947 - DNA, 75 bp, synthetic construct
  source 1..75: mol_type = other DNA
agctttttgactgtgtgcgtcacaccctgaaatcccttgagctgtcaaaacatcagtatgtggcggccgttcata

SEQ ID NO: 583948 - DNA, 75 bp, synthetic construct
  source 1..75: mol_type = other DNA
tcacagcgagaaaacgacgtcgcctcctccctgcagtcctgcctgtcccgcattaaggacgtcagcatcactctt

SEQ ID NO: 583949 - DNA, 75 bp, synthetic construct
  source 1..75: mol_type = other DNA
ggctggcggaactgaccgatttgcgtgatgagctacaggcagaagccgggcatctggaagcgcagtatcagcagg

SEQ ID NO: 583950 - DNA, 75 bp, synthetic construct
  source 1..75: mol_type = other DNA
gatgcggtacaaaaatcgccggagccggtgctgctgtttatcgatgaagcccacaccattatcggcgcgggtaat

SEQ ID NO: 583951 - DNA, 75 bp, synthetic construct
  source 1..75: mol_type = other DNA
tctgaccgggcgccagttgccggacaaggcggttgatttgctggataccgccggggcaagagtccgcatgagcct

SEQ ID NO: 583952 - DNA, 75 bp, synthetic construct
  source 1..75: mol_type = other DNA
atatgattaaagcggaaattgagaaggaaaagcatattgccagccttcgaaaaatgcgccgcatatcaatcaact

SEQ ID NO: 583953 - DNA, 75 bp, synthetic construct
  source 1..75: mol_type = other DNA
tccgggagcggacagccgctcgttgtgtcgcactattcgtggacgtgggaaaattgatcccattctggtgctgga

SEQ ID NO: 583954 - DNA, 75 bp, synthetic construct
  source 1..75: mol_type = other DNA
aggaatggaatgggagcctgaacgagggatccgttgtaccatgtgttttgacatgcgttttgagcggactgcact

SEQ ID NO: 583955 - DNA, 75 bp, synthetic construct
  source 1..75: mol_type = other DNA
ctgtgatgccgtcgtggatcgggtgaatgaacatctgccggggaatatcgacccctggaaagactacaacctctg

SEQ ID NO: 583956 - DNA, 75 bp, synthetic construct
  source 1..75: mol_type = other DNA
agattgataatgattactatgaaggaagacaactagaaaggttagcaacttactatgaacgcgatccgaaagcca

SEQ ID NO: 583957 - DNA, 75 bp, synthetic construct
  source 1..75: mol_type = other DNA
aaaaacaacagcaagcggtgcagctaagatcaaagattttgaaaaaaatatcgtacgtaaatatttgacaaaaat

SEQ ID NO: 583958 - DNA, 75 bp, synthetic construct
  source 1..75: mol_type = other DNA
gtggttcgaaaaagcgcatccttgatgatgcgcctgaacatattatcaccggtccctggaaacgcctcgtatacg

SEQ ID NO: 583959 - DNA, 75 bp, synthetic construct
  source 1..75: mol_type = other DNA
ggcgacctggaaagaaaaagacggcgctgttgaagcagaagaccgcgtaaccatcgacttcaccggttctgtaga

SEQ ID NO: 583960 - DNA, 75 bp, synthetic construct
  source 1..75: mol_type = other DNA
gggaacggcataattttatttatttcatgctgttctttttcttttactacttcattatgtcggcctattttcctt

SEQ ID NO: 583961 - DNA, 75 bp, synthetic construct
  source 1..75: mol_type = other DNA
tgatctttgctgacggagggctgctttatgactatttcccgtatttcactccgccaatggacaaattgggtattg

SEQ ID NO: 583962 - DNA, 75 bp, synthetic construct
  source 1..75: mol_type = other DNA
ggaaaccgcggctcatgatgttcgtgaggaaacatccggcgcgttaacgcgcatcagagttctgacctgcctcca

SEQ ID NO: 583963 - DNA, 75 bp, synthetic construct
  source 1..75: mol_type = other DNA
cagttgggccgaagctatcagcctgttgcgtaataaccgtgtggtgatcctctctgccggtactggtaacccatt

SEQ ID NO: 583964 - DNA, 75 bp, synthetic construct
  source 1..75: mol_type = other DNA
cttcagccactttcactccggcaaaacataaaattttccaggcccgccttaaccgacttaatgaaaaaggagtgt

SEQ ID NO: 583965 - DNA, 75 bp, synthetic construct
  source 1..75: mol_type = other DNA
tcccgaatttattgctcatcctggtaccccgtcatccggaacgcttcccggatgcgattaaccttgtccgccagg

SEQ ID NO: 583966 - DNA, 75 bp, synthetic construct
  source 1..75: mol_type = other DNA
tactcaccgacgccgattaccgtagtttctatggccgtcatgccgttgaagtgctgtatcaaaaccagggcgcgc

SEQ ID NO: 583967 - DNA, 75 bp, synthetic construct
  source 1..75: mol_type = other DNA
atgattaagtcagttattgccggtgcggtagctatggcagtggtgtcttttggtgtaaatgctgctccacagggg

SEQ ID NO: 583968 - DNA, 75 bp, synthetic construct
  source 1..75: mol_type = other DNA
cctccgtcgcgcctgcgctggcaatggcgatgctggcgattgtcgcctggtcgctgtcggtcgtggatgtggcga

SEQ ID NO: 583969 - DNA, 75 bp, synthetic construct
  source 1..75: mol_type = other DNA
atgcacgcatgacgctgatgccgcctgaagcattctccattcagccatatgccttctaccagaacctggcgggat

SEQ ID NO: 583970 - DNA, 75 bp, synthetic construct
  source 1..75: mol_type = other DNA
ctgggctaagctatatcacacgctcttcaggggaagtcccctccaccagcacgcaggttgtggttggcgatacga

SEQ ID NO: 583971 - DNA, 75 bp, synthetic construct
  source 1..75: mol_type = other DNA
gtggaaatcatccttttgacgagacgctgacaaagaaaatgagaattgccaggcgggcagagtctggtggttaca

SEQ ID NO: 583972 - DNA, 75 bp, synthetic construct
  source 1..75: mol_type = other DNA
gtcgtgcatcgtcgttcaataccgagcgtgtggatcacatttatcaggacccgcactcttgcaatcctaaactcc

SEQ ID NO: 583973 - DNA, 75 bp, synthetic construct
  source 1..75: mol_type = other DNA
gtcgtgcatcgtcattcaacaccgagcgtgtggatcacatttatcaggaccctcacatcggtaactctaaattcc

SEQ ID NO: 583974 - DNA, 75 bp, synthetic construct
  source 1..75: mol_type = other DNA
actacgtaaaaatgcagtggatgatgctgcaacaggaacagccggaagatttcgttatcgcgaccggcgttcagt

SEQ ID NO: 583975 - DNA, 75 bp, synthetic construct
  source 1..75: mol_type = other DNA
tccgttttctgggcaccttcctcaccgatatgaatcatattccttccggcgtccggcattttaccgccagacagc

SEQ ID NO: 583976 - DNA, 75 bp, synthetic construct
  source 1..75: mol_type = other DNA
gttggtcgggtgattctgattatgtcctcagatgcaaaaacacatgttgatggtggaatggctgtttatgcgtga

SEQ ID NO: 583977 - DNA, 75 bp, synthetic construct
  source 1..75: mol_type = other DNA
gtcttcgtgaactggctggcctgctggggcgcgaggcagatatgtcggggagtgcagcggatattgctcaacgtg

SEQ ID NO: 583978 - DNA, 75 bp, synthetic construct
  source 1..75: mol_type = other DNA
tgcgtcagttcgtcgagatggccgcggcacagctgggcatcaagctgcgctttgaaggtaccggcgtggaagaga

SEQ ID NO: 583979 - DNA, 75 bp, synthetic construct
  source 1..75: mol_type = other DNA
cgacgagaaaatactgtctcttgaccacgatcttgttatcaacagaacagctgaaaagaaaaatacctacgatgc

SEQ ID NO: 583980 - DNA, 75 bp, synthetic construct
  source 1..75: mol_type = other DNA
acagctgaaaagaaaaatacctacgatgctcttcagcgttgcgggcttataaatatagatccacttaataaattg

SEQ ID NO: 583981 - DNA, 75 bp, synthetic construct
  source 1..75: mol_type = other DNA
cgtgaagtgcagccggatgaagtgtacaacctgggcgcgatgagccacgtggccgtctcgtttgaatccccggaa

SEQ ID NO: 583982 - DNA, 75 bp, synthetic construct
  source 1..75: mol_type = other DNA
gaagttgaaacgctgctcggcgacccgaccaaagcgcacgaaaaactgggctggaaaccggaaatcaccctcaga

SEQ ID NO: 583983 - DNA, 75 bp, synthetic construct
  source 1..75: mol_type = other DNA
cctggcagagtttctgctggaaaaaggttacgaggtgcatggtattaagcgtcgcgcatcgtcattcaacaccga

SEQ ID NO: 583984 - DNA, 75 bp, synthetic construct
  source 1..75: mol_type = other DNA
tccggctgaatatgacgttattgcctgtatgaacctgaacggtgactacatttctgacgccctggcagcgcaggt

SEQ ID NO: 583985 - DNA, 75 bp, synthetic construct
  source 1..75: mol_type = other DNA
ggttcggcaaatatttccttgtcaccagcaaatataggttgcccagcatctcctactggttggttaactacagga

SEQ ID NO: 583986 - DNA, 75 bp, synthetic construct
  source 1..75: mol_type = other DNA
tggtaaatgccccggcgggtgtccaggaaggtaaatattatccgttagtgataaaaaggaatgacagccatcggg

SEQ ID NO: 583987 - DNA, 75 bp, synthetic construct
  source 1..75: mol_type = other DNA
gcgaaaaaatctgaaacgaacgcacaagctgcaaaagaagcggcagcagaatcagcatctgtagcgtcggccaaa

SEQ ID NO: 583988 - DNA, 75 bp, synthetic construct
  source 1..75: mol_type = other DNA
aaaattgagcgggcgctcgacaagctggagcagatcgaaggtgttctctacgagattcaggtctgtggccgttat

SEQ ID NO: 583989 - DNA, 75 bp, synthetic construct
  source 1..75: mol_type = other DNA
agtggcgcagtgtcaatgagcaacggactaactgttgctggtggacttaatgtaacgagcggaaacctgaaaatc

SEQ ID NO: 583990 - DNA, 75 bp, synthetic construct
  source 1..75: mol_type = other DNA
tcgcgttcggcacatacattttgtcggcatcggtggtgccggtatgggcggtattgcagaagttctggccaatga

SEQ ID NO: 583991 - DNA, 75 bp, synthetic construct
  source 1..75: mol_type = other DNA
acaatgccaatggtgctgttaggatcggtaatggactcaatgttactggcggcatcaatggtagcttgaacggta

SEQ ID NO: 583992 - DNA, 75 bp, synthetic construct
  source 1..75: mol_type = other DNA
acggatttgttatgcctggtggctggactgacagggggcgttatgcttatggaatgttctggcaatatcaaaaca

SEQ ID NO: 583993 - DNA, 75 bp, synthetic construct
  source 1..75: mol_type = other DNA
ggcagctggcagtgcgacggcggcagcacagagcaaaagtacggcggaatccgcggcaacgcgcgccgagacagc

SEQ ID NO: 583994 - DNA, 75 bp, synthetic construct
  source 1..75: mol_type = other DNA
tgggtgaatacatccggtgatacctatgacatttatgtagaaataggtaattacgccacaggtgttaatatccag

SEQ ID NO: 583995 - DNA, 75 bp, synthetic construct
  source 1..75: mol_type = other DNA
ttacaacgacaacaacatcgggtcatggtggtgttaataatgcggaatttatttatgtgtacaatggaagtgatt

SEQ ID NO: 583996 - DNA, 75 bp, synthetic construct
  source 1..75: mol_type = other DNA
acagcaaggaaaattgctggtgtggcgtttgatggctctgccgatataactttgactgcggctaaccttaatgct

SEQ ID NO: 583997 - DNA, 75 bp, synthetic construct
  source 1..75: mol_type = other DNA
atcgccatatccggcaggcactttccagtgcgcctcgtaaccagtacaccgtcgagctgcacctgcaaatgatta

SEQ ID NO: 583998 - DNA, 75 bp, synthetic construct
  source 1..75: mol_type = other DNA
tcgctcgattgcagcgcaaagctgagcttaacccacagcgtgccgaaagtttttacggcggcggtgcggaaggtt

SEQ ID NO: 583999 - DNA, 75 bp, synthetic construct
  source 1..75: mol_type = other DNA
catagtccggaacaaattgccgcatggaaaaaaatcaccgctggcgttcatgctgaaaatggtcatatggccgta

SEQ ID NO: 584000 - DNA, 75 bp, synthetic construct
  source 1..75: mol_type = other DNA
atgcgttccgcgaaaaagtacgcgcccgtttccacggtccgattatcggcgcaggtgcatacacggtagaaaaag

SEQ ID NO: 584001 - DNA, 75 bp, synthetic construct
  source 1..75: mol_type = other DNA
gaagaagccgatgcactgtatctgattgaacaactgggtaaacgcggcattgcttatctgcatatgtcagaacca

SEQ ID NO: 584002 - DNA, 75 bp, synthetic construct
  source 1..75: mol_type = other DNA
aagtggtcgatgccgggattgaagaatggggtgccgatcgcattggcattcgcgtttcgccaatcggtactttcc

SEQ ID NO: 584003 - DNA, 75 bp, synthetic construct
  source 1..75: mol_type = other DNA
agtgccggtttgattattagtgaagccacgcaaatttctgcccaggcaaaaggatatgcaggtgcgcctggcatc

SEQ ID NO: 584004 - DNA, 75 bp, synthetic construct
  source 1..75: mol_type = other DNA
cattggtttctcggtgatgatcgaggcgctcaatcagttggctatctttaaccggcgacgttttctttccgctaa

SEQ ID NO: 584005 - DNA, 75 bp, synthetic construct
  source 1..75: mol_type = other DNA
gggctgttgatggagtatttgcagcgtattccaaaacctggcgaagaagttcaggtgggggattatttgcttaaa

SEQ ID NO: 584006 - DNA, 75 bp, synthetic construct
  source 1..75: mol_type = other DNA
ggcgtggataaatacgaactcggcactgcttatggtcacatcgcgcttagcgtagataacgccgctgaagcgtgc

SEQ ID NO: 584007 - DNA, 75 bp, synthetic construct
  source 1..75: mol_type = other DNA
gcggcgtaaagccgccgctatactaaaacaacattttgaatctgttagccattttgaggataaaaagatgcgtct

SEQ ID NO: 584008 - DNA, 75 bp, synthetic construct
  source 1..75: mol_type = other DNA
atgtcccaagaattatctttaacctttaccgaaaacatatattattcaactaaagaacctgtaagcatcaaagat

SEQ ID NO: 584009 - DNA, 75 bp, synthetic construct
  source 1..75: mol_type = other DNA
tgatcccgactatttataccgccctggatattgtatcccgtgagcaggtaggttttatccctgcggtagcaaaaa

SEQ ID NO: 584010 - DNA, 75 bp, synthetic construct
  source 1..75: mol_type = other DNA
tatgactccccgcaattttttgcttttgcaaaaggagctggtgtttttggtgaggctggaccggaagctattatg

SEQ ID NO: 584011 - DNA, 75 bp, synthetic construct
  source 1..75: mol_type = other DNA
gtctgcaacttgaacgtgactatgcagataaatcccgtggaatgtcaaatcatgtttttcaggagaaaatgcagg

SEQ ID NO: 584012 - DNA, 75 bp, synthetic construct
  source 1..75: mol_type = other DNA
acagaccggcgtgaaactggtggtcggcaaaggcggaatggggccgctgaccgaagaaggttgccagaaattcaa

SEQ ID NO: 584013 - DNA, 75 bp, synthetic construct
  source 1..75: mol_type = other DNA
atgttcggtgggattggcccggcgatcaaaggtgtaggttcttatgtgctgggattaattaatccttttaccctg

SEQ ID NO: 584014 - DNA, 75 bp, synthetic construct
  source 1..75: mol_type = other DNA
aaaagctattcttattatggatgatcctgtaacaagttttgatgaggaaagaatatcttgtattttgcagaagtt

SEQ ID NO: 584015 - DNA, 75 bp, synthetic construct
  source 1..75: mol_type = other DNA
gatgaggatttccaggatatcacggatccgctgatgacggaggctgagcgtcatgatgaaacctgtctgttatat

SEQ ID NO: 584016 - DNA, 75 bp, synthetic construct
  source 1..75: mol_type = other DNA
gtgtagaagattatcagcagattggtccgcagggacactttacgctgctacgtcaggacaaagagccaatgcgcg

SEQ ID NO: 584017 - DNA, 75 bp, synthetic construct
  source 1..75: mol_type = other DNA
agggaaagtgactaaggcaacagaagatgagaagaacgcgctcgcaaaattaaaagcagctattgatccagttgg

SEQ ID NO: 584018 - DNA, 75 bp, synthetic construct
  source 1..75: mol_type = other DNA
gttcgccttgcgggcgtagtttatgccttgattggtcacggtgagaaagcgttaccggcctggtttgcttcactg

SEQ ID NO: 584019 - DNA, 75 bp, synthetic construct
  source 1..75: mol_type = other DNA
tgaatggtgaaggtataggtgattatgcgccatttaagaatggtacaaaacgtgaaattttggataggtttttta

SEQ ID NO: 584020 - DNA, 75 bp, synthetic construct
  source 1..75: mol_type = other DNA
ggcaaaggcggaatggggccgctgaccgaagaaggctgccagaaattcaaggcgctacatgtgattttcccggca

SEQ ID NO: 584021 - DNA, 75 bp, synthetic construct
  source 1..75: mol_type = other DNA
atgccccgcaagaacttcaccagctggcggagcgggaatactctctggtggtgctttgtggcgcggaatttccct

SEQ ID NO: 584022 - DNA, 75 bp, synthetic construct
  source 1..75: mol_type = other DNA
agaagaagaagaagcgaacaggcctgatcctaactggtttgcacatttaccgcctgaaaaaatcaatgcgtatat

SEQ ID NO: 584023 - DNA, 75 bp, synthetic construct
  source 1..75: mol_type = other DNA
gcgacacccagaataccaactccgattcctatacccgctcgaaatatggcgatgaaaccaaccgtctgtatcgcc

SEQ ID NO: 584024 - DNA, 75 bp, synthetic construct
  source 1..75: mol_type = other DNA
atgaaacatatctttaatgctgtagcaatcgctctgtccctgacctctgctgtcgcaatggcctcagcaacttca

SEQ ID NO: 584025 - DNA, 75 bp, synthetic construct
  source 1..75: mol_type = other DNA
taatgagcgaagggaaatactacgaagccaatcttgcactgaaaggtgcagaagatggtgtgattacggatactg

SEQ ID NO: 584026 - DNA, 75 bp, synthetic construct
  source 1..75: mol_type = other DNA
tgaatgatactctcgcaagacagaaagatatctctttagctaaagaaatatcatacatatctcaaacaaaaggca

SEQ ID NO: 584027 - DNA, 75 bp, synthetic construct
  source 1..75: mol_type = other DNA
ttgttgctggacgacgagaagtggtgccagcttgcgcaattttgtgatttctcgatctttatcaaagctcccgca

SEQ ID NO: 584028 - DNA, 75 bp, synthetic construct
  source 1..75: mol_type = other DNA
ccggctaagttacaggaaaatcgcccaatgtctgccagcaccctaatttctattgcagaacaggtagaagatgtt

SEQ ID NO: 584029 - DNA, 75 bp, synthetic construct
  source 1..75: mol_type = other DNA
cgctggctcttcattatggggatattatattgacgattcaaataattttggtgatttgcgtaactggaatataag

SEQ ID NO: 584030 - DNA, 75 bp, synthetic construct
  source 1..75: mol_type = other DNA
ccattaaggccagctctagccactattgttaagccagaaatacgcccatttccaccactaccaatagaaccagat

SEQ ID NO: 584031 - DNA, 75 bp, synthetic construct
  source 1..75: mol_type = other DNA
atggatgacgaatacgtaaacaagtttattgttatgtttcttagtgaacactggcgcatgtttgagcattattgt

SEQ ID NO: 584032 - DNA, 75 bp, synthetic construct
  source 1..75: mol_type = other DNA
aaggtgctggtatagtcatcactaatcttatgaagtactggtggagtgttattattctcgatccaaaaagggagt

SEQ ID NO: 584033 - DNA, 75 bp, synthetic construct
  source 1..75: mol_type = other DNA
atctggagatcgcaacggagaaagaaaccttgttgctggaagcctggaaaaagtatcgggtgttgctgaaccgtg

SEQ ID NO: 584034 - DNA, 75 bp, synthetic construct
  source 1..75: mol_type = other DNA
tgggggcgacgcattgcctggaaaacccggggataattccgctcgatttaattgaagtgcgctccggctcttatc

SEQ ID NO: 584035 - DNA, 75 bp, synthetic construct
  source 1..75: mol_type = other DNA
cattgccggttacggcgtggcgcttgatctgacattgcgtgatgttcagggaaaaatgaagaaagctgggcagcc

SEQ ID NO: 584036 - DNA, 75 bp, synthetic construct
  source 1..75: mol_type = other DNA
aactcttgtccgctttccgggtttattcccgcggcggaatttaccggcgatccacaaaatacaacgctgggcctg

SEQ ID NO: 584037 - DNA, 75 bp, synthetic construct
  source 1..75: mol_type = other DNA
tcagctttttgagcgtgcagaacccgaacatcttctttcattcatgaatgatattcgttcagaattaagggggaa

SEQ ID NO: 584038 - DNA, 75 bp, synthetic construct
  source 1..75: mol_type = other DNA
cgccaaaagcgaccgccagcacggagcctgcacaaacggcatctccggcgcaaaccacggcaacaccagccgctg

SEQ ID NO: 584039 - DNA, 75 bp, synthetic construct
  source 1..75: mol_type = other DNA
agcatactgaaccggctgcgccagtggtgagcaccagggcacctgctgcgacttctacgccagtagcaacgcctg

SEQ ID NO: 584040 - DNA, 75 bp, synthetic construct
  source 1..75: mol_type = other DNA
ggcgaaaacgcaaactgctgaacgtccgaccaccacgcgtccggcacgtcagcagacggtgattgaaccgaagaa

SEQ ID NO: 584041 - DNA, 75 bp, synthetic construct
  source 1..75: mol_type = other DNA
gaacaggtgcatctgcaggcgctgccaggtacggacttcgataccagctacttcgatatccgtcatgtctcctgg

SEQ ID NO: 584042 - DNA, 75 bp, synthetic construct
  source 1..75: mol_type = other DNA
aaagcggtatctacattgccagcagatgttcaggccaaaaacccgtgggcgaaaccgctgcgtcaggtacaggcc

SEQ ID NO: 584043 - DNA, 75 bp, synthetic construct
  source 1..75: mol_type = other DNA
ctgaacaatgcgctgacccagccacaaaatcagcaacagttgaacaatgtggcggtcaattctacattgccgacc

SEQ ID NO: 584044 - DNA, 75 bp, synthetic construct
  source 1..75: mol_type = other DNA
atacgggaggcggaagaaacaaaaaacagcctcatgcaggtagccagtgagcatatttcgccacttcaagatgcc

SEQ ID NO: 584045 - DNA, 75 bp, synthetic construct
  source 1..75: mol_type = other DNA
aatggatagccgatgtggctgacaaacgggaacttcgccagttcaaagaaacaccggaacagcgcttcgcgctgg

SEQ ID NO: 584046 - DNA, 75 bp, synthetic construct
  source 1..75: mol_type = other DNA
ctgtagattacatcaagagtaaatctggtctcattgctggttacaagctgaaattgttgattgtttaccaggtcg

SEQ ID NO: 584047 - DNA, 75 bp, synthetic construct
  source 1..75: mol_type = other DNA
tgatattgaacttgatgacactgacgatcgccgtccgactcgtgcgcaaaaagagcgcaatgaggaaccggaaat

SEQ ID NO: 584048 - DNA, 75 bp, synthetic construct
  source 1..75: mol_type = other DNA
tgcagccgttaccggatacggactttgataccagttacttcgacatccgccatgtgtcctgggacagctatatcg

SEQ ID NO: 584049 - DNA, 75 bp, synthetic construct
  source 1..75: mol_type = other DNA
atgatttacgtctctcgccgattactcatcacctgtttgctgctggtttccgcctgtgtggttgcaggtatctgg

SEQ ID NO: 584050 - DNA, 75 bp, synthetic construct
  source 1..75: mol_type = other DNA
gactatttcgcaaatattaccctgaatacgctcgaccccaaccatattgacgtgttcttcccggagttcgcccac

SEQ ID NO: 584051 - DNA, 75 bp, synthetic construct
  source 1..75: mol_type = other DNA
taagctcaaaggatttaaagaagcttatgtcgagggtcagtctgggtgcacgggacatgttgataaaacgcacct

SEQ ID NO: 584052 - DNA, 75 bp, synthetic construct
  source 1..75: mol_type = other DNA
ggccgacggccctatccgttggagaccatgctgcgtattcactgcatgcagcattggtacaacctgagcgacggt

SEQ ID NO: 584053 - DNA, 75 bp, synthetic construct
  source 1..75: mol_type = other DNA
attgattttgagataagcggtatctctgatgcgagtagcacgacaactgctgctatagctgacgctattgacagt

SEQ ID NO: 584054 - DNA, 75 bp, synthetic construct
  source 1..75: mol_type = other DNA
gtgagctccgtgacgagaaccgccagttcatgcaggcagagctggagaacgttggcgcgctgctacgattcggta

SEQ ID NO: 584055 - DNA, 75 bp, synthetic construct
  source 1..75: mol_type = other DNA
aaagcaactttttgctgattgctgccgtatatgacactaccgacaaagcgaccagttccgatattgctgactggc

SEQ ID NO: 584056 - DNA, 75 bp, synthetic construct
  source 1..75: mol_type = other DNA
cgatagcaaccggcgcaggggcgaacagccgcatcgccattggtacgggcattattggcggtacgctgaccgcta

SEQ ID NO: 584057 - DNA, 75 bp, synthetic construct
  source 1..75: mol_type = other DNA
ctggttcctgattaacgagaaagcaaataccgatgtcatttttaccgttgatggtttcagttttagcggcagcgg

SEQ ID NO: 584058 - DNA, 75 bp, synthetic construct
  source 1..75: mol_type = other DNA
taagctcaaaggatttaaagaagcttatgtcatgaatcaagtacctgggtgcgaaggatatgttgcaaaaacgca

SEQ ID NO: 584059 - DNA, 75 bp, synthetic construct
  source 1..75: mol_type = other DNA
ttacgctgtgatgtgtgttcccactccgctgacgctggtggtcgacaaatttaacgtgacggcaaaacaggcggg

SEQ ID NO: 584060 - DNA, 75 bp, synthetic construct
  source 1..75: mol_type = other DNA
gtaaattacaatactacctgggcaaactataagtgtgatttcccggagaatcaacagagctgcacatctaatggc

SEQ ID NO: 584061 - DNA, 75 bp, synthetic construct
  source 1..75: mol_type = other DNA
tggatgccaccattaaagcggcgcgtgctggctggccggataaaaacctggtaatgctgtttcagccgcaccgtt

SEQ ID NO: 584062 - DNA, 75 bp, synthetic construct
  source 1..75: mol_type = other DNA
cttctgccgtacctattcctatatcgcccaactgattgattttggcgacccggagttggagaattttgccgcttt

SEQ ID NO: 584063 - DNA, 75 bp, synthetic construct
  source 1..75: mol_type = other DNA
tttgaccgctatatcgagcagcacagcgagtacggctttattcattcactggtggccttctccggcaagatgacc

SEQ ID NO: 584064 - DNA, 75 bp, synthetic construct
  source 1..75: mol_type = other DNA
gaacggctatgtgccctacaaaacggccttcaacctttccaagcagcttgaagacagcaagcgggtaagcggcaa

SEQ ID NO: 584065 - DNA, 75 bp, synthetic construct
  source 1..75: mol_type = other DNA
gttcgacagcttcactcatgtcaatcaacaactggagcaatggatagccgatgtggctgacaaacgggagcttcg

SEQ ID NO: 584066 - DNA, 75 bp, synthetic construct
  source 1..75: mol_type = other DNA
ctgttgctggccgaccactataacttcctgccacaggcatgccgtccacgcagggccagaacaaaaggtaaggtt

SEQ ID NO: 584067 - DNA, 75 bp, synthetic construct
  source 1..75: mol_type = other DNA
atgtctaatcagtttggtgatacacgtatcgatgacgacctgacgttgctgagtgaaacacttgacgaggtacta

SEQ ID NO: 584068 - DNA, 75 bp, synthetic construct
  source 1..75: mol_type = other DNA
taccaaggagcgccacagcgcgaggagctggccgaggtggagcacccgtttcgcatcatcaagcggcagttcggc

SEQ ID NO: 584069 - DNA, 75 bp, synthetic construct
  source 1..75: mol_type = other DNA
gccacctgctcgagcagcatcaactggcccgtcaattgttcaagaccatcatcgctggctggccgaagctaggcg

SEQ ID NO: 584070 - DNA, 75 bp, synthetic construct
  source 1..75: mol_type = other DNA
tgcctatctgactgccgctgcacgtaacgatagccatgcccgttccacgatggctggcgagttaaccatgattca

SEQ ID NO: 584071 - DNA, 75 bp, synthetic construct
  source 1..75: mol_type = other DNA
cgggtaaagtgcgtctccactatcatgcatatctggcagctgcttcacgtaacgatagccatgcccgttccacaa

SEQ ID NO: 584072 - DNA, 75 bp, synthetic construct
  source 1..75: mol_type = other DNA
gaagaaatgaagaaactgccgattggcggtttatgggaagggaaagttaaactccattttagctacccggcaaca

SEQ ID NO: 584073 - DNA, 75 bp, synthetic construct
  source 1..75: mol_type = other DNA
aatggcagtgaacagcagcaaaaacaggctgaaatggcgctgaatcagttgattaaccgttatcagatggaacac

SEQ ID NO: 584074 - DNA, 75 bp, synthetic construct
  source 1..75: mol_type = other DNA
ccctgacggaactgttgaaccgctactggtttctgagacatggagatgcaggtaagaagacgataaataataaac

SEQ ID NO: 584075 - DNA, 75 bp, synthetic construct
  source 1..75: mol_type = other DNA
ccggtggtgaccccaggtcattaccggattatgctgccctgcgtgatgaaatcagcaaactgacccacccggcac

SEQ ID NO: 584076 - DNA, 75 bp, synthetic construct
  source 1..75: mol_type = other DNA
gaatttatcagccagagtgctaccgttaaactcatcatagagaaaactggtatttctcgtgcaacgtatttcaga

SEQ ID NO: 584077 - DNA, 75 bp, synthetic construct
  source 1..75: mol_type = other DNA
gggagcgagtggtaaacccggatggcacattcgttaatctggatagcgccgggaccaactctctcggtagttccg

SEQ ID NO: 584078 - DNA, 75 bp, synthetic construct
  source 1..75: mol_type = other DNA
tgggtaaaattcgcgccccggctaaagctgaagctgataaagacggtggtaaagcgcaacaggccaatacactgc

SEQ ID NO: 584079 - DNA, 75 bp, synthetic construct
  source 1..75: mol_type = other DNA
ctgcactggcatttgatgctgaagagcgggtggaacggcagaaaggcaataatgagaacatcgcaacatatgatg

SEQ ID NO: 584080 - DNA, 75 bp, synthetic construct
  source 1..75: mol_type = other DNA
gtcgtgtgggggttccggcgtcatgtcgtccggtcattgcggtgcacggtggttatgtttcatacagttctccac

SEQ ID NO: 584081 - DNA, 75 bp, synthetic construct
  source 1..75: mol_type = other DNA
tttatccgaaacgatggctcaaacacatatttcatgttgaccgattcgggtaacagcctgggaacctataatagg

SEQ ID NO: 584082 - DNA, 75 bp, synthetic construct
  source 1..75: mol_type = other DNA
gtggccattccgggatggcagtctctgacacagccatcaccggcggagcagcaactcagggcgttgctgacacca

SEQ ID NO: 584083 - DNA, 75 bp, synthetic construct
  source 1..75: mol_type = other DNA
caactgatggtacttttccccgataatccccgggtacaggaaatggtggataactggcagaagagcgtaaggagt

SEQ ID NO: 584084 - DNA, 75 bp, synthetic construct
  source 1..75: mol_type = other DNA
gctggcggtcagtgtggtcattcctggatggcagtttctgacacagccacccccagcggagcagcaactcagggc

SEQ ID NO: 584085 - DNA, 75 bp, synthetic construct
  source 1..75: mol_type = other DNA
tcaccaaaaatgtaagcgtaaactgaccgccgtatgtagccatcagacgagaattggtaacttagacgcccatct

SEQ ID NO: 584086 - DNA, 75 bp, synthetic construct
  source 1..75: mol_type = other DNA
gaaaccgtgctcaatttgccggatatccccggcggtaaaaaactcatttataacggcgtcaccatgccgctcacc

SEQ ID NO: 584087 - DNA, 75 bp, synthetic construct
  source 1..75: mol_type = other DNA
cagtggcgtttgatttttcgctggcgagacggccacgcatacgagatttacctcgatccacataagtaccgttaa

SEQ ID NO: 584088 - DNA, 75 bp, synthetic construct
  source 1..75: mol_type = other DNA
tataccggttcattgggtgaagttatgcaggagtccattcaggcggcgttaactgtggttcgcgcgcgtgcagaa

SEQ ID NO: 584089 - DNA, 75 bp, synthetic construct
  source 1..75: mol_type = other DNA
tgaacttctttgccgggccaacggataaaaacttcaaagtgccgtttaacttttacaacgtgcattacaacagca

SEQ ID NO: 584090 - DNA, 75 bp, synthetic construct
  source 1..75: mol_type = other DNA
gcatcgcatgggcgtgaaacctggtggcaatattgcgctgctggcgtgtgcgggcccgatggggataggcgctat

SEQ ID NO: 584091 - DNA, 75 bp, synthetic construct
  source 1..75: mol_type = other DNA
ggcaatattgcgctgctggcgtgtgctggcccgatgggaattggcgctatcgattacgccattaacggcggcata

SEQ ID NO: 584092 - DNA, 75 bp, synthetic construct
  source 1..75: mol_type = other DNA
tgcaggagtctattcaggcggcgttaacggtggttcgtgcgcgtgcggaaaaactggggatcaaccctgattttt

SEQ ID NO: 584093 - DNA, 75 bp, synthetic construct
  source 1..75: mol_type = other DNA
gacaaaatgtcttctgacatgcgaggcgatccggcctctgcactgcttgaagtgctggatccagagcagaacgta

SEQ ID NO: 584094 - DNA, 75 bp, synthetic construct
  source 1..75: mol_type = other DNA
cagatcctgataatcaaggatgggttcttggttgggctgtagtacgttacaagccatggcatcttgttggtgttt

SEQ ID NO: 584095 - DNA, 75 bp, synthetic construct
  source 1..75: mol_type = other DNA
aatggacgacgcgccggacgaaaacgaagccctgaagcgcaaaatcgacgcggcgaagatgccgaaagaggcaaa

SEQ ID NO: 584096 - DNA, 75 bp, synthetic construct
  source 1..75: mol_type = other DNA
tgaggggttacagcgcgcgcgtatttctgcgctctctgacaatggcgaacacttttctgcgaaggcggagtatct

SEQ ID NO: 584097 - DNA, 75 bp, synthetic construct
  source 1..75: mol_type = other DNA
tcttttcactgtcgggaccgtggcctctatattgcagatgctgaaactgcctgatggcaccgtcaaagtgctggt

SEQ ID NO: 584098 - DNA, 75 bp, synthetic construct
  source 1..75: mol_type = other DNA
ccgccacggatgtcggcgcattaccaataaccggaggaaatctcaacggcggtttaacggctactggtgagatca

SEQ ID NO: 584099 - DNA, 75 bp, synthetic construct
  source 1..75: mol_type = other DNA
cagaagtttatacctcgaaaaatcttccacaagaaagctacccggtcggcgcaccaatcccgtggccatcagata

SEQ ID NO: 584100 - DNA, 75 bp, synthetic construct
  source 1..75: mol_type = other DNA
gggcttatgcaaataataaggtcattacagatacaggttgcggaaatatttgtcttgcaggtgctgtggtggaag

SEQ ID NO: 584101 - DNA, 75 bp, synthetic construct
  source 1..75: mol_type = other DNA
tggtgaaggcgagttgctcattggctggagtggcacaaatggcgctcatgcaccagctttcattcgatccaaaag

SEQ ID NO: 584102 - DNA, 75 bp, synthetic construct
  source 1..75: mol_type = other DNA
atgcggggagttgccctgctgtacagttccgcgtgaattacaggaacggcggtattttttatcgttcagcgcgtg

SEQ ID NO: 584103 - DNA, 75 bp, synthetic construct
  source 1..75: mol_type = other DNA
gtcaggttatgtcgttacgggttcagttaacggaaaccgtgatgaattaattgatacaactcaggcaaggccaat

SEQ ID NO: 584104 - DNA, 75 bp, synthetic construct
  source 1..75: mol_type = other DNA
cacacggacacaccgtcactgttaacgctactggtaacgcagaaaacaccgtcaaaaacatcgcatttaactata

SEQ ID NO: 584105 - DNA, 75 bp, synthetic construct
  source 1..75: mol_type = other DNA
acagaagggctgcaaagcggcaagcagttgccgctcggtccggcgttattaggtcgcgttctggacggcagcggt

SEQ ID NO: 584106 - DNA, 75 bp, synthetic construct
  source 1..75: mol_type = other DNA
ggaaggcgcaatcaatgcgaagaccgtaacctatgacttcgaacgtctgatggaaggcgctaaactgctgaaatg

SEQ ID NO: 584107 - DNA, 75 bp, synthetic construct
  source 1..75: mol_type = other DNA
cggtatcgccccaggcgcaaacatcggtgacgaatgcgccctgtttgaagccacccacggtactgcgccgaaata

SEQ ID NO: 584108 - DNA, 75 bp, synthetic construct
  source 1..75: mol_type = other DNA
attatgcgcgagtgcgcacattcaaacagttgttgtcgagttttcagcgtaatcgcgatctggtcagtgtcggcg

SEQ ID NO: 584109 - DNA, 75 bp, synthetic construct
  source 1..75: mol_type = other DNA
ggggatgatggcacgttacacccgcgccgatgtcattgtcgttggtttaattggtgaacgcggacgcgaagtaaa

SEQ ID NO: 584110 - DNA, 75 bp, synthetic construct
  source 1..75: mol_type = other DNA
ccgatacgactgaaaccggtgcgctgattaccccgccatttaacccattgcaacgtacaccgattgaacatgtgc

SEQ ID NO: 584111 - DNA, 75 bp, synthetic construct
  source 1..75: mol_type = other DNA
aatgcggagtttgtctatgtgtttaacgggacgagctattcaccaggatggcgcagagcgtataacactaaaaac

SEQ ID NO: 584112 - DNA, 75 bp, synthetic construct
  source 1..75: mol_type = other DNA
gtctgacaggaacgccaacagcgccgacggcagcgcaaggtacaaacagcacgcagatcgcaaatacagcctttg

SEQ ID NO: 584113 - DNA, 75 bp, synthetic construct
  source 1..75: mol_type = other DNA
ctatcaggttaatacagcgtcacatattcatgcggctgaatttgttaccagaacctataccgattcatatcagtt

SEQ ID NO: 584114 - DNA, 75 bp, synthetic construct
  source 1..75: mol_type = other DNA
acgctgaaagaaatagcggctgcgatcaataacgacccgaattacagcacaactatcaacaatgctctggccctt

SEQ ID NO: 584115 - DNA, 75 bp, synthetic construct
  source 1..75: mol_type = other DNA
tgccgcgatgaatgtgcgtattgccagcagaacgcatatcagtattcagaactgggcaccatccggtgagggtac

SEQ ID NO: 584116 - DNA, 75 bp, synthetic construct
  source 1..75: mol_type = other DNA
gatggctcaggcgatatcaacattaatacattggtatctcgtggccgagttacggcgttaagcggctctactcaa

SEQ ID NO: 584117 - DNA, 75 bp, synthetic construct
  source 1..75: mol_type = other DNA
ataccgttccgtctggttatgccctaatgcaggggcagacttttgacaaatctgcttacccgaaacttgcagccg

SEQ ID NO: 584118 - DNA, 75 bp, synthetic construct
  source 1..75: mol_type = other DNA
attcggcttttacatgattaacaactcaagaacagcaaatggtacagatggccaagcatttcttgatagcagtgg

SEQ ID NO: 584119 - DNA, 75 bp, synthetic construct
  source 1..75: mol_type = other DNA
tgtttaataacggcagtagctcaaacaattatacgattcgtataacaacggcaacaacgacaagcgtttctggcg

SEQ ID NO: 584120 - DNA, 75 bp, synthetic construct
  source 1..75: mol_type = other DNA
atcatcacctgaagctcttgataccctgaatgagcttgcagcagcactgggcaatgacccgaactttgcgacaac

SEQ ID NO: 584121 - DNA, 75 bp, synthetic construct
  source 1..75: mol_type = other DNA
ggaactattcatcttgcaggttgcgttattgaggttatgggtaataaaggtgccatgaccatccgtgtaacaaca

SEQ ID NO: 584122 - DNA, 75 bp, synthetic construct
  source 1..75: mol_type = other DNA
tactggatgtgcaaaggctcatgggcttatgcaaataataaggtcattacagatacaggttgcggaaatatttgt

SEQ ID NO: 584123 - DNA, 75 bp, synthetic construct
  source 1..75: mol_type = other DNA
catttttatagtcagagaaatactgataacagtataacatttgctgtaaatggtcaggtgtccccctctaattat

SEQ ID NO: 584124 - DNA, 75 bp, synthetic construct
  source 1..75: mol_type = other DNA
ggggtaatagtccgtctgttcgtcttccttctgcgattgtgaaagccgcttcgttaaacgttgatgatgtagtgg

SEQ ID NO: 584125 - DNA, 75 bp, synthetic construct
  source 1..75: mol_type = other DNA
tgctgatggcaaaccataaaaccagaaacgggctgcatcagttttactatcgggtaaaaaggattcgccggacta

SEQ ID NO: 584126 - DNA, 75 bp, synthetic construct
  source 1..75: mol_type = other DNA
aaatgggcagcatcagttttactatcgggtaaaaaggatccgccggactcaacatgctgattgggatcctgctaa

SEQ ID NO: 584127 - DNA, 75 bp, synthetic construct
  source 1..75: mol_type = other DNA
aacacaaatttgaccgtaagaaagcgctggcttatgagcgcgaagtgctgggcaaatttgataaaactgcggatc

SEQ ID NO: 584128 - DNA, 75 bp, synthetic construct
  source 1..75: mol_type = other DNA
caagtgggaacacaaatttgaccgcaaaaaggcgctggcttatgagcgtgaagtgctgggtaaatttgataaaac

SEQ ID NO: 584129 - DNA, 75 bp, synthetic construct
  source 1..75: mol_type = other DNA
tcctgattcgtattctgaaagatgagctgattctggcgtactccactgccagctctgaaagcgtgctgccgcgaa

SEQ ID NO: 584130 - DNA, 75 bp, synthetic construct
  source 1..75: mol_type = other DNA
aacctatgacttcgaacgtctgatggaaggcgctaagctgctgaaatgttcagagtttggtgatgcgatcatcga

SEQ ID NO: 584131 - DNA, 75 bp, synthetic construct
  source 1..75: mol_type = other DNA
cttcgaacgtctgatggaaggcgctaagctgctgaaatgtagcgagtttggcgacgcgattatcgcgaacatgta

SEQ ID NO: 584132 - DNA, 75 bp, synthetic construct
  source 1..75: mol_type = other DNA
ccgctgagatgatgctgcgccagatgggttggacggaagcggctgaccttattgttaaaggtatggaaggcgcaa

SEQ ID NO: 584133 - DNA, 75 bp, synthetic construct
  source 1..75: mol_type = other DNA
aacctatgacttcgaacgtctgatggagggcgctaaactgctgaaatgttcagagtttggtgatgcgatcatcga

SEQ ID NO: 584134 - DNA, 75 bp, synthetic construct
  source 1..75: mol_type = other DNA
aacctatgacttcgaacgtctgatggatggcgctaagctgctgaaatgttcagagtttggtgaagcgatcatcga

SEQ ID NO: 584135 - DNA, 75 bp, synthetic construct
  source 1..75: mol_type = other DNA
aacctatgacttcgaacgtctgatggatggcgctaaactgctgaaatgttcagagtttggtgaggcgatcatcga

SEQ ID NO: 584136 - DNA, 75 bp, synthetic construct
  source 1..75: mol_type = other DNA
cagtacaaacccaatgttccgctgttgaatccatcttcttccatgacacagcacagcgagctgaaagtcacgttc

SEQ ID NO: 584137 - DNA, 75 bp, synthetic construct
  source 1..75: mol_type = other DNA
aaggttacagggcacggattcagacattcaatgtctactattttgcatgagcaaggatttgaatcgagttggata

SEQ ID NO: 584138 - DNA, 75 bp, synthetic construct
  source 1..75: mol_type = other DNA
atgcctttaaacgatatgcagattcgccgcgctaagcctgaagctaaagcctatacacttggagatgggcaaggg

SEQ ID NO: 584139 - DNA, 75 bp, synthetic construct
  source 1..75: mol_type = other DNA
tgctcatgattacaggtgttagaaccatcgaattacgtgcggcattatggtcagaatttgatttagataacgcta

SEQ ID NO: 584140 - DNA, 75 bp, synthetic construct
  source 1..75: mol_type = other DNA
atctcgcttggtgtttacccaacgatcacccttgccgatgctcgttcccgtcgtgatgaagctcgaaaacttgtg

SEQ ID NO: 584141 - DNA, 75 bp, synthetic construct
  source 1..75: mol_type = other DNA
catcgaattacgtgcggccttatggtcagaatttgatctagataacgctatttgggaaattcccgctgaaaggat

SEQ ID NO: 584142 - DNA, 75 bp, synthetic construct
  source 1..75: mol_type = other DNA
tcatgctatttaccttccggaaaggcagaaaatgatgcaatggtactgcgattatcttagcgagatagaggaagt

SEQ ID NO: 584143 - DNA, 75 bp, synthetic construct
  source 1..75: mol_type = other DNA
attccgcgacaaaatcgcagaaacaggcattacgttttctgcggatcaatccgaagaaattagctgctgatatgc

SEQ ID NO: 584144 - DNA, 75 bp, synthetic construct
  source 1..75: mol_type = other DNA
tgcgcgttatcgatttgccgaaaacaggcgatccctttatgaaaatcacccatgacgttgggtattcacctttca

SEQ ID NO: 584145 - DNA, 75 bp, synthetic construct
  source 1..75: mol_type = other DNA
taattgatgtaccgggcaaagccgatcccctgatgaaaatcacgcacgatgtggggtattctccattcaggcgat

SEQ ID NO: 584146 - DNA, 75 bp, synthetic construct
  source 1..75: mol_type = other DNA
aaaacatgtttacgatggttctgcggaccaattaaaattgctttgtgcggcagatttgattataagtgatttttc

SEQ ID NO: 584147 - DNA, 75 bp, synthetic construct
  source 1..75: mol_type = other DNA
ggctttatcagattgtggcccgtctgattgccgtactgaacggcttcagaacagaaaacacctcaccgctttact

SEQ ID NO: 584148 - DNA, 75 bp, synthetic construct
  source 1..75: mol_type = other DNA
tcggcagaaacgggattgatggggaaaggccgcggctttatcgggaaggccggggtatatggttttctgggaacc

SEQ ID NO: 584149 - DNA, 75 bp, synthetic construct
  source 1..75: mol_type = other DNA
ccgctgagatgatgctgcgccacatgggttggacggaagcggctgacttaattgttaaaggtatggaaggcgcaa

SEQ ID NO: 584150 - DNA, 75 bp, synthetic construct
  source 1..75: mol_type = other DNA
tgatatatctattacccttgcagattatatctggcatggggaagctaaaaaacattcttcatatttatatctttt

SEQ ID NO: 584151 - DNA, 75 bp, synthetic construct
  source 1..75: mol_type = other DNA
tcaacgaggtcattgtgatataacaataaagttgaatagatttacttggcatggcgaggccaaaaaacacactgg

SEQ ID NO: 584152 - DNA, 75 bp, synthetic construct
  source 1..75: mol_type = other DNA
gtacaggcaattgaggaaaattcaaataaattgaattttgatttaacagaagatcagcttactttaattttactg

SEQ ID NO: 584153 - DNA, 75 bp, synthetic construct
  source 1..75: mol_type = other DNA
ctttctgctgtcccgccgacgtccatcttccccgctcgatatgctgaaaaatgcacttgctcacggagagttcag

SEQ ID NO: 584154 - DNA, 75 bp, synthetic construct
  source 1..75: mol_type = other DNA
agccttaattctgttgcacattttttaccggatcaatttcatattgggatcaatatttcaccagcgcattttctg

SEQ ID NO: 584155 - DNA, 75 bp, synthetic construct
  source 1..75: mol_type = other DNA
tcttccctgaacgatatgctgaaaaatgcgcttacttacggagagttcagaccttattttcaacccgtcatttcc

SEQ ID NO: 584156 - DNA, 75 bp, synthetic construct
  source 1..75: mol_type = other DNA
cgtcgcttcgatttcctcggtgaattcccgctggagccggtcaacggtaaaagtggtacagcaatgctggtcgat

SEQ ID NO: 584157 - DNA, 75 bp, synthetic construct
  source 1..75: mol_type = other DNA
ggacgacagcggcatacaaaaagaaagtcattcaaaaaaatatccgttctccctgatttataccatcccggtgaa

SEQ ID NO: 584158 - DNA, 75 bp, synthetic construct
  source 1..75: mol_type = other DNA
tactgctgaagcgtcctcaacttcgtgcactgagccttgcaagacaagatgctgtattttgcagcactcatccgg

SEQ ID NO: 584159 - DNA, 75 bp, synthetic construct
  source 1..75: mol_type = other DNA
cctgcagtcgtttcctgtcgattacatcaaactcgataaagggtttgtacaaatggttggcgtggatgaaatttc

SEQ ID NO: 584160 - DNA, 75 bp, synthetic construct
  source 1..75: mol_type = other DNA
atgttttctagattatttgtaaaaaaaaagacttcagctatggtgttcggtagcctgatatttctattcattatt

SEQ ID NO: 584161 - DNA, 75 bp, synthetic construct
  source 1..75: mol_type = other DNA
cgaaaccagctatccgtcacagcagaatcaaaagcgttatttgcgaaattacatcaacagggagtattgtttgca

SEQ ID NO: 584162 - DNA, 75 bp, synthetic construct
  source 1..75: mol_type = other DNA
ggatatatttcactagaacaagcggtagtgggcgcaatatcaggctatctctgcttatggtgtctttactgggct

SEQ ID NO: 584163 - DNA, 75 bp, synthetic construct
  source 1..75: mol_type = other DNA
ctggctgggccggaggtgttcgtacttatgatttgtatgcgtctggaactgttggggctggaaccgggaaaacag

SEQ ID NO: 584164 - DNA, 75 bp, synthetic construct
  source 1..75: mol_type = other DNA
gttggtgtaggaacaggtaaaacagttaaagcttatatgaacaatgcgggtaatatttacgcgtcaggtaatctt

SEQ ID NO: 584165 - DNA, 75 bp, synthetic construct
  source 1..75: mol_type = other DNA
tactggaagtcagtattgtgttaggtattggaacgcttatcgcttttatgaagtttcaggatatgagaaacaatc

SEQ ID NO: 584166 - DNA, 75 bp, synthetic construct
  source 1..75: mol_type = other DNA
ccgctgagatgatgctgcgccatatgggttggacggaagcggctgacgtcattgttaaaggtatggaaggcgcaa

SEQ ID NO: 584167 - DNA, 75 bp, synthetic construct
  source 1..75: mol_type = other DNA
ccgctgagatgatgctgcgccaaatgggttggacggaagcggctgacttcattgttaaaggtatggaaggcgcaa

SEQ ID NO: 584168 - DNA, 75 bp, synthetic construct
  source 1..75: mol_type = other DNA
gtggaacctctacccttaatggtcctgtaaatatcaacaacaacctgaaggtaaaatccgatacttatctgaata

SEQ ID NO: 584169 - DNA, 75 bp, synthetic construct
  source 1..75: mol_type = other DNA
ggtaatggaactccaatgtattgtgttaacgggtattggtctaatattgtatcaagtaaaacagataatggaggt

SEQ ID NO: 584170 - DNA, 75 bp, synthetic construct
  source 1..75: mol_type = other DNA
gtggttgctcacctaatggtttacaagggagagatgctgaaggttcggcattaagttgtgttaatgggttatggg

SEQ ID NO: 584171 - DNA, 75 bp, synthetic construct
  source 1..75: mol_type = other DNA
ttaccagacacttattaatgaaggattattgccagtatcatataccggggtaaatgcccaaaaatcatcttataa

SEQ ID NO: 584172 - DNA, 75 bp, synthetic construct
  source 1..75: mol_type = other DNA
gcgccgtgaagccgaaggagatgtggaaataaccgcgcttccgaaaaatagcaacaaaaccagagggaaaaaata

SEQ ID NO: 584173 - DNA, 75 bp, synthetic construct
  source 1..75: mol_type = other DNA
ctaatggtgataacagttggtatgcaggatgtgatacaactaaaaatattacagctactataactgtttatgcta

SEQ ID NO: 584174 - DNA, 75 bp, synthetic construct
  source 1..75: mol_type = other DNA
ggtttgcagggtgcatggaaagaaacatcaacagtttacagtaatatcaccagtgcaggtcttatggcctatcgt

SEQ ID NO: 584175 - DNA, 75 bp, synthetic construct
  source 1..75: mol_type = other DNA
agctgaaagcaactaaaacaaacgttgctttctcagactttacgccgattgaatacagtactaaaggaaagccaa

SEQ ID NO: 584176 - DNA, 75 bp, synthetic construct
  source 1..75: mol_type = other DNA
ttcaacccggtaattatgacaagctgatttccgcaatggatttctacccgacagcggctttgttgaataaatcag

SEQ ID NO: 584177 - DNA, 75 bp, synthetic construct
  source 1..75: mol_type = other DNA
tacctccgataatggtgcggttatcgatggtcctctgccgctgaacggggcgcaaaaaggcggtgatgctgccaa

SEQ ID NO: 584178 - DNA, 75 bp, synthetic construct
  source 1..75: mol_type = other DNA
tttttcgaatttaaaaacactgtcgatatgatggggagcgaagatttttgtcagttcctgcgggatgatgaagag

SEQ ID NO: 584179 - DNA, 75 bp, synthetic construct
  source 1..75: mol_type = other DNA
ctggcggtatacgccgaacgccgccaggaccgcaaagggccttatacctgcctgatgagtattaccctgaactga

SEQ ID NO: 584180 - DNA, 75 bp, synthetic construct
  source 1..75: mol_type = other DNA
gatattccagtggtgatgttgaccgccagaggggaagaagaagatcgcgtgcgcggccttgaaaccggtgcggat

SEQ ID NO: 584181 - DNA, 75 bp, synthetic construct
  source 1..75: mol_type = other DNA
ctcgcggtatacgccgaacgccgccaggaccgcaatgggccctatacctgcctgatgagcatcaccctgaactga

SEQ ID NO: 584182 - DNA, 75 bp, synthetic construct
  source 1..75: mol_type = other DNA
caatgaccctgtaccggcaacatcctggctcccgactgtttcgcttctgtaccggcaaatataaatggtccggca

SEQ ID NO: 584183 - DNA, 75 bp, synthetic construct
  source 1..75: mol_type = other DNA
ccatggctctgcaccgacagcatcctggctcccgcttgttttgcttctgtaccggcaaatataaatggtcaggca

SEQ ID NO: 584184 - DNA, 75 bp, synthetic construct
  source 1..75: mol_type = other DNA
gccggtaccggaagataaacaaacgcgtgactatcatgacaacttcaccacattttctgcggaagaatggcaacc

SEQ ID NO: 584185 - DNA, 75 bp, synthetic construct
  source 1..75: mol_type = other DNA
agtaccggatatcagaggtgtgctggccgtcttttctgaacgcagcaagaacggtaacagcccctatgtcctcct

SEQ ID NO: 584186 - DNA, 75 bp, synthetic construct
  source 1..75: mol_type = other DNA
agttcctgacattcccggcgtgctggcggtatacgccgaacgtcgccaggaccgcaacggaccgtatgcctgcct

SEQ ID NO: 584187 - DNA, 75 bp, synthetic construct
  source 1..75: mol_type = other DNA
tttttcgaatttaaaaacactgtcgatatgatggagaatgaaaatttctgtcagtatttgcgtgatgatgaagag

SEQ ID NO: 584188 - DNA, 75 bp, synthetic construct
  source 1..75: mol_type = other DNA
ttttcctgctcaacacgccgtacagcgcagatgaagtgtggtcgcgcttgccgcaggaagttcaggccgtgctaa

SEQ ID NO: 584189 - DNA, 75 bp, synthetic construct
  source 1..75: mol_type = other DNA
tactacaagcactaccggagtccgtacgcagcgtagcggtgttggatcgcaccaaagagccgggtgcccaggcag

SEQ ID NO: 584190 - DNA, 75 bp, synthetic construct
  source 1..75: mol_type = other DNA
ctggaaagaggaactctgtacccaatgtaaccactgcgtcgccgcttgcccacactcagctattcgcgcaaaagt

SEQ ID NO: 584191 - DNA, 75 bp, synthetic construct
  source 1..75: mol_type = other DNA
tgttcctctttgaaaactacacccgcaccgcgcaggtgctggccgacacgatggctgaggcgcacatgtgggcgg

SEQ ID NO: 584192 - DNA, 75 bp, synthetic construct
  source 1..75: mol_type = other DNA
agcgattcaggaagcggaagcgtatccggggccatcgctgatcattgcttatagcccgtgtgaagagcatggtta

SEQ ID NO: 584193 - DNA, 75 bp, synthetic construct
  source 1..75: mol_type = other DNA
accaatgtgcaaagcgccattgcgaaagccggtaaaaaaggcactctggccgcgtccctgcaggccatcgccgac

SEQ ID NO: 584194 - DNA, 75 bp, synthetic construct
  source 1..75: mol_type = other DNA
atctgctcagacacagctcggcgttaaaccgcgcattctcggcgtgccaggtcacgataacaaagccgttgcgac

SEQ ID NO: 584195 - DNA, 75 bp, synthetic construct
  source 1..75: mol_type = other DNA
agcgatgaacaacgcaagcatacccgtttagcagcagagttagccgggctaaatgcagtgcgcctgattaatgag

SEQ ID NO: 584196 - DNA, 75 bp, synthetic construct
  source 1..75: mol_type = other DNA
gcaaagcaaggtcaggattttgtgtttgatcactacagttgggatggcgtaactcaaagattcgaagaggttatt

SEQ ID NO: 584197 - DNA, 75 bp, synthetic construct
  source 1..75: mol_type = other DNA
gtggtacgcacagggctattttgtttacgactccaaaaggcgggcggcctgacggtttctcaccttcgagtgagc

SEQ ID NO: 584198 - DNA, 75 bp, synthetic construct
  source 1..75: mol_type = other DNA
gtgtggatctctcttccgagcatgaacgctacctggcagaagagcactttaaagcaccggtagtggtgaaaaact

SEQ ID NO: 584199 - DNA, 75 bp, synthetic construct
  source 1..75: mol_type = other DNA
ttgacagcgaagtcaccgtgcgcggatggtacgtaccgccgagattcaaaagctggcatctccttcctcgccgtt

SEQ ID NO: 584200 - DNA, 75 bp, synthetic construct
  source 1..75: mol_type = other DNA
gaatttactcgtgagcaggccactcaggaagtgttaatggctgccgctgtgggcaagcttaatcgcgtgaatcag

SEQ ID NO: 584201 - DNA, 75 bp, synthetic construct
  source 1..75: mol_type = other DNA
atctatgttactgattttgaaaatttcatcgttcgagtttcagaaaatgggtattatcgttcaaaaggtgaaata

SEQ ID NO: 584202 - DNA, 75 bp, synthetic construct
  source 1..75: mol_type = other DNA
acctaaaaacactgatccgaaagactctgttattgttatccacaatagcatgaagctgtataaacagattcgtag

SEQ ID NO: 584203 - DNA, 75 bp, synthetic construct
  source 1..75: mol_type = other DNA
gatgcagctgccgaacagccagaatcgctcgcagaggacccggaaaccctcagtatcagctgtgaggtaacgttc

SEQ ID NO: 584204 - DNA, 75 bp, synthetic construct
  source 1..75: mol_type = other DNA
actaaagaacgcgttgaagcaccacctacaacaacgtctatgcgggaagatttacgtgatatctggcaaaacgac

SEQ ID NO: 584205 - DNA, 75 bp, synthetic construct
  source 1..75: mol_type = other DNA
aacagacatgaaacttaattcttatctttaccagcgggcagtgcacccagcggctgaccgtcaaaacgtttcatg

SEQ ID NO: 584206 - DNA, 75 bp, synthetic construct
  source 1..75: mol_type = other DNA
aacgatctggtaaattagcaaagattcttgctcgccaagaagaaggcgacctcattgatgctttgacattttcta

SEQ ID NO: 584207 - DNA, 75 bp, synthetic construct
  source 1..75: mol_type = other DNA
caaaaatggtgtcaacaggcctgacagaaacaataacccattaaatcttaaagctactggaaacagaagaagaga

SEQ ID NO: 584208 - DNA, 75 bp, synthetic construct
  source 1..75: mol_type = other DNA
cattggcattcatcgtgcatttgaaagtacttcggagtcaattgtaagagccagtaatatggggagaatgcttgg

SEQ ID NO: 584209 - DNA, 75 bp, synthetic construct
  source 1..75: mol_type = other DNA
atgagcaacgatatcgcaatcacatcacagcctggcgctaccgtagggaccgctgcggcaatcttcagtcctgag

SEQ ID NO: 584210 - DNA, 75 bp, synthetic construct
  source 1..75: mol_type = other DNA
ctccgtcacgggatgctccgtctcaacggcactgtcagcgaaaagctcctgaccctgctgatacaggaactgaag

SEQ ID NO: 584211 - DNA, 75 bp, synthetic construct
  source 1..75: mol_type = other DNA
ggcgaaaaggctgccctaattatcctcccgaatttaaacagctgcttgttgctgcctcctgtgaacccgggatat

SEQ ID NO: 584212 - DNA, 75 bp, synthetic construct
  source 1..75: mol_type = other DNA
agccagcacataggagaggtaaaggtaattgccaaaacggatcaatcctcaaaactaaccgaaggatttaaggag

SEQ ID NO: 584213 - DNA, 75 bp, synthetic construct
  source 1..75: mol_type = other DNA
cgctactactcactcacgacgcacaatctgaaaaccgttatggaacagctggctcagggtaaacgccgttgccag

SEQ ID NO: 584214 - DNA, 75 bp, synthetic construct
  source 1..75: mol_type = other DNA
cggcgttgtctatatttcccaccgtatgaaagaaatcttcgagatttgtgatgacgttacggtttttcgtgacgg

SEQ ID NO: 584215 - DNA, 75 bp, synthetic construct
  source 1..75: mol_type = other DNA
gtagatgtcggcgcgaaaaaagagatctatcaactgattaaccagttcaaagccgatggcttgagcatcattctg

SEQ ID NO: 584216 - DNA, 75 bp, synthetic construct
  source 1..75: mol_type = other DNA
cgaactgatgaaagtgctctacggcgcactgccgcgcacaagcggttacgtcaccctggatgggcatgaagtcgt

SEQ ID NO: 584217 - DNA, 75 bp, synthetic construct
  source 1..75: mol_type = other DNA
tacccgttcgccgcaggatggcctggcaaacggcattgtgtatatctccgaagaccgtaaacgtgacggtttagt

SEQ ID NO: 584218 - DNA, 75 bp, synthetic construct
  source 1..75: mol_type = other DNA
tcccaggaagccgggattgggattatccatcaggaactgaacctgatcccgcagttaaccattgccgaaaacatt

SEQ ID NO: 584219 - DNA, 75 bp, synthetic construct
  source 1..75: mol_type = other DNA
atccacacctggacaaagcgccgggagatatccgcctgaaagtcgataatctctgcggacctggcgttaacgatg

SEQ ID NO: 584220 - DNA, 75 bp, synthetic construct
  source 1..75: mol_type = other DNA
ctgggcgcagaggcagaaaacatcaatctcttcgaccgtatgcaactggaacacgttatcgctatctgccgctag

SEQ ID NO: 584221 - DNA, 75 bp, synthetic construct
  source 1..75: mol_type = other DNA
atgaaaatcatcagtaagagccaggcgatgcatatttatcgtcagcatcccgaatccaggctatctgccttctgt

SEQ ID NO: 584222 - DNA, 75 bp, synthetic construct
  source 1..75: mol_type = other DNA
gtattgatatttactgagaggtcagatcaactttccagggcaacagatcgcgtacccggtttgccggccaatcct

SEQ ID NO: 584223 - DNA, 75 bp, synthetic construct
  source 1..75: mol_type = other DNA
taggcatgagcgatcgcattatcgtcatgcatgaagggcatctcagcggggaatttactcgtgagcaggccaccc

SEQ ID NO: 584224 - DNA, 75 bp, synthetic construct
  source 1..75: mol_type = other DNA
cgcaaaggcgaaattcttggcgtctctggtttgatgggcgcaggtcgtaccgaactgatgaaagtgctctacggc

SEQ ID NO: 584225 - DNA, 75 bp, synthetic construct
  source 1..75: mol_type = other DNA
tacccgttcaccgcaggatggcctggcaagcggcattgtgtatatctccgaagaccgtaaacgtgacggtttagt

SEQ ID NO: 584226 - DNA, 75 bp, synthetic construct
  source 1..75: mol_type = other DNA
ctggtctgacagcaggaacatacggaagtgtgaccgcctttgttgccacggctgcagtactggaagcggcaaagg

SEQ ID NO: 584227 - DNA, 75 bp, synthetic construct
  source 1..75: mol_type = other DNA
gcaacattcagcccgtctggacaagcagcaacgccagattaatgagaatcataaagagatgaaacgtgccgcagc

SEQ ID NO: 584228 - DNA, 75 bp, synthetic construct
  source 1..75: mol_type = other DNA
gaacacggaaaagcattatggtctggtctgacagcaggaaagtacggagatgtgaccgcctttgctgccacggaa

SEQ ID NO: 584229 - DNA, 75 bp, synthetic construct
  source 1..75: mol_type = other DNA
aggcaggcgtcacaacgctggttcgccgcgacggtttccgtttctggggtaaccgtacctgctccgatgacccac

SEQ ID NO: 584230 - DNA, 75 bp, synthetic construct
  source 1..75: mol_type = other DNA
tcagcgcatggggttgtaaaaccatttccgaggcgatggcctatcgcgagaatttcagccagcgcgagctgatgg

SEQ ID NO: 584231 - DNA, 75 bp, synthetic construct
  source 1..75: mol_type = other DNA
atgcgacagagcaggcgatgtttgcgaagggagtggagattaatacacgccagttgcagatgaaagccgaggttg

SEQ ID NO: 584232 - DNA, 75 bp, synthetic construct
  source 1..75: mol_type = other DNA
agccagcgcgaaggaatgctgatttggcctgactttactggctgggacacagtgctgaatgccgacgcaacggca

SEQ ID NO: 584233 - DNA, 75 bp, synthetic construct
  source 1..75: mol_type = other DNA
gacggacacaatggcagaagcgcacatgtgggcagtggacaagccgctgaacccgtcactggcgcgcgacattat

SEQ ID NO: 584234 - DNA, 75 bp, synthetic construct
  source 1..75: mol_type = other DNA
actacacccgcacggcgcaggtgctgacggacacaatggcagaagcgcacatgtgggcagtggacaagccgctga

SEQ ID NO: 584235 - DNA, 75 bp, synthetic construct
  source 1..75: mol_type = other DNA
cagttgcagatgaaagcagaggttgaggcgctgacagagctgaaggcgatccgcagttacgttgttggatggcct

SEQ ID NO: 584236 - DNA, 75 bp, synthetic construct
  source 1..75: mol_type = other DNA
ttgcagatgaaagcagaggttgaggcgctgacagagctgaagtccatcagaagttatgttgttggctggcctgcc

SEQ ID NO: 584237 - DNA, 75 bp, synthetic construct
  source 1..75: mol_type = other DNA
gatgacccgctctttgccttcgaaaactacacccgcacggcgcaggtgctgatggacacgatggcagaagcacac

SEQ ID NO: 584238 - DNA, 75 bp, synthetic construct
  source 1..75: mol_type = other DNA
ggcgttaaaccgcgcatcctcggcgttccggggctcgactcccttgaagttgcaactgctctcgcgccgatttgc

SEQ ID NO: 584239 - DNA, 75 bp, synthetic construct
  source 1..75: mol_type = other DNA
gtgccggtgctggcggcgcggtttgacatcaccgaagaagggctgcgttatttacgccagtgggtcaacgaatcc

SEQ ID NO: 584240 - DNA, 75 bp, synthetic construct
  source 1..75: mol_type = other DNA
accttgtctactgtgccagtggtggtaacggtgaaagccgcctttttctacgcaaagacggcgagtggcgtttcc

SEQ ID NO: 584241 - DNA, 75 bp, synthetic construct
  source 1..75: mol_type = other DNA
ggcgattatcgccgaaggtttaggtgcgcagtatggcgacgcggtgccgctgtcactgttacgtgatgaactggc

SEQ ID NO: 584242 - DNA, 75 bp, synthetic construct
  source 1..75: mol_type = other DNA
tgtgatgaaagcgaggcaagggtaaaagcgcatcttacttgcctccatacccggatgccgtttgatccgcaaaac

SEQ ID NO: 584243 - DNA, 75 bp, synthetic construct
  source 1..75: mol_type = other DNA
aaggtgatgatatctggtatcaacggctctggcggcaattaacaccagagacaatggaggccatcgttgaacagt

SEQ ID NO: 584244 - DNA, 75 bp, synthetic construct
  source 1..75: mol_type = other DNA
caacttgccgacagagtcattgcctgtcgccagccagggcagagcatggaaatcgatctcgcctgcaacggtgtg

SEQ ID NO: 584245 - DNA, 75 bp, synthetic construct
  source 1..75: mol_type = other DNA
tattatcaatcattaaaccttgattctttcgaactttttagtggtgaaagtttgaacgagaaaaggatgatcagc

SEQ ID NO: 584246 - DNA, 75 bp, synthetic construct
  source 1..75: mol_type = other DNA
atgaatgatttagaaaaaaccaagtttctttttgagcagacctgttcagtcattggcggagcacttactgaacaa

SEQ ID NO: 584247 - DNA, 75 bp, synthetic construct
  source 1..75: mol_type = other DNA
ggatcgcgaatcggtgctgtttggcgattctactttggcgcttcgtcaatggatgcgcgaaaaaggcattcagtt

SEQ ID NO: 584248 - DNA, 75 bp, synthetic construct
  source 1..75: mol_type = other DNA
gggctaacaatcatccagatcccagagcaactggatattggtatgagctttattacgacggagcattcctagaca

SEQ ID NO: 584249 - DNA, 75 bp, synthetic construct
  source 1..75: mol_type = other DNA
tactcaattatcatgttgcgaaaatacatgatacctttggcacgttagatgagtatattaaacgatctggtttga

SEQ ID NO: 584250 - DNA, 75 bp, synthetic construct
  source 1..75: mol_type = other DNA
tataaataacaaatcaagttgcattccgaaagatgtaaagtgtttttttgagatttattacagtgtattgtttga

SEQ ID NO: 584251 - DNA, 75 bp, synthetic construct
  source 1..75: mol_type = other DNA
cacccgatccattaccacggtgagcaccgccatcgtgggtatggtctgcacgggcgatgatgccgatacaaaaat

SEQ ID NO: 584252 - DNA, 75 bp, synthetic construct
  source 1..75: mol_type = other DNA
gcaggacccggcaactgatgcgggactacttaaccagaacgatgttaccacacttatccgcaaagacggctttcg

SEQ ID NO: 584253 - DNA, 75 bp, synthetic construct
  source 1..75: mol_type = other DNA
aattgaccaggagcagggctggcataaaacgctgtccaatgtcggggtgaacggtgttaccggcatcagcacctc

SEQ ID NO: 584254 - DNA, 75 bp, synthetic construct
  source 1..75: mol_type = other DNA
actgtttccaatatcatcggcaccaccgacgaaaacggtcagtacaccggactgaaagccctgctggcggcggag

SEQ ID NO: 584255 - DNA, 75 bp, synthetic construct
  source 1..75: mol_type = other DNA
cactcctgacccggaatcgcctgtgcgaagtccggctgaaggacggatacagggaggttacggcaagtttggctt

SEQ ID NO: 584256 - DNA, 75 bp, synthetic construct
  source 1..75: mol_type = other DNA
cgtagcaaactggaacgtattgatattcgtacatcgcagctgattacaccgctgtttgaatattcaggtgcttgc

SEQ ID NO: 584257 - DNA, 75 bp, synthetic construct
  source 1..75: mol_type = other DNA
cggtagcttcggtggcatttcgcaccagtgaagttatcgccatctaccctattaccccaagttccacgatggcgg

SEQ ID NO: 584258 - DNA, 75 bp, synthetic construct
  source 1..75: mol_type = other DNA
tgcgcgttgttgaagtcaacgaaggcccccgatccattaccacggtgagcaccgccatcgtgggtatggtctgca

SEQ ID NO: 584259 - DNA, 75 bp, synthetic construct
  source 1..75: mol_type = other DNA
ccacgtcgagccgatgaaggcaaactgccgctggcactggattcacgcccgccgtcagaagcactggaagaaacg

SEQ ID NO: 584260 - DNA, 75 bp, synthetic construct
  source 1..75: mol_type = other DNA
gcgtcaaaagccacgccgcttggcgcggtgactaagtttggcgagcacggcaaacgtaaagcgcgtaaagatctt

SEQ ID NO: 584261 - DNA, 75 bp, synthetic construct
  source 1..75: mol_type = other DNA
ggcgatcacttaccgtgaaaacttcaaccagcgcgaaggaatgctgatctggcccgattttactggctgggacac

SEQ ID NO: 584262 - DNA, 75 bp, synthetic construct
  source 1..75: mol_type = other DNA
cattaacgcagcgaaaatcgcgcgtgaatgtggactggcggctcgtattaacaccgtaatgcagatggcgttttt

SEQ ID NO: 584263 - DNA, 75 bp, synthetic construct
  source 1..75: mol_type = other DNA
gcggctaaaccgaaagcgcgctttacggttggtatttacgatgatgtgaccaatctgtcactgccgttgccggaa

SEQ ID NO: 584264 - DNA, 75 bp, synthetic construct
  source 1..75: mol_type = other DNA
ccgacgaggaatacaacgttgctcatattaatgctatttcaaatggcgttaatagtgtaaatgcttttgcaaaga

SEQ ID NO: 584265 - DNA, 75 bp, synthetic construct
  source 1..75: mol_type = other DNA
accaacccacaaagcgccatcgcaaaagccggtactaaaggtaccctggcaaaatccctacagctcatcgctaac

SEQ ID NO: 584266 - DNA, 75 bp, synthetic construct
  source 1..75: mol_type = other DNA
catggacacaatggcagaagcacatatgtgggcggtggacaaaccgctgaacccgtcgctggcccgcgacattat

SEQ ID NO: 584267 - DNA, 75 bp, synthetic construct
  source 1..75: mol_type = other DNA
tcccctcaacgagccggtactgattaccaatgtgcaaagcgccattgcgaaagccggtaaaaaaggcacgctggc

SEQ ID NO: 584268 - DNA, 75 bp, synthetic construct
  source 1..75: mol_type = other DNA
gatatccctgcaggccatcgctgaccagtgcaaaccggtcattgtggccgtgcgcgtggccgaaggcgcagaaga

SEQ ID NO: 584269 - DNA, 75 bp, synthetic construct
  source 1..75: mol_type = other DNA
aggccggtaaacagggcacgctgtcggcgtccctgcaggctatcgctgaccagtgcaagccggtcatcgtggccg

SEQ ID NO: 584270 - DNA, 75 bp, synthetic construct
  source 1..75: mol_type = other DNA
actcaccatcgactatgactacacgccagtgccgccacttgaaaatctgatgctgcgccagcgcatcaccgatca

SEQ ID NO: 584271 - DNA, 75 bp, synthetic construct
  source 1..75: mol_type = other DNA
aaatctacgaagagccgaaaaacctgtttgttgccgggttcattggcgaaatcaatatgtttaacgccactgtca

SEQ ID NO: 584272 - DNA, 75 bp, synthetic construct
  source 1..75: mol_type = other DNA
tctgttgttgctggatgagtcgctctcagcgctggattacaaactgcgtaagcaaatgcagaacgagctgaaagc

SEQ ID NO: 584273 - DNA, 75 bp, synthetic construct
  source 1..75: mol_type = other DNA
aactgtatatcgactacgactatacaccggtgcctcctcttgaaaacctgaccctgcgccagcgtattaccgata

SEQ ID NO: 584274 - DNA, 75 bp, synthetic construct
  source 1..75: mol_type = other DNA
gtgaactcgacacggcgttcgttctgccggggatttattccggcgataaccggtgttaaaccgcgtattctcggc

SEQ ID NO: 584275 - DNA, 75 bp, synthetic construct
  source 1..75: mol_type = other DNA
acggtgttaccggcatcagtgcatccgtcttctgggatttgcagaagccaggcactgatgctgacctgctgaacg

SEQ ID NO: 584276 - DNA, 75 bp, synthetic construct
  source 1..75: mol_type = other DNA
cgcgtccctgcaggccatcgccgaccagtcaaaacctgtcacagttgtcgtgcgtgttgccgaaggtaccggaga

SEQ ID NO: 584277 - DNA, 75 bp, synthetic construct
  source 1..75: mol_type = other DNA
cggcaacaccatttgcggatgtacagtcggacaccggcggcatgaacgtgactgagatggtaccggataccgaag

SEQ ID NO: 584278 - DNA, 75 bp, synthetic construct
  source 1..75: mol_type = other DNA
gttacacggtgtggagccggatgaagtgaatgtgaccatggatttacgtgaacgggtcggtcatatgctggtact

SEQ ID NO: 584279 - DNA, 75 bp, synthetic construct
  source 1..75: mol_type = other DNA
tattgaggcccggctggggaatgccgccaaatcggcgcaggtcaccggtaactttaacaccctggtgatgttacg

SEQ ID NO: 584280 - DNA, 75 bp, synthetic construct
  source 1..75: mol_type = other DNA
ggcgacatagtgattgtttttgatcccaagggtgacgccgacctgctgcggcgtgtctgggcggaggcgcaccgc

SEQ ID NO: 584281 - DNA, 75 bp, synthetic construct
  source 1..75: mol_type = other DNA
ctgttatcgccggattacaccaatatgcaggatccccgtccgatttttgactggcagcaggtgatccggaaaaaa

SEQ ID NO: 584282 - DNA, 75 bp, synthetic construct
  source 1..75: mol_type = other DNA
aaatctatgatccgattctggacgggttgcgcagtgcgatccgttatgaccggacctattttgataaaatagtgg

SEQ ID NO: 584283 - DNA, 75 bp, synthetic construct
  source 1..75: mol_type = other DNA
ctgaccacacaactgccccaggtggagatttacacgaagacgctggtctccggtcatcaggatacggcagatgtg

SEQ ID NO: 584284 - DNA, 75 bp, synthetic construct
  source 1..75: mol_type = other DNA
cgtacacccagacgtcatcggatattgaagcgcgtattggtaatgcggccaaaacggcgcaggttcaggggaact

SEQ ID NO: 584285 - DNA, 75 bp, synthetic construct
  source 1..75: mol_type = other DNA
gcattatctgctgcccggaggactttaccgggctgcgcgctggcttgaaatgaaaacggaacaccggctgcccgg

SEQ ID NO: 584286 - DNA, 75 bp, synthetic construct
  source 1..75: mol_type = other DNA
cagaagcacaccgggccggcaggggcgatgagctttatatctttcatctgggctggccggaaatctctgcccgct

SEQ ID NO: 584287 - DNA, 75 bp, synthetic construct
  source 1..75: mol_type = other DNA
ggtggcggaggcgatgcgacagaattatcactccggtgaaggatggtggaatgctccacctttagtacaggcgat

SEQ ID NO: 584288 - DNA, 75 bp, synthetic construct
  source 1..75: mol_type = other DNA
gatattgtcacgctgcccaagggacaggcatttgccctgctggaaggtggacagttatggaagatccggatgccg

SEQ ID NO: 584289 - DNA, 75 bp, synthetic construct
  source 1..75: mol_type = other DNA
cgaactgatgggtgatgaatttattccgcttattaacaaaggcggtggcgcgggcgtgcaggtcacggcttacac

SEQ ID NO: 584290 - DNA, 75 bp, synthetic construct
  source 1..75: mol_type = other DNA
cagtgccaacaaggttaacctgaaatttgaagaagccaaaccggttcttgaagatcagttagcaaaatctattgc

SEQ ID NO: 584291 - DNA, 75 bp, synthetic construct
  source 1..75: mol_type = other DNA
ctgacaatgtggctgcgctgaagcagggaacgtcgggttataaagtgcagaccagcagtgaaacaggtaaccagc

SEQ ID NO: 584292 - DNA, 75 bp, synthetic construct
  source 1..75: mol_type = other DNA
aagacggtttatctgcaaatcaaaaatacctccgataaggatatgagtggcctgcaggcaaaaattgccagcgct

SEQ ID NO: 584293 - DNA, 75 bp, synthetic construct
  source 1..75: mol_type = other DNA
cactggggttgtattttaattacctggtgcatggtatgggcgtcattttgatgagcctgaatatggcctcgctgg

SEQ ID NO: 584294 - DNA, 75 bp, synthetic construct
  source 1..75: mol_type = other DNA
ttattaccgctccactcattcgtaataccgttcgcccaacaacattactgatgctgtacacctttatctcattta

SEQ ID NO: 584295 - DNA, 75 bp, synthetic construct
  source 1..75: mol_type = other DNA
gtgtgggctgaactgtggttcggttggtcctttatgattgctgcaggcattatgtttattaacgctctgttttta

SEQ ID NO: 584296 - DNA, 75 bp, synthetic construct
  source 1..75: mol_type = other DNA
acattactggattcaggcgaatatccttaaagcggataaaatggacctgcgtaccgcccaagggttcctgaacca

SEQ ID NO: 584297 - DNA, 75 bp, synthetic construct
  source 1..75: mol_type = other DNA
tttgcggcgctggctgtcacccgcacccatcaggggatgaagattattcgctaccgccggaatctccgccgcctg

SEQ ID NO: 584298 - DNA, 75 bp, synthetic construct
  source 1..75: mol_type = other DNA
tttgccgtactgtcgatgaaacgcacgcagcagggattacgggtattgcgttaccggcgcaatatccggcgtctg

SEQ ID NO: 584299 - DNA, 75 bp, synthetic construct
  source 1..75: mol_type = other DNA
caaatgcgaacaaggttaacctgaaatttgaagaggcgaagcctgttctcgaagaccagctggccaaatcaatcg

SEQ ID NO: 584300 - DNA, 75 bp, synthetic construct
  source 1..75: mol_type = other DNA
caacaaggttaacctgaaatttgaagaagcgaagcctgtactggaagaccaactggctaaatccatcgcgaacat

SEQ ID NO: 584301 - DNA, 75 bp, synthetic construct
  source 1..75: mol_type = other DNA
gtccggtctgcaggcgaaagtgacgaaggcgcttcaggataaagggtatactgtgacatccgcgccggaaagcgc

SEQ ID NO: 584302 - DNA, 75 bp, synthetic construct
  source 1..75: mol_type = other DNA
gtattgtgacgccattttcggcacaggttaatgccatcaagacgtcattgcgtaagctggagattaattgcaatg

SEQ ID NO: 584303 - DNA, 75 bp, synthetic construct
  source 1..75: mol_type = other DNA
ttcaggcagtgccttatagtcaacatgaagctgcccgctcgctgggattacccaacccggttacgctacgccagg

SEQ ID NO: 584304 - DNA, 75 bp, synthetic construct
  source 1..75: mol_type = other DNA
cactgtaacgaatctcagtaatcgcggcataacatcaggatttgcttttcttgaccgcggggccggttttggcat

SEQ ID NO: 584305 - DNA, 75 bp, synthetic construct
  source 1..75: mol_type = other DNA
tgtcgcttcgcagggcgttgtatatgcccgcaatggtagccaccagtaagactgagtggggacgggcgttccgcg

SEQ ID NO: 584306 - DNA, 75 bp, synthetic construct
  source 1..75: mol_type = other DNA
tattaagtttattactgggttttgcgctattaagtggttcctccattattgatttgtcatggttttcgttgcctg

SEQ ID NO: 584307 - DNA, 75 bp, synthetic construct
  source 1..75: mol_type = other DNA
ttccgcggtggtatggtgctgatccctgaactggctgccttaacgttggcgctttcggtctatacctctgcattt

SEQ ID NO: 584308 - DNA, 75 bp, synthetic construct
  source 1..75: mol_type = other DNA
aaggctcactctcctttgccaaccctgtggttcgcgcctggttattccaaatccttgccgttgttgccgtcgtcg

SEQ ID NO: 584309 - DNA, 75 bp, synthetic construct
  source 1..75: mol_type = other DNA
agggcgttgtatatgcccgcaatggtagccaccagtaagactgagtggggacgggcgttccgcgaccgtctggcg

SEQ ID NO: 584310 - DNA, 75 bp, synthetic construct
  source 1..75: mol_type = other DNA
cgaccgtctggcggctaatggcaagaaaggaaaggtgattctcggcgcgatgatgcgcaagctggcacaggtggc

SEQ ID NO: 584311 - DNA, 75 bp, synthetic construct
  source 1..75: mol_type = other DNA
atgcccgcaatggtagccaccagtaagactgagtggggacgggcgttccgcgaccgtctggcggctaatgggcaa

SEQ ID NO: 584312 - DNA, 75 bp, synthetic construct
  source 1..75: mol_type = other DNA
ccgcgaccgtctggcggctaatggcaagaaaggaaaggtgattctcggcgcgatgatgcgcaagctggcacaggt

SEQ ID NO: 584313 - DNA, 75 bp, synthetic construct
  source 1..75: mol_type = other DNA
ggacgggcgttccgcgaccgtctggcggctaatggcaagaaaggaaaggtgattctcggcgcgatgatgcgcaag

SEQ ID NO: 584314 - DNA, 75 bp, synthetic construct
  source 1..75: mol_type = other DNA
aagcattcccgggcgacgttttctacctccattctcgtctgctggagcgtgctgcacgtgttaacgccgaatacg

SEQ ID NO: 584315 - DNA, 75 bp, synthetic construct
  source 1..75: mol_type = other DNA
actgagatgacgtccatggagcccgttgtgacagagagcagaacgccaattccgccagttaccgatgccgaccga

SEQ ID NO: 584316 - DNA, 75 bp, synthetic construct
  source 1..75: mol_type = other DNA
taaaaaaaacatccactcaatgtgatggtaaactggactcgggaaaagtcaggataaaacaaggatgtcgtggtt

SEQ ID NO: 584317 - DNA, 75 bp, synthetic construct
  source 1..75: mol_type = other DNA
aaacaaaaaaaagatgctttggagtttcttctcaatttttatggattaaaaatacaggaggattattcgccccat

SEQ ID NO: 584318 - DNA, 75 bp, synthetic construct
  source 1..75: mol_type = other DNA
gtgatgacaatacagtctatgaacaaaaaacagtaagtcaacgtatagaatctctatttctaaataatttaggta

SEQ ID NO: 584319 - DNA, 75 bp, synthetic construct
  source 1..75: mol_type = other DNA
atttcggaaggctgcacctcacgtactcaatctaacagatgaacaactggcacaactgattctacagggtcagtt

SEQ ID NO: 584320 - DNA, 75 bp, synthetic construct
  source 1..75: mol_type = other DNA
gtcggtggcggcaaatctggcggttatcgcacaatcattttctatcgtgtcggtatgagggcatttttcgtatat

SEQ ID NO: 584321 - DNA, 75 bp, synthetic construct
  source 1..75: mol_type = other DNA
cggagcctgactccagaaaaggtctgtgattacgccatccggtgtacccacgcattagagaagctggggctgaaa

SEQ ID NO: 584322 - DNA, 75 bp, synthetic construct
  source 1..75: mol_type = other DNA
cgccgggcatcggtgaaatcatcggcggttcccagcgtgaagaacgtctggacgtactggacgagcgcatgctgg

SEQ ID NO: 584323 - DNA, 75 bp, synthetic construct
  source 1..75: mol_type = other DNA
cattcctgacccggaatcgtctgtgcgaagtccggctgaaggacggatacagggaagttacggcaacaatggctt

SEQ ID NO: 584324 - DNA, 75 bp, synthetic construct
  source 1..75: mol_type = other DNA
aggctggatacctcaaactggatcacagaatgaagacctactcagttctcacagaaaatactcttttgtttaccg

SEQ ID NO: 584325 - DNA, 75 bp, synthetic construct
  source 1..75: mol_type = other DNA
tcaataaactctccggagccgatgccggaattgtcagccagcttgcggaaaaattactgactaccagaaccaaag

SEQ ID NO: 584326 - DNA, 75 bp, synthetic construct
  source 1..75: mol_type = other DNA
gaggtggtgaaggcggataccctgcgcattgccggggcgctgtggctggcagaacagacctttacggatgaggct

SEQ ID NO: 584327 - DNA, 75 bp, synthetic construct
  source 1..75: mol_type = other DNA
gattttcagcagatgcgtgaagaggtcaataaactctccggagccgatgccggaattgtcagccagcttgcagaa

SEQ ID NO: 584328 - DNA, 75 bp, synthetic construct
  source 1..75: mol_type = other DNA
caatggtgatgaattttttgaaacacagagccgcaatgtaacagactggatgccgctaccggaaccgccgcagga

SEQ ID NO: 584329 - DNA, 75 bp, synthetic construct
  source 1..75: mol_type = other DNA
atgacccctgaacaattcagacaatggttcgccacgctgccaccgaactatcagagcgccgcacgcaccatgtac

SEQ ID NO: 584330 - DNA, 75 bp, synthetic construct
  source 1..75: mol_type = other DNA
attgggaatcaagcgacatggatcggcggcatatgcaaatgttgcttgataacggcctgatatatagaaagccgt

SEQ ID NO: 584331 - DNA, 75 bp, synthetic construct
  source 1..75: mol_type = other DNA
acgttgcatgtgcaggtgatcccgccacacgatcacgatgccttgttggatcagatccaacactacctgatggat

SEQ ID NO: 584332 - DNA, 75 bp, synthetic construct
  source 1..75: mol_type = other DNA
aaggtctggagaaaggtcgggcagaagagcgcaaaaaagcgcttgaagccacttatgcatctgtccgccgcatga

SEQ ID NO: 584333 - DNA, 75 bp, synthetic construct
  source 1..75: mol_type = other DNA
ccgggaggttctgcttttccgcgactggcagcagtggcagttctcactggaagaacgtctgcagccggatgcagc

SEQ ID NO: 584334 - DNA, 75 bp, synthetic construct
  source 1..75: mol_type = other DNA
atgaaccagcagaccacacaacaggaccagaccacacgtaaaccatcacggcgcataccgtggcagcacatgaca

SEQ ID NO: 584335 - DNA, 75 bp, synthetic construct
  source 1..75: mol_type = other DNA
ggcgtattacgtggcgcattaacttcatacatccacacgacgcgatacctgaaagccattgtcgctggcggcgca

SEQ ID NO: 584336 - DNA, 75 bp, synthetic construct
  source 1..75: mol_type = other DNA
tggaataatcagttttaatattgagcggcaatggcatttaaaagatattgcggaattgatttatacgagtgaaag

SEQ ID NO: 584337 - DNA, 75 bp, synthetic construct
  source 1..75: mol_type = other DNA
attgggaatcaagcggcatggatcgcgaacacatgcaaacattgcttgataatggcctgatatacagaaagcagt

SEQ ID NO: 584338 - DNA, 75 bp, synthetic construct
  source 1..75: mol_type = other DNA
atttgcacatgttatttaacatcgcttatctggttaagggtgacaaggtgatgattcaggatccagaaaaactat

SEQ ID NO: 584339 - DNA, 75 bp, synthetic construct
  source 1..75: mol_type = other DNA
acaagttatttgacatcgcttatctggttaaaggtgacaaggtgatgattcagaatccagaaaaaccatactggg

SEQ ID NO: 584340 - DNA, 75 bp, synthetic construct
  source 1..75: mol_type = other DNA
aaacgcagactaactacggcgttaatccggtgacgttaccggcggtaaatatttatcatcctgacagcagcattc

SEQ ID NO: 584341 - DNA, 75 bp, synthetic construct
  source 1..75: mol_type = other DNA
cgatggtggaagatattaattacaccatgataaccgatgtgcagattgctgagcgcacccgggccagggttacaa

SEQ ID NO: 584342 - DNA, 75 bp, synthetic construct
  source 1..75: mol_type = other DNA
ggtaaaggagaggccctggaaataccccacagccccgaaaaagagccagtcagttgcttaactgactggcattac

SEQ ID NO: 584343 - DNA, 75 bp, synthetic construct
  source 1..75: mol_type = other DNA
ccagtatcaggcaacggatgatatctccattggtgcaggcgcacgctatatcggcagtatgcataaaggttctga

SEQ ID NO: 584344 - DNA, 75 bp, synthetic construct
  source 1..75: mol_type = other DNA
acgcaccagtagacacagcaatcgctggaactgctgcaactattttcagcccagacggcttgaaccaactgatga

SEQ ID NO: 584345 - DNA, 75 bp, synthetic construct
  source 1..75: mol_type = other DNA
gggagtctcagggatggctgaaccgtggttatgaaggcgcagcagttggtgcagcgttaggtgccggtatcaccg

SEQ ID NO: 584346 - DNA, 75 bp, synthetic construct
  source 1..75: mol_type = other DNA
attaaggcgagttagtggttgcataagcataaaaaaatggggtcaaaatcaactcaaaaaccaatatgatgggag

SEQ ID NO: 584347 - DNA, 75 bp, synthetic construct
  source 1..75: mol_type = other DNA
gaaaaaacgcacgatgccggacgcgacaaagtcaaaaatgagcgttacggcgtcgccccttctgtcgcttttggc

SEQ ID NO: 584348 - DNA, 75 bp, synthetic construct
  source 1..75: mol_type = other DNA
aattatcatactgaatatgacagtgccaccgcctgcggcggcagcgggcgcggtgccatcacctgccctgctggc

SEQ ID NO: 584349 - DNA, 75 bp, synthetic construct
  source 1..75: mol_type = other DNA
cagtctggcagcggtaacagtgccaaccgcaccgattttaaaccgcaaaaagccaacaccagcgagattggcacc

SEQ ID NO: 584350 - DNA, 75 bp, synthetic construct
  source 1..75: mol_type = other DNA
agcaggattatctgatgacggcgattatgggaggggcgtcaaatattacccagcccaccagcaatgtggatagct

SEQ ID NO: 584351 - DNA, 75 bp, synthetic construct
  source 1..75: mol_type = other DNA
gcataacttttatggtacggactccgattacgacgattcgaccaccgataccgccactatgcgttttgaacatga

SEQ ID NO: 584352 - DNA, 75 bp, synthetic construct
  source 1..75: mol_type = other DNA
gtgggtgcgttttttgctggtgagaacggtaactccaccactggcgacgctatttatatgcgcggcgccgatacc

SEQ ID NO: 584353 - DNA, 75 bp, synthetic construct
  source 1..75: mol_type = other DNA
tccgtgcgggtgtttatccgggagaatatatgcaggcgcttgccagtaaggaagtggctgagatgacagagaagc

SEQ ID NO: 584354 - DNA, 75 bp, synthetic construct
  source 1..75: mol_type = other DNA
ctctccgtcagggaacctccggtgcaaaagtgcagaccagcacatcaaccggaaatcaacataaataccagaccc

SEQ ID NO: 584355 - DNA, 75 bp, synthetic construct
  source 1..75: mol_type = other DNA
atattaactacaccatggtcacggacattcagatttctgaaaaaacggatgccagtgtccagaccgataatgtag

SEQ ID NO: 584356 - DNA, 75 bp, synthetic construct
  source 1..75: mol_type = other DNA
tggttgtggtgcgatgagcacagcaatcaagaaacgtaatcttgaagtgaaaacccagatgagtgaaaccatctg

SEQ ID NO: 584357 - DNA, 75 bp, synthetic construct
  source 1..75: mol_type = other DNA
ctgtctggcattgttgccgggaagccgtggcgcggaagtggagatgcttagcgccgatttcctgaaaacggccca

SEQ ID NO: 584358 - DNA, 75 bp, synthetic construct
  source 1..75: mol_type = other DNA
gacagaaacgcgttttcaaaataggcagagccaccgatctggtgctcgcatttctgcctttcgaaaaagcgtttt

SEQ ID NO: 584359 - DNA, 75 bp, synthetic construct
  source 1..75: mol_type = other DNA
accgttgcggctatggatgttctggctccgggcatcggtgaaatcattggtggttctcagcgtgaagagcgtctg

SEQ ID NO: 584360 - DNA, 75 bp, synthetic construct
  source 1..75: mol_type = other DNA
ttgcactggtcagttctgcgctggctctttcaggatgtggagccatgggcacagcgatcaaaaaacgaaatctgg

SEQ ID NO: 584361 - DNA, 75 bp, synthetic construct
  source 1..75: mol_type = other DNA
atgaaaacaaaaaaattaatgatggttgcactggtcagttccactctggccctttcagggtgtggtgcgatgagc

SEQ ID NO: 584362 - DNA, 75 bp, synthetic construct
  source 1..75: mol_type = other DNA
ggttttttactggcgctgtttattggcttacgcagccacaaggaaacacaacatccatcgctaaagggaaatgtc

SEQ ID NO: 584363 - DNA, 75 bp, synthetic construct
  source 1..75: mol_type = other DNA
ggaacgtgctaactggaaaggcgctgaccggaccgacgctatatttatttctcgccgcgggagtcggctttctcg

SEQ ID NO: 584364 - DNA, 75 bp, synthetic construct
  source 1..75: mol_type = other DNA
tggcatatcggcatgggatgcgtattagtgaactgcttgatctgcattatcaggatcttgaccttaatgaaggtc

SEQ ID NO: 584365 - DNA, 75 bp, synthetic construct
  source 1..75: mol_type = other DNA
gcgaacaaggttaacctgaaatttgaagaggcgaagcctgttctcgaagagcagctggccaaatcaatcgcaaat

SEQ ID NO: 584366 - DNA, 75 bp, synthetic construct
  source 1..75: mol_type = other DNA
ctgattacgtctctctacccaatttgctggcgggcagagagttagtcaaagagttattgcaggaagagtgtgagc

SEQ ID NO: 584367 - DNA, 75 bp, synthetic construct
  source 1..75: mol_type = other DNA
tgccgggcgctggatgctgcggacggtgacggtgcgtctgcgcagcttgccgtgttgcggcaactcgtcgagcgt

SEQ ID NO: 584368 - DNA, 75 bp, synthetic construct
  source 1..75: mol_type = other DNA
cgcgagcagctgttaaaccacgtctggggaactaacgtgtatgtggaagaccgcacggtcgatgtccacattcgt

SEQ ID NO: 584369 - DNA, 75 bp, synthetic construct
  source 1..75: mol_type = other DNA
ctcctcgactggatgttacctggcggctccggtatccagttcatcaaacacctcaagcgcgagtcgatgacccgg

SEQ ID NO: 584370 - DNA, 75 bp, synthetic construct
  source 1..75: mol_type = other DNA
ataataaaaaacactggtcataatgtaacaaaaagtattcatgagaactttattaaaattgataaatttattgaa

SEQ ID NO: 584371 - DNA, 75 bp, synthetic construct
  source 1..75: mol_type = other DNA
tgttttgatggtaaagaagtcattccccagttggatctgactatcaacaatggcgagttccttacgctgcttggc

SEQ ID NO: 584372 - DNA, 75 bp, synthetic construct
  source 1..75: mol_type = other DNA
gcaccacgggcggctacggcttgttcgatgacgccgccttgcagcggctgtgctttgtgcgggccgcttttgagg

SEQ ID NO: 584373 - DNA, 75 bp, synthetic construct
  source 1..75: mol_type = other DNA
tcttgcgcctgtttctgcaaactgaataacggtggctgggacggcgcgctgattacgttcttcgccagcatgatt

SEQ ID NO: 584374 - DNA, 75 bp, synthetic construct
  source 1..75: mol_type = other DNA
ctcgacacgtaaaaatcaggatcgcggcattaatatgcatgtggttactgaagtacaacacattgtgattctggc

SEQ ID NO: 584375 - DNA, 75 bp, synthetic construct
  source 1..75: mol_type = other DNA
gcgtatcaaagcagaagtcgcaccggatctttcggttcatctgctggatgggatgggccgcgaggcgatgatcgc

SEQ ID NO: 584376 - DNA, 75 bp, synthetic construct
  source 1..75: mol_type = other DNA
agcgttctgctgctggtgccgggctttccgttgattaatgccgtcgccgatatgtttaaaggccacatcaatacc

SEQ ID NO: 584377 - DNA, 75 bp, synthetic construct
  source 1..75: mol_type = other DNA
ttcagccattacgttacccaagatggctggtagccttaatggttggcctttcttgcgcctgtttctgtaaactca

SEQ ID NO: 584378 - DNA, 75 bp, synthetic construct
  source 1..75: mol_type = other DNA
ctggcacgctgggcgattgccagcctattgacgttggctacctgcgttggcgtggtgatggcactcacgatttgg

SEQ ID NO: 584379 - DNA, 75 bp, synthetic construct
  source 1..75: mol_type = other DNA
atgacgattccacgttgcaaaaagccccgtacgaaattccttcaggcttacgaaggcaacatgatggtgcgtggc

SEQ ID NO: 584380 - DNA, 75 bp, synthetic construct
  source 1..75: mol_type = other DNA
gtattgctcgtgataagttggttgatgggatatttaaagctgttggtttacctgtgattcatcacccggttaaaa

SEQ ID NO: 584381 - DNA, 75 bp, synthetic construct
  source 1..75: mol_type = other DNA
tgcaccatctttatcatgaacccttacccgaaaacctgaagctcacgccgaaggtcgaagtggataatgttcatc

SEQ ID NO: 584382 - DNA, 75 bp, synthetic construct
  source 1..75: mol_type = other DNA
ccgcgttccacttttccggccatactggtgtcgccgatcttgacgaagcttacctgacgctgcaaccgctgttaa

SEQ ID NO: 584383 - DNA, 75 bp, synthetic construct
  source 1..75: mol_type = other DNA
atgatgaagaagtcgctgaacataccaacctcgaaacgcactttatcgattccagcggtttaatctcctgggacc

SEQ ID NO: 584384 - DNA, 75 bp, synthetic construct
  source 1..75: mol_type = other DNA
tggaacgtaccgtgaccgagctgctgcaaggtcgtggcctgaaagatctggatgtgtttactccgccaaccttcg

SEQ ID NO: 584385 - DNA, 75 bp, synthetic construct
  source 1..75: mol_type = other DNA
cgtctggtctgtacatattcgcgacaaagagtgcgcactgtgttttaccaacggtaaaggcgcaaccaaaaaagc

SEQ ID NO: 584386 - DNA, 75 bp, synthetic construct
  source 1..75: mol_type = other DNA
aaaccgctggaaaaagtgattggtgggttactgttgtttgttgccgcggcttacattgtcgagttgattttttcc

SEQ ID NO: 584387 - DNA, 75 bp, synthetic construct
  source 1..75: mol_type = other DNA
cagctactgtgggttgtcgtttgggccaacctgatggcgatgctgattcagatcctctctgccaaactggggatt

SEQ ID NO: 584388 - DNA, 75 bp, synthetic construct
  source 1..75: mol_type = other DNA
ttacattgtagagttgattttctcccagcctaacctagcgcaactgggtaaaggaatggtaatcccgagtttacc

SEQ ID NO: 584389 - DNA, 75 bp, synthetic construct
  source 1..75: mol_type = other DNA
gatcctctcggccaaactggggattgccaccggtaaaaatctggcggaacaaattcgcgatcactacccgcgtcc

SEQ ID NO: 584390 - DNA, 75 bp, synthetic construct
  source 1..75: mol_type = other DNA
cggggcagggggggatgcagggcttcattcgctttcatatcccgctgtgggtgcgtcgtacagtcaccatgctgc

SEQ ID NO: 584391 - DNA, 75 bp, synthetic construct
  source 1..75: mol_type = other DNA
cggggcaggtagtgatgcagggcttcattcgttttcatatcccgctgtgggtgcgtcgcaccgttaccatgttgc

SEQ ID NO: 584392 - DNA, 75 bp, synthetic construct
  source 1..75: mol_type = other DNA
caacctcgaaacgcactttatcgattccagcggtttaatctcctgggacctgttcaagcaggatgccgattatcc

SEQ ID NO: 584393 - DNA, 75 bp, synthetic construct
  source 1..75: mol_type = other DNA
tccgccgttgagtgaaggcttgcggatgttaccttttgaacgtccggccagtccctggcatggtaaaggcaatat

SEQ ID NO: 584394 - DNA, 75 bp, synthetic construct
  source 1..75: mol_type = other DNA
tcggtactatcgcgcgtgatatggattatgtcggggcccagagcgaaaccgatccaacggctatcatggccatca

SEQ ID NO: 584395 - DNA, 75 bp, synthetic construct
  source 1..75: mol_type = other DNA
aggaagagctgaataatgtttataaaccgcaggtagcagcaatagagcgcctgcagatagacattaaagacctga

SEQ ID NO: 584396 - DNA, 75 bp, synthetic construct
  source 1..75: mol_type = other DNA
caaagtcagacctcaagcgcgcaattcttgaagcaagttgtcgagttatcggcctgggcaaacagtcttatgttt

SEQ ID NO: 584397 - DNA, 75 bp, synthetic construct
  source 1..75: mol_type = other DNA
attaagcgcagtgccagtggccgcactggcaaccatgatttatcgccgcctcagtacccctgcttatgcacaggc

SEQ ID NO: 584398 - DNA, 75 bp, synthetic construct
  source 1..75: mol_type = other DNA
cgggcagggctgtatgagatggtgtgcaatctgccgcagggattccggacaccggtgaataactgcggagccgat

SEQ ID NO: 584399 - DNA, 75 bp, synthetic construct
  source 1..75: mol_type = other DNA
tggtagtcgccgcggtggttagcgtctggtggttaggcatggccctgcgtggttataaggtcgctgatgacagag

SEQ ID NO: 584400 - DNA, 75 bp, synthetic construct
  source 1..75: mol_type = other DNA
aaagagtgcgcactgtgttttaccaacggtaaaggcgcaaccaaaaaagcggcgctggcttctgcactcggtgaa

SEQ ID NO: 584401 - DNA, 75 bp, synthetic construct
  source 1..75: mol_type = other DNA
ctgcgcgcattttacgatccggagaatgaattgaccggcagtatgctgattgacctgcaatccggtaacgaagat

SEQ ID NO: 584402 - DNA, 75 bp, synthetic construct
  source 1..75: mol_type = other DNA
ccggttcgtgaagcctttattaaactggcggaaaacggcctgattcaaattcgtccgcagcgtggcagctacgtc

SEQ ID NO: 584403 - DNA, 75 bp, synthetic construct
  source 1..75: mol_type = other DNA
tgtggtttatgtcggcgtttatagcctgtacatgaaacgccactctgtctacggcacgttgattggttcgctctc

SEQ ID NO: 584404 - DNA, 75 bp, synthetic construct
  source 1..75: mol_type = other DNA
atgtcggcgtttatagctgtacatgaaacgtcattctgtctacggcacattgattggttcgctctccggcgctgc

SEQ ID NO: 584405 - DNA, 75 bp, synthetic construct
  source 1..75: mol_type = other DNA
atcgatggtgcgatcaaatacctcagtgctctcaccgtggatcaaatccagcaattgctcacagattaagactcg

SEQ ID NO: 584406 - DNA, 75 bp, synthetic construct
  source 1..75: mol_type = other DNA
ctttgagcaatatcagaacaaccaggcatcaggtgaatatctggtttcccgtctgcaagcagagaaagaccgcct

SEQ ID NO: 584407 - DNA, 75 bp, synthetic construct
  source 1..75: mol_type = other DNA
atgccaacagtaccaacagtcaccggtcgacaggtagaaagcagagggtttcagtctcctgggtttcaggcattc

SEQ ID NO: 584408 - DNA, 75 bp, synthetic construct
  source 1..75: mol_type = other DNA
agaatccagttcaagacgaccgctgttcgccatgaagttgggcaggtgcgtcagtacgaagcaggtatgcaggag

SEQ ID NO: 584409 - DNA, 75 bp, synthetic construct
  source 1..75: mol_type = other DNA
aatcacacgaagtaaataaaggtccatatattccaccagaaccactcgagattccaagagttgaaattgattttt

SEQ ID NO: 584410 - DNA, 75 bp, synthetic construct
  source 1..75: mol_type = other DNA
atgtctatccgtgatgaacatgaaatgattatcgaacacaaaccaagcgcacttgatatttacgaattaagtttg

SEQ ID NO: 584411 - DNA, 75 bp, synthetic construct
  source 1..75: mol_type = other DNA
ttcacgcatcggaccgtagcggcagcccgaaaccgcgccagcgggttcggcggagactggcgggtgcgccagcag

SEQ ID NO: 584412 - DNA, 75 bp, synthetic construct
  source 1..75: mol_type = other DNA
tagggctgggtaaacgtctggatcatcttccggcacagctttccggcggcgaacagcaacgagtggcgctggcac

SEQ ID NO: 584413 - DNA, 75 bp, synthetic construct
  source 1..75: mol_type = other DNA
gctgtttgccgacgaacccaccggcaaccttgaccgccagacgggcgataaaattgccgacctgctgttttccct

SEQ ID NO: 584414 - DNA, 75 bp, synthetic construct
  source 1..75: mol_type = other DNA
caaccgtgagcatggcaccacgttgattatggtgacccacgacctgcaactggcggcacgctgcgaccgctgctt

SEQ ID NO: 584415 - DNA, 75 bp, synthetic construct
  source 1..75: mol_type = other DNA
gaaatatactcccggacagtctaaggaatacagcgcagaaagtcagcgcgacaacctgattaacattttccagaa

SEQ ID NO: 584416 - DNA, 75 bp, synthetic construct
  source 1..75: mol_type = other DNA
cggatcaggtgatgcagcaggttcagaagagcgcttatcctgcgttgcaggttgtcatggctaccgagaacccgc

SEQ ID NO: 584417 - DNA, 75 bp, synthetic construct
  source 1..75: mol_type = other DNA
gagtttttcactgacgaggttcatccagaggctggattttggatccgtcaattattttcgcaagataagcgtaaa

SEQ ID NO: 584418 - DNA, 75 bp, synthetic construct
  source 1..75: mol_type = other DNA
atgcttagaaaaaaagcactaaagattactgccaaaatattaatactatatctatttttagcatctaatgttttt

SEQ ID NO: 584419 - DNA, 75 bp, synthetic construct
  source 1..75: mol_type = other DNA
atgcggcaagagattagcggtaaagaagcctctgaaattgctgccagtggctgtgttccagcaaaccagttcacc

SEQ ID NO: 584420 - DNA, 75 bp, synthetic construct
  source 1..75: mol_type = other DNA
tctcgcggaagatattgaacgcgatattccctacgatcccgaacccattggcagatacaacgtcgcgccgggaac

SEQ ID NO: 584421 - DNA, 75 bp, synthetic construct
  source 1..75: mol_type = other DNA
gactatttcaggattgtgtaccttccttgatatcaccaggcaaacatggggaaccttccggtcaatggaaggttt

SEQ ID NO: 584422 - DNA, 75 bp, synthetic construct
  source 1..75: mol_type = other DNA
ctgtgtgccagctaaccagttcacctggcacccggtatcgcgcgcggtgggtaatgttaaaaaccagggcgcagc

SEQ ID NO: 584423 - DNA, 75 bp, synthetic construct
  source 1..75: mol_type = other DNA
ccttcatctggatccggttttctggggatatgctcccggatggtgggataaaccgccgctgattaacgcccgcgt

SEQ ID NO: 584424 - DNA, 75 bp, synthetic construct
  source 1..75: mol_type = other DNA
ttcatgaccgccgcccgctggttctgtcgccagaagctgcacgggaatggatgcggcaagaggttggcggtaaag

SEQ ID NO: 584425 - DNA, 75 bp, synthetic construct
  source 1..75: mol_type = other DNA
tttatctggcctgcggtacgtgacggcaaggtatccattacccattcgcaactggtaatgctccttgaaccgccc

SEQ ID NO: 584426 - DNA, 75 bp, synthetic construct
  source 1..75: mol_type = other DNA
tgaaagtttccatcgagtcagctctgactgacttgggtgcgaatttcacacttctgtatgacaaagacggtcgtc

SEQ ID NO: 584427 - DNA, 75 bp, synthetic construct
  source 1..75: mol_type = other DNA
tggctctggctgtagcagctctatctggctgtgcatccaccagcagttacgaacccacagcgtacaaaaccaatc

SEQ ID NO: 584428 - DNA, 75 bp, synthetic construct
  source 1..75: mol_type = other DNA
gaggcgctgtgggctgcttgttgtgaatacttcgagtgggctgatgataacccgctatgggagggtaaggtattt

SEQ ID NO: 584429 - DNA, 75 bp, synthetic construct
  source 1..75: mol_type = other DNA
agcctatcgccaagatgcgagcgatgaccattaccggcctcactctgttcattgatgtgacgcttgaaacatggc

SEQ ID NO: 584430 - DNA, 75 bp, synthetic construct
  source 1..75: mol_type = other DNA
atgagttcaagcaagcagaagagtttatagaaaacttatgctcatctaaaagagtaaatattgatggtataggta

SEQ ID NO: 584431 - DNA, 75 bp, synthetic construct
  source 1..75: mol_type = other DNA
ggcatacagcctgaaactggcgaagtatcccgccgtggtgtttgacgaccgctacgtggtttacggcacggcaga

SEQ ID NO: 584432 - DNA, 75 bp, synthetic construct
  source 1..75: mol_type = other DNA
gaactattcagatgaacaggtggagcgtgcaaagcaaaacgggtggcttggataatgcacagaataccaggcgag

SEQ ID NO: 584433 - DNA, 75 bp, synthetic construct
  source 1..75: mol_type = other DNA
ttgatcaacgttctacttgttgatgaccacgaacttgtgcgcgcagggatacgacgcattctggaagatataaag

SEQ ID NO: 584434 - DNA, 75 bp, synthetic construct
  source 1..75: mol_type = other DNA
cagagaactctgcagcaattattaatctgggagacagtaatgcaactatcgggaagacggactctccattattca

SEQ ID NO: 584435 - DNA, 75 bp, synthetic construct
  source 1..75: mol_type = other DNA
gtatgctggagctgaaatcgggtatcgttatcacatgtcagaaaatacatgggtggaaccacagatggaactggt

SEQ ID NO: 584436 - DNA, 75 bp, synthetic construct
  source 1..75: mol_type = other DNA
gtttaataacaattatatcgtatctacacaaaataacagtacatggacaggttctggcatcattgttaatgatgg

SEQ ID NO: 584437 - DNA, 75 bp, synthetic construct
  source 1..75: mol_type = other DNA
aataaagactacagggaaatagcccgtttaataaaatgcaaagttataagccagaaaaaaatatctctttgcagt

SEQ ID NO: 584438 - DNA, 75 bp, synthetic construct
  source 1..75: mol_type = other DNA
aaagaagttcaaccagatgaagtttacaatttgggggcgatgagccatgtagcggtatcatttgagtcaccagaa

SEQ ID NO: 584439 - DNA, 75 bp, synthetic construct
  source 1..75: mol_type = other DNA
atccatatcaaaacctcatcataaaccacgaaattgacactctgcgctgcaacatctgggcgggtatgggaatgg

SEQ ID NO: 584440 - DNA, 75 bp, synthetic construct
  source 1..75: mol_type = other DNA
atgatggcaaaaattcacgaggtaaagctgcacgcaaaatatttcgaccttgtgctggaaggaaagaaacgcgca

SEQ ID NO: 584441 - DNA, 75 bp, synthetic construct
  source 1..75: mol_type = other DNA
acacacagcgaaatgatttaaagcctgatagagtagagtatgatggtatccattctcagttttacaagcgacgta

SEQ ID NO: 584442 - DNA, 75 bp, synthetic construct
  source 1..75: mol_type = other DNA
actaatctcacctgcagaaagaaagcagtttgataatgaatctgcgttgattgcaaaaaaattattaaaaacctg

SEQ ID NO: 584443 - DNA, 75 bp, synthetic construct
  source 1..75: mol_type = other DNA
atcgatcatgacatctcagatgaagaacccagcaatgacgcgggttccgacgatgaaaaatgcgcaaaaaattct

SEQ ID NO: 584444 - DNA, 75 bp, synthetic construct
  source 1..75: mol_type = other DNA
gctcgtgaactgggtattccggcggtagtcggctgtggtgatgcaaccgaacggatgaaagacggtgagaaggtt

SEQ ID NO: 584445 - DNA, 75 bp, synthetic construct
  source 1..75: mol_type = other DNA
ggaactggcaaaacaggccgtacaaattgagaaacactacggtcgcccgatggatattgagtgggcgaaagatgg

SEQ ID NO: 584446 - DNA, 75 bp, synthetic construct
  source 1..75: mol_type = other DNA
atcatgatgtgtgaaatcccgtccaacgccttgctggcagagcagttcctcgaatatttcgacggcttctcaatt

SEQ ID NO: 584447 - DNA, 75 bp, synthetic construct
  source 1..75: mol_type = other DNA
taagctcctggggaatatggatattgtcattccggagcttacaggcaatgatattttaacgcttgatggttctgt

SEQ ID NO: 584448 - DNA, 75 bp, synthetic construct
  source 1..75: mol_type = other DNA
ggattactgagtggttttaatacggcataccgcggtgcaattcatgccccatctgcatctgctactgtgaacaat

SEQ ID NO: 584449 - DNA, 75 bp, synthetic construct
  source 1..75: mol_type = other DNA
gatgaaaaatgcgcaaaaaactctgaaaaaaactgcgcaaattcggcagaaacgaaacgcaacagcagatcgggc

SEQ ID NO: 584450 - DNA, 75 bp, synthetic construct
  source 1..75: mol_type = other DNA
ggatattgagtgggcgaaagatggccacaccggcaaactgttcattgtgcaggcgcgtccggaaaccgtgcgctc

SEQ ID NO: 584451 - DNA, 75 bp, synthetic construct
  source 1..75: mol_type = other DNA
cgtccgatatggtgctgttcgatgaactggtgttcacccgtgcccgcgcactttcagtaacaggaacactgaaaa

SEQ ID NO: 584452 - DNA, 75 bp, synthetic construct
  source 1..75: mol_type = other DNA
atgaaaaaaatcataatactgctcagtttactgatactgctgcctctgacagcaaccagtaagcccttaatccca

SEQ ID NO: 584453 - DNA, 75 bp, synthetic construct
  source 1..75: mol_type = other DNA
cccggaccgtgctttcgacttcgcctgcctaccgaacgaaggcgtgggccttgcgcgtctggaatttatcatcaa

SEQ ID NO: 584454 - DNA, 75 bp, synthetic construct
  source 1..75: mol_type = other DNA
tcatcaaccgtatgattggcgtccacccacgcgcactgcttgagtttgacgatcaggaaccgcagttgcaaaacg

SEQ ID NO: 584455 - DNA, 75 bp, synthetic construct
  source 1..75: mol_type = other DNA
cttccgcgactgcttcgcgctggagtgtgaagcagtgaaacgagtgcgcaacgacatggggctgaccaacgttga

SEQ ID NO: 584456 - DNA, 75 bp, synthetic construct
  source 1..75: mol_type = other DNA
cttatcactggaaacacgatcttgaacgcttgcttaaagcattccctcgcggtcgtcacctcgaccaggatccac

SEQ ID NO: 584457 - DNA, 75 bp, synthetic construct
  source 1..75: mol_type = other DNA
tggtgtggggggatcgtaatggcgaggacagagagaaaatttcacactgccctcactgcctgagtgctgaaatca

SEQ ID NO: 584458 - DNA, 75 bp, synthetic construct
  source 1..75: mol_type = other DNA
gctggcgcgggcgctcattactgcaccggacgtgttaatcctggatgatactacctcagcggttgatgctgttac

SEQ ID NO: 584459 - DNA, 75 bp, synthetic construct
  source 1..75: mol_type = other DNA
ctacggcggggggtcggtcatgcacgggcggatcgatctcggtaccttcgttgcattcgccagcttcctcgcgat

SEQ ID NO: 584460 - DNA, 75 bp, synthetic construct
  source 1..75: mol_type = other DNA
aacaaacaagactacaggcgcggatggatgagttacgggcagagattgcatttgctcagaagggcgaaaagccat

SEQ ID NO: 584461 - DNA, 75 bp, synthetic construct
  source 1..75: mol_type = other DNA
tttcatgactaaagtatccagaaggatagatggttgcactaaaagtctatggataactggtttaggtagttcagg

SEQ ID NO: 584462 - DNA, 75 bp, synthetic construct
  source 1..75: mol_type = other DNA
gaacggcacaaatctcgtgctgactggcagttgtggcaccgggaaaaatcacctggcggttgcgatggcaaaata

SEQ ID NO: 584463 - DNA, 75 bp, synthetic construct
  source 1..75: mol_type = other DNA
tcgaaacttactcgaccatgcacccggagcaggattcaattacggtgaatgtttaccagggggaaaaccacaaag

SEQ ID NO: 584464 - DNA, 75 bp, synthetic construct
  source 1..75: mol_type = other DNA
cagtcaaacgatatggcccgcgtcgatgaggtcaggcggcgggcgagtgattatttagccattgagatcccataa

SEQ ID NO: 584465 - DNA, 75 bp, synthetic construct
  source 1..75: mol_type = other DNA
ggcattttctcgccgattattgaacgaaacaccacagtaccggtgtcgcgtgtagaaacttactcgaccatgcac

SEQ ID NO: 584466 - DNA, 75 bp, synthetic construct
  source 1..75: mol_type = other DNA
cggcgagtttaccgtgaagattttgcagaccttcccgaaactgatgttgatgccctccacccccgccttcaagcc

SEQ ID NO: 584467 - DNA, 75 bp, synthetic construct
  source 1..75: mol_type = other DNA
tacacaattgaattgcaaggagcacatttatcgaatattctgacatgttatccacactcaattacacatgcgggt

SEQ ID NO: 584468 - DNA, 75 bp, synthetic construct
  source 1..75: mol_type = other DNA
ttggtcagaggcgattaagaccataggcgacaaaagtattagccttattttttatactaataaaggccttacctt

SEQ ID NO: 584469 - DNA, 75 bp, synthetic construct
  source 1..75: mol_type = other DNA
ccgctttgagaactgcgagtttgagaactatcaggctgtgaatgccggggctcagcggaatcttgatgcctgcca

SEQ ID NO: 584470 - DNA, 75 bp, synthetic construct
  source 1..75: mol_type = other DNA
tatggtatgtatgcctgtaacggtatcttgttcaaccacgaatctccacgtcgtggcgaaacatttgttacacgt

SEQ ID NO: 584471 - DNA, 75 bp, synthetic construct
  source 1..75: mol_type = other DNA
agagcaacttggcatcaaattgagctttgaaggaaaaggtgtagatgaaaaaggtattgttgtttccgtgacggg

SEQ ID NO: 584472 - DNA, 75 bp, synthetic construct
  source 1..75: mol_type = other DNA
agcagtttcttttgagtctccagaatatacagccgatgtcgatgcaattggtacattacgtttactggaagcaat

SEQ ID NO: 584473 - DNA, 75 bp, synthetic construct
  source 1..75: mol_type = other DNA
gttgctagcgatttgttaaaagcgaaacaacatgcacttcttaaaagccatggttatgatgtttcggtttctctg

SEQ ID NO: 584474 - DNA, 75 bp, synthetic construct
  source 1..75: mol_type = other DNA
gaattaccgggcaagatggttcctacttggcagaatttctgcttaaaaaaggctatgaggttcatggaataaaac

SEQ ID NO: 584475 - DNA, 75 bp, synthetic construct
  source 1..75: mol_type = other DNA
ggggatattattgtgcgtgttgatcctcgttatttccgtccagctgaagttgaaactctccttggtgatccagca

SEQ ID NO: 584476 - DNA, 75 bp, synthetic construct
  source 1..75: mol_type = other DNA
aaccgccccgtccggacggattacacggctgctgcgtctgataacacaaccagaatggctggctgaagccgtacg

SEQ ID NO: 584477 - DNA, 75 bp, synthetic construct
  source 1..75: mol_type = other DNA
accgcctatccctggcgataagccgttgcgtgcccgcggattccttttaagagcgattcagtatgtcgtgaggaa

SEQ ID NO: 584478 - DNA, 75 bp, synthetic construct
  source 1..75: mol_type = other DNA
atccagctttttagggatcttggtcatcgatgagatgcagaatctgaatctggcaaaaaccggtggtgctgaccg

SEQ ID NO: 584479 - DNA, 75 bp, synthetic construct
  source 1..75: mol_type = other DNA
tattctgccgcagatcatcgccgagcagaactggtgatgaataaactttatgataaggtgccttccggcgtctgg

SEQ ID NO: 584480 - DNA, 75 bp, synthetic construct
  source 1..75: mol_type = other DNA
ctgagcgttaccgggaggtggcgtatgcatggtcactgggcgtgaagaaatatccggccgtggtctttgatgatc

SEQ ID NO: 584481 - DNA, 75 bp, synthetic construct
  source 1..75: mol_type = other DNA
gcttcccccgcgtccttttctggatatggggatcgaggattcaaaaccccgaaccactgcgcacctgaaggcagc

SEQ ID NO: 584482 - DNA, 75 bp, synthetic construct
  source 1..75: mol_type = other DNA
cgcgcttattgatatttctgttattgctgacagggcgcataaacacgcagccagagaatcagaatgcatcttcca

SEQ ID NO: 584483 - DNA, 75 bp, synthetic construct
  source 1..75: mol_type = other DNA
tttagtgctgatatggcgctgaatgaggcaggcaaaattcttaccgcagatattcaaggggcgcaccatgcatga

SEQ ID NO: 584484 - DNA, 75 bp, synthetic construct
  source 1..75: mol_type = other DNA
catgcgcaggatcatttaatgaatgccatgttatgtcaggatttagcgaaagaaataatccggttaagaaaagaa

SEQ ID NO: 584485 - DNA, 75 bp, synthetic construct
  source 1..75: mol_type = other DNA
cgaaaccatcgccaacggtccgttcgtgcattatcccaatgaaaaatggttcccactgagcgaaaatgacgatgt

SEQ ID NO: 584486 - DNA, 75 bp, synthetic construct
  source 1..75: mol_type = other DNA
tttagcatttgtgcagctaaaagccgatcaggcactggataaggccggaaaaattatcatggctgatgtgcagga

SEQ ID NO: 584487 - DNA, 75 bp, synthetic construct
  source 1..75: mol_type = other DNA
gatcgttttaattccctgaaacaagaattttccggcgttcctgatgatgcggctgatgcgctttcgtcaatatct

SEQ ID NO: 584488 - DNA, 75 bp, synthetic construct
  source 1..75: mol_type = other DNA
aaaagcgatgcgataagacaaaaatgcattgaagattatttggggtgcaagttttttcgttgtgctatatcctga

SEQ ID NO: 584489 - DNA, 75 bp, synthetic construct
  source 1..75: mol_type = other DNA
gccgcagtcacaggcgtcctgccagcagtggctggaagcccactggcgtactctgacaccggcgaatttcaccca

SEQ ID NO: 584490 - DNA, 75 bp, synthetic construct
  source 1..75: mol_type = other DNA
ggggccagatgtgccaggtcagaattcctggctactgcaatcacaatcccgaaacgtctgtgctggcgcattacc

SEQ ID NO: 584491 - DNA, 75 bp, synthetic construct
  source 1..75: mol_type = other DNA
tcgtaacagtctttaccttgcagccaatggttatgatgttgacgcatgggataaaaatgccatgagtattgccaa

SEQ ID NO: 584492 - DNA, 75 bp, synthetic construct
  source 1..75: mol_type = other DNA
atgtaccgtcggctttccgtttgccttcaaagaaggagagctacgtcgttattatgaaggctgggatttattgaa

SEQ ID NO: 584493 - DNA, 75 bp, synthetic construct
  source 1..75: mol_type = other DNA
cagccgccgaagctatcagaacgctgatgcacgcgctgattgatatttcatgcacggcagcaaccgcagaaaaac

SEQ ID NO: 584494 - DNA, 75 bp, synthetic construct
  source 1..75: mol_type = other DNA
acgcgttcagggattgtccgaagttttcgaacgttacgtgaaaaaccgcattattgctgaaagcatcagcttgcc

SEQ ID NO: 584495 - DNA, 75 bp, synthetic construct
  source 1..75: mol_type = other DNA
aaattctgcgcaattacaaagccgtgattaatgcgcggcgtcgtgagatggggcagaaaccgctcaccactgcgc

SEQ ID NO: 584496 - DNA, 75 bp, synthetic construct
  source 1..75: mol_type = other DNA
acgctcgaggtttttttcgtttgtatttctattattgccaaaatcgcaaaaatcctctgcgttttacgccatttt

SEQ ID NO: 584497 - DNA, 75 bp, synthetic construct
  source 1..75: mol_type = other DNA
gtccgcagccgttcagcgtaggagaagagtacccgtggctggcggagcgtgacgaagacggtgcggtagtcacct

SEQ ID NO: 584498 - DNA, 75 bp, synthetic construct
  source 1..75: mol_type = other DNA
ggcattgcttgaacttggcatggggttccatcctgattttactggaaaagaaaatgtctttatgtcagggcagtt

SEQ ID NO: 584499 - DNA, 75 bp, synthetic construct
  source 1..75: mol_type = other DNA
cgtgaagtcgcgcaggagtgtgaggtcatcatcaccatgctccctgataccccacatgttgaggatgttcttttt

SEQ ID NO: 584500 - DNA, 75 bp, synthetic construct
  source 1..75: mol_type = other DNA
gtataatgggtaagccgatggcttataatttacaacaggccgggcataccctttatttttcagcacattttgaac

SEQ ID NO: 584501 - DNA, 75 bp, synthetic construct
  source 1..75: mol_type = other DNA
attctcggtggtgtgacagcagcccttcagggcaacagtgcggcagcaggcgcaattggtgcgggtactggcgaa

SEQ ID NO: 584502 - DNA, 75 bp, synthetic construct
  source 1..75: mol_type = other DNA
catgagtatcctgaaaactggcttcagggctggggcgggacgctggttgtcgacggacataaagcttaccggact

SEQ ID NO: 584503 - DNA, 75 bp, synthetic construct
  source 1..75: mol_type = other DNA
atctgcacgcatttgcagcgcatcagtcgttgttaaaagcctacgaaaagctgcagcgcgccaaagcggcattct

SEQ ID NO: 584504 - DNA, 75 bp, synthetic construct
  source 1..75: mol_type = other DNA
cgctgtgccagccgacaagtttatctggcacgccgtgacgcgtgccgtggggaatgtgaagaaccaggggcagga

SEQ ID NO: 584505 - DNA, 75 bp, synthetic construct
  source 1..75: mol_type = other DNA
gcatggccgggctatcgtgtttgcggatggttggtttgagtggaagaaggaaggcgacaagaagcagccatattt

SEQ ID NO: 584506 - DNA, 75 bp, synthetic construct
  source 1..75: mol_type = other DNA
gacgagcaactgcatctggatccggtattctggggatatgcgcccgaatggtgggataaacctccgctgattaat

SEQ ID NO: 584507 - DNA, 75 bp, synthetic construct
  source 1..75: mol_type = other DNA
gtgggggcgctggtcgtatattggcggtggcaggtcagggaatatgttcaatcagttgttggcatccaaaaaact

SEQ ID NO: 584508 - DNA, 75 bp, synthetic construct
  source 1..75: mol_type = other DNA
ttggtgagctttcatcccgcacagatatcattgatgcagcaacggctgcgaatacgaataaaattgattcccgaa

SEQ ID NO: 584509 - DNA, 75 bp, synthetic construct
  source 1..75: mol_type = other DNA
gcgctggcggcggagaatgctgggcttaaggccttcaaaaccgccgtttatcagcagatgggcgtcggatgtgat

SEQ ID NO: 584510 - DNA, 75 bp, synthetic construct
  source 1..75: mol_type = other DNA
aaatggaaatagcaaagcatatagagctacttacgcgtggtgttgaaggctttgttatcgatcgcacacctgctg

SEQ ID NO: 584511 - DNA, 75 bp, synthetic construct
  source 1..75: mol_type = other DNA
tataaccatgagcggccacatctggctctgaaatacaaaacacccgatgacgttcatcaggcgttttacagacag

SEQ ID NO: 584512 - DNA, 75 bp, synthetic construct
  source 1..75: mol_type = other DNA
ctgagcaaacaggccatgaagcgccaaacgcttcgtctgtgggctgaatatcgcttggaactatcaataaaatca

SEQ ID NO: 584513 - DNA, 75 bp, synthetic construct
  source 1..75: mol_type = other DNA
gtgaaagtggttaaaccgggtaaaacgctggatctgggctgtggcaatggtcgtaacagtctttacctggcagcc

SEQ ID NO: 584514 - DNA, 75 bp, synthetic construct
  source 1..75: mol_type = other DNA
atgtataatttgccctctgctgaagccagcaaggatattcgtaaagctatctccggacttagtgagaagaaagtc

SEQ ID NO: 584515 - DNA, 75 bp, synthetic construct
  source 1..75: mol_type = other DNA
gttgtggaaggcgctggtggaatatactaatgaactggggcaaccgcactggcaccgcgccaatctctaccagcg

SEQ ID NO: 584516 - DNA, 75 bp, synthetic construct
  source 1..75: mol_type = other DNA
gcgctacaggcgctgggtaaacatattgaaatccatctcctgtttaccaacccctgccgttattactggggcgat

SEQ ID NO: 584517 - DNA, 75 bp, synthetic construct
  source 1..75: mol_type = other DNA
gagatgtttgcggagtgtgcatacacacttgaacatcatgatcacgcagtagccttcgccgctgagcttcgcaaa

SEQ ID NO: 584518 - DNA, 75 bp, synthetic construct
  source 1..75: mol_type = other DNA
tatcaggccgcagcgatgggagcttgaggcgttagtacgcggtgcgatcgtcaattacaatgaaaagcaattttc

SEQ ID NO: 584519 - DNA, 75 bp, synthetic construct
  source 1..75: mol_type = other DNA
atcgcgctggtagtcatgattatctacctgtttttgcgcaatattccggcgaccatcattcccggtgttgctgta

SEQ ID NO: 584520 - DNA, 75 bp, synthetic construct
  source 1..75: mol_type = other DNA
ccacatctggccctgaagtacaaaacgcccgatgatgttcatcaggcgttttacagacaaaaaactgtcaaccta

SEQ ID NO: 584521 - DNA, 75 bp, synthetic construct
  source 1..75: mol_type = other DNA
attatcgtctcgccggaacgtgcggcacagccatcaaacctcacgatatgcagggcgctatcgcctgtagtgcgt

SEQ ID NO: 584522 - DNA, 75 bp, synthetic construct
  source 1..75: mol_type = other DNA
tgacgtcccagtttgatttttatcacggtggtggtctggatgtttgttatttgagttttgctgaagtcgaccagc

SEQ ID NO: 584523 - DNA, 75 bp, synthetic construct
  source 1..75: mol_type = other DNA
gaccaatatctgggtgggccgcggtgggttaatgcaaatggcgctttcagcaatcgatatcgccctgtgggacct

SEQ ID NO: 584524 - DNA, 75 bp, synthetic construct
  source 1..75: mol_type = other DNA
gaaacatctgtgctggcgcactacaggctagcggggacgtgtggaatggcgataaaaccacacgatatgcaggca

SEQ ID NO: 584525 - DNA, 75 bp, synthetic construct
  source 1..75: mol_type = other DNA
cccgtcgctttattcactacctgttaagtccgaaaggacagcgtattctggccgatgccaatacaggaaaatatc

SEQ ID NO: 584526 - DNA, 75 bp, synthetic construct
  source 1..75: mol_type = other DNA
ttgcaggctgtcatggcgatggtacgtggtggcgatctcggtcagccgttccagttcaaaaacttccgcgattaa

SEQ ID NO: 584527 - DNA, 75 bp, synthetic construct
  source 1..75: mol_type = other DNA
cagagccacagcgatacaccattatcgccggattacaggacaaatacctgatcactccttaccccataagggaat

SEQ ID NO: 584528 - DNA, 75 bp, synthetic construct
  source 1..75: mol_type = other DNA
aaaagtcacggcagaagccgccaaaatcatcgaagaacagggtgcggaacttacgcttttcaaaactcaaccagt

SEQ ID NO: 584529 - DNA, 75 bp, synthetic construct
  source 1..75: mol_type = other DNA
acagcgtgggtaaattcaacgccacggcagcggttggtggttacagcgaccagcaggcactggcagtgggtgtgg

SEQ ID NO: 584530 - DNA, 75 bp, synthetic construct
  source 1..75: mol_type = other DNA
ccggtcacaccacatcatggtgatatgatgcaggcacaattacatctggtaatggcacatccctcttgctctctg

SEQ ID NO: 584531 - DNA, 75 bp, synthetic construct
  source 1..75: mol_type = other DNA
cagcgcttctgacaaatctccgcctgatagagcgctctcaagttgcattcattgatgacgcccgacacaccgtat

SEQ ID NO: 584532 - DNA, 75 bp, synthetic construct
  source 1..75: mol_type = other DNA
aggagaacgcttaccgtgagttgcttctgcgccagcgcattaatgaagccgcgcaggcggtaatggtggcttacg

SEQ ID NO: 584533 - DNA, 75 bp, synthetic construct
  source 1..75: mol_type = other DNA
ggacgtgatatccgccgcagcgccatttatgccgcgttgcatgtggagggcgtccagcgtgtggaactggcgtcc

SEQ ID NO: 584534 - DNA, 75 bp, synthetic construct
  source 1..75: mol_type = other DNA
gtgaagctcagatcatggcatggcagcagtttttcctgcatcaacagcaattagtgaacatgcaactcgagtcat

SEQ ID NO: 584535 - DNA, 75 bp, synthetic construct
  source 1..75: mol_type = other DNA
gcatctacgaaaaagcgctccccgctggggagtgctggctggaacgactgcaactggcaaaaacgttaggcttcg

SEQ ID NO: 584536 - DNA, 75 bp, synthetic construct
  source 1..75: mol_type = other DNA
tatacccactgccctccggcactcctctcgcggagcaacaactacgattattttcctctccttcccttgattatc

SEQ ID NO: 584537 - DNA, 75 bp, synthetic construct
  source 1..75: mol_type = other DNA
atgctggcctgtgccgccggtaatgaccttgatgtgattggtgccaattacaacaccacgcgcctgactatcacc

SEQ ID NO: 584538 - DNA, 75 bp, synthetic construct
  source 1..75: mol_type = other DNA
gtgcaaccagtccggctcctgcagaggtggtgcttactgtcctgagccgtgaaggcgacggaacagcagaaaaag

SEQ ID NO: 584539 - DNA, 75 bp, synthetic construct
  source 1..75: mol_type = other DNA
tgttcagcgtgtggaactggcttccccgcaggcggacgtggtcctgaacaaaacgcaggcggcatcatgtacgca

SEQ ID NO: 584540 - DNA, 75 bp, synthetic construct
  source 1..75: mol_type = other DNA
acttgctggatgtggtggagaaagccctgaacagtgagaatgtccgcccggtggctgaccgtctgacggttcgca

SEQ ID NO: 584541 - DNA, 75 bp, synthetic construct
  source 1..75: mol_type = other DNA
tatatccgctaccctccggtactccactcgcggatcaacaactgcgattatttgcctccccttcccttgattatc

SEQ ID NO: 584542 - DNA, 75 bp, synthetic construct
  source 1..75: mol_type = other DNA
gagggcaacggcaccgccagccctgatttactggcgattgttgataaagcgctgaatgccgaagatgtgcgcccg

SEQ ID NO: 584543 - DNA, 75 bp, synthetic construct
  source 1..75: mol_type = other DNA
ggttcaacgtgtggagctggcttcaccgctggctgatgtggtcctgaacaaaacacaggccgcatcatgtacgca

SEQ ID NO: 584544 - DNA, 75 bp, synthetic construct
  source 1..75: mol_type = other DNA
gcaaggtatccattacccgctcgcaactggcaatgctcctcgataaactggactggcgtcagccaaaaacatccc

SEQ ID NO: 584545 - DNA, 75 bp, synthetic construct
  source 1..75: mol_type = other DNA
cttaggcaaacgctggcaacaattgcataacttcgtctatcttgtcgcgatcctggcccccatacattatctgtg

SEQ ID NO: 584546 - DNA, 75 bp, synthetic construct
  source 1..75: mol_type = other DNA
aacgtggtactcgacaccgttatgctggcaaaaagcggcgacccgctgctttcaccttcggcagttgccacgcta

SEQ ID NO: 584547 - DNA, 75 bp, synthetic construct
  source 1..75: mol_type = other DNA
taactaaggccctgctgacagcggtctgtatgctggcggcacctttgacacaggcgatttcggtcggcaatctga

SEQ ID NO: 584548 - DNA, 75 bp, synthetic construct
  source 1..75: mol_type = other DNA
gtgagggcaactctaaaccacgctacagagtttctcaatatggattgaatcttatcaaagaacaacaagacaacc

SEQ ID NO: 584549 - DNA, 75 bp, synthetic construct
  source 1..75: mol_type = other DNA
atgcgtctgacagcaaaacaggtgacatggctgaaagtttgcctacatcttgccggattgttgccgtttctctgg

SEQ ID NO: 584550 - DNA, 75 bp, synthetic construct
  source 1..75: mol_type = other DNA
gtcagtgaagattatctcaccacagccggttatctacgccgggctggctttattacttttagccttacgttttaa

SEQ ID NO: 584551 - DNA, 75 bp, synthetic construct
  source 1..75: mol_type = other DNA
gtggctgaccgtctgacggttcgcagcgcagaaatcatcccgtatcgcgtggaagccaccatttttctttatccg

SEQ ID NO: 584552 - DNA, 75 bp, synthetic construct
  source 1..75: mol_type = other DNA
ggcagggaggcgatattctccgtcggtgagcaggttccggttcttggcagcgtgtcttatgaggatggtaaagcc

SEQ ID NO: 584553 - DNA, 75 bp, synthetic construct
  source 1..75: mol_type = other DNA
tttatctggcctgcggtacgtgacggcaaggtatccattacccgttcgcaactggcaatgctcctcgataagctg

SEQ ID NO: 584554 - DNA, 75 bp, synthetic construct
  source 1..75: mol_type = other DNA
caacgtccacgacaaaatgtttcttgacggctcattcctgaaaattggctggccgtcgatcaccgtattttcctc

SEQ ID NO: 584555 - DNA, 75 bp, synthetic construct
  source 1..75: mol_type = other DNA
cgtaaagatgaaggacgtactttttaacgtgctggctatcggtactgttttagcagccctggtggtgatctttta

SEQ ID NO: 584556 - DNA, 75 bp, synthetic construct
  source 1..75: mol_type = other DNA
agcaggctctggatattttcattgccatgaaaacctttgccggtggttccgacttcgttttgccatcacggtacg

SEQ ID NO: 584557 - DNA, 75 bp, synthetic construct
  source 1..75: mol_type = other DNA
tgtgatgcgtacgctggaactggaatctgaacccgtcactaaattgttgcaggaaaacgcttaccgtgagttgct

SEQ ID NO: 584558 - DNA, 75 bp, synthetic construct
  source 1..75: mol_type = other DNA
tgtggctggattatctggacgcactggagctggtcgataccgccagtgcgccagatattgaatggcctacgcctc

SEQ ID NO: 584559 - DNA, 75 bp, synthetic construct
  source 1..75: mol_type = other DNA
tatcgagtggcgcagttgacagccacacaccacaaacagccgttgctgccgtgctatgtgcggcgatgatagggc

SEQ ID NO: 584560 - DNA, 75 bp, synthetic construct
  source 1..75: mol_type = other DNA
gccgccgaagagagcgaactgatgcagtcgctgcgccaggtgtgcaaactgtcggcgcgtaaacaaaagcaggtg

SEQ ID NO: 584561 - DNA, 75 bp, synthetic construct
  source 1..75: mol_type = other DNA
tcagtgctgcgctccatcctgattacaaaaaccgttatcaaaaacacatgcaaatagacgcagtcaaatgcacta

SEQ ID NO: 584562 - DNA, 75 bp, synthetic construct
  source 1..75: mol_type = other DNA
taagaaaaaaaactgaagagcaaaaaataacggattacaaagtagttcgctacagagatgattatcgaatatttt

SEQ ID NO: 584563 - DNA, 75 bp, synthetic construct
  source 1..75: mol_type = other DNA
tttcaacaacgcagcaggatactgagaaccagcgactagagcttgagcaagctgggtggcaaattgactattggt

SEQ ID NO: 584564 - DNA, 75 bp, synthetic construct
  source 1..75: mol_type = other DNA
agaaaaagaatagcgggaccagtatcagtgcgttagcgcgtgaatacggtgtttccagagcgactatagccgcgc

SEQ ID NO: 584565 - DNA, 75 bp, synthetic construct
  source 1..75: mol_type = other DNA
agaaaaagaatagcggaaccagtgtcagtgcgttagcgcgtgaatacggtgtttccagagcgactatagccgcgc

SEQ ID NO: 584566 - DNA, 75 bp, synthetic construct
  source 1..75: mol_type = other DNA
aaagcagctattggtcgtctgaaaggtgacgagctggaacaatataatttatggctggattatctggacgcactg

SEQ ID NO: 584567 - DNA, 75 bp, synthetic construct
  source 1..75: mol_type = other DNA
ctggtttgctacaggaagataaaatgagtaaatatctttacgatgctaaaactaatatgttttacccatttactc

SEQ ID NO: 584568 - DNA, 75 bp, synthetic construct
  source 1..75: mol_type = other DNA
atgtctctaagtactgaagcaacagctaaaatcgtttctgagtttggtcgtggtgaaaacgacaccggttctacc

SEQ ID NO: 584569 - DNA, 75 bp, synthetic construct
  source 1..75: mol_type = other DNA
ttctggaaggcaaacagcaggaaacagaagcgcaaacccaggctcgccttgcggcgctggaagcacagctcgccg

SEQ ID NO: 584570 - DNA, 75 bp, synthetic construct
  source 1..75: mol_type = other DNA
tttgttgcctattcgaaagctgtttcattaatagccaacagaatagtgcgtaacaaccaggtgatttacagtttc

SEQ ID NO: 584571 - DNA, 75 bp, synthetic construct
  source 1..75: mol_type = other DNA
ttctctcacactatcggcagggtcatggtcgcatgtttaactatggttctgaaatctacgagcccctgttggatc

SEQ ID NO: 584572 - DNA, 75 bp, synthetic construct
  source 1..75: mol_type = other DNA
aaaatctggtgtagtaggtacattccctgtttctacaaagttcacacatgccactggtgattataatgttattac

SEQ ID NO: 584573 - DNA, 75 bp, synthetic construct
  source 1..75: mol_type = other DNA
gcccttcgcgttcagataccactcatctgatgattgaagatctcctgcaacaacaaggatggaataacggctgga

SEQ ID NO: 584574 - DNA, 75 bp, synthetic construct
  source 1..75: mol_type = other DNA
tccgccattgctgccgcactgcatgtgcacggtgtgcaacgcgtggagataatcgaacccacacagaatatggcc

SEQ ID NO: 584575 - DNA, 75 bp, synthetic construct
  source 1..75: mol_type = other DNA
gaaaataacggtgtcgcatccgaagacctgctggccgtggtgcgtaacgcccttaatggtgaggacgtcaggccg

SEQ ID NO: 584576 - DNA, 75 bp, synthetic construct
  source 1..75: mol_type = other DNA
caatcactatttatggagaatagtaatcatgactgacacgcattctattgcacaaccgttcgaagcagaagtctc

SEQ ID NO: 584577 - DNA, 75 bp, synthetic construct
  source 1..75: mol_type = other DNA
gttgccctgaacggctatatcgccattctggaaggcaaacagcaggaaacagaagcgcaaacccaggctcgcctt

SEQ ID NO: 584578 - DNA, 75 bp, synthetic construct
  source 1..75: mol_type = other DNA
ttgccgataaccctggcatgagcgagctgggcctgcgttattatcaggaagatgccgtccgcgcggttgaaaagg

SEQ ID NO: 584579 - DNA, 75 bp, synthetic construct
  source 1..75: mol_type = other DNA
gtcactacaccaattgtggcgcttgctcactatttatggggtaatggcgctgaaaggagcgttaatatcgccaac

SEQ ID NO: 584580 - DNA, 75 bp, synthetic construct
  source 1..75: mol_type = other DNA
gacctcttttagtccaggttgtttatagttttttccagagtccaaacatgtgtcttcaggctttaactcaacttg

SEQ ID NO: 584581 - DNA, 75 bp, synthetic construct
  source 1..75: mol_type = other DNA
tcaccctggaataagcgtttatgacgcttaccacttcgcaaaaccagcaccaagtcaatatgactatcgctcaat

SEQ ID NO: 584582 - DNA, 75 bp, synthetic construct
  source 1..75: mol_type = other DNA
gtgtggccagccggtatcaatacggatctcgctggatgatgaactgcggatctacagtaatgagcaacaggtagc

SEQ ID NO: 584583 - DNA, 75 bp, synthetic construct
  source 1..75: mol_type = other DNA
tctggcgaacaaatctcaagctgggacagggtaaataccgctcattacgctcaatggatagtagtttgtacaaaa

SEQ ID NO: 584584 - DNA, 75 bp, synthetic construct
  source 1..75: mol_type = other DNA
attaatgagcaactgattacccatctgtcaccactgggatgggaacatatcaacctgagcggggattacgtctgg

SEQ ID NO: 584585 - DNA, 75 bp, synthetic construct
  source 1..75: mol_type = other DNA
accggggactggaaaaccagagctaccgggccagcgggctgacattgctgactgcggcgatctcactgtggaata

SEQ ID NO: 584586 - DNA, 75 bp, synthetic construct
  source 1..75: mol_type = other DNA
agtctgtgaaaacctaaaaacatctacccaatccgcccatcaaacccaactgcaccttgcagatgcactcactga

SEQ ID NO: 584587 - DNA, 75 bp, synthetic construct
  source 1..75: mol_type = other DNA
gagttaattttctcgaaactgttaaggaaaggcttgtagttgatagtcatgtaacgataattagaagcattaaac

SEQ ID NO: 584588 - DNA, 75 bp, synthetic construct
  source 1..75: mol_type = other DNA
ccttaaagatcgggatccaatctgcccaacaaacccaactgcaccttgcagacgcactgactggcgcggcgataa

SEQ ID NO: 584589 - DNA, 75 bp, synthetic construct
  source 1..75: mol_type = other DNA
accgctggcaaggccgcgttaagttctttaccgatcttcgggttacggataatttctcattctttaactacctgt

SEQ ID NO: 584590 - DNA, 75 bp, synthetic construct
  source 1..75: mol_type = other DNA
gttcgttgattaaacaaaacggaagctgggtcactaatggtgaggctattaccactgagtataagctgatgctgg

SEQ ID NO: 584591 - DNA, 75 bp, synthetic construct
  source 1..75: mol_type = other DNA
ggcaaattatcctttgacctctcgttttaccgtgtccggagaagttactggttcgttgatcaaacagaacggaag

SEQ ID NO: 584592 - DNA, 75 bp, synthetic construct
  source 1..75: mol_type = other DNA
gccaaagctttctgaaagggctgtggtcattatgcatgataccaatgttagggaacgtggttttggcgtatttca

SEQ ID NO: 584593 - DNA, 75 bp, synthetic construct
  source 1..75: mol_type = other DNA
atgaaatcactgtacccctgtctgctgctggcgttttgcgtatggatgttgttcagcgctgttgcggtgaactta

SEQ ID NO: 584594 - DNA, 75 bp, synthetic construct
  source 1..75: mol_type = other DNA
cagcaccaatattcgcatagtccaacactcagaagattagttaactattacatagacagcttaccagaaactgat

SEQ ID NO: 584595 - DNA, 75 bp, synthetic construct
  source 1..75: mol_type = other DNA
tttattgatccctattccgccagaaaatgagcaagaaaaaataacaaataaaattgaagaattatatataattgt

SEQ ID NO: 584596 - DNA, 75 bp, synthetic construct
  source 1..75: mol_type = other DNA
gaagcgtattgcggcggaaaaagcagagctggtgaagcaaggtaaaattaaaaagcaaaaaccactgccggaaat

SEQ ID NO: 584597 - DNA, 75 bp, synthetic construct
  source 1..75: mol_type = other DNA
tacttatctaaaaattacccttgatagcatgtacgattatttccaatcaaaaggagtggggattgcaattcctgg

SEQ ID NO: 584598 - DNA, 75 bp, synthetic construct
  source 1..75: mol_type = other DNA
attgcagaaaagggagatatcttaattacctgcaaaggcgcaggacttggaaaactaaatatcgctaataccaga

SEQ ID NO: 584599 - DNA, 75 bp, synthetic construct
  source 1..75: mol_type = other DNA
tgtatggcattaagaaattgcgtgagctgattctggaactggcggtgcgcggtaaactggtgccgcaggatccga

SEQ ID NO: 584600 - DNA, 75 bp, synthetic construct
  source 1..75: mol_type = other DNA
aaaaagctcaactggtgaaagaaggaaaaataaaaaaaccgttgccgccaattagcgatgaggaaaaaccgtttg

SEQ ID NO: 584601 - DNA, 75 bp, synthetic construct
  source 1..75: mol_type = other DNA
aactgacgcctaccataatgaagctataatttcaattaatgaaatgaagggaattcataaaaattatctattcca

SEQ ID NO: 584602 - DNA, 75 bp, synthetic construct
  source 1..75: mol_type = other DNA
aactcgtccagcaatctccctatttgcagctttctggctgtaccttcagcgtggaagaagaagttgcctttgggc

SEQ ID NO: 584603 - DNA, 75 bp, synthetic construct
  source 1..75: mol_type = other DNA
aggaaaaaccgtttgaactgccggaagggtgggagtggtgtcgtttaaatgatatttcatctaaaattactgatg

SEQ ID NO: 584604 - DNA, 75 bp, synthetic construct
  source 1..75: mol_type = other DNA
gatttttatttttaggacttcaatccgcccagcaaacccaactacaccttgcagacgcactcactgacgcggcga

SEQ ID NO: 584605 - DNA, 75 bp, synthetic construct
  source 1..75: mol_type = other DNA
acaggggttgcctatccagcaatcaatgacaaacaatttttttctggaataactccagttcctccatccttggaa

SEQ ID NO: 584606 - DNA, 75 bp, synthetic construct
  source 1..75: mol_type = other DNA
tttgggccagaaaatctgtgtcttgctgaagcagagattatggcgcggattgatgccgccctgactctgacctag

SEQ ID NO: 584607 - DNA, 75 bp, synthetic construct
  source 1..75: mol_type = other DNA
ctaagcgaacaagccgctaccattcaactcgtccagcaatctccctatttgcagctttccggctgtacctttagc

SEQ ID NO: 584608 - DNA, 75 bp, synthetic construct
  source 1..75: mol_type = other DNA
tattctctccaatatgcatatgcacccgattcttctggcctggttagtggctcttattctgcatgcggcagtggg

SEQ ID NO: 584609 - DNA, 75 bp, synthetic construct
  source 1..75: mol_type = other DNA
aacgcaagggatcgtaatgaacatcctgcgtcgcaagatgcctgccgagaagattaacgaaaatctcgttcagcg

SEQ ID NO: 584610 - DNA, 75 bp, synthetic construct
  source 1..75: mol_type = other DNA
attctcaatatctttgctgtcatgactgcattctttggcgtctatttaggctttcgcgaagcaacgcaagggatc

SEQ ID NO: 584611 - DNA, 75 bp, synthetic construct
  source 1..75: mol_type = other DNA
gtagggtgcctgatcccggcgtggctggtttacaaagttggatttgcccctatatttccagacatctgttatcac

SEQ ID NO: 584612 - DNA, 75 bp, synthetic construct
  source 1..75: mol_type = other DNA
tgatggtaagccattagccgatcatctgctggcaccgacccgcatttacgtgaagtcagtgctggagttgattga

SEQ ID NO: 584613 - DNA, 75 bp, synthetic construct
  source 1..75: mol_type = other DNA
gggcggcttcggtgcgctgtgtgcgttgccgcaaaaatatcgtgaacccgtgctggtttccggcactgacggcgt

SEQ ID NO: 584614 - DNA, 75 bp, synthetic construct
  source 1..75: mol_type = other DNA
aaaccaccgaacttgatggtaagccattagccgatcatctgctggcaccgacccgcatttacgtgaagtcagtgc

SEQ ID NO: 584615 - DNA, 75 bp, synthetic construct
  source 1..75: mol_type = other DNA
atttatgggtgaaacgccctaatctgtttaactggcatatgactcagccggatgaaagtgttctggtttctgacg

SEQ ID NO: 584616 - DNA, 75 bp, synthetic construct
  source 1..75: mol_type = other DNA
aatatcaaacagaatggcgatgactttgtcctgacgccgaaagccagcaatggcaatctgaagcaattcaccatt

SEQ ID NO: 584617 - DNA, 75 bp, synthetic construct
  source 1..75: mol_type = other DNA
cgatcagcgcagtagttatcaactgaaatcccagcaaaacggtgctgtggatgcagcgaaatttaccttcacccc

SEQ ID NO: 584618 - DNA, 75 bp, synthetic construct
  source 1..75: mol_type = other DNA
ccgtttaccctgacgtcgattctgtttatccagacgttaagcccgatggtgatctcttatcgctcgcgggaaaaa

SEQ ID NO: 584619 - DNA, 75 bp, synthetic construct
  source 1..75: mol_type = other DNA
agtgctggagcaggtttctcgtctcgcgccgctggataaacctgtgctggtcattggggaacgaggaacagggaa

SEQ ID NO: 584620 - DNA, 75 bp, synthetic construct
  source 1..75: mol_type = other DNA
tcaggccgttaacaagccactgtgggtggattatcaaaacggcgcgatcacttcattacagcttcagcacgggcg

SEQ ID NO: 584621 - DNA, 75 bp, synthetic construct
  source 1..75: mol_type = other DNA
aaaccaccgaactcgacggcaaaccgttagccgatcatctgctggcgcccactcgcatttacgtgaaatcagtgc

SEQ ID NO: 584622 - DNA, 75 bp, synthetic construct
  source 1..75: mol_type = other DNA
cgttttcgctcaatagaacaagcgatgcttgacgccggattgagcgcggaagaagccagtgcaggcgcacacgcg

SEQ ID NO: 584623 - DNA, 75 bp, synthetic construct
  source 1..75: mol_type = other DNA
cgcgatgacacccgccaggcgctggatgcggtgtgggaagaagaacaggtgaagtttattgaagataacgccacg

SEQ ID NO: 584624 - DNA, 75 bp, synthetic construct
  source 1..75: mol_type = other DNA
gcaggccaatgctgaattcatcgccgcagccaatccggctaccgtcttggcgctgctggatgagctggaaagaaa

SEQ ID NO: 584625 - DNA, 75 bp, synthetic construct
  source 1..75: mol_type = other DNA
ccggtaattccggatggttggataagctgtagtgatcgaatgccggaagacaccaaaatgttactggcatttagt

SEQ ID NO: 584626 - DNA, 75 bp, synthetic construct
  source 1..75: mol_type = other DNA
acggtaatggcatacaaagtttctgaggtcatcgctgcaatccgcgccgctggcatccgtatcaacggaggtgag

SEQ ID NO: 584627 - DNA, 75 bp, synthetic construct
  source 1..75: mol_type = other DNA
agcaaagttgcgaagcccgggagcgtgatttgtttgaatcatgggtaatgcattcaatttgtatctccaaatcga

SEQ ID NO: 584628 - DNA, 75 bp, synthetic construct
  source 1..75: mol_type = other DNA
atgcagatcctcaaagtgatcggcctgttgatggagtatccggacgagctgttatgggaatgtaaggaggatgcg

SEQ ID NO: 584629 - DNA, 75 bp, synthetic construct
  source 1..75: mol_type = other DNA
cacagcgggtggcggcttatgcttccgaaatcaaccggctgaaggcgctggttgcgaaaactgcaacgtatgcag

SEQ ID NO: 584630 - DNA, 75 bp, synthetic construct
  source 1..75: mol_type = other DNA
cgccctgctaaatgccaacggtgaaaacgcgtggaaaatcggtatcatcaaagcctctgattccgaacaacgcgt

SEQ ID NO: 584631 - DNA, 75 bp, synthetic construct
  source 1..75: mol_type = other DNA
gattgagcagccaacattggggaatgtgccgacatatggtggcccattagatagttacaccattccaacaaagga

SEQ ID NO: 584632 - DNA, 75 bp, synthetic construct
  source 1..75: mol_type = other DNA
ttgctcaatgttgcgccgatcctcgccctgcttggcggtcgcttaaaacaacgcaaggcaccgtggtacgcgttg

SEQ ID NO: 584633 - DNA, 75 bp, synthetic construct
  source 1..75: mol_type = other DNA
gccagatatttgcccaataaccggacgtgcatttttcatgtggattgagcatccaacattggggaatgtgccgac

SEQ ID NO: 584634 - DNA, 75 bp, synthetic construct
  source 1..75: mol_type = other DNA
gcgcggccgtgaggcttggacgctagggcagggcatgaaaaagcccgtagcgggctgctacgggcgtctgacgcg

SEQ ID NO: 584635 - DNA, 75 bp, synthetic construct
  source 1..75: mol_type = other DNA
cggcgcgcggacccgcgccacggcccacgagcggacgccgcagcaggagcgccagaaggccgccagagaggccga

SEQ ID NO: 584636 - DNA, 75 bp, synthetic construct
  source 1..75: mol_type = other DNA
gagctatgtgggcgtgatggcgatggagtgttttgtcacgccgcaaggtctgctgatcaacgaactggctccgcg

SEQ ID NO: 584637 - DNA, 75 bp, synthetic construct
  source 1..75: mol_type = other DNA
ccgttaaagacggcaagtccggaacttggaaactggacactttcgaaattaccacagataaggcgctgaccctcg

SEQ ID NO: 584638 - DNA, 75 bp, synthetic construct
  source 1..75: mol_type = other DNA
accagctggcgttacgtacaacgcttgctggcatgacatatggacagacttcgcaacagctaatctcgcacagat

SEQ ID NO: 584639 - DNA, 75 bp, synthetic construct
  source 1..75: mol_type = other DNA
ttatagtaatgctgccattctgccagcagttccttcaggtcatcagcagaaagatctacggtagcgtaaaactca

SEQ ID NO: 584640 - DNA, 75 bp, synthetic construct
  source 1..75: mol_type = other DNA
gaaagaacgtagtcgtgagtgctacgaagacgatttgcgttttacagacacgcctgaccatgccggttggatata

SEQ ID NO: 584641 - DNA, 75 bp, synthetic construct
  source 1..75: mol_type = other DNA
atctccaaggtcaaaaagatggtcttgaatgggctgcgcagcttgcagaagcaaatcacccacaaactggcgact

SEQ ID NO: 584642 - DNA, 75 bp, synthetic construct
  source 1..75: mol_type = other DNA
tccttgcaccgttcttcccggatgcaacgatgctgatcacctcgttcaacaacctgtcgatttactggcagaaag

SEQ ID NO: 584643 - DNA, 75 bp, synthetic construct
  source 1..75: mol_type = other DNA
ggcgattaccgatctgccgttaccgcaaccggtagtgaatagtccgtcggtgatgatcaacctgattggtagcga

SEQ ID NO: 584644 - DNA, 75 bp, synthetic construct
  source 1..75: mol_type = other DNA
tcgcgtctgaccgcaacgctggaagccttaatcccgctgctgccgccagagtatgccagcggcgtgatgtgggcg

SEQ ID NO: 584645 - DNA, 75 bp, synthetic construct
  source 1..75: mol_type = other DNA
ctgtatatcgagcttaatggcgattttcgccaggttccaacagataccttcatcagactctgtaatattctggcc

SEQ ID NO: 584646 - DNA, 75 bp, synthetic construct
  source 1..75: mol_type = other DNA
tgaactactacaccggtgaagccttcccggcaggtgtgaaggtgaccgcaaccgcgtttaccggcggcaccggga

SEQ ID NO: 584647 - DNA, 75 bp, synthetic construct
  source 1..75: mol_type = other DNA
gctgatgttatgagcgccctgcacgccagctatgacgacgggcagtcaggcgaaaaatttttgcgggagctgtgc

SEQ ID NO: 584648 - DNA, 75 bp, synthetic construct
  source 1..75: mol_type = other DNA
tgaactgaaacgaaaaggtaacgctgccggcgttacacaaacggatcaaaaagcgctaccagaggaagaggaaga

SEQ ID NO: 584649 - DNA, 75 bp, synthetic construct
  source 1..75: mol_type = other DNA
tcgaaaatgacggtgggctttctctacctaactttgaacgtcataacggaaaaagctctaaaaaaaaacgggcgg

SEQ ID NO: 584650 - DNA, 75 bp, synthetic construct
  source 1..75: mol_type = other DNA
gccaataattatatatataaaaatttttctcccgtagctttaattgaaaagcttaagggagcggattcatttacc

SEQ ID NO: 584651 - DNA, 75 bp, synthetic construct
  source 1..75: mol_type = other DNA
atggctaatgtaccaccaaaaccgcgtaacaacaaaggcgaaccgccaagcctggaggatacacaacacggattt

SEQ ID NO: 584652 - DNA, 75 bp, synthetic construct
  source 1..75: mol_type = other DNA
tcgaaagtgatggagtgctttcactaccaaactttgagcgtcataacggaaaaagctcgaaaaaacgggcggtta

SEQ ID NO: 584653 - DNA, 75 bp, synthetic construct
  source 1..75: mol_type = other DNA
ttgacacacaaacgtacgtaaaggctggtcttcattttgagggggtagcatttaaagctttccatgaattatgtg

SEQ ID NO: 584654 - DNA, 75 bp, synthetic construct
  source 1..75: mol_type = other DNA
caggtgagcgtgagcgccggggctacgaaggaaaacattgcgacagccatcgctgatgcggtgacgaaaaagcct

SEQ ID NO: 584655 - DNA, 75 bp, synthetic construct
  source 1..75: mol_type = other DNA
atgatgacgtgctggactcactggatgccggtcagccggtgatgacgccgaagctgtgcaccgcagagctgctgg

SEQ ID NO: 584656 - DNA, 75 bp, synthetic construct
  source 1..75: mol_type = other DNA
ttaccggatagtgcgatcccgccaggcttcaggggggtaactgaccatgaaaaatattgcgacaggcgacgttct

SEQ ID NO: 584657 - DNA, 75 bp, synthetic construct
  source 1..75: mol_type = other DNA
acggagcagggcgctaacggggcgatacgggaactggaaaaattccgccagcagggtttacccctgagcaggtga

SEQ ID NO: 584658 - DNA, 75 bp, synthetic construct
  source 1..75: mol_type = other DNA
cgaaaggtgttcggcctgagacgttgctccgacaggttaacactgtctcgttgccggacagtgcgatcccgccag

SEQ ID NO: 584659 - DNA, 75 bp, synthetic construct
  source 1..75: mol_type = other DNA
aacggggcggcaacaaccacagaccgtgctgctcagaatacctcacccgtctggtattcgttgaatgatggcagg

SEQ ID NO: 584660 - DNA, 75 bp, synthetic construct
  source 1..75: mol_type = other DNA
atgattagcgtaacccttagccaacttaccgatattctcaacggtgaactaaaaggggcagatattacccttgat

SEQ ID NO: 584661 - DNA, 75 bp, synthetic construct
  source 1..75: mol_type = other DNA
tgccgccaacagcgatttcaccgccaccaatatccatgtgacctcgcacggtacggaatttaccctgcaaacccc

SEQ ID NO: 584662 - DNA, 75 bp, synthetic construct
  source 1..75: mol_type = other DNA
gacggcggcgattttaagccagtgcggcaacacgctatacactgctggcaacctcaacaacgacatcggggtgcc

SEQ ID NO: 584663 - DNA, 75 bp, synthetic construct
  source 1..75: mol_type = other DNA
gagatttcgattattatggtgcatcaggtatcattgataaaattgatgattatattttcgataaaccattattac

SEQ ID NO: 584664 - DNA, 75 bp, synthetic construct
  source 1..75: mol_type = other DNA
aattgcgcaggaaaaagctcaactggtgaaagaagggaaaataaaaaagcattcaccagtagaacctttaggaac

SEQ ID NO: 584665 - DNA, 75 bp, synthetic construct
  source 1..75: mol_type = other DNA
ttataaccgaaggaaaatttaatgaattaagaagtgggaaaattcaaaaaggtgatttggtttattgcctacgag

SEQ ID NO: 584666 - DNA, 75 bp, synthetic construct
  source 1..75: mol_type = other DNA
aagagctggtcctaaaaatcgggttggtatttcatgccttgttgaaaaaacaagagaaaatttaatgatttcaga

SEQ ID NO: 584667 - DNA, 75 bp, synthetic construct
  source 1..75: mol_type = other DNA
tggggggtgttaaaaacgaccgcagttcaatctcttgaatatagagagtacgaaaacaaggcgctccctaaaaat

SEQ ID NO: 584668 - DNA, 75 bp, synthetic construct
  source 1..75: mol_type = other DNA
ggtaaactggtgccgcaggacccgaacgatgaaccggcgtcggagctgctgaagcgtattgcggcggaaaaagca

SEQ ID NO: 584669 - DNA, 75 bp, synthetic construct
  source 1..75: mol_type = other DNA
cctgaaaggcgaacgttttgatgcccacgattttgccgaccaggcgaaagctggcggcgcgggcgcactactggt

SEQ ID NO: 584670 - DNA, 75 bp, synthetic construct
  source 1..75: mol_type = other DNA
ggtaaactggtgccgcaggacccgaacgatgaaccggcgtcggagctgctgaagcgtattgcggcagaaaaagcg

SEQ ID NO: 584671 - DNA, 75 bp, synthetic construct
  source 1..75: mol_type = other DNA
gaacaacaactcatagttgacaaaactctggaatatttagaaatttgcgaaaaattaaaattccgcattcaatcc

SEQ ID NO: 584672 - DNA, 75 bp, synthetic construct
  source 1..75: mol_type = other DNA
ggaaaaaagttagaagttttatatttcctttgccaccgacaaaagaacaactacgaattgttaacatggttgata

SEQ ID NO: 584673 - DNA, 75 bp, synthetic construct
  source 1..75: mol_type = other DNA
tccttgcgccgttcttcccggatgcagcgatgctgatcacctcgttcaacaacctgtcgatttactggcagaaag

SEQ ID NO: 584674 - DNA, 75 bp, synthetic construct
  source 1..75: mol_type = other DNA
ctgaactcccgtcagtaccagtgtgagcaggtgaactacgacacgtttatttcgtatccgcagcttgatgcctgg

SEQ ID NO: 584675 - DNA, 75 bp, synthetic construct
  source 1..75: mol_type = other DNA
aacgtagccaggacatcatccgcgcgcgctggctggacgaagacaacaaatctacgttgcaggaactggctgacc

SEQ ID NO: 584676 - DNA, 75 bp, synthetic construct
  source 1..75: mol_type = other DNA
atgtgatggtggagtttttccagagcggcgtgccggtagccaccccaaccacttttctgaccaacgttaacacga

SEQ ID NO: 584677 - DNA, 75 bp, synthetic construct
  source 1..75: mol_type = other DNA
ccattctgatggcggcgatgctgtccggctgtctgcaggcagggacactggatgatattcgtgcactggaagctg

SEQ ID NO: 584678 - DNA, 75 bp, synthetic construct
  source 1..75: mol_type = other DNA
aattcatgccctgtcagcctatctgacgccgtcatgccgtgaactgatggagaacgatgcccgccgccgtaagga

SEQ ID NO: 584679 - DNA, 75 bp, synthetic construct
  source 1..75: mol_type = other DNA
gcgaatgggacgtaccgcactggtaattcatcccacattaaaagaacgtagttcgacactggctgaacccgcttc

SEQ ID NO: 584680 - DNA, 75 bp, synthetic construct
  source 1..75: mol_type = other DNA
attcatccaacattaaaagaacgtagttcaacactggctgaacccgcttccgatattaaaacttgcgatcattac

SEQ ID NO: 584681 - DNA, 75 bp, synthetic construct
  source 1..75: mol_type = other DNA
aagtacaggagctcatgtccctttgcgaccaactggaacagcaatccttggccagtctggacgcacatcagcaac

SEQ ID NO: 584682 - DNA, 75 bp, synthetic construct
  source 1..75: mol_type = other DNA
gttacggtgtttccgctgagcgtgtgcgccagctggaaaagaacgcgatgaaaaaactgcgcgctgctatagaag

SEQ ID NO: 584683 - DNA, 75 bp, synthetic construct
  source 1..75: mol_type = other DNA
atgaatatcgcaacgcgcttaaaggttatgtctttcttgcaatattttatctgggggagttggctagtaaccctc

SEQ ID NO: 584684 - DNA, 75 bp, synthetic construct
  source 1..75: mol_type = other DNA
gcattaacgttaccgaaaattccagtggcggaacataaagccagtacgacgctttccagtaaattaggcttggat

SEQ ID NO: 584685 - DNA, 75 bp, synthetic construct
  source 1..75: mol_type = other DNA
accgattttacttatgcccggggactttccggtaaaagctttcctgccagctgcaacaatgttgaaaatgccagc

SEQ ID NO: 584686 - DNA, 75 bp, synthetic construct
  source 1..75: mol_type = other DNA
gattgatccttatactcacgcgccaaacttaaccagcaccgactggtatgatgttggtatggaagatgcaatatc

SEQ ID NO: 584687 - DNA, 75 bp, synthetic construct
  source 1..75: mol_type = other DNA
atgaaaaagtttatcgcccccttgttggctttactggttagcggatgtcagattgatccttatactcacgcgcca

SEQ ID NO: 584688 - DNA, 75 bp, synthetic construct
  source 1..75: mol_type = other DNA
gataccagcagaaatccccgcgtattgatgggcgtcaaatcaacgtttatgtgcttcaccaggttgcggaagatg

SEQ ID NO: 584689 - DNA, 75 bp, synthetic construct
  source 1..75: mol_type = other DNA
ctttaacggtcgcagcgctgcatcttccgggtatgccattgctggtactgctgccacctggcgggattccgtcgc

SEQ ID NO: 584690 - DNA, 75 bp, synthetic construct
  source 1..75: mol_type = other DNA
gtataactaacgaagcagaatcacataatcactgtttattggctcttgatgaaatagagcaggcttccagtgcca

SEQ ID NO: 584691 - DNA, 75 bp, synthetic construct
  source 1..75: mol_type = other DNA
gcagtcaggcgaaattatccggcctgaaacgtggttatgttccccgcttgaactactgggaacggggacaatcgg

SEQ ID NO: 584692 - DNA, 75 bp, synthetic construct
  source 1..75: mol_type = other DNA
agagctacggcgagcaggtccaccgcgtgggtgagcgtttcgccatactggaggccgcacttgtgctttccggtc

SEQ ID NO: 584693 - DNA, 75 bp, synthetic construct
  source 1..75: mol_type = other DNA
ccggaaaggcgcacgcagacgcgttaaaggatgcctggacagaaaatcacggggcggcgggtcgtgagtgggtta

SEQ ID NO: 584694 - DNA, 75 bp, synthetic construct
  source 1..75: mol_type = other DNA
cggcgacaaaataccacctgtttatctcggacggcgtgacctgggtaatctggaaaacctgcgtattgtggatga

SEQ ID NO: 584695 - DNA, 75 bp, synthetic construct
  source 1..75: mol_type = other DNA
tctggaacgtgagcgccaaaacatcgatgacgggctggctatccggcttccgacaaaagaaaacgccaccggaag

SEQ ID NO: 584696 - DNA, 75 bp, synthetic construct
  source 1..75: mol_type = other DNA
gtgcggaggcattggtgaccgtgacggctggcggttgctgaaagaccacggccttaacgtgacgaccaacggcaa

SEQ ID NO: 584697 - DNA, 75 bp, synthetic construct
  source 1..75: mol_type = other DNA
tatgtctgcgttaccagggggtcttactggatgccagcgaagaggtggttcatgttgcggtggtcgatgccccct

SEQ ID NO: 584698 - DNA, 75 bp, synthetic construct
  source 1..75: mol_type = other DNA
tggccggaagatgccgctccgctgattacctggggattgacagtgacgcgtggcccgcacaaagagcggcagaat

SEQ ID NO: 584699 - DNA, 75 bp, synthetic construct
  source 1..75: mol_type = other DNA
gatccggatgttgtcgcgcatattgacgccatctgggatgaactggccatctttaacaacggtaaaagcgcctga

SEQ ID NO: 584700 - DNA, 75 bp, synthetic construct
  source 1..75: mol_type = other DNA
gggacgtcccatcaaaaaagatccagatgttgtcgcgcatattgacgccatctgggatgaactggctatttttaa

SEQ ID NO: 584701 - DNA, 75 bp, synthetic construct
  source 1..75: mol_type = other DNA
atgaaacaaaaaaaaatcgtgttaccattcagaatggtgactctgcgccactatataatagaagccttattaaat

SEQ ID NO: 584702 - DNA, 75 bp, synthetic construct
  source 1..75: mol_type = other DNA
agtgacaatcaaaaaacagtacgccggacatgcgaagcgcgtcatgatgggggtctggtcattcttacgccagtt

SEQ ID NO: 584703 - DNA, 75 bp, synthetic construct
  source 1..75: mol_type = other DNA
acgcgaagcgcgtcatgatgggcgtctggtcgttcttacgccagtttatgtacactaaatttgtgatcgtttgcg

SEQ ID NO: 584704 - DNA, 75 bp, synthetic construct
  source 1..75: mol_type = other DNA
tcgtctctggcgatgacgtcgatctcaatcgcattcccattatgacctgctggccggaagatgccgcgccgctga

SEQ ID NO: 584705 - DNA, 75 bp, synthetic construct
  source 1..75: mol_type = other DNA
gattctgcaaaaacagttcccggaaattgtcgatttttacctgccgccggaaggctgttcttatcgcctggcggt

SEQ ID NO: 584706 - DNA, 75 bp, synthetic construct
  source 1..75: mol_type = other DNA
ccattgtactcagatgcccacaaggcggcattagcgaggaagctgggtactgagagatcccctcataatttcccc

SEQ ID NO: 584707 - DNA, 75 bp, synthetic construct
  source 1..75: mol_type = other DNA
ataaactgccgcagtttaagcagatattaaacatgccgacgaaacgactgcgcggtgcgccctgccaacaaaaaa

SEQ ID NO: 584708 - DNA, 75 bp, synthetic construct
  source 1..75: mol_type = other DNA
ggggcgtcctatcaaaaaagatccggacgttgtcgcgcgtattgacgcaatctgggatgagctggctatttttaa

SEQ ID NO: 584709 - DNA, 75 bp, synthetic construct
  source 1..75: mol_type = other DNA
atggggctggatgccacgaataaatggccaggggaaacccagcgcgagtgggggcgtcctatcaaaaaagatccg

SEQ ID NO: 584710 - DNA, 75 bp, synthetic construct
  source 1..75: mol_type = other DNA
atgaagctggcaccgaatgtaaaactgttaccgaaagataaaggcgaggatgccgtgatttttgcgggggatgac

SEQ ID NO: 584711 - DNA, 75 bp, synthetic construct
  source 1..75: mol_type = other DNA
ggagaaagtaaactaacaataattatagatgagttagacagatgtaagcctagttttgccatttctattattgaa

SEQ ID NO: 584712 - DNA, 75 bp, synthetic construct
  source 1..75: mol_type = other DNA
ctgttccattaagacccggtgaacgcctgaatggacttaatcatattgcggagttaagggcgaaagtttttggtc

SEQ ID NO: 584713 - DNA, 75 bp, synthetic construct
  source 1..75: mol_type = other DNA
acgataaaattttggcttcgaactctcattttagaatgctatgtaacgagtctgaaagactaaaagaaattggag

SEQ ID NO: 584714 - DNA, 75 bp, synthetic construct
  source 1..75: mol_type = other DNA
agcaacaggctaatgcggagccagaagaacaggttgatccgcgcaaagcggcagttgccgcggctattgcccgcg

SEQ ID NO: 584715 - DNA, 75 bp, synthetic construct
  source 1..75: mol_type = other DNA
ccgtcgaagcggctattgcccgtgccaaagcacgcaagctggaacagcaacaggctaatgcagagccagaagaac

SEQ ID NO: 584716 - DNA, 75 bp, synthetic construct
  source 1..75: mol_type = other DNA
ataatgacactttaacttccaaaaatcattggatgatgctatgtgagcaatctgaaaggctgaccgctgcagtag

SEQ ID NO: 584717 - DNA, 75 bp, synthetic construct
  source 1..75: mol_type = other DNA
tccctatcaactggactctacctttatattctacaagcaagtctgaagatattgatagcgaaagatatcacgcat

SEQ ID NO: 584718 - DNA, 75 bp, synthetic construct
  source 1..75: mol_type = other DNA
acaaaaagtttacaatgaactccttctttgcagggattggaggatttgatttagcgtttgaaaatgccggtttta

SEQ ID NO: 584719 - DNA, 75 bp, synthetic construct
  source 1..75: mol_type = other DNA
atgttccgctaaaggcaggcgcgcgtctggctggtctcaaccacgtagctgaattacgtgcgagatattggggtg

SEQ ID NO: 584720 - DNA, 75 bp, synthetic construct
  source 1..75: mol_type = other DNA
tcatattttaaaaggaaatgcaggtgtagaagaccctgttagaatattcaaaaacaccttaaaagttttcttgct

SEQ ID NO: 584721 - DNA, 75 bp, synthetic construct
  source 1..75: mol_type = other DNA
ctacgggaagttgaaaccttatcaagatatctagaaatttatcaaattttatctcaaaatgaaatcagcaataaa

SEQ ID NO: 584722 - DNA, 75 bp, synthetic construct
  source 1..75: mol_type = other DNA
cctgaatggacttaatcacattgcggagttaagggcgaaagtttttggtctgaatattgagtcagagcttgagcg

SEQ ID NO: 584723 - DNA, 75 bp, synthetic construct
  source 1..75: mol_type = other DNA
tcacctttgaagccgcacatcgactgcccaacgtgcctgatggccataagtgcggacgcttacacggacactctt

SEQ ID NO: 584724 - DNA, 75 bp, synthetic construct
  source 1..75: mol_type = other DNA
gtcgtgctggccgatgagcaacttaaagatattggcaatctgcaaattgtgcctgacgggagaaaatcagcacgg

SEQ ID NO: 584725 - DNA, 75 bp, synthetic construct
  source 1..75: mol_type = other DNA
ttaaagccacgcgttgaaagtcgcgccgatggtgttttctgggtaacgcccaaagtggataagcagtcaggcgaa

SEQ ID NO: 584726 - DNA, 75 bp, synthetic construct
  source 1..75: mol_type = other DNA
cagttaaacggaaaccatgaggaatggcagttaagcacaacaacggggtggcattttggcgcgtacatcatgccg

SEQ ID NO: 584727 - DNA, 75 bp, synthetic construct
  source 1..75: mol_type = other DNA
tggacggttacgcgccatggtcagacgtgccggaaagctggatgacagacaggcgttacagattgaaaccctgct

SEQ ID NO: 584728 - DNA, 75 bp, synthetic construct
  source 1..75: mol_type = other DNA
cttcggggtacatcttttcgaacagtcatcggcagggaaaaccaccacacagaacatcgcatccagtttatgggg

SEQ ID NO: 584729 - DNA, 75 bp, synthetic construct
  source 1..75: mol_type = other DNA
ggatagctaacgaagcagaagcacacaaccacgggcttttaccactggatgaaataggacaggcaggcagtccac

SEQ ID NO: 584730 - DNA, 75 bp, synthetic construct
  source 1..75: mol_type = other DNA
gaaacattcctcaaaagtgaggggataaaagtcaaggctgggcagcttgtccggttgcttaacgtgccgatggag

SEQ ID NO: 584731 - DNA, 75 bp, synthetic construct
  source 1..75: mol_type = other DNA
aacagcctcgagggaaaaaacacgccaatacggaagtgattattttcgctggcagtgatgcgtgggcgcatgcga

SEQ ID NO: 584732 - DNA, 75 bp, synthetic construct
  source 1..75: mol_type = other DNA
aatttggcacgggcaacaaggaacacaaacagatcattgagcaggcagaggcgtttcttgctgcctacggcatga

SEQ ID NO: 584733 - DNA, 75 bp, synthetic construct
  source 1..75: mol_type = other DNA
caaacagtcaggcgaaattatccggcctgaggcgtggttatgttccccgcttgaactactgggaacgggaacgat

SEQ ID NO: 584734 - DNA, 75 bp, synthetic construct
  source 1..75: mol_type = other DNA
caggaaaggcgcacgcagacgcgttaaaggatgcctggacagcaaatcacggggcggcaggtcgtgagtggatta

SEQ ID NO: 584735 - DNA, 75 bp, synthetic construct
  source 1..75: mol_type = other DNA
aaaagccgcctggacagaaaaccacggggcggcgggtcgtgaatggattaaatggctggcagcccaccagcagga

SEQ ID NO: 584736 - DNA, 75 bp, synthetic construct
  source 1..75: mol_type = other DNA
gcttcatggacggtggcaatcacccttgccgtggctttgctgttctataaaatgccggtcgctaacgcgctggcc

SEQ ID NO: 584737 - DNA, 75 bp, synthetic construct
  source 1..75: mol_type = other DNA
aatgggctggaaaatgaactccaaaacggctttgatttataacaatcgttatattagcgaagaaactttaaaagc

SEQ ID NO: 584738 - DNA, 75 bp, synthetic construct
  source 1..75: mol_type = other DNA
tgattgcttttgaaaattatctgatagaatcaaatataaatcttatcgaaagaattagatctaagaccttcctca

SEQ ID NO: 584739 - DNA, 75 bp, synthetic construct
  source 1..75: mol_type = other DNA
ccgcgacgaactggaagcggcgtttgttgttgctggcacttctgatgaaatgctgactgaagcatttaagaaggt

SEQ ID NO: 584740 - DNA, 75 bp, synthetic construct
  source 1..75: mol_type = other DNA
gtgcgaggaaaggaaaccgaaaccatttcagaaaggttgatacgtgaggctgatacacgagaatatgaactatgg

SEQ ID NO: 584741 - DNA, 75 bp, synthetic construct
  source 1..75: mol_type = other DNA
tattgcagcagtgttcgtctataagatctcgatgaaaaccgggcagtttgacatcattcgctcgtctattctttc

SEQ ID NO: 584742 - DNA, 75 bp, synthetic construct
  source 1..75: mol_type = other DNA
cggggaagtcgatccgcatacgggctggattatcgatttcgctgaactgaaagcggcgtttaaaccaacctacga

SEQ ID NO: 584743 - DNA, 75 bp, synthetic construct
  source 1..75: mol_type = other DNA
ggatatggctacgacatcatcaaggctattgatgcacggcttgcgccgctttactcatctcctgccattcaggcg

SEQ ID NO: 584744 - DNA, 75 bp, synthetic construct
  source 1..75: mol_type = other DNA
gtgctgcgagagctgatattcatcggattgtcttcaatgcagatgtagtggcatcagcttgtcatgctgttgttg

SEQ ID NO: 584745 - DNA, 75 bp, synthetic construct
  source 1..75: mol_type = other DNA
tcgtaaaaacggttgagagagagattaatatcagtgaaaggttatgtatgcagataagttcatatattgaaggtg

SEQ ID NO: 584746 - DNA, 75 bp, synthetic construct
  source 1..75: mol_type = other DNA
tatttttcttttattaattatcgtattgatgatgtgcgtcgtttattacttgctgctgataggaagaaaaacaaa

SEQ ID NO: 584747 - DNA, 75 bp, synthetic construct
  source 1..75: mol_type = other DNA
ccaatggtcattttgtcgcctacaaagcatttcgtgacgaccccgaggcaaatccacttaaaacgccttccggta

SEQ ID NO: 584748 - DNA, 75 bp, synthetic construct
  source 1..75: mol_type = other DNA
atgaggaaaaacttttttcaatccggggcatttttggggaatggactgtcccgtttcgctttgaacgctgatccg

SEQ ID NO: 584749 - DNA, 75 bp, synthetic construct
  source 1..75: mol_type = other DNA
gtcaacggtataggcatatccatgcaactccaggggattgatattgccgaaaggccaggcaagaatattcactaa

SEQ ID NO: 584750 - DNA, 75 bp, synthetic construct
  source 1..75: mol_type = other DNA
tccataaacagcctcatggtcaacggtatgggcatatccatgcaactccaggggattgatattgccgaaaggccc

SEQ ID NO: 584751 - DNA, 75 bp, synthetic construct
  source 1..75: mol_type = other DNA
gctgaaacagtttttatcctgtgctttattgtactatggcagggattgtttatatggttgttttctcaaatacga

SEQ ID NO: 584752 - DNA, 75 bp, synthetic construct
  source 1..75: mol_type = other DNA
atgaaactttgttttggggttatcgaccagccgtatgactacggcgacgaaccgggaaaaaccacgtttgacgtg

SEQ ID NO: 584753 - DNA, 75 bp, synthetic construct
  source 1..75: mol_type = other DNA
gcgaggcaggcgttattgataaggacatctgcaaaggcatgatgcaggtcgtcaacgtactggaaacagagtgcc

SEQ ID NO: 584754 - DNA, 75 bp, synthetic construct
  source 1..75: mol_type = other DNA
ttgactaatttgaattatcaacagacgcattttgtgatgagtgcgcctgatattcgccacctaccttccgatacc

SEQ ID NO: 584755 - DNA, 75 bp, synthetic construct
  source 1..75: mol_type = other DNA
atgcaaaaaactaaaaactttctgttaaaggtaaaggttctggctttttctttcttcgctagtgtcatggcatct

SEQ ID NO: 584756 - DNA, 75 bp, synthetic construct
  source 1..75: mol_type = other DNA
tccacgttgcaggaactggctgaccgttacggcgtttccgctgaacgtgtacgccagctggaaaagaacgcgatg

SEQ ID NO: 584757 - DNA, 75 bp, synthetic construct
  source 1..75: mol_type = other DNA
cctggaaggaaaagaaggtaaagaatggaccgtcgaacaggcgcacaagatgattctggaagctgcaaatcgaag

SEQ ID NO: 584758 - DNA, 75 bp, synthetic construct
  source 1..75: mol_type = other DNA
cgtagcgactggaaaaaagcttacgtccccctgaaagaaggccagaatctggacttcgttggcggcgctgagtaa

SEQ ID NO: 584759 - DNA, 75 bp, synthetic construct
  source 1..75: mol_type = other DNA
agaaaacaaaattctgtcaaaaagcaatcatctgatattgatcgcatgggggaatacattaaaaacctagcaaaa

SEQ ID NO: 584760 - DNA, 75 bp, synthetic construct
  source 1..75: mol_type = other DNA
ggactatcttattctgattttgattttctagatattcttgatgattctctaactacgaaagaacgtgcggaaaag

SEQ ID NO: 584761 - DNA, 75 bp, synthetic construct
  source 1..75: mol_type = other DNA
ggtcagtttcgattcaaggcgcaaccactcatacctaaaaatgttaaaacaggagaatacacaggcgctttatct

SEQ ID NO: 584762 - DNA, 75 bp, synthetic construct
  source 1..75: mol_type = other DNA
gagtcggttgttaccacttcgattgtattactgttgatcggtttttccgtgggcatgtcctgggcaatgactaat

SEQ ID NO: 584763 - DNA, 75 bp, synthetic construct
  source 1..75: mol_type = other DNA
actggattactgataccgccctcaaacgtgttaattgtgttttccctgacagctggcggcgtttctgtagcatcg

SEQ ID NO: 584764 - DNA, 75 bp, synthetic construct
  source 1..75: mol_type = other DNA
atgaagtggcaacaacgtgttcgtgtcgcaactggtctaagttgctggcagattatgttgcatttactggtagtg

SEQ ID NO: 584765 - DNA, 75 bp, synthetic construct
  source 1..75: mol_type = other DNA
aacgtcattgtttatcaccacacgggaaaagtcgccttaatgaaggaaggtcaatttgtgggttatttaaaatga

SEQ ID NO: 584766 - DNA, 75 bp, synthetic construct
  source 1..75: mol_type = other DNA
tgcaataacttgtgtctgttttgttcgcagccaccaaagaaatcaaatgatgactggctacttacccaatcagct

SEQ ID NO: 584767 - DNA, 75 bp, synthetic construct
  source 1..75: mol_type = other DNA
cgcaactgaagcgtcagcaattgccgttgtctacacatttattctctcggtgctgatttaccgggaagtaaaatg

SEQ ID NO: 584768 - DNA, 75 bp, synthetic construct
  source 1..75: mol_type = other DNA
ctcagagtatggaatttccggaatatcccaggggcgaaagcgtacacgccggaaggaagaactgagatcgtttca

SEQ ID NO: 584769 - DNA, 75 bp, synthetic construct
  source 1..75: mol_type = other DNA
tgggtaatgccgatatctggaagggaaacaataaagaattgccattaggctacgttgtaagttatatggctgagc

SEQ ID NO: 584770 - DNA, 75 bp, synthetic construct
  source 1..75: mol_type = other DNA
atcatgatattggtaaatatgatatcgttacatcgttaaatgcaaaggaaactgttgatagagttttgagtaggt

SEQ ID NO: 584771 - DNA, 75 bp, synthetic construct
  source 1..75: mol_type = other DNA
cattctatgacaggaagcttctgaatggagaacgggcaattccggatgtctatcagcacgctccagaagcgttat

SEQ ID NO: 584772 - DNA, 75 bp, synthetic construct
  source 1..75: mol_type = other DNA
agtgaactggccattgcgatgcagtcggcgagacgcgtcctgttagttggagaccatctgcagcttccaccattg

SEQ ID NO: 584773 - DNA, 75 bp, synthetic construct
  source 1..75: mol_type = other DNA
atccgacaaagaagtctatatctcgggtggaagactcgtgaaggcctggctgaacgtgggggggcagggagacga

SEQ ID NO: 584774 - DNA, 75 bp, synthetic construct
  source 1..75: mol_type = other DNA
ttcattatgtgcaattgatgaagacaataaagatgccactgtttatcagtcaggtctttataacgtcattgttta

SEQ ID NO: 584775 - DNA, 75 bp, synthetic construct
  source 1..75: mol_type = other DNA
cagtttcgctttcgtgcgcaaccggtattcccggcagttgtgaaggcgggtgaatatgcaggagcactgaccttt

SEQ ID NO: 584776 - DNA, 75 bp, synthetic construct
  source 1..75: mol_type = other DNA
gattatcgcggacgtctgactcaggacagtcattcggtgaattacccggtggagtttgctgctaaaggacagttc

SEQ ID NO: 584777 - DNA, 75 bp, synthetic construct
  source 1..75: mol_type = other DNA
ttatccggtggactttgccgccagggggcagttccgcttccgtgcgcagccggagtttccgaaagacgtgaaggc

SEQ ID NO: 584778 - DNA, 75 bp, synthetic construct
  source 1..75: mol_type = other DNA
cccgcggtgccggtgatggtattcgcgtggatgtgcgggcggtggatgcgcaggcagattatcgcggacgtctga

SEQ ID NO: 584779 - DNA, 75 bp, synthetic construct
  source 1..75: mol_type = other DNA
cagcctttaaggcagggcaggtcgccaccttggattttggtaacccggggcagcttgatgcagaaggcgtggtca

SEQ ID NO: 584780 - DNA, 75 bp, synthetic construct
  source 1..75: mol_type = other DNA
tccggcgctacggttcaagggtgttcagcctttcgagcggggcaggtcgcaactctggattttggtaacccgggc

SEQ ID NO: 584781 - DNA, 75 bp, synthetic construct
  source 1..75: mol_type = other DNA
gcagccggtgtttccggcgaacgtgaaggcgggggaatacacgggtgcactgacctttgtggtcacgtatcagta

SEQ ID NO: 584782 - DNA, 75 bp, synthetic construct
  source 1..75: mol_type = other DNA
agaaaaccgtattcagtgctgacgtggtggcttcggcctgtcatgtggtggtggatgcggacagtatcggcaaca

SEQ ID NO: 584783 - DNA, 75 bp, synthetic construct
  source 1..75: mol_type = other DNA
ctctaattctttatgggctacaaacatatatttcttaaatgataaagaggagtctaaccatggatgtgaatgctt

SEQ ID NO: 584784 - DNA, 75 bp, synthetic construct
  source 1..75: mol_type = other DNA
cccggtggagtttgctgctaagggacagttccgttttcgtgcgcagccggtgtttccggcgaacgtgaaggcggg

SEQ ID NO: 584785 - DNA, 75 bp, synthetic construct
  source 1..75: mol_type = other DNA
caaccaccagcttgccgcgtatgaactgaccaataccgtgacgcataatcaggggaactacgcggcgatgatggc

SEQ ID NO: 584786 - DNA, 75 bp, synthetic construct
  source 1..75: mol_type = other DNA
ccggctggggctgcgaaggtgccattaatcaccagcttgccgcgtatgaactgaccaacaccgtgacgcataatc

SEQ ID NO: 584787 - DNA, 75 bp, synthetic construct
  source 1..75: mol_type = other DNA
agaaataaccactcgccatattgccgagtttcttgatttgtggattgaaggagggaaaaacacaatggcaggatc

SEQ ID NO: 584788 - DNA, 75 bp, synthetic construct
  source 1..75: mol_type = other DNA
cttatcacctctggtttaaccggcatgatggcggcgtggctgtttaatcttgatttgattgaaggattattaatc

SEQ ID NO: 584789 - DNA, 75 bp, synthetic construct
  source 1..75: mol_type = other DNA
atgccatgtcgcggatctcatttgcggcggtcattttttttttctgccatgagaagtgagcgcagagagggatta

SEQ ID NO: 584790 - DNA, 75 bp, synthetic construct
  source 1..75: mol_type = other DNA
ggcgtcagttctgatgcagggttgttggaggccgcagatattctgttatgtatgcggcattgcgaaacaagtaat

SEQ ID NO: 584791 - DNA, 75 bp, synthetic construct
  source 1..75: mol_type = other DNA
ctctttcggtatttgccggattgctaccgttccgtggcttcaatctgcgtgagcgcgtgtttatcagctgggtag

SEQ ID NO: 584792 - DNA, 75 bp, synthetic construct
  source 1..75: mol_type = other DNA
ccggcgctcattctgtctgcatggatgattttctttgctcgtcccctttcagtatttgtcggattgctaccattc

SEQ ID NO: 584793 - DNA, 75 bp, synthetic construct
  source 1..75: mol_type = other DNA
agcagttgttaggcgcagcaccggttgtcggtgaccaggtagagtttgccgggatgatctggacggtggccgaga

SEQ ID NO: 584794 - DNA, 75 bp, synthetic construct
  source 1..75: mol_type = other DNA
tgagtctgcacaatgagcgcattgcagatattgcattacatgaaaaggaggaaaagaaacctgaaattgaaatcg

SEQ ID NO: 584795 - DNA, 75 bp, synthetic construct
  source 1..75: mol_type = other DNA
ggaaatggatgaagagtggatggtagaatgtgccagagcaagtcatattcatgatgttataatgaatatgccaat

SEQ ID NO: 584796 - DNA, 75 bp, synthetic construct
  source 1..75: mol_type = other DNA
gatgaacagttcgctgtatctgatgcgcagcgaattgcgtgagatccccccacacgactggggtaagacgctgtg

SEQ ID NO: 584797 - DNA, 75 bp, synthetic construct
  source 1..75: mol_type = other DNA
atgtcgcggatctcgtttgcggcggtcattttttctttttctgccatgagaagtgagcgcagagagggattatct

SEQ ID NO: 584798 - DNA, 75 bp, synthetic construct
  source 1..75: mol_type = other DNA
atgcaaaaatataaaatcaatcgttcaagacatgctgccttccttttgcatgttcatcttgtctttgtaacaaaa

SEQ ID NO: 584799 - DNA, 75 bp, synthetic construct
  source 1..75: mol_type = other DNA
gatagttctctgctttaccacaatttacatttttattcgtctggtgacatacggcaattaccgacagatatcaga

SEQ ID NO: 584800 - DNA, 75 bp, synthetic construct
  source 1..75: mol_type = other DNA
atgacaaacttcacgaccagcacgccgcatgacgcattatttaaatcttttctcacgcatccggacaccgcgcgg

SEQ ID NO: 584801 - DNA, 75 bp, synthetic construct
  source 1..75: mol_type = other DNA
tatccatacggaatttgtgattttaaggttttaaaacgagccaaaggtcacaagttagacggagacgttatatgg

SEQ ID NO: 584802 - DNA, 75 bp, synthetic construct
  source 1..75: mol_type = other DNA
taaacaaaactgaaattgtatccaatatggtgattagaatttctaaaatttatccatacggaatttgtgatttta

SEQ ID NO: 584803 - DNA, 75 bp, synthetic construct
  source 1..75: mol_type = other DNA
tgattgcgcctgtcattgaagaaccgacttcatccggtgaagaacgtaatgatcccgctgaacccgttactgcgg

SEQ ID NO: 584804 - DNA, 75 bp, synthetic construct
  source 1..75: mol_type = other DNA
atgaaatatttcactccacaggatattgtggaagcctggaaacgtggtgagatcaaccgttttaaagtaaggatg

SEQ ID NO: 584805 - DNA, 75 bp, synthetic construct
  source 1..75: mol_type = other DNA
gatcaaccgctttaaagtaaggatgtatagaaacaccgctcgccgttgtggttatccagagcgtgaaaaatgttt

SEQ ID NO: 584806 - DNA, 75 bp, synthetic construct
  source 1..75: mol_type = other DNA
gttatccagagcgtgaaaaatgctttgacgatgcactaaaaattattgatgaactgcgtaaggcagagaaagaat

SEQ ID NO: 584807 - DNA, 75 bp, synthetic construct
  source 1..75: mol_type = other DNA
cagcgggaaacaggccgcaggggtggcggcaggagggaggactgctgcgccatcaggcgcagtttcctcacacac

SEQ ID NO: 584808 - DNA, 75 bp, synthetic construct
  source 1..75: mol_type = other DNA
accgtagcgacagcccgaaaccgcgccagcgggttcggcggagactggcgggtgcgccagcagctgcctgtcgga

SEQ ID NO: 584809 - DNA, 75 bp, synthetic construct
  source 1..75: mol_type = other DNA
tggatacaaaagattaccggactttcggcagagcaaatgcaggcattaaggcagcccttgcctgagcgtgagcgc

SEQ ID NO: 584810 - DNA, 75 bp, synthetic construct
  source 1..75: mol_type = other DNA
gtattggtaaagagagcgtgatttgggtcgttgatggcgagaatatcaaactgaaaaccgccatccagaacaccg

SEQ ID NO: 584811 - DNA, 75 bp, synthetic construct
  source 1..75: mol_type = other DNA
gaccgaacttgttgccgaagccgaatataaggtgaaactcctgtccgggatgattgcgccggtcactgatgacca

SEQ ID NO: 584812 - DNA, 75 bp, synthetic construct
  source 1..75: mol_type = other DNA
gcgaaaagctataaagtggtgaaaacgttcgatacgccgactcatccgaacagcctggcgctgtctgccgatggc

SEQ ID NO: 584813 - DNA, 75 bp, synthetic construct
  source 1..75: mol_type = other DNA
ccaagatgtgaacgcattacaaaaatggttgctccaatatggatttatccatggtggtatagcgactgaaaaaat

SEQ ID NO: 584814 - DNA, 75 bp, synthetic construct
  source 1..75: mol_type = other DNA
tttcatcaaaatccatatgaaggggcatcagcaagtgctaatgctttgaaaagatcaacttactcccataatccg

SEQ ID NO: 584815 - DNA, 75 bp, synthetic construct
  source 1..75: mol_type = other DNA
gttggtatcgacgccaccgacgcagtgcgttgctcggcgaaaaccggcgttggtgtgcaggacgttcttgaacgt

SEQ ID NO: 584816 - DNA, 75 bp, synthetic construct
  source 1..75: mol_type = other DNA
cacggcatgatggccgaagtcgggttaaagcatcaggtcgatgcttggtatgcagacatggatgagactcggctc

SEQ ID NO: 584817 - DNA, 75 bp, synthetic construct
  source 1..75: mol_type = other DNA
tcggttttgataacatcgacctgacgcaattttgtgatccgccgctgacaaccatcgcgcagccgcgttacgaaa

SEQ ID NO: 584818 - DNA, 75 bp, synthetic construct
  source 1..75: mol_type = other DNA
gttattgcttgatcaaatgcaggggcaacacgttggcagtggctctcgtttaatggactgcgaacttatcatccg

SEQ ID NO: 584819 - DNA, 75 bp, synthetic construct
  source 1..75: mol_type = other DNA
gcaaacggtcggcagtggctcacgtttaatggactgcgagcttattatccggggatcgacacgcacattgactta

SEQ ID NO: 584820 - DNA, 75 bp, synthetic construct
  source 1..75: mol_type = other DNA
atacaaaccgtattccgctttttcaggcggaattcaataactccatggcggtaaccggtactccgccacagcgtc

SEQ ID NO: 584821 - DNA, 75 bp, synthetic construct
  source 1..75: mol_type = other DNA
cattcacagctgtatctgcggttgttgatggcagtaatgcaggcggtctgaaaggaagtatgggagtgagcgccc

SEQ ID NO: 584822 - DNA, 75 bp, synthetic construct
  source 1..75: mol_type = other DNA
gcttcagacgctggcgcttccgtcacgcatggccccggccccggccgatcgtctgacgcgtgaagagcgtaacag

SEQ ID NO: 584823 - DNA, 75 bp, synthetic construct
  source 1..75: mol_type = other DNA
ccgcatccggcagttggcgcacaatgcctgatgcgacgcttgacgcgtcttatcaggcctacaagtctgtgccga

SEQ ID NO: 584824 - DNA, 75 bp, synthetic construct
  source 1..75: mol_type = other DNA
gacgcgtcttatcaggcctacaagtctgtgccgaaccgtaggccgtatccggcatgtcacaaatacagagccgga

SEQ ID NO: 584825 - DNA, 75 bp, synthetic construct
  source 1..75: mol_type = other DNA
cggcgttagtttctggtatccccttaatgttgttattgttcacggcttttttcgctgttctgacaggcttccctg

SEQ ID NO: 584826 - DNA, 75 bp, synthetic construct
  source 1..75: mol_type = other DNA
tcccttgtctggtgtgtgttgatcgtgtgtctcacactgttgatattcacttatctgacacgaaaatcgctgtgc

SEQ ID NO: 584827 - DNA, 75 bp, synthetic construct
  source 1..75: mol_type = other DNA
atgaaacaaatgtcactaattgagatggatggttttctgaaaggtaaatgcatcccacgtgatttaaaggttaac

SEQ ID NO: 584828 - DNA, 75 bp, synthetic construct
  source 1..75: mol_type = other DNA
gaattgtatcgaaaaacaaacttctggattttggttatatcaacggtgcaccggtatggacgttgcgtgatgagc

SEQ ID NO: 584829 - DNA, 75 bp, synthetic construct
  source 1..75: mol_type = other DNA
tattggagtggtgaaatagttgatccgttaaaaaaggaaatactttttgaaggaaatatgcggattctagagcac

SEQ ID NO: 584830 - DNA, 75 bp, synthetic construct
  source 1..75: mol_type = other DNA
ccaagatgtgaatgcattacaaaaatggttgctccaatctggttttatcagtggtggtatagcgactgaaaaaat

SEQ ID NO: 584831 - DNA, 75 bp, synthetic construct
  source 1..75: mol_type = other DNA
gagccaccagaaaaatggcggcgcgttgctgtgaaagatattgatgaattcgttacctgctgtttcaccgaacag

SEQ ID NO: 584832 - DNA, 75 bp, synthetic construct
  source 1..75: mol_type = other DNA
tgcgatggctgaacgtatcgaagagatgcagacaaaatctgcgccagattcgtttggcatcatcggtgaaaatat

SEQ ID NO: 584833 - DNA, 75 bp, synthetic construct
  source 1..75: mol_type = other DNA
aaatagcctggtatgcttcgatacagcaggagccgaatgactggaagatcgtcaccacacagttccacatccagg

SEQ ID NO: 584834 - DNA, 75 bp, synthetic construct
  source 1..75: mol_type = other DNA
gaaatgtggcgaagtaggctggctggtatgtgcgattaaagatatccacggcgctccagtcggcgataccttaac

SEQ ID NO: 584835 - DNA, 75 bp, synthetic construct
  source 1..75: mol_type = other DNA
catgcaccaacaatattctatcaatatcctaaactaatagatgaagttaagtattgtataagtaataaaaaataa

SEQ ID NO: 584836 - DNA, 75 bp, synthetic construct
  source 1..75: mol_type = other DNA
taaaatttgatggttctgtccctgatgaatccactgatgttgataatgctggcgatgtaaatcccacgatattta

SEQ ID NO: 584837 - DNA, 75 bp, synthetic construct
  source 1..75: mol_type = other DNA
cctgacattttctggaaccacaacggatactggttctcttcgccttgaaaatagcgaaactgctgcgggtagtgc

SEQ ID NO: 584838 - DNA, 75 bp, synthetic construct
  source 1..75: mol_type = other DNA
attcatgtgttcactggaggatcgaatagatgttgttcctgtagactattgtgctgatgcattattaatgttact

SEQ ID NO: 584839 - DNA, 75 bp, synthetic construct
  source 1..75: mol_type = other DNA
cgtctggtgctggatgatcgtaagcgcacggaagaggtgcgcccgctgcaaccgcgtgagctggtagctgacgat

SEQ ID NO: 584840 - DNA, 75 bp, synthetic construct
  source 1..75: mol_type = other DNA
cttcgcaaagccgcaaactggataaaggtggcgtggtttatcgtcttgatccggtcactctggaagtgacgcagg

SEQ ID NO: 584841 - DNA, 75 bp, synthetic construct
  source 1..75: mol_type = other DNA
ggtggttgatggcgagaatatcaaactgaaaaccgccatccagaacaccggtaaaatgagcaccggcctggcgct

SEQ ID NO: 584842 - DNA, 75 bp, synthetic construct
  source 1..75: mol_type = other DNA
atgatgcacttaaagaaaataaaagcgggtaacgctaaaacactggaacagtatgagttaacaaagaaacacgga

SEQ ID NO: 584843 - DNA, 75 bp, synthetic construct
  source 1..75: mol_type = other DNA
ataactacgccatgagttcgccgggatcgctgggcgtctttcttgccggaggaacggttgttctggcggccgatc

SEQ ID NO: 584844 - DNA, 75 bp, synthetic construct
  source 1..75: mol_type = other DNA
aaagccgcagaagtgttagtggtcgatacccgtaatggcaatattctggcgaaggttgcggcaccggaatcactg

SEQ ID NO: 584845 - DNA, 75 bp, synthetic construct
  source 1..75: mol_type = other DNA
cgatgctggcgctcggtacggttttgggaacggcatttggcatggctgccacggagatatttccgcaataccacc

SEQ ID NO: 584846 - DNA, 75 bp, synthetic construct
  source 1..75: mol_type = other DNA
gctatacgttaatttcgattaaagcggtatttattggcgtcattatgtcgaccattatgtaccggatttttaatc

SEQ ID NO: 584847 - DNA, 75 bp, synthetic construct
  source 1..75: mol_type = other DNA
aactgcatctgctggtttttcgtttcgatgatgtattctggcaaacccattatccccctaatgactgggaatgtc

SEQ ID NO: 584848 - DNA, 75 bp, synthetic construct
  source 1..75: mol_type = other DNA
gcctgtggttacaggcgctggctgaaggcgaaagccgggcgcagcttgcctcgctgaaactgttacaggtcggtg

SEQ ID NO: 584849 - DNA, 75 bp, synthetic construct
  source 1..75: mol_type = other DNA
gttgcttttgacaaaggcgtcgcctggttacagaaccaacgcatgggggcgctggtccatacggccgataattat

SEQ ID NO: 584850 - DNA, 75 bp, synthetic construct
  source 1..75: mol_type = other DNA
tcattttgccaatgattattaccggtcttggcgcaacactattagcgcaatttaccggcgggaaaccgctatact

SEQ ID NO: 584851 - DNA, 75 bp, synthetic construct
  source 1..75: mol_type = other DNA
ccgcgcactcataacgactactactacagcgtgcgtcgtagcgtcgagatttgtcagttcacacaacagacacgc

SEQ ID NO: 584852 - DNA, 75 bp, synthetic construct
  source 1..75: mol_type = other DNA
agcaattaatccagaaggcgcaagcgtcgttgaggttcctgatattacagcaaatcgccgggctgatatttcggg

SEQ ID NO: 584853 - DNA, 75 bp, synthetic construct
  source 1..75: mol_type = other DNA
accgagtggctgctctacgcgcagaaagtagagtctacggatacctccgtcctgccagtcacgttccccgaacaa

SEQ ID NO: 584854 - DNA, 75 bp, synthetic construct
  source 1..75: mol_type = other DNA
gttatctggttatggtccgaagatggaaaaaattggtatgaggaattaaaaaactttcaggaggatacaataaaa

SEQ ID NO: 584855 - DNA, 75 bp, synthetic construct
  source 1..75: mol_type = other DNA
tgcgccaaatgcacagttccttggtgtctacctgggtctgtggggcgtatttacgctgtttatgttcttcggcac

SEQ ID NO: 584856 - DNA, 75 bp, synthetic construct
  source 1..75: mol_type = other DNA
atatcagctaacaaagcaatttaacatcaaatggctttatacagaggatggaaaaaactggtatgaggaacaaaa

SEQ ID NO: 584857 - DNA, 75 bp, synthetic construct
  source 1..75: mol_type = other DNA
atgctctatgcgcagaaagtcgaatccacagacacctccagcctgccagtaacatttcccgaacaacctgaatga

SEQ ID NO: 584858 - DNA, 75 bp, synthetic construct
  source 1..75: mol_type = other DNA
acagagtggatgctctatgcgcagaaagtcgaatccacagacacctcctgcctgccagtaacgtttcccgaacaa

SEQ ID NO: 584859 - DNA, 75 bp, synthetic construct
  source 1..75: mol_type = other DNA
gtttttactgttccggcgatctgatctctattgatccagagggttacatcacccgtgcaggggcgcgagaaagat

SEQ ID NO: 584860 - DNA, 75 bp, synthetic construct
  source 1..75: mol_type = other DNA
cagccgctggaacgcgctgtcaggctgaatatggcaacagacgaggaacgcacacgactggaagcatgggaacgc

SEQ ID NO: 584861 - DNA, 75 bp, synthetic construct
  source 1..75: mol_type = other DNA
accgtatcgattaccaggcgctgccggagcacgaaaaacacatctttatcagcaacctgaaatatcagacgctgc

SEQ ID NO: 584862 - DNA, 75 bp, synthetic construct
  source 1..75: mol_type = other DNA
tccattcccgaactggaaacctgggtagaaacctgggcgttttcggaaacaattcactcccgctcctacacgcac

SEQ ID NO: 584863 - DNA, 75 bp, synthetic construct
  source 1..75: mol_type = other DNA
aaaactttgatgcagaaattggtcggaagattgcccggcagaatgctgtaaacaaaatctggatgcttgaaggtt

SEQ ID NO: 584864 - DNA, 75 bp, synthetic construct
  source 1..75: mol_type = other DNA
tggcgatgagcggtaaaaatgtgctccatgcggacagcgtgaaacatcagaatgacggcatcgccctgacgccgg

SEQ ID NO: 584865 - DNA, 75 bp, synthetic construct
  source 1..75: mol_type = other DNA
tagcgatgttgcccagattgaaggtatcgtggttgatggaatcgtccgggatgtcggtttagccacttttgttta

SEQ ID NO: 584866 - DNA, 75 bp, synthetic construct
  source 1..75: mol_type = other DNA
agtgaattaatcggtttggttgctcaagcgtcattgatgcaagatccggcagtaattgaaaacgaggtaaagtaa

SEQ ID NO: 584867 - DNA, 75 bp, synthetic construct
  source 1..75: mol_type = other DNA
agtccaggttgtcatgtccgatatggcaccaaacatgagcggaacaccggcggtggatatccccgtgccatgtat

SEQ ID NO: 584868 - DNA, 75 bp, synthetic construct
  source 1..75: mol_type = other DNA
gtgaatatcgcgagcctggctatggccccccacgtaatggtatggaaagaaataaatcgaataaattaagtgaac

SEQ ID NO: 584869 - DNA, 75 bp, synthetic construct
  source 1..75: mol_type = other DNA
atatagcgcgtcgttcaacgaatcttaaggtgtttatcttagatacagattccgcacggtattatccgtttgatg

SEQ ID NO: 584870 - DNA, 75 bp, synthetic construct
  source 1..75: mol_type = other DNA
cagaaatctggagtgaacatcctgatcgaaataaacacggtgttgttcttgtggccgaatctgttaatggaaaag

SEQ ID NO: 584871 - DNA, 75 bp, synthetic construct
  source 1..75: mol_type = other DNA
tccgcgtcacaccgttaagcacctttttcccgtggattgaaaaacaggggctaagtatcgggataatcattctga

SEQ ID NO: 584872 - DNA, 75 bp, synthetic construct
  source 1..75: mol_type = other DNA
acgctgcgagtgacagcatcgcggttatcgacggcgagcggcagttgagttatcgggagctgaatcaggcggcgg

SEQ ID NO: 584873 - DNA, 75 bp, synthetic construct
  source 1..75: mol_type = other DNA
tcgtaccgaatgctgaccgatgattttaataaattgatggtcgaagccgatacgtgtctgtatcgctcgaagaaa

SEQ ID NO: 584874 - DNA, 75 bp, synthetic construct
  source 1..75: mol_type = other DNA
gggcgaaggtttcgatgagtatctaagggaaattcgctccctgtttacgaaggttaaagttcgtaagccggactc

SEQ ID NO: 584875 - DNA, 75 bp, synthetic construct
  source 1..75: mol_type = other DNA
cggtggatatcccccgtgccatgtatctggtggaactggcgctagaaatgtgtcgtgatgtattagcgccaggtg

SEQ ID NO: 584876 - DNA, 75 bp, synthetic construct
  source 1..75: mol_type = other DNA
atatgtggtcacccaaattggcggcaaaggccgcatcatcgcttgcgatcttttacctatggatcctatcgttgg

SEQ ID NO: 584877 - DNA, 75 bp, synthetic construct
  source 1..75: mol_type = other DNA
aaacaattactacgcactatccagattacaaagagttttactgcaattcacccaagaaagataactttaacagtt

SEQ ID NO: 584878 - DNA, 75 bp, synthetic construct
  source 1..75: mol_type = other DNA
tgaaacctttgttcgttctgtttgtcgtcccgagaaaatcagtgccgccccaccgcatcccaaagggatgcagga

SEQ ID NO: 584879 - DNA, 75 bp, synthetic construct
  source 1..75: mol_type = other DNA
taaccacccggcagacggttttactgccacgccgtcgcctgccgatgaagtggcgtatttccagctttccggcgg

SEQ ID NO: 584880 - DNA, 75 bp, synthetic construct
  source 1..75: mol_type = other DNA
acagcgtgcgtcgtagcgtcgagatttgtcagttcacacaacagacgcgctacctgtgcgcgatcccggcggctc

SEQ ID NO: 584881 - DNA, 75 bp, synthetic construct
  source 1..75: mol_type = other DNA
cgtggataagcagaccggagaagtcagagaaatgccggtgaccacatattcagatggcaccagaaccatgacacc

SEQ ID NO: 584882 - DNA, 75 bp, synthetic construct
  source 1..75: mol_type = other DNA
gcagcggcaaataagaaagctcgtcaggataaactggacgccgaagccactgcggacaaaaaacgcgatcaaagt

SEQ ID NO: 584883 - DNA, 75 bp, synthetic construct
  source 1..75: mol_type = other DNA
tgaaacctttgttcgttctgtctgccgtcctgagaaaataagcgccgcaccaccgcatcccaaagggatgcagca

SEQ ID NO: 584884 - DNA, 75 bp, synthetic construct
  source 1..75: mol_type = other DNA
tcgataaaattgatctgacggagtggattaatgatgcagttcaggtaggagaagttcctgatcaatattcaaaat

SEQ ID NO: 584885 - DNA, 75 bp, synthetic construct
  source 1..75: mol_type = other DNA
gtataagcagtaatcccaatactactcctggaaccaaaacaaataccggagagattttcagctcagagcaaaagc

SEQ ID NO: 584886 - DNA, 75 bp, synthetic construct
  source 1..75: mol_type = other DNA
cgcaactgcgaaaataattaacgcagagtgggatgaccatatgagggtcacgcttgatggtacacagatttttgc

SEQ ID NO: 584887 - DNA, 75 bp, synthetic construct
  source 1..75: mol_type = other DNA
aacgcttcactgttgacggttacaccataaccttcactgcgggcgttaagcgcgaccaggcggtcgtggtgttcg

SEQ ID NO: 584888 - DNA, 75 bp, synthetic construct
  source 1..75: mol_type = other DNA
atggatgcaccgagtaccacaccgcatgatgcggtgtttaaacaatttttaatgcatgcggaaacggctcgtgac

SEQ ID NO: 584889 - DNA, 75 bp, synthetic construct
  source 1..75: mol_type = other DNA
aggtaagacaggaggtaagacaggaggtaatacaagaggttagacaggaagtaagacaggaattcgccctgcgtt

SEQ ID NO: 584890 - DNA, 75 bp, synthetic construct
  source 1..75: mol_type = other DNA
gatcaatggcggagaaatttccggcccgattgtgattaaagggcgttacattgctggtgttggcgcagaatacgt

SEQ ID NO: 584891 - DNA, 75 bp, synthetic construct
  source 1..75: mol_type = other DNA
aaggttacagtgcaacaagtactggtgaaaggcgaaccgattgacgcgcaaaccttgcaggcggaagaaccagca

SEQ ID NO: 584892 - DNA, 75 bp, synthetic construct
  source 1..75: mol_type = other DNA
ggcgacgctgttgccgattatattattgataatgtctctattctcgacctgatcaatggcggagaaatttccggc

SEQ ID NO: 584893 - DNA, 75 bp, synthetic construct
  source 1..75: mol_type = other DNA
caaatgtggttcgttaccggatgaaccgtttattcagatggcgtttctttccctgccagtgatccccgcgttgaa

SEQ ID NO: 584894 - DNA, 75 bp, synthetic construct
  source 1..75: mol_type = other DNA
gctttggtctgaatgaaggtgcactggctgcgacggttagccatgacagccataacattgtggtgatcggtcgta

SEQ ID NO: 584895 - DNA, 75 bp, synthetic construct
  source 1..75: mol_type = other DNA
tcccgctccagcgtctacagcgaaaacggttttgatcgcgatgatgtgtgctttattgccgttcttgagcgttac

SEQ ID NO: 584896 - DNA, 75 bp, synthetic construct
  source 1..75: mol_type = other DNA
gaacggcatcgccgtattcacaggaatgtacgcaaaatcagacggctgggcttcactcaatggcttgaaccgcaa

SEQ ID NO: 584897 - DNA, 75 bp, synthetic construct
  source 1..75: mol_type = other DNA
ttagttatcaaaaagcctgctatgtatacacatacggcgcttatgatgagacgttatatgaagttcaccacgtga

SEQ ID NO: 584898 - DNA, 75 bp, synthetic construct
  source 1..75: mol_type = other DNA
gcggcgttcgcaccagctcttaacagtcatacgtgggagtcttttttttcgtgcatcgcagcgcagatccacaaa

SEQ ID NO: 584899 - DNA, 75 bp, synthetic construct
  source 1..75: mol_type = other DNA
atgaataattctattaaccataaatttcatcacattagccgggctgaataccaggaattgttagccgtttcccgt

SEQ ID NO: 584900 - DNA, 75 bp, synthetic construct
  source 1..75: mol_type = other DNA
attgcgctctatatcgatgacggctgtgatgctgccgttcttaacgcggcgttcgcgccagctcttaacagtcat

SEQ ID NO: 584901 - DNA, 75 bp, synthetic construct
  source 1..75: mol_type = other DNA
acgcttttcgatattcatcatatcaatctaaaaaggcaagataaccgcatcaagaatatccgcctgatgccgaaa

SEQ ID NO: 584902 - DNA, 75 bp, synthetic construct
  source 1..75: mol_type = other DNA
acgcactcccactccagcgtctacagcgaaaatggttttgatcgcgatgatgtgtgctttattgccgtacttgag

SEQ ID NO: 584903 - DNA, 75 bp, synthetic construct
  source 1..75: mol_type = other DNA
ttatcatgctgtggttatgttgtcatgcatcagtacactgacaaaagtgcaaaagaaaggaaaacaggcagatga

SEQ ID NO: 584904 - DNA, 75 bp, synthetic construct
  source 1..75: mol_type = other DNA
attgggcaaagcctcaatttaaccgtcgtggcggaaggcgtcgaaaccaaagagcaatttgagatgctacgcaag

SEQ ID NO: 584905 - DNA, 75 bp, synthetic construct
  source 1..75: mol_type = other DNA
ggttttaggcgcagcgctaaaagaagcaattagcaataaccaacttaaactggtttatcagccgcaaatcttcgc

SEQ ID NO: 584906 - DNA, 75 bp, synthetic construct
  source 1..75: mol_type = other DNA
ctatacaagacatatgctcagaacgcccagaagtgggagttttggcgtgcatgttttatgaaaaacttgcaaagt

SEQ ID NO: 584907 - DNA, 75 bp, synthetic construct
  source 1..75: mol_type = other DNA
gttcaaatgatgtgattgagcatagtattttaaaactaaatatacttaaagaagcatcacctaaagtcccacata

SEQ ID NO: 584908 - DNA, 75 bp, synthetic construct
  source 1..75: mol_type = other DNA
actgatgattattatagagaaagagaaaactttttggctggtgtcgcaagtgatggggcttacgtcagtgatcaa

SEQ ID NO: 584909 - DNA, 75 bp, synthetic construct
  source 1..75: mol_type = other DNA
tcgtccagggcagtggattgctatctacggtcttggcggtctgggtaacctcgctctgcaatacgcgaagaatgt

SEQ ID NO: 584910 - DNA, 75 bp, synthetic construct
  source 1..75: mol_type = other DNA
ccggatacagcgttgatggcgggatggcggaagagtgcatcgtggtcgccgattacgcggtaaaagtgccagatg

SEQ ID NO: 584911 - DNA, 75 bp, synthetic construct
  source 1..75: mol_type = other DNA
agacccgataccttaagagtactcgccaagctaccggtgttgttcatgaccgaaatttatacaaaagatgatgaa

SEQ ID NO: 584912 - DNA, 75 bp, synthetic construct
  source 1..75: mol_type = other DNA
ccgccgatggcatttttttccccgcccttgagcaaaatatgatgggcgcggtgttaattaacgaaaatgatgaag

SEQ ID NO: 584913 - DNA, 75 bp, synthetic construct
  source 1..75: mol_type = other DNA
ctgaatcagcccggagtcattcccggggcagtacttcacaacctgacgcaattacccgactcagcacttcagagc

SEQ ID NO: 584914 - DNA, 75 bp, synthetic construct
  source 1..75: mol_type = other DNA
aggatcttccgccgcagattcgtcagccagtctgtaatgctggtgaggcaaaaacagcccctgtcggtgagcgta

SEQ ID NO: 584915 - DNA, 75 bp, synthetic construct
  source 1..75: mol_type = other DNA
atgggctggaggggaacgtttctactaaaagtattggagacattcttgatgacgaactgagcggagatcgcgagt

SEQ ID NO: 584916 - DNA, 75 bp, synthetic construct
  source 1..75: mol_type = other DNA
tccaggacgatttgaacgtgccgacggcggtacgctatttcttgatgaactcgctacagcaccgatgatggtgca

SEQ ID NO: 584917 - DNA, 75 bp, synthetic construct
  source 1..75: mol_type = other DNA
ggccgggaaatattcgtgaattgaaaaacgtggtggaacgttcagtgtatcgccacggcaccagcgattatccgc

SEQ ID NO: 584918 - DNA, 75 bp, synthetic construct
  source 1..75: mol_type = other DNA
ggaaaaattattacgcgtaattgagtacggtgaactggaacgcgttggcggtagccagccattgcaggtcaatgt

SEQ ID NO: 584919 - DNA, 75 bp, synthetic construct
  source 1..75: mol_type = other DNA
tgtgatgtcgaaactgggcgtcagttctgacgcagggttgttggaggccgcagatattctgttatgtatgcggca

SEQ ID NO: 584920 - DNA, 75 bp, synthetic construct
  source 1..75: mol_type = other DNA
gataaaaccagtcaggatgctgattttactgcgaaaactatcgccgataagcaggcggatacgaatcaggaacag

SEQ ID NO: 584921 - DNA, 75 bp, synthetic construct
  source 1..75: mol_type = other DNA
tcctggacgatttgaacgtgccgacggcggaacgctgtttcttgatgaactcgctacggcaccaatgatggtgca

SEQ ID NO: 584922 - DNA, 75 bp, synthetic construct
  source 1..75: mol_type = other DNA
actctcctgctgccttaattgaaaagcttaaagggttcgactcatttactatggctgactggattgaacgttaca

SEQ ID NO: 584923 - DNA, 75 bp, synthetic construct
  source 1..75: mol_type = other DNA
caggacaacgtcgcgaagacataacgaatatgcggttcagtgatatttatgatgatcgtcttcacatcaggcaaa

SEQ ID NO: 584924 - DNA, 75 bp, synthetic construct
  source 1..75: mol_type = other DNA
aaggagggacaaagcatattactggcgcaaccctctgacgaaagaagaatttacactaggtaaaatttcaagaag

SEQ ID NO: 584925 - DNA, 75 bp, synthetic construct
  source 1..75: mol_type = other DNA
tcgctacggcaccgatgatggtgcaagaaaaattattgcgcgtgatcgaatacggtgaactggagcgcgttggcg

SEQ ID NO: 584926 - DNA, 75 bp, synthetic construct
  source 1..75: mol_type = other DNA
cttcagtccggaaactttcgggaaaacaagaattcgtcaaccaataattttcgggaaatcgcggaaacgtcaacc

SEQ ID NO: 584927 - DNA, 75 bp, synthetic construct
  source 1..75: mol_type = other DNA
aattgctcatcgtgtgggaatggggggcttcagttctctgcgtcaggtgcgtgaaggggctgaatataagtacgt

SEQ ID NO: 584928 - DNA, 75 bp, synthetic construct
  source 1..75: mol_type = other DNA
aagccctgcgcctggctgccgaactggctgaacaaaagcagcttctggaacagaaagcccaccagctaaatcagc

SEQ ID NO: 584929 - DNA, 75 bp, synthetic construct
  source 1..75: mol_type = other DNA
tggttgtgcggcatcctggtataagcccgcttttaatgcaaaacctttgggatagattttcgcgggatacaaaca

SEQ ID NO: 584930 - DNA, 75 bp, synthetic construct
  source 1..75: mol_type = other DNA
acgcaagaccaaagattggttgatgtattattttgcaaacggtgaaaaacgcgagttaggaaacttttctttaga

SEQ ID NO: 584931 - DNA, 75 bp, synthetic construct
  source 1..75: mol_type = other DNA
gcaagtcctttcaccttaaatcctgaaatattgctcagtgatgctccaatattaaaaaacaaaagaactataaaa

SEQ ID NO: 584932 - DNA, 75 bp, synthetic construct
  source 1..75: mol_type = other DNA
aaactactgggaaaccgtattcacaatgggctggaggggaacgtttctactaaaagtattggagacattcttgat

SEQ ID NO: 584933 - DNA, 75 bp, synthetic construct
  source 1..75: mol_type = other DNA
aggaaaaataaaatatttgatttgtacttccactctagtagaaggtgtaaatttggcctgtaaaaatatttttat

SEQ ID NO: 584934 - DNA, 75 bp, synthetic construct
  source 1..75: mol_type = other DNA
gattcatatgtatccgcattctctagaattagtgatactctgagtaagaagctaggttataattcaaaaggagct

SEQ ID NO: 584935 - DNA, 75 bp, synthetic construct
  source 1..75: mol_type = other DNA
tggtttaccagccgcaaatcttcgcagaaacgggtgaactgtacggcatcgaagcccttgctcgctggcacgatc

SEQ ID NO: 584936 - DNA, 75 bp, synthetic construct
  source 1..75: mol_type = other DNA
ttgacggccaccagctaacggtggaaatcaccgaaagcatgatgatggaacacgataccgaaatttttaagcgca

SEQ ID NO: 584937 - DNA, 75 bp, synthetic construct
  source 1..75: mol_type = other DNA
atgaagctaaccgatgcggataatgccgccgatggcatttttttccccgcccttgagcaaaatatgatgggcgcg

SEQ ID NO: 584938 - DNA, 75 bp, synthetic construct
  source 1..75: mol_type = other DNA
taatttaacaaatatagttaatattcagacactaccattgagtaatgtataccagagcgaaaaatctaatgtctt

SEQ ID NO: 584939 - DNA, 75 bp, synthetic construct
  source 1..75: mol_type = other DNA
ctccagccctgtatttttacttgctaaacgcagcctggaagacagctaccagcgcgtcgttctgactctgagtca

SEQ ID NO: 584940 - DNA, 75 bp, synthetic construct
  source 1..75: mol_type = other DNA
gatccactgtcgcgttattcagggatatttcttttcccgccccctgcccgccgaagaaattccaggctggatgag

SEQ ID NO: 584941 - DNA, 75 bp, synthetic construct
  source 1..75: mol_type = other DNA
gcgctggtggcagagaacgctgggctgaaacacgcaatggccgtaactcttgagcatgtgtcggtcacggatgca

SEQ ID NO: 584942 - DNA, 75 bp, synthetic construct
  source 1..75: mol_type = other DNA
acagggcgaatgggtcgcatttatttcgccgggtactggtacgtatgcggtgcatacgcccggtgataaacgatg

SEQ ID NO: 584943 - DNA, 75 bp, synthetic construct
  source 1..75: mol_type = other DNA
gaagttgggccaaacaagaacgttccggggctgattagaggcgcagagatatgcgtaagtattgctgaacagctt

SEQ ID NO: 584944 - DNA, 75 bp, synthetic construct
  source 1..75: mol_type = other DNA
tggcacccgctttgccaccggtcaggcggtggtgacaccttccgtgatccggaccgagttgctggcactgtttga

SEQ ID NO: 584945 - DNA, 75 bp, synthetic construct
  source 1..75: mol_type = other DNA
ccgcgcaaggtcatccgccggcgggaaggccaggatgccgctcgtgacctacaaggtgtgggcggcgagcctcct

SEQ ID NO: 584946 - DNA, 75 bp, synthetic construct
  source 1..75: mol_type = other DNA
gcagccaggctgggatcacccggagaatacgttgattatgcggcatcgaaaggggcgattgatacgttaaccacc

SEQ ID NO: 584947 - DNA, 75 bp, synthetic construct
  source 1..75: mol_type = other DNA
atgaacagggaattggatttgaccgtggaagacttaagcacgattgcggaatacatgcgcggcggcgatcctgat

SEQ ID NO: 584948 - DNA, 75 bp, synthetic construct
  source 1..75: mol_type = other DNA
atggacaaggatttagaattgaccgtggaggatttaagcactattgctgaatacatgcgcggcgatgatcctgat

SEQ ID NO: 584949 - DNA, 75 bp, synthetic construct
  source 1..75: mol_type = other DNA
ccttccgcctgttgcagcgtccgggggtgatggccgggatgatcgctatctttatgtcctttgcggggcaattcg

SEQ ID NO: 584950 - DNA, 75 bp, synthetic construct
  source 1..75: mol_type = other DNA
tctcctatgaggtttcccgttcgctggctgcctgtgaaggcgcactgctggtggtcgatgccgggcagggcgtag

SEQ ID NO: 584951 - DNA, 75 bp, synthetic construct
  source 1..75: mol_type = other DNA
gtctcgctggagttcctgcggcagaacgggaagtgcaaagactaccggatcacctacaacaaggccaaattcaag

SEQ ID NO: 584952 - DNA, 75 bp, synthetic construct
  source 1..75: mol_type = other DNA
aacttaaaaacgattttatgtctagttcaaggctgatttctttatgggcgatcatgtatgcgcgggcgcaatgga

SEQ ID NO: 584953 - DNA, 75 bp, synthetic construct
  source 1..75: mol_type = other DNA
tctggcgattgcgacctttggcgataacgaattgctcgacttcttacaatgcccagtgctggcggtggctcagcg

SEQ ID NO: 584954 - DNA, 75 bp, synthetic construct
  source 1..75: mol_type = other DNA
gccctccctgtcaacggatccggcccgaccattacagacactggcgctgcctgcccgtatggcacctgaagcacc

SEQ ID NO: 584955 - DNA, 75 bp, synthetic construct
  source 1..75: mol_type = other DNA
gctttatcggtgaatgctcagctcatgatttacgggtgaactattatgacggtgaaactacaccggccggtctta

SEQ ID NO: 584956 - DNA, 75 bp, synthetic construct
  source 1..75: mol_type = other DNA
cgtgccggtcagaatatcgtgacgccggagatcatgaagcttcagttaatttcgctgggtgaagagtgggtggaa

SEQ ID NO: 584957 - DNA, 75 bp, synthetic construct
  source 1..75: mol_type = other DNA
ctgagtgcaaaatttacaggtgcattatctgccgtggacgtgcgctggaactattacgcgggtgaaaccacccct

SEQ ID NO: 584958 - DNA, 75 bp, synthetic construct
  source 1..75: mol_type = other DNA
cttacattcctggctattgcacaactgaatttaaggctctattattacctcaacaaaccaccccaatataagttt

SEQ ID NO: 584959 - DNA, 75 bp, synthetic construct
  source 1..75: mol_type = other DNA
ctggcactaaagctaaacgtgcacaacgtccggcgaaatatagctacgttgacgaaaacggcgaaactaaaacct

SEQ ID NO: 584960 - DNA, 75 bp, synthetic construct
  source 1..75: mol_type = other DNA
cgtcttgacgtgttatgcacgccggatctggttaaccagttccgcttcctggcagcacagatccgtttcattttg

SEQ ID NO: 584961 - DNA, 75 bp, synthetic construct
  source 1..75: mol_type = other DNA
gatcagccagacaacgaaatgcgttgtattgagcatcttttacagcgtcaggtcgatgccatcattgtttcgact

SEQ ID NO: 584962 - DNA, 75 bp, synthetic construct
  source 1..75: mol_type = other DNA
atgccagtacaatggctatggtttttacattttacgcaaggggcaattgtgaaactggatgaaatcgctcggctg

SEQ ID NO: 584963 - DNA, 75 bp, synthetic construct
  source 1..75: mol_type = other DNA
agctatcattgatgcgcttgttgccctgataaataaggatactgatgcgccattcacagctgtatctgcggttgt

SEQ ID NO: 584964 - DNA, 75 bp, synthetic construct
  source 1..75: mol_type = other DNA
gggcaaaacgcaatgattttctggcgacctgcacattcattcccaaagcccctgaaccggattacctctgggcag

SEQ ID NO: 584965 - DNA, 75 bp, synthetic construct
  source 1..75: mol_type = other DNA
tcaggatcacccgtgcgtctcaggcaacagaattctgggggcgcggctccatgattgccctgatggtggcggaat

SEQ ID NO: 584966 - DNA, 75 bp, synthetic construct
  source 1..75: mol_type = other DNA
cgctacgttgtcattctgttcgccgttttgctgacgctttcctgtttgctggtttcctttgccaactcattcagt

SEQ ID NO: 584967 - DNA, 75 bp, synthetic construct
  source 1..75: mol_type = other DNA
agttgcccgcaaagctggcagatgaacgtggcggtgcgcccggatgtgctggtgccggtggtgatggcgaagtca

SEQ ID NO: 584968 - DNA, 75 bp, synthetic construct
  source 1..75: mol_type = other DNA
ctggtttatgccattctgacgtctaacccgaaaatctccacagataatgtaagtctgttcgataaagcgaaacat

SEQ ID NO: 584969 - DNA, 75 bp, synthetic construct
  source 1..75: mol_type = other DNA
tattgaacgcgccgtcgtgatgaattcaggcccgatcattttttctgaggatcttccgccacagattcgtcagcc

SEQ ID NO: 584970 - DNA, 75 bp, synthetic construct
  source 1..75: mol_type = other DNA
ggaagggcattcatgcagcgacgacagactgggtaaagccgagaatcaaacagtacacggcaaccaggctgccga

SEQ ID NO: 584971 - DNA, 75 bp, synthetic construct
  source 1..75: mol_type = other DNA
ctacaacgtcagcgcccagcgcagggaggtgttgatggaactcgatgacgcgattggtttcagcagtaaacacgc

SEQ ID NO: 584972 - DNA, 75 bp, synthetic construct
  source 1..75: mol_type = other DNA
atgagttttcaattttgcaggcggaagttgtatttcctcctggcgctggccttaccgggctacgccgccgtccac

SEQ ID NO: 584973 - DNA, 75 bp, synthetic construct
  source 1..75: mol_type = other DNA
atgcacgaacagggatttccgcgcaaagcgcccgccggtaaaggtcgccgcccccgtgttgcaatgagcagaaaa

SEQ ID NO: 584974 - DNA, 75 bp, synthetic construct
  source 1..75: mol_type = other DNA
taaatatcgatgttaacattgttaatgagataaagactagtttccccacaataggaaggaatattgatataatta

SEQ ID NO: 584975 - DNA, 75 bp, synthetic construct
  source 1..75: mol_type = other DNA
cattgaaatggagattgtcaacaaatctgtcttagccgagccagagaaaatcttcgacgatatgaaagatgatcg

SEQ ID NO: 584976 - DNA, 75 bp, synthetic construct
  source 1..75: mol_type = other DNA
tgtttgctgatattcaccctgacgtggtgttgatggatatccgcatgccagagatggacggcatcaaggcactaa

SEQ ID NO: 584977 - DNA, 75 bp, synthetic construct
  source 1..75: mol_type = other DNA
ttaaacacagcggtattgccgctggggcgctggtggtgacatcggcagcaccgctacccgcatgggcagaagaga

SEQ ID NO: 584978 - DNA, 75 bp, synthetic construct
  source 1..75: mol_type = other DNA
cgtggtgtcagatgatgtttgatacgcgcggtggcgtgcggttgtcagagcagatccagaatgatttattgctgc

SEQ ID NO: 584979 - DNA, 75 bp, synthetic construct
  source 1..75: mol_type = other DNA
tttcgataaatttcgatagctctctggttgaaccgctaatatgctccgcacgctataccggaagcacctttcggc

SEQ ID NO: 584980 - DNA, 75 bp, synthetic construct
  source 1..75: mol_type = other DNA
cctgctgcatctggaattgagtagtctgcagctgtatatcgcgtccggtgcgtcattgctgctgtcggcttatgc

SEQ ID NO: 584981 - DNA, 75 bp, synthetic construct
  source 1..75: mol_type = other DNA
cttgaccccgtatctgctttcccgcccattcgcgtttttggtacggtaggatttattgtcgcgatgtgggcggtc

SEQ ID NO: 584982 - DNA, 75 bp, synthetic construct
  source 1..75: mol_type = other DNA
caaaacgtcaaaaccgcggctcccgaaactcaacagatgatgggggctgaaaaccagagagaggagaaagcagga

SEQ ID NO: 584983 - DNA, 75 bp, synthetic construct
  source 1..75: mol_type = other DNA
tgatggcagggatgatcgccatcttcatgtctttcgccgggcagtttgctttcttcacatatattcgcccggtgt

SEQ ID NO: 584984 - DNA, 75 bp, synthetic construct
  source 1..75: mol_type = other DNA
ggcgatgtcggcgtcgctgaccatgcgtctggtgccgccgcgtacggtgccgaaggcgctgtcggtgatcttcgg

SEQ ID NO: 584985 - DNA, 75 bp, synthetic construct
  source 1..75: mol_type = other DNA
taaggcaatggcatgtattcagtcaaaacgtacagaggaatttaaaaagatgccggaatccattcgaaacatgat

SEQ ID NO: 584986 - DNA, 75 bp, synthetic construct
  source 1..75: mol_type = other DNA
ccattactggcttgctgccgtagatattcccgtggcgagcgataacccagtgcactatgcggatgccattcgtta

SEQ ID NO: 584987 - DNA, 75 bp, synthetic construct
  source 1..75: mol_type = other DNA
acttgatactgccaagaatggttacatcctcctggttcaggacgcagagccaaacttcgatataaatggcaactc

SEQ ID NO: 584988 - DNA, 75 bp, synthetic construct
  source 1..75: mol_type = other DNA
acggctggactgagtgcgataccttcgaagggtattacgattgttcgagaaacaaatggtgggcagttactgaca

SEQ ID NO: 584989 - DNA, 75 bp, synthetic construct
  source 1..75: mol_type = other DNA
tgtaagccagacttacaagttgaacaagctgtcgggcaactctccggtaactccggatggttggataagctgtag

SEQ ID NO: 584990 - DNA, 75 bp, synthetic construct
  source 1..75: mol_type = other DNA
ccgtgcttatgaaattgctttggtatcgctggaagcagaaccggtggcatggctgcattcagacaatggcttagg

SEQ ID NO: 584991 - DNA, 75 bp, synthetic construct
  source 1..75: mol_type = other DNA
cagcagcctagagattcgagacgatattgagcgccgtgcttatgaaattgctctggcatcgctggaagaggagcc

SEQ ID NO: 584992 - DNA, 75 bp, synthetic construct
  source 1..75: mol_type = other DNA
gtgccggaaggtgcgtttgccgaagaagagcgatacatgattaacggtgtactgactctggcgtcgcgctctctg

SEQ ID NO: 584993 - DNA, 75 bp, synthetic construct
  source 1..75: mol_type = other DNA
cggtgccgatgaaattcgtgaacagttgctttcttcgccacatagcctgttcccggtatgtcgtggtgaactgga

SEQ ID NO: 584994 - DNA, 75 bp, synthetic construct
  source 1..75: mol_type = other DNA
tcaggcggcgctaattcggatatcacgacccgcactatcgaagcggtgcgtaaatcgaaggaagcgttagacctg

SEQ ID NO: 584995 - DNA, 75 bp, synthetic construct
  source 1..75: mol_type = other DNA
atgactgaagaacagaaattccagttagagatttacaaactggtcatgaaccagaacgcagccgcagaagaagca

SEQ ID NO: 584996 - DNA, 75 bp, synthetic construct
  source 1..75: mol_type = other DNA
ccggaaaccctcgatccgatcaacctgctgggcgtgctgcgtcgtgctcgcgggagttttgttatcgtgaccaac

SEQ ID NO: 584997 - DNA, 75 bp, synthetic construct
  source 1..75: mol_type = other DNA
caccattgttgaagctaacgattatcgtgttgatctggttcgcattgttaaagagcaactggcgcacgacgaaga

SEQ ID NO: 584998 - DNA, 75 bp, synthetic construct
  source 1..75: mol_type = other DNA
gtgagcagtgaaagccgccagtggcttgcgcagtgcgggctgacggtggagcggctggcggcacagatagagccg

SEQ ID NO: 584999 - DNA, 75 bp, synthetic construct
  source 1..75: mol_type = other DNA
ttatcgtctcttctttcgttatagtgaaaaagaggtaagcgcatcatttaaaccgtctttcgcctccctttcctg

SEQ ID NO: 585000 - DNA, 75 bp, synthetic construct
  source 1..75: mol_type = other DNA
cattctgtgctcatttagccaaagagctttgttttgtgagttctttgcctccacatcttaaagatgatgagcatg

SEQ ID NO: 585001 - DNA, 75 bp, synthetic construct
  source 1..75: mol_type = other DNA
ggtgtatttatgttgccgaagctgaaaacggatgacatgaaaacgggtaagaaggtttatctgaaatccggaaaa

SEQ ID NO: 585002 - DNA, 75 bp, synthetic construct
  source 1..75: mol_type = other DNA
cgacgaccggaaaatcgcttcgcatcactcaaattcaatttaacataatatacattatgcgcactgacgttgtgg

SEQ ID NO: 585003 - DNA, 75 bp, synthetic construct
  source 1..75: mol_type = other DNA
gtgacgcgcactatctttaccggtatgaccgtcacggcaggctgacaaagaaaaccgacctcatcccggaagggg

SEQ ID NO: 585004 - DNA, 75 bp, synthetic construct
  source 1..75: mol_type = other DNA
tggttagtatggttcgctaacaggcataataaggccgttgcctatgactgcggagaatggattgtcgaaccatca

SEQ ID NO: 585005 - DNA, 75 bp, synthetic construct
  source 1..75: mol_type = other DNA
tggcgtcttcaaaaacgtgccgtttggcgaaggtgtagtggatttcgaacgttgtttcgaaacgctcaaacagag

SEQ ID NO: 585006 - DNA, 75 bp, synthetic construct
  source 1..75: mol_type = other DNA
gctgtctataagtggctcaaaaacggcttcctccctaagactgagttttttgggaaaactaaatacgcatcaaaa

SEQ ID NO: 585007 - DNA, 75 bp, synthetic construct
  source 1..75: mol_type = other DNA
tggtggaggaacagcttgtcgtcagccgtaaccgtcgtcgtcgctacagctcatattgcggagaaatcggaccgg

SEQ ID NO: 585008 - DNA, 75 bp, synthetic construct
  source 1..75: mol_type = other DNA
acccggcggcagaagtggcgaaagcgcgtgattgggtgaaagcgcgtatggtcaaagcaggcatggtggaggcgg

SEQ ID NO: 585009 - DNA, 75 bp, synthetic construct
  source 1..75: mol_type = other DNA
tgcagatggagttgcaggccggaatcgggcatatcgtcgcggtacatgtgaaagacaccaaaccgggcgtcttca

SEQ ID NO: 585010 - DNA, 75 bp, synthetic construct
  source 1..75: mol_type = other DNA
cggcgtgcgcgtgccgtctatgtgcctttctgctcatcgtcgttttccgctgggcagcgaagatgacgcagtgcg

SEQ ID NO: 585011 - DNA, 75 bp, synthetic construct
  source 1..75: mol_type = other DNA
tatcagccggggagcttcacgccactcatcagggtcgaaactgccaccggtgagctggcgaaaacgcagcgccgc

SEQ ID NO: 585012 - DNA, 75 bp, synthetic construct
  source 1..75: mol_type = other DNA
ggtaccaagcgcagagatcatgaggcaggcgcaggagctgcgggactttgatgaagccagacgcatgccatatgt

SEQ ID NO: 585013 - DNA, 75 bp, synthetic construct
  source 1..75: mol_type = other DNA
ccggtaaacaaaagctgcagatcatgcccaatatggttgtatttcagttcgtattgcgcggtatctgttcccgcc

SEQ ID NO: 585014 - DNA, 75 bp, synthetic construct
  source 1..75: mol_type = other DNA
gtgggcattatcgctggccatgctggctggaaagagtgaatgcagcaggtcttattctctcaatgtcccgtaaag

SEQ ID NO: 585015 - DNA, 75 bp, synthetic construct
  source 1..75: mol_type = other DNA
ggccttattcactcaatgtcccgtaaaggatgctatcctgataatgctgcatgcgaaggctttttcggcagactg

SEQ ID NO: 585016 - DNA, 75 bp, synthetic construct
  source 1..75: mol_type = other DNA
gaggaactaatggtaagttaaaaatggatacagtgctaacagcaccaacgaaccttaattcaaataaggatctaa

SEQ ID NO: 585017 - DNA, 75 bp, synthetic construct
  source 1..75: mol_type = other DNA
acaacctagtcagctagagaatttaattgcttcccctattgatagacagttgatagaacgtgcagaacatttgat

SEQ ID NO: 585018 - DNA, 75 bp, synthetic construct
  source 1..75: mol_type = other DNA
aacagataatggcacatactccgaattacaacttttccgtgaggtgttggtcagaaaagggttcaatgagcttga

SEQ ID NO: 585019 - DNA, 75 bp, synthetic construct
  source 1..75: mol_type = other DNA
ttggtccgaagtctgaaccgatcaaaggcgatgtcctgaactatgatgaagtgatggagcgcatggatcacttca

SEQ ID NO: 585020 - DNA, 75 bp, synthetic construct
  source 1..75: mol_type = other DNA
tgcttgctgcgtaagcccgatgatcgttggtaaacaaatgcagttcttcggtgcgcgtgcaaacctggcgaaaac

SEQ ID NO: 585021 - DNA, 75 bp, synthetic construct
  source 1..75: mol_type = other DNA
gtatcaccacatgtcttagccaggcggcgttagcgggtctggcgtccttcagtcaacaattactggagcaactca

SEQ ID NO: 585022 - DNA, 75 bp, synthetic construct
  source 1..75: mol_type = other DNA
cgggcatatcgtcgcggtgcatgtgaaagacaccaaaccaggcgtcttcaaaaacgtgccgtttggcgaaggcgt

SEQ ID NO: 585023 - DNA, 75 bp, synthetic construct
  source 1..75: mol_type = other DNA
aactctatcagcaaggcgctgggctacgcacactatctcaacaatccgtggttccagctctacccggatatcggc

SEQ ID NO: 585024 - DNA, 75 bp, synthetic construct
  source 1..75: mol_type = other DNA
gcaatggcgccaggcgcaatgagcagagaaatggagagaatgatacctaccgctttcagcgtcgccacaatggtc

SEQ ID NO: 585025 - DNA, 75 bp, synthetic construct
  source 1..75: mol_type = other DNA
agcaaatggaaaaaatgggacgagatgctcgcctcaccgtggttcaccgtctacccggacgtcggcaacctcagc

SEQ ID NO: 585026 - DNA, 75 bp, synthetic construct
  source 1..75: mol_type = other DNA
gcagcaatctggcctctccgctggagcaggtcaatgctgccgtgaaagcactcggtgaaattcctgaaagccgca

SEQ ID NO: 585027 - DNA, 75 bp, synthetic construct
  source 1..75: mol_type = other DNA
gcagcttgagaaaatcgttggtctgcagactgaagctccgctgaaacgtgctcttatcccgttcggtggtatcaa

SEQ ID NO: 585028 - DNA, 75 bp, synthetic construct
  source 1..75: mol_type = other DNA
atacacttaagctatttgactcaaaaactaatcagcttaatccggcctttattaaggatatgcaggccttggaag

SEQ ID NO: 585029 - DNA, 75 bp, synthetic construct
  source 1..75: mol_type = other DNA
atggctgatgcatcaaaacttaaaactaaaaggacccgtggtgggctgggggtacccccgggccccgacgaagtg

SEQ ID NO: 585030 - DNA, 75 bp, synthetic construct
  source 1..75: mol_type = other DNA
atatcacggtcaatccatcatcaccggcattccgtcatggcaagtcgttaggctctgggaaaaataaagactggt

SEQ ID NO: 585031 - DNA, 75 bp, synthetic construct
  source 1..75: mol_type = other DNA
cggagttggtgtttcctgatggggagacgttgcgtgaaatactcacttcgctagggaaggtgcgaacaagttcct

SEQ ID NO: 585032 - DNA, 75 bp, synthetic construct
  source 1..75: mol_type = other DNA
ctgacgtggtgtttcctgatggggacaatttagttggtcttttaaaaacaaaaggtttcagtaaattaaataaat

SEQ ID NO: 585033 - DNA, 75 bp, synthetic construct
  source 1..75: mol_type = other DNA
aatccctgtggcgaaatttaattatcgacacttcattgaaggttcgccaatgaggataaaagggggctttaatat

SEQ ID NO: 585034 - DNA, 75 bp, synthetic construct
  source 1..75: mol_type = other DNA
atgctcactggtttgcgctgccaactctctatacgccgcgcttcgagtggtttgccattctgactattctgccag

SEQ ID NO: 585035 - DNA, 75 bp, synthetic construct
  source 1..75: mol_type = other DNA
cggaactcgtgtttcctgatggggagacattacgtgaaatactcacttcgctagcagtactacaacctgccatct

SEQ ID NO: 585036 - DNA, 75 bp, synthetic construct
  source 1..75: mol_type = other DNA
tgaagagctactcaatcacacacagcgtattgaattgcagcaaggtcgcgtccgtaaagctgaacgctggggacc

SEQ ID NO: 585037 - DNA, 75 bp, synthetic construct
  source 1..75: mol_type = other DNA
cggaaatagtgtacagaatcggattgggggtaacagccattatgcatatttaaacctacagagtgggttaaatat

SEQ ID NO: 585038 - DNA, 75 bp, synthetic construct
  source 1..75: mol_type = other DNA
catgggatgaaagggataaagtcattaaagagaaaaaaccatctcatcaaaatagagtatattggatgtgcgaaa

SEQ ID NO: 585039 - DNA, 75 bp, synthetic construct
  source 1..75: mol_type = other DNA
ttatcgtctcttctttcgttatagtgaaaaagagaaagtcatcattctgggatggatgaacgatgaaaacactct

SEQ ID NO: 585040 - DNA, 75 bp, synthetic construct
  source 1..75: mol_type = other DNA
ttgatgtgaatcgcgcaaatgctgcattgcagcgccgatcaggaatgcctgtgcaaattagttctggttcaagac

SEQ ID NO: 585041 - DNA, 75 bp, synthetic construct
  source 1..75: mol_type = other DNA
tcgatgtgaatcgcgcgaatgctgcgttgcaacgtcgatcgggaatgccagtgcaaattagctctggttcaaagc

SEQ ID NO: 585042 - DNA, 75 bp, synthetic construct
  source 1..75: mol_type = other DNA
agccagtaaaatacaccactgaaccagatggctcgaactggctggaagttcatgagccgctgtcgcgcaatcgtg

SEQ ID NO: 585043 - DNA, 75 bp, synthetic construct
  source 1..75: mol_type = other DNA
ttgaataatactgaggatagttacgtttatgctgaatcggggctggtaaccactgtcggcgttaaggatctggta

SEQ ID NO: 585044 - DNA, 75 bp, synthetic construct
  source 1..75: mol_type = other DNA
atgacagcgccgcaactggtaagcacaccaacgctactgaaaaatatcgggcgcgaagatgtgccggaatttaaa

SEQ ID NO: 585045 - DNA, 75 bp, synthetic construct
  source 1..75: mol_type = other DNA
taagctagctgtgcgccctgctggtgtatcacctgagcaatacaatgcttttggggcgcgtaatattaaagttaa

SEQ ID NO: 585046 - DNA, 75 bp, synthetic construct
  source 1..75: mol_type = other DNA
tggactggctgggtaaacagtacatcactgcactgaacatcatcccctacatgcacgacaagtacagctacgaag

SEQ ID NO: 585047 - DNA, 75 bp, synthetic construct
  source 1..75: mol_type = other DNA
atggcaggcaaagcaacggcacttaacactaaccagcttttcatgtacctgaatcgcggggatattgcggaattt

SEQ ID NO: 585048 - DNA, 75 bp, synthetic construct
  source 1..75: mol_type = other DNA
agcttgtacaggtggttaatgctgtagatgtacaaaaaaaattaaatgcgttgtttaccagtttgtttttcactc

SEQ ID NO: 585049 - DNA, 75 bp, synthetic construct
  source 1..75: mol_type = other DNA
aagaaatgtcgttgatacgcgaagagttttctgacaccgagcgtttcctggaacatgatttaaatttccatttgc

SEQ ID NO: 585050 - DNA, 75 bp, synthetic construct
  source 1..75: mol_type = other DNA
cagcgaacgcaccgggcttgaaagtgaactggcagccgtcagcgaagaaattgccgggattaccggaatcagcgg

SEQ ID NO: 585051 - DNA, 75 bp, synthetic construct
  source 1..75: mol_type = other DNA
tggttctgatgagcaatgctgcgtttgataaacttagccaggaaaatcaggcagttatattaaagcagctaaaga

SEQ ID NO: 585052 - DNA, 75 bp, synthetic construct
  source 1..75: mol_type = other DNA
agatgtgcaaaaaaaattaaatgcgttgtttaccagtttgtttttcactcgctcggtaatgtttgaatcgagaga

SEQ ID NO: 585053 - DNA, 75 bp, synthetic construct
  source 1..75: mol_type = other DNA
catcgagctttatgctgatcaggctggttgccccgcaaacgtcatgattatgggcgctgaggtatggcgcacatt

SEQ ID NO: 585054 - DNA, 75 bp, synthetic construct
  source 1..75: mol_type = other DNA
tgaaggtgcgatgaaagccatggatgagcatttcaacctctcttctgatgctttaaacaatcagtctcctcttta

SEQ ID NO: 585055 - DNA, 75 bp, synthetic construct
  source 1..75: mol_type = other DNA
gtgcgcgtgcaaacctggcaaaaaccatgctgtacgcaatcaacggcggtgttgacgaaaaactgaaaatgcagg

SEQ ID NO: 585056 - DNA, 75 bp, synthetic construct
  source 1..75: mol_type = other DNA
ttgcttaccgcgacgccacaccgggctttgagcgtgattttgttggcaggatgacagacttctggtgccgtgatt

SEQ ID NO: 585057 - DNA, 75 bp, synthetic construct
  source 1..75: mol_type = other DNA
ccggatgtttcatcaaagacgggttcaacataccagtggcaaaaagtcaggcatcctgggttaatcagaatacgc

SEQ ID NO: 585058 - DNA, 75 bp, synthetic construct
  source 1..75: mol_type = other DNA
aatgcaggccatgtatggcggtctattcagaacgcgccgcgagatctgaagaaacgataaatagctgcatcagga

SEQ ID NO: 585059 - DNA, 75 bp, synthetic construct
  source 1..75: mol_type = other DNA
caaactggccaacgcgctgcaaaacgtcggtgaaagccagagtttcccgccgtacaacattgagaaaagcgacga

SEQ ID NO: 585060 - DNA, 75 bp, synthetic construct
  source 1..75: mol_type = other DNA
caggcgctggttaatgtcggcgcacaaatagccgccatgacgccgggcgaactggcgacctggcttgcggagaat

SEQ ID NO: 585061 - DNA, 75 bp, synthetic construct
  source 1..75: mol_type = other DNA
caggcgctggtaaatgtcggcgcacaaatagccgcgatgacgccaggcgaactggctacctggcttgcggagaat

SEQ ID NO: 585062 - DNA, 75 bp, synthetic construct
  source 1..75: mol_type = other DNA
tccggaaccgaacatgaccattctgtggtctgaaaaactgccgctgaacttcaagaaattcgctgctaaagtgtc

SEQ ID NO: 585063 - DNA, 75 bp, synthetic construct
  source 1..75: mol_type = other DNA
ccaacctggctggtctgatggatggttatttccaccacgaagcatccatcgaaggtggtcagcacctgaacgtta

SEQ ID NO: 585064 - DNA, 75 bp, synthetic construct
  source 1..75: mol_type = other DNA
acttcatggactggctggctaaacagtacatcactgcactgaacatcatccactacatgcacgacaagtacagct

SEQ ID NO: 585065 - DNA, 75 bp, synthetic construct
  source 1..75: mol_type = other DNA
agtttgttccaccgaaaagccctgaacagcaggatattgaggggctacaccgtgcaagacagcgtattgtcaatc

SEQ ID NO: 585066 - DNA, 75 bp, synthetic construct
  source 1..75: mol_type = other DNA
ctggggactgctgcttgatcgggaaataacaatcggcgcggcagtctcaagagttcgtcgtgctgttccgcttat

SEQ ID NO: 585067 - DNA, 75 bp, synthetic construct
  source 1..75: mol_type = other DNA
acgctgaagtcgatgctggatgtggtgcgtaaatttggcgttgaagttatctctgaaaccaacgtgccgctggac

SEQ ID NO: 585068 - DNA, 75 bp, synthetic construct
  source 1..75: mol_type = other DNA
cttgtgattggcttaatgctggattccattggcccggcggcgaaagcgatggcggaaaatttcgacctgaatctg

SEQ ID NO: 585069 - DNA, 75 bp, synthetic construct
  source 1..75: mol_type = other DNA
cgaggtcaatttgttagatttggaataaataaagcaaattatggagaacgtgcgccagatcgttggttacagaga

SEQ ID NO: 585070 - DNA, 75 bp, synthetic construct
  source 1..75: mol_type = other DNA
ttgaagctaagccgcaaccaattgattacgtcttgcctaatttggctattggtactatcggagcgattgtttctc

SEQ ID NO: 585071 - DNA, 75 bp, synthetic construct
  source 1..75: mol_type = other DNA
cttcccagaaaaaaaagacgttagtggttatattgaaagtatctctcaaaaaatcatagaacatgctgaaattga

SEQ ID NO: 585072 - DNA, 75 bp, synthetic construct
  source 1..75: mol_type = other DNA
tatgatgaacggtggaaatatactggtactgcgcgatattcttggacatgccgatataaaaatgacgatgattta

SEQ ID NO: 585073 - DNA, 75 bp, synthetic construct
  source 1..75: mol_type = other DNA
tacggtgttgagcaagaaagatttcaccattgaactcaaagagtgcgatgggataaccaaagcaacagttgaaat

SEQ ID NO: 585074 - DNA, 75 bp, synthetic construct
  source 1..75: mol_type = other DNA
tgttaatgaagccagtcacggtcggaagagtcataaacgaaaaaaatttcgtaatcgaattaaaagattgtgacg

SEQ ID NO: 585075 - DNA, 75 bp, synthetic construct
  source 1..75: mol_type = other DNA
ttatttaatggacatctatgttccactaatgacaacttacgcaggaattctcaatgaaatcagtagctcaagcga

SEQ ID NO: 585076 - DNA, 75 bp, synthetic construct
  source 1..75: mol_type = other DNA
atgttatagattatacagacttgattaaaaccataatgggtttgccacctgtaaaaatacagcagatttgcgatt

SEQ ID NO: 585077 - DNA, 75 bp, synthetic construct
  source 1..75: mol_type = other DNA
ataaaatcagcacaaaacttgcgattttggctcataaagtggaattaaataccagtttgaatttaatggatttaa

SEQ ID NO: 585078 - DNA, 75 bp, synthetic construct
  source 1..75: mol_type = other DNA
agagcaacaaaagaagtcaacgatgaacttaaaaaacttgcacatcattactctgaatattctgttcagttagat

SEQ ID NO: 585079 - DNA, 75 bp, synthetic construct
  source 1..75: mol_type = other DNA
tcttaaaaatcgcacagcaatcactgaactctgatgaaagagaagaagatgattatttattaggagagataagtt

SEQ ID NO: 585080 - DNA, 75 bp, synthetic construct
  source 1..75: mol_type = other DNA
gcttatcagatgggcggtggcacttggaatcctttttcgcaaagtaaatcggcccctatatctgccgcaataggc

SEQ ID NO: 585081 - DNA, 75 bp, synthetic construct
  source 1..75: mol_type = other DNA
aataacattatacttgagccggtcgggcgcaacaccgcgccggccatcgccctggcggcccttcaggccacccgc

SEQ ID NO: 585082 - DNA, 75 bp, synthetic construct
  source 1..75: mol_type = other DNA
atgttgcttcctgtgataatggctggcggtaccggcagtcgtctctggccgatgtctcgcgagctttacccgaaa

SEQ ID NO: 585083 - DNA, 75 bp, synthetic construct
  source 1..75: mol_type = other DNA
ccgaagcttatcaacaaaaattgtgggaaaaaattgacgctgacacacgtgctcaggcgaaagctatggggggtg

SEQ ID NO: 585084 - DNA, 75 bp, synthetic construct
  source 1..75: mol_type = other DNA
aattgccaaagttttttctgaagatgaacacgcctcaattcctgactttttggttatctccaccaaaacatggaa

SEQ ID NO: 585085 - DNA, 75 bp, synthetic construct
  source 1..75: mol_type = other DNA
atcccaggcgttaaccgaattaaatttagcgccgacgatattcagcgcaaatttggcccttttggcgaacctgtc

SEQ ID NO: 585086 - DNA, 75 bp, synthetic construct
  source 1..75: mol_type = other DNA
ctgggacatacggcggtggtatcggcaagcctgattttttatcccactcaccattttaattgctgtttgtgtgcc

SEQ ID NO: 585087 - DNA, 75 bp, synthetic construct
  source 1..75: mol_type = other DNA
ggtaatcaggtgctgccgtttggcgatcttgccactatcggcttcttcgtggcgatggcggtcgcggtgcatcgt

SEQ ID NO: 585088 - DNA, 75 bp, synthetic construct
  source 1..75: mol_type = other DNA
ctaggacactggtcagcaccaaacccgctggcaggacttccaaccttcaaaattgccgaaggtgagctggctttt

SEQ ID NO: 585089 - DNA, 75 bp, synthetic construct
  source 1..75: mol_type = other DNA
gggccatcagttatctaaataccgcatcacttataccaagacgaagggtaagaaaaaccgcaccgtgccgatatc

SEQ ID NO: 585090 - DNA, 75 bp, synthetic construct
  source 1..75: mol_type = other DNA
atcatcctctcctcgattacggaagggatcatcgtcaccaatgaaaataacgagatccagatcttcaataaatcc

SEQ ID NO: 585091 - DNA, 75 bp, synthetic construct
  source 1..75: mol_type = other DNA
tgatgaggagtccggcctgtattacaaccgccaccgctattatgacccgctgcaggggcggtatatcactcagga

SEQ ID NO: 585092 - DNA, 75 bp, synthetic construct
  source 1..75: mol_type = other DNA
ttggattacgtaaaatccggcaagcctgtaatggaaggtaattcattaaaaaatattgatgaattgtcaggctgc

SEQ ID NO: 585093 - DNA, 75 bp, synthetic construct
  source 1..75: mol_type = other DNA
atggaaggtaattcattaaaaaatattgatgaattgtcaggctgcatatccagacaatgggctggtaatggaaca

SEQ ID NO: 585094 - DNA, 75 bp, synthetic construct
  source 1..75: mol_type = other DNA
tgctgggtctggtggcgctcggcttcaccttaatttccgtgttcacgcttagcggcccggcccgctttctctact

SEQ ID NO: 585095 - DNA, 75 bp, synthetic construct
  source 1..75: mol_type = other DNA
ttttaacgccggtgcgccagcagtagaggcatttatcgagaaagtcagccgtcgcagtaatttcgaatttggtcg

SEQ ID NO: 585096 - DNA, 75 bp, synthetic construct
  source 1..75: mol_type = other DNA
cgcttatctggtgctgggtctggtggcgctgggcttcaccttaatttccgtgttcacgcttagcggccccggccc

SEQ ID NO: 585097 - DNA, 75 bp, synthetic construct
  source 1..75: mol_type = other DNA
gtttgctaatttctttacttcgttctttgccaccggtgaacagggtacgcgggtatttggctacgtaacgacaat

SEQ ID NO: 585098 - DNA, 75 bp, synthetic construct
  source 1..75: mol_type = other DNA
gctccggatatcgtatggccagagctgatgaatcagggttatgtgcgggaggacgagcagataacttcagactga

SEQ ID NO: 585099 - DNA, 75 bp, synthetic construct
  source 1..75: mol_type = other DNA
gaagcccagcttcttagcgaaaatcaatctgtctatattccgcaaggcaccgttcattgtctggaaaatcccggg

SEQ ID NO: 585100 - DNA, 75 bp, synthetic construct
  source 1..75: mol_type = other DNA
caccttaatttccgtgttcacgcttagcggccccggtccgctttctctactacgtcgccaggtgaaggaagtcgc

SEQ ID NO: 585101 - DNA, 75 bp, synthetic construct
  source 1..75: mol_type = other DNA
cgtgttgatacatcaactgcacctgatgttgattggccagcagcaccgaagtgtaattcattagaactcatcacc

SEQ ID NO: 585102 - DNA, 75 bp, synthetic construct
  source 1..75: mol_type = other DNA
gtcgccgtatggagagtatcagaagtggaacggcacatcctgggtgaaagatgcagaagcagaaaaactgtttcg

SEQ ID NO: 585103 - DNA, 75 bp, synthetic construct
  source 1..75: mol_type = other DNA
gcatattgcgccacttcaggatgctgtagatctggaaatcgcaacggaggaagaaaactcgttgctggaagcctg

SEQ ID NO: 585104 - DNA, 75 bp, synthetic construct
  source 1..75: mol_type = other DNA
atgtcacctggttatccccggcaggggagtttcagaagtggaacggcacatcatggataaaggatacggaggaag

SEQ ID NO: 585105 - DNA, 75 bp, synthetic construct
  source 1..75: mol_type = other DNA
acagtgatgagtcatcgtggcatctcgttgaagatcatcggggtaaaacggtttatgacgtagcgtcaggggacg

SEQ ID NO: 585106 - DNA, 75 bp, synthetic construct
  source 1..75: mol_type = other DNA
gccagtgagcatattgcgccacttcaggatgctgtagatctggaaatcgcaacggaggaagaaacctcattgctg

SEQ ID NO: 585107 - DNA, 75 bp, synthetic construct
  source 1..75: mol_type = other DNA
tcggggtaaaaccgtctatgacgtggcatcaggggatgcgttatttatttctgaacccggtccgttaccggaaaa

SEQ ID NO: 585108 - DNA, 75 bp, synthetic construct
  source 1..75: mol_type = other DNA
cttcgacatccgccatgtgtcctgggacagctatatcgaggttggtggtaatcgttacagcgttcccgaagcgct

SEQ ID NO: 585109 - DNA, 75 bp, synthetic construct
  source 1..75: mol_type = other DNA
atgcgtccgtcaaaaagaacagttcgcttcgaaactcagcctggataccagctccagcacgactggagcgaagtt

SEQ ID NO: 585110 - DNA, 75 bp, synthetic construct
  source 1..75: mol_type = other DNA
taccttagcagctttagcagctcttgatgagtcagcgggagaagaccctttgttgcttgtcttatctgctgatca

SEQ ID NO: 585111 - DNA, 75 bp, synthetic construct
  source 1..75: mol_type = other DNA
gaataacaacggaaaagtcgtgttcaactctggcttcctgttgctggccgaccactataacttcctgccacgggc

SEQ ID NO: 585112 - DNA, 75 bp, synthetic construct
  source 1..75: mol_type = other DNA
atcgcaccgtctctgttcggctgcatacggctggcagaccgtgccggagcatcacgccccactctggcagcaggt

SEQ ID NO: 585113 - DNA, 75 bp, synthetic construct
  source 1..75: mol_type = other DNA
gataaccagaaagccgcagtgctgaaaaataacaacgggaaggtagtgttcaactccgggttcctgctgctggcc

SEQ ID NO: 585114 - DNA, 75 bp, synthetic construct
  source 1..75: mol_type = other DNA
gataatcagaaagcggccgtgctgaaaaatcacaacggcaatgtggtgttcaacgccggcttcctgcaactggcg

SEQ ID NO: 585115 - DNA, 75 bp, synthetic construct
  source 1..75: mol_type = other DNA
agcaggaacatctgcagccgttaccggatacggatgtcgataccagttactttgacatccgccatgtgtctaggg

SEQ ID NO: 585116 - DNA, 75 bp, synthetic construct
  source 1..75: mol_type = other DNA
cggtggttgtgtgaaaacggtgctggttgataaccagaaggctgcggtgctgaagaataacaacgggaaagtcgt

SEQ ID NO: 585117 - DNA, 75 bp, synthetic construct
  source 1..75: mol_type = other DNA
ctatcattatggctggtggttcaggcagtcggttgtggccactatcaagaattctctatccgaaacaatttctta

SEQ ID NO: 585118 - DNA, 75 bp, synthetic construct
  source 1..75: mol_type = other DNA
gctggctggagtgatgtcggttcatggtcttctctttgggaaattaatgataaagactcagacggcggtgatgct

SEQ ID NO: 585119 - DNA, 75 bp, synthetic construct
  source 1..75: mol_type = other DNA
agcgcgagctgcgccagttccggcaaacgccggcgacccgcttcgaggaagaaaaagcgcacctacaggcgttgc

SEQ ID NO: 585120 - DNA, 75 bp, synthetic construct
  source 1..75: mol_type = other DNA
gccgatgtggctgacaaacgggaacttcgccagttcaaagaaacgccggaacagcgcttcgcgctggagcaggaa

SEQ ID NO: 585121 - DNA, 75 bp, synthetic construct
  source 1..75: mol_type = other DNA
gcgctactacatccaacccaaacgtaaaatgcgtctgtcgaagaaaacggtccgcttcgaaacccagccgggata

SEQ ID NO: 585122 - DNA, 75 bp, synthetic construct
  source 1..75: mol_type = other DNA
aaaatggccaaactgaagccgttcatggactacatcgacacacgtctggccgagaacgtctggaatggtgaggtg

SEQ ID NO: 585123 - DNA, 75 bp, synthetic construct
  source 1..75: mol_type = other DNA
gccgccgctggtgatgatggcggcagtagaaggtgacaccctcgatcctgaagtggaacaacgctatcgtgatgc

SEQ ID NO: 585124 - DNA, 75 bp, synthetic construct
  source 1..75: mol_type = other DNA
ctacagtaatgagagactggtggcctcacatcgcctctgttcggcatcgtctggctggcagacagtgccggagca

SEQ ID NO: 585125 - DNA, 75 bp, synthetic construct
  source 1..75: mol_type = other DNA
tggattacatcgacatgcgcctggcagagaatgtctggaatagtgaggttatctttgcggagattaaggcaatgg

SEQ ID NO: 585126 - DNA, 75 bp, synthetic construct
  source 1..75: mol_type = other DNA
ctgccgtccgcgcagggccagaaccaaaggtaaggtggagcggatggtgaaatatctcaaggagaacttcttcgt

SEQ ID NO: 585127 - DNA, 75 bp, synthetic construct
  source 1..75: mol_type = other DNA
tatccccacagcagcgtgatgccttagcgttaacgttagacgccgtgcggctggtgtttgtcgatggacgttacg

SEQ ID NO: 585128 - DNA, 75 bp, synthetic construct
  source 1..75: mol_type = other DNA
acgcactgcaacagtggcatcatttgtttgaagctgaaggggtgaaacgttccccgcaagcacaacagcatttac

SEQ ID NO: 585129 - DNA, 75 bp, synthetic construct
  source 1..75: mol_type = other DNA
gctgccaggaggtgcaagattactttttccgtcgacaaagtgcgggccgactttccggtgctttcgcgtgaggta

SEQ ID NO: 585130 - DNA, 75 bp, synthetic construct
  source 1..75: mol_type = other DNA
caatgtcgcgccgcacgccattaaaactgacggtcagatgaccaacaataacttgttgatgggcaaactggcgga

SEQ ID NO: 585131 - DNA, 75 bp, synthetic construct
  source 1..75: mol_type = other DNA
tgatgatgagcaaatgttctatctgcgttctcgcgggatcaatcagcaggatgcccagcagatgatcatctatgc

SEQ ID NO: 585132 - DNA, 75 bp, synthetic construct
  source 1..75: mol_type = other DNA
cccagggcgtggcaggtgaagaggtgaacactgcccattaccggcatcatctggatctggcggaaggtgccgaag

SEQ ID NO: 585133 - DNA, 75 bp, synthetic construct
  source 1..75: mol_type = other DNA
atgcgaaacgaggggagagtttgcccgcatttgttcctgcggggcccgataatcccatggggctgtacgcgattt

SEQ ID NO: 585134 - DNA, 75 bp, synthetic construct
  source 1..75: mol_type = other DNA
ttgccgaagtctggctcgcaactcaccattccgcagcaactgattttgcccgccactgttcgtaaagggattgtg

SEQ ID NO: 585135 - DNA, 75 bp, synthetic construct
  source 1..75: mol_type = other DNA
gtccgggcgttgtcgatgagtatcattgcttatctggtagcactgaaattccagcttttccgcaacctggcatta

SEQ ID NO: 585136 - DNA, 75 bp, synthetic construct
  source 1..75: mol_type = other DNA
gtgactatgcgctgattatcagtacaggtgtgctggcaggtctgtgcggaccactgttgttaacgttaatgaacg

SEQ ID NO: 585137 - DNA, 75 bp, synthetic construct
  source 1..75: mol_type = other DNA
tgtggggcaacggctatagcaccgtacaatcctttttaaccgccccgccactgttaatgatcattgccgggatct

SEQ ID NO: 585138 - DNA, 75 bp, synthetic construct
  source 1..75: mol_type = other DNA
aagatcaatttattgatatgaaattcattacccagcttactggcctgagcgataaatggttctataagctgatac

SEQ ID NO: 585139 - DNA, 75 bp, synthetic construct
  source 1..75: mol_type = other DNA
ccggtcaggtgactgtcaacggtaagcagttcctgttgtccgagaaccagtccacctttattccgattggcgccg

SEQ ID NO: 585140 - DNA, 75 bp, synthetic construct
  source 1..75: mol_type = other DNA
tcatcagcatcccgcatgacattttctgcgagtgcccggacgagtccgtggactacgcggtgatggagaaaaccg

SEQ ID NO: 585141 - DNA, 75 bp, synthetic construct
  source 1..75: mol_type = other DNA
cgcctatcaactggaccaccaaagttgagcgtaagaaagcaggcccgacctggacgccgaccgccaaaatgcacg

SEQ ID NO: 585142 - DNA, 75 bp, synthetic construct
  source 1..75: mol_type = other DNA
gctgggttatctggctctctttcctcattgcgctgttactgcaaattatgccctggccggacaaccttattgttt

SEQ ID NO: 585143 - DNA, 75 bp, synthetic construct
  source 1..75: mol_type = other DNA
tgggcggcgtttcgctgctgctttatggtgtcatcggtgcttccggtattcgtgtgttgatcgaatcgaaagtgg

SEQ ID NO: 585144 - DNA, 75 bp, synthetic construct
  source 1..75: mol_type = other DNA
gttcgctaacggactgtcgacggtcatctccggcttctttggctctacaccaaacaccacctacggtgaaaacat

SEQ ID NO: 585145 - DNA, 75 bp, synthetic construct
  source 1..75: mol_type = other DNA
caatagtcggtattcttgcggcctttgccgttgccgcgtttcgtcacgcgatgctgctactggaatggctgttcc

SEQ ID NO: 585146 - DNA, 75 bp, synthetic construct
  source 1..75: mol_type = other DNA
tgccaccgttacgctggttaacgcctgctcttataccctggcgatgtccacctgccgcgaagtacgcgacggcga

SEQ ID NO: 585147 - DNA, 75 bp, synthetic construct
  source 1..75: mol_type = other DNA
ggttttctactgggcatggtgggtgatttacgctatccagatgagtatcttcctggcgcgtatttcccgtggtcg

SEQ ID NO: 585148 - DNA, 75 bp, synthetic construct
  source 1..75: mol_type = other DNA
tcggctgccgtactgttctggggatcaattgagatctactactacatttctactccgccgtttggcttagaaccg

SEQ ID NO: 585149 - DNA, 75 bp, synthetic construct
  source 1..75: mol_type = other DNA
aagttgggggctttcctgcccccatcaaaatggggcgcagctcccgctggctgaaaagtgaagtggaagcctggc

SEQ ID NO: 585150 - DNA, 75 bp, synthetic construct
  source 1..75: mol_type = other DNA
cgtggcgtgatgagcaggggatcgtacgggtagaaaaatcgcagtgcatcggctgcagttattgcattggcgctt

SEQ ID NO: 585151 - DNA, 75 bp, synthetic construct
  source 1..75: mol_type = other DNA
cgctggtaggtgaaaaacacgccaaagggttgttcggcactatcgtcgacaacttctatctcgtcgccttgatct

SEQ ID NO: 585152 - DNA, 75 bp, synthetic construct
  source 1..75: mol_type = other DNA
attacatggaagcgttgcaaaccgatgggcagtttgattacgcagcaagcctggttaaatcccttgcctctctgc

SEQ ID NO: 585153 - DNA, 75 bp, synthetic construct
  source 1..75: mol_type = other DNA
gcctggtggtgtgtttacaccgacactctttatcggtcttgccattggcatgttgtatggacgtagcctggggtt

SEQ ID NO: 585154 - DNA, 75 bp, synthetic construct
  source 1..75: mol_type = other DNA
aactggcattgggaggtttgatcgtgggtctgctttccctgctcactcctgccgtgtggggcaacggctatagta

SEQ ID NO: 585155 - DNA, 75 bp, synthetic construct
  source 1..75: mol_type = other DNA
tggtggtgatgcttttcggttggttctggctggtgtttggcccgtatgccaaaaagcgtttaggtaacgaaccac

SEQ ID NO: 585156 - DNA, 75 bp, synthetic construct
  source 1..75: mol_type = other DNA
cgcgcctaccgattatatggaggcattacagaccgatgggcagtttgattacgcctccagcctggtaaaatcact

SEQ ID NO: 585157 - DNA, 75 bp, synthetic construct
  source 1..75: mol_type = other DNA
atctgcgtaccatgttccgacgtctgattatcgcgacggtaacaggcatccttgcggctcttgctgttgcgggat

SEQ ID NO: 585158 - DNA, 75 bp, synthetic construct
  source 1..75: mol_type = other DNA
atgaccagatggtcgacatgacgtttatcactcaactgaccggcttaaccgataagtggttttacaaactcatca

SEQ ID NO: 585159 - DNA, 75 bp, synthetic construct
  source 1..75: mol_type = other DNA
gcacattgcgccacttcaggatgctgtagatttggagattgcaacggaggaagaagcatcgttgctgactgcatg

SEQ ID NO: 585160 - DNA, 75 bp, synthetic construct
  source 1..75: mol_type = other DNA
gaagaagtatcgggtgttgctgaaccgggttgatacatctttagcgccggaaattgagtggccgcagcaacctgt

SEQ ID NO: 585161 - DNA, 75 bp, synthetic construct
  source 1..75: mol_type = other DNA
tattactgatttttttgctttctttatcatttactacgcaagctgaacgaactttcaccgatcagattggtcggg

SEQ ID NO: 585162 - DNA, 75 bp, synthetic construct
  source 1..75: mol_type = other DNA
ggaaaggctgtcgccttgatgaactggttggattagcaatatttagacgtttttttattttcggctcgttcctta

SEQ ID NO: 585163 - DNA, 75 bp, synthetic construct
  source 1..75: mol_type = other DNA
catggagtggaacgtgcctggatgaattggtaagaaattctctttttcgtcatatttttagctgtattagctcag

SEQ ID NO: 585164 - DNA, 75 bp, synthetic construct
  source 1..75: mol_type = other DNA
gcagaacgactgttgaccaaatgggcaaagaatgttggtaacggcatgagtgttccgccagtgcgacgacaactg

SEQ ID NO: 585165 - DNA, 75 bp, synthetic construct
  source 1..75: mol_type = other DNA
gacctggctgagtttgtggcgctgatttcggagagtggggcaaatccatttggtctgacggtggatgctgtgatg

SEQ ID NO: 585166 - DNA, 75 bp, synthetic construct
  source 1..75: mol_type = other DNA
taagtacccgtggtctcagcctgtgctgtatcacatttgcctcgagatgcgttcaaaggggattgagcgccagat

SEQ ID NO: 585167 - DNA, 75 bp, synthetic construct
  source 1..75: mol_type = other DNA
atgacgcagaaagatattgatgacgcgccaatggtgccgagcatcccgccgctgctggcggcagataagcgctaa

SEQ ID NO: 585168 - DNA, 75 bp, synthetic construct
  source 1..75: mol_type = other DNA
tattcccccgatccggagacaactcgcatcgccgaagtgcccgcaagggccaacgccaattgaattactgaaaca

SEQ ID NO: 585169 - DNA, 75 bp, synthetic construct
  source 1..75: mol_type = other DNA
tcaaatccgcaatggcaggtaatagatgctgtcaaaaatcatcgtgtttatttgatgccagagtatgcaaaagca

SEQ ID NO: 585170 - DNA, 75 bp, synthetic construct
  source 1..75: mol_type = other DNA
tcctcgccgccgaccatatcatcaataaccagccggtcttccacgacgccatccgcgtcgccgagcagtatgccg

SEQ ID NO: 585171 - DNA, 75 bp, synthetic construct
  source 1..75: mol_type = other DNA
caaactcggccgcagctcccgatggctgaaaagtgaagtggaagcctggctgcaggcgcgtattgcacaatcccg

SEQ ID NO: 585172 - DNA, 75 bp, synthetic construct
  source 1..75: mol_type = other DNA
atgaccagatggtcgatatgacgtttatcactcaactgaccggcctgaccgataagtggttttacaagctcatca

SEQ ID NO: 585173 - DNA, 75 bp, synthetic construct
  source 1..75: mol_type = other DNA
gaaactgggacgcagttcccgctggttaaaaagcgaagtggaagcctggcttcaggaacgtattaaccagtcccg

SEQ ID NO: 585174 - DNA, 75 bp, synthetic construct
  source 1..75: mol_type = other DNA
caagctggggcgaagctcccgatggttaaaaagcgaagtcgaaaactggctacaggagcgaatcgaccagtcccg

SEQ ID NO: 585175 - DNA, 75 bp, synthetic construct
  source 1..75: mol_type = other DNA
gcagttcctgctgaccgagaaccagtccacctttattccgattggcgccgagcacagcctggaaaacccgggccg

SEQ ID NO: 585176 - DNA, 75 bp, synthetic construct
  source 1..75: mol_type = other DNA
ggacatgtttccgttatctctccggcccgccgcagacgcagcatgtgtttggtgtattcccggcggtccgggtca

SEQ ID NO: 585177 - DNA, 75 bp, synthetic construct
  source 1..75: mol_type = other DNA
cagaaccgttgaaggacacaacatgatcaaagttcttggctatgacagagatggagaataccaatttacaagcat

SEQ ID NO: 585178 - DNA, 75 bp, synthetic construct
  source 1..75: mol_type = other DNA
gagtctttaccgcgtcaggaaaaaatgaatgcgcttgcgaaatttctaaatgttgatgttgtttggcttcagcac

SEQ ID NO: 585179 - DNA, 75 bp, synthetic construct
  source 1..75: mol_type = other DNA
aaaaaactgacagccaaacaactgcaacaggctgaattattatcgcaacaatatatagaaaaatatgccccgtaa

SEQ ID NO: 585180 - DNA, 75 bp, synthetic construct
  source 1..75: mol_type = other DNA
ggtctgaccgagcgcgaactgcgtaccaacaatcaacagttgacggcaggccagcgtttataccagcagcttggt

SEQ ID NO: 585181 - DNA, 75 bp, synthetic construct
  source 1..75: mol_type = other DNA
ttgcttcagctcaaccagccggtaacgccaacaaccgtttgttctacggcggcaagtttctgccgtggcctgacc

SEQ ID NO: 585182 - DNA, 75 bp, synthetic construct
  source 1..75: mol_type = other DNA
agatccatcgaagatacatacagccagaatacataattgctcaagccaaattccgaggacaacaggttagtcatt

SEQ ID NO: 585183 - DNA, 75 bp, synthetic construct
  source 1..75: mol_type = other DNA
tccatgactacgggtttacctttctggcagaccggctggggataaccatgaagacggtatgtgcgcatctttaca

SEQ ID NO: 585184 - DNA, 75 bp, synthetic construct
  source 1..75: mol_type = other DNA
tgctgattcagagcggtgactttgttctgaataccggtaatgaacctgaattatgtaataaccgaaaaagtatcg

SEQ ID NO: 585185 - DNA, 75 bp, synthetic construct
  source 1..75: mol_type = other DNA
atgaggaagcggcaggccgcgtcattgtgacggcagaaacgtatgaattcggactgattgatcctgttgaggttg

SEQ ID NO: 585186 - DNA, 75 bp, synthetic construct
  source 1..75: mol_type = other DNA
atcacctgctggacgcgccagcagatggaaggtcacgccagtcgcgtacaacaaacgttgcccttagccgttcag

SEQ ID NO: 585187 - DNA, 75 bp, synthetic construct
  source 1..75: mol_type = other DNA
gccagggggtgaaattaaagttcgacgattttcagcaaaccactcaggagcacgtctggccgcggctgaataaag

SEQ ID NO: 585188 - DNA, 75 bp, synthetic construct
  source 1..75: mol_type = other DNA
ggaagcgatggggctgcggacctgcggtgatgtgcaaaagtgtgatctggtgatgctgcttaaacgctttggcaa

SEQ ID NO: 585189 - DNA, 75 bp, synthetic construct
  source 1..75: mol_type = other DNA
gcgtccaagccgccatctgaataaagcgcactggagcaccgtgtatctcgacggttcgctgccggaagaaaaacg

SEQ ID NO: 585190 - DNA, 75 bp, synthetic construct
  source 1..75: mol_type = other DNA
gaaaataaccttcaaaaggcataaagaattattgccagagtcaattcaaaaaagcggcgtaaataaaatatatga

SEQ ID NO: 585191 - DNA, 75 bp, synthetic construct
  source 1..75: mol_type = other DNA
ggcgggaaagttattgtaaaagacaggagtaaaagaaccaatatttcaggatattttaaaggcttcttaaatgtt

SEQ ID NO: 585192 - DNA, 75 bp, synthetic construct
  source 1..75: mol_type = other DNA
cctggatattgcggaacatcgcctgccgcaggatgggcaattcactgtcgaactggcggataacacagtctcatt

SEQ ID NO: 585193 - DNA, 75 bp, synthetic construct
  source 1..75: mol_type = other DNA
ttaacagcgaacggttgcgaaaatccgtcggcgtggaacgcacgatggcggaagatattcatcactggtctgaat

SEQ ID NO: 585194 - DNA, 75 bp, synthetic construct
  source 1..75: mol_type = other DNA
aaggtaaaacctgatttactgattgcccgacagggggtgaaattaaagttcgacgattttcagcaaaccactcag

SEQ ID NO: 585195 - DNA, 75 bp, synthetic construct
  source 1..75: mol_type = other DNA
gccaccaactggattgccaacatgatcgttggcgcaacgttcctgaccatgctcaacacgctgggtaacgccaac

SEQ ID NO: 585196 - DNA, 75 bp, synthetic construct
  source 1..75: mol_type = other DNA
acgcgacggctggctggcgggcgtgacctggttccgtaacgattatcgcaataagattgaagcgggctatgtggc

SEQ ID NO: 585197 - DNA, 75 bp, synthetic construct
  source 1..75: mol_type = other DNA
agccgccagggtaacctgtatgcgggcgacacccagaacaccaactccgattcctatacccgctcgaaatatggc

SEQ ID NO: 585198 - DNA, 75 bp, synthetic construct
  source 1..75: mol_type = other DNA
atgactgtgatgtgggcactggaagctgataccgtagaatacggtgaatacctgaccggcgtgcgaattgaaggg

SEQ ID NO: 585199 - DNA, 75 bp, synthetic construct
  source 1..75: mol_type = other DNA
caccaaaaaaggcagtggcgagtggcacggttcctgggatgcttatttcaatgcccctgaacataaagaggaagg

SEQ ID NO: 585200 - DNA, 75 bp, synthetic construct
  source 1..75: mol_type = other DNA
gggccaactatatcgcgggtgccggggcgtatacctataacgagccgggacgtacgtggtatatgagcgtaaaca

SEQ ID NO: 585201 - DNA, 75 bp, synthetic construct
  source 1..75: mol_type = other DNA
ggcgttaacctgaccggtaactccaccagtggtcagcgtgggaataaccgacaaattgatattcgcggcatgggt

SEQ ID NO: 585202 - DNA, 75 bp, synthetic construct
  source 1..75: mol_type = other DNA
ctattatcatgctaattcttagatccctagcgattattcctgcctggttcgtcagcttaggccatgagattgtta

SEQ ID NO: 585203 - DNA, 75 bp, synthetic construct
  source 1..75: mol_type = other DNA
ccatttgccacaaaatggctatttcatggaacacagtaatttcttagtggctattatcaagctaattcttaggtc

SEQ ID NO: 585204 - DNA, 75 bp, synthetic construct
  source 1..75: mol_type = other DNA
gttggcgcaacgttcctgaccatgctcaacacgctgggcaacgctaataccttctgggtttacgcgggtctgaac

SEQ ID NO: 585205 - DNA, 75 bp, synthetic construct
  source 1..75: mol_type = other DNA
ataccttcctgattggcgctttgctgggaacctgcggttatctgctattcttctgggtttccgtctggtcactgc

SEQ ID NO: 585206 - DNA, 75 bp, synthetic construct
  source 1..75: mol_type = other DNA
cctagcgattattcctggctggttcgtcagcttaggccatgagattgttacattcctttttatcctggagatatg

SEQ ID NO: 585207 - DNA, 75 bp, synthetic construct
  source 1..75: mol_type = other DNA
atggaacacagtaatttcttagtggctattatcatgctaattcttagatccctagcgattattcctgcctggttc

SEQ ID NO: 585208 - DNA, 75 bp, synthetic construct
  source 1..75: mol_type = other DNA
atgttcttgacgaaaagttatctgaagaacaaatgcctactttagaaagatttcatgaaactttcgtaaaaaaag

SEQ ID NO: 585209 - DNA, 75 bp, synthetic construct
  source 1..75: mol_type = other DNA
taacagcgagtgggggactgggggaaataccgcaggatactctttctggcatacgaacactggcttttaacggag

SEQ ID NO: 585210 - DNA, 75 bp, synthetic construct
  source 1..75: mol_type = other DNA
ggatgtcaacacgctgggaatgcagccgttacaactggcggactttgctcatgccttgcaacaaccacagggact

SEQ ID NO: 585211 - DNA, 75 bp, synthetic construct
  source 1..75: mol_type = other DNA
ttttgatactgattcttgatcagttcattgagagcactccagtaatcgaactggttaaaaatcgattggctctca

SEQ ID NO: 585212 - DNA, 75 bp, synthetic construct
  source 1..75: mol_type = other DNA
gactgctattactcctgctgaagcggcaactgcatgtaaaaaacctgattcaaccaataaagttacatattttat

SEQ ID NO: 585213 - DNA, 75 bp, synthetic construct
  source 1..75: mol_type = other DNA
attactccatcagatgctgcaggtagtggcggctgtaaagatggcaatgaaaacaaagtaacttattttatgaaa

SEQ ID NO: 585214 - DNA, 75 bp, synthetic construct
  source 1..75: mol_type = other DNA
agattcagatgtatgtactttatatgataaagaatcattaaaacatcttgttaacacaagttcacctcatcctct

SEQ ID NO: 585215 - DNA, 75 bp, synthetic construct
  source 1..75: mol_type = other DNA
ataatggaagaagccaaagatgaactacgactgatgggtggctggagtccgacaagtcaaatgcctgatctatat

SEQ ID NO: 585216 - DNA, 75 bp, synthetic construct
  source 1..75: mol_type = other DNA
aatttaaaaggtgataagtttagtttgattgtgacaactgtcgacgaggcatacgaaccaagaaagaatgcgcca

SEQ ID NO: 585217 - DNA, 75 bp, synthetic construct
  source 1..75: mol_type = other DNA
gagaagttcaattcagaaattatttaatctgtcgtcttcttttgaattatggtttgcgagtaagtgaattgctcc

SEQ ID NO: 585218 - DNA, 75 bp, synthetic construct
  source 1..75: mol_type = other DNA
aaaaacccactcaatcccttccccgctggtgaaatccagctacgtaattttctgatttgcagattgcttttaaat

SEQ ID NO: 585219 - DNA, 75 bp, synthetic construct
  source 1..75: mol_type = other DNA
aggaagccaaggatgaattacgactgctcggcggctggagccacaatagccatatgccagatgtttatgcaaaaa

SEQ ID NO: 585220 - DNA, 75 bp, synthetic construct
  source 1..75: mol_type = other DNA
tgccgatattaagcgggtcactgaaatggtgattacggaaaaattacatcatgcgacgtctcgggtcgttgaaat

SEQ ID NO: 585221 - DNA, 75 bp, synthetic construct
  source 1..75: mol_type = other DNA
gcttctactaattcatttaatacttcagccactagtagtaacgctaaatcgtcagctattactcctgctgaggcg

SEQ ID NO: 585222 - DNA, 75 bp, synthetic construct
  source 1..75: mol_type = other DNA
caaaatcatacatgcctcaagctattcatgatttcgtagaagcaagtaattttaataagaaatatatacatgttc

SEQ ID NO: 585223 - DNA, 75 bp, synthetic construct
  source 1..75: mol_type = other DNA
tctgatggggaagaagttacatttgagctaaatgaaaataacaagaaaactttatttaagttaacaaaaggtgaa

SEQ ID NO: 585224 - DNA, 75 bp, synthetic construct
  source 1..75: mol_type = other DNA
tcaccctgaacatgggggttggtgaagcgatcgctgacaaaaaactgctggataacgcagcagcagacctggcag

SEQ ID NO: 585225 - DNA, 75 bp, synthetic construct
  source 1..75: mol_type = other DNA
aactgaatgaaaacaacaacaaaaaatcgtttaagttagctaaaggtgaatcactgtctaagacgcatagtgcga

SEQ ID NO: 585226 - DNA, 75 bp, synthetic construct
  source 1..75: mol_type = other DNA
agctgtaaaaccatttatcatcattgacgaaccacatagatttcctactggtaaaaaaacatgggaaaacataga

SEQ ID NO: 585227 - DNA, 75 bp, synthetic construct
  source 1..75: mol_type = other DNA
ctttcctccagaacactcttgaatgaaatttttgatgatgagatcattgatgataatgataacttcaaagattca

SEQ ID NO: 585228 - DNA, 75 bp, synthetic construct
  source 1..75: mol_type = other DNA
tacagcgagtagcggtaccgcgaaaaacagcgctattactccaggagaggctgcaagctcctgcgatgggagtaa

SEQ ID NO: 585229 - DNA, 75 bp, synthetic construct
  source 1..75: mol_type = other DNA
aaatcaataataaaaaagaagaaaaagggctatcgttgattgaatcagcaatggttttggctctggcagctacag

SEQ ID NO: 585230 - DNA, 75 bp, synthetic construct
  source 1..75: mol_type = other DNA
acacaatcagctatttctgaagtaatgagtgcaacttcagcaattaatggtttatatattgggcaaagtggttac

SEQ ID NO: 585231 - DNA, 75 bp, synthetic construct
  source 1..75: mol_type = other DNA
atggcgaaactgcatgattactacaaagacgaagtagttaaaaaactcatgactgagtttaactacaattctgtc

SEQ ID NO: 585232 - DNA, 75 bp, synthetic construct
  source 1..75: mol_type = other DNA
ttgtgatcaactcagggatgattaactctaagtctttaactgaaacttatgatgttggcttgcttgataatcagt

SEQ ID NO: 585233 - DNA, 75 bp, synthetic construct
  source 1..75: mol_type = other DNA
cttactcttttcttcattgatgatattgaagggtatcgtgatggtaatgatattgccggaagtctgaaaaccaag

SEQ ID NO: 585234 - DNA, 75 bp, synthetic construct
  source 1..75: mol_type = other DNA
ctttatggagaacggatacgacgattttaaggccaagctattgacggctggagatttacgcatgggcgatctcta

SEQ ID NO: 585235 - DNA, 75 bp, synthetic construct
  source 1..75: mol_type = other DNA
aaaggctgttctgaaaatggttgtcaggcaattatgcgtgcgcgtgagaaagttggtggcaaattcgagtcagtg

SEQ ID NO: 585236 - DNA, 75 bp, synthetic construct
  source 1..75: mol_type = other DNA
tgaaggatgcgctgacctatggcattcgcgtattgccaccagacgttaatgtgtcatctaaccgaattgagatcc

SEQ ID NO: 585237 - DNA, 75 bp, synthetic construct
  source 1..75: mol_type = other DNA
attccatcattaaactatcaaaataatttagaagagaggttggaaccgaatgaaattgttaagattgaaaatgat

SEQ ID NO: 585238 - DNA, 75 bp, synthetic construct
  source 1..75: mol_type = other DNA
tccgccagttccggtaactccggatggttggataagctgtagtgatcgaatgccagaaatgggagagcgacaata

SEQ ID NO: 585239 - DNA, 75 bp, synthetic construct
  source 1..75: mol_type = other DNA
tctctatcaggaacagacgatgaacgcgactcgattgcttgccggcttcacaatggctgaagctgacggtgttcg

SEQ ID NO: 585240 - DNA, 75 bp, synthetic construct
  source 1..75: mol_type = other DNA
acgtaactactcgtttaccgctctaattaaaaatgagcaaggatatcgcgacatctgcgaactaatgacggtggc

SEQ ID NO: 585241 - DNA, 75 bp, synthetic construct
  source 1..75: mol_type = other DNA
cattcaatgcagcctgcaagttacaaagccttatgcgtggctttggtagacatgcggcagggatgatcgtagcag

SEQ ID NO: 585242 - DNA, 75 bp, synthetic construct
  source 1..75: mol_type = other DNA
tcgaccagccgcatcgtctgcgtatcccccaccagcgagataacgccgtcaatggtcgccgccatctccttgagg

SEQ ID NO: 585243 - DNA, 75 bp, synthetic construct
  source 1..75: mol_type = other DNA
cagaccttgacgttacagtcttttacgggtttaaccccaacattctttacttcagacctgaagagggagaacgac

SEQ ID NO: 585244 - DNA, 75 bp, synthetic construct
  source 1..75: mol_type = other DNA
cagcacgcctactttgtgctgatggtgagcgtcgcacttatgccgaagcaatggcaataaatgccgacataacga

SEQ ID NO: 585245 - DNA, 75 bp, synthetic construct
  source 1..75: mol_type = other DNA
ggttgagcgccgtggtgacgcgcgttgtatcgcatttgacaagcgttactgcgaggctatgggcctaattaagct

SEQ ID NO: 585246 - DNA, 75 bp, synthetic construct
  source 1..75: mol_type = other DNA
cttgaggggaaggcgcggatttctcagggcgtacttgtactgcagcaggaacgagggcactgcctgttcctggga

SEQ ID NO: 585247 - DNA, 75 bp, synthetic construct
  source 1..75: mol_type = other DNA
ggcatatgattgccctcgtatgctttatcactgtaatcaattatctggacagaacggcgttaggtattgcggctc

SEQ ID NO: 585248 - DNA, 75 bp, synthetic construct
  source 1..75: mol_type = other DNA
attttagcctgaaagaaattgccatgttcgtctggctacctttcctgttgggcgaccttggctgtttagccagtg

SEQ ID NO: 585249 - DNA, 75 bp, synthetic construct
  source 1..75: mol_type = other DNA
ctttattgccctggctttctttgacattattggcgccattgcgctgtggacgcttatcaaagttaaagatgaaga

SEQ ID NO: 585250 - DNA, 75 bp, synthetic construct
  source 1..75: mol_type = other DNA
ccttgaacctggcaccctgcaaggctatgaccgtgacccgcgttccatcgcgaagcgcgctgaagattacctgcg

SEQ ID NO: 585251 - DNA, 75 bp, synthetic construct
  source 1..75: mol_type = other DNA
tctccgaaagcgcgtcgtatcgaagtgcgtttcccggacccggcggctaacccgtacctgtgctttgctgccctg

SEQ ID NO: 585252 - DNA, 75 bp, synthetic construct
  source 1..75: mol_type = other DNA
attattggcgccattgcgctgtggacgcttatcaaagttaaagatgaagatgaagaaccgcaagtacagttagcg

SEQ ID NO: 585253 - DNA, 75 bp, synthetic construct
  source 1..75: mol_type = other DNA
tgttcacctctttgttactttaccacttagccagttctatactgctttaggggaaacgaatattgaaaatattca

SEQ ID NO: 585254 - DNA, 75 bp, synthetic construct
  source 1..75: mol_type = other DNA
gttttccttgttggtggaggttcttacctgattgaaccggcagttcgtaaacattttgacaaatcgaaaatcatc

SEQ ID NO: 585255 - DNA, 75 bp, synthetic construct
  source 1..75: mol_type = other DNA
ctttattgcactggcggtatttgacctgattggtgctgtagccttatggatactgataaaagacaacaaacagac

SEQ ID NO: 585256 - DNA, 75 bp, synthetic construct
  source 1..75: mol_type = other DNA
ctggcatttatgcgcgccctgatgggtttcagcgaagcgtcggcaattccggcgggtgtaaaaaccgcatcaaca

SEQ ID NO: 585257 - DNA, 75 bp, synthetic construct
  source 1..75: mol_type = other DNA
accgtgaaagcctgttctgggttaatgttaaagctattcctgctatggaaaaagatcagaagaatgagaataagt

SEQ ID NO: 585258 - DNA, 75 bp, synthetic construct
  source 1..75: mol_type = other DNA
gctgtgaacattgctaccacggtttctatggccgcacagccttatttgaagttctgcccattacgccagcaataa

SEQ ID NO: 585259 - DNA, 75 bp, synthetic construct
  source 1..75: mol_type = other DNA
aacgcggtgcgtgacgttgccgtcaacggcacacgtctgcaaacgctcaacgacgagcgagagatgcaggctgaa

SEQ ID NO: 585260 - DNA, 75 bp, synthetic construct
  source 1..75: mol_type = other DNA
acgtcccagccgacatctgaataaagcgcactggagtaccgtatatctcgacggatcgttgccggattcgcaaat

SEQ ID NO: 585261 - DNA, 75 bp, synthetic construct
  source 1..75: mol_type = other DNA
gcgacgcaaatcaaagtggaagatgtgctgtttgcgatggtgaaagaagtggaaaatcgcccggcggtttcgctg

SEQ ID NO: 585262 - DNA, 75 bp, synthetic construct
  source 1..75: mol_type = other DNA
gatattaaccagggtcatcagtccgcgcgtgccggaacctatgcaactaccctaccagccgggcgcgaaggggtg

SEQ ID NO: 585263 - DNA, 75 bp, synthetic construct
  source 1..75: mol_type = other DNA
cgtcattatgttgggaatgctggtcattattctctgcggtatccgttttgccgccgagatcatcgtgccgtttat

SEQ ID NO: 585264 - DNA, 75 bp, synthetic construct
  source 1..75: mol_type = other DNA
ctttctcggatttgccgtcagacctgtaggcggaattatcttcggctcattaggtgatcgtttgggccgtaagtt

SEQ ID NO: 585265 - DNA, 75 bp, synthetic construct
  source 1..75: mol_type = other DNA
tgctttttgcgatggtgaaagaggttgaaaatcgcccagctgtttcgctgaaaaccagcccggagctggcagagt

SEQ ID NO: 585266 - DNA, 75 bp, synthetic construct
  source 1..75: mol_type = other DNA
cgctgacgctgggtacggagtggaatcagcaacggatgaaggacttaagttccaatacccaggcgctgaccggga

SEQ ID NO: 585267 - DNA, 75 bp, synthetic construct
  source 1..75: mol_type = other DNA
gatattaacaaaggtcatcagtccgcacgtgcaggaacctatgcaactaccctaccagccgggcgcgaaggggtg

SEQ ID NO: 585268 - DNA, 75 bp, synthetic construct
  source 1..75: mol_type = other DNA
aagcaggctatgttgctgtagggcaaaacgcagtcggcaccgatctctatcagtgggataacgtgccgaaagcgg

SEQ ID NO: 585269 - DNA, 75 bp, synthetic construct
  source 1..75: mol_type = other DNA
gtgaaaacaaaaccacgggcgaccgtttgtcgatcatcccggagtatacgttgaactcaacgctgagctggcagg

SEQ ID NO: 585270 - DNA, 75 bp, synthetic construct
  source 1..75: mol_type = other DNA
taaccagacgctgacgctgggtacggagtggaatcagcaacggatgaaggacttaagttccaacacccaggcgct

SEQ ID NO: 585271 - DNA, 75 bp, synthetic construct
  source 1..75: mol_type = other DNA
gagcgcgatacccgtggtgatacttcctgggtgccgcctgaaatgattgaacgtattgaagttctgcgtggtccg

SEQ ID NO: 585272 - DNA, 75 bp, synthetic construct
  source 1..75: mol_type = other DNA
gttactcagcttgatgtgaatgagcttgccgagcgatacatcaacgcaactgagccgaagcctagcgacagcagc

SEQ ID NO: 585273 - DNA, 75 bp, synthetic construct
  source 1..75: mol_type = other DNA
tggcggtcgataaacaaattgctgccgtcaaagggcaaatcaccgaaacgcgagaatctctgcgtgcattgattg

SEQ ID NO: 585274 - DNA, 75 bp, synthetic construct
  source 1..75: mol_type = other DNA
tgttgttgtgcagcattctcggcagcacgacgctgatttccggctgtgcgttagtgcgtaaggattcagcccctc

SEQ ID NO: 585275 - DNA, 75 bp, synthetic construct
  source 1..75: mol_type = other DNA
ctgttctacccgagctttgatatcaaagcgtttttcggccttgatgccatccacctggataccttattcaaaaaa

SEQ ID NO: 585276 - DNA, 75 bp, synthetic construct
  source 1..75: mol_type = other DNA
tatcgctgaccactggcgtcgcacagctttattacagcattcaggccagttaccagatgctcgatctgttagagc

SEQ ID NO: 585277 - DNA, 75 bp, synthetic construct
  source 1..75: mol_type = other DNA
gaagcgcaagtgcctttccacggcgcgcgggcacagattctggcggtcgataaacaaattgctgccgttaaaggg

SEQ ID NO: 585278 - DNA, 75 bp, synthetic construct
  source 1..75: mol_type = other DNA
ctcgatttgtggggtgtgcatcgctcagcggttgccgccgccattggcgcgcataatgccgcgctggcagaaacc

SEQ ID NO: 585279 - DNA, 75 bp, synthetic construct
  source 1..75: mol_type = other DNA
ctgaaattctggctggatggtgttaatcgtcaggagctactgcgtttaatccgcaaacaggcgaaaggcgatgag

SEQ ID NO: 585280 - DNA, 75 bp, synthetic construct
  source 1..75: mol_type = other DNA
cgtattacggaaacttgttacgtatttatttaagccctcttgtatggtggctggtgagttatttattacgccata

SEQ ID NO: 585281 - DNA, 75 bp, synthetic construct
  source 1..75: mol_type = other DNA
aaagcgtcaataaatcaagcaatctacctgataaggcgatggaatatctgaagcagaacggactggttggtgtgg

SEQ ID NO: 585282 - DNA, 75 bp, synthetic construct
  source 1..75: mol_type = other DNA
ctggtgaactattcattgcgccatagccagttagaaaccgtgaacggttttatcgcctaccgccagaagcaaatg

SEQ ID NO: 585283 - DNA, 75 bp, synthetic construct
  source 1..75: mol_type = other DNA
gccagttagaaagcgtaagcggttttattgcctatcggcaaaagcaaatgcacctcctgaaagagattattgcca

SEQ ID NO: 585284 - DNA, 75 bp, synthetic construct
  source 1..75: mol_type = other DNA
tatgatgcaccgttggcgctggatagcgatattcgtcagcgcttagagctgctgatttcgcgttttccgctatag

SEQ ID NO: 585285 - DNA, 75 bp, synthetic construct
  source 1..75: mol_type = other DNA
tacctggataaagagcagtaaaggcatccgggttccgaccacgaagaaatcacttccgaaaattatcagcgtgca

SEQ ID NO: 585286 - DNA, 75 bp, synthetic construct
  source 1..75: mol_type = other DNA
gcaaccaaattacttaaagcctaccgagagcataacgcagataaatataaagttgatgtgttaccaggccagctg

SEQ ID NO: 585287 - DNA, 75 bp, synthetic construct
  source 1..75: mol_type = other DNA
aattgctgcgtaattttttacgttgcaccaactgggaagaaaaatacctctacattattgagctgggccagcgtc

SEQ ID NO: 585288 - DNA, 75 bp, synthetic construct
  source 1..75: mol_type = other DNA
cggtggaatactattaaaccaggtcgtagttttttgttgagtataaccttaaatgatatgtatgcctttatacca

SEQ ID NO: 585289 - DNA, 75 bp, synthetic construct
  source 1..75: mol_type = other DNA
gccatcggtattaatccggtaacgggatatggcagcggattgatgcaggtagactcccagcattttaacgaactg

SEQ ID NO: 585290 - DNA, 75 bp, synthetic construct
  source 1..75: mol_type = other DNA
gtggagtgggttaaattatttcctgatgacgtcaccagaggtgagaaaatgagaaaatggcttctgacgatctgc

SEQ ID NO: 585291 - DNA, 75 bp, synthetic construct
  source 1..75: mol_type = other DNA
ccgtcatggtggcggtatttattctgcccggctgctcgacatcgaaagaggagcttctgcctccgggtgaacaga

SEQ ID NO: 585292 - DNA, 75 bp, synthetic construct
  source 1..75: mol_type = other DNA
attcgctggtggacttctgcggctatctcatggcgtcggtaatgtgtgatggcctgttagtgggtaatgctgaaa

SEQ ID NO: 585293 - DNA, 75 bp, synthetic construct
  source 1..75: mol_type = other DNA
ctgctgtatgagcagcagaaatcagaagaagctctggtgataaaacgcgagggcgattcgctggtggacttctgc

SEQ ID NO: 585294 - DNA, 75 bp, synthetic construct
  source 1..75: mol_type = other DNA
aattgctgcgtaattttttacgctgcgccaactgggaagagaaatatctctacattattgagctgggccagcgtc

SEQ ID NO: 585295 - DNA, 75 bp, synthetic construct
  source 1..75: mol_type = other DNA
gtgattccgagtttaaaaaggccttctctactaacgaactaatttctttaagcacatgtagttcatctgattatt

SEQ ID NO: 585296 - DNA, 75 bp, synthetic construct
  source 1..75: mol_type = other DNA
cggctgtgccacctccaaagaggaactgctgccggcgggaaacagcgacatgatggccatctggtcaggcagaca

SEQ ID NO: 585297 - DNA, 75 bp, synthetic construct
  source 1..75: mol_type = other DNA
caatgctggattcaggaagaccgaacgccagaaccagagacgtcttgcctacgcatcagatgtttaccggattta

SEQ ID NO: 585298 - DNA, 75 bp, synthetic construct
  source 1..75: mol_type = other DNA
cagcgggataaaaaacagcaaggggatccagcttcgtgcatctgaaaaaccgctttcaaaaatgaacagctcgca

SEQ ID NO: 585299 - DNA, 75 bp, synthetic construct
  source 1..75: mol_type = other DNA
ctgagagcaatttcatggcatgaatcccgtaacagggttaatgctatcggcattaaccctgttacgggattcggc

SEQ ID NO: 585300 - DNA, 75 bp, synthetic construct
  source 1..75: mol_type = other DNA
ccagagacgtcttgcctacgcatcagatgtttaccggatttataccgggataaaaagcagtaaaggtatccggat

SEQ ID NO: 585301 - DNA, 75 bp, synthetic construct
  source 1..75: mol_type = other DNA
atgcaggtagattcccagcattttaacgaactggcccgctatggaattaagccggaacatctgacaacagatccc

SEQ ID NO: 585302 - DNA, 75 bp, synthetic construct
  source 1..75: mol_type = other DNA
taaatgggatctgcgaagccgccgattgctttgatcttgcaggtcgggattacaaaatagacccggatttactga

SEQ ID NO: 585303 - DNA, 75 bp, synthetic construct
  source 1..75: mol_type = other DNA
atcttacagcagatccctgtctgaacatttataccggtgcttattatctggctatagcctttaaaaaatggggag

SEQ ID NO: 585304 - DNA, 75 bp, synthetic construct
  source 1..75: mol_type = other DNA
ttatctggcaatagcgtttaaaaaatggggcgtcacctgggaggccgttggtgcatacaatgcgggattcaggaa

SEQ ID NO: 585305 - DNA, 75 bp, synthetic construct
  source 1..75: mol_type = other DNA
ttatctggcaatagcctttaaaaaatggggcgtcgcctgggaggccgttggtgcatacaatgcaggattcaggaa

SEQ ID NO: 585306 - DNA, 75 bp, synthetic construct
  source 1..75: mol_type = other DNA
ttatctggcaatagcatttaaaaaatggggcgtcgcctgggaggccgttggtgcatacaatgccggattcaggaa

SEQ ID NO: 585307 - DNA, 75 bp, synthetic construct
  source 1..75: mol_type = other DNA
cgggataaagagcagtaaaggcatccaggttccgaccacgaagaaatcccccccccaaattaacagtgtgcagaa

SEQ ID NO: 585308 - DNA, 75 bp, synthetic construct
  source 1..75: mol_type = other DNA
gaaagaatcccgttaccgggttaatgccattggtattaatccggtaacgggatatggcagcggactgatgcaggt

SEQ ID NO: 585309 - DNA, 75 bp, synthetic construct
  source 1..75: mol_type = other DNA
aaagacataacaagtcaaagtcctggagatgcagttattgaactaaatgaaaggtttagagaacatggggttggt

SEQ ID NO: 585310 - DNA, 75 bp, synthetic construct
  source 1..75: mol_type = other DNA
tgacaaggtggcaatcgacccgaagcataaagccccctactcaacacgcattcaggcggtcgtgctggcggtgaa

SEQ ID NO: 585311 - DNA, 75 bp, synthetic construct
  source 1..75: mol_type = other DNA
cgaatatccgcattgtcgacgatgaacgccgctttgcgcgtgtctatctcgcgggggagatagagccaatccaga

SEQ ID NO: 585312 - DNA, 75 bp, synthetic construct
  source 1..75: mol_type = other DNA
atcacctgctggacgcgccagcaaatggaaggccatgccagccgctcacaacaaacgttgcccgtaaccgttcag

SEQ ID NO: 585313 - DNA, 75 bp, synthetic construct
  source 1..75: mol_type = other DNA
ccaaacagcttttgcatgagcagcaaaaatcagaagaagcgctggccattaaacgtgaaggggattcactggtgg

SEQ ID NO: 585314 - DNA, 75 bp, synthetic construct
  source 1..75: mol_type = other DNA
aaagagctacagcgcacaatggcgcaaatcttcattgacgaagatatctgctattcacaaaacgccattaaatcg

SEQ ID NO: 585315 - DNA, 75 bp, synthetic construct
  source 1..75: mol_type = other DNA
cgtgagcgccagaatctttctgatggtctggttattcagcttcctgttaagaaaaaaacagaagacagcgccgca

SEQ ID NO: 585316 - DNA, 75 bp, synthetic construct
  source 1..75: mol_type = other DNA
tagccacaaaaaatattgacctatccaggccagcactaaatcagatgggagccagccagagaggggaagtgttac

SEQ ID NO: 585317 - DNA, 75 bp, synthetic construct
  source 1..75: mol_type = other DNA
agtagtaaaaataattttgtttttacagagagctgtttggttagtttggttggtgttgaaaaacttgtagtcgta

SEQ ID NO: 585318 - DNA, 75 bp, synthetic construct
  source 1..75: mol_type = other DNA
gatgcaaaattttaccccgaaggaatgcacggtcagaagtgtgaaaactggcggcgctatctgaatgctgagcgt

SEQ ID NO: 585319 - DNA, 75 bp, synthetic construct
  source 1..75: mol_type = other DNA
ccgaactttatgcactgcaaattgttcctgatggaaaaaaacgcgtaaggctgtaccaggcaggagaactggact

SEQ ID NO: 585320 - DNA, 75 bp, synthetic construct
  source 1..75: mol_type = other DNA
cttcagttaatcagtgctgacggccgtaagcgcaccctgaaaggcggacaggtcaggggcacctgtcacaccctt

SEQ ID NO: 585321 - DNA, 75 bp, synthetic construct
  source 1..75: mol_type = other DNA
gtttctcgatatggtgaccggtcagtttattgctgacttaattagctggggcgcgattggcgcacgcactaccga

SEQ ID NO: 585322 - DNA, 75 bp, synthetic construct
  source 1..75: mol_type = other DNA
gtttctcgatatggtgaccggtcagtttattgccgatctgattagctggggggcgattggcgcacgcacaaccga

SEQ ID NO: 585323 - DNA, 75 bp, synthetic construct
  source 1..75: mol_type = other DNA
ggagatttgtaccatgctggcgggtaaggccaacacggtatcggcaagcatgaaggcactggaggatgcaaggga

SEQ ID NO: 585324 - DNA, 75 bp, synthetic construct
  source 1..75: mol_type = other DNA
tgggacgtttctcctgcagtgagtaaaatgcaaaatacagttgtgctgccctatctggcaacaaatcagctctcg

SEQ ID NO: 585325 - DNA, 75 bp, synthetic construct
  source 1..75: mol_type = other DNA
taaatcggcggtcgataccatgaagttaagtttgcctgtaatggggaatacagcccgtaacctgattggattcag

SEQ ID NO: 585326 - DNA, 75 bp, synthetic construct
  source 1..75: mol_type = other DNA
aggcagaagttgccacgatactggcgaagctggctacaccgcctgttatttcagtagtgatgccggtctataacc

SEQ ID NO: 585327 - DNA, 75 bp, synthetic construct
  source 1..75: mol_type = other DNA
taccactatgaatcgattagtcgaggagccgaagattcaccggagaaactagccagatttgccagggaagtggac

SEQ ID NO: 585328 - DNA, 75 bp, synthetic construct
  source 1..75: mol_type = other DNA
tctcgataatggcagcgttgagcaggagactcttgatttctttgcccaaatccagcaggaagacagccgggttaa

SEQ ID NO: 585329 - DNA, 75 bp, synthetic construct
  source 1..75: mol_type = other DNA
attggctcgcattcaaaaagaacaccaaagctatcgtgacatgccgctagaaaaaatcaaaaaatccatattgat

SEQ ID NO: 585330 - DNA, 75 bp, synthetic construct
  source 1..75: mol_type = other DNA
gtacgcaaactttgcccgcattgtcgccgacagcaaggggagcccatccatattccagacaatgtatggccgtcg

SEQ ID NO: 585331 - DNA, 75 bp, synthetic construct
  source 1..75: mol_type = other DNA
gtggacttctgcggctatctcatggcgtcggtaatgtgtgatggcctgttagtgggtaatgctgaaattgtgcca

SEQ ID NO: 585332 - DNA, 75 bp, synthetic construct
  source 1..75: mol_type = other DNA
gaccgcaaggcagatcgcgttctggcagcgttatttatggtgctggcgaaccggtacgactggcagttattcatt

SEQ ID NO: 585333 - DNA, 75 bp, synthetic construct
  source 1..75: mol_type = other DNA
tgaaagcggtagcctgtccatggatcgcctggtatctctctataacgagacctttagtttcacgctaccctccgt

SEQ ID NO: 585334 - DNA, 75 bp, synthetic construct
  source 1..75: mol_type = other DNA
gtgtagaagttgatgccggtctggtgcccaacacctatcgcgtacgttatccaatacctgaacctgcaccactgg

SEQ ID NO: 585335 - DNA, 75 bp, synthetic construct
  source 1..75: mol_type = other DNA
gttacccagtttgaaattacgtcaattagtgatagccaaatagaacccgcattactggctcgtattcagcaggaa

SEQ ID NO: 585336 - DNA, 75 bp, synthetic construct
  source 1..75: mol_type = other DNA
ccgccgcatatcgtcgaaaaactctgtaccgtggcgcagcgcccggacacacacggctattccacttcacgcggc

SEQ ID NO: 585337 - DNA, 75 bp, synthetic construct
  source 1..75: mol_type = other DNA
gagatccacgaaccactcactcgactgctaaaagagtttggccccaagcgacgcactgactatcccaatatgcct

SEQ ID NO: 585338 - DNA, 75 bp, synthetic construct
  source 1..75: mol_type = other DNA
aaagcctttgataaaggatcgattggcctggacgaaaatatgcgggtactggtctcagatgcggtaaacggcgga

SEQ ID NO: 585339 - DNA, 75 bp, synthetic construct
  source 1..75: mol_type = other DNA
atgggcagaaatatgtcagcagcacgtaccgatggctttattcgtaatattcattcccgcaatccctttgatgtt

SEQ ID NO: 585340 - DNA, 75 bp, synthetic construct
  source 1..75: mol_type = other DNA
attttgacgggaaaactattgcgttgccgcaggtgcgtaaaaattacccttatgaggggtttgtagagtggcatc

SEQ ID NO: 585341 - DNA, 75 bp, synthetic construct
  source 1..75: mol_type = other DNA
tattggttaaagggctgcatgaagcgggctggatggtcgaaatgccgaaggcttcgatgtatgtctgggcgaaaa

SEQ ID NO: 585342 - DNA, 75 bp, synthetic construct
  source 1..75: mol_type = other DNA
tgaaactggcatgtggaacatcccggcggagtttatgaaaatgaagaagcctcacaaagttccactgagcaaaga

SEQ ID NO: 585343 - DNA, 75 bp, synthetic construct
  source 1..75: mol_type = other DNA
atctcgcagaacgggtagttctcatgcaatggtggagtgattatgtttcatctcaaaaatacaaggctgacgcag

SEQ ID NO: 585344 - DNA, 75 bp, synthetic construct
  source 1..75: mol_type = other DNA
atattaccgaacgagtagctctcatgcagtggtggggagattatgtcctggcacaacagcttaaaatttttgctg

SEQ ID NO: 585345 - DNA, 75 bp, synthetic construct
  source 1..75: mol_type = other DNA
cggaatgcgttctatagcaagaacggctgctgaagaaagtggtaaatttagaacagaggtgcttgaatcagcctt

SEQ ID NO: 585346 - DNA, 75 bp, synthetic construct
  source 1..75: mol_type = other DNA
tggagaaagatgtatttcctgccattggtgagatccccgttcagcaaatcaaagcccgaacattggttgaagcac

SEQ ID NO: 585347 - DNA, 75 bp, synthetic construct
  source 1..75: mol_type = other DNA
cagctctagcacatagtgataaaaatgaagtacgaagagcttataaccgctcaacgtaccttaataaaagaatag

SEQ ID NO: 585348 - DNA, 75 bp, synthetic construct
  source 1..75: mol_type = other DNA
gccgcgtagtgattttcatctcattcgccaccggatgctggcgccagaaaaaatgggctggaaatatcaagacgc

SEQ ID NO: 585349 - DNA, 75 bp, synthetic construct
  source 1..75: mol_type = other DNA
ggcctgattggtgtggagcctggtggtcacggtatcgaaactggcgagcacggcgcaccgctaaaacatggtcgc

SEQ ID NO: 585350 - DNA, 75 bp, synthetic construct
  source 1..75: mol_type = other DNA
ggcccagttcaacgatctgctgaaaaactatgccggacgtccaaccgcgctgaccaaatgccagaacattacggc

SEQ ID NO: 585351 - DNA, 75 bp, synthetic construct
  source 1..75: mol_type = other DNA
gcgcacataaaaccaaccaggtgctggggcaggcgttgctggcgaagcggatgggtaaaaccgaaatcatcgccg

SEQ ID NO: 585352 - DNA, 75 bp, synthetic construct
  source 1..75: mol_type = other DNA
attaaaaaactcatgggcgcatcgagttttagcgttagacataaatgattacaaccacttaaaaacatacattga

SEQ ID NO: 585353 - DNA, 75 bp, synthetic construct
  source 1..75: mol_type = other DNA
gcgaagaaacgaaagcgcagattctggaaagagaaggtcgtctgccggatgccgttattgcttgtgttggcggcg

SEQ ID NO: 585354 - DNA, 75 bp, synthetic construct
  source 1..75: mol_type = other DNA
tccgccggactcgattttccgtccgtcggcccacaacacgcgtatcttaacagcactggacgcgctgattatgtg

SEQ ID NO: 585355 - DNA, 75 bp, synthetic construct
  source 1..75: mol_type = other DNA
gttattacatcgtgggcaattagttgggcgaatggatgccaaaatgcatcgccagacaggcatccttgaagttat

SEQ ID NO: 585356 - DNA, 75 bp, synthetic construct
  source 1..75: mol_type = other DNA
aggataacggaccggttcgctcagccgattttgaacatccgcgcacaggagcgagcggctggtgggagtggaagc

SEQ ID NO: 585357 - DNA, 75 bp, synthetic construct
  source 1..75: mol_type = other DNA
ctggccggaaagctcactgcaacgcacagcgcggtactttcgccttttgatcctgttgtctgggatcgcaaacgc

SEQ ID NO: 585358 - DNA, 75 bp, synthetic construct
  source 1..75: mol_type = other DNA
attttcgcaagctgccaatgtttctggtggtgttggtattgttggtgcttgtcagccggtgtcctatgtacgatt

SEQ ID NO: 585359 - DNA, 75 bp, synthetic construct
  source 1..75: mol_type = other DNA
atgtcgaaagctatcgatgatgaactacaagcaattaacaatttaatatataagacagaaatatatagcgttgtt

SEQ ID NO: 585360 - DNA, 75 bp, synthetic construct
  source 1..75: mol_type = other DNA
accggctggagtgctataccccagcgccgaaacgccagtatggctattttttgttctgccgttattacatcgtgg

SEQ ID NO: 585361 - DNA, 75 bp, synthetic construct
  source 1..75: mol_type = other DNA
gcttgaacttataaataaagaaaaacctgatatacttgttcttcttgaaacaaacttatggtgggaacagaaact

SEQ ID NO: 585362 - DNA, 75 bp, synthetic construct
  source 1..75: mol_type = other DNA
atgggggatactatgcaacaacgattaacgcaggatttaacccaatttctcgccagcttgccggaagacgatcgc

SEQ ID NO: 585363 - DNA, 75 bp, synthetic construct
  source 1..75: mol_type = other DNA
gtggtcacgcatacggataaaaatgccctggaaatcgtggatggttttcaccgccatgaaattggtaaaggctca

SEQ ID NO: 585364 - DNA, 75 bp, synthetic construct
  source 1..75: mol_type = other DNA
agcagcggcattctgccagtgatcaacaccgccatcgcccataaagatgcgggcgtcggcatgattggcgcgggc

SEQ ID NO: 585365 - DNA, 75 bp, synthetic construct
  source 1..75: mol_type = other DNA
tcgtcataaccgcgcgcgtggtcgccatcaaatcactgccatgtccgaaattgttcgtgaactcagccagttggg

SEQ ID NO: 585366 - DNA, 75 bp, synthetic construct
  source 1..75: mol_type = other DNA
tgctgcgcctgaagcaaattaacggcctgcaagaactgtttgccgaccgtcaattttcccgcgcctggacggtta

SEQ ID NO: 585367 - DNA, 75 bp, synthetic construct
  source 1..75: mol_type = other DNA
gcatacggataaaaatgccctggaaattgttgatggttttcaccgtcatgaaataggtaaaggcttatcttcgtt

SEQ ID NO: 585368 - DNA, 75 bp, synthetic construct
  source 1..75: mol_type = other DNA
ggcaatcgacatcacccgcgtgggtagcagcggcattctgccggtgatcaacaccgccatcgcccataaagatgc

SEQ ID NO: 585369 - DNA, 75 bp, synthetic construct
  source 1..75: mol_type = other DNA
ggcaacatcgcttataccaatatgagcgagcagatggcgaagattttgcgtatgggtgccaacgatcagagcgtg

SEQ ID NO: 585370 - DNA, 75 bp, synthetic construct
  source 1..75: mol_type = other DNA
gaaaaacaaaacctacggcaacatcgcttacaccaatatgagcgagcagatggcgaagattttgcgtatgggtgc

SEQ ID NO: 585371 - DNA, 75 bp, synthetic construct
  source 1..75: mol_type = other DNA
ggtcaccggggcgctggtgttcgaagggctggcgaaagatctcgacgaggcggctgaactggcggcttccgggga

SEQ ID NO: 585372 - DNA, 75 bp, synthetic construct
  source 1..75: mol_type = other DNA
tcggcctgcgggtcagcggcctgccggggcaatggtttaccggcccggcgcagcaggtgatcggcccgatgtttg

SEQ ID NO: 585373 - DNA, 75 bp, synthetic construct
  source 1..75: mol_type = other DNA
cgttgaacgttattaacgtcggcatcgccatgtttagcgatgatctgaaaaagcagcatgtagaagtgacccaac

SEQ ID NO: 585374 - DNA, 75 bp, synthetic construct
  source 1..75: mol_type = other DNA
tgttgcgtctgaagcaaatcaacggcctgtacgaattgttcgccgaccgtcaatattcccgcgcctggaccgtca

SEQ ID NO: 585375 - DNA, 75 bp, synthetic construct
  source 1..75: mol_type = other DNA
ctacccgtgagctacagcgctggcgattgattcttggtgaagcggctgaaactaccctttgcggtcttgatggca

SEQ ID NO: 585376 - DNA, 75 bp, synthetic construct
  source 1..75: mol_type = other DNA
atgaaggcggaacatcgtcattgctaattcatcagataaaacagtgtgtacagagtggcatcaaagtattggggc

SEQ ID NO: 585377 - DNA, 75 bp, synthetic construct
  source 1..75: mol_type = other DNA
gccattctattggtatcgccctcaatgcctgtaccgttcctgccgcgggaaaaccttcttttacgctggcagata

SEQ ID NO: 585378 - DNA, 75 bp, synthetic construct
  source 1..75: mol_type = other DNA
ttctgatgacgaactacgcactcggtttttaaaggttcaagacgctgatagtaatccatggagatctttacaaga

SEQ ID NO: 585379 - DNA, 75 bp, synthetic construct
  source 1..75: mol_type = other DNA
aagttgaacgcttggttatgacacggctagaaggcgattcaacagcaaaaaaagccataaaaacaaccgttaatc

SEQ ID NO: 585380 - DNA, 75 bp, synthetic construct
  source 1..75: mol_type = other DNA
agtcatgaattcactacgtccggaattattagaactgacaccgcaggccctgacggcgttaagcaatgccggttt

SEQ ID NO: 585381 - DNA, 75 bp, synthetic construct
  source 1..75: mol_type = other DNA
ccgcgcagtcagatgatgaaacatttgcaacagttgccagcggacaagcagccgggtttgggtgccatggtacgc

SEQ ID NO: 585382 - DNA, 75 bp, synthetic construct
  source 1..75: mol_type = other DNA
atggcgttaacacaccgcgaactctgtcagattgcgtacaattttcttaagcgcaatgggttcaaggtttgcttt

SEQ ID NO: 585383 - DNA, 75 bp, synthetic construct
  source 1..75: mol_type = other DNA
tacggaaagtacatggatggcccaggggtaattgctgttggggtaatcctgacgataagccatttaccgggaata

SEQ ID NO: 585384 - DNA, 75 bp, synthetic construct
  source 1..75: mol_type = other DNA
ggccctgttggcctgtgtgtttctggccggaagcaacgcggggctggcacattaccggctctggcagcaggctga

SEQ ID NO: 585385 - DNA, 75 bp, synthetic construct
  source 1..75: mol_type = other DNA
ccggagaaaaatacctcatccagcctggtgagatacgacagcagccgcagggggtagaaagtcgtctgatcctga

SEQ ID NO: 585386 - DNA, 75 bp, synthetic construct
  source 1..75: mol_type = other DNA
ctggaagagcagttggcgacagacattgagcagctgcacttcgccattcttcatcagtcgggtgacaggtgtgat

SEQ ID NO: 585387 - DNA, 75 bp, synthetic construct
  source 1..75: mol_type = other DNA
tcattctgtgggccgtacgctggtactgcaaatacggcatcagttaccgtgagctgcaggagatgctggctgaac

SEQ ID NO: 585388 - DNA, 75 bp, synthetic construct
  source 1..75: mol_type = other DNA
gcaggtgatggtggtatagaaattggaaattatgtgcatattgcatcatattcgtccttaatagggaaggaaaaa

SEQ ID NO: 585389 - DNA, 75 bp, synthetic construct
  source 1..75: mol_type = other DNA
aatcagcggtgtgggacgtccgtatctggcagaggaaggcaccgggcttgttagcgtgaccggtctgacggtggc

SEQ ID NO: 585390 - DNA, 75 bp, synthetic construct
  source 1..75: mol_type = other DNA
aacacgccagaaatcgtatcgcgtggagcgtggtatagccgttctgccggttaccgggacgctggttcataaatt

SEQ ID NO: 585391 - DNA, 75 bp, synthetic construct
  source 1..75: mol_type = other DNA
gattgtgaaccttattaatgatcgtaccgatgatattttgtatggaagaccatggtacacaaaatggacgatggg

SEQ ID NO: 585392 - DNA, 75 bp, synthetic construct
  source 1..75: mol_type = other DNA
ctttatatgctggcaatccattaaaaagaatcaaagaaagacaaagaaacattgaaagattagaattggatttta

SEQ ID NO: 585393 - DNA, 75 bp, synthetic construct
  source 1..75: mol_type = other DNA
cagatcatcgatagccagaatcgcccgatgtttagaaccggcagtgccgatgtcgaaccctatatgcgcgacatt

SEQ ID NO: 585394 - DNA, 75 bp, synthetic construct
  source 1..75: mol_type = other DNA
accgatgatattttgtatggaagaccatggtacacaaaatggacgatggggagaatgatctcatttaacacatct

SEQ ID NO: 585395 - DNA, 75 bp, synthetic construct
  source 1..75: mol_type = other DNA
cgccagcttcggctgcattaataacctgcagatggggcacggaatggggagttttggcacagaaaatcgttaccg

SEQ ID NO: 585396 - DNA, 75 bp, synthetic construct
  source 1..75: mol_type = other DNA
tgctatctaatctgaacggttacgcaccgcctatcgccgttgagtttggtcgcaaaacgctctattccagcgaac

SEQ ID NO: 585397 - DNA, 75 bp, synthetic construct
  source 1..75: mol_type = other DNA
ccgtaagcgtcctggaaaaaactgggggagtaccacaggtcagtgtttccacaatgtcatcagccgaaccgaggt

SEQ ID NO: 585398 - DNA, 75 bp, synthetic construct
  source 1..75: mol_type = other DNA
cgaaactgcgggcgttgcgtccacatctcaaaatcgatctggtccaggaaggtctacgtattcagatcatcgata

SEQ ID NO: 585399 - DNA, 75 bp, synthetic construct
  source 1..75: mol_type = other DNA
tgtggcactgatttcggaaagcggagccaatccatttggtctgacggtggatgttgtgatggaggagtaccgctg

SEQ ID NO: 585400 - DNA, 75 bp, synthetic construct
  source 1..75: mol_type = other DNA
tgaccgtattattgttggcggcattatgccggtaactaaaacggtttccgttggcggggaagttggtaaacaact

SEQ ID NO: 585401 - DNA, 75 bp, synthetic construct
  source 1..75: mol_type = other DNA
gacgaaatgggcaaagcaagttggtaacgggatgagtattcccccgatccggagacaactcgcatcgccgaagtg

SEQ ID NO: 585402 - DNA, 75 bp, synthetic construct
  source 1..75: mol_type = other DNA
gtagcggaagaacgcagcaaaattacgccggtcactgcgattaaggtaacgccgacaggtacggttgaaaaaggg

SEQ ID NO: 585403 - DNA, 75 bp, synthetic construct
  source 1..75: mol_type = other DNA
ccgttcagccggatacggcatcggacaaaaccttccgggtgtcatctgaccacaacaatgtggcgacagtgaccg

SEQ ID NO: 585404 - DNA, 75 bp, synthetic construct
  source 1..75: mol_type = other DNA
atggcagaagatcgcagtacggtgacggcggcaaccggtatgactgtggcgcctgccagctcctcggtggtgaaa

SEQ ID NO: 585405 - DNA, 75 bp, synthetic construct
  source 1..75: mol_type = other DNA
ctgtaccacatctgcctcgaaatgcgtaccagagggattgagcgccagatgacgcagggcgagttaaaacgactt

SEQ ID NO: 585406 - DNA, 75 bp, synthetic construct
  source 1..75: mol_type = other DNA
catggcctccggacctggctgagtttgtggcgctgatttcggaaagcggggccaatccatttggcctgacggtgg

SEQ ID NO: 585407 - DNA, 75 bp, synthetic construct
  source 1..75: mol_type = other DNA
atgactgaacagcaaatccggcaggtctgccgtcagtgcatggaccgctgccgggcgggtgaaacgtggcctccg

SEQ ID NO: 585408 - DNA, 75 bp, synthetic construct
  source 1..75: mol_type = other DNA
atcgccagtggcgcccggacgaggcaccggaagtggcgggccatcttgatgcccaactgacggaatatggcgaga

SEQ ID NO: 585409 - DNA, 75 bp, synthetic construct
  source 1..75: mol_type = other DNA
attatcaaaaaacgttcgagttactgacgcagcaaatacctgataaagaaatgagaaataaaattttatcggtta

SEQ ID NO: 585410 - DNA, 75 bp, synthetic construct
  source 1..75: mol_type = other DNA
atgattggttctggtgttggctctgcaagtcaggggttgaataatatggcagtaaaactagccaagaaagcggct

SEQ ID NO: 585411 - DNA, 75 bp, synthetic construct
  source 1..75: mol_type = other DNA
gcaacgatgtcatcagtgcttacaccgagtgctttagtgaagtcatttttgtcaagcaggttgattttgtaatca

SEQ ID NO: 585412 - DNA, 75 bp, synthetic construct
  source 1..75: mol_type = other DNA
ttaccgcgggctatgctcagaacggtagtaccgttgcaccaggtctggtgaaatcaacggcaagtttcgtcgtgc

SEQ ID NO: 585413 - DNA, 75 bp, synthetic construct
  source 1..75: mol_type = other DNA
cagccgattaaagatgcggttgaaaccgtttatcaacgactggaaggctgggaaggaaatggtggatttgcgcag

SEQ ID NO: 585414 - DNA, 75 bp, synthetic construct
  source 1..75: mol_type = other DNA
cagcagattaaagatgcggtggaaacggtgtatcagcggctggaaggctgggaaggaaatggcggcttcgcgcag

SEQ ID NO: 585415 - DNA, 75 bp, synthetic construct
  source 1..75: mol_type = other DNA
cgtgttcgcagcgggtgactgtacgacggttccgtacaagcagatcatcatcgccactggcgaaggtgccaaagc

SEQ ID NO: 585416 - DNA, 75 bp, synthetic construct
  source 1..75: mol_type = other DNA
gaaaccgtttatcaacggctggaaggctgggaagggaacggcggcttcgcgcagttagcggtggaagaagagtag

SEQ ID NO: 585417 - DNA, 75 bp, synthetic construct
  source 1..75: mol_type = other DNA
cagccgattaaagacgccgtagaaaccgtttatcaacggctggaaggctgggaagggaatggcggcttcgcgcag

SEQ ID NO: 585418 - DNA, 75 bp, synthetic construct
  source 1..75: mol_type = other DNA
cagccgattaaagatgcggtagaaaccgtttatcaacgactggaaggctgggaagggaacggcggcttcgcgcag

SEQ ID NO: 585419 - DNA, 75 bp, synthetic construct
  source 1..75: mol_type = other DNA
atgagtaataccgacgcttcaggtgagaagcgagtgacaggcaccagcgagcgacgagaacagatcattcaacgc

SEQ ID NO: 585420 - DNA, 75 bp, synthetic construct
  source 1..75: mol_type = other DNA
tgtatggcgtatctactgtgacgatccgcaacgatctggcgtttctggaaaagcaggggatcgctgtgcgtgcct

SEQ ID NO: 585421 - DNA, 75 bp, synthetic construct
  source 1..75: mol_type = other DNA
acgttgaaggatggcgtcgtgacgttaaacgacatgcaaggtcaatcgcctgtgctggcgctttccggggctggt

SEQ ID NO: 585422 - DNA, 75 bp, synthetic construct
  source 1..75: mol_type = other DNA
ttaatttgaccgccaacgacagtacgtttggtgggcaagcacaggtgactctgacagagcaaccggaatggcagc

SEQ ID NO: 585423 - DNA, 75 bp, synthetic construct
  source 1..75: mol_type = other DNA
aaattaaagtccagtaccaaacaatcgaactggaaggactacacatcaagtagtagaacagtaaatgccttaatt

SEQ ID NO: 585424 - DNA, 75 bp, synthetic construct
  source 1..75: mol_type = other DNA
aacctgacattgatgatatcatcaacgtggctattttagaaacttcttatctacaaataaaaaaaaccaataatg

SEQ ID NO: 585425 - DNA, 75 bp, synthetic construct
  source 1..75: mol_type = other DNA
cggcgatcaggctgagcaatcgctgcaaaattaccacttcgatatgctgtttcttggtgtagatgcgatcgatct

SEQ ID NO: 585426 - DNA, 75 bp, synthetic construct
  source 1..75: mol_type = other DNA
gcttgaccgctttaccaccgatttgacgttgaaggatggcgtcgtgacgttaaacgacatgcaaggtcaatcgcc

SEQ ID NO: 585427 - DNA, 75 bp, synthetic construct
  source 1..75: mol_type = other DNA
aggtttcactgccgggcacgctggacgcgacatcaataaatccgcggataaacttccagccacggctggaaaacg

SEQ ID NO: 585428 - DNA, 75 bp, synthetic construct
  source 1..75: mol_type = other DNA
tatccccgtgatttccggtaatggtcagtttgccacggtagctgaagtcaccgttactgaagcgggcgctgcagg

SEQ ID NO: 585429 - DNA, 75 bp, synthetic construct
  source 1..75: mol_type = other DNA
acgctcgacaatggtgttgtgacacttgatgacatgcagggcgagtcgcccatgctggcgctttccggggctggt

SEQ ID NO: 585430 - DNA, 75 bp, synthetic construct
  source 1..75: mol_type = other DNA
taaacgacatgcaaggtcaatcgccagtgttagctctgacaggggaaggttcgttgaatctggcagagcagacct

SEQ ID NO: 585431 - DNA, 75 bp, synthetic construct
  source 1..75: mol_type = other DNA
acctttcaacctcggctggagaatgtcgagattggcaccattctgaaggcatttaactatccgatttcgttaacc

SEQ ID NO: 585432 - DNA, 75 bp, synthetic construct
  source 1..75: mol_type = other DNA
gtatgctttgccatccgcacgggaagctttgattatgctgaacggtttccagattcacctaaccttaaaattttt

SEQ ID NO: 585433 - DNA, 75 bp, synthetic construct
  source 1..75: mol_type = other DNA
tcaaccagctgttgatgccctgaaaagccaggctgaaatgacaagacttggccctcagtatcaaattgacgtcaa

SEQ ID NO: 585434 - DNA, 75 bp, synthetic construct
  source 1..75: mol_type = other DNA
gtaaaaaaatgccagcaggcaggccaccactacaaagcagactccatcagagactcatgggcatcggcattgaga

SEQ ID NO: 585435 - DNA, 75 bp, synthetic construct
  source 1..75: mol_type = other DNA
tgaactgaagcgtatggagatcagcaccaacgcgatgtcacgttatacatctataacgcgcaatatggtaccgcg

SEQ ID NO: 585436 - DNA, 75 bp, synthetic construct
  source 1..75: mol_type = other DNA
ggcacgctagtgcgcaaatggttttcaatgtgtacggcgcatggatggcagacaataacgcagagcagatcgcaa

SEQ ID NO: 585437 - DNA, 75 bp, synthetic construct
  source 1..75: mol_type = other DNA
ctcgtgggacgcagggttaaaaaaggcggggatcaggcatcgaaaagcttaccagtcgcgccacacttacgcgtg

SEQ ID NO: 585438 - DNA, 75 bp, synthetic construct
  source 1..75: mol_type = other DNA
cgtaacttcattaatgaggtcaacaacctgaacaaacgtatgggtgacctgcgggacatcaacggcgaggccggt

SEQ ID NO: 585439 - DNA, 75 bp, synthetic construct
  source 1..75: mol_type = other DNA
ccggtggtgatgcggcaggatgcaaagacgccgaatcctgtggaagccgtatcaccgctcccttcaccggtttct

SEQ ID NO: 585440 - DNA, 75 bp, synthetic construct
  source 1..75: mol_type = other DNA
tgacaactacacacacgttcaggtgggtgcggataaaaaacacgaactggacggtctggacctcttcaccggggt

SEQ ID NO: 585441 - DNA, 75 bp, synthetic construct
  source 1..75: mol_type = other DNA
agaaaatgaagtcgccaaaacatcactcaacacataccgtgccgtcatcaaaaatatcctgagcataatcggtga

SEQ ID NO: 585442 - DNA, 75 bp, synthetic construct
  source 1..75: mol_type = other DNA
aaagcttatacctttatctggggcatggtcggtgaaaaccaggtctttgatgatatggaccatgtggccgttaaa

SEQ ID NO: 585443 - DNA, 75 bp, synthetic construct
  source 1..75: mol_type = other DNA
gctgaaaataaccaggaccaggtactcatcctcaaccagaaattgagtgagtttgccccatccatgccccacgca

SEQ ID NO: 585444 - DNA, 75 bp, synthetic construct
  source 1..75: mol_type = other DNA
cggcgataccgttgaaatcattattccctgcgtggcaagtcgggacggctgtatagagccaacagatatggcagc

SEQ ID NO: 585445 - DNA, 75 bp, synthetic construct
  source 1..75: mol_type = other DNA
ccgtcgcctggtacgataacgagtatggtttcgtcactcaactcattcgtaccctggaaaaattcgccaaactct

SEQ ID NO: 585446 - DNA, 75 bp, synthetic construct
  source 1..75: mol_type = other DNA
catgtatatattattggtggcgcaattgttggttcacagcataaatggaaagaattctataaattagttctggaa

SEQ ID NO: 585447 - DNA, 75 bp, synthetic construct
  source 1..75: mol_type = other DNA
agcaaaaatgtattggttgtaaaagatgcgcaatcgcttgcccctttggcgtcgttgagatggtcgatacgattg

SEQ ID NO: 585448 - DNA, 75 bp, synthetic construct
  source 1..75: mol_type = other DNA
cactgcaatggccgcaggaaggcaggcggcgcgcgatatgttaactctgatacgaaggcatcgtgatgaaatcgt

SEQ ID NO: 585449 - DNA, 75 bp, synthetic construct
  source 1..75: mol_type = other DNA
gtgggtctgattcgtactgcaatgggggagcctgggccagatggtcgccgtcgtccacgtccggtggcggggtcg

SEQ ID NO: 585450 - DNA, 75 bp, synthetic construct
  source 1..75: mol_type = other DNA
ggccaaacaggattacgcggtacgcctcgaagggccgattgtcgaagatattctccagtttgagctggaaaacct

SEQ ID NO: 585451 - DNA, 75 bp, synthetic construct
  source 1..75: mol_type = other DNA
ttttaatttattatcatgctttttacagcatgatgcttgtctttgtttttcatgcagttaaaagtaaagccatcc

SEQ ID NO: 585452 - DNA, 75 bp, synthetic construct
  source 1..75: mol_type = other DNA
tgaaagatatgacaattacggtaaacggcatggcgacaggtaaggtgcagatccctgtggtgagcggaaatggtc

SEQ ID NO: 585453 - DNA, 75 bp, synthetic construct
  source 1..75: mol_type = other DNA
ctggttgatacgccaggcatacgttttcagagcgacagtgaaaccacaaaactcgcccttgatgcgctaaatcag

SEQ ID NO: 585454 - DNA, 75 bp, synthetic construct
  source 1..75: mol_type = other DNA
atgtttgaagatgctttaaatgccgttaatgctgtccgggataaaatcagcggtggtaagaaaacaaccggcaaa

SEQ ID NO: 585455 - DNA, 75 bp, synthetic construct
  source 1..75: mol_type = other DNA
tctggcagaccgtaaaagatggcactgcggcggcaaccgccgtgatggaagctgtaaccggtgtcatcgatgata

SEQ ID NO: 585456 - DNA, 75 bp, synthetic construct
  source 1..75: mol_type = other DNA
gcattcattattaatattttgctgacacttcttggctatatccctggtttaattcacgctttctgggtgcaaacc

SEQ ID NO: 585457 - DNA, 75 bp, synthetic construct
  source 1..75: mol_type = other DNA
tgtaatactgaatatcctacaccatttgaggatgtaaatttaaactcaattcatgggttaaagaaagaatttaaa

SEQ ID NO: 585458 - DNA, 75 bp, synthetic construct
  source 1..75: mol_type = other DNA
gcacctaaggcagagtatcagataaaagtaactggtaatcaggaatcccaattagaaatgacaaggaagcttgag

SEQ ID NO: 585459 - DNA, 75 bp, synthetic construct
  source 1..75: mol_type = other DNA
atttttgaaaaggttaactctggcaattacaaatttacagcatataaagaaaaattaatatctaaaggcgctaac

SEQ ID NO: 585460 - DNA, 75 bp, synthetic construct
  source 1..75: mol_type = other DNA
atccaaaccaattttggcggcattcgcgcactgatgtctaatgggcttgcctctcgtacgcagggggcatttggc

SEQ ID NO: 585461 - DNA, 75 bp, synthetic construct
  source 1..75: mol_type = other DNA
ataatcttgtgtctaaagacgctacacttaatgtgttctatagcaaaaattccctgaatgatggtgacactcttt

SEQ ID NO: 585462 - DNA, 75 bp, synthetic construct
  source 1..75: mol_type = other DNA
aatacagagtatcctacaccttatgaagatgttaatcttaatgttcttgctggattaaaaaaaatcttccaagaa

SEQ ID NO: 585463 - DNA, 75 bp, synthetic construct
  source 1..75: mol_type = other DNA
gctgccgttcagctttgtgatcttcttcgtgatggcggggttgtataaatctctgaaggtagaagattaccgccg

SEQ ID NO: 585464 - DNA, 75 bp, synthetic construct
  source 1..75: mol_type = other DNA
tgctggcgcagtatccggcgtttacctttagcgcctccgtcgccaccattactggcctgctgttttatgtgacct

SEQ ID NO: 585465 - DNA, 75 bp, synthetic construct
  source 1..75: mol_type = other DNA
caaagagcaggtgatcaccgatattcttgaccagtacgagcggcaccttaactttatccatctccatcgtgaagc

SEQ ID NO: 585466 - DNA, 75 bp, synthetic construct
  source 1..75: mol_type = other DNA
tactatgataacgacaacggatgcaaaaaatctgaactctgataatgtcgttatggatgcttcatatttacgaga

SEQ ID NO: 585467 - DNA, 75 bp, synthetic construct
  source 1..75: mol_type = other DNA
tcggacttatcacaccacaagccgcactggcgacacatttcccggcaggactgccggttgtaccaccagtgataa

SEQ ID NO: 585468 - DNA, 75 bp, synthetic construct
  source 1..75: mol_type = other DNA
ggcgctggggttgatcctgttcgtgctgtttatgggcgacacctcgttcctgcttaatgcgctggtgctgaacgt

SEQ ID NO: 585469 - DNA, 75 bp, synthetic construct
  source 1..75: mol_type = other DNA
tgcgttgctggaagcggaaggcgttgagctgctgatgaccggcgggcatttgcgccgtcagtcgcaatcttttta

SEQ ID NO: 585470 - DNA, 75 bp, synthetic construct
  source 1..75: mol_type = other DNA
ggtgcggataaaaaacacgaactggacggtctggacctcttcaccggggtgaccatgacatataccgacagcaac

SEQ ID NO: 585471 - DNA, 75 bp, synthetic construct
  source 1..75: mol_type = other DNA
actgggcaccaaccgcgcagatgccgttctgcacgatacgccaaacattctgtacttcatcaaaaccgccggtaa

SEQ ID NO: 585472 - DNA, 75 bp, synthetic construct
  source 1..75: mol_type = other DNA
ctggcagtattacaacagttttacggaaacaaatttcgatacatgcaatcatcagatgcaataattcgagaaatc

SEQ ID NO: 585473 - DNA, 75 bp, synthetic construct
  source 1..75: mol_type = other DNA
ttggtaagtatgttcatcatgataatgagtacaccgcaacctttgccggactcggaacccgtgattacagtacgc

SEQ ID NO: 585474 - DNA, 75 bp, synthetic construct
  source 1..75: mol_type = other DNA
gctggcgcatgggcacgtatcatgagcggaaccggctctgccggtggtggtttcagtgacaaccacacacatgtt

SEQ ID NO: 585475 - DNA, 75 bp, synthetic construct
  source 1..75: mol_type = other DNA
ttaatgtctctgcggtcagggatgccgggatgctgatgtcaatggggcaccgtaacttcattaatgaggtcaaca

SEQ ID NO: 585476 - DNA, 75 bp, synthetic construct
  source 1..75: mol_type = other DNA
caaccttgctccagccgatctgccaaaagaagggggacgatatgatttgcctatcggctattgcgttactggcgg

SEQ ID NO: 585477 - DNA, 75 bp, synthetic construct
  source 1..75: mol_type = other DNA
tgcgcaagcacactgacgtaattgcgatgaccaacggtatgaacgtggctaatgcgttgctggaagcggaaggcg

SEQ ID NO: 585478 - DNA, 75 bp, synthetic construct
  source 1..75: mol_type = other DNA
gcgatcaggctgagcaatcgctgcaaaattaccacttcgatatgctgtttcttggtgtagatgcgatcgatctgg

SEQ ID NO: 585479 - DNA, 75 bp, synthetic construct
  source 1..75: mol_type = other DNA
gtgctggtagcaacaaaccaggaagatcagccactaggattcatgtttttgcatgagggacatttagaggctctt

SEQ ID NO: 585480 - DNA, 75 bp, synthetic construct
  source 1..75: mol_type = other DNA
aacaccggacattaactcagtagatagaattagactgcaatctgtccgagagaaagtaatgcaattaaagagaat

SEQ ID NO: 585481 - DNA, 75 bp, synthetic construct
  source 1..75: mol_type = other DNA
caaaaaaacatattcttgtagaggaaaattataatgagttcataaaattttgtcgctatcaactgcccggactaa

SEQ ID NO: 585482 - DNA, 75 bp, synthetic construct
  source 1..75: mol_type = other DNA
ctgccgcgtctggcgcgtggtcaggagatcccctgctttgcactgaccagcccggaagcgggttccgatgcgggc

SEQ ID NO: 585483 - DNA, 75 bp, synthetic construct
  source 1..75: mol_type = other DNA
aacgggcgcgtatgcgcacattcgtcggcagttcaaaatctctatcggtaagatggaagggattgaagagccgct

SEQ ID NO: 585484 - DNA, 75 bp, synthetic construct
  source 1..75: mol_type = other DNA
atgctcgggcagagcaacttcctggcccgtgcttaccagggggcaccgattgccatcaccgttgaaggggcaaat

SEQ ID NO: 585485 - DNA, 75 bp, synthetic construct
  source 1..75: mol_type = other DNA
attgcgaagatcataatggttttaaattacgcttctcaaaagcaaccctgcgccgtgtcggagctaacagtgatg

SEQ ID NO: 585486 - DNA, 75 bp, synthetic construct
  source 1..75: mol_type = other DNA
agtacgttctacttcggcgcgtgcgctggcagaaaagaaacagctgactcgccgtattgaacaagcgtcggcgcg

SEQ ID NO: 585487 - DNA, 75 bp, synthetic construct
  source 1..75: mol_type = other DNA
cgtcagttcaaaatctctatcggtaagatggaagggattgaagagccgctggcgcgtattgccggtaatgcctac

SEQ ID NO: 585488 - DNA, 75 bp, synthetic construct
  source 1..75: mol_type = other DNA
atgcgtaaaactagtagatgaagatcgtcgagttggaaaaattgataaaaatgatttaatatattttttagaaaa

SEQ ID NO: 585489 - DNA, 75 bp, synthetic construct
  source 1..75: mol_type = other DNA
ccaggagaacatcgcaacgtttatcaacaaaatcaaagcatcaccgtggtttaaggataccgttatcgtcgtctc

SEQ ID NO: 585490 - DNA, 75 bp, synthetic construct
  source 1..75: mol_type = other DNA
ctctcgtacctgtaaccgcaaaaaatatgattttgacggtaaaccgaaccagtcattcagcgcggtaagttgcag

SEQ ID NO: 585491 - DNA, 75 bp, synthetic construct
  source 1..75: mol_type = other DNA
ctggcagaaaagaaacagctgactcgccgtatagaacaagcgtcggcgcgtgaagttgaatggcaggaaaaagcc

SEQ ID NO: 585492 - DNA, 75 bp, synthetic construct
  source 1..75: mol_type = other DNA
aatacagcaaagaacacgaatggctgcgtaaagaagccgacggcacttacactgttggcatcactgagcacgctc

SEQ ID NO: 585493 - DNA, 75 bp, synthetic construct
  source 1..75: mol_type = other DNA
acggttagcgcgggcgatgactgcgcggttgccgaatcggtaaaagcggcgtcagacatttatgcgccagtaagc

SEQ ID NO: 585494 - DNA, 75 bp, synthetic construct
  source 1..75: mol_type = other DNA
tggggaactgtcgacgcttgggacaaaaatacccccctacctgacgatgaggtggaagtaccgtttctgaaggat

SEQ ID NO: 585495 - DNA, 75 bp, synthetic construct
  source 1..75: mol_type = other DNA
gccgtctggaaaagctggtaggttctgagccacgcatcaaacaggtcgcggccgatctggttcagcactttgaaa

SEQ ID NO: 585496 - DNA, 75 bp, synthetic construct
  source 1..75: mol_type = other DNA
ttatctgtaacgaagcgctggtagtgagcgacgggcaaaatgcgcgtatcggctctctgaccgctgatgaagagc

SEQ ID NO: 585497 - DNA, 75 bp, synthetic construct
  source 1..75: mol_type = other DNA
ggctctctcaccgcgaacgaagagcgcttcttgccgtggaaaacgctgtctaatgaagacgacaaaccgctgttt

SEQ ID NO: 585498 - DNA, 75 bp, synthetic construct
  source 1..75: mol_type = other DNA
gtggagtccgaatcgaacctgaaaattaagcgcatgaaatgtgtggcaatggaaggtctaattgatgaagctaat

SEQ ID NO: 585499 - DNA, 75 bp, synthetic construct
  source 1..75: mol_type = other DNA
gtgtcgacacacaacactcatattaatgaaactattcacctgctttcagatacctacagcgcagaaaaacaatta

SEQ ID NO: 585500 - DNA, 75 bp, synthetic construct
  source 1..75: mol_type = other DNA
atgaatatgaagaccattgaagatgtatttattcacctgctttcagatacctacagcgcagaaaaacaattaacc

SEQ ID NO: 585501 - DNA, 75 bp, synthetic construct
  source 1..75: mol_type = other DNA
tgtctgctctcctgcttacaggctgtgccggacagcatcaccgttcttctgccgtcatgacagaaaacgcaccgc

SEQ ID NO: 585502 - DNA, 75 bp, synthetic construct
  source 1..75: mol_type = other DNA
ggcgctggcgctgattgccgtctcttcggaaacagaagaagagcgcacctttacctttcgtcagcttcatgacga

SEQ ID NO: 585503 - DNA, 75 bp, synthetic construct
  source 1..75: mol_type = other DNA
ggatgtgttccgtggctgggtgagcgccattggtaaagcggtgaccgccaaagaggtgatcacccgtacggtgaa

SEQ ID NO: 585504 - DNA, 75 bp, synthetic construct
  source 1..75: mol_type = other DNA
atctcccggttgccgtgctggatgaggtgatactgcgtatcgcccatgcgcaaagcccggatctggtcgtcagta

SEQ ID NO: 585505 - DNA, 75 bp, synthetic construct
  source 1..75: mol_type = other DNA
caaagcccggacttggtcgtcagcaacaaagccttccatcatctgctgctcgacggtgtgcccgttgagtacaag

SEQ ID NO: 585506 - DNA, 75 bp, synthetic construct
  source 1..75: mol_type = other DNA
tgcggtgttgttgactgccgttgagggcaaaaccgccgccgaattgcaggcacagtcgccgctggcattgtttga

SEQ ID NO: 585507 - DNA, 75 bp, synthetic construct
  source 1..75: mol_type = other DNA
gaaaaatgaaggcctggatttcagccacacgcagcagctgccgggaacggattacacgattgcaggcatggtggc

SEQ ID NO: 585508 - DNA, 75 bp, synthetic construct
  source 1..75: mol_type = other DNA
ccggcgttactggagcaggcgctggggaatttactggataacgccatcgattttacccccgagagcggtcgcata

SEQ ID NO: 585509 - DNA, 75 bp, synthetic construct
  source 1..75: mol_type = other DNA
cgggctttacctaccgcgcacgtagcgggaaatcgacctactaccggctggaaaccttcctgttagaaggcagcc

SEQ ID NO: 585510 - DNA, 75 bp, synthetic construct
  source 1..75: mol_type = other DNA
agtcggtcgtgattagcggtgacacgaggctggaggaattggggattagcgaacgtttgcagcaggaatgcaatg

SEQ ID NO: 585511 - DNA, 75 bp, synthetic construct
  source 1..75: mol_type = other DNA
cggacgtcattatctggcaccgtctgacaagctggatcataaagtggcgaagattttacaagtgccgaacgccac

SEQ ID NO: 585512 - DNA, 75 bp, synthetic construct
  source 1..75: mol_type = other DNA
attccgtcactgacaataagcccgttcctctccccgatctcggtagtagcgagctgcgtaaactcgcgcaggcgc

SEQ ID NO: 585513 - DNA, 75 bp, synthetic construct
  source 1..75: mol_type = other DNA
ttttactgacaacattctgacgcaaaatgcgcgaatgcaggcactggtggaaacgttactacgccaggcaagact

SEQ ID NO: 585514 - DNA, 75 bp, synthetic construct
  source 1..75: mol_type = other DNA
aaaaatggaattctcataaattacttcgctttcctgattgtggttatggaactcatgcctacttggttaccagga

SEQ ID NO: 585515 - DNA, 75 bp, synthetic construct
  source 1..75: mol_type = other DNA
gctactacagtctgtacatcgcccagaaggtgatgaaactcgaccccacgcgcgcgacgcctgcggttattaaca

SEQ ID NO: 585516 - DNA, 75 bp, synthetic construct
  source 1..75: mol_type = other DNA
aggtgttgcggccggtaaagcgcagatccctgtggttaccggcaatggtgagtttgcggcagtggcggaaattac

SEQ ID NO: 585517 - DNA, 75 bp, synthetic construct
  source 1..75: mol_type = other DNA
ggcgaaggcggcagaagctgcaatacgtctgtgtaaagagctgggagatcagtcggtcatgattagcggtgacac

SEQ ID NO: 585518 - DNA, 75 bp, synthetic construct
  source 1..75: mol_type = other DNA
gcggcgtgaagtcggtggcgctggcaacgggcgcgtatgctcacattcgtcgtcagttcaaaatctctatcggta

SEQ ID NO: 585519 - DNA, 75 bp, synthetic construct
  source 1..75: mol_type = other DNA
atgattttatttcatcaaggttgagtgagtgcctgctgccagaggcgactgccggacacctcgaccgccgggcgt

SEQ ID NO: 585520 - DNA, 75 bp, synthetic construct
  source 1..75: mol_type = other DNA
ccgggcaaggctggcggatgctggtggagtgtctctccgtgggccgcggcatcaccctaccttccaactcaaccg

SEQ ID NO: 585521 - DNA, 75 bp, synthetic construct
  source 1..75: mol_type = other DNA
aacacggcgtggaaatacctcaataagcaggatcgcaataacctgttttttgtcatccgtggcgacaaaccgcag

SEQ ID NO: 585522 - DNA, 75 bp, synthetic construct
  source 1..75: mol_type = other DNA
aatatcctcggacactcgccgcgtaagctcgggatcggcatggtggaaattaaagttgtggaacgtgaagggtaa

SEQ ID NO: 585523 - DNA, 75 bp, synthetic construct
  source 1..75: mol_type = other DNA
agagttcaccatcgaccagcagaaaaacatgattgccttctcgggtagccatttccgtttgccgctgctgttgcg

SEQ ID NO: 585524 - DNA, 75 bp, synthetic construct
  source 1..75: mol_type = other DNA
tatctacggagaaagcctcgaacgaacttattttgacaacgacgctttcccggatctcacgccagaactgggggc

SEQ ID NO: 585525 - DNA, 75 bp, synthetic construct
  source 1..75: mol_type = other DNA
attttactggcgatggtattaacgacgcggttctctataccttaaccaacagcctgaccggtgctggcgtcagca

SEQ ID NO: 585526 - DNA, 75 bp, synthetic construct
  source 1..75: mol_type = other DNA
ttctcactgtttaccctgacagtcgatacccatcacccggatggttttatctctcgtacctgtaaccgcaaaaaa

SEQ ID NO: 585527 - DNA, 75 bp, synthetic construct
  source 1..75: mol_type = other DNA
aacaaacgctacattacgctggcaccgattgcgaccgtgcttggtctggcgtttaaactctccgacccggaaaaa

SEQ ID NO: 585528 - DNA, 75 bp, synthetic construct
  source 1..75: mol_type = other DNA
tagttatgcagttttttccagtccggcttgccctggaacaagtcgccctcccaccaggtggtgcccgcatcaatc

SEQ ID NO: 585529 - DNA, 75 bp, synthetic construct
  source 1..75: mol_type = other DNA
cccggaagcgggttccgatgcgggcgcgattccggataccgggattgtctgcatgggcgaatggcagggccagca

SEQ ID NO: 585530 - DNA, 75 bp, synthetic construct
  source 1..75: mol_type = other DNA
taaacaaactatttaccgacccggcgcatattgaatcgacgcaaaaaatgttgactgaaataaccaatgcactgg

SEQ ID NO: 585531 - DNA, 75 bp, synthetic construct
  source 1..75: mol_type = other DNA
gaggtccggtaagaagcggaactcatgcaaagcgtagcaagagtcgtatttttactggtaaggttgtagcacgta

SEQ ID NO: 585532 - DNA, 75 bp, synthetic construct
  source 1..75: mol_type = other DNA
actttgcgcctatgcgtaagtcgatgatttctgcgccggtatttcgtggattccgtaaggtgatgccaccgatgt

SEQ ID NO: 585533 - DNA, 75 bp, synthetic construct
  source 1..75: mol_type = other DNA
atggaaagtaatttcattgactggcatcccgctgacatcattgcgggtttgcgcaagaagggaacgtcaatggcg

SEQ ID NO: 585534 - DNA, 75 bp, synthetic construct
  source 1..75: mol_type = other DNA
ctatagatgaattacgacactctggcagttttgctacaacacatcgagttgtagcaaaattattaaagctcactc

SEQ ID NO: 585535 - DNA, 75 bp, synthetic construct
  source 1..75: mol_type = other DNA
atgatattgaatattatagtctatacctttattttcttcgtcagtgtgatacctataaaaggcatgtgtaatgtt

SEQ ID NO: 585536 - DNA, 75 bp, synthetic construct
  source 1..75: mol_type = other DNA
ggagaagaggcgttcgttggtttgcagacgcttgttgcggcggctggttcaggagagctgcaaaaactgaccaga

SEQ ID NO: 585537 - DNA, 75 bp, synthetic construct
  source 1..75: mol_type = other DNA
atgattattgcgaaagccctgggtactgacccctgggttatatggccatcacgctaccatgatccgcagacccat

SEQ ID NO: 585538 - DNA, 75 bp, synthetic construct
  source 1..75: mol_type = other DNA
aggggatgggaatagcccgacaggttaaatggaatactcaagaaattgaccgtgatagattgtctgttgctacca

SEQ ID NO: 585539 - DNA, 75 bp, synthetic construct
  source 1..75: mol_type = other DNA
gaggtcgtttctgatccgctccgcgatatggaaatgctggcgtttgagggtatcaaagatcgcatcaactctctt

SEQ ID NO: 585540 - DNA, 75 bp, synthetic construct
  source 1..75: mol_type = other DNA
gaggcagatcccttaacaaagctgggaacagcccgttctggtgcatcgcaggtctggcgttttgtgaatgagatc

SEQ ID NO: 585541 - DNA, 75 bp, synthetic construct
  source 1..75: mol_type = other DNA
aaagaatttcttatggaatgctcaggagcggagcagaacaccgccgctgttagcagggttatttcaatgtttgga

SEQ ID NO: 585542 - DNA, 75 bp, synthetic construct
  source 1..75: mol_type = other DNA
ggaaggcttatttcagtcggggcgcattatggtagaaagtttgcagcatattctttcggtgcaaacggggattaa

SEQ ID NO: 585543 - DNA, 75 bp, synthetic construct
  source 1..75: mol_type = other DNA
ggaaggtttatttcagtcgggacgcattatggtagaaagtttgcagcatattctttctgtgcaaacggggattaa

SEQ ID NO: 585544 - DNA, 75 bp, synthetic construct
  source 1..75: mol_type = other DNA
aagcagcataaggaatgacaaaagtttttttattcatgaatataaaaaaccagatgcccttattctggtattaat

SEQ ID NO: 585545 - DNA, 75 bp, synthetic construct
  source 1..75: mol_type = other DNA
tttcagggacccttgcatgggttgatgagccgccgctttcaccagaacagaaaatatcagatgcagaaaacatga

SEQ ID NO: 585546 - DNA, 75 bp, synthetic construct
  source 1..75: mol_type = other DNA
tttgggtatggttttttttcctgttgtcgttaggtatctgtgtagtactcgtggcattgtccagttttgaaacgc

SEQ ID NO: 585547 - DNA, 75 bp, synthetic construct
  source 1..75: mol_type = other DNA
gcctgtcaaaggcgttgaatcaaccgtggccacaacgaatgcaggagatgtttcaacaatttttacctcatcgcg

SEQ ID NO: 585548 - DNA, 75 bp, synthetic construct
  source 1..75: mol_type = other DNA
aaaggcaaacgcgtagcggttatcggcggcggtaactccggcgtggaagcggcaattgacctggcgggtatcgtt

SEQ ID NO: 585549 - DNA, 75 bp, synthetic construct
  source 1..75: mol_type = other DNA
aactgcgcagcctgaaaaacgtcgacattattctgaatgcgcaaaccacggaagtgaaaggcgacggcagcaaag

SEQ ID NO: 585550 - DNA, 75 bp, synthetic construct
  source 1..75: mol_type = other DNA
tcaagcacactgcaattgacggcggcaccttccagaacgaaatcaccgatcgcaacgtgatgggcgttccggcag

SEQ ID NO: 585551 - DNA, 75 bp, synthetic construct
  source 1..75: mol_type = other DNA
ccgcagccagaacgaactccccacgttcctgaaggccgtgccggaagttgcgtaattcagaattcaggatgctga

SEQ ID NO: 585552 - DNA, 75 bp, synthetic construct
  source 1..75: mol_type = other DNA
ggagaacgcggcgctgagcgagcgcgtcacgggcttgagcaggcaggtgcagagtttgagcgatcagctgcgccg

SEQ ID NO: 585553 - DNA, 75 bp, synthetic construct
  source 1..75: mol_type = other DNA
ttgtatatggcgccgggaaatggctcgctaattacaggtattctcttcatggttaccgcatttctcgttttattt

SEQ ID NO: 585554 - DNA, 75 bp, synthetic construct
  source 1..75: mol_type = other DNA
gtgaaattggtagacaatgcagatggttcaaccatgctggataaacgttatgtcatcactaacggtaaccagttg

SEQ ID NO: 585555 - DNA, 75 bp, synthetic construct
  source 1..75: mol_type = other DNA
agaaatagcatggcgacaggatgccgttgatgtaggcatcgcgacggaagttgaaaccgccgcgcttactgaatg

SEQ ID NO: 585556 - DNA, 75 bp, synthetic construct
  source 1..75: mol_type = other DNA
caatggaagaaataccgtgtgctgctgatgcgtgttgatacgtcaacagcacccgatattgaatggcctacgcct

SEQ ID NO: 585557 - DNA, 75 bp, synthetic construct
  source 1..75: mol_type = other DNA
ttggaggcaagaaagaattcaccctgcggaacaagtcagagatggagctgttggctgacgcctatgagatggcaa

SEQ ID NO: 585558 - DNA, 75 bp, synthetic construct
  source 1..75: mol_type = other DNA
tattcatagttttattcacaacattatttatgacatccctgggaacgcaactcaggcaatagaaaaaattaaaca

SEQ ID NO: 585559 - DNA, 75 bp, synthetic construct
  source 1..75: mol_type = other DNA
ctcaacatggcaacacttacagcggcctgtatcaacaatgatgatggttatggcggaagacccgtcacaatatac

SEQ ID NO: 585560 - DNA, 75 bp, synthetic construct
  source 1..75: mol_type = other DNA
agatagttgtagcgtctacagaggtgaagaacactgataacggtctggatctcaacatggcaacacttacagcgg

SEQ ID NO: 585561 - DNA, 75 bp, synthetic construct
  source 1..75: mol_type = other DNA
ttataaatgaccttgctaatacgccccttcaggctatcgtttcgatcacaagaaacaacaaagatataattgcca

SEQ ID NO: 585562 - DNA, 75 bp, synthetic construct
  source 1..75: mol_type = other DNA
cttataaacggaaggtggtttataaatggtaaatataggcctgttctaaagaccagcatgaccaaaaccaatttc

SEQ ID NO: 585563 - DNA, 75 bp, synthetic construct
  source 1..75: mol_type = other DNA
caatttcaacattacttttgcatcttcacgcagcagctgcaccacatcaagagaaagagcatagaaaagatgctt

SEQ ID NO: 585564 - DNA, 75 bp, synthetic construct
  source 1..75: mol_type = other DNA
gcgttgatagttggtgtctttatgatctatccaaaaattagttctggtcagaagatagatagcgacataaaaata

SEQ ID NO: 585565 - DNA, 75 bp, synthetic construct
  source 1..75: mol_type = other DNA
agcttctgaaagaaaccctggaagaagaaaaggctaccgacatcaaactgactgatctggcccttaataacgtaa

SEQ ID NO: 585566 - DNA, 75 bp, synthetic construct
  source 1..75: mol_type = other DNA
tatttattcacctgctttcagacacctacagtgcagaaaaacaattaacacgggcactggcaaaactcgccagag

SEQ ID NO: 585567 - DNA, 75 bp, synthetic construct
  source 1..75: mol_type = other DNA
aaatactctgcatgaatgggacgaaggcgaattccagcttgagcctccgctggataccgaagaagggcgcacagc

SEQ ID NO: 585568 - DNA, 75 bp, synthetic construct
  source 1..75: mol_type = other DNA
agttcaatgtccagaaatatattctgcaagatggcgacattatgtggcaggttgagtttttagccgatgagggcg

SEQ ID NO: 585569 - DNA, 75 bp, synthetic construct
  source 1..75: mol_type = other DNA
atgttcaacattacaaagagaaagaaaaaagggttttcattattagagttgttattggttttcgggattatcgca

SEQ ID NO: 585570 - DNA, 75 bp, synthetic construct
  source 1..75: mol_type = other DNA
taattataatgtcgatcaattaatcattaatcgtgatgatgaggattatttgaccgacaatattaacgatccgtc

SEQ ID NO: 585571 - DNA, 75 bp, synthetic construct
  source 1..75: mol_type = other DNA
atgacgcagatgatttctaaaacgcaggccccggtcaaacgcgccggacgcatcgatcccatcgccttcttcgag

SEQ ID NO: 585572 - DNA, 75 bp, synthetic construct
  source 1..75: mol_type = other DNA
atgggtacagcgattggcttcctgcacggtctgggcgtcacccgcctgcgcctaccaccgttcatcgtcaccctt

SEQ ID NO: 585573 - DNA, 75 bp, synthetic construct
  source 1..75: mol_type = other DNA
atgaccctgaccccgagcccgaaacatttccctctacctttattactcccccgactaattcaataatgcttaaag

SEQ ID NO: 585574 - DNA, 75 bp, synthetic construct
  source 1..75: mol_type = other DNA
gtcggcgtgccaaactcattaggcccgggcgaactgttgcaacattacggcactgacgagcagaaagatcactat

SEQ ID NO: 585575 - DNA, 75 bp, synthetic construct
  source 1..75: mol_type = other DNA
cactgacgagcagaaagatcactatctgccgcgtctggcgcgtggtcaggagatcccttgctttgcactgaccag

SEQ ID NO: 585576 - DNA, 75 bp, synthetic construct
  source 1..75: mol_type = other DNA
cagttgtcctgctcggcgcgttgttctatcaccgcgtgagcttatttatcagcagtctgattttgctcgcctgga

SEQ ID NO: 585577 - DNA, 75 bp, synthetic construct
  source 1..75: mol_type = other DNA
ctggcggaaaagaaacagcttactcgccgcattgaacaagcgtcggctcgtgaagttgaatggcaggaaaaagcc

SEQ ID NO: 585578 - DNA, 75 bp, synthetic construct
  source 1..75: mol_type = other DNA
tttcgaatctttcgaacgtcgtatcgaccagatggaagcggaagcagaaagccacagcttcggcaaacaaaaatc

SEQ ID NO: 585579 - DNA, 75 bp, synthetic construct
  source 1..75: mol_type = other DNA
ctcgtcagcaggcgctgatgctgcgtcatcaggcagcgagttcttcgcgtgatgttcgtcgtcaactggacagcg

SEQ ID NO: 585580 - DNA, 75 bp, synthetic construct
  source 1..75: mol_type = other DNA
accgacaagacgttcagagcggtttccgccgatccgtcgaaagccaccattagtgtgaaagatatgacaattacg

SEQ ID NO: 585581 - DNA, 75 bp, synthetic construct
  source 1..75: mol_type = other DNA
tgagctgggattacgtgcgcagcttagcgcctcacgcagtcaggggctgaatgcattaagcgaggcgattatcgc

SEQ ID NO: 585582 - DNA, 75 bp, synthetic construct
  source 1..75: mol_type = other DNA
ggaaaaacaggagcttacacaagtgtatctttccctgcgcagcaagctggcgaaactggaaatctgtggttccgc

SEQ ID NO: 585583 - DNA, 75 bp, synthetic construct
  source 1..75: mol_type = other DNA
gccagcgtgacctgcgcgtatcgtcgtgatgaagtcagtatgccgggctcgcgcaaagaggtggtcaatgcgcgc

SEQ ID NO: 585584 - DNA, 75 bp, synthetic construct
  source 1..75: mol_type = other DNA
tagcgtgctggtgctggcgctgatgaccgggggattccacctggacggcctcgccgatacctgtgatggcgtatt

SEQ ID NO: 585585 - DNA, 75 bp, synthetic construct
  source 1..75: mol_type = other DNA
tagcgtacttgtgctggcgctgatgaccgggggattccacctggacggcctcgctgatacctgtgatggcgtatt

SEQ ID NO: 585586 - DNA, 75 bp, synthetic construct
  source 1..75: mol_type = other DNA
aataacaaccagagatggctggcacataatgattattccgccaacgcatcatatccggtggaatgagccagaaaa

SEQ ID NO: 585587 - DNA, 75 bp, synthetic construct
  source 1..75: mol_type = other DNA
ggtggcgaaatttcgggcgcagatcgttttatctggggagcccgcagaattcggaaaaaatcgtacgctaaggtt

SEQ ID NO: 585588 - DNA, 75 bp, synthetic construct
  source 1..75: mol_type = other DNA
atgggcaaccatgagcggctgatgattgatgcgttaagtcctgatggcaacgtgaataactggctaatgaatggc

SEQ ID NO: 585589 - DNA, 75 bp, synthetic construct
  source 1..75: mol_type = other DNA
atttatatagccgtattgatggttctggctacagaaacatatgggttgttggtgatctgcatggttgctacacca

SEQ ID NO: 585590 - DNA, 75 bp, synthetic construct
  source 1..75: mol_type = other DNA
ctggagaactccatctttattattcaggaacttacaccgagaatttagtttcagtttagatggcgctgcaactga

SEQ ID NO: 585591 - DNA, 75 bp, synthetic construct
  source 1..75: mol_type = other DNA
atgtgtgtgtatgtctggttccgcacaggtcaaagacaacttactggcttcggtgtgtatatacaaacccctttc

SEQ ID NO: 585592 - DNA, 75 bp, synthetic construct
  source 1..75: mol_type = other DNA
cacgcaaattccagtacctgaaatacccaagtatgtaaatgatttaactgacacattgacgaacaacgaagtaaa

SEQ ID NO: 585593 - DNA, 75 bp, synthetic construct
  source 1..75: mol_type = other DNA
ttgataaaagacatccggttgaacgggcggctgatgcgctcattcagcaggccattgtgttatatagcggtgaat

SEQ ID NO: 585594 - DNA, 75 bp, synthetic construct
  source 1..75: mol_type = other DNA
atgagcgtcaaaatcacaggtttagacaaaatgcagaaacagctaaaagaggttgagagagcaacagaggcatta

SEQ ID NO: 585595 - DNA, 75 bp, synthetic construct
  source 1..75: mol_type = other DNA
caccctttccattgacggtgagtcgactaccagcacatcaattgatttgtccacagccacaagttttagtgatat

SEQ ID NO: 585596 - DNA, 75 bp, synthetic construct
  source 1..75: mol_type = other DNA
tgccgactatccggataatgaataccaattcggtaaggaggtgccgcttttcaacgttgtctgggcgcgcgagcg

SEQ ID NO: 585597 - DNA, 75 bp, synthetic construct
  source 1..75: mol_type = other DNA
tcgcctcgatgatcaaagactcaatgagctatgccgagcaggacgtaaaagcccgtatgctggcagaacaaaaag

SEQ ID NO: 585598 - DNA, 75 bp, synthetic construct
  source 1..75: mol_type = other DNA
tccctagctgacatgcttatcccatcggcttcggagcttggcacaagagaaaaccaaacaaaccgcacactggct

SEQ ID NO: 585599 - DNA, 75 bp, synthetic construct
  source 1..75: mol_type = other DNA
cttcggcaacctcagcctgattagccacagcaagaattcgcgacttagtaatttccagccaaaacaaaagcaaga

SEQ ID NO: 585600 - DNA, 75 bp, synthetic construct
  source 1..75: mol_type = other DNA
agctgatgaagtgctggaagtggtgatggttggcggttctactcgcgtgccgctggtgcgtgaacgggtaggcga

SEQ ID NO: 585601 - DNA, 75 bp, synthetic construct
  source 1..75: mol_type = other DNA
gcgaaatgctgttgctggatgtgatcccgctgtcgctgggcctcgaaacgatgggcggcctggtggagaaagtga

SEQ ID NO: 585602 - DNA, 75 bp, synthetic construct
  source 1..75: mol_type = other DNA
ccaggatttcgccgctcgccgcatggaccagttggttcgtcgtgcgctgaaaggccattccgtggacgaggttta

SEQ ID NO: 585603 - DNA, 75 bp, synthetic construct
  source 1..75: mol_type = other DNA
atgagcaaaccacctcttttctttattgttatcattggcttaatcatcgtcgccgcatcgtttcgttttatgcaa

SEQ ID NO: 585604 - DNA, 75 bp, synthetic construct
  source 1..75: mol_type = other DNA
ggccagggggataatcttctgttacccgtttatccttccgaaaatgggaaagttggcacctcagaattcatgatt

SEQ ID NO: 585605 - DNA, 75 bp, synthetic construct
  source 1..75: mol_type = other DNA
gtaacagttgccgatagtcagtcgaataccaaaacctatactcagaagttcagttatctaccgaataaccttgtg

SEQ ID NO: 585606 - DNA, 75 bp, synthetic construct
  source 1..75: mol_type = other DNA
ctccattcgtttggcaacctttgccttatcagccacagcaagaactcgcgcttgagtaacttccagccgcaacag

SEQ ID NO: 585607 - DNA, 75 bp, synthetic construct
  source 1..75: mol_type = other DNA
cgaaatacaatgatggggctgatggtaaagcaattgccagctttaaggttaaaaaattactttgtgatgcaagcc

SEQ ID NO: 585608 - DNA, 75 bp, synthetic construct
  source 1..75: mol_type = other DNA
ttgttatcattggcttaatcattgtcgccgcatcatttcgctttatgcagcagcgacgggaaaaagctgataatg

SEQ ID NO: 585609 - DNA, 75 bp, synthetic construct
  source 1..75: mol_type = other DNA
cgtgatgtcaaccagccatcacgccatacaagaagcaattcttcctcccactattcatcatcgtcatcctcttca

SEQ ID NO: 585610 - DNA, 75 bp, synthetic construct
  source 1..75: mol_type = other DNA
gatacttgataaaagtttatctgataagcgtaagcgactcgtcagaaccgtattgatatttactgagagctcaga

SEQ ID NO: 585611 - DNA, 75 bp, synthetic construct
  source 1..75: mol_type = other DNA
gatggggtttagtgatactcacctctgttgctatgtgcttcatgacgatccggctggtcagcacatacacattat

SEQ ID NO: 585612 - DNA, 75 bp, synthetic construct
  source 1..75: mol_type = other DNA
gatagcaccaagtatcttcgccaggatgtcgcaaaaccagtttggcacaactcgcttcgcttacctgatggtgaa

SEQ ID NO: 585613 - DNA, 75 bp, synthetic construct
  source 1..75: mol_type = other DNA
aatcgtagaaaagatccttcaaaagaatgcagccaaacagcaaaagcatctcaggctcaccggctggattccctt

SEQ ID NO: 585614 - DNA, 75 bp, synthetic construct
  source 1..75: mol_type = other DNA
agctatgggaagagcattcttcacaaaacccatatgaccttctcaaatatctccgcaatgaaacctttaaacaag

SEQ ID NO: 585615 - DNA, 75 bp, synthetic construct
  source 1..75: mol_type = other DNA
aggggattgccttcaaagcttcgcagcttgggaaaaggtatacctggtcaaatattcagacacttattgattact

SEQ ID NO: 585616 - DNA, 75 bp, synthetic construct
  source 1..75: mol_type = other DNA
tcattacgggcgcacgcagggtgtcacggagcaggtactgaaggcaaatccggggcttgccgaacacggcccctt

SEQ ID NO: 585617 - DNA, 75 bp, synthetic construct
  source 1..75: mol_type = other DNA
cggaatgatgttgctggcggtggcgctgctgtcggtaagcgactccctgtcgctgcctgagccattttctcggcc

SEQ ID NO: 585618 - DNA, 75 bp, synthetic construct
  source 1..75: mol_type = other DNA
tactggtggtcatcctccaatcaggagatcctcggcatcaccggcgtggaacgccagctgtccgccatgattgac

SEQ ID NO: 585619 - DNA, 75 bp, synthetic construct
  source 1..75: mol_type = other DNA
atgtggcgtgagtttctggtgtggtgtacaaatccaccaccagaaaaaccgttcccggcttgtctggaagaacgg

SEQ ID NO: 585620 - DNA, 75 bp, synthetic construct
  source 1..75: mol_type = other DNA
ggaagagcgcctgcaaggcaaattatttaagcgcaagggacgtggtctcgaacccagcgagctgggagagctggt

SEQ ID NO: 585621 - DNA, 75 bp, synthetic construct
  source 1..75: mol_type = other DNA
agaaggttctgtggttggcgcagcggaggcgctttatttaacaccacaaacgattaccgggcagatcagggcgct

SEQ ID NO: 585622 - DNA, 75 bp, synthetic construct
  source 1..75: mol_type = other DNA
gctgcaaaccgggaaacgattctggagaaaatccatcagcttgaagaaaaaattcgtctggaaagacaacaggag

SEQ ID NO: 585623 - DNA, 75 bp, synthetic construct
  source 1..75: mol_type = other DNA
atgattaatgtcagtcatatcaggaccttaagtagcgttgagtcaactacttcaagtccatccatccgtctgaca

SEQ ID NO: 585624 - DNA, 75 bp, synthetic construct
  source 1..75: mol_type = other DNA
tctgacatcaacaaaacgcatgaaattctgcaggacgaatcgaaatgcgaaatgattgtggtcatcgaaaacttt

SEQ ID NO: 585625 - DNA, 75 bp, synthetic construct
  source 1..75: mol_type = other DNA
cacttaaaacgccttccggtaagattgaaatttattccagcaagctggcggaaattgcccgtacctgggaactgg

SEQ ID NO: 585626 - DNA, 75 bp, synthetic construct
  source 1..75: mol_type = other DNA
ccctttgccctttagcggttggtgggctttgttagtctgggcaatagtactgacctttatttccgccagaggata

SEQ ID NO: 585627 - DNA, 75 bp, synthetic construct
  source 1..75: mol_type = other DNA
ctggcgcaggaaaagcaggcgcaggtggttgtgttagtggttgaaacgacgggcgacgaaactatagagcagtat

SEQ ID NO: 585628 - DNA, 75 bp, synthetic construct
  source 1..75: mol_type = other DNA
tcggttacggactggaaggtattattacggatgcgcagtccgggaaaattattcgcaacagtattattcctgcat

SEQ ID NO: 585629 - DNA, 75 bp, synthetic construct
  source 1..75: mol_type = other DNA
ctatcggctcggactggtgttccctcccctaaggaagctctccaacagatcattgataaaagtttggctgataga

SEQ ID NO: 585630 - DNA, 75 bp, synthetic construct
  source 1..75: mol_type = other DNA
aatgggattcagtgatacccatctccgttgctatgtcttacataacgacaaaggccagcacatacacatcatcgc

SEQ ID NO: 585631 - DNA, 75 bp, synthetic construct
  source 1..75: mol_type = other DNA
aaattcgtctggaaagacaacaggaaacagtgggtgtcattcaactcaggagcaaactgcacaatacagctcgtc

SEQ ID NO: 585632 - DNA, 75 bp, synthetic construct
  source 1..75: mol_type = other DNA
ctcaggagcaaactgcacaatacagctcgtcagataccccgccagcgtcgtctgcattcgtggcttgtattactc

SEQ ID NO: 585633 - DNA, 75 bp, synthetic construct
  source 1..75: mol_type = other DNA
tctctgcaaacacagattgattttacaccagagcacctggctttactgaaaaaagagcaacagcagactgtgcca

SEQ ID NO: 585634 - DNA, 75 bp, synthetic construct
  source 1..75: mol_type = other DNA
taccggaacatctgactttactgaaacaagcacaaaagccaacagtacctgcacctgtgccattaacagtgccaa

SEQ ID NO: 585635 - DNA, 75 bp, synthetic construct
  source 1..75: mol_type = other DNA
agcgcgctggcccaacgcacacgtatcaccaagacggcattgttgttgacagtctttagccaagtgctggcacgt

SEQ ID NO: 585636 - DNA, 75 bp, synthetic construct
  source 1..75: mol_type = other DNA
gtactacaacgagaacagatcggactgaatgacaacttttttgaagcggggggcggctcaatccagatcgtgctg

SEQ ID NO: 585637 - DNA, 75 bp, synthetic construct
  source 1..75: mol_type = other DNA
ccgcaacaaaatcaaccggcggctaagcaaactcgaccttgcctctccagcgctggagcctgaggtaatttggct

SEQ ID NO: 585638 - DNA, 75 bp, synthetic construct
  source 1..75: mol_type = other DNA
ggcatccgcatgtggacgccgcggtggtggcctgtattgaaagagcaccgttacacaaagcactggcagcattca

SEQ ID NO: 585639 - DNA, 75 bp, synthetic construct
  source 1..75: mol_type = other DNA
agacatcaacgaacgctttggcctcaatgcgcaggatagggtgttcgggctgtcatcattgagctttgacctgtc

SEQ ID NO: 585640 - DNA, 75 bp, synthetic construct
  source 1..75: mol_type = other DNA
ggggtaaatagttctctggcgctgcccaccgttagtgcaccggtcacgcaggctcctgcacctacggccttgttg

SEQ ID NO: 585641 - DNA, 75 bp, synthetic construct
  source 1..75: mol_type = other DNA
ttcgaggcgctggcggtgaatgccggatcgctgctgacgccgataggcaacccgcaaaatattcttatctgggga

SEQ ID NO: 585642 - DNA, 75 bp, synthetic construct
  source 1..75: mol_type = other DNA
atgagcctgccttttttacgcacgctgcaaggcgatcgtttttttcagttattaattcttgttggcatcggatta

SEQ ID NO: 585643 - DNA, 75 bp, synthetic construct
  source 1..75: mol_type = other DNA
ttattgcccaaatggcaccgctggctggcgcaatgatgctgacactcctgctgttgtgctggtgttgtttccctg

SEQ ID NO: 585644 - DNA, 75 bp, synthetic construct
  source 1..75: mol_type = other DNA
tgatgaaacaacggtcggcgagatccgcccttttgctgacgacctggatgctgtcaggttcaaccgccacaaaat

SEQ ID NO: 585645 - DNA, 75 bp, synthetic construct
  source 1..75: mol_type = other DNA
gcagctccatcagcaaaaggggatgataagtttatcaccaccgactatttgcaacagtgcctgtataagcggcca

SEQ ID NO: 585646 - DNA, 75 bp, synthetic construct
  source 1..75: mol_type = other DNA
gtatttatggcgatgtttatcgacgtccatttgctgacccaactgccagctttgcagggcgtgttgagcaatgtg

SEQ ID NO: 585647 - DNA, 75 bp, synthetic construct
  source 1..75: mol_type = other DNA
ccaccgttagtgcaccggtcacgcaggctcctgcacctacggccttgttgcaccatgggttactgcgtcaggcag

SEQ ID NO: 585648 - DNA, 75 bp, synthetic construct
  source 1..75: mol_type = other DNA
cgtccaactatacgtcagaacatttaattaaaaactggcttgcctataatacagcgttgttacatttttttctta

SEQ ID NO: 585649 - DNA, 75 bp, synthetic construct
  source 1..75: mol_type = other DNA
ggaagggttgtatctggtcgcggtggattacccggacagattcgatcttccaaagccgccaatgggcccgctctt

SEQ ID NO: 585650 - DNA, 75 bp, synthetic construct
  source 1..75: mol_type = other DNA
gagctgttggcggctaaggacaggacgctggcggcagcaacggcgaaagcggaagggttgtatctggtcgcggtg

SEQ ID NO: 585651 - DNA, 75 bp, synthetic construct
  source 1..75: mol_type = other DNA
ctacatttgtttctgctgtgtttgctggttcagctatggcctatgacggaacaattacgtttaccggtaaagttg

SEQ ID NO: 585652 - DNA, 75 bp, synthetic construct
  source 1..75: mol_type = other DNA
ccaccatgttctgctacatcgtcggtgtgagcaaatgcctgcgtgatatccagacccacgcggagtacatcaacg

SEQ ID NO: 585653 - DNA, 75 bp, synthetic construct
  source 1..75: mol_type = other DNA
tatcaaaggccactcaggtaattgaaaaattcatgcccgccattatggaggcgatcaagctggaagacaaaaaag

SEQ ID NO: 585654 - DNA, 75 bp, synthetic construct
  source 1..75: mol_type = other DNA
gactgcgttttttatggcgtttttgctggtaatgaaatgcattacgaagtaattcagagtgagggactggccggg

SEQ ID NO: 585655 - DNA, 75 bp, synthetic construct
  source 1..75: mol_type = other DNA
cggcggcgagctttgtctggcgcgaagcgagtggtgagcgaatttaccgcactggggatcgcgggcgctactttg

SEQ ID NO: 585656 - DNA, 75 bp, synthetic construct
  source 1..75: mol_type = other DNA
cggcagcaactgccagactatatggtgccaacgctgtggcagagggtggccgacttcccgaacactgacaacggt

SEQ ID NO: 585657 - DNA, 75 bp, synthetic construct
  source 1..75: mol_type = other DNA
gtgtgcaggagaagctggaaaaggcgctctcccaggtggcgaacgaaccgatcaccgtcttctgcgccgggcgta

SEQ ID NO: 585658 - DNA, 75 bp, synthetic construct
  source 1..75: mol_type = other DNA
cctggctgtatcaggaaattagcgatttttcccgcattttcaacatcgaagatcgtggtcaggcgctgattgccg

SEQ ID NO: 585659 - DNA, 75 bp, synthetic construct
  source 1..75: mol_type = other DNA
aaccggtcaactggtgggcgtcgacccggcgttgctggtgctggcaacagcggctggctccaacacgctgaccca

SEQ ID NO: 585660 - DNA, 75 bp, synthetic construct
  source 1..75: mol_type = other DNA
ctgatgctgctgaccaaaggtgtggagttaagcggttattttgatgtgctggggcgcaaaatggtgcgccgcttt

SEQ ID NO: 585661 - DNA, 75 bp, synthetic construct
  source 1..75: mol_type = other DNA
tatctgcacgcacagcgtcagaaactgcacggttatctgccaagccgtcagccgaacttcaccgagaagcttgag

SEQ ID NO: 585662 - DNA, 75 bp, synthetic construct
  source 1..75: mol_type = other DNA
cgtatctatggggctggggccaatcggtgctatctaccaggcgaagttcctgaaatatctggaacaccgtggcct

SEQ ID NO: 585663 - DNA, 75 bp, synthetic construct
  source 1..75: mol_type = other DNA
cgccaatgaacatgacgacgaagccgtcagacagcagcaagaacaaaacaaccgaggagcaacataatgccgatg

SEQ ID NO: 585664 - DNA, 75 bp, synthetic construct
  source 1..75: mol_type = other DNA
ggcgtaggttctgacgtttatagcgtgacctccttcaccgagctggcgcgtgatggtcaggattgtgaacgctgg

SEQ ID NO: 585665 - DNA, 75 bp, synthetic construct
  source 1..75: mol_type = other DNA
cgtctttccagtcttccgcaaccatttatgatgtgtgttttaaccacttcttccgtgcacgcaacgagcaggatg

SEQ ID NO: 585666 - DNA, 75 bp, synthetic construct
  source 1..75: mol_type = other DNA
ctatcctgcgtcatgtccgtgaagcagcacagatcctggcgaaagattacggcgtaggttctgacgtctatagcg

SEQ ID NO: 585667 - DNA, 75 bp, synthetic construct
  source 1..75: mol_type = other DNA
tataccggaaagcggatcagtagccagcgggccatgcggctgacggcggtgtattcctgcgtcagggtactggcg

SEQ ID NO: 585668 - DNA, 75 bp, synthetic construct
  source 1..75: mol_type = other DNA
caccttcaacaatattgaagagctggggcttggtttcattaactattcccttgtgccgtacctgacccgtattga

SEQ ID NO: 585669 - DNA, 75 bp, synthetic construct
  source 1..75: mol_type = other DNA
cgtacggtgaaagtgaccaacgtgggtaaaccttctgtggcggaagaacgcagcgaaattacgccggtcactgcg

SEQ ID NO: 585670 - DNA, 75 bp, synthetic construct
  source 1..75: mol_type = other DNA
atgtttttccaggggctttttcaacgcaaaaataacacccccgtcacaacgcccgggatgcttgcggaagaactt

SEQ ID NO: 585671 - DNA, 75 bp, synthetic construct
  source 1..75: mol_type = other DNA
atatccattgaactggtggacgcgctgaaagctatggaactggccttcgaagaagcgattacaccgtatttacag

SEQ ID NO: 585672 - DNA, 75 bp, synthetic construct
  source 1..75: mol_type = other DNA
gtggggctgaatcccatcgcctatgcccgcgaggcaatatcgctggcagctgcgaccgaagagcacggggccaga

SEQ ID NO: 585673 - DNA, 75 bp, synthetic construct
  source 1..75: mol_type = other DNA
atatggtgcagaacactgatcgcgccaccttcaacaatattgaagagctggggcttggcttcattaactattccc

SEQ ID NO: 585674 - DNA, 75 bp, synthetic construct
  source 1..75: mol_type = other DNA
tgcaaagtcaacgaccggagccggcggcatgggcgatggagaaagcccaggacttacagcagatgctgaactcaa

SEQ ID NO: 585675 - DNA, 75 bp, synthetic construct
  source 1..75: mol_type = other DNA
cccctctggttttctgcatcattgtctgcctgtcattggctgttaatcattatcgtaataatgccattacctaca

SEQ ID NO: 585676 - DNA, 75 bp, synthetic construct
  source 1..75: mol_type = other DNA
atgattgaccgtgactggcaggacccagataaacctggcatctggacagatgaaagcagacatcccgatacccgc

SEQ ID NO: 585677 - DNA, 75 bp, synthetic construct
  source 1..75: mol_type = other DNA
acccaggaaaaagaatcacttatcgcagtaaagtcaaagaccaaaattactattctgttgcagtcaatgcaggtt

SEQ ID NO: 585678 - DNA, 75 bp, synthetic construct
  source 1..75: mol_type = other DNA
atcattttacctgcggtttccatcgcctttatgtcgctggcgataaacgctcgcctgttgcgcgccagtatgctg

SEQ ID NO: 585679 - DNA, 75 bp, synthetic construct
  source 1..75: mol_type = other DNA
acgctggaacttgcaggtgcggcgctggtattaattctgctcacctccgtgccgctcggtatctgggcggcgcgc

SEQ ID NO: 585680 - DNA, 75 bp, synthetic construct
  source 1..75: mol_type = other DNA
gcactccatcccggtttgcaatttacgctcgggcagcatcgctatccggtgaccgccgttggcagcgtggcggaa

SEQ ID NO: 585681 - DNA, 75 bp, synthetic construct
  source 1..75: mol_type = other DNA
ggcgaacgtctgcataagctgatctccacgcatcccaatggctatatgacgccgcaggagttctgggagctggtg

SEQ ID NO: 585682 - DNA, 75 bp, synthetic construct
  source 1..75: mol_type = other DNA
gagctggtggtcacctgtctgtgtctgcggggaaacttttacgcctacaaagtgaaagcatttggcgaagtggct

SEQ ID NO: 585683 - DNA, 75 bp, synthetic construct
  source 1..75: mol_type = other DNA
gttaactgggagctgaatccatggttatctgttggtgcagctggctggaccactctcaatagtcgggggggggat

SEQ ID NO: 585684 - DNA, 75 bp, synthetic construct
  source 1..75: mol_type = other DNA
atgaggtttattgaggttgatgagattggctatgagaatgcacgtggtagaggtaaatctttagttaacattgat

SEQ ID NO: 585685 - DNA, 75 bp, synthetic construct
  source 1..75: mol_type = other DNA
aggtggaatcattccttgccgtgattcagtagagtcaatcaaatcaaaaatgagtggtcagtggctttatagcta

SEQ ID NO: 585686 - DNA, 75 bp, synthetic construct
  source 1..75: mol_type = other DNA
taaaccggaagataccgtgctggtgtgtggttcattccacacggtcgcacatgtcatggaagtgattgacgcgag

SEQ ID NO: 585687 - DNA, 75 bp, synthetic construct
  source 1..75: mol_type = other DNA
ggtcgtctggatgccaccaatattgtcgatgctgatgtagctgtggtgaccagcattgcgctggatcataccgac

SEQ ID NO: 585688 - DNA, 75 bp, synthetic construct
  source 1..75: mol_type = other DNA
atacgatgcctgttgctgttcagccaggagcttttctgccatccgcgagccagtgtgacaggtgatgaagcatgt

SEQ ID NO: 585689 - DNA, 75 bp, synthetic construct
  source 1..75: mol_type = other DNA
agtcgcattgtctctggggttaccggttgtgaccgccattacccatcgtccggtacagcgctgtacattgattac

SEQ ID NO: 585690 - DNA, 75 bp, synthetic construct
  source 1..75: mol_type = other DNA
ccgctagtcccgcaaccgaatgccgcaacggcgttggcggcgctacgagccagcggccttgacgtcagtgaacag

SEQ ID NO: 585691 - DNA, 75 bp, synthetic construct
  source 1..75: mol_type = other DNA
cgcatctggtgcgttataccgagcgcgttcgtgtgcagggccaggaattgccggaatcggcccacaccgcctctt

SEQ ID NO: 585692 - DNA, 75 bp, synthetic construct
  source 1..75: mol_type = other DNA
aaaaacatgtcagtgaaaaagaaacctggcgttgggttgaaggatataataaagcaacagaactggctcgccaat

SEQ ID NO: 585693 - DNA, 75 bp, synthetic construct
  source 1..75: mol_type = other DNA
ggcggttgtaacttatatatgccaaaaaattttgacaatgcagctaaagctattcgccttcttaatgaggttgca

SEQ ID NO: 585694 - DNA, 75 bp, synthetic construct
  source 1..75: mol_type = other DNA
ttttctatactcaaaatcattagtgcaaacaggtacggcttttcagattattggttatcgttactcgacggaagg

SEQ ID NO: 585695 - DNA, 75 bp, synthetic construct
  source 1..75: mol_type = other DNA
atacgatgcctgttgctgttcagccaggagcttttctgccatccgcgagccagtgtgacagctgatgaaggatgt

SEQ ID NO: 585696 - DNA, 75 bp, synthetic construct
  source 1..75: mol_type = other DNA
attgacgctacggtgtggggcggcgcggcggggatgtttgcctcgttaatcatcgcctgcgtgcttaccctcgtc

SEQ ID NO: 585697 - DNA, 75 bp, synthetic construct
  source 1..75: mol_type = other DNA
aatcatggagattacaccgcagcaactggttgaattcactatacctgatgggcgggggcagcaagccagaacact

SEQ ID NO: 585698 - DNA, 75 bp, synthetic construct
  source 1..75: mol_type = other DNA
agaccaggagcaaaagcgcctggcaaagcgtacacaggaaatgactgatggcgaagtgcaggcagccacacaacg

SEQ ID NO: 585699 - DNA, 75 bp, synthetic construct
  source 1..75: mol_type = other DNA
gacaagaaatttaccaaaagagaatatggttacaggtactaagagtgatgatattttcgaagagtcgtttaagtt

SEQ ID NO: 585700 - DNA, 75 bp, synthetic construct
  source 1..75: mol_type = other DNA
atttattaggtaatcctaatgattttgcaaaaataaatgaggtaataaataatagggatattatcttactagaag

SEQ ID NO: 585701 - DNA, 75 bp, synthetic construct
  source 1..75: mol_type = other DNA
ccgaatatatagataagaatggtttttttgtcggaaaccaccagatacctttgtttaatgaaatagattatctac

SEQ ID NO: 585702 - DNA, 75 bp, synthetic construct
  source 1..75: mol_type = other DNA
ggcggtcattgtacgtatgacacgctcctcgatgctggaagtgctgggtgaagattatatccgcaccgcgcgcgc

SEQ ID NO: 585703 - DNA, 75 bp, synthetic construct
  source 1..75: mol_type = other DNA
ttagcgtaattggtgatgatctattaaacataataaattgccaaaacaaagccgcactggagaacataattcatc

SEQ ID NO: 585704 - DNA, 75 bp, synthetic construct
  source 1..75: mol_type = other DNA
ggaagcatattaatcttgggaagatattctgcaaatggttcaaaatagcagaaagatatatgccattgacaataa

SEQ ID NO: 585705 - DNA, 75 bp, synthetic construct
  source 1..75: mol_type = other DNA
aacatgctgcacccgctggaaactccgcgcgttccgtatatcgctcaggtgatgaacgacgctccggcagtggca

SEQ ID NO: 585706 - DNA, 75 bp, synthetic construct
  source 1..75: mol_type = other DNA
atgcaaaaactttggttagacctcgaaactttcagcgaaatcccaataaaaaacggcacccatgtctatgcagaa

SEQ ID NO: 585707 - DNA, 75 bp, synthetic construct
  source 1..75: mol_type = other DNA
catcccgcgacctgcgatttctggtacgagcttgagcgcaccgtccgcaccgccatcgctacacccaaaaagacg

SEQ ID NO: 585708 - DNA, 75 bp, synthetic construct
  source 1..75: mol_type = other DNA
cgatatctcagtcgtggcaaaaggtatggagcagatgttgaatcccccgggaaacgtggatctgcaccggctgat

SEQ ID NO: 585709 - DNA, 75 bp, synthetic construct
  source 1..75: mol_type = other DNA
gtcagattggtatttacagcccgaatggtcagcagtacaccccgcaggaccgcgagcaggttgcttactataaag

SEQ ID NO: 585710 - DNA, 75 bp, synthetic construct
  source 1..75: mol_type = other DNA
ccagcaagcgcgtggcttcctgatcggcggtacttccggtcgtaccaccctgaacggtgaaggtctgcagcacga

SEQ ID NO: 585711 - DNA, 75 bp, synthetic construct
  source 1..75: mol_type = other DNA
aggtttatctctccggtttgcctttacaaggcataataaatatacagtggggagaaagttcttatcagcaatgtc

SEQ ID NO: 585712 - DNA, 75 bp, synthetic construct
  source 1..75: mol_type = other DNA
ccgttctggcatcatttttagtctttttttatattccgcagagctatgccggggttgctctgggggccacccgcg

SEQ ID NO: 585713 - DNA, 75 bp, synthetic construct
  source 1..75: mol_type = other DNA
gaaatggggcagatgctggcaaaggacagatttactctgaaggaagcggcgatgaccgcgcggcgttcctggcag

SEQ ID NO: 585714 - DNA, 75 bp, synthetic construct
  source 1..75: mol_type = other DNA
gtatcaaatatcccaacggcactgttgatgttttccgtggctggctgagctcactgggtaaaaccattgcctcaa

SEQ ID NO: 585715 - DNA, 75 bp, synthetic construct
  source 1..75: mol_type = other DNA
aacatagacgttgtcgctattaatgatctcacttccccaaaaattctcgcctatctgctgaaacatgattcaaac

SEQ ID NO: 585716 - DNA, 75 bp, synthetic construct
  source 1..75: mol_type = other DNA
cagtcgcctggtacgacaacgaatatggctttgtcacccagcttattcgcaccctggaaaaattcgccaaactct

SEQ ID NO: 585717 - DNA, 75 bp, synthetic construct
  source 1..75: mol_type = other DNA
catggataaggcgaaaaccggcgagaattatctgcagtttgcaattgtcagcagaattaaactgctctaccgtcc

SEQ ID NO: 585718 - DNA, 75 bp, synthetic construct
  source 1..75: mol_type = other DNA
atgttcagccgcaatatatcgcctgtgatgaagatggacgtctaacggcggtagggttgattcgcaccgcaatgg

SEQ ID NO: 585719 - DNA, 75 bp, synthetic construct
  source 1..75: mol_type = other DNA
agctcatgggattgccggagtctgcagagtatccgctgacggatgtggaaggtaagcgagttgtggtattgggcg

SEQ ID NO: 585720 - DNA, 75 bp, synthetic construct
  source 1..75: mol_type = other DNA
gcgtacatctattcgtttgaatgccgccagcgtaacctgtgcttatcgtcgtgatgaagtcagtatgccgggatc

SEQ ID NO: 585721 - DNA, 75 bp, synthetic construct
  source 1..75: mol_type = other DNA
atgacgacactctggatggcaacgacaccattgtttccgtggcgtcatgcaccactaactgtcttgcgccgatgg

SEQ ID NO: 585722 - DNA, 75 bp, synthetic construct
  source 1..75: mol_type = other DNA
tttggcgtcgttgagatggtcgatacgattgcgcagaaatgcgacctttgtaaccagcgcagttccggcacgcaa

SEQ ID NO: 585723 - DNA, 75 bp, synthetic construct
  source 1..75: mol_type = other DNA
atatttatccactcaaacgcatctgaaaaaagtctttgctggtggcgatgctgttcatggtgcggatctggtcgt

SEQ ID NO: 585724 - DNA, 75 bp, synthetic construct
  source 1..75: mol_type = other DNA
accaccaactgtcttgcgccgatggccaaagccttgcacgacagtttcggaatagaagtcggcacgatgacgact

SEQ ID NO: 585725 - DNA, 75 bp, synthetic construct
  source 1..75: mol_type = other DNA
gcagaagatgttgaccgcgcaagaacggcgcagcgcgcggcagaagccgatcttaatgccgtattgttacaggca

SEQ ID NO: 585726 - DNA, 75 bp, synthetic construct
  source 1..75: mol_type = other DNA
ctgcgcagcgcgccgcagaagccgatcttaatgccgtattgttacaggcgcagtcagccgccagcgccgtcagcg

SEQ ID NO: 585727 - DNA, 75 bp, synthetic construct
  source 1..75: mol_type = other DNA
gcggaagaggttgaccgtgcaagaaccgcacagcgtgcggcagaagcggaccttaatgccgtattgttacaagcg

SEQ ID NO: 585728 - DNA, 75 bp, synthetic construct
  source 1..75: mol_type = other DNA
gtatgccggagtatctggatcgctgctggaacaacataatctcaactataatattcaacaaaattttgccaacca

SEQ ID NO: 585729 - DNA, 75 bp, synthetic construct
  source 1..75: mol_type = other DNA
tcagttgatcccctgtttttcgctcgatgagttagttactttaggaattaacaaaagtgcattgccggaacaggc

SEQ ID NO: 585730 - DNA, 75 bp, synthetic construct
  source 1..75: mol_type = other DNA
gcgatacgttacgccgtaccgagccgttgctaaaagaaggttttgtctcagcggaagacgttgaccgtgcgagga

SEQ ID NO: 585731 - DNA, 75 bp, synthetic construct
  source 1..75: mol_type = other DNA
tgaaatgaaaaccatcgtttataacgtcaatgacgacacactggatggcaacgacaccattgtttccgtggcgtc

SEQ ID NO: 585732 - DNA, 75 bp, synthetic construct
  source 1..75: mol_type = other DNA
ccggaactgagcggcaaactgaaaggtcatgcgcaacgcgtgccggtgaaaacaggttcggtcactgaactggta

SEQ ID NO: 585733 - DNA, 75 bp, synthetic construct
  source 1..75: mol_type = other DNA
cttgcatgacagtttcgggatagaagtcggcacgatgacgaccattcatgcctatactggcacccagtcactggt

SEQ ID NO: 585734 - DNA, 75 bp, synthetic construct
  source 1..75: mol_type = other DNA
ggtcgagtgcatgggcttgtgcgcaggatttgatgtgtagagacattaaagttgtatcctttaacctgaaaaaga

SEQ ID NO: 585735 - DNA, 75 bp, synthetic construct
  source 1..75: mol_type = other DNA
aatcaaagcctgaaaaacacgctggcggttcatctgccgaagcggttggttgaacggttacaacaactcgggcaa

SEQ ID NO: 585736 - DNA, 75 bp, synthetic construct
  source 1..75: mol_type = other DNA
atgacaacacgctggatggcaacgacaccattgtttccgtggcgtcctgcaccaccaactgtcttgcgccgatgg

SEQ ID NO: 585737 - DNA, 75 bp, synthetic construct
  source 1..75: mol_type = other DNA
gcagaatcaaaactctgaacacccggcggataaatgtcctgaagggggaacagcgtcgtgtcagtggcagtgccc

SEQ ID NO: 585738 - DNA, 75 bp, synthetic construct
  source 1..75: mol_type = other DNA
cgtcattttaaccagacgctgcgcgataatctgaacggcattattgccgcagattgtcagcaggtggatgaaacc

SEQ ID NO: 585739 - DNA, 75 bp, synthetic construct
  source 1..75: mol_type = other DNA
ccactttttacgccacttcccggcgctggttggctggcttccggcacacacaccacgtctggcgcaggttgatcc

SEQ ID NO: 585740 - DNA, 75 bp, synthetic construct
  source 1..75: mol_type = other DNA
atggctgagcttcgtacactccagagcagaatcaaaacactgaatacccggcgggtgaatgtcctgaagggtgaa

SEQ ID NO: 585741 - DNA, 75 bp, synthetic construct
  source 1..75: mol_type = other DNA
gtactgaatgccatcgacaaaagtctgctcgtgaagcggcgggtggtatgccggacccgacgctgccggaggtgt

SEQ ID NO: 585742 - DNA, 75 bp, synthetic construct
  source 1..75: mol_type = other DNA
atctttattattcagtttgttgtgcgaaaaaaatgttaactggctttttcagcaaatgttaaccaggcagcagtt

SEQ ID NO: 585743 - DNA, 75 bp, synthetic construct
  source 1..75: mol_type = other DNA
agtgtgcacgtggtttactggcgaaagatctctcctcggcgattgtgattcgtaccagcgcggcttccgatgcgc

SEQ ID NO: 585744 - DNA, 75 bp, synthetic construct
  source 1..75: mol_type = other DNA
gaacagttgtgcgatgaaggtttcgaccagtgcttcggcagcgtggaaagcggtgttaatggcgctggatgatac

SEQ ID NO: 585745 - DNA, 75 bp, synthetic construct
  source 1..75: mol_type = other DNA
tgatgaaaaacggtctgggcgtcaccgttcccggtacaggaatggtggggctgccgattgcagcggcgctgggag

SEQ ID NO: 585746 - DNA, 75 bp, synthetic construct
  source 1..75: mol_type = other DNA
tgcacttcagttcggtggtggtaatgaggagacgaatctctggacgctctgtaccgaatgccatcgccagaagtc

SEQ ID NO: 585747 - DNA, 75 bp, synthetic construct
  source 1..75: mol_type = other DNA
cagctgctggctgaactcggcttagataaaccgatgtggcagcagtatctccattacatttggggcgtaatgcac

SEQ ID NO: 585748 - DNA, 75 bp, synthetic construct
  source 1..75: mol_type = other DNA
cgttaggtgggaatgccaatgccgggctggaagtgctgaaagacgcaactgcgcaggcaattgccgatgccaaag

SEQ ID NO: 585749 - DNA, 75 bp, synthetic construct
  source 1..75: mol_type = other DNA
cttctcttgaagatatcctgcttgagataacctcgctggtagataacgcattggatctggctgaaattacagaag

SEQ ID NO: 585750 - DNA, 75 bp, synthetic construct
  source 1..75: mol_type = other DNA
gcaggcaccgttctggtcattaacgtcctcgacccggcgaaacataaaacggcgatcgaggatgaggtggttacc

SEQ ID NO: 585751 - DNA, 75 bp, synthetic construct
  source 1..75: mol_type = other DNA
acgccgccacgggggtcattacgctgccaacttttatggtcggcgcagggctgagtattagctatcgttatctga

SEQ ID NO: 585752 - DNA, 75 bp, synthetic construct
  source 1..75: mol_type = other DNA
tggtggagcaactcaaaccaggaaattcagggtattaccggtattgaacgttcgctttctgcaatgattgatgat

SEQ ID NO: 585753 - DNA, 75 bp, synthetic construct
  source 1..75: mol_type = other DNA
gtttttactaacatgcaatcacgaatagctaagggaatattagtaggtgaaagcaaaatcactccctgggccatt

SEQ ID NO: 585754 - DNA, 75 bp, synthetic construct
  source 1..75: mol_type = other DNA
ttaacgaacaggggatcaccacagtattcagcagttacggcagcggccttcgtctgtggggtaaccggacggcag

SEQ ID NO: 585755 - DNA, 75 bp, synthetic construct
  source 1..75: mol_type = other DNA
tgtggtggtgaaaaacagtgaaggcagcaccacccacacggcgaacacggactaccgtgttgatgcgcaggcggg

SEQ ID NO: 585756 - DNA, 75 bp, synthetic construct
  source 1..75: mol_type = other DNA
tagaaactattgaaattgaaaccggcccgcgtccggttaaagcggtaaaatccgccgtcatcgctttaatcggta

SEQ ID NO: 585757 - DNA, 75 bp, synthetic construct
  source 1..75: mol_type = other DNA
taggaatctccagcgtgcaacaggaagagtattacattgttttcgggcgttatcgcttaaatcttctcttgaaga

SEQ ID NO: 585758 - DNA, 75 bp, synthetic construct
  source 1..75: mol_type = other DNA
aatcagaagatgatgccgttgtcatcggtaggaatctccagcgtgcaacaggaagagtattacattgttttcggg

SEQ ID NO: 585759 - DNA, 75 bp, synthetic construct
  source 1..75: mol_type = other DNA
tcatcaacctttaacaccgcagcatttagcgtagatgaacaaacaggcataattacccgtaaaggagccgacatt

SEQ ID NO: 585760 - DNA, 75 bp, synthetic construct
  source 1..75: mol_type = other DNA
caacttcaacaccagttctgaccgtgcgcgtttatgctatccgcacgtcaaagtttatgacggctcaaccaacca

SEQ ID NO: 585761 - DNA, 75 bp, synthetic construct
  source 1..75: mol_type = other DNA
cccgcgtccggttaaagcggtaaaatccgccgtcatcgctttaatcggtacagccccctgcggtccggtaaataa

SEQ ID NO: 585762 - DNA, 75 bp, synthetic construct
  source 1..75: mol_type = other DNA
atccgctttattctcgattccgcgaagctaaattgtgcgttatcgcaggaaggtttgagcggtaagtgggggctg

SEQ ID NO: 585763 - DNA, 75 bp, synthetic construct
  source 1..75: mol_type = other DNA
tggatcgttttaacaaagaatttgtgagcacgtttacctcctgtcaaaaggggtgctcttcgtgctgtaaaatcg

SEQ ID NO: 585764 - DNA, 75 bp, synthetic construct
  source 1..75: mol_type = other DNA
agcgggtagcgaagccatgcccgtcgcctgtggccgtctggcagatgttactgacccgtctacttgcacaacact

SEQ ID NO: 585765 - DNA, 75 bp, synthetic construct
  source 1..75: mol_type = other DNA
attcagtgatgaaactgttattaaggaacatattgatgccgggatcaccctggccgatgcagtcaactttctggt

SEQ ID NO: 585766 - DNA, 75 bp, synthetic construct
  source 1..75: mol_type = other DNA
gacatatattgcacaggcagctaaaatcatagccagagataatcaacttacgaccggacataattcaaaatgtcc

SEQ ID NO: 585767 - DNA, 75 bp, synthetic construct
  source 1..75: mol_type = other DNA
gatgcacaagtcatgcagtatggttctcaaagtgcgaacatgggaaatcacatctacaaaacaatagctgagtgg

SEQ ID NO: 585768 - DNA, 75 bp, synthetic construct
  source 1..75: mol_type = other DNA
cagagacgtcttcccttatccccgcgaggatatccaaagatttcttcaccataacccccctcgtccattttgtta

SEQ ID NO: 585769 - DNA, 75 bp, synthetic construct
  source 1..75: mol_type = other DNA
ataaaccgatgtggcagcagtatctccattacatttggggcgttatgcatggcgatctaggcatttcgatgaaaa

SEQ ID NO: 585770 - DNA, 75 bp, synthetic construct
  source 1..75: mol_type = other DNA
cagcatattgaggcgggtatttcactgtgtgatgcggtgaactttcttgtggaaaaatacgcgctggtgcgtacc

SEQ ID NO: 585771 - DNA, 75 bp, synthetic construct
  source 1..75: mol_type = other DNA
accggcctgatgacccggaacaattacagaatggtaaataacattacccagggcaagcatccggaggcaaaacaa

SEQ ID NO: 585772 - DNA, 75 bp, synthetic construct
  source 1..75: mol_type = other DNA
cgatattctccgcgccagaaaagcctgtggcctgatgaaacgtcgcggctaccggactgttaccgacatcaccac

SEQ ID NO: 585773 - DNA, 75 bp, synthetic construct
  source 1..75: mol_type = other DNA
accgggctgatgacccgcaacggctacaaagtggtgaccgatatcaccaccggcaaataccgtggggtgcagcaa

SEQ ID NO: 585774 - DNA, 75 bp, synthetic construct
  source 1..75: mol_type = other DNA
accgggttgatgacccgcaacgattacaaagtggtgaccgacatcaccaacggtaaataccgcgaggggcagcga

SEQ ID NO: 585775 - DNA, 75 bp, synthetic construct
  source 1..75: mol_type = other DNA
tagatacgcctgaaaccctgaatttttgtctgcaagttgttcctgatgctcatgctgtattgattaaaaatgaac

SEQ ID NO: 585776 - DNA, 75 bp, synthetic construct
  source 1..75: mol_type = other DNA
tgtattacttctggcatgtctacaaagaaggttctgtggttggcgcagcggaggcgctttatttaacaccacaaa

SEQ ID NO: 585777 - DNA, 75 bp, synthetic construct
  source 1..75: mol_type = other DNA
ccgatgtcgggtttgagcagggcggagaagtgacgcgagcggcgatggtgctgctgaaatacccctcgcttgagc

SEQ ID NO: 585778 - DNA, 75 bp, synthetic construct
  source 1..75: mol_type = other DNA
agagtattacattgtttttggtgcattatcgcttaactcttcccttgatgatctcctgctggagataaccacgct

SEQ ID NO: 585779 - DNA, 75 bp, synthetic construct
  source 1..75: mol_type = other DNA
agcgcggtttgctggcgaaagatctctcttcatccattgtgattcgtaccagcgcggcatccgatgcgcgtatgg

SEQ ID NO: 585780 - DNA, 75 bp, synthetic construct
  source 1..75: mol_type = other DNA
tcgtgaactatcgcaaagaatccaatttattgtttgacgttggcgtggctgatgcactttctaaacgcctggtca

SEQ ID NO: 585781 - DNA, 75 bp, synthetic construct
  source 1..75: mol_type = other DNA
atgattcagcacccggcggtacagcgaatctgcaatacggattattctgcgctttttagtccagcggcgcgttaa

SEQ ID NO: 585782 - DNA, 75 bp, synthetic construct
  source 1..75: mol_type = other DNA
cattccggacaccgtgggctacaccatgccgtttgagttcgccggaatcatcagcggcctgtatgaacgcgtacc

SEQ ID NO: 585783 - DNA, 75 bp, synthetic construct
  source 1..75: mol_type = other DNA
attatcgtccatgcgctgcgtaacgccatgctgccggtggtaaccgttattggcctacaggtagggacgctgctg

SEQ ID NO: 585784 - DNA, 75 bp, synthetic construct
  source 1..75: mol_type = other DNA
tttggcgtacgtagcgctatgccgacagggatggcgctcaaattatgcccacatctcaccttgcttccggggcgc

SEQ ID NO: 585785 - DNA, 75 bp, synthetic construct
  source 1..75: mol_type = other DNA
ttgctacggcagtcggtattccggttggtgtgctggctgcggttaaacgcggttccattttcgatcacactgcag

SEQ ID NO: 585786 - DNA, 75 bp, synthetic construct
  source 1..75: mol_type = other DNA
tcagcggcctgtatgaacgcgtgcctaacatcgacaaagccattatctccgtacatacccacgacgatttgggcc

SEQ ID NO: 585787 - DNA, 75 bp, synthetic construct
  source 1..75: mol_type = other DNA
agcgtgccggtaactgttccctggaagaagtcatcatggcgatcaaagttcgtaaggatattctcaacgtccaca

SEQ ID NO: 585788 - DNA, 75 bp, synthetic construct
  source 1..75: mol_type = other DNA
atactcttcagaaggtcactcaggaactgaataaacaaatcaccgctaaaggtggctggaaagctatttcagaaa

SEQ ID NO: 585789 - DNA, 75 bp, synthetic construct
  source 1..75: mol_type = other DNA
ggtatggacacaaccgaaacacaagcacagtttgcttcatttggtgcatctgcaaaaaatacgatgggtcttgaa

SEQ ID NO: 585790 - DNA, 75 bp, synthetic construct
  source 1..75: mol_type = other DNA
cgcagacaatgctagggaacttaaagaatacctggaataactcattaacggatatttttagaggttctgaagatg

SEQ ID NO: 585791 - DNA, 75 bp, synthetic construct
  source 1..75: mol_type = other DNA
tttaaacagtttaggtgggagtggtaaaacattaggtgaaagtcttggtggcttgatgagtgatatgtcgcatgg

SEQ ID NO: 585792 - DNA, 75 bp, synthetic construct
  source 1..75: mol_type = other DNA
atggcacagtttaaagttgatgattttctgattgagttaagttttaactctcagaaagttttaaaaggtctggaa

SEQ ID NO: 585793 - DNA, 75 bp, synthetic construct
  source 1..75: mol_type = other DNA
ggttctatcgctgactggtttaatggtgcagttaataaaattgctaacttccaagaaccgatgaataaccttgta

SEQ ID NO: 585794 - DNA, 75 bp, synthetic construct
  source 1..75: mol_type = other DNA
cagcttgacagcaatttaacggcttctttaaagtcaatggaagggaaaattaataagacctttgaccgtctggaa

SEQ ID NO: 585795 - DNA, 75 bp, synthetic construct
  source 1..75: mol_type = other DNA
agttttacgggctatctgctaaagccgggtcaatggattcttcaaaattcaatgagaagttagctcagttaaacg

SEQ ID NO: 585796 - DNA, 75 bp, synthetic construct
  source 1..75: mol_type = other DNA
cagcttgatagtaatttaacggcttctttaaagtcaatggaagggaagattaataagacctttgaccgtctggaa

SEQ ID NO: 585797 - DNA, 75 bp, synthetic construct
  source 1..75: mol_type = other DNA
taataagacctttgacaagattgagcagcgtcttaaaaacactagagcgtttaagattaaaacggaaattgagga

SEQ ID NO: 585798 - DNA, 75 bp, synthetic construct
  source 1..75: mol_type = other DNA
ggaagcggtaagagtcttggtgaatctcttggtagtctcatgacttctatgtcaagtggtgtggatagcctgact

SEQ ID NO: 585799 - DNA, 75 bp, synthetic construct
  source 1..75: mol_type = other DNA
gagcaatcacagcagcttattcagcgaatatgagcaagttaaagggctttgaccctattatgcagaaatacatca

SEQ ID NO: 585800 - DNA, 75 bp, synthetic construct
  source 1..75: mol_type = other DNA
tcggtgcatctgcaaagaatacgatgggtcttgaaggctcagaggaattatttaaaaacttaactggatatgccc

SEQ ID NO: 585801 - DNA, 75 bp, synthetic construct
  source 1..75: mol_type = other DNA
ggtgttaccagaagtatttacgggcttatgactgctatcacaagattaggtcaggtagctgataccacagcagat

SEQ ID NO: 585802 - DNA, 75 bp, synthetic construct
  source 1..75: mol_type = other DNA
tgatgaaaagcatgtcaaacggtattgatgatttaaccacgattagctaccgagtgcagggattctttgacagag

SEQ ID NO: 585803 - DNA, 75 bp, synthetic construct
  source 1..75: mol_type = other DNA
ttatgctgagttggtgaactttgctcttgataatttaaaccctgaagcagctaagaatccgaacttacatcaatc

SEQ ID NO: 585804 - DNA, 75 bp, synthetic construct
  source 1..75: mol_type = other DNA
accagcaaaaacaatcacagtgaaaatgcttcgaatggtctggatgtattagctacgagtgcaatcaaagcaggt

SEQ ID NO: 585805 - DNA, 75 bp, synthetic construct
  source 1..75: mol_type = other DNA
gttctttagatttacacagtcagctaatgaccagttcacagcagatatgcttatgagttcaagttacccacttga

SEQ ID NO: 585806 - DNA, 75 bp, synthetic construct
  source 1..75: mol_type = other DNA
caaaggtttcaggattaatacaaaacagcttgatagtaatttgacaagttctttggagcagcttgaaagaaagtt

SEQ ID NO: 585807 - DNA, 75 bp, synthetic construct
  source 1..75: mol_type = other DNA
atttcacaagaagcctaacaacgcttttaaacgctcttggtggaagcggtaaaagtcttggtgaatctcttggta

SEQ ID NO: 585808 - DNA, 75 bp, synthetic construct
  source 1..75: mol_type = other DNA
tacgatgggtcttgaagggtcagaagagttatttaaaaaccttacaggttacgcccgtttaatgggtcgttcaga

SEQ ID NO: 585809 - DNA, 75 bp, synthetic construct
  source 1..75: mol_type = other DNA
acttgatgagtgatatgtcacatggtatcgataacctgacttatattagttacagggtgagagcgttctttgatg

SEQ ID NO: 585810 - DNA, 75 bp, synthetic construct
  source 1..75: mol_type = other DNA
agacctgatgaaccagcattctttagatttacacaagcatctagtgaccagttcacagcggatatgctacttagc

SEQ ID NO: 585811 - DNA, 75 bp, synthetic construct
  source 1..75: mol_type = other DNA
gatggtttatctgatgggttaattgatggtttgaagatgcttgccgtagctgttactgctcaaaaggctgcaaat

SEQ ID NO: 585812 - DNA, 75 bp, synthetic construct
  source 1..75: mol_type = other DNA
gatatttcttacaaggtgagaggtttctttgacgaggtgacattggcttatcgttcactaaatgacactcagagg

SEQ ID NO: 585813 - DNA, 75 bp, synthetic construct
  source 1..75: mol_type = other DNA
aaaaacactaaagcgtttaagattaaaacggaaattgaggatactttaaagccacttagacagccaagacagcca

SEQ ID NO: 585814 - DNA, 75 bp, synthetic construct
  source 1..75: mol_type = other DNA
ccatccgctcctcaatctggtgtttgccgcgtttctgctgatgcccattccgcgctacagcctgcatcgcttgcg

SEQ ID NO: 585815 - DNA, 75 bp, synthetic construct
  source 1..75: mol_type = other DNA
aggtatccaaagtacttatgcgcttctggcaagcagcggcggattgcgtttaggtatgggaggattaacgggggg

SEQ ID NO: 585816 - DNA, 75 bp, synthetic construct
  source 1..75: mol_type = other DNA
actggtattgcacaggcgttggctttgacaccggaaccggatgatcctacaaccaccgatcctgatcaggctgca

SEQ ID NO: 585817 - DNA, 75 bp, synthetic construct
  source 1..75: mol_type = other DNA
gcgcagcaggttcactatatcgcggccactgaagtatattttgatattgttctttatatgaacggcataccgctg

SEQ ID NO: 585818 - DNA, 75 bp, synthetic construct
  source 1..75: mol_type = other DNA
atgtttaacgaacaaaccgttacagaaaatggaattatcgaccgcttaaaaggtttaagtggggtcaagtggaca

SEQ ID NO: 585819 - DNA, 75 bp, synthetic construct
  source 1..75: mol_type = other DNA
tattcaagctcttggtaatggtggggtcataactttaatcttggcactaacttttttaacattaaatggatatgt

SEQ ID NO: 585820 - DNA, 75 bp, synthetic construct
  source 1..75: mol_type = other DNA
caggtgcaggtgcaggtgcaggtgcaggtgcaggcgcggtagagaataaggctgaaaataaaactacgaatgata

SEQ ID NO: 585821 - DNA, 75 bp, synthetic construct
  source 1..75: mol_type = other DNA
agacgtaatgcggagaccggcagcactgcatcggcgaccccgtctgacacatccagcatagacaccgttgataat

SEQ ID NO: 585822 - DNA, 75 bp, synthetic construct
  source 1..75: mol_type = other DNA
gggaaggcagggggggcccggctgttatgccgtggcctgacggtatcggtatctcaaaagtgcaggagagaagag

SEQ ID NO: 585823 - DNA, 75 bp, synthetic construct
  source 1..75: mol_type = other DNA
gaagctcgtgcgaaaatactggccaaattagacccaaacaatcatgggggaagtcaagccagggacgttgatacg

SEQ ID NO: 585824 - DNA, 75 bp, synthetic construct
  source 1..75: mol_type = other DNA
gtacttactggcgggaccaagtttctccttgtggccagccggacaaccgacgaccactgtaacaacgacgggtgg

SEQ ID NO: 585825 - DNA, 75 bp, synthetic construct
  source 1..75: mol_type = other DNA
taattctttcaaaaaatgccgataattattactggtttctcccgtctgcaaaaaaaaatatcatttataatggga

SEQ ID NO: 585826 - DNA, 75 bp, synthetic construct
  source 1..75: mol_type = other DNA
aaaaagtactactggaaaaatgttgaatctttctttgtacctaacttgctgtgctttgccagcgaaggaaaaacc

SEQ ID NO: 585827 - DNA, 75 bp, synthetic construct
  source 1..75: mol_type = other DNA
tcaccactgagggccgccggaagctggccgaagccctgaagcccggtggaaaaaaagtcaccctggcaaagatgc

SEQ ID NO: 585828 - DNA, 75 bp, synthetic construct
  source 1..75: mol_type = other DNA
cagtattatccgggcaaacatccctgtgaaaaaccggcggatatgttgcggcagataattgaggccagcagtcgc

SEQ ID NO: 585829 - DNA, 75 bp, synthetic construct
  source 1..75: mol_type = other DNA
ttaatattcggaaatatcgggatattcctgctgaaatgtcgtatgcgccgggagaacaaattaagggagggcaag

SEQ ID NO: 585830 - DNA, 75 bp, synthetic construct
  source 1..75: mol_type = other DNA
aggacctgccgggccgacgggaccgacggggccgcaggggaacaccggaccacgaggtttgcagggagaaacagg

SEQ ID NO: 585831 - DNA, 75 bp, synthetic construct
  source 1..75: mol_type = other DNA
cagggcccgacaggtgaaaccggaccacggggaccacaagggccaaccggaaggctggtacccggggaaatttac

SEQ ID NO: 585832 - DNA, 75 bp, synthetic construct
  source 1..75: mol_type = other DNA
caactggtgaaaaaagtctgggaagggaatatctccagcatcacacaggatgcggagaatgaaagctttgtcacc

SEQ ID NO: 585833 - DNA, 75 bp, synthetic construct
  source 1..75: mol_type = other DNA
actgacaggtatgctggattgtctctggtattcctgacagccggaattgttttattgacagttatgaacattatt

SEQ ID NO: 585834 - DNA, 75 bp, synthetic construct
  source 1..75: mol_type = other DNA
gcttttgttgaccttggcccagtttggactagggaaagataaagagttgttccggaaggcgtatgggtacattga

SEQ ID NO: 585835 - DNA, 75 bp, synthetic construct
  source 1..75: mol_type = other DNA
gagggaatcgaggcatttaaagagctattgccgttacaactgaataaatgtctggccttcttccctggtgtggat

SEQ ID NO: 585836 - DNA, 75 bp, synthetic construct
  source 1..75: mol_type = other DNA
tttttcagtgccggtattgattcgtggaaagctgacccggaattaaataattttcgttatatgtggaacaccctg

SEQ ID NO: 585837 - DNA, 75 bp, synthetic construct
  source 1..75: mol_type = other DNA
gtgaagcccgagggctgggataaccagtggaagggcgacgatgattacctgaagtggctggaccagtgtctggcg

SEQ ID NO: 585838 - DNA, 75 bp, synthetic construct
  source 1..75: mol_type = other DNA
aagcggacccggaattaaataattcgagttatatgtggaatatcctgatatatgacattccgtatacgttatatg

SEQ ID NO: 585839 - DNA, 75 bp, synthetic construct
  source 1..75: mol_type = other DNA
tccgggttcactggccgggatgattaaacaggcctggtgcagtgccctgggggtggatgccgggccttatgccac

SEQ ID NO: 585840 - DNA, 75 bp, synthetic construct
  source 1..75: mol_type = other DNA
tccgggttcactggccggaatgattgaacaggcctggtgcagtgccctgggggtggatgccgggccttatgccac

SEQ ID NO: 585841 - DNA, 75 bp, synthetic construct
  source 1..75: mol_type = other DNA
tccgggatcactggccggtatgattgaacaggcctggtgcagtgccctgggggtggatgccgggccttatgccac

SEQ ID NO: 585842 - DNA, 75 bp, synthetic construct
  source 1..75: mol_type = other DNA
aacggacgcagctgtgatatcccgcttcatcaatgccctgaaagcccgaatcaacgcttaccagaatcgtaagcc

SEQ ID NO: 585843 - DNA, 75 bp, synthetic construct
  source 1..75: mol_type = other DNA
tggtgtcgtgccggtgattaccgtgctccgggatcactggccgggatgattaaacaggcgtggtgcagtgccctg

SEQ ID NO: 585844 - DNA, 75 bp, synthetic construct
  source 1..75: mol_type = other DNA
tccggggtcactggccggtatgattaaacaggcctggtgcagtgccctgggggtggatgccgggccttatgccac

SEQ ID NO: 585845 - DNA, 75 bp, synthetic construct
  source 1..75: mol_type = other DNA
taaacaggcgtggtgcagtgccctgggagtggatgtcgggtgctatgccacgctggtgcattttccggcctggcc

SEQ ID NO: 585846 - DNA, 75 bp, synthetic construct
  source 1..75: mol_type = other DNA
cacctgctgctgctggtctaccgggatacctggtgtcgtgccggcgattaccgcgctccggggtcactggccgga

SEQ ID NO: 585847 - DNA, 75 bp, synthetic construct
  source 1..75: mol_type = other DNA
gcattatcggcctgatgactcgcttcggtatggatgtcaccctggctcatccggaaggctatgacctgattccgg

SEQ ID NO: 585848 - DNA, 75 bp, synthetic construct
  source 1..75: mol_type = other DNA
gatgtaccggcagcaacggacgcagctgtgatatcccgcttcatcaatgccctgaaagcccgaatcgacgcttac

SEQ ID NO: 585849 - DNA, 75 bp, synthetic construct
  source 1..75: mol_type = other DNA
ttcagcaggtgctggaacgtgctaactatctggcgaaggagcataccaaagctcactgcaccggtgagcgcaact

SEQ ID NO: 585850 - DNA, 75 bp, synthetic construct
  source 1..75: mol_type = other DNA
gtgggtttacaccggcacgggtgatgcttatgcaaacccgttgtcagacgatgactggcagcgactggctaaggt

SEQ ID NO: 585851 - DNA, 75 bp, synthetic construct
  source 1..75: mol_type = other DNA
aacggacgcagctgtgatatcccgcttcatcaatgccctgaaagcccgaatcaacgcttaccagaaccgtaagct

SEQ ID NO: 585852 - DNA, 75 bp, synthetic construct
  source 1..75: mol_type = other DNA
cccattgctctgcgcgccagggaagcctatgctgctgggtttcagtgaatccagttaccagcaatttttcctatg

SEQ ID NO: 585853 - DNA, 75 bp, synthetic construct
  source 1..75: mol_type = other DNA
ctggaacgcgatgatgaaaccggctttcagcaggtactggaacgtgctggctatctggcgaaggagcataccaaa

SEQ ID NO: 585854 - DNA, 75 bp, synthetic construct
  source 1..75: mol_type = other DNA
tgcagtgccctgggagtggatgtcgggtgccatgccacgctggtgcattttccggcctggccggcggtgtggctg

SEQ ID NO: 585855 - DNA, 75 bp, synthetic construct
  source 1..75: mol_type = other DNA
ttttccggtcaggccggctgtgtggctggaacgcgatgatgacaccggctttcagcaggtgctggagcgtgctga

SEQ ID NO: 585856 - DNA, 75 bp, synthetic construct
  source 1..75: mol_type = other DNA
gcgtgctgactatctggcgaaggagagtaccaaagcttacggcaccggtgagcgtaattttggctgtagccggag

SEQ ID NO: 585857 - DNA, 75 bp, synthetic construct
  source 1..75: mol_type = other DNA
tacgtctgggcccgggagtttggggagtgcaaaggtaaaaaacactatcacctgatgctgctggtcaaccgggat

SEQ ID NO: 585858 - DNA, 75 bp, synthetic construct
  source 1..75: mol_type = other DNA
gctggaacgtgctgactatctggcgaaggaacataccaaagctcactgcaccggtgagcgcaattttggctgtag

SEQ ID NO: 585859 - DNA, 75 bp, synthetic construct
  source 1..75: mol_type = other DNA
aaaacactatcacctgatattgctggtcaaccgggatacctggtgtcgttccggcgattaccgcgctccgggatc

SEQ ID NO: 585860 - DNA, 75 bp, synthetic construct
  source 1..75: mol_type = other DNA
aacggacgcagctgtgatatcccgcttcatcaatgccctgaaagcccgaatctacgcttaccagaaacgtaagca

SEQ ID NO: 585861 - DNA, 75 bp, synthetic construct
  source 1..75: mol_type = other DNA
ctttcagcaggtgctggagcgtgctgactatctggcgaaggagagtaccaaagcttacggcaccggtgagcgcaa

SEQ ID NO: 585862 - DNA, 75 bp, synthetic construct
  source 1..75: mol_type = other DNA
gcggcacgcactgaatgttcatccccgcctgacggcattgcgggttgacctgcgtttcccggatgtaccggcagc

SEQ ID NO: 585863 - DNA, 75 bp, synthetic construct
  source 1..75: mol_type = other DNA
aactgacgcagcagtgatatcccgcttcatcaatgccctgaaagcccgaatcgatgcttaccagaagcgtaagcg

SEQ ID NO: 585864 - DNA, 75 bp, synthetic construct
  source 1..75: mol_type = other DNA
gcatcatcggtctgatgacccgcttcggtatggatgtcaccctggcccatccggaaggctacgacctgatcccgg

SEQ ID NO: 585865 - DNA, 75 bp, synthetic construct
  source 1..75: mol_type = other DNA
cgggatacctggtgtcgtgccggtgattaccgcgctccgggatcactggccgggatgattaaacaggcgtggtgc

SEQ ID NO: 585866 - DNA, 75 bp, synthetic construct
  source 1..75: mol_type = other DNA
ttcagcaggtgctggagcgtgctgactatctggcgaaggagagtaccaaagcttacggcaccggtgagcgtaatt

SEQ ID NO: 585867 - DNA, 75 bp, synthetic construct
  source 1..75: mol_type = other DNA
cgctggtgaaacagaactccttctatgtgctggcctatatggaagaaaccaagctggaaggggtgcgccctgggt

SEQ ID NO: 585868 - DNA, 75 bp, synthetic construct
  source 1..75: mol_type = other DNA
acaaggctgcattacgtctgggcccgggaattcggggtgctcaggggtaaaaaacactatcacctgatactgctg

SEQ ID NO: 585869 - DNA, 75 bp, synthetic construct
  source 1..75: mol_type = other DNA
gggagttcggggagcttaaaggcaaaaaacactatcacctcctgctgctggtcaaccgggatacctggtgtcgtg

SEQ ID NO: 585870 - DNA, 75 bp, synthetic construct
  source 1..75: mol_type = other DNA
ttcagcagctactggaacgggctgattatctggcgaaggagagtaccaaagcttacggcaccggtgagcgcaact

SEQ ID NO: 585871 - DNA, 75 bp, synthetic construct
  source 1..75: mol_type = other DNA
ggcaaacaagatcgcgacgaaagccaggattcgttcttccgtaaaatggctcatcgcctgcgtgagtttggttaa

SEQ ID NO: 585872 - DNA, 75 bp, synthetic construct
  source 1..75: mol_type = other DNA
cccgtacggccatcacggtcgtattagtcattctggccttcatcgcaatttttaatgcctgggtctattacaccg

SEQ ID NO: 585873 - DNA, 75 bp, synthetic construct
  source 1..75: mol_type = other DNA
cttgctgattatcggatgcagcaaaaccagagcggatttgatctgcgccatttcgttaacgtcaatttcaccctg

SEQ ID NO: 585874 - DNA, 75 bp, synthetic construct
  source 1..75: mol_type = other DNA
attacccgtggctcaacggcggttgcgctggtgaaacagaactccttctatgtgctggcctatatggaagaaacc

SEQ ID NO: 585875 - DNA, 75 bp, synthetic construct
  source 1..75: mol_type = other DNA
gcgccggacgtatccggactcattactcaggtaaatgttcatgataaccagctggtgaaaaaaggacaggtactg

SEQ ID NO: 585876 - DNA, 75 bp, synthetic construct
  source 1..75: mol_type = other DNA
ggtaaacaagatcgcgacgaaagtcaggattcgttcttccgtaaaatggctcatcgcctgcgtgagtttggttaa

SEQ ID NO: 585877 - DNA, 75 bp, synthetic construct
  source 1..75: mol_type = other DNA
gctatatcggtaaaactattttcaccaccatcatgatgacgctgttcatgctggtgtcactctccggcattatca

SEQ ID NO: 585878 - DNA, 75 bp, synthetic construct
  source 1..75: mol_type = other DNA
ctgggcgcaggcaacgcctatatgcgtgaagttggcgctgcacttgatgacggttacaagcagggtgtactgcca

SEQ ID NO: 585879 - DNA, 75 bp, synthetic construct
  source 1..75: mol_type = other DNA
ccgccattccactggtcttgctgacgatggcgattggcgaatgggtcgcgccgcagggcgagcagatggcgcgta

SEQ ID NO: 585880 - DNA, 75 bp, synthetic construct
  source 1..75: mol_type = other DNA
atggtgaattactgtcttatatcattggcgctgacagttaacgatgaaaccatgcaggagattaacactctgctg

SEQ ID NO: 585881 - DNA, 75 bp, synthetic construct
  source 1..75: mol_type = other DNA
cgtgaacactttggttcgctggaaaacctgaaaggtaaaaaaatcgccatgacctgggcctactcaccaagctat

SEQ ID NO: 585882 - DNA, 75 bp, synthetic construct
  source 1..75: mol_type = other DNA
gcattatcggcctgatgacccgcttcggtatggatgtcaccctggcccatccggaaggctacgatttgatcccag

SEQ ID NO: 585883 - DNA, 75 bp, synthetic construct
  source 1..75: mol_type = other DNA
tatatgcactgcctgccagccgatatcagcggcgtatcctgcaaagaaggtgaagtcactgaaggcgtattcgaa

SEQ ID NO: 585884 - DNA, 75 bp, synthetic construct
  source 1..75: mol_type = other DNA
ccgtgaaggtaaacgcgtgcatcccacaaccctgcattacgtctgggcccgggagttcggggagaacaaaggtaa

SEQ ID NO: 585885 - DNA, 75 bp, synthetic construct
  source 1..75: mol_type = other DNA
ccgtgaaggtaaacgcgtacataccacaaggctgcattacgtctgggcccgggagttcggggagaacaaaggtaa

SEQ ID NO: 585886 - DNA, 75 bp, synthetic construct
  source 1..75: mol_type = other DNA
ttctgccgaacacaagaccagaatgcgtgataaccgctggcgtgattatataagcgagtttttattgacctggtg

SEQ ID NO: 585887 - DNA, 75 bp, synthetic construct
  source 1..75: mol_type = other DNA
aaccactttccaaaagatagctggtttcaggctgaactgaatccgtgcgctgcttatatcgggagaaagacgggc

SEQ ID NO: 585888 - DNA, 75 bp, synthetic construct
  source 1..75: mol_type = other DNA
acgacactgcattacgtctgggcccgggaattcggggtgctcaggggtaaaaaacactatcacctgctgctgctg

SEQ ID NO: 585889 - DNA, 75 bp, synthetic construct
  source 1..75: mol_type = other DNA
aggcgaatgccctgatgtatttgaactgatcaaagtgccggttaaatcgcataccaatcacgggcgcaatgcgga

SEQ ID NO: 585890 - DNA, 75 bp, synthetic construct
  source 1..75: mol_type = other DNA
tttttagctacggcacacagcatgttggttcgctttactactgcatacctgccaggaattttgatacgactcaaa

SEQ ID NO: 585891 - DNA, 75 bp, synthetic construct
  source 1..75: mol_type = other DNA
ctgacgatgcaaacctggcaagtaaggagtcagaacatgacagcacgcagagagaaacgccagcgccgattgaag

SEQ ID NO: 585892 - DNA, 75 bp, synthetic construct
  source 1..75: mol_type = other DNA
tcttcagctacggaacacaacacgtcggctccctttattactgcatcccggccaggaactttgataccactcaaa

SEQ ID NO: 585893 - DNA, 75 bp, synthetic construct
  source 1..75: mol_type = other DNA
agttacaattacgaggtcgataaaaattatctggatgaagtaaaagaatcaggttttagccatactttcagcgat

SEQ ID NO: 585894 - DNA, 75 bp, synthetic construct
  source 1..75: mol_type = other DNA
gttccctttttcaatggcatattggaccggtatattgaggcgtttagccgcagcaggacagctgatatcctggca

SEQ ID NO: 585895 - DNA, 75 bp, synthetic construct
  source 1..75: mol_type = other DNA
cttcgattgtattgcaaatattgacaatatcagaaattattaagtctgcggccttatcatttttagtgtttcttg

SEQ ID NO: 585896 - DNA, 75 bp, synthetic construct
  source 1..75: mol_type = other DNA
gccatcatcagttatacgctgacggtggcgatgcttattccggtaagcggatggctagccgatcgcttcggtttt

SEQ ID NO: 585897 - DNA, 75 bp, synthetic construct
  source 1..75: mol_type = other DNA
gtcccttatcagcatggcaccatccaactggaaggcaaaaaggtggaaggcccgggcgccgagcgcggcgtggtc

SEQ ID NO: 585898 - DNA, 75 bp, synthetic construct
  source 1..75: mol_type = other DNA
atttggcagctttccggcggtcaacgtcagcgggtggggattgcccgcgcgttggcggcgaatcctcagctgtta

SEQ ID NO: 585899 - DNA, 75 bp, synthetic construct
  source 1..75: mol_type = other DNA
ccctgaaggtgtggaatttgccaataaggcggacggtacccatccgttcctggtggcgttctatctgcagacaga

SEQ ID NO: 585900 - DNA, 75 bp, synthetic construct
  source 1..75: mol_type = other DNA
ggtatgtggtgacaccaccttctggtggaagcaacagtacccgacacaatacagcctggtttatggcgcgtaccg

SEQ ID NO: 585901 - DNA, 75 bp, synthetic construct
  source 1..75: mol_type = other DNA
ccaactcgctaccacagctggttgtcttccgggttattcaggggataggcggcgcaatgatgatgcctgttgctc

SEQ ID NO: 585902 - DNA, 75 bp, synthetic construct
  source 1..75: mol_type = other DNA
ggaatattcaggcgaatatttccgtgaatcgatgctcattccattgcgtgtgtacagaaaaacacagagtacgtg

SEQ ID NO: 585903 - DNA, 75 bp, synthetic construct
  source 1..75: mol_type = other DNA
gctggacagaaagcgtcaaacgccaggtagtgaaggatgctttttatattcatcagcataaagggaccaccagtg

SEQ ID NO: 585904 - DNA, 75 bp, synthetic construct
  source 1..75: mol_type = other DNA
aagtcacttatggcgagcatgtgtttgatttcggcaaaccgtttgaaaaactcaccatgcgcgaagcaatcaaaa

SEQ ID NO: 585905 - DNA, 75 bp, synthetic construct
  source 1..75: mol_type = other DNA
ccgatatggcggatctggataattttgatgctgctaaagcattagctgaatctatcggtattacggtagagaaaa

SEQ ID NO: 585906 - DNA, 75 bp, synthetic construct
  source 1..75: mol_type = other DNA
tgtcttttcatgcctgtcatttgtctgttactgatgatgttgttgttcctgctactgctactgctactgctactg

SEQ ID NO: 585907 - DNA, 75 bp, synthetic construct
  source 1..75: mol_type = other DNA
gccttctccgttgatcgctgggatgaggcctggccgataaacacaaaacgaaaggcggtggccgatgcgttttac

SEQ ID NO: 585908 - DNA, 75 bp, synthetic construct
  source 1..75: mol_type = other DNA
taagcgatgccaaaccatgtagccgacacatgatcggcatgtccatcaaactgcagaccagcggcccgcattggg

SEQ ID NO: 585909 - DNA, 75 bp, synthetic construct
  source 1..75: mol_type = other DNA
actggaatgaatacgatcatctgactattgagctggaaaaaaatggagcagggagtaaattatacattacattta

SEQ ID NO: 585910 - DNA, 75 bp, synthetic construct
  source 1..75: mol_type = other DNA
cgctttgtccattatgtttgcaaatgccttatccgatttgcggttgttaatggcagggtatcttattgctcattt

SEQ ID NO: 585911 - DNA, 75 bp, synthetic construct
  source 1..75: mol_type = other DNA
aaacccgggagtgaagattctactggccgcctgatgtatcatctgcataataccgccaggcttcttattccgtca

SEQ ID NO: 585912 - DNA, 75 bp, synthetic construct
  source 1..75: mol_type = other DNA
agcagccttgcaaagggcgaaaccaccaaagctgcatttaatcagatggtacaagggcataagctgccagcctgg

SEQ ID NO: 585913 - DNA, 75 bp, synthetic construct
  source 1..75: mol_type = other DNA
tgtgaacgatgcgctctcgattgatggtaaaacggtgctgttcgcggcgttgactggcagcctggaaaaccatcc

SEQ ID NO: 585914 - DNA, 75 bp, synthetic construct
  source 1..75: mol_type = other DNA
caacgacgaagtggattctatcagaaagaaaaatactgatggtgattgggttgcaagcgcaataaccggtaatgg

SEQ ID NO: 585915 - DNA, 75 bp, synthetic construct
  source 1..75: mol_type = other DNA
ccgattatggcggcaaaccggcgctggaagatatcaacctgacgctggaaagcggcgagcttctggtggtgctgg

SEQ ID NO: 585916 - DNA, 75 bp, synthetic construct
  source 1..75: mol_type = other DNA
gccattctcagcgccttgcgtctggcgcaggagttaggcgcagagacagcaacactttctgatccggcagaagaa

SEQ ID NO: 585917 - DNA, 75 bp, synthetic construct
  source 1..75: mol_type = other DNA
ctacctgatgacaatggtaaattgcagccgttgacgcatccgcagggaatgacgccgtgggacgatgccatcgcg

SEQ ID NO: 585918 - DNA, 75 bp, synthetic construct
  source 1..75: mol_type = other DNA
caagggctggatattgtggttggcgtggttgaaacccacgggcggaaagataccgccgcaatgctggaagggctg

SEQ ID NO: 585919 - DNA, 75 bp, synthetic construct
  source 1..75: mol_type = other DNA
ggttacagcagtcgctaaactggccgcagtttgttcaaagtgaagaggacacgcgaaaaacggtgcagggtaatg

SEQ ID NO: 585920 - DNA, 75 bp, synthetic construct
  source 1..75: mol_type = other DNA
acaaaacggtatatcaggccatcaaaagaatgcgaaggctggagcgtggaaaatatcaaatgcaactatttaagg

SEQ ID NO: 585921 - DNA, 75 bp, synthetic construct
  source 1..75: mol_type = other DNA
ttgtgcgattggtgttgagctggagacaggacgttttgaacagacagtcagggaagttcaggatttaatcgtttg

SEQ ID NO: 585922 - DNA, 75 bp, synthetic construct
  source 1..75: mol_type = other DNA
taccgacgccggaaaaggttaacgacgctattttctattacgcccgttttgaagtccccaaccccaatggtttgc

SEQ ID NO: 585923 - DNA, 75 bp, synthetic construct
  source 1..75: mol_type = other DNA
aaggcagcgtgccgaacccatatgtgaaagcctctgactggggctggcagattgatccggtgggtctgcgttacg

SEQ ID NO: 585924 - DNA, 75 bp, synthetic construct
  source 1..75: mol_type = other DNA
tggaagaaaacggcagtatcaacgacgattaccgtattgattacctgcgcgcccatatcgaagagatgaaaaaag

SEQ ID NO: 585925 - DNA, 75 bp, synthetic construct
  source 1..75: mol_type = other DNA
atctgctggagaacgcggtgaaatatgcgggtgcgcaggccgaaattggtatcgatgcccacgttgagggcgaaa

SEQ ID NO: 585926 - DNA, 75 bp, synthetic construct
  source 1..75: mol_type = other DNA
gacgcgatccttttatgcatcgggcataacaccggcagtgagaaactggtccgcgcggcggcgcggttggcctcg

SEQ ID NO: 585927 - DNA, 75 bp, synthetic construct
  source 1..75: mol_type = other DNA
gttgagattgtcaaagggctggaagcgggcgatgaagtggtgattggtgaggccaaaccaggagctgcacaatga

SEQ ID NO: 585928 - DNA, 75 bp, synthetic construct
  source 1..75: mol_type = other DNA
ttggtgatatccaggatgacagcattctggagcacctggacgatgacagttcggcggaaacagtgcgtttccctg

SEQ ID NO: 585929 - DNA, 75 bp, synthetic construct
  source 1..75: mol_type = other DNA
agcggcgagctactggtggtgctggggccgtccggctgcggtaaaaccaccctgctgaatctgattgccggtttt

SEQ ID NO: 585930 - DNA, 75 bp, synthetic construct
  source 1..75: mol_type = other DNA
caggaaaacaccgcttatccggcgttactttctgaactgaacgcactgctgcgtaaagagctggcccggattggc

SEQ ID NO: 585931 - DNA, 75 bp, synthetic construct
  source 1..75: mol_type = other DNA
gcttgccgggcgcgccagttcgctctcgatggaagggctgatggcattgcagcccgatctggtcgttgattgcgg

SEQ ID NO: 585932 - DNA, 75 bp, synthetic construct
  source 1..75: mol_type = other DNA
gttcggcctgcaactggcaggtgtagagaaagcactgcgcctggaaatcgcgcaccagatgctgaaaaaagtggg

SEQ ID NO: 585933 - DNA, 75 bp, synthetic construct
  source 1..75: mol_type = other DNA
tcgagccgcagcatcaagtccgatccacaattcatcgccatgcgcgaatatgttttaagccgcgtatttgagcaa

SEQ ID NO: 585934 - DNA, 75 bp, synthetic construct
  source 1..75: mol_type = other DNA
atctggcagctttccggtggtcaacgtcagcgggtggggattgcccgcgcgctggcggcgaatccccagctgtta

SEQ ID NO: 585935 - DNA, 75 bp, synthetic construct
  source 1..75: mol_type = other DNA
aactgattggtgcgacggatggtttcatcctgcgcccgttcctgtacggtggcgcactgctgggattttctggcg

SEQ ID NO: 585936 - DNA, 75 bp, synthetic construct
  source 1..75: mol_type = other DNA
cagtgtgcgtctgagcatctttgctcgccgtgactccattaacgtgcagaaactgattggtgcgacggatggttt

SEQ ID NO: 585937 - DNA, 75 bp, synthetic construct
  source 1..75: mol_type = other DNA
gagttccgtaactggtctggttttggtggtgcgctggatatgctggaagaaaacccgcttccggcagtggcggtg

SEQ ID NO: 585938 - DNA, 75 bp, synthetic construct
  source 1..75: mol_type = other DNA
cgcaggcacttgcatctaccctgctcctgcagtctctaccgtccttttcacaaacagttaatcgttttgcttcgc

SEQ ID NO: 585939 - DNA, 75 bp, synthetic construct
  source 1..75: mol_type = other DNA
agcaaggcgtagagaaagtgaactatctttctcgtgaagacgcactgggcgagttccgtaactggtctggttttg

SEQ ID NO: 585940 - DNA, 75 bp, synthetic construct
  source 1..75: mol_type = other DNA
aacgctggacgatgacgccgctgcgggcgtggtggcacagttgcaggccgagcaaggcgtagagaaagtgaacta

SEQ ID NO: 585941 - DNA, 75 bp, synthetic construct
  source 1..75: mol_type = other DNA
aacaaagacaccaccactatcatcgatggcgtgggtgaagaagctgcaatccagggccgtgttgctcagatccgt

SEQ ID NO: 585942 - DNA, 75 bp, synthetic construct
  source 1..75: mol_type = other DNA
caaagtcggtaaagaaggcgttatcaccgttgaagacggtaccggtatgcaggacgaactggacgtggttgaagg

SEQ ID NO: 585943 - DNA, 75 bp, synthetic construct
  source 1..75: mol_type = other DNA
gatgcagctgacttaggcgctgctggcggtatgggcggcatgggtggcatgggtggcatgggcggcatgatgtaa

SEQ ID NO: 585944 - DNA, 75 bp, synthetic construct
  source 1..75: mol_type = other DNA
aaggcgtggttgctggtggtggtgttgcgctgattcgcgtagcgtctaaactggctgacctgcgtggtcacaacg

SEQ ID NO: 585945 - DNA, 75 bp, synthetic construct
  source 1..75: mol_type = other DNA
cgagtgcatggttaccgacctgccgaaaaacgatgcagctgacttaggcgctgctggcggtatgggcggcatggg

SEQ ID NO: 585946 - DNA, 75 bp, synthetic construct
  source 1..75: mol_type = other DNA
atctttcggtgcaccgaccatcaccaaagatggtgtttctgttgctcgtgaaatcgaactggaagacaagttcga

SEQ ID NO: 585947 - DNA, 75 bp, synthetic construct
  source 1..75: mol_type = other DNA
aatccgccgacagttagagaaaggggatagcttctcttttgaagagacggcgctgtacaagaaagtttatcagct

SEQ ID NO: 585948 - DNA, 75 bp, synthetic construct
  source 1..75: mol_type = other DNA
atgatctctctcgttttttcctattctcatgtagacgaagcattgcgcaatgagcttgagaagcatctttccccc

SEQ ID NO: 585949 - DNA, 75 bp, synthetic construct
  source 1..75: mol_type = other DNA
agaagattccaagaataaccagaaaattgcagaagccgatattatagtaagctgcactgcacattggaatactga

SEQ ID NO: 585950 - DNA, 75 bp, synthetic construct
  source 1..75: mol_type = other DNA
gctgcggttgaagaactgaaaacactgtccgtaccatgctccgactctaaagcgattgctcaggttggtaccatc

SEQ ID NO: 585951 - DNA, 75 bp, synthetic construct
  source 1..75: mol_type = other DNA
gacagtttctcttttgaagagaccgcgttgtacaagaaggtttatcagctcgcagaagcgaaaacgggtaaatcg

SEQ ID NO: 585952 - DNA, 75 bp, synthetic construct
  source 1..75: mol_type = other DNA
acagcgaacgattagatactgtgcgtacagaaaagcagttgagtgcgatttttgacgatctgataagcattgtgc

SEQ ID NO: 585953 - DNA, 75 bp, synthetic construct
  source 1..75: mol_type = other DNA
tggagttctgctcagtaaccgggagtttactgaagatgccattaagatgagaaaatatgaaccttatcttctcaa

SEQ ID NO: 585954 - DNA, 75 bp, synthetic construct
  source 1..75: mol_type = other DNA
tcaggtgtacaaaacgctgttggtcgcagtgaacggcgatatgaaacatctggctgtggccgttacgcctgtcgc

SEQ ID NO: 585955 - DNA, 75 bp, synthetic construct
  source 1..75: mol_type = other DNA
ggggggattagcccactggggcagaaaaaacgtctgccaacgattatcgacgcccccgcacaagaatttgccact

SEQ ID NO: 585956 - DNA, 75 bp, synthetic construct
  source 1..75: mol_type = other DNA
aacgcattgcaggcgcagtcgttaaaaatacaggcaattaaaatgcagtatgatgtatgggatagtaaaaacagg

SEQ ID NO: 585957 - DNA, 75 bp, synthetic construct
  source 1..75: mol_type = other DNA
gccgcgcgggcatttgtggaagttgccgtgttcagcttttagaaggcgaagtcacgccgctgaaaaaatcagcaa

SEQ ID NO: 585958 - DNA, 75 bp, synthetic construct
  source 1..75: mol_type = other DNA
tggcgtgaatccagattaaacatctcattgctgatgcttgatattgagcatcttgcgcgcggtaaggggctgcgt

SEQ ID NO: 585959 - DNA, 75 bp, synthetic construct
  source 1..75: mol_type = other DNA
gcaacgttcgacgggatatctggttggagggattagcccgttggggcagaaaaagcgtctgcctacgttgattga

SEQ ID NO: 585960 - DNA, 75 bp, synthetic construct
  source 1..75: mol_type = other DNA
ttggtcaggataagccgcgaaaatttgaagcgctggcagaaaaactcggcgtgcggagcaatgtgcatttcttct

SEQ ID NO: 585961 - DNA, 75 bp, synthetic construct
  source 1..75: mol_type = other DNA
catcccgcttatcaggaggctgcaggtattgttctccttgaggcaattgccgcgggattacctgtgttgacgact

SEQ ID NO: 585962 - DNA, 75 bp, synthetic construct
  source 1..75: mol_type = other DNA
gtgcgcagtaatgttcacttcttctcggggcgcaacgatgtctcggaattaatggcggcggcggatttattactg

SEQ ID NO: 585963 - DNA, 75 bp, synthetic construct
  source 1..75: mol_type = other DNA
ggcagctaccgaacgaaagcgattatctgaaattacaggcgctgtttgcccgggtggcagaagagaagcatcagc

SEQ ID NO: 585964 - DNA, 75 bp, synthetic construct
  source 1..75: mol_type = other DNA
tttactgaagatgccattaaaatgcggaaatatgaaccttatcttctcaatgataattccatactttcccgaatt

SEQ ID NO: 585965 - DNA, 75 bp, synthetic construct
  source 1..75: mol_type = other DNA
ggaaatatgagccttattttctcaatgataattccatactttccagaatggctcttctcagacttggtattttct

SEQ ID NO: 585966 - DNA, 75 bp, synthetic construct
  source 1..75: mol_type = other DNA
tgtttggcctgacagttatatcatcgatcataatgatatgacctatgcagtcgatttactaaacgatgctatact

SEQ ID NO: 585967 - DNA, 75 bp, synthetic construct
  source 1..75: mol_type = other DNA
ggaaaagagctcaagggcaagtttggcctcaagagtaaatgccgagcgtgtattagcgagaaaacaaaacgtacg

SEQ ID NO: 585968 - DNA, 75 bp, synthetic construct
  source 1..75: mol_type = other DNA
ctgtgcggcgggtggtggagccgttcggcttcctgatccgcattattgaatggtggcagaccggagaagcaccgg

SEQ ID NO: 585969 - DNA, 75 bp, synthetic construct
  source 1..75: mol_type = other DNA
ttttatattcatcagcataaaggaactaccagtgccgtgcggcgggtggtggaaccgttcggattcctgatccgc

SEQ ID NO: 585970 - DNA, 75 bp, synthetic construct
  source 1..75: mol_type = other DNA
tatgagcaacaaacaggcattagcgccgctagcatattagctaccattcgactgccacacttaagattgatttct

SEQ ID NO: 585971 - DNA, 75 bp, synthetic construct
  source 1..75: mol_type = other DNA
cgtcttcggactgcagttttttctgcaggaccgccccgccgcagaagccctgctggacaaactgaacatctccgc

SEQ ID NO: 585972 - DNA, 75 bp, synthetic construct
  source 1..75: mol_type = other DNA
gtctatttctggttaattctctcgaatttcattctttatatttctccagagaaatcagcgttgctggaaaaggta

SEQ ID NO: 585973 - DNA, 75 bp, synthetic construct
  source 1..75: mol_type = other DNA
gccgggtggataatctacaaagcaatcaggtggcgttgcgtaatggttttgtactggaaggttgcttgaaacagg

SEQ ID NO: 585974 - DNA, 75 bp, synthetic construct
  source 1..75: mol_type = other DNA
ctatatacgcagtacagcatccggagtgtgccgtctctggtggtacggtgtcaggccggatatgacgtggtacgc

SEQ ID NO: 585975 - DNA, 75 bp, synthetic construct
  source 1..75: mol_type = other DNA
cagagttggtgtcatatgataccccagttatgccgcatgttgtttgtaagcgaattgttagtgtaggtgattcag

SEQ ID NO: 585976 - DNA, 75 bp, synthetic construct
  source 1..75: mol_type = other DNA
tttcctgccttatctcgcctgggcgttctctgtggatcgctgggacgagggctggacagaaagcgtcaagcgcca

SEQ ID NO: 585977 - DNA, 75 bp, synthetic construct
  source 1..75: mol_type = other DNA
ccggaaggttacgacctgatcccggatgtcgttgaagttgctaaaaacaatgctaaagcctccggtggtagcttc

SEQ ID NO: 585978 - DNA, 75 bp, synthetic construct
  source 1..75: mol_type = other DNA
gtcgggtggacaatccgcaaagcaacaaggtagccgtgcgtaatggttttacactggaaggttgtctgaaacagg

SEQ ID NO: 585979 - DNA, 75 bp, synthetic construct
  source 1..75: mol_type = other DNA
ccggcgctggtggggctgctggggccgtggatctccggcgggattgagtttaactggccgcaacaccatcgcccg

SEQ ID NO: 585980 - DNA, 75 bp, synthetic construct
  source 1..75: mol_type = other DNA
tgtgccgtcagcagtcctctgctgttgtacaggatgttgtacagaagagggagaaaacaccgccacctttgtgtt

SEQ ID NO: 585981 - DNA, 75 bp, synthetic construct
  source 1..75: mol_type = other DNA
ttaaaaagatcctcaaagaaaatgcggggctgggaacggaagcaacccgggctggagtaattgaaacgctcctga

SEQ ID NO: 585982 - DNA, 75 bp, synthetic construct
  source 1..75: mol_type = other DNA
gcggctgatttgatggctgtgttaccggcacagcttaaagatccgggtatgacggcgctctgggagcaatcactg

SEQ ID NO: 585983 - DNA, 75 bp, synthetic construct
  source 1..75: mol_type = other DNA
tcggttgactgcgaacaaatcctgaaagacttcagcgattatgcagcgacagaaactgacaagttaaaaactcat

SEQ ID NO: 585984 - DNA, 75 bp, synthetic construct
  source 1..75: mol_type = other DNA
gaccactatttttcgcaagcagatattatcctgttgctaattagcagtgatttcatcgcttctgactattgttat

SEQ ID NO: 585985 - DNA, 75 bp, synthetic construct
  source 1..75: mol_type = other DNA
gcagctgcagtggacccgccaccttgtcgaaaaaggccgccaggacagtgtgaaaatcactgctcctgtcacgcc

SEQ ID NO: 585986 - DNA, 75 bp, synthetic construct
  source 1..75: mol_type = other DNA
agtccggcaatcagtttaatcataccacaaggcgttatcgacgcgctccaaacgaacaccaaaaaggaaccatag

SEQ ID NO: 585987 - DNA, 75 bp, synthetic construct
  source 1..75: mol_type = other DNA
gcgtcttcattactggctgattctctttccccatacaccaagccatcagagctgttacagatgaagattggctgg

SEQ ID NO: 585988 - DNA, 75 bp, synthetic construct
  source 1..75: mol_type = other DNA
acctcatatatggccgaaaaatcgcagtacgattttgtcggcgcgtggtgtcacgatgaagatggcggtttgctg

SEQ ID NO: 585989 - DNA, 75 bp, synthetic construct
  source 1..75: mol_type = other DNA
gcgtcaaaaaaataaattatccggtgctgtatgaatccggaataacacctccgttatgtgaagtcagtgcaccag

SEQ ID NO: 585990 - DNA, 75 bp, synthetic construct
  source 1..75: mol_type = other DNA
acccgaagctgaaaaaagtgctgcgggagaatgccggtctggggacggaggccacgcgggccggagtgctggagg

SEQ ID NO: 585991 - DNA, 75 bp, synthetic construct
  source 1..75: mol_type = other DNA
accctgaaagccagggagtgtggtgtgtccggcgtcctctctgttggcagggtgcagacgcccacgcttgcgatg

SEQ ID NO: 585992 - DNA, 75 bp, synthetic construct
  source 1..75: mol_type = other DNA
atgccaacaccaaatccccttgagccggtaaaaggtgccggtaccactctgtgggtttacaacggcaagggtgat

SEQ ID NO: 585993 - DNA, 75 bp, synthetic construct
  source 1..75: mol_type = other DNA
cttcacttcatgcacgggactttatcaaaagacgaaccgagaaaatattgcagtgcagcttgtgccgaaaaagac

SEQ ID NO: 585994 - DNA, 75 bp, synthetic construct
  source 1..75: mol_type = other DNA
atcacctttgcaataaagaaattgaagagagcaaaatcattacaagaccacttcatttcatgcgtggagttatac

SEQ ID NO: 585995 - DNA, 75 bp, synthetic construct
  source 1..75: mol_type = other DNA
atttaaaatcatgtcagaaaatatgatccctgattttctgttgagaataaagttttttagccataagagattttt

SEQ ID NO: 585996 - DNA, 75 bp, synthetic construct
  source 1..75: mol_type = other DNA
atggcgggcattaatctcaataaaaaattatggcgtattccgcagcagggcatggtacgcggcgtctgcgccggg

SEQ ID NO: 585997 - DNA, 75 bp, synthetic construct
  source 1..75: mol_type = other DNA
ggcggtcgtttcccggaaggctatccggtcgcggttgtctcttccgtaaaacttgatactcagcgcgcttatact

SEQ ID NO: 585998 - DNA, 75 bp, synthetic construct
  source 1..75: mol_type = other DNA
tctgcgaatacattttctactacgtgaaggggcaggatttccgtcacgttggtggtgatgagctggataagctgc

SEQ ID NO: 585999 - DNA, 75 bp, synthetic construct
  source 1..75: mol_type = other DNA
acccacgtcatgaatgatcaggctctgtcagccctgaaagaaaaatatgctgttcctgctgagctgagaagctgt

SEQ ID NO: 586000 - DNA, 75 bp, synthetic construct
  source 1..75: mol_type = other DNA
gggaatggagatgggcgaccgaaaagaggcttacgatgttatcgcctttgccccggatggaagtcagaacgtctt

SEQ ID NO: 586001 - DNA, 75 bp, synthetic construct
  source 1..75: mol_type = other DNA
cccgaatatgctcatgtggttagcaccgacagccatactgcaatcaatgattagtacgacaggctcgatatttat

SEQ ID NO: 586002 - DNA, 75 bp, synthetic construct
  source 1..75: mol_type = other DNA
tgtattgtatacttcatttttttttatatcttcgtaaatatatgtcttcgatttaaaatcatgtcagaaaatatg

SEQ ID NO: 586003 - DNA, 75 bp, synthetic construct
  source 1..75: mol_type = other DNA
ttcgttaaaaaaatcatttacattaataatgtggtaaatgatgtgagctatttaataattcaggtaatcatcggt

SEQ ID NO: 586004 - DNA, 75 bp, synthetic construct
  source 1..75: mol_type = other DNA
tcattgaaggccatgtgcctgcggcaacgatacataaggccatgcagtctggttcgggtatatacggtctcgcca

SEQ ID NO: 586005 - DNA, 75 bp, synthetic construct
  source 1..75: mol_type = other DNA
catgaccgaagaagccggtatggacggtgcgttcggcttacagagcaactggttacaggcagatattctgattaa

SEQ ID NO: 586006 - DNA, 75 bp, synthetic construct
  source 1..75: mol_type = other DNA
gtaatgctggtattgctgaatacttgcgggaggggcagaagcaaggccgcgcctttaatcgtgatgaacttgatt

SEQ ID NO: 586007 - DNA, 75 bp, synthetic construct
  source 1..75: mol_type = other DNA
ggattaatcacgttagggaaggagaaaacgttaacaaaaatttatgtgactggtgcgtttttacatctgttttat

SEQ ID NO: 586008 - DNA, 75 bp, synthetic construct
  source 1..75: mol_type = other DNA
gtggagacactcaatattttccgtgaaagaagacataaaaaagtttcgacatcgatcgaaacgcatgaatcgcac

SEQ ID NO: 586009 - DNA, 75 bp, synthetic construct
  source 1..75: mol_type = other DNA
aatcaggtaactcagagacagccagagagcataaggccgaagtgctggactatcttaaggataaaatcgcaacgg

SEQ ID NO: 586010 - DNA, 75 bp, synthetic construct
  source 1..75: mol_type = other DNA
aagaaatggttatcgttgcggctaaacctccgaaggatttccttatgggtggtgatggaaaagcctacactgact

SEQ ID NO: 586011 - DNA, 75 bp, synthetic construct
  source 1..75: mol_type = other DNA
aaaagagcatcagaaagaagtcctggactatctcaaagacaagatagccacagccaaagaagcacgggaaaacct

SEQ ID NO: 586012 - DNA, 75 bp, synthetic construct
  source 1..75: mol_type = other DNA
atgaatttactgatatggccggaacgcctgctgttccggcaggaaagacgaagtaaggaaaaaggtatggatgat

SEQ ID NO: 586013 - DNA, 75 bp, synthetic construct
  source 1..75: mol_type = other DNA
tgggcgatctgatttgggttgattttgacccgacaaaaggtagcgagcaagctggacatcgtccggctgttgtcc

SEQ ID NO: 586014 - DNA, 75 bp, synthetic construct
  source 1..75: mol_type = other DNA
tgcaagtgaaaagcgtttgcgtgagatggagcgttatgtaacgtctgatacttttacattacgcagccgcttccg

SEQ ID NO: 586015 - DNA, 75 bp, synthetic construct
  source 1..75: mol_type = other DNA
gaaccacaatccgcaatatccgtttccccaatcacatgattgaacagctcaatatcgcccttgaacataaaggtt

SEQ ID NO: 586016 - DNA, 75 bp, synthetic construct
  source 1..75: mol_type = other DNA
aacatcgctcttgaccagaaaggttcagaaaatttttctgcgtgggtcattgaatcttgccgccgggagctggca

SEQ ID NO: 586017 - DNA, 75 bp, synthetic construct
  source 1..75: mol_type = other DNA
tcagattgtgctcaggcagtcatggagcgggcaacagaacgcgccctttgtgaccggctgacacgtaagtgccgg

SEQ ID NO: 586018 - DNA, 75 bp, synthetic construct
  source 1..75: mol_type = other DNA
gatccacaacaacacgctctactacaccggtgtaccggaaaaccttgacgccgatgcgtttgagcagaccgcgaa

SEQ ID NO: 586019 - DNA, 75 bp, synthetic construct
  source 1..75: mol_type = other DNA
tggcgagttcaccgttaaacgcctgcagcttaagccccgtattgccctgctgccgatgaatccagcctaccccac

SEQ ID NO: 586020 - DNA, 75 bp, synthetic construct
  source 1..75: mol_type = other DNA
tggcgagttcaccgttaaacgcctgcagcttaagcctcgtattgccctgctgcctatgaatccggcctacccaac

SEQ ID NO: 586021 - DNA, 75 bp, synthetic construct
  source 1..75: mol_type = other DNA
cattctgggcgggtataccccgccggactgccgccgccgcatctggctgacccgggaggtttttatcggggaggt

SEQ ID NO: 586022 - DNA, 75 bp, synthetic construct
  source 1..75: mol_type = other DNA
gttccaccttcgcaacctacagtagcctggcagcctgtaccgggtccacaaacgggagagccggttattgctcct

SEQ ID NO: 586023 - DNA, 75 bp, synthetic construct
  source 1..75: mol_type = other DNA
aaccggttgcgccgcagcagcaatatcagcagccgcaacagccggttgcacagcagccgcaatatcagcagccgc

SEQ ID NO: 586024 - DNA, 75 bp, synthetic construct
  source 1..75: mol_type = other DNA
gcaacgttcttcgtctgggctatcggatattcgatgaaagagatgagcctgcattccggcgacctgatagtggtc

SEQ ID NO: 586025 - DNA, 75 bp, synthetic construct
  source 1..75: mol_type = other DNA
tgttgagtcgatgtatcatgcacttgcaaatcaagttgagtacattattacggttgataatacacctatgcatgt

SEQ ID NO: 586026 - DNA, 75 bp, synthetic construct
  source 1..75: mol_type = other DNA
aatgccgctgtaacatggacacttgtatatgaatggttcttttatttttctcttccggtaatttccgcgctcata

SEQ ID NO: 586027 - DNA, 75 bp, synthetic construct
  source 1..75: mol_type = other DNA
gcgaagctatgcgcatcgccagcaacgataacgctgtttctgacgcaaaaatctccctcgtaaccaaagtagtta

SEQ ID NO: 586028 - DNA, 75 bp, synthetic construct
  source 1..75: mol_type = other DNA
gagttcgtcaccgaaacgatgtttgtagaggacagcgacgtggacgagctgccattgctgtttaccgtgaactac

SEQ ID NO: 586029 - DNA, 75 bp, synthetic construct
  source 1..75: mol_type = other DNA
tgcgctcggcggctggcgtccggtgaattgtcaccgcccgatacggctgaagcaggacacctttattggcgaagt

SEQ ID NO: 586030 - DNA, 75 bp, synthetic construct
  source 1..75: mol_type = other DNA
attatgtaccgacgaaatggaaaattaaaaaatgtatggaaatattatttcttccgataattttttcaataaaag

SEQ ID NO: 586031 - DNA, 75 bp, synthetic construct
  source 1..75: mol_type = other DNA
gcggaaaaattcattaatccgatggggcggcaaacagacgctgcgttgttctccggtaagcggatggatgatgaa

SEQ ID NO: 586032 - DNA, 75 bp, synthetic construct
  source 1..75: mol_type = other DNA
tctgcaacaaaatgatggaaaagtacctgatatccgcagccaggagacactaccaaaagaagaaaatcgccagga

SEQ ID NO: 586033 - DNA, 75 bp, synthetic construct
  source 1..75: mol_type = other DNA
ttgtggaaaaggaggccacttatctgaaagcgtcccctggcgaggaaaaggtgaaagcataccagaaaatgatta

SEQ ID NO: 586034 - DNA, 75 bp, synthetic construct
  source 1..75: mol_type = other DNA
atggaagactatgacaaaccatggataaatattttcctacgttctttttacggtagacgtgaaattaaatttcgt

SEQ ID NO: 586035 - DNA, 75 bp, synthetic construct
  source 1..75: mol_type = other DNA
ggtgacgcaggcgcgtgaagagctggccgaagcaggattcagtcaggaaaacagtgacaccatgttgtatgcctt

SEQ ID NO: 586036 - DNA, 75 bp, synthetic construct
  source 1..75: mol_type = other DNA
ggacaaccggttgaggatggtaaggccctgtatcgccgtgcctgtcagctggtgaaacaggcgcgtgaagagctg

SEQ ID NO: 586037 - DNA, 75 bp, synthetic construct
  source 1..75: mol_type = other DNA
atggataaagaaaatagtagtattcctgaaatatggttaattgcatctggtgttgcggttattttactgacctta

SEQ ID NO: 586038 - DNA, 75 bp, synthetic construct
  source 1..75: mol_type = other DNA
aatccatcctggcaaaagcgttccgtggtgaactcaccgcccagtggcgggccgaaaacccggaattaatcagcg

SEQ ID NO: 586039 - DNA, 75 bp, synthetic construct
  source 1..75: mol_type = other DNA
ggtgctaccggtgaagtcggtaaaattgatgattatatttttgatgaagaacttgttgcattaggtgaagatggt

SEQ ID NO: 586040 - DNA, 75 bp, synthetic construct
  source 1..75: mol_type = other DNA
caagttcatatcgaaagcgttggccattactggcggcttctgactgaactgctgaaagaaattcctgcgaagtaa

SEQ ID NO: 586041 - DNA, 75 bp, synthetic construct
  source 1..75: mol_type = other DNA
gagcaaaaaaatccagaaaagtaactccaggtgattttatcttgtcaaactccatgtctctgggtagagcatata

SEQ ID NO: 586042 - DNA, 75 bp, synthetic construct
  source 1..75: mol_type = other DNA
agatgaccagtttatctatcctgatcttatgatgaaatttcgggcaaatgagaaaatacatcctaaatatctcta

SEQ ID NO: 586043 - DNA, 75 bp, synthetic construct
  source 1..75: mol_type = other DNA
gtcatctaagtctaataaagaaggactcattcctgtattaagaatgggcaatcttcagggcggaaaattggactg

SEQ ID NO: 586044 - DNA, 75 bp, synthetic construct
  source 1..75: mol_type = other DNA
tctggatggaaaaagcccaggacctcagcaaacacctgtatcccattatgaaagagctgaactcctcatacacga

SEQ ID NO: 586045 - DNA, 75 bp, synthetic construct
  source 1..75: mol_type = other DNA
attaaatacattctgtaatagtagtaatctattaagctataatgagataaaagcaacagcaaaatcagtagccaa

SEQ ID NO: 586046 - DNA, 75 bp, synthetic construct
  source 1..75: mol_type = other DNA
atgtagaaaaatacaaactgcaaattcaaaaatatgctttatgctgtgatgattttagagatggagtatacagag

SEQ ID NO: 586047 - DNA, 75 bp, synthetic construct
  source 1..75: mol_type = other DNA
ttattctgcccaccactggcatgatgtcggtgcggcattgcgtgaagtgaatcgggtgctgaaacccggcggtag

SEQ ID NO: 586048 - DNA, 75 bp, synthetic construct
  source 1..75: mol_type = other DNA
tcaggaatttcaggatctgccagacggtgctgagacgacgcttacggatgtcgtggcacaagctgccgaagcccg

SEQ ID NO: 586049 - DNA, 75 bp, synthetic construct
  source 1..75: mol_type = other DNA
ttacacctgtaccagagaaatggactacaaaaggtctagagaagatacgcaaaagcgccgcaaacgccatgttca

SEQ ID NO: 586050 - DNA, 75 bp, synthetic construct
  source 1..75: mol_type = other DNA
aaaaccctcttaacatctttgaatggagaaccacgtggacagatattaaagcgtatgatctatactatttagctg

SEQ ID NO: 586051 - DNA, 75 bp, synthetic construct
  source 1..75: mol_type = other DNA
tgcaaactggtagtactggaccagaacatccagtcgatgaccaaattcaagcaaattatcggtcgtggtacacgc

SEQ ID NO: 586052 - DNA, 75 bp, synthetic construct
  source 1..75: mol_type = other DNA
gctatccagaaagagccaatgtttgaaggcgttggaccagaagcagctcgccagattattggtagctgggccatg

SEQ ID NO: 586053 - DNA, 75 bp, synthetic construct
  source 1..75: mol_type = other DNA
ccgcagcagcaatatcagcagccacaacagccggttacacagcagccgcagtatcagcagccgcaacagccggtt

SEQ ID NO: 586054 - DNA, 75 bp, synthetic construct
  source 1..75: mol_type = other DNA
agccgtattacgcccctgcgccagaacaaccggtggcaggtaacgcctggcaagccgaagagcagcaatccactt

SEQ ID NO: 586055 - DNA, 75 bp, synthetic construct
  source 1..75: mol_type = other DNA
gcagccgcaatatcagcagccacaacagccggttgcacagcagccgcaatatcagcagccgcaacaaccggttgc

SEQ ID NO: 586056 - DNA, 75 bp, synthetic construct
  source 1..75: mol_type = other DNA
atgccagctttgtcgcttgcgcagaacgtgagcgcggtggtggcgtatgacttatctgcccaaatgctggatgtc

SEQ ID NO: 586057 - DNA, 75 bp, synthetic construct
  source 1..75: mol_type = other DNA
gtttcaaaatgctatgaaagaaaaaacattagattcagtgagtttgctaataagcaaaataaggaggcttgactg

SEQ ID NO: 586058 - DNA, 75 bp, synthetic construct
  source 1..75: mol_type = other DNA
gtattgaatcattttatcaattaatggactctaaggagctaaatgaaagttccgttctttcactttatcaagata

SEQ ID NO: 586059 - DNA, 75 bp, synthetic construct
  source 1..75: mol_type = other DNA
taagtaaaataaggaagcttgactggcaaaggttaaaagaattctttggtcctttggcatttaaccacccaggtt

SEQ ID NO: 586060 - DNA, 75 bp, synthetic construct
  source 1..75: mol_type = other DNA
ctgaactggggatcgggctgatttgtgccaacagtccacaggctaaaggtcgtgtgaagcgagcaaatcagacac

SEQ ID NO: 586061 - DNA, 75 bp, synthetic construct
  source 1..75: mol_type = other DNA
acagcgattttggacccacgctggccgctgaaaaactcagagagcgccatgatatccggctttcaatcgagaccg

SEQ ID NO: 586062 - DNA, 75 bp, synthetic construct
  source 1..75: mol_type = other DNA
tgcaattgagcatgatcgttctaaaaatctgctaacttacaatgaacgccttaactttttgatcaattgtgataa

SEQ ID NO: 586063 - DNA, 75 bp, synthetic construct
  source 1..75: mol_type = other DNA
ggaacgacgcatgtgggaggagatgctggacattcgttctgcagatcacgcctacggtatggtgcaccgtcagtc

SEQ ID NO: 586064 - DNA, 75 bp, synthetic construct
  source 1..75: mol_type = other DNA
ctgctcaggaagaaaacgtacgtgcaagtatcgaagaagttcaggccgctttgactcaggcactactggatctgg

SEQ ID NO: 586065 - DNA, 75 bp, synthetic construct
  source 1..75: mol_type = other DNA
gatttattagtctgatgtgtgaaaaagaaccggagttgaaaatagcacagcaactggtactcgagttctaccgta

SEQ ID NO: 586066 - DNA, 75 bp, synthetic construct
  source 1..75: mol_type = other DNA
ttaacctctgttatcccagagggtaatcctgagaagcattatcttttccctaatgatattttattacgtctgcgg

SEQ ID NO: 586067 - DNA, 75 bp, synthetic construct
  source 1..75: mol_type = other DNA
gcttatgcaaacccgttgtcagacgatgactggcagcgactggctaaggtgatggcgcgccgttccgctacagct

SEQ ID NO: 586068 - DNA, 75 bp, synthetic construct
  source 1..75: mol_type = other DNA
accaggttgttgattctgaagatggtattaaactaaaaagaattaagtgcgccgcaatggaaggccttattgaag

SEQ ID NO: 586069 - DNA, 75 bp, synthetic construct
  source 1..75: mol_type = other DNA
gtaagcgcgagcgcgagattatgaatcgggcggcaagcgtcatggctatgaccgtcgatccaaccactgatgctg

SEQ ID NO: 586070 - DNA, 75 bp, synthetic construct
  source 1..75: mol_type = other DNA
acgagttatgggcccggaatctgttctttaaggagtatcgggaagagtttgagagcagaactcttatgagttact

SEQ ID NO: 586071 - DNA, 75 bp, synthetic construct
  source 1..75: mol_type = other DNA
tgtatcagcccccgcacttttttctcacaaccaccgaacgactggcacaactcagcatcgttggactgcgaaatt

SEQ ID NO: 586072 - DNA, 75 bp, synthetic construct
  source 1..75: mol_type = other DNA
tttaccagccaccacacttctttctgacaacaactgaaagattggcgcaactcagtattgtggggctgcgaaatt

SEQ ID NO: 586073 - DNA, 75 bp, synthetic construct
  source 1..75: mol_type = other DNA
gtatttcaacctttgagatatgagcgtgactgtgaaaaagcggttgtggccgctggcggtgtagttaattgggtt

SEQ ID NO: 586074 - DNA, 75 bp, synthetic construct
  source 1..75: mol_type = other DNA
agagagattacacgacttattggtgatgcgcaggaagccactgtcactggctatgagttaatcgctgaagcctgg

SEQ ID NO: 586075 - DNA, 75 bp, synthetic construct
  source 1..75: mol_type = other DNA
ggagcaggaaggatgtcgaactcgggttactgttgtgcctcctggctttgatttccaggaattatacgttgattc

SEQ ID NO: 586076 - DNA, 75 bp, synthetic construct
  source 1..75: mol_type = other DNA
agtataccgttaaaaaagcaaaagatggttcggacaggattagcgcaggtaaattaaatctgaatgtttcagatt

SEQ ID NO: 586077 - DNA, 75 bp, synthetic construct
  source 1..75: mol_type = other DNA
caaaaccgtggacataagcatattgccaacactacctttggcttgccagaagtgctaccacgcgaactggtttct

SEQ ID NO: 586078 - DNA, 75 bp, synthetic construct
  source 1..75: mol_type = other DNA
ttgatgaatggcaaaaccgtgtcagtaaagaaattaaatatatcaataaagcatcaaagaaagtccaacatgctt

SEQ ID NO: 586079 - DNA, 75 bp, synthetic construct
  source 1..75: mol_type = other DNA
tccccaagttgttcagggatactgtcatggtcgaaatcgatcttgcaaacgggacagatgaagagatcgctgaat

SEQ ID NO: 586080 - DNA, 75 bp, synthetic construct
  source 1..75: mol_type = other DNA
cagcagcaatatcagcagccgcaacagccggttgcgccgcagccgcagtatcagcagccacaacaaccggttgcg

SEQ ID NO: 586081 - DNA, 75 bp, synthetic construct
  source 1..75: mol_type = other DNA
aatattcagtagaaaaatgacttatgcagagagaaaagcggctctttcagtcgctgtctttaacaaattgaggca

SEQ ID NO: 586082 - DNA, 75 bp, synthetic construct
  source 1..75: mol_type = other DNA
accattgcccttagcttagcaactgcggtatttcccgttgacgcagagtattattttaatccacggtttttaagc

SEQ ID NO: 586083 - DNA, 75 bp, synthetic construct
  source 1..75: mol_type = other DNA
ctgagtatggacttacagaatcaggaggtgttgtcttattctccgccccagaacgagggcgttcagtaagtcttt

SEQ ID NO: 586084 - DNA, 75 bp, synthetic construct
  source 1..75: mol_type = other DNA
gtaatcgacgaacgcacagaactggttgccagaaccattaccgactacctcaagcgcaccaatccgatggataaa

SEQ ID NO: 586085 - DNA, 75 bp, synthetic construct
  source 1..75: mol_type = other DNA
cccgcagcagcgctgcgatgcgtttatccagtttgccagcgaagtgatgctggcccgctgcgaactgaccagcga

SEQ ID NO: 586086 - DNA, 75 bp, synthetic construct
  source 1..75: mol_type = other DNA
aagtcgttatcgacaaaggtagtgttaatggcgtgtatgaaggccagcctgtcatcagcgacaaaggtgttgttg

SEQ ID NO: 586087 - DNA, 75 bp, synthetic construct
  source 1..75: mol_type = other DNA
aacgcgcgcctgcgcgagctgctgggttctccgttgcgccaggatgagcaaaagatggtgacccaggttatctct

SEQ ID NO: 586088 - DNA, 75 bp, synthetic construct
  source 1..75: mol_type = other DNA
tcacaaaatactctgaagcagcgcaagccgtgctcgataatctgctggataaatacgccgatgcgggcgtacagg

SEQ ID NO: 586089 - DNA, 75 bp, synthetic construct
  source 1..75: mol_type = other DNA
gaatcagggaacttgaagcgcagcttgagctggcgaaccagaaagctgagttttttgagtcagtttatgagtttt

SEQ ID NO: 586090 - DNA, 75 bp, synthetic construct
  source 1..75: mol_type = other DNA
agatcgtgaagcggttccggctggctttgaatccttcacgttaaccttaaaaggtctgaaaggcggtcactccgg

SEQ ID NO: 586091 - DNA, 75 bp, synthetic construct
  source 1..75: mol_type = other DNA
cctatggacaaacaggaaacaaggtttcagccggaaccgtccagtcagtcattggtgtcacttttatctatgaat

SEQ ID NO: 586092 - DNA, 75 bp, synthetic construct
  source 1..75: mol_type = other DNA
tatgccatcgtgtattaatatcatcagtggacccagctcgacggcggatattgaacttatcaaggtggttggggt

SEQ ID NO: 586093 - DNA, 75 bp, synthetic construct
  source 1..75: mol_type = other DNA
tacgaaacgcaacatatggaggaggaactacctcttcacctcaaaatatgggattttcttctcgttgcggtcggg

SEQ ID NO: 586094 - DNA, 75 bp, synthetic construct
  source 1..75: mol_type = other DNA
tgaaaaatgattacggggtgagtatcgtaaaaaagcggcccggcaagtcctcgcgcaaagtccggcccccaaaat

SEQ ID NO: 586095 - DNA, 75 bp, synthetic construct
  source 1..75: mol_type = other DNA
tggttctaactttttatcgatgatggataacgccgaaattctgcgcggaacgctggcgctgtacgactggaccga

SEQ ID NO: 586096 - DNA, 75 bp, synthetic construct
  source 1..75: mol_type = other DNA
gcttatgcaaacccgttgtcagacgatgactgtcaacgacggatgaaaagtgatccacttatatctccaccaacg

SEQ ID NO: 586097 - DNA, 75 bp, synthetic construct
  source 1..75: mol_type = other DNA
gttgcaggatgacagcgttatgcgctccatcgccacggtgaagaccaccaaaaccaacgaataccagaagctggt

SEQ ID NO: 586098 - DNA, 75 bp, synthetic construct
  source 1..75: mol_type = other DNA
aatttccggctaaccgaagcctatgaagaaatcctggaagtcgaagctatcagaacaggccagagcaaaactacc

SEQ ID NO: 586099 - DNA, 75 bp, synthetic construct
  source 1..75: mol_type = other DNA
tgaaaacgctattagaagcgttaccggaagaggtggtaacagaagtcacatcaaaactaaatccttcggcaagcc

SEQ ID NO: 586100 - DNA, 75 bp, synthetic construct
  source 1..75: mol_type = other DNA
aaaacaaccaccctgacggtttcttttgagccggaaagtgcaaccgacaagacgttcagagcggtttccgccgat

SEQ ID NO: 586101 - DNA, 75 bp, synthetic construct
  source 1..75: mol_type = other DNA
gaacatttcgtatagcctttacgttcagtgagttagctggcctggatgtaaccactcgttcaactcaattctctt

SEQ ID NO: 586102 - DNA, 75 bp, synthetic construct
  source 1..75: mol_type = other DNA
ggcgtgggaaaatttccgttttccaagcggaccccttttacacctgtgctacatgtaacctccgtatgccgcctt

SEQ ID NO: 586103 - DNA, 75 bp, synthetic construct
  source 1..75: mol_type = other DNA
atggcgggacaacagctgtttcggtgtccgaaatcgtacaattctgtacatctacgcaaggaaatgtacggaagt

SEQ ID NO: 586104 - DNA, 75 bp, synthetic construct
  source 1..75: mol_type = other DNA
ataccgcaaaaacgccgtatgggtgatgaactccaacaccgcagccaaactgcaaaagctgaaaaacggcaacgg

SEQ ID NO: 586105 - DNA, 75 bp, synthetic construct
  source 1..75: mol_type = other DNA
tgcccgttgacggacttcaggggaaaaacgagtatttttagtcatcctgtttacctctttctcaggaagtttagt

SEQ ID NO: 586106 - DNA, 75 bp, synthetic construct
  source 1..75: mol_type = other DNA
gacacagaaatttcccgcctcgagtctgtggctgatgaagaacgcagcaagccaggaacgggcatccagaaatta

SEQ ID NO: 586107 - DNA, 75 bp, synthetic construct
  source 1..75: mol_type = other DNA
gaacagggcagagcaaaacaaccgttctcaaagcagcgctggcgatgtacaacagccaggatgaaaacataaaga

SEQ ID NO: 586108 - DNA, 75 bp, synthetic construct
  source 1..75: mol_type = other DNA
tgagaaatgggtgacggataccgatgcacagcatagcgtcgcagtagaagcggcagaagcacagcgccagtcact

SEQ ID NO: 586109 - DNA, 75 bp, synthetic construct
  source 1..75: mol_type = other DNA
tgagaaatgggtgacggataccgatgcacagcatagcgacgcagtagaagctgcagaagcacagcgccagtcact

SEQ ID NO: 586110 - DNA, 75 bp, synthetic construct
  source 1..75: mol_type = other DNA
tgagaaatgggtgacggatactgatgcacagcatagcggcgcagtagaagccgcagaagcacagcgccagtcact

SEQ ID NO: 586111 - DNA, 75 bp, synthetic construct
  source 1..75: mol_type = other DNA
ccgcagaagcacagcgccagtcgctgattgatactgcaatggcttccattagtctgattcaactgaaattgcagg

SEQ ID NO: 586112 - DNA, 75 bp, synthetic construct
  source 1..75: mol_type = other DNA
ctgcagaagcacagcgccagtcgctgattgatgctgcaatggcttccattagtctgattcaactgaaatttcagg

SEQ ID NO: 586113 - DNA, 75 bp, synthetic construct
  source 1..75: mol_type = other DNA
cagcagaagcacagcgccagtcgctgattgattctgcaatggcttccattagtctgattcaactgaaatttcagg

SEQ ID NO: 586114 - DNA, 75 bp, synthetic construct
  source 1..75: mol_type = other DNA
atgcgtcccgcgactatcgccccattaacgccatacgataaatgggatggtgagaaatgggtgactgatactgaa

SEQ ID NO: 586115 - DNA, 75 bp, synthetic construct
  source 1..75: mol_type = other DNA
ctgtcgctggccggtgatttttcgggttcggtgattgatgccaaccacttccgccgcgactggcaggggcaggcg

SEQ ID NO: 586116 - DNA, 75 bp, synthetic construct
  source 1..75: mol_type = other DNA
gatattctgaagtctacggctattccgctgcgcgtttacggcaaatgggaagccctgaactacagtttgcaggta

SEQ ID NO: 586117 - DNA, 75 bp, synthetic construct
  source 1..75: mol_type = other DNA
tgagaaatgggtgacggatacagatgcacagcatagcgccgcagtagaagctgcagaagcacagcgccagtcact

SEQ ID NO: 586118 - DNA, 75 bp, synthetic construct
  source 1..75: mol_type = other DNA
atgcgtcccgcgactatcgcccccttatcgccatacgataaatgggatggtgagaaatgggtgacagatactgaa

SEQ ID NO: 586119 - DNA, 75 bp, synthetic construct
  source 1..75: mol_type = other DNA
atgcgtcccgcgactatcgcccctttaccgccatacgataaatgggatggtgagaaatgggtgacagatactgaa

SEQ ID NO: 586120 - DNA, 75 bp, synthetic construct
  source 1..75: mol_type = other DNA
ggcaaaaaagcttaaggctaataatttattgaaatattatgtagctgatgcttgtgatttaccatttgaagataa

SEQ ID NO: 586121 - DNA, 75 bp, synthetic construct
  source 1..75: mol_type = other DNA
ctgtatcagggcgtggtcgatccgctgggcggcgttaagagcctgtgcccgctgttcggtatctccaaccagatg

SEQ ID NO: 586122 - DNA, 75 bp, synthetic construct
  source 1..75: mol_type = other DNA
gggatgtgcgggcctataaaatccgtttcccaaatggcacggtggatgtgttccgtggctgggtcagcagtatcg

SEQ ID NO: 586123 - DNA, 75 bp, synthetic construct
  source 1..75: mol_type = other DNA
gccactggcagcacaagacattaccagtacagatgaagcctggtttatcggtcagcatctggagcaatatcatca

SEQ ID NO: 586124 - DNA, 75 bp, synthetic construct
  source 1..75: mol_type = other DNA
cagccgtccgttgcataaaccgacgacgccactgccttctctggatttgctgacaccgccgccgagcgaagtgga

SEQ ID NO: 586125 - DNA, 75 bp, synthetic construct
  source 1..75: mol_type = other DNA
gggattggcccgcagttgccacgaccgaaacgcatccgcgtgccaactcgtcgtgaactggcgtcttacggtatt

SEQ ID NO: 586126 - DNA, 75 bp, synthetic construct
  source 1..75: mol_type = other DNA
ccaacggcgaaagaaacgccgtatgagtcaatgccggaaaatgtcgaggagatcgtggcgcaggcaaaaggcgca

SEQ ID NO: 586127 - DNA, 75 bp, synthetic construct
  source 1..75: mol_type = other DNA
gcagtactggcgatgatcgtggtgaaagccctgactcatagcccgtggggaacgtataccgttgcgttcaccatt

SEQ ID NO: 586128 - DNA, 75 bp, synthetic construct
  source 1..75: mol_type = other DNA
attacgccggtcagtgcgattaaggtgacgccgacatccggtacggtggcaaaagggaaaacaaccaccctgacg

SEQ ID NO: 586129 - DNA, 75 bp, synthetic construct
  source 1..75: mol_type = other DNA
ggtgttggttgacgaatttgccgacctgatgatgacggtaggtaaaaaagtggaagagctgatagcacgtctggc

SEQ ID NO: 586130 - DNA, 75 bp, synthetic construct
  source 1..75: mol_type = other DNA
attggtatcgtgctgctggttgcctctatctacttcggtggcgtgattgctcacgatccgtactggggtccggca

SEQ ID NO: 586131 - DNA, 75 bp, synthetic construct
  source 1..75: mol_type = other DNA
aaaccttacgtaggtctggagttacccaacaaaaaacgccaaaccgtttacctgcgtgaagtgctggacaatgct

SEQ ID NO: 586132 - DNA, 75 bp, synthetic construct
  source 1..75: mol_type = other DNA
atgactccagtaaaagtgtggcaagagcgcgttgagatcccgacctatgaaaccgggccgcaggatatacatcct

SEQ ID NO: 586133 - DNA, 75 bp, synthetic construct
  source 1..75: mol_type = other DNA
gggcgaacaacaaaccgcacagcaactgtttagtgaaatgaaacagtgggcgcaagagatggcgaaaaccagtat

SEQ ID NO: 586134 - DNA, 75 bp, synthetic construct
  source 1..75: mol_type = other DNA
tgtttatcacaatgaggtgataaagccagcattggtggggttgttggggccgtggatttccgggggcatcgagtt

SEQ ID NO: 586135 - DNA, 75 bp, synthetic construct
  source 1..75: mol_type = other DNA
ccgcagcaggccagcgaactgcttcatgccgcgctgcattatccggagaatttaagcgaaggccgtttaccgggg

SEQ ID NO: 586136 - DNA, 75 bp, synthetic construct
  source 1..75: mol_type = other DNA
acgggccgtctccgctttccccatcgccactggcacctattacaaagtggactactctgttggggtggatatctc

SEQ ID NO: 586137 - DNA, 75 bp, synthetic construct
  source 1..75: mol_type = other DNA
ctgggcggtcgggtgcatcgcgcgtgggataaagtgaaacagcgcgattttgtctatcacaatgaagtcattaaa

SEQ ID NO: 586138 - DNA, 75 bp, synthetic construct
  source 1..75: mol_type = other DNA
caggcactgaaacgcgcacatgcgctgaacaaaaatccgcagtgcggacaggcgagtttgattcgcgccagtgct

SEQ ID NO: 586139 - DNA, 75 bp, synthetic construct
  source 1..75: mol_type = other DNA
catcttgatgccagacagccgcagcaggccagcgaactgcttcatgccgcgttgcattatccggagaatttaagc

SEQ ID NO: 586140 - DNA, 75 bp, synthetic construct
  source 1..75: mol_type = other DNA
cacagcaactgtttagtgaaatgaaacagtgggcgcaagagatggcgaaaaccagtatcgaagcggatttctttg

SEQ ID NO: 586141 - DNA, 75 bp, synthetic construct
  source 1..75: mol_type = other DNA
acgacctttatgcccgtcgatttcaccattgaagcccatgaagacggcgcacagactgtatgggttggcgaaacg

SEQ ID NO: 586142 - DNA, 75 bp, synthetic construct
  source 1..75: mol_type = other DNA
ccagcgcacgctgccgctttatctgcaggcgagtttattgccgaaagctgaacgcggcgaactggtcgcaaaagc

SEQ ID NO: 586143 - DNA, 75 bp, synthetic construct
  source 1..75: mol_type = other DNA
ttaaactccagcgtagcgagcgggggattgagtgggggctgtatgccatctccccgttgaaaggatgccgcctgg

SEQ ID NO: 586144 - DNA, 75 bp, synthetic construct
  source 1..75: mol_type = other DNA
atcaggaacatcagccgcaagagttgccgttgccggacgtcgccaaagcaccactggcagcacaagacattacca

SEQ ID NO: 586145 - DNA, 75 bp, synthetic construct
  source 1..75: mol_type = other DNA
gacgcaaaagcgcgagcatatggcgatggtgactaccgaaaccgacgtagccagcctgcgcaaacagctggccgg

SEQ ID NO: 586146 - DNA, 75 bp, synthetic construct
  source 1..75: mol_type = other DNA
cggcattgagtatcaaacgccgtggaatcccctgcgtctgaaactcgaatacgacggcaacaattaccagaatga

SEQ ID NO: 586147 - DNA, 75 bp, synthetic construct
  source 1..75: mol_type = other DNA
ctaccgtattcgtgaagatcgctttagctactctttcaacccaacactttcacaatcgctggcggcccggaagat

SEQ ID NO: 586148 - DNA, 75 bp, synthetic construct
  source 1..75: mol_type = other DNA
atatcccttcactgacctggaagaggcgctacgtttcgccggtgataaaacccaggcagcaaaagtccagcttgt

SEQ ID NO: 586149 - DNA, 75 bp, synthetic construct
  source 1..75: mol_type = other DNA
taaaaatcttaaaggaaagtggatctgtttttttgccatatcttggtcttttattaaatttattcgtagattatg

SEQ ID NO: 586150 - DNA, 75 bp, synthetic construct
  source 1..75: mol_type = other DNA
atgtcaaaacaggacggtgctcttatcttccagggacacccggttattcatgcagggcaaactgtttctgcatcg

SEQ ID NO: 586151 - DNA, 75 bp, synthetic construct
  source 1..75: mol_type = other DNA
acgccaacaggtttcgtgacggcttactggaacccgccgacgctcaatggcgtactgatgaaactcagcgtgggg

SEQ ID NO: 586152 - DNA, 75 bp, synthetic construct
  source 1..75: mol_type = other DNA
tttcaacgtcggtgcagtttatcgcgctgccagctgggcagatctcaacctgagttatgaacgcggtaacacgtt

SEQ ID NO: 586153 - DNA, 75 bp, synthetic construct
  source 1..75: mol_type = other DNA
ggctgatgtccagcgcccgctactggtttaccgaccacctgctgcttgatggcggtattttcaccaatatttaca

SEQ ID NO: 586154 - DNA, 75 bp, synthetic construct
  source 1..75: mol_type = other DNA
actggaacccgccgacgctcaatggcgtactgatgaaacttagcgttgggcaatatctggcaaaagataaaggcg

SEQ ID NO: 586155 - DNA, 75 bp, synthetic construct
  source 1..75: mol_type = other DNA
gttcgcaatgacgtttatctcaacaacttgcaggcgaactactttgccgacttaggcaatggtttctatggccag

SEQ ID NO: 586156 - DNA, 75 bp, synthetic construct
  source 1..75: mol_type = other DNA
ctaccgtattcgtgaagatcgctttagctactctttcaacccaacactttcacgtcgctgggcggcccggaagat

SEQ ID NO: 586157 - DNA, 75 bp, synthetic construct
  source 1..75: mol_type = other DNA
tcatcagaattacatgaagggcaaacggtagccattaatccgtctaaaccgtgcggtcactgcaaatactgcatt

SEQ ID NO: 586158 - DNA, 75 bp, synthetic construct
  source 1..75: mol_type = other DNA
acccatatccggaccatcacccacagggtgacagacaccaccctgaaggtggtggcagccgatccgaatacggtg

SEQ ID NO: 586159 - DNA, 75 bp, synthetic construct
  source 1..75: mol_type = other DNA
accggtgttcgccatatcaaggaagtgtttatccttatccccaagaaaaactcgaagtccacgctggccgcggga

SEQ ID NO: 586160 - DNA, 75 bp, synthetic construct
  source 1..75: mol_type = other DNA
gctcaacaactcactcgcgacagttacgccattgaccccaccgattctattcgtgaagagttaccgttccttatg

SEQ ID NO: 586161 - DNA, 75 bp, synthetic construct
  source 1..75: mol_type = other DNA
atgatgaccggttacgccaaccctgtacgtctcaccacctcactgattggcgtcagcggtggtgattattccaat

SEQ ID NO: 586162 - DNA, 75 bp, synthetic construct
  source 1..75: mol_type = other DNA
ctggggatgtatgtgattgggcgtgaccgggagacccgcgaatggctgggctggggccatgcctgggcgcatgaa

SEQ ID NO: 586163 - DNA, 75 bp, synthetic construct
  source 1..75: mol_type = other DNA
ctacgatgcgcagaccggtgtcgccatatcaaggaagtttttatccttatccccaagaaaaacagcaagtccacg

SEQ ID NO: 586164 - DNA, 75 bp, synthetic construct
  source 1..75: mol_type = other DNA
tttcactgtgttccatcgtatttatggcgacaacagccaacgctgccgtttgctcacccgctatggaaaccgcag

SEQ ID NO: 586165 - DNA, 75 bp, synthetic construct
  source 1..75: mol_type = other DNA
agcagcaatatcagcagccgcaacaaccggttgcaccgcagcagcaatatcagcagccgcaacaaccggttgcac

SEQ ID NO: 586166 - DNA, 75 bp, synthetic construct
  source 1..75: mol_type = other DNA
gatgtgagtccccgttccctttcgctgggcaaagagatgggggcggatgtgctcgtaaacccacaaaacgacgac

SEQ ID NO: 586167 - DNA, 75 bp, synthetic construct
  source 1..75: mol_type = other DNA
atacggcaaacccgtcaatgccgctccagttctgcccggcgcctccccctgtttttaaacgtatcgggctggcta

SEQ ID NO: 586168 - DNA, 75 bp, synthetic construct
  source 1..75: mol_type = other DNA
tggggataagacgaaaatccaagcgctatctcaacatatgtatgatatctataaacaaatggggggggatagtta

SEQ ID NO: 586169 - DNA, 75 bp, synthetic construct
  source 1..75: mol_type = other DNA
atgctaaagaagttaaagcattaggggataaaccaaagcataaagaaatcatagctgtaaacaaaaaatataagg

SEQ ID NO: 586170 - DNA, 75 bp, synthetic construct
  source 1..75: mol_type = other DNA
ttctttattcatggtgcactgtgcgtggcatattccggtcagtgctacatttctcatgcacaaacggggcgtagc

SEQ ID NO: 586171 - DNA, 75 bp, synthetic construct
  source 1..75: mol_type = other DNA
tgcgcctgcataaaagacttttatttagccgcttcggtatcttcagtatatttcctatgctgttggttgtgattt

SEQ ID NO: 586172 - DNA, 75 bp, synthetic construct
  source 1..75: mol_type = other DNA
agtttgtgttattggtgcttttagcgcctggtttcatcgttgctggttgttggtgcctttagcgcctggtttcat

SEQ ID NO: 586173 - DNA, 75 bp, synthetic construct
  source 1..75: mol_type = other DNA
atccgttacacctttcgccactggaaaacgaatttctgctgcgcccgatgcgcattcaggacgggcataccgaga

SEQ ID NO: 586174 - DNA, 75 bp, synthetic construct
  source 1..75: mol_type = other DNA
tggcgtttgcgcgtattaatcgccagctgatcgctttgcgcataatgcaacaagttaaggccaccggaagtccgg

SEQ ID NO: 586175 - DNA, 75 bp, synthetic construct
  source 1..75: mol_type = other DNA
gtcacttaaaaaactcaggccgtagtcggtaacctcgcgcatacatccgggcagtgatgtgattgtctgcgctga

SEQ ID NO: 586176 - DNA, 75 bp, synthetic construct
  source 1..75: mol_type = other DNA
tgattgtctgcgctgaaatggacgaacagtggggctacgtcggtgctaaatcacgtcagcgctggctgttttacg

SEQ ID NO: 586177 - DNA, 75 bp, synthetic construct
  source 1..75: mol_type = other DNA
cctgacttaacgctgtgctggattacattgacgcggtgacggcaacagataccagcaccgcgccggatgtcatct

SEQ ID NO: 586178 - DNA, 75 bp, synthetic construct
  source 1..75: mol_type = other DNA
ccagacttaactctgtgctggattacattgacgcggtgacggcaacagataccagcaccgcgccggatgtcatct

SEQ ID NO: 586179 - DNA, 75 bp, synthetic construct
  source 1..75: mol_type = other DNA
cggcagaagcacagcgccagtcgctgattgatactgcaatggcttccattagtctgattcaactgaaattccagg

SEQ ID NO: 586180 - DNA, 75 bp, synthetic construct
  source 1..75: mol_type = other DNA
ggctaccagttgctgctggagtatttcaccttccgcgagaagtttatgttcgtggcgctgaacgggctggagcag

SEQ ID NO: 586181 - DNA, 75 bp, synthetic construct
  source 1..75: mol_type = other DNA
catatttcatttttctaatggctaacctttttttattctggctatccttcttttttcttattaaaaataaaacat

SEQ ID NO: 586182 - DNA, 75 bp, synthetic construct
  source 1..75: mol_type = other DNA
cctgatgactgtggtctggtggttattcccggttcacgcggtgattactccaggctgttcagcccgtcaggagtg

SEQ ID NO: 586183 - DNA, 75 bp, synthetic construct
  source 1..75: mol_type = other DNA
tggcgatggtctgaatgtgatgattaaacgtgaagtggttggctttcgcgccaatacagtcgaaaaaaccgggca

SEQ ID NO: 586184 - DNA, 75 bp, synthetic construct
  source 1..75: mol_type = other DNA
cgccattgcccgcgaagctattttgcacggtgccgatgctgtttatatcggcggccctggttttggtgcccgtca

SEQ ID NO: 586185 - DNA, 75 bp, synthetic construct
  source 1..75: mol_type = other DNA
acaagtcattattgacgttaaatctgtcaccattgaaaaaagatgaaatagctgtaagcgtgaaggcgttagata

SEQ ID NO: 586186 - DNA, 75 bp, synthetic construct
  source 1..75: mol_type = other DNA
gaccagcgaagagggcgtgagtatcacacatacgctggatgggcaattcgacgaggccaataatgccgaaaaggc

SEQ ID NO: 586187 - DNA, 75 bp, synthetic construct
  source 1..75: mol_type = other DNA
ttaccagcgcggcagccgtaaaccggttgctgatcctgcgccggtttatccgcaaacgcatctgagtttcctcgc

SEQ ID NO: 586188 - DNA, 75 bp, synthetic construct
  source 1..75: mol_type = other DNA
gcaaaatcaaaaatcacatactgaaaatgccgttaccgggaagcgtagtggcatccgtaagtccggatgagctgc

SEQ ID NO: 586189 - DNA, 75 bp, synthetic construct
  source 1..75: mol_type = other DNA
aaacaatctgaacaaacgtatgggggagctgcgtgacacgaacggtgatgccggtgcctgggcccgtattatgaa

SEQ ID NO: 586190 - DNA, 75 bp, synthetic construct
  source 1..75: mol_type = other DNA
aagccggtttaattatacctgtcgcgcgactgcgtccggtgctaacgctcaaaatcagtggagggaaaaaaggat

SEQ ID NO: 586191 - DNA, 75 bp, synthetic construct
  source 1..75: mol_type = other DNA
ggccgggcggtcaacatgtcaataaaaccgactcggcggtgcgcgccacgcatttggcatccggtattagcgtga

SEQ ID NO: 586192 - DNA, 75 bp, synthetic construct
  source 1..75: mol_type = other DNA
atttaaactgatgtctgattcatcagtactgaaagccagagaccaggcatctgttgttggtgatattatttctga

SEQ ID NO: 586193 - DNA, 75 bp, synthetic construct
  source 1..75: mol_type = other DNA
tccgtcaggggccggtggaatggctctggcgtcagttaactttgcgtgctgccggacctgcattatctaaaacat

SEQ ID NO: 586194 - DNA, 75 bp, synthetic construct
  source 1..75: mol_type = other DNA
aggtcggttttgacaaaaaacatgcgctggacggtgttgacctgttcaccggtgtcacgatgacctataccgaca

SEQ ID NO: 586195 - DNA, 75 bp, synthetic construct
  source 1..75: mol_type = other DNA
ccaactgtctcctctaattcattaacttcaaatggggaggtggcaggccttacccctttcacaatttcactggaa

SEQ ID NO: 586196 - DNA, 75 bp, synthetic construct
  source 1..75: mol_type = other DNA
tcgccgcaggccattacccgtgattacacccttgatatccatgatgaaaacggcaaagctccgctgttatcggta

SEQ ID NO: 586197 - DNA, 75 bp, synthetic construct
  source 1..75: mol_type = other DNA
atgaattccgtctggtcagcgaggcgctggcagaacgtgaagtgttgctgaaaatggccccgcatatcgctttcc

SEQ ID NO: 586198 - DNA, 75 bp, synthetic construct
  source 1..75: mol_type = other DNA
caagcagcaaaccaacgttcaacattgaatgcatggagaaatgctgtttctatatgggaccctgtttgccgagaa

SEQ ID NO: 586199 - DNA, 75 bp, synthetic construct
  source 1..75: mol_type = other DNA
ttgttgctgcatctgctgcagtatctggctccgcgatggcgtggacccagggtgatttcaatggttcggttgata

SEQ ID NO: 586200 - DNA, 75 bp, synthetic construct
  source 1..75: mol_type = other DNA
aaggtattaaaaacagtaagaaagctacattctttcaaaaatgctttgtctttgggaatcaaaaaggcgggtaag

SEQ ID NO: 586201 - DNA, 75 bp, synthetic construct
  source 1..75: mol_type = other DNA
tcgtctggacctactccggcgtgcgtccactgtgtgatgatgagtccgattcgccgcaggccattacccgtgatt

SEQ ID NO: 586202 - DNA, 75 bp, synthetic construct
  source 1..75: mol_type = other DNA
gcggaatcctactataagggcttccccgaacagtcaacgccggtttttaatttctgtctgttcatcaatgaaggg

SEQ ID NO: 586203 - DNA, 75 bp, synthetic construct
  source 1..75: mol_type = other DNA
tgtttggggtcgtttgcgggaaggggcggaatcctactataagggcttccccgaacagtcaacgccggtttttaa

SEQ ID NO: 586204 - DNA, 75 bp, synthetic construct
  source 1..75: mol_type = other DNA
tgccgggctatgtgcaacgggaatttgaagaatttctccaatgcgggcggctggagcatggctttctacgggttc

SEQ ID NO: 586205 - DNA, 75 bp, synthetic construct
  source 1..75: mol_type = other DNA
tcttttattgattattatggcctggtcggcgtggaagttagctgccgggacagcgtttaaaaccacacaaatatt

SEQ ID NO: 586206 - DNA, 75 bp, synthetic construct
  source 1..75: mol_type = other DNA
gctgtccaaccgcattgccggattggggctgtcgattatggcggtgggcggttatgcccgctacatggagcgcat

SEQ ID NO: 586207 - DNA, 75 bp, synthetic construct
  source 1..75: mol_type = other DNA
gctcgctgttcctcgcccacatcgggctgatgcagtcagaactgcatctggtggtggtgatgttactgagtttga

SEQ ID NO: 586208 - DNA, 75 bp, synthetic construct
  source 1..75: mol_type = other DNA
agccagtactgatgtttgccaacgttggtggaaatatatgaccgatgttatgcccgctaacccggataacagccc

SEQ ID NO: 586209 - DNA, 75 bp, synthetic construct
  source 1..75: mol_type = other DNA
gccgtggccgtttccccagtcgctgatgaccgcatttatggcggaatatgacagcggcgacatcgtgattgatcc

SEQ ID NO: 586210 - DNA, 75 bp, synthetic construct
  source 1..75: mol_type = other DNA
caaatcgccccctgcattattgttgccatccgtcgtgatgattcgattctgctcgctcagcatacccgccatcgt

SEQ ID NO: 586211 - DNA, 75 bp, synthetic construct
  source 1..75: mol_type = other DNA
gtcgggctatttcaactagccggacgcggcgtgcaactggcggagttttaccgctcgcataaatactgcgggtat

SEQ ID NO: 586212 - DNA, 75 bp, synthetic construct
  source 1..75: mol_type = other DNA
accagggattgaacgagcacggatacattattccgggtcttggcgatgccggtgacaaaatctttggtacaaaat

SEQ ID NO: 586213 - DNA, 75 bp, synthetic construct
  source 1..75: mol_type = other DNA
gcccggtagaaatcgaccagatcaaaggtaagaaaattaccgttgtgccaattctgcgtgcgggtctggggatga

SEQ ID NO: 586214 - DNA, 75 bp, synthetic construct
  source 1..75: mol_type = other DNA
atgtatcgtaacgaagaaacgctggagccggtaccttacttccagaagctggtgtcgaacattgatgagcgtatg

SEQ ID NO: 586215 - DNA, 75 bp, synthetic construct
  source 1..75: mol_type = other DNA
ggtaacggttatcttcagaatgctggttatgtgaagactcagacagctgagggtatgaaaaatgaactcactcgt

SEQ ID NO: 586216 - DNA, 75 bp, synthetic construct
  source 1..75: mol_type = other DNA
aagttggtaaacttgagtttaaaatgaatgtgtttacattggcagacctggtgtggaaaggaaatggtgttacta

SEQ ID NO: 586217 - DNA, 75 bp, synthetic construct
  source 1..75: mol_type = other DNA
gtatcagcgtcggcacaacccgatctggccggaactggaagcggtattgaaatctcacggtgcgcataactacgc

SEQ ID NO: 586218 - DNA, 75 bp, synthetic construct
  source 1..75: mol_type = other DNA
caaatttcgatcttgtgggtcagcgcgcactgcatatcggcgaatggcaaggagaacctgtttggctggtgcaac

SEQ ID NO: 586219 - DNA, 75 bp, synthetic construct
  source 1..75: mol_type = other DNA
tgagcaaaaattatggttgccgaagggagaattgccatatggcaaagcggcaaatttcgatcttgtgggtcagcg

SEQ ID NO: 586220 - DNA, 75 bp, synthetic construct
  source 1..75: mol_type = other DNA
ccatccgtcgcgatgattcgatcctcctcgcccagcatacccgccatcgcaacggtgtccatacggtacttgccg

SEQ ID NO: 586221 - DNA, 75 bp, synthetic construct
  source 1..75: mol_type = other DNA
tgcttatggcccgcacgctgcaaacgtcgttggcctgaccgatcagaccgatctcttctacaccatgaaagccgc

SEQ ID NO: 586222 - DNA, 75 bp, synthetic construct
  source 1..75: mol_type = other DNA
gacgtcagcgtgtactcacccaattcccaggtaaacgcatctttgttgcctcgattcgtggtgatgtgcagcagc

SEQ ID NO: 586223 - DNA, 75 bp, synthetic construct
  source 1..75: mol_type = other DNA
ccagaacgcctccggcgtgcgtgccgaatgccatgactgccatattccgccggatattccgggcatggtgaagcg

SEQ ID NO: 586224 - DNA, 75 bp, synthetic construct
  source 1..75: mol_type = other DNA
taccagacctttattgcccactccattgatacacctgaaaaattcgaagccaaacgcgcggaacttgccgagcgt

SEQ ID NO: 586225 - DNA, 75 bp, synthetic construct
  source 1..75: mol_type = other DNA
atctgtcgtctacttgatgcaggagcgggtgtcggcgctctatcctgcgcttttctcgaccgttgggcgacgggt

SEQ ID NO: 586226 - DNA, 75 bp, synthetic construct
  source 1..75: mol_type = other DNA
tggtagcaagcgtcgttgatcctgctaccttcagtgagtattcagtgttgggatttgaaaatcacatgaacgtgt

SEQ ID NO: 586227 - DNA, 75 bp, synthetic construct
  source 1..75: mol_type = other DNA
taagcggttcaatgaatctgacgatcggcgggatcgtgatcaatgatgaacagattaacttgaccacagacaaaa

SEQ ID NO: 586228 - DNA, 75 bp, synthetic construct
  source 1..75: mol_type = other DNA
acgtgcagatgaagtgtacttcctgaaagaaggtaattttgaagcagataaaaacacgaaagacgaagcgttact

SEQ ID NO: 586229 - DNA, 75 bp, synthetic construct
  source 1..75: mol_type = other DNA
tccgtttatttccgaaaagaatgccgggccgatatacatcaccaacttccagttacaaaaggtggactataacca

SEQ ID NO: 586230 - DNA, 75 bp, synthetic construct
  source 1..75: mol_type = other DNA
aaaacctggcctggggcggcgtatttaaactgaaagatactggctatccggtatttcgttttgctaaggatgtca

SEQ ID NO: 586231 - DNA, 75 bp, synthetic construct
  source 1..75: mol_type = other DNA
taactacgatgcgatggatcatgcgaagcagcatcctgaagcggcacgtcagatgaaggtggcagcgaaagataa

SEQ ID NO: 586232 - DNA, 75 bp, synthetic construct
  source 1..75: mol_type = other DNA
catgaagggccagaaggtgcaggacacttaggcgatctgccggcactggtggttaacaatgacggtaaagcaacc

SEQ ID NO: 586233 - DNA, 75 bp, synthetic construct
  source 1..75: mol_type = other DNA
atgggcgatccccgtgatgaagagaacgctctcggaccaatggctcgttttgatttacgtgatgagctgcatcat

SEQ ID NO: 586234 - DNA, 75 bp, synthetic construct
  source 1..75: mol_type = other DNA
atgcttcaaagtaatgagtacttttcaggcaaagtgaaatcgatcggcttttccagcagtactggtcgcgccagc

SEQ ID NO: 586235 - DNA, 75 bp, synthetic construct
  source 1..75: mol_type = other DNA
gaaattatgctgaaggtgcgggcggtttttttaaaggaatcgatgccttaccgcttaccggacaatacacccact

SEQ ID NO: 586236 - DNA, 75 bp, synthetic construct
  source 1..75: mol_type = other DNA
gtgggttaccattgtcgtgttgatccctgttacgggcgtaattctgcttatactgtgctgcctgccgtcaaagtc

SEQ ID NO: 586237 - DNA, 75 bp, synthetic construct
  source 1..75: mol_type = other DNA
ctctcaatcgtcagagctatcgtcagcggtgagcgcgatccttccgtattgatccagtaccttgatgtgagatgt

SEQ ID NO: 586238 - DNA, 75 bp, synthetic construct
  source 1..75: mol_type = other DNA
cttggcggcggcgcaaaaacctttgctgaaacggcaaccgccggtgaatggcagggaaaaacgctgcgtgaacag

SEQ ID NO: 586239 - DNA, 75 bp, synthetic construct
  source 1..75: mol_type = other DNA
cacagggagatattagtacgcccggcggtgcccgccgtttaacaggcgatcagaccgccgccttgcgtgattcac

SEQ ID NO: 586240 - DNA, 75 bp, synthetic construct
  source 1..75: mol_type = other DNA
atcgataaacccgcagtaacctgtaccccgaatccgcaacgaaatgacagtgtgccgacgttagcgcagatgacc

SEQ ID NO: 586241 - DNA, 75 bp, synthetic construct
  source 1..75: mol_type = other DNA
tgccagaaccggctttccccagggctgggaagtgaacaaagaagataacctggtgtatctcgaagtgaagcccgt

SEQ ID NO: 586242 - DNA, 75 bp, synthetic construct
  source 1..75: mol_type = other DNA
cccggaaaatgagcttgaacgctggcgaacgaatctgtttgttcgcaccacgaaacgtaattacagcatggagct

SEQ ID NO: 586243 - DNA, 75 bp, synthetic construct
  source 1..75: mol_type = other DNA
cctggaaaatgcgaaatcgccccgtaactggcagtactggaagcgggttgctgaaggcagccaggatatcagccc

SEQ ID NO: 586244 - DNA, 75 bp, synthetic construct
  source 1..75: mol_type = other DNA
accgcacagccgcacgtttacgcggtgggcgacgtgattggttatccgagcctggcgtcggcggcctatgaccag

SEQ ID NO: 586245 - DNA, 75 bp, synthetic construct
  source 1..75: mol_type = other DNA
gattgaagatatccctaccggcatctacaccattccggaaatcagctcggtcggtaaaacggaacagcaactgac

SEQ ID NO: 586246 - DNA, 75 bp, synthetic construct
  source 1..75: mol_type = other DNA
accgcacagccgcacgtttacgcagtgggcgacgtgattggttatccaagcctggcttcggcggcctacgaccag

SEQ ID NO: 586247 - DNA, 75 bp, synthetic construct
  source 1..75: mol_type = other DNA
acaaaaagcctgtacgggttcgcctggcaaacatcgatgcgccggaaaagaaacaggctttcgggcgctggtcgg

SEQ ID NO: 586248 - DNA, 75 bp, synthetic construct
  source 1..75: mol_type = other DNA
gccagacaacaaaaacgtgggctctggtcagatgctgatccggttcccccatggatatggcgacaccgtaaataa

SEQ ID NO: 586249 - DNA, 75 bp, synthetic construct
  source 1..75: mol_type = other DNA
gctggcaaaagtcacccgcgataatcaaatcgttaccctgaccgcctcccgcgatctgcgtttcctgctgcaaga

SEQ ID NO: 586250 - DNA, 75 bp, synthetic construct
  source 1..75: mol_type = other DNA
tggattgccactgacagcaccgaggctgtgcatattgccgaacagattggttatccggtggcactaaaattacgc

SEQ ID NO: 586251 - DNA, 75 bp, synthetic construct
  source 1..75: mol_type = other DNA
atggacccggcatgggatgcggctattcagcgtgccggtttgttgcgggtacaggacacccacgaactgttttcg

SEQ ID NO: 586252 - DNA, 75 bp, synthetic construct
  source 1..75: mol_type = other DNA
catctttatatcgactggcctgtagaccgggccattccgcatgtggtgcgcgaatccgtcgatgccatccgacgc

SEQ ID NO: 586253 - DNA, 75 bp, synthetic construct
  source 1..75: mol_type = other DNA
gcatgggtctatgaacgttacaacgcggatgagtcattaccagctctgcaacgggaagcgcaggaacaaaaacgc

SEQ ID NO: 586254 - DNA, 75 bp, synthetic construct
  source 1..75: mol_type = other DNA
cggttactgtcacatattttcagcgagatcgttatggtcgtattctcgggcaggtttatgcaccagacggtatga

SEQ ID NO: 586255 - DNA, 75 bp, synthetic construct
  source 1..75: mol_type = other DNA
atgagacattttcttaatgctctttcctttgctgttgccctgttgccagctacattgtgtgctgctcagattcag

SEQ ID NO: 586256 - DNA, 75 bp, synthetic construct
  source 1..75: mol_type = other DNA
aacatgatgaatttacatgccttacctacttcccctcgccgttggcaatgttatgatggcgggaatttttaccaa

SEQ ID NO: 586257 - DNA, 75 bp, synthetic construct
  source 1..75: mol_type = other DNA
cgtcaccgtaagcattaatggtgccgatcagcgtaccgatcaggcgctggcaaaagtcacccgcgataatcaaat

SEQ ID NO: 586258 - DNA, 75 bp, synthetic construct
  source 1..75: mol_type = other DNA
tagttgctctgtttatgcttgcaggatgcgcaaaaccgccaacaactattgaagtttctccgacgattacactgc

SEQ ID NO: 586259 - DNA, 75 bp, synthetic construct
  source 1..75: mol_type = other DNA
atggctaaccgtgctggcgctcaggagttgcgggttgtggttgagcacgatccggtttttgggccgttgatcatg

SEQ ID NO: 586260 - DNA, 75 bp, synthetic construct
  source 1..75: mol_type = other DNA
gagatttgtcgtcacctctgtgatggaaaccatgcgtcgccgcagcgaaaacaacggttttggcctcgcttccag

SEQ ID NO: 586261 - DNA, 75 bp, synthetic construct
  source 1..75: mol_type = other DNA
atcgttgggtgccctatgctcttaccgaacttctgcgcagcaagagagaaaatcaggggatgatgctggctgaac

SEQ ID NO: 586262 - DNA, 75 bp, synthetic construct
  source 1..75: mol_type = other DNA
cggttttcacagcctcgaatcgctctcgccaactttatgccagccgttcggtcgtgaccgcgcgggcatcaccat

SEQ ID NO: 586263 - DNA, 75 bp, synthetic construct
  source 1..75: mol_type = other DNA
tcattgctgattatgacatcagcgtctgtatcaactgggcacgttcggccattgaaggacgcaataccacattac

SEQ ID NO: 586264 - DNA, 75 bp, synthetic construct
  source 1..75: mol_type = other DNA
ggcatcaagctgctcgaaataaatgcgaaggatgatgtacaacatcgaatagaaatattacgtaacggcattcac

SEQ ID NO: 586265 - DNA, 75 bp, synthetic construct
  source 1..75: mol_type = other DNA
aatgcgacggctgatgtgcaccatcgcatcgaaatattacgtaacggcattcactctctgaatgaatctcgttaa

SEQ ID NO: 586266 - DNA, 75 bp, synthetic construct
  source 1..75: mol_type = other DNA
ttcacagccaggattttgatgcgctgatggttattcattcgcccagcgccgcagcgcccgcaacagaaagtgcgc

SEQ ID NO: 586267 - DNA, 75 bp, synthetic construct
  source 1..75: mol_type = other DNA
actcctcgcaagaggcacgacgtttattcagcgaagctggactgccaacctatcgaacgccggaaggaaccatca

SEQ ID NO: 586268 - DNA, 75 bp, synthetic construct
  source 1..75: mol_type = other DNA
aatttaccgcgctggatgtcacggtggatattgcaccgttcgaaggcaataacgaaagtcgccttgctgtgcgcc

SEQ ID NO: 586269 - DNA, 75 bp, synthetic construct
  source 1..75: mol_type = other DNA
atccgtcgcgttttctcagccactggctggcgctcgacggcccggcttataccctttcaaccgcctgctcttcca

SEQ ID NO: 586270 - DNA, 75 bp, synthetic construct
  source 1..75: mol_type = other DNA
acgctgccaccgtgtggcattatcgaaaaaccgcagccgctggcacgtccggtgatcctgtccaattccttcgcc

SEQ ID NO: 586271 - DNA, 75 bp, synthetic construct
  source 1..75: mol_type = other DNA
ctgctgacgaactggtgtggagaacactcctcgcaagaggcacgacgcttattcagcgaagccgggctgccgacc

SEQ ID NO: 586272 - DNA, 75 bp, synthetic construct
  source 1..75: mol_type = other DNA
caggaacaaaagcgtggtttatgggctgacagtaatccggttccaccgtgggaatggcgacataaacagaactga

SEQ ID NO: 586273 - DNA, 75 bp, synthetic construct
  source 1..75: mol_type = other DNA
tttgaacgtgaacgggaccggatgtaccgggaaaaattaccggcgcagatgatgacggccatggcgcatcagtta

SEQ ID NO: 586274 - DNA, 75 bp, synthetic construct
  source 1..75: mol_type = other DNA
ccatgaaaaatctggatgcgattaaccgccgtgccgttccccgggctgccgccacgacacttaaccgtgtggcgg

SEQ ID NO: 586275 - DNA, 75 bp, synthetic construct
  source 1..75: mol_type = other DNA
ccatgaaaaatctggatgcaattgatcgccgtgccgttccccgggcctctgccacgacactgaaccgcgtggcgg

SEQ ID NO: 586276 - DNA, 75 bp, synthetic construct
  source 1..75: mol_type = other DNA
gctgagccagaaacctcattacagcaagctaacgtacggctatgcacgcggtcatgaagcttacgcttatgtaga

SEQ ID NO: 586277 - DNA, 75 bp, synthetic construct
  source 1..75: mol_type = other DNA
gaaatgaatgaagacggtactctggcacgcattgaagagaaatacctggggcatggcgatgattttgattacgtc

SEQ ID NO: 586278 - DNA, 75 bp, synthetic construct
  source 1..75: mol_type = other DNA
accgggagaaattaccggaacagatgatgaaagccatggcgtatcagttacgtctcgttatgaaacgaaaactgt

SEQ ID NO: 586279 - DNA, 75 bp, synthetic construct
  source 1..75: mol_type = other DNA
gcaccgaaacagcgcgagcgtcagcgcatcgtgattgaaggcgacggcgaagaacagatcgccgcatttgctgaa

SEQ ID NO: 586280 - DNA, 75 bp, synthetic construct
  source 1..75: mol_type = other DNA
ccttaagtgtgggcggtaaagctctgaccaacgccaaagggcgcaaagatgtgttgtcgcgcggcccggatgaat

SEQ ID NO: 586281 - DNA, 75 bp, synthetic construct
  source 1..75: mol_type = other DNA
gcgccgaaacagcgcgaacgtcagcgcatcgtgattgaaggcgacggcgaagaacagatcgccgcatttgctgaa

SEQ ID NO: 586282 - DNA, 75 bp, synthetic construct
  source 1..75: mol_type = other DNA
cagcgccgtctcatccgtgagcgtatccgcctgcaacgggccagcgcagacagggtttatgcgaaggtcatcatc

SEQ ID NO: 586283 - DNA, 75 bp, synthetic construct
  source 1..75: mol_type = other DNA
ataccgaacattacaaggtaaagtcgtatggctatggatattgccatttgttattgcgcggttaatcgtgcgtgc

SEQ ID NO: 586284 - DNA, 75 bp, synthetic construct
  source 1..75: mol_type = other DNA
tggcggaagaagatgataaagtatgtgaacttatttttaaacaacaagataatttgattttaaaaataaatgtag

SEQ ID NO: 586285 - DNA, 75 bp, synthetic construct
  source 1..75: mol_type = other DNA
tggtctataacagcgcaagggttaaaaattatcaaccaggcccaacctattattccgtttcacaacaactggtct

SEQ ID NO: 586286 - DNA, 75 bp, synthetic construct
  source 1..75: mol_type = other DNA
aatctgaaaattgttgagctggaagcgccacaattgccgcgttctctggacgatgctcagattgaactggcagtt

SEQ ID NO: 586287 - DNA, 75 bp, synthetic construct
  source 1..75: mol_type = other DNA
cgtgaagaaattcgtccaggcttatcagtctgacgaagtttatgaagcggcaaacaaagtgtttaacggcggtgc

SEQ ID NO: 586288 - DNA, 75 bp, synthetic construct
  source 1..75: mol_type = other DNA
aaagtgggcttgatcaaactgaaagatggcgttggcctgttgccaacagttcttgatgttgttgagaacccaaaa

SEQ ID NO: 586289 - DNA, 75 bp, synthetic construct
  source 1..75: mol_type = other DNA
gcgaaagaagaggatctgctcaaccactttctggaaacgccgcgcccaatcccggtagtgggtaaagctggggtg

SEQ ID NO: 586290 - DNA, 75 bp, synthetic construct
  source 1..75: mol_type = other DNA
atcaacaccacctatgccagccagattggcctgactccggcgaaagacggtatcttcgtggaagacaaagagtct

SEQ ID NO: 586291 - DNA, 75 bp, synthetic construct
  source 1..75: mol_type = other DNA
cgatcagcaactgaaggatcgtggctacaaactggttgcagtaggcaatacttttgtttatccgattgccggtta

SEQ ID NO: 586292 - DNA, 75 bp, synthetic construct
  source 1..75: mol_type = other DNA
tctggacgacttgactcctgatgatattgatatcaatgcgccactgtttggcgacggtttagggctggactctat

SEQ ID NO: 586293 - DNA, 75 bp, synthetic construct
  source 1..75: mol_type = other DNA
cgccgtagcgctcgatatcaccgatgaacaaccggtgacctggtttagcccgttagatggcgataataccctttc

SEQ ID NO: 586294 - DNA, 75 bp, synthetic construct
  source 1..75: mol_type = other DNA
gatacgcgcacgtttttacgcgccgttgatgctgttctgccacagttaaaaccgctatttgagaaatacgccgag

SEQ ID NO: 586295 - DNA, 75 bp, synthetic construct
  source 1..75: mol_type = other DNA
cggcagtgggagccctgattggatcactggcactggtaggctgcggtcaggatgaaaaagatccaaaccacatta

SEQ ID NO: 586296 - DNA, 75 bp, synthetic construct
  source 1..75: mol_type = other DNA
attcaataccgctgtacaaaaacttgaagaaattcaggagtgtcatttagtatccggtgatttcgactacctgtt

SEQ ID NO: 586297 - DNA, 75 bp, synthetic construct
  source 1..75: mol_type = other DNA
cacttctggaacagtggcgtagtgattcgtcacaacgaagagtatgagaagattgaaggctgcgatgacggcgtg

SEQ ID NO: 586298 - DNA, 75 bp, synthetic construct
  source 1..75: mol_type = other DNA
tctctgtaggttcctctactaatcaacgtcgtatcaccaacgtagctgcaggtaaaaatgctaccgatgctgtta

SEQ ID NO: 586299 - DNA, 75 bp, synthetic construct
  source 1..75: mol_type = other DNA
aagagtacatcaactttatggccagcaatttcgaccgcctgaccgtctggcaggacggcaagaaagtcgacttta

SEQ ID NO: 586300 - DNA, 75 bp, synthetic construct
  source 1..75: mol_type = other DNA
tgtccagcatcatcgtttcatctgcgggtaaccagtccctgttgacgtaccttcagaccaacaccatcagctatc

SEQ ID NO: 586301 - DNA, 75 bp, synthetic construct
  source 1..75: mol_type = other DNA
ctggcagcatattgctgaagatattaaagcgcactatgacgactatgatggttttgtcattctacacggtaccga

SEQ ID NO: 586302 - DNA, 75 bp, synthetic construct
  source 1..75: mol_type = other DNA
gttgctcttgggcttgggatcggattagttgccgaacaatccagcggcgaacaagaggaagagaatctaatccgc

SEQ ID NO: 586303 - DNA, 75 bp, synthetic construct
  source 1..75: mol_type = other DNA
cgcaggattctgatgtcattaaaacctatgttgctcttgggctggggattggattagttgccgaacaatccagcg

SEQ ID NO: 586304 - DNA, 75 bp, synthetic construct
  source 1..75: mol_type = other DNA
gcctgtatcagctgacaacctactacggccgcctgggccaggtggaaaccccgtacggcaacaccattgcctaca

SEQ ID NO: 586305 - DNA, 75 bp, synthetic construct
  source 1..75: mol_type = other DNA
tcgaactcgatattcagcctacccgtaacaacctcaccttgtgggggcaggaaatcagctggacggtgccggaac

SEQ ID NO: 586306 - DNA, 75 bp, synthetic construct
  source 1..75: mol_type = other DNA
ttgcaaagcgttcctgtccagtatcgcggtctgtaccagattgcgacctattacggcaagctcggtgcggttgag

SEQ ID NO: 586307 - DNA, 75 bp, synthetic construct
  source 1..75: mol_type = other DNA
cttcccgcttaccctgtggggtatggagctgggatggaccgttcccgaattgcaggcagctgcgcaggttggtcg

SEQ ID NO: 586308 - DNA, 75 bp, synthetic construct
  source 1..75: mol_type = other DNA
caggactttaacctcatcctctcccaggcatgggtgacttcaggttacgcaatttgcccgaaaaaagtcggcctg

SEQ ID NO: 586309 - DNA, 75 bp, synthetic construct
  source 1..75: mol_type = other DNA
acatcgacgagcaggtttacattggcgataacgatctgggtgtcaccggccttctgaacctctctcaggtaacac

SEQ ID NO: 586310 - DNA, 75 bp, synthetic construct
  source 1..75: mol_type = other DNA
atttatccggggatctctgccgatgttgtgcgtaatttcctgcgccaaccggttagggcgttgattcttcgctct

SEQ ID NO: 586311 - DNA, 75 bp, synthetic construct
  source 1..75: mol_type = other DNA
gcctttctgctggtgccgatcccgcgcgaaaagctacaccgtatccgccactggatcgctattccgctgggattc

SEQ ID NO: 586312 - DNA, 75 bp, synthetic construct
  source 1..75: mol_type = other DNA
gtagtatttccgattcaatggtgtttctgtttccagcattattaaacctttggcttatcaagaaaacctcttata

SEQ ID NO: 586313 - DNA, 75 bp, synthetic construct
  source 1..75: mol_type = other DNA
ggtgatcatgctggtaaagacaggcttatttataaacttcaacagaccgacagttcttctcgctataccaatggt

SEQ ID NO: 586314 - DNA, 75 bp, synthetic construct
  source 1..75: mol_type = other DNA
ttgcaattgctaaagaggtcactgagtcggatttactgaaatatccagtctctaaaggtcgtaaacacatccgaa

SEQ ID NO: 586315 - DNA, 75 bp, synthetic construct
  source 1..75: mol_type = other DNA
tacccgaattaaacagacaactaacctgcctcatcaaactattatgcagcttgcaattgctaaagaggtcactga

SEQ ID NO: 586316 - DNA, 75 bp, synthetic construct
  source 1..75: mol_type = other DNA
aatcatttggcgaagatgccgaacggctggctaataacaaatggcttgataagttcattgcggagggtggcaaat

SEQ ID NO: 586317 - DNA, 75 bp, synthetic construct
  source 1..75: mol_type = other DNA
ttttaacgtccactcacaccattgcgctggtgggggcaagcgacaaacccgatcgtcccagctatcgcgtgatga

SEQ ID NO: 586318 - DNA, 75 bp, synthetic construct
  source 1..75: mol_type = other DNA
gccgcaaccaattggcgtagtgacgatttatccggggatttctgctgacgtcgtgcgcaattttctgcgccaacc

SEQ ID NO: 586319 - DNA, 75 bp, synthetic construct
  source 1..75: mol_type = other DNA
tcccatcaatgaagtgacgctcttttttaataaccgtctgtatcgcggtaaccgcaccaccaaagcccatgccga

SEQ ID NO: 586320 - DNA, 75 bp, synthetic construct
  source 1..75: mol_type = other DNA
gttttccgtaattcagaagcggcgtggggcgtggcgcaggaagctatcgccattggcgcgaaaaccctctggatg

SEQ ID NO: 586321 - DNA, 75 bp, synthetic construct
  source 1..75: mol_type = other DNA
caactgggggtgattaatgagcaagcggcagtactggcacgggatgccgggttaaatgtagtgatggatcgctgc

SEQ ID NO: 586322 - DNA, 75 bp, synthetic construct
  source 1..75: mol_type = other DNA
aggggtatggcacgctggcagacgttccggaaaaggtcgatatggtcgatgttttccgtaattcagaagcggcgt

SEQ ID NO: 586323 - DNA, 75 bp, synthetic construct
  source 1..75: mol_type = other DNA
cgggatattcagtagaagaaatcatggatgacagcaacttgcttgaagagttaaatcgatttattaataacgaac

SEQ ID NO: 586324 - DNA, 75 bp, synthetic construct
  source 1..75: mol_type = other DNA
tgttggcccgcaaggtaagcagttgattgaactgcctgaactgccgcagccggagagcgccggacaactctggct

SEQ ID NO: 586325 - DNA, 75 bp, synthetic construct
  source 1..75: mol_type = other DNA
actacattaaattaccattaagtgggttgacgttgcgggggaagcattacacgtcagtattggtgcgtctgaagt

SEQ ID NO: 586326 - DNA, 75 bp, synthetic construct
  source 1..75: mol_type = other DNA
gtccaggagctatgttgcataaagggaaattcattggttatgtcatgaagatcagattttccgagtgttctggag

SEQ ID NO: 586327 - DNA, 75 bp, synthetic construct
  source 1..75: mol_type = other DNA
tgatcatgacgccacatcaggcatggcagagacagattaaaggcgaagtggaaaccattgcgctggaacaactgg

SEQ ID NO: 586328 - DNA, 75 bp, synthetic construct
  source 1..75: mol_type = other DNA
atgagcggcgagcgtgttgcaggaaaagtgatcttcgaaacgcagtcgacccacaaaatgctggcggcgttatcg

SEQ ID NO: 586329 - DNA, 75 bp, synthetic construct
  source 1..75: mol_type = other DNA
ataccccgtacgtcttcccgagcgaaaacggtctgcgctgcgggacgcgcgaattgaattatggcccacaccagt

SEQ ID NO: 586330 - DNA, 75 bp, synthetic construct
  source 1..75: mol_type = other DNA
acgtcaggttaatggcgataaaccctatatcgaaattatctgcatggattcagaagctgaaattcagaaagcaga

SEQ ID NO: 586331 - DNA, 75 bp, synthetic construct
  source 1..75: mol_type = other DNA
gcgtgccggaggccgggctgttattctggaggtcagtggccgcgggatagaagcggctgaagcatggatacgggc

SEQ ID NO: 586332 - DNA, 75 bp, synthetic construct
  source 1..75: mol_type = other DNA
atgaccaaagagcatgcacaaggtgtatttatccgttttattgattttcgcggtgagttgttgttacgcgcatcc

SEQ ID NO: 586333 - DNA, 75 bp, synthetic construct
  source 1..75: mol_type = other DNA
gccagcaggaggcgaaagcctgtcattaccggcaggccgggaaacgggcagtcatcctggaagtcaggggattct

SEQ ID NO: 586334 - DNA, 75 bp, synthetic construct
  source 1..75: mol_type = other DNA
cggtgaactgttattacgtgcatcagctattgatgctgtagcccaggcagaaaaaaaagcagttactcacgttta

SEQ ID NO: 586335 - DNA, 75 bp, synthetic construct
  source 1..75: mol_type = other DNA
aaatcattagcgaagctgaaaaggcacgtcagattaatagcgatgaaccatacatcgaaattatctgcatggatt

SEQ ID NO: 586336 - DNA, 75 bp, synthetic construct
  source 1..75: mol_type = other DNA
aactgatggtgcctgaagcaatttggctacttttgcaatgtgacaagttatggcagagctggctggtggcgaaga

SEQ ID NO: 586337 - DNA, 75 bp, synthetic construct
  source 1..75: mol_type = other DNA
gacactatccggcaagtcacccatgagttggataagaaccgtgaacggcgggacgcattgcaaataacgtcgccg

SEQ ID NO: 586338 - DNA, 75 bp, synthetic construct
  source 1..75: mol_type = other DNA
tgatcgccgtcctctgtcagtgcttattgaattgtggtggaaatatcacggccagttaatgaggtcagggcataa

SEQ ID NO: 586339 - DNA, 75 bp, synthetic construct
  source 1..75: mol_type = other DNA
atgtcggcaagtgaaacgctggcgcagtattcaccattggtgctgaacggcgaaggtatggtactgccggaactg

SEQ ID NO: 586340 - DNA, 75 bp, synthetic construct
  source 1..75: mol_type = other DNA
ttgaacagttatgttaataacgaactggtcagtgaaatggatttaagatatggatcagtgatcattaatctggtt

SEQ ID NO: 586341 - DNA, 75 bp, synthetic construct
  source 1..75: mol_type = other DNA
gatgcgctagaggaatcattaaaaaaattattttctgcggcagaagagttagaaaaaacagtgcagaaaagtaca

SEQ ID NO: 586342 - DNA, 75 bp, synthetic construct
  source 1..75: mol_type = other DNA
gtcttctataaagttgagatcgttgctgtagcgccaggccagctgatattgaatggccgtagtaaagtcattcag

SEQ ID NO: 586343 - DNA, 75 bp, synthetic construct
  source 1..75: mol_type = other DNA
acggcaatatgttcgggattcgggtaagcgggctgggcgaacgctggtttactgcgcctgtaaacactccgcaag

SEQ ID NO: 586344 - DNA, 75 bp, synthetic construct
  source 1..75: mol_type = other DNA
cgatgaacggctggctgtcgaaatccttctgtcgaccggggcgcaatggggcgaggtagcggcactggagcagcg

SEQ ID NO: 586345 - DNA, 75 bp, synthetic construct
  source 1..75: mol_type = other DNA
atgcggaagttctggaatgtttctttttttggtgatggtgaactgatggtgcctgaagcaatttggctacttttg

SEQ ID NO: 586346 - DNA, 75 bp, synthetic construct
  source 1..75: mol_type = other DNA
gctctgcgtgagcaggacttctggaagcccggtgttcgtgccgtcatgtttgacagcaatgcacagaccctgatg

SEQ ID NO: 586347 - DNA, 75 bp, synthetic construct
  source 1..75: mol_type = other DNA
tctcaaccgggcagtgctgacaggttcgatgcctgatggctatggcgaggtgaagccgcttgcagacggtatcaa

SEQ ID NO: 586348 - DNA, 75 bp, synthetic construct
  source 1..75: mol_type = other DNA
aggcttacgaaaaactgctcgtcgctctcaaccgggcagtgctgacaggttcgatgcctgatggctatggcgagg

SEQ ID NO: 586349 - DNA, 75 bp, synthetic construct
  source 1..75: mol_type = other DNA
caggcgtccaggccgcaactcagtatttcgcctacagctttaattatcaggaactgctggggccaaacttcaatc

SEQ ID NO: 586350 - DNA, 75 bp, synthetic construct
  source 1..75: mol_type = other DNA
ctgaacactgccaccggcgctgccgaggaaggggggtaacgaaaaaagcagccttcattactccagggattcaga

SEQ ID NO: 586351 - DNA, 75 bp, synthetic construct
  source 1..75: mol_type = other DNA
gtaaaaattgcccgtaacgattacgaacagcgagtgctggagtttaaacagctactttataaggcaatgagcagt

SEQ ID NO: 586352 - DNA, 75 bp, synthetic construct
  source 1..75: mol_type = other DNA
atgaatttccgagcctgggtaaacttgaaatcattcaggaatcgctcgcgttcctggccggttatggcattaagt

SEQ ID NO: 586353 - DNA, 75 bp, synthetic construct
  source 1..75: mol_type = other DNA
caggatatcaaggcggctggtctgctgggaaacgatgaaggtgtttatgtgggagcctgggaagacaagaacggc

SEQ ID NO: 586354 - DNA, 75 bp, synthetic construct
  source 1..75: mol_type = other DNA
cagctacagtatctgcgtcacaacggcccggaacacgtattgacttacgcccctacccgttccggtaaaggtgtg

SEQ ID NO: 586355 - DNA, 75 bp, synthetic construct
  source 1..75: mol_type = other DNA
acaacttcatgaaggcggtgatttcgaatacatcctgacaacaacggaattatcagagcgttcgtttgctctccg

SEQ ID NO: 586356 - DNA, 75 bp, synthetic construct
  source 1..75: mol_type = other DNA
cttgttcccttaaacagcgattaccctatttgccgctcctgggaaaaacctatcaagattattggaacaatggtg

SEQ ID NO: 586357 - DNA, 75 bp, synthetic construct
  source 1..75: mol_type = other DNA
tttgagccaataaaaaatggcacagatatcagcacaccgcaaaagttgcagtggcataaaacatccaataccgct

SEQ ID NO: 586358 - DNA, 75 bp, synthetic construct
  source 1..75: mol_type = other DNA
tccactatcgctagtgctgatgcgcaagaaattgctaccgctctggctggattcgatctggaaatgctggatgcg

SEQ ID NO: 586359 - DNA, 75 bp, synthetic construct
  source 1..75: mol_type = other DNA
cacgtcgtttggaattaggaatgactcaagtggaagtagcgaattctgcaggggttagccaacaatccatagaat

SEQ ID NO: 586360 - DNA, 75 bp, synthetic construct
  source 1..75: mol_type = other DNA
ggtgcggttaaaaagcgtattggaaaaattgaacatgcaaatggtggtacgttatttctcgatgaaatagaggga

SEQ ID NO: 586361 - DNA, 75 bp, synthetic construct
  source 1..75: mol_type = other DNA
aatattggatggcggcacaaaagcagatgaaacgggttgtgccgcttcttctggttattatgcctgcatgttcaa

SEQ ID NO: 586362 - DNA, 75 bp, synthetic construct
  source 1..75: mol_type = other DNA
atctgaaacgacaccggatattcgtattatcggggcaaaagggcagcatataaacattgagcgttgcgactactt

SEQ ID NO: 586363 - DNA, 75 bp, synthetic construct
  source 1..75: mol_type = other DNA
atgaccctgatcaactacggcagcaattaaaagacccggatggagctaaaaaatatcctgaattgcagatatctc

SEQ ID NO: 586364 - DNA, 75 bp, synthetic construct
  source 1..75: mol_type = other DNA
cttttgctatggcggacattgcctcgcgtgcaaaaagttctggtgggcattagttcgctggtcgcggcctgttat

SEQ ID NO: 586365 - DNA, 75 bp, synthetic construct
  source 1..75: mol_type = other DNA
caagaacactcgcaaccgcaactgattgttttacatctgatgggctcacatccgcaggcctgcgaccggacacaa

SEQ ID NO: 586366 - DNA, 75 bp, synthetic construct
  source 1..75: mol_type = other DNA
gcgccgtaaccgcgggcatcatatgccgtagtggcgatctgtcttattctcagtacccctctatcagtatgcgcc

SEQ ID NO: 586367 - DNA, 75 bp, synthetic construct
  source 1..75: mol_type = other DNA
tggcgtctgttgagctgagtattgatgccagcacggtgatggcgacgcaggattacgtcgataaagccatatcca

SEQ ID NO: 586368 - DNA, 75 bp, synthetic construct
  source 1..75: mol_type = other DNA
tggtctgtatgacgatgccggaacactgattgcggtcgctaacatggtagaaagctataagcctgaactggctga

SEQ ID NO: 586369 - DNA, 75 bp, synthetic construct
  source 1..75: mol_type = other DNA
atgaatataaagcaaattactgatgaagcagaaaaatcaattacagaagatatgcagaaagcaatagatgccaaa

SEQ ID NO: 586370 - DNA, 75 bp, synthetic construct
  source 1..75: mol_type = other DNA
ttatgatgcgtacggtgtgcagcagttctattttccgaatgtgctgaagtatgaccctgatcaactacggcagca

SEQ ID NO: 586371 - DNA, 75 bp, synthetic construct
  source 1..75: mol_type = other DNA
agatcttaccctcatgtgtgatagagagcgtgaggatggtctaaatttgctgcgctatcttatcgcagataaatt

SEQ ID NO: 586372 - DNA, 75 bp, synthetic construct
  source 1..75: mol_type = other DNA
tctgggtatttatgacgattctgctgacgcttatgtaattgcagcccgtagtgacggcactgcattcatgcagat

SEQ ID NO: 586373 - DNA, 75 bp, synthetic construct
  source 1..75: mol_type = other DNA
atttaggcgatctgcctgcactggtcgtcaataatgacggcaaagctaccgatgccgtcatcgcgcctcgtctga

SEQ ID NO: 586374 - DNA, 75 bp, synthetic construct
  source 1..75: mol_type = other DNA
aaaccggcaagagacttccggcacgcgggcctggatacggctgaaaaaagatcagtacgtggcaaaccagatata

SEQ ID NO: 586375 - DNA, 75 bp, synthetic construct
  source 1..75: mol_type = other DNA
aagaattctgtaacgttaaagatgaaattgatgatccaattttattgcaattctattcagatactatcgtgaagg

SEQ ID NO: 586376 - DNA, 75 bp, synthetic construct
  source 1..75: mol_type = other DNA
tcggctttattccgatgcaggatggctcgcccgcgccggggctgagtaatatcacggcagaaggctggttcccgc

SEQ ID NO: 586377 - DNA, 75 bp, synthetic construct
  source 1..75: mol_type = other DNA
aattttgcgctattcatctggtttggcactggtttattagggctggtaagtcttatgatgctatactgtgcaata

SEQ ID NO: 586378 - DNA, 75 bp, synthetic construct
  source 1..75: mol_type = other DNA
tgcatcacgggcagtttttcctgcaaaaccgggaagaggcttccggtacgcgcgcctgggtacggctgaagaaag

SEQ ID NO: 586379 - DNA, 75 bp, synthetic construct
  source 1..75: mol_type = other DNA
cgttatggcgggattggtctggggttaagtattgtcagccgcattacacagttgcatcacgggcagtttttcctg

SEQ ID NO: 586380 - DNA, 75 bp, synthetic construct
  source 1..75: mol_type = other DNA
ttagtagattacatccaggaaaatgataacaggttaagtttacgcttgcgcaatagacttagagctgtagctatc

SEQ ID NO: 586381 - DNA, 75 bp, synthetic construct
  source 1..75: mol_type = other DNA
atcatctgggtaagcgcaccagcctgccgggatcaatcggtttgcgttttggcgcaaactcagtgttaaaaccgg

SEQ ID NO: 586382 - DNA, 75 bp, synthetic construct
  source 1..75: mol_type = other DNA
ttactcaggacgctttagatactttgaagggactaaacaactttaaaattgatattgcccgtctaatgagtatca

SEQ ID NO: 586383 - DNA, 75 bp, synthetic construct
  source 1..75: mol_type = other DNA
tataccgtggcctggctttactggctgacctggaccgtggcgctgggttcgagctttaccgccgctggattctgt

SEQ ID NO: 586384 - DNA, 75 bp, synthetic construct
  source 1..75: mol_type = other DNA
ctgcagtaccgcgcgccgtggtatccgctggtgccggtgcttggttttatcctctgcgtggtggcctgtgtcggc

SEQ ID NO: 586385 - DNA, 75 bp, synthetic construct
  source 1..75: mol_type = other DNA
aacatctataatttaactgacttttataaactcgaaacttgtatggatgaaattcaagtatatgcccatattaaa

SEQ ID NO: 586386 - DNA, 75 bp, synthetic construct
  source 1..75: mol_type = other DNA
gttatccgtggaaacgtagaacaaattgaaccaaatttattaggcgtttacgccggcttattattagcaatgaaa

SEQ ID NO: 586387 - DNA, 75 bp, synthetic construct
  source 1..75: mol_type = other DNA
atgaatgatgccgttattacgctgaacggcctggaaaaacgctttccgggcatggacaagcccgccgtcgcgccg

SEQ ID NO: 586388 - DNA, 75 bp, synthetic construct
  source 1..75: mol_type = other DNA
tgccgccaccgatcacgtcaactttgccgtcaaacgcggtgaaatctttggtttgctggggccaaacggcgcggg

SEQ ID NO: 586389 - DNA, 75 bp, synthetic construct
  source 1..75: mol_type = other DNA
caaaccatggccggacgcagctttctgatgaccagtccacacgagggcaaccgcaaactgttgcaacgcgccttg

SEQ ID NO: 586390 - DNA, 75 bp, synthetic construct
  source 1..75: mol_type = other DNA
gaagcagtaaggtctggtgctggcagcgtgccggaggccgggccgttattctggaggtcagtggacgctggatag

SEQ ID NO: 586391 - DNA, 75 bp, synthetic construct
  source 1..75: mol_type = other DNA
aagaactgcctattgggaaaataactatccaggaaaccttatatggtctgctgttcacaccagaacttcattctt

SEQ ID NO: 586392 - DNA, 75 bp, synthetic construct
  source 1..75: mol_type = other DNA
taaaatcaataaaagatatcagtcagcatgcaattatgatacacaaaggcggtgacaatcattcagactcaccac

SEQ ID NO: 586393 - DNA, 75 bp, synthetic construct
  source 1..75: mol_type = other DNA
ctttcagttgggtggtgattgaaaacaccagccagcgcggcgaggcgcgttcggctactttgccgttgcctgcgg

SEQ ID NO: 586394 - DNA, 75 bp, synthetic construct
  source 1..75: mol_type = other DNA
tagcaaatgcccgccgtttacttccagaggctgatttttgggtggcgattgaagctggcatcgatggtgacagca

SEQ ID NO: 586395 - DNA, 75 bp, synthetic construct
  source 1..75: mol_type = other DNA
acggcggtacagccacagggcgtgaatgagggcgcggaagcgtacctgaatgcacactggataggctcgactgaa

SEQ ID NO: 586396 - DNA, 75 bp, synthetic construct
  source 1..75: mol_type = other DNA
atgaactgccattaggttttaaacagcggctggcgctggcctgttcgctgatgcatgaaccggacattctgtttc

SEQ ID NO: 586397 - DNA, 75 bp, synthetic construct
  source 1..75: mol_type = other DNA
ccgtatgagcgaggcgttcggcctgaaaagtatcgcctcccacgcgaccgatgaactgccattaggttttaaaca

SEQ ID NO: 586398 - DNA, 75 bp, synthetic construct
  source 1..75: mol_type = other DNA
cggcgttgaccctatctcacggcgcgaactgtggcagatggtgcatgagctggcaggcgaagggatgttaatcct

SEQ ID NO: 586399 - DNA, 75 bp, synthetic construct
  source 1..75: mol_type = other DNA
gaaagctgctggtgttgatccatctgctgtttctcaatggggggaactggttcctgaaggtcgcgcgatgcgtct

SEQ ID NO: 586400 - DNA, 75 bp, synthetic construct
  source 1..75: mol_type = other DNA
aacttcgtctttggtagcatgaatgatcaaggcctggcattcttcttcctgaaagtgctgtgcccaatcgtcttt

SEQ ID NO: 586401 - DNA, 75 bp, synthetic construct
  source 1..75: mol_type = other DNA
tcgcgctgatagatgcaatgaacgaagccctcgacaaacagcgctggcgacgccttccggcgctgcatcagcagt

SEQ ID NO: 586402 - DNA, 75 bp, synthetic construct
  source 1..75: mol_type = other DNA
ccacctgcgcgccacgcgggagatcagcaacgaaacgctgcaaaaattactgcacgatctcgatttgctggaagc

SEQ ID NO: 586403 - DNA, 75 bp, synthetic construct
  source 1..75: mol_type = other DNA
gaaacagctgaaaggctttgagaaaatcaccctgaaaccgggcgaaactcagactgtcagcttcccgatcgatat

SEQ ID NO: 586404 - DNA, 75 bp, synthetic construct
  source 1..75: mol_type = other DNA
tgggtagtatcatggcgaccaaactggtttctaacgagttcgttgcgatgatggatctgcagaaaattgcttcca

SEQ ID NO: 586405 - DNA, 75 bp, synthetic construct
  source 1..75: mol_type = other DNA
cctgattctgggtcagtctgaaaactttattgcctataaagatatcctcggcaaaatctcccgtaatcgtatgta

SEQ ID NO: 586406 - DNA, 75 bp, synthetic construct
  source 1..75: mol_type = other DNA
atttggccaatggatgatggggatgttgagtatcgttgttactactgttcagggcagtatcaggcagataaagac

SEQ ID NO: 586407 - DNA, 75 bp, synthetic construct
  source 1..75: mol_type = other DNA
ctcgggcgaagacgccaaagagaaaatttctgcgggctatttccgcgttatccgtaactactatcgcttcggttg

SEQ ID NO: 586408 - DNA, 75 bp, synthetic construct
  source 1..75: mol_type = other DNA
cgaggcatctgaacgccgtcagcaggaaatggaagccgctgataccgaaccgtttgcggtgtggctggaaaaaca

SEQ ID NO: 586409 - DNA, 75 bp, synthetic construct
  source 1..75: mol_type = other DNA
agcagtggcgatggggacgatgatcttcaccgtcggcggtgcgacggtcgaatttatgaaagtagccattggcgg

SEQ ID NO: 586410 - DNA, 75 bp, synthetic construct
  source 1..75: mol_type = other DNA
gtatggtgttcctgctgctgggcctgcaattgccgggcattctggagacgtcgctgatggcggcggaaatcgacc

SEQ ID NO: 586411 - DNA, 75 bp, synthetic construct
  source 1..75: mol_type = other DNA
tgattaaccagttcaaagccgatggcttgagcatcattctggtgtcatcggagatgccagaagtattaggcatga

SEQ ID NO: 586412 - DNA, 75 bp, synthetic construct
  source 1..75: mol_type = other DNA
aacgttaaatacgatatggggttgtttaacgatccgtacagccatcttgggccgaaagagtctgacccggcggat

SEQ ID NO: 586413 - DNA, 75 bp, synthetic construct
  source 1..75: mol_type = other DNA
ccaggcgaagaaatgcagtgggtaattccgggtcaaactgaatctatttactgccagctagatggcggctggaaa

SEQ ID NO: 586414 - DNA, 75 bp, synthetic construct
  source 1..75: mol_type = other DNA
cggtggtgaagatggaaaaaacatcagaaaaaggtggccgcccggcgtcaaatggtaaacgtttcacctcgccgg

SEQ ID NO: 586415 - DNA, 75 bp, synthetic construct
  source 1..75: mol_type = other DNA
aactcatcgaaaattcctcttccgaggcaaaacctaaaacgaaggccaaaccgaaaacggcgggcatcaaacgtc

SEQ ID NO: 586416 - DNA, 75 bp, synthetic construct
  source 1..75: mol_type = other DNA
tgcgctggcaattgccatcacccactgccatatcagtcagaatgcgatgcagatgagcgaatcgcggctgaatct

SEQ ID NO: 586417 - DNA, 75 bp, synthetic construct
  source 1..75: mol_type = other DNA
cgagaaaagccaggtgcagcatatggttcgcaccttgctgaaacttcccgctaacccgcaggcagacgccgctga

SEQ ID NO: 586418 - DNA, 75 bp, synthetic construct
  source 1..75: mol_type = other DNA
caaccgacgccgccactgacgtattatccgcatccaggacaacagcatgaaaatgctccccccggcagcaccaac

SEQ ID NO: 586419 - DNA, 75 bp, synthetic construct
  source 1..75: mol_type = other DNA
cttacgacgtgctgcacggtcagcgcactgtcttcccgattagccttggtctggcctcttcttttaacctcgatg

SEQ ID NO: 586420 - DNA, 75 bp, synthetic construct
  source 1..75: mol_type = other DNA
atgctgcccgccatgtactgaacgttaaatatgatatggggttgtttaacgacccatacagccatttggggccga

SEQ ID NO: 586421 - DNA, 75 bp, synthetic construct
  source 1..75: mol_type = other DNA
gaacccggcaagttcaacgtctttatcggcactgattctgcacgcgttaagaaaggcgagtttgagttgctgtaa

SEQ ID NO: 586422 - DNA, 75 bp, synthetic construct
  source 1..75: mol_type = other DNA
aagtatctgcccgggttgattaagtccggtaaagtgacgatggcagagctggacgacgctacccgccatgtgctg

SEQ ID NO: 586423 - DNA, 75 bp, synthetic construct
  source 1..75: mol_type = other DNA
gagtccgcagcgcctgtttaacgactatatgccaccgtacaaagcggggctggatgcaggcagcggtgcggtgat

SEQ ID NO: 586424 - DNA, 75 bp, synthetic construct
  source 1..75: mol_type = other DNA
cgaaagcctggtgttgctgaaaaaccgtctcgaaacgctgccgctgaaaaaatctgcaaccattgcggtggttgg

SEQ ID NO: 586425 - DNA, 75 bp, synthetic construct
  source 1..75: mol_type = other DNA
cctacgttcggggagtcctgtgcaccgtgggtgtttgacctggtggcggccctgtttggctcctacgatgcgcag

SEQ ID NO: 586426 - DNA, 75 bp, synthetic construct
  source 1..75: mol_type = other DNA
gtacttacgctggctggaccaagtttctccctgtggcctgccggtcaaccgaccacgacggtgacaacgacgggc

SEQ ID NO: 586427 - DNA, 75 bp, synthetic construct
  source 1..75: mol_type = other DNA
gaaaaaactcaccagtgggttgccacaaacagcaccggtctccgagaactcaaatgcagtagttattcaatacca

SEQ ID NO: 586428 - DNA, 75 bp, synthetic construct
  source 1..75: mol_type = other DNA
gaaattcttcggcatgaaggcaccacatcagggggcaccgattgtcattgaccaaccgagcagcttcctggctat

SEQ ID NO: 586429 - DNA, 75 bp, synthetic construct
  source 1..75: mol_type = other DNA
caatgcctggctgaataatttctacaatgccgaagcgaaacgtaagacgcctttcccgtctacgcttccggctga

SEQ ID NO: 586430 - DNA, 75 bp, synthetic construct
  source 1..75: mol_type = other DNA
atatccctagcccgtctatcaccgacgtccccgttggggtgaaattcttcggcaatgaaggcaccacatcagggg

SEQ ID NO: 586431 - DNA, 75 bp, synthetic construct
  source 1..75: mol_type = other DNA
ggcggcgactgggtgcctacccgcagtaagaacgaaaaaggccgcagagtttccccctgcggcctgatccgggcg

SEQ ID NO: 586432 - DNA, 75 bp, synthetic construct
  source 1..75: mol_type = other DNA
tgggtagcctgatgcgctacgtctcccgctcggtggtcactggtttcgtcaacgcgctggccatcctcatattta

SEQ ID NO: 586433 - DNA, 75 bp, synthetic construct
  source 1..75: mol_type = other DNA
aacgccgtttgagctgggcgtgtgtgcgcaaaaaaagcggctgcatgagccgctgattgaggcgttctggaggat

SEQ ID NO: 586434 - DNA, 75 bp, synthetic construct
  source 1..75: mol_type = other DNA
gctgatcgcgccagccttaccgtgcccggtgcgtaatcaggtttcggtagagaagccggactggtctacagtgcc

SEQ ID NO: 586435 - DNA, 75 bp, synthetic construct
  source 1..75: mol_type = other DNA
ctgtggatatggctgcggacgtggtgcggtggcgcactggccagagagcagcgttcacactgcaccggagaaagg

SEQ ID NO: 586436 - DNA, 75 bp, synthetic construct
  source 1..75: mol_type = other DNA
ataatgaagacactttttacggatgttaccggtactgtaccagatgctgaagagatcgcgcataaagccgaactt

SEQ ID NO: 586437 - DNA, 75 bp, synthetic construct
  source 1..75: mol_type = other DNA
gcgatgattgggcaatctgttatcaacgtaaaatccggtggacgcggacgactttcaaccctcacggcgggcgtg

SEQ ID NO: 586438 - DNA, 75 bp, synthetic construct
  source 1..75: mol_type = other DNA
ctggcgcggcctttccggctggaacttctattttctggttaagttcggcctgctgtgggcgggatatcttaactt

SEQ ID NO: 586439 - DNA, 75 bp, synthetic construct
  source 1..75: mol_type = other DNA
aaaagcactgggggcaaaatatcaggacaggtgtgtttttgtttatgctaccagcgattttaaagaaatctgtca

SEQ ID NO: 586440 - DNA, 75 bp, synthetic construct
  source 1..75: mol_type = other DNA
acaggaagcggaggaggatattgatgaaagggaagatatatacagacagaacggggcacaaccagattatttaag

SEQ ID NO: 586441 - DNA, 75 bp, synthetic construct
  source 1..75: mol_type = other DNA
aggggatctctcagggcttaatccccgtcaccctgatggtgtcggggaatattatggggtcaggtgtttttctgt

SEQ ID NO: 586442 - DNA, 75 bp, synthetic construct
  source 1..75: mol_type = other DNA
aaattaaggacgtcggaacaggctcgtttgttgcggctgaggttttggctcgttggtgctgcgaaggccagatgc

SEQ ID NO: 586443 - DNA, 75 bp, synthetic construct
  source 1..75: mol_type = other DNA
tttaatgagctggagaatgactttaatcagttcttttcggatattgatttctacacccgttatggtcagtcagga

SEQ ID NO: 586444 - DNA, 75 bp, synthetic construct
  source 1..75: mol_type = other DNA
gttctggtgcatacaggattcatcttggccaaaatgaagtggttcatattattcgctttattcttaactctaaag

SEQ ID NO: 586445 - DNA, 75 bp, synthetic construct
  source 1..75: mol_type = other DNA
ggattttcgttctgctgaatatcgtcggccctaaaatgatcacccgcgttcaggccgttgccaccgtactggcgc

SEQ ID NO: 586446 - DNA, 75 bp, synthetic construct
  source 1..75: mol_type = other DNA
gaaaaacccgaaacgcaacgtccctatcgccaccattggcggggctgattatcgtcggtattttgatgaccatct

SEQ ID NO: 586447 - DNA, 75 bp, synthetic construct
  source 1..75: mol_type = other DNA
ccgcaggcggtacgccggtggttggtgatatgcctgcgcaaaccgcgccgccgacaaccgcaaaccttaatgcct

SEQ ID NO: 586448 - DNA, 75 bp, synthetic construct
  source 1..75: mol_type = other DNA
gggctgattatcgtcggtattttgatgaccatcttccagctcagcagcatttcgccaaacgcgaccaaagagttc

SEQ ID NO: 586449 - DNA, 75 bp, synthetic construct
  source 1..75: mol_type = other DNA
ggtctggtctcttccgtatcggtaatctttaccctggtgccttatctttatacctgtgccgctttactgctttta

SEQ ID NO: 586450 - DNA, 75 bp, synthetic construct
  source 1..75: mol_type = other DNA
cccaacgcggcactgcgcgtttctgcctcgccgttcggtgatgcggcgcgaatggcgctgggcgacaccgccggc

SEQ ID NO: 586451 - DNA, 75 bp, synthetic construct
  source 1..75: mol_type = other DNA
ccttcttttttggcatcctgcacaccaataacattattatcgcttatgtttttggttttctggccggaatggcaa

SEQ ID NO: 586452 - DNA, 75 bp, synthetic construct
  source 1..75: mol_type = other DNA
cgctggggttgtatttcaattacctggtacatggtatgggcgtcattttgatgactctgaatatggcctcgctgg

SEQ ID NO: 586453 - DNA, 75 bp, synthetic construct
  source 1..75: mol_type = other DNA
acccgcgaaccacggttaattatgatcaccaacggccaggttgaaagcggtctggacgataaacatctcggcctt

SEQ ID NO: 586454 - DNA, 75 bp, synthetic construct
  source 1..75: mol_type = other DNA
tatcgtcggtaaaccagacagcgataaaccgtcaatggatatggatcagcatttcaacggcattcaccatacgtt

SEQ ID NO: 586455 - DNA, 75 bp, synthetic construct
  source 1..75: mol_type = other DNA
ctaggtattggcagattaagcgttctgtttctggcaggattattatccgatcgctttggtcgtcgaccatttatc

SEQ ID NO: 586456 - DNA, 75 bp, synthetic construct
  source 1..75: mol_type = other DNA
agtatctacaccgtgggttcgctgctttgtgtatttattaccgctccactcattcgtaataccgttcgcccggta

SEQ ID NO: 586457 - DNA, 75 bp, synthetic construct
  source 1..75: mol_type = other DNA
gtgaacacatccattcacctgaaggcgttcttggcctgacggagcgatcgatgctgatggacctgctgcggaaga

SEQ ID NO: 586458 - DNA, 75 bp, synthetic construct
  source 1..75: mol_type = other DNA
acgccacggcgtcagcagtaatgcaggcgatgaagatagagaacaaaacctacagcgccccactgaagcccggct

SEQ ID NO: 586459 - DNA, 75 bp, synthetic construct
  source 1..75: mol_type = other DNA
atcgaacgtgctggcaccaaagctggcaacaaaggtgcagaagctgcactgaccgcgcttgaaatgattaatgta

SEQ ID NO: 586460 - DNA, 75 bp, synthetic construct
  source 1..75: mol_type = other DNA
ttctgtaaactcaataaaggtggctgggatggtgccgtcatcaccttctttgccagtacggccgcgatgtatatc

SEQ ID NO: 586461 - DNA, 75 bp, synthetic construct
  source 1..75: mol_type = other DNA
gttggtgtgagcaaatgcctgcgtgatatccagactcacgcggagtacatcaacgacaaggctgggttcttctga

SEQ ID NO: 586462 - DNA, 75 bp, synthetic construct
  source 1..75: mol_type = other DNA
agctcaatatggggggatgggatggtgcatttattagcttcattgctggcggcatggcgatgttgatccgcctga

SEQ ID NO: 586463 - DNA, 75 bp, synthetic construct
  source 1..75: mol_type = other DNA
gataaaccgtcaatggatatggatcagcatttcaacggcattaaccatacgtttgaatatggggatgggatctga

SEQ ID NO: 586464 - DNA, 75 bp, synthetic construct
  source 1..75: mol_type = other DNA
gagagaagaagtcatttcgccagcggagaaaacaacgtcatgctaattggcgatgtggcggcgacatcacgatat

SEQ ID NO: 586465 - DNA, 75 bp, synthetic construct
  source 1..75: mol_type = other DNA
caatggcgcttattgtgctagtgggttgttctacaccgccacccgtgcagaaagcacaacgggtaaaggttgatc

SEQ ID NO: 586466 - DNA, 75 bp, synthetic construct
  source 1..75: mol_type = other DNA
gtcggggcgattggttcggtcagtattgatagtctggatttctggcctttgcttgcggactggttcagtgagtaa

SEQ ID NO: 586467 - DNA, 75 bp, synthetic construct
  source 1..75: mol_type = other DNA
ttcagacgcggctgggtttacacagcgaatggcgtaccgctgttcatgtcataccaacattagatctgaattatt

SEQ ID NO: 586468 - DNA, 75 bp, synthetic construct
  source 1..75: mol_type = other DNA
agaactgagcggtcgtcaggaagccgcgctgatcctcggtgaagtctatcgcaggaatggtgactggaaatttcg

SEQ ID NO: 586469 - DNA, 75 bp, synthetic construct
  source 1..75: mol_type = other DNA
atgaatctgacaccggggggcaatgcccccgtacctgctcaggaactgcgcgttagagtcatttctggtggtcct

SEQ ID NO: 586470 - DNA, 75 bp, synthetic construct
  source 1..75: mol_type = other DNA
ccgaaaacggcgggcatcaaacgtccagtcgttaagatggaaaaaacggcggaaaaaggcggtcgcccggcgtcc

SEQ ID NO: 586471 - DNA, 75 bp, synthetic construct
  source 1..75: mol_type = other DNA
gtctttcgcattacgctggtacaggggttgaatcggcagatccgtcgcatgtgcgaatactttggctatgaagtg

SEQ ID NO: 586472 - DNA, 75 bp, synthetic construct
  source 1..75: mol_type = other DNA
ctgccattgctattcgcgaagtggttgaagaagcttatgccgccgacccggaaatgatcgcttctgcggcctgcg

SEQ ID NO: 586473 - DNA, 75 bp, synthetic construct
  source 1..75: mol_type = other DNA
ccgaaaacagcgggcatcaaacgtccagtcgttaagatggaaaaaaacggcggaaaaaggcggtcgcccggcgtc

SEQ ID NO: 586474 - DNA, 75 bp, synthetic construct
  source 1..75: mol_type = other DNA
aaaaagctggaacgcacgcgcatcatgaacgttagcttaagcggcattccgctggggggaatggcgcgatttaac

SEQ ID NO: 586475 - DNA, 75 bp, synthetic construct
  source 1..75: mol_type = other DNA
tggcgatcaggtgaaacccggcgacgttgtgaaagtaaacggtcagttgattgagcctcgggaagccgaagattt

SEQ ID NO: 586476 - DNA, 75 bp, synthetic construct
  source 1..75: mol_type = other DNA
atcaatgacagcctgctggaaggtgcaatcgatgcactgaaacgtattggtcaggtaaaagatgaaaacattacc

SEQ ID NO: 586477 - DNA, 75 bp, synthetic construct
  source 1..75: mol_type = other DNA
gtcaagaagcaattgcttgaaagtgttggtgtttataatgaggtaaaacatgataatgagattagttggcctgtc

SEQ ID NO: 586478 - DNA, 75 bp, synthetic construct
  source 1..75: mol_type = other DNA
ccaggcgaactccaacctggatgaagaaggccgcttcgttgaagacctggtaacttgtcgtagtaaaggtgaatc

SEQ ID NO: 586479 - DNA, 75 bp, synthetic construct
  source 1..75: mol_type = other DNA
ccgcatgatgcgtcctggcgagccgccgactcgtgaagctgctgaaagcctgttcgagaacctgttcttctctga

SEQ ID NO: 586480 - DNA, 75 bp, synthetic construct
  source 1..75: mol_type = other DNA
tgcgtaatcttggacagggctatgtcaacttcggtgaaccaatgccgttgatgacctatctcaaccagcatgtgc

SEQ ID NO: 586481 - DNA, 75 bp, synthetic construct
  source 1..75: mol_type = other DNA
aagtaaaaaataaattacacactggggatgaaattaaccaacttcaggtggcattttcaatctatgatagtcatt

SEQ ID NO: 586482 - DNA, 75 bp, synthetic construct
  source 1..75: mol_type = other DNA
tcacgtgaataaagagttattacttatattaaataatgatagctttgatataaatgtggttaaaaataagataaa

SEQ ID NO: 586483 - DNA, 75 bp, synthetic construct
  source 1..75: mol_type = other DNA
ataagccgctggttggtacgggtatggaacgtgctgttgccgttgactctggtgtaactgcggttgctaaacgtg

SEQ ID NO: 586484 - DNA, 75 bp, synthetic construct
  source 1..75: mol_type = other DNA
gaacaacccgctgtctgagattacacacaagcgtcgtatctctgcactcggcccaggcggtctgacccgtgaacg

SEQ ID NO: 586485 - DNA, 75 bp, synthetic construct
  source 1..75: mol_type = other DNA
ccgcaatggtaacgcctttcgatgaaacggaaaaaatggatatcactgcggcgaaaaaaatggcgcgctggttag

SEQ ID NO: 586486 - DNA, 75 bp, synthetic construct
  source 1..75: mol_type = other DNA
tgctgcgcgaagaaatcgaaggttccggtattctgagcaaagacgacatcattgatgttatgaaaaagctcatcg

SEQ ID NO: 586487 - DNA, 75 bp, synthetic construct
  source 1..75: mol_type = other DNA
tcggtcagatcctcgaaacccacttgggtatggctgcgaaaggtatcggcgacaagatcaacgccatgctgaaac

SEQ ID NO: 586488 - DNA, 75 bp, synthetic construct
  source 1..75: mol_type = other DNA
cgtcgtatccgttccgttggtgaaatggcggaaaaccagttccgtgttggcctggtacgtgtagagcgtgcggtg

SEQ ID NO: 586489 - DNA, 75 bp, synthetic construct
  source 1..75: mol_type = other DNA
ggttctgccttcactgatggcggcaattgtaacgcagcatcgccacatctcccgcgacgtattgatggagcacgt

SEQ ID NO: 586490 - DNA, 75 bp, synthetic construct
  source 1..75: mol_type = other DNA
gatctggctggcaagctggtctgtacgattaatgaggacgtatacagtgcaaacaggaatgtaaaactaattgaa

SEQ ID NO: 586491 - DNA, 75 bp, synthetic construct
  source 1..75: mol_type = other DNA
taatgcggtatctactggttcagtaaaacgcgcgacaggtctcagcgatgatgttgatccattcaacaccagggc

SEQ ID NO: 586492 - DNA, 75 bp, synthetic construct
  source 1..75: mol_type = other DNA
gaactcacaggctgtgtcttcggcgcgatcccccctttcagcttccatccaaaactcaaactggttgccgaccct

SEQ ID NO: 586493 - DNA, 75 bp, synthetic construct
  source 1..75: mol_type = other DNA
attttcaagaggtttttccttattttcagaatgaaagagagatggtgtttttaggtgctccatatatagaatatg

SEQ ID NO: 586494 - DNA, 75 bp, synthetic construct
  source 1..75: mol_type = other DNA
ctacggctgtagaaattgaacgcgcattacgtgaacgccgtcagcaagaacttgaacaggccagtacagacagcg

SEQ ID NO: 586495 - DNA, 75 bp, synthetic construct
  source 1..75: mol_type = other DNA
acccgcgcagctttctaaaattacgcgcgttccttatgaccctaaccttttcattcctgaaaataccgcgattaa

SEQ ID NO: 586496 - DNA, 75 bp, synthetic construct
  source 1..75: mol_type = other DNA
ccgccgcatatcgccgccgggatcaacctgaacttctggcctgccgggccgattttccgccgtctgggggcgttc

SEQ ID NO: 586497 - DNA, 75 bp, synthetic construct
  source 1..75: mol_type = other DNA
gccactacgtatgctcaacggcgtgcagaaatttttcgccgtactgtggcttggtcgcgatagctttgtgcgttt

SEQ ID NO: 586498 - DNA, 75 bp, synthetic construct
  source 1..75: mol_type = other DNA
caacttcggtgaaccgatgccgttgatgacctatctcaaccagcacgtgccagactggcgtgaatctattgatcc

SEQ ID NO: 586499 - DNA, 75 bp, synthetic construct
  source 1..75: mol_type = other DNA
aactgctcaatttccgccgcactgcgcaactagcctgtccgttcaataagcagaacggacaaaaccagcacaaca

SEQ ID NO: 586500 - DNA, 75 bp, synthetic construct
  source 1..75: mol_type = other DNA
cgcgtagcaaaaaaatctctcatgaaaaagcgcagcagaacgcgattgcgctgatggaagagattgcagcgaact

SEQ ID NO: 586501 - DNA, 75 bp, synthetic construct
  source 1..75: mol_type = other DNA
tcggtgatgtttggtcgcgcgccggggcgcgaaaaaggtgaagtaaatccgccgttgcgtatgctcaacggcgtg

SEQ ID NO: 586502 - DNA, 75 bp, synthetic construct
  source 1..75: mol_type = other DNA
atgtcatggatcctcgaaaccaatacaggcatgaataacatgctggaacgcattggggcggagccgtacaagcgt

SEQ ID NO: 586503 - DNA, 75 bp, synthetic construct
  source 1..75: mol_type = other DNA
ctctgctacatgcaactctggatggaaaaagcccaggacctcagcaaacacctgtatccgatcatgaaagagctg

SEQ ID NO: 586504 - DNA, 75 bp, synthetic construct
  source 1..75: mol_type = other DNA
attcacagacgaagaaatcatcctcctttgctatatgcaggtacagatggagaatgcgcaggacatctgcaaacg

SEQ ID NO: 586505 - DNA, 75 bp, synthetic construct
  source 1..75: mol_type = other DNA
agataccttgcaccgcgagcgttacggtgaagataccggtcatttcggcatgattgacgccattgatgatccgca

SEQ ID NO: 586506 - DNA, 75 bp, synthetic construct
  source 1..75: mol_type = other DNA
tgacttaaaggcatttatcgcttttccgtcgtcactttattccaatgattcaaactggatcccccctttatgcat

SEQ ID NO: 586507 - DNA, 75 bp, synthetic construct
  source 1..75: mol_type = other DNA
gtcatggatcctcgaaaccaatgcgggcatgaataacatgctggagcgcattggcgcagaaccgtacaagcgtta

SEQ ID NO: 586508 - DNA, 75 bp, synthetic construct
  source 1..75: mol_type = other DNA
agcattgaacgaaaacgtcttattgcagcctatgtcgatcaacagctatctcccctaaatcttcgccccaaagaa

SEQ ID NO: 586509 - DNA, 75 bp, synthetic construct
  source 1..75: mol_type = other DNA
actcattagcattgttaatagcggctttactattaacaggttgtgattctgatgaagagcgagccataaatctag

SEQ ID NO: 586510 - DNA, 75 bp, synthetic construct
  source 1..75: mol_type = other DNA
gtggcgattatcggtcagaccagctcactggctccggcggataaacgtttctacgcgacccgtgatattaccgca

SEQ ID NO: 586511 - DNA, 75 bp, synthetic construct
  source 1..75: mol_type = other DNA
ctcagaaaaaactagatggcttaattaagaaacatggcggagtcaccgaaaccttactgtatctcactcatcatg

SEQ ID NO: 586512 - DNA, 75 bp, synthetic construct
  source 1..75: mol_type = other DNA
gaattgcgagaccaattagcgcaaaataccctttcgttgatagaaattgtcaaagcggtaaaaatcaattcgatt

SEQ ID NO: 586513 - DNA, 75 bp, synthetic construct
  source 1..75: mol_type = other DNA
caaagcggtaaaaatcaattcggttataccggtggaaagtctgttggccaaacatgtgattcgggagctacataa

SEQ ID NO: 586514 - DNA, 75 bp, synthetic construct
  source 1..75: mol_type = other DNA
gagctgaactcctcatacacgaacaagctgtatgacattgcgtttgagaccatctacatggtgacgaagaacaga

SEQ ID NO: 586515 - DNA, 75 bp, synthetic construct
  source 1..75: mol_type = other DNA
ggtaacgcggttgaagtacgtgaagcggtgcagttcctgacaggtgagtaccgtaacccgcgtctgtttgatgtc

SEQ ID NO: 586516 - DNA, 75 bp, synthetic construct
  source 1..75: mol_type = other DNA
accagattatcagtgatacagtaaaagctattaatgatgtaaataagaaaatagtagaaaaacgaaatcagcagg

SEQ ID NO: 586517 - DNA, 75 bp, synthetic construct
  source 1..75: mol_type = other DNA
ttcttacgttggtagtatcattaaccagcgtgcttacgcgtctgtctcctgttcagataccacttcctttgatcc

SEQ ID NO: 586518 - DNA, 75 bp, synthetic construct
  source 1..75: mol_type = other DNA
ggttgagccgtcaacaggctggcaggtgcgctcctatttacgtgcggcgctgggcatgaatcagactcatggggg

SEQ ID NO: 586519 - DNA, 75 bp, synthetic construct
  source 1..75: mol_type = other DNA
tgaccgtgtacataagccccgaaatcgtggaggtgctcaagcagcgccacaaaaaaaactatgaggctggcgtag

SEQ ID NO: 586520 - DNA, 75 bp, synthetic construct
  source 1..75: mol_type = other DNA
tctggacgataaacatctcggccttctgatagaaaatcacacgctggcttatttaagcagatctctggtatcagg

SEQ ID NO: 586521 - DNA, 75 bp, synthetic construct
  source 1..75: mol_type = other DNA
atgcagcttaaacatgtggcagaagccaaactgccaaccccatggggcgatttcctgatggtgggatttgaagaa

SEQ ID NO: 586522 - DNA, 75 bp, synthetic construct
  source 1..75: mol_type = other DNA
tcaacggcactatatccaacgaaacaactcttctcgttaatgcccgtgatttacacgaatttttggaagtacgtc

SEQ ID NO: 586523 - DNA, 75 bp, synthetic construct
  source 1..75: mol_type = other DNA
ctctgctacatgcaggtacagatggagaaagcacaggacatcagcaaacgcctgtatccgatattgaaggaactg

SEQ ID NO: 586524 - DNA, 75 bp, synthetic construct
  source 1..75: mol_type = other DNA
cattctgcgcagcaggttagctcgtaaagcattgcagcttccgccaggcgtgttacagcaaatgggcagcgggtc

SEQ ID NO: 586525 - DNA, 75 bp, synthetic construct
  source 1..75: mol_type = other DNA
ctctgctacatgcaactctggatggaaaaagcacaacaactcagtaagcagctataccccgtcatgagagaactg

SEQ ID NO: 586526 - DNA, 75 bp, synthetic construct
  source 1..75: mol_type = other DNA
gaaatcatcctcctttgctacatgcagctctggatggaaaaagcccaacaactcagtaaacagctataccccgtc

SEQ ID NO: 586527 - DNA, 75 bp, synthetic construct
  source 1..75: mol_type = other DNA
ttttgaatttcagacctggggcgaaaacagacgtattccggtggatttggatggggtacagttggtttcgtttct

SEQ ID NO: 586528 - DNA, 75 bp, synthetic construct
  source 1..75: mol_type = other DNA
tgaaattgcgtaattattatttgctcaatccttatgagtccggcgagaaaggatttaaattactgctgaccgaga

SEQ ID NO: 586529 - DNA, 75 bp, synthetic construct
  source 1..75: mol_type = other DNA
tataaggaggatattttaatagaagatctatatatatattataaagctgcatctttaggctataaaatggctctt

SEQ ID NO: 586530 - DNA, 75 bp, synthetic construct
  source 1..75: mol_type = other DNA
cgccgatatgatcgccggacagaacaaagcaaaaaatgcatgggggggaaatgtaacaattcaagcaacgactga

SEQ ID NO: 586531 - DNA, 75 bp, synthetic construct
  source 1..75: mol_type = other DNA
gctggcagaatcgcgtaatatgagtcgtagcgaactgatcgaagagatattgatgcagcagttggcagcgctgcg

SEQ ID NO: 586532 - DNA, 75 bp, synthetic construct
  source 1..75: mol_type = other DNA
cagagctttgaaccggggatgacggtctccctcgttgcccggcaacatggtgtagcagccagccagttatttctc

SEQ ID NO: 586533 - DNA, 75 bp, synthetic construct
  source 1..75: mol_type = other DNA
gtgcaatggcattgggaaaagaaagtgacaaatcgcttgctacggcttttcaggatttgggtgatgctgccaact

SEQ ID NO: 586534 - DNA, 75 bp, synthetic construct
  source 1..75: mol_type = other DNA
tatgatcccaaggtttatgacgaatatcgtaagacgaagcgggcggggcggttgaacaatgaaaatcactcctga

SEQ ID NO: 586535 - DNA, 75 bp, synthetic construct
  source 1..75: mol_type = other DNA
atttcggttcaaaaacaaaacttgcacaagctgctggtattcgtttggcttcgctttatagctggaaaggggagc

SEQ ID NO: 586536 - DNA, 75 bp, synthetic construct
  source 1..75: mol_type = other DNA
atgttgaaaattgatgctatagcgttttttggcagcaaaacaaagcttgccaatgccgcaggagttaggctggca

SEQ ID NO: 586537 - DNA, 75 bp, synthetic construct
  source 1..75: mol_type = other DNA
gcgcagttcgtccatatttaccaaaattatgaacacagccccgaacatggtggatcccgttaccgtctgcagtag

SEQ ID NO: 586538 - DNA, 75 bp, synthetic construct
  source 1..75: mol_type = other DNA
ggagcaaagtctaagcctgatatttgcagtgggaggtttgtgaatatcaacatacccaatgcgcatggacaccga

SEQ ID NO: 586539 - DNA, 75 bp, synthetic construct
  source 1..75: mol_type = other DNA
ttcctgaaaagcgagcagctcgactcgaccatatcactaatggagcactgaaatatgacccgactttttacgatg

SEQ ID NO: 586540 - DNA, 75 bp, synthetic construct
  source 1..75: mol_type = other DNA
agcgtgcaatcgctggttttcttgaagaaggtgttaaagaggtgattgtgaagcgcggcaatcaaggtgccagtt

SEQ ID NO: 586541 - DNA, 75 bp, synthetic construct
  source 1..75: mol_type = other DNA
atggctaagggtgatattaaaaagttgaagtttgaatctttctacgatagtgaatcgaataacgaggttattcga

SEQ ID NO: 586542 - DNA, 75 bp, synthetic construct
  source 1..75: mol_type = other DNA
cggttgaaaacacctcgcgatggacgacgacaaagatatcagttgttcgacaattgattgctgaaacaacggaat

SEQ ID NO: 586543 - DNA, 75 bp, synthetic construct
  source 1..75: mol_type = other DNA
aaaaccgtatagcggcaagcacaaaattctggtgatcgccgctgacgaacgctatttgccgaccgataacggtaa

SEQ ID NO: 586544 - DNA, 75 bp, synthetic construct
  source 1..75: mol_type = other DNA
cctgggcgaccaataccgagtcgggttttgaatttcagacctggggtgaaaatagacgtattccggtggatttgg

SEQ ID NO: 586545 - DNA, 75 bp, synthetic construct
  source 1..75: mol_type = other DNA
gcggaagaaggcaatgtagtgatggcatgggcaacgaatacggaatcgggatttgagttccagacatttggggta

SEQ ID NO: 586546 - DNA, 75 bp, synthetic construct
  source 1..75: mol_type = other DNA
tcgtgccgtctgcgtcgctgcgtcatcgatcgtgcttgtgttattccggaaggcatggtgattggtgaaaacgca

SEQ ID NO: 586547 - DNA, 75 bp, synthetic construct
  source 1..75: mol_type = other DNA
aaggaccgtaaagttctcaccggcgacagtcctttcgcagcgaatgcgttgggtaaactggcggcgcaggaaatg

SEQ ID NO: 586548 - DNA, 75 bp, synthetic construct
  source 1..75: mol_type = other DNA
atgactgttcaaacaagtaagaacccgcagattgatattgctgaagataatgcgttcttcccttcagaatattcg

SEQ ID NO: 586549 - DNA, 75 bp, synthetic construct
  source 1..75: mol_type = other DNA
aactgaagaaaatgggaatgaatatcatcaatgatgatattaccggccgggtacataaggatcgtaaacttctca

SEQ ID NO: 586550 - DNA, 75 bp, synthetic construct
  source 1..75: mol_type = other DNA
cacaggttgacattgctgaagataatgcattctttccttcggaatattcgctcagccaatataccagcccagtat

SEQ ID NO: 586551 - DNA, 75 bp, synthetic construct
  source 1..75: mol_type = other DNA
tgcattcttcccttcagaatattcgcttagccaatataccagtcccgtctctgatcttgatggcgtggactaccc

SEQ ID NO: 586552 - DNA, 75 bp, synthetic construct
  source 1..75: mol_type = other DNA
tttacagtgggcaatcaaaaatgaccgttttgttatctccctttgccacggcccggcggcttttctggcgcttcg

SEQ ID NO: 586553 - DNA, 75 bp, synthetic construct
  source 1..75: mol_type = other DNA
cgctgatggcgattatcaccctgtttttaaaaagtatgttgcagtggcgcctggagaatcaggaaaaaacgcgca

SEQ ID NO: 586554 - DNA, 75 bp, synthetic construct
  source 1..75: mol_type = other DNA
atggcggaagtgacacaattgaagcgttatgacgcgcgcccgattaactggggcaaatggtttctgattggcatc

SEQ ID NO: 586555 - DNA, 75 bp, synthetic construct
  source 1..75: mol_type = other DNA
ggctggatgaacataatttgcagattatgttctcctggccgggaatggtgctggtcaccatctttgtgacctgtc

SEQ ID NO: 586556 - DNA, 75 bp, synthetic construct
  source 1..75: mol_type = other DNA
caggctgccgtcgatgcgcatatcaaactgggtattcagcccagtggccagcgcctcggcgcaatggatatcgca

SEQ ID NO: 586557 - DNA, 75 bp, synthetic construct
  source 1..75: mol_type = other DNA
acggactggcacgcatcacggaaacgctgacctatgatcctcagtataaaaaacacaagcccaaccacccgcgct

SEQ ID NO: 586558 - DNA, 75 bp, synthetic construct
  source 1..75: mol_type = other DNA
tttaaagagtatgttgcagtggcgcctggagaatcaggaaaaacgcgcacagcaggaggaacatcatgagcattg

SEQ ID NO: 586559 - DNA, 75 bp, synthetic construct
  source 1..75: mol_type = other DNA
gccaaaaccgaaacacaacccattcctgagcctggtgcctgagcaaggcgttaagctgacgccacgtcattacgc

SEQ ID NO: 586560 - DNA, 75 bp, synthetic construct
  source 1..75: mol_type = other DNA
aagcaaaaggcgctgcactggttaaatctgagctgtatggaagggtttgataccgggtgtgaagagtttgaaaaa

SEQ ID NO: 586561 - DNA, 75 bp, synthetic construct
  source 1..75: mol_type = other DNA
atcaaaatcaccaatccggtcagcctggactatccacaagcaaaagtgcttgccgagaaagccgcgcaagcaggc

SEQ ID NO: 586562 - DNA, 75 bp, synthetic construct
  source 1..75: mol_type = other DNA
aaacggtcggtaatgttttgttgtccggactgatattttctgtttctggttgcgcaatgcacaacattcagagcc

SEQ ID NO: 586563 - DNA, 75 bp, synthetic construct
  source 1..75: mol_type = other DNA
aagcgtccgggttcagtagatcgccagttggctcgcatcaaacaatggcgtgaaatctgcccggagctgactctg

SEQ ID NO: 586564 - DNA, 75 bp, synthetic construct
  source 1..75: mol_type = other DNA
gcagcagatttccgccgagcgcctgcaagagaaagtgggccgtgaaattctggtgattatcgacgaagtggacga

SEQ ID NO: 586565 - DNA, 75 bp, synthetic construct
  source 1..75: mol_type = other DNA
gcacgcgccatatatgcgtgttgagtttcctgaaactggtgccgttatcaaaggcgaggctggcgataatattgg

SEQ ID NO: 586566 - DNA, 75 bp, synthetic construct
  source 1..75: mol_type = other DNA
cccgtcagtggagatcaaactcactaccggtgatgcggccgatgcgatggaaaaggtggtcactggcgaagcgga

SEQ ID NO: 586567 - DNA, 75 bp, synthetic construct
  source 1..75: mol_type = other DNA
agaagccggactggtcaacggtgccgtttattatggccgatcaggggccggtacgccgccgcattgaactgtggt

SEQ ID NO: 586568 - DNA, 75 bp, synthetic construct
  source 1..75: mol_type = other DNA
ttctggatcgcttccgcgcggaacacccgtcggtggagattaaacttactactggtgatgcggcagatgcgatgg

SEQ ID NO: 586569 - DNA, 75 bp, synthetic construct
  source 1..75: mol_type = other DNA
aacaccgtttgaactgggcgtttgcgcacaaaaaaagcggctacatgagccgctgattgaggcgttctggaagat

SEQ ID NO: 586570 - DNA, 75 bp, synthetic construct
  source 1..75: mol_type = other DNA
gatgatttacgccacggttggcgggcatgaagcgatggtatcgatggtggcgctcggctgtggcgtggcattgtt

SEQ ID NO: 586571 - DNA, 75 bp, synthetic construct
  source 1..75: mol_type = other DNA
ttctacatctggcggaaagccgtcattttgggcgcagcgcgcgggcgatgcacgtcagcccatcgacactttcac

SEQ ID NO: 586572 - DNA, 75 bp, synthetic construct
  source 1..75: mol_type = other DNA
tcatcatcgagctttcgcagccgacctattccattaatggtgtgggaaaaatcgttattgataaacagcctgatg

SEQ ID NO: 586573 - DNA, 75 bp, synthetic construct
  source 1..75: mol_type = other DNA
tcgagaaggttttcggcttttgcgaacaggacaacctcgaagagtttcgctttgacgaggacgggctgggcgctg

SEQ ID NO: 586574 - DNA, 75 bp, synthetic construct
  source 1..75: mol_type = other DNA
ggtgaccattccgtttttactcttccctaagcaggaggagtggatccactggattatggaacgctggggcaatcg

SEQ ID NO: 586575 - DNA, 75 bp, synthetic construct
  source 1..75: mol_type = other DNA
tcctgcatctggcggaaagccgccattttggccgcagcgcgcgggcgatgcacgttagcccatccacgctctcac

SEQ ID NO: 586576 - DNA, 75 bp, synthetic construct
  source 1..75: mol_type = other DNA
tgaactacagcgcatcagcggaaggcgtcctgatcccatccgactgggtacaggctgctgtcgacgcgcatatca

SEQ ID NO: 586577 - DNA, 75 bp, synthetic construct
  source 1..75: mol_type = other DNA
tctcttcaacaaagaaatggttatcggtttcggctcccgtaaagaggaatacgtcgacagcaccggtgacccgaa

SEQ ID NO: 586578 - DNA, 75 bp, synthetic construct
  source 1..75: mol_type = other DNA
atggcagccgtcgtctgggtgttgcgctggcgaccgctgagagtgttgttgacgccattgaacgcgcgaagcacg

SEQ ID NO: 586579 - DNA, 75 bp, synthetic construct
  source 1..75: mol_type = other DNA
aatgaatatgcgacttgcagatgaaatttgttcaatcgatttacttgatgattgcaatcttattgcacgtttttc

SEQ ID NO: 586580 - DNA, 75 bp, synthetic construct
  source 1..75: mol_type = other DNA
aatataaaattcacatggatgcacagagataacttgaaattatttaagaacatagaaatatcaccaaccactttg

SEQ ID NO: 586581 - DNA, 75 bp, synthetic construct
  source 1..75: mol_type = other DNA
atggggacgttagtcggttcttacgccagtgtcgcgcgcatgttagatgaagtcgcaagcgtgcctggtgccaaa

SEQ ID NO: 586582 - DNA, 75 bp, synthetic construct
  source 1..75: mol_type = other DNA
caaactggtttcatcaatggacttctatccgaccgctttagatgccgcagatatcaagatccctgcttctctgaa

SEQ ID NO: 586583 - DNA, 75 bp, synthetic construct
  source 1..75: mol_type = other DNA
aagaacttgagagaacatggacacctgcatctactattagatatatttatgcactaatgagatatcgaaatttcg

SEQ ID NO: 586584 - DNA, 75 bp, synthetic construct
  source 1..75: mol_type = other DNA
caagatttaaaaatcaaaaatggaagaataaattcttccttataccagtcgatgtccgttctgctagaggcggac

SEQ ID NO: 586585 - DNA, 75 bp, synthetic construct
  source 1..75: mol_type = other DNA
gaaaatcgaagaattacgtgaaatttttagtgaagatggcctctatgctgtgcgcgttgagaatgggggtattac

SEQ ID NO: 586586 - DNA, 75 bp, synthetic construct
  source 1..75: mol_type = other DNA
cttttattacgtgagcaagcgacgatcacaaatttcagagctaatcatgaaaccatccacgatttgaaagatgct

SEQ ID NO: 586587 - DNA, 75 bp, synthetic construct
  source 1..75: mol_type = other DNA
ggctgacgcagtcacccaaaacctcgatatcatccgccgctataaagcggaatatgtggtgatcctggcgggcga

SEQ ID NO: 586588 - DNA, 75 bp, synthetic construct
  source 1..75: mol_type = other DNA
agtgtccccatgaaagtgatctgcgccgggcaaagcgacgctggcatggcgttctccgcccggtatgccgatttc

SEQ ID NO: 586589 - DNA, 75 bp, synthetic construct
  source 1..75: mol_type = other DNA
gcgatgactatttctcccgtcgttacgactatctcaccgaatatgttcaggtgctgcgcgacctgtggggcacgg

SEQ ID NO: 586590 - DNA, 75 bp, synthetic construct
  source 1..75: mol_type = other DNA
cccagataaagcgaatgcaatcgaagaagctactcgtaatttcacgggttataaacctgtgaaaaaggaaaatct

SEQ ID NO: 586591 - DNA, 75 bp, synthetic construct
  source 1..75: mol_type = other DNA
tattgaccgtttagggcgtaataccgttgatgtgctctctaacgtggagtcactacagactaaaggtgtgagggt

SEQ ID NO: 586592 - DNA, 75 bp, synthetic construct
  source 1..75: mol_type = other DNA
catgtcgcgcatcgctcccatgtcattaatatgcttgatggtgatgcattacgccgtgtggttgaactggaaaaa

SEQ ID NO: 586593 - DNA, 75 bp, synthetic construct
  source 1..75: mol_type = other DNA
ggccgctgcggcagcccgggagcagcgacgtgccctggcagaactgaacagccagttgacggaaattcgcggttc

SEQ ID NO: 586594 - DNA, 75 bp, synthetic construct
  source 1..75: mol_type = other DNA
ggcttcggcgaagtgttccgtatgctgtcgttcgaagagattggcaccgcaaccctgcaatctcgtgcggtggcg

SEQ ID NO: 586595 - DNA, 75 bp, synthetic construct
  source 1..75: mol_type = other DNA
actggctactgcagagagtgttgttgacgccattgaacgcgcgaagcacgccgccggacaggtaaaagtacaggg

SEQ ID NO: 586596 - DNA, 75 bp, synthetic construct
  source 1..75: mol_type = other DNA
cgcatgacaccgggatggtgacgttaatttctcaggatctctcagaatttgccctacatgtacgcgcgttccttg

SEQ ID NO: 586597 - DNA, 75 bp, synthetic construct
  source 1..75: mol_type = other DNA
ccgccgtctggcggcagaagagcttcaaattcccacttcaacgtatcgttttgccgacagcgaaaaccttttccg

SEQ ID NO: 586598 - DNA, 75 bp, synthetic construct
  source 1..75: mol_type = other DNA
gaggctgtacagacgcttatttcacaaggtaagacacggttgcagattcaggaagagctaggaatctctagagca

SEQ ID NO: 586599 - DNA, 75 bp, synthetic construct
  source 1..75: mol_type = other DNA
ggcacagcttgaaagaagcttgatagcagagcgtagaaaggctggaatagaacgtgctaaagccgaaggggttca

SEQ ID NO: 586600 - DNA, 75 bp, synthetic construct
  source 1..75: mol_type = other DNA
caaggtaaaacgaggttgcagattcaggaagagttaggaatctctagagcaacttattacagacttgctaaataa

SEQ ID NO: 586601 - DNA, 75 bp, synthetic construct
  source 1..75: mol_type = other DNA
tcccgacccgtattgctattcttacggtttctaatcgtcgcggtgaagaagacgatacctccggtcactatctgc

SEQ ID NO: 586602 - DNA, 75 bp, synthetic construct
  source 1..75: mol_type = other DNA
caaggtaagacgaggttgcagattcaggaagaattaggaatctctagagcaacttattacagacttgctaaataa

SEQ ID NO: 586603 - DNA, 75 bp, synthetic construct
  source 1..75: mol_type = other DNA
ggggaggcctgtaaaagcttcttcagaggctgtacagacgcttatttcacaaggtaagacgaggttgcagattca

SEQ ID NO: 586604 - DNA, 75 bp, synthetic construct
  source 1..75: mol_type = other DNA
gtctggagcaaaaagcgtatcctgacggtttacctgaatatcgccgaatttggcgacggtgtgtttggcgtcgaa

SEQ ID NO: 586605 - DNA, 75 bp, synthetic construct
  source 1..75: mol_type = other DNA
aactgctggttgccggtgatttcagtaacgggcaggaagagcgtccactgtcagagcgtgtaaaaacggatatca

SEQ ID NO: 586606 - DNA, 75 bp, synthetic construct
  source 1..75: mol_type = other DNA
tcgaagattatttcgcggtgaaaccggaaaacaaagaccgtgtgaagaaacaggtagaagccggcaagttgatta

SEQ ID NO: 586607 - DNA, 75 bp, synthetic construct
  source 1..75: mol_type = other DNA
tgctggaaaacgaagtggtgcacggttcactggaagtacaggatggcgaaattcgcgcctttgccgaaagccaga

SEQ ID NO: 586608 - DNA, 75 bp, synthetic construct
  source 1..75: mol_type = other DNA
tgctggaaaacgaagtcgtacacggttcgctggagatgcaggacggcgaaatccgcgcctttgccgaaagccaga

SEQ ID NO: 586609 - DNA, 75 bp, synthetic construct
  source 1..75: mol_type = other DNA
ttacctaatccacttcgtttcaaagtctcctcgccatcgggctacgtgcgtagccgtcaggcgtggattttacgg

SEQ ID NO: 586610 - DNA, 75 bp, synthetic construct
  source 1..75: mol_type = other DNA
aaggtccgattgaggcgatcatcgaagcccgtaataaaggcggctacttccgcgaactgtttgatctctgcgctc

SEQ ID NO: 586611 - DNA, 75 bp, synthetic construct
  source 1..75: mol_type = other DNA
aaatgaccgctcgcgaagtgatggatattgacgaagcccgggaaaaatatgctcgcgggcttgctatctcgctga

SEQ ID NO: 586612 - DNA, 75 bp, synthetic construct
  source 1..75: mol_type = other DNA
aatcctacgccagctgccaaccgtggccggagcaggtggtattagatggggaacgtgaaacgttaggcctgtacc

SEQ ID NO: 586613 - DNA, 75 bp, synthetic construct
  source 1..75: mol_type = other DNA
atcagcgaaacaggacgggaaatcctccgctatcaccagctcacgctcaccactggctatgacggtagctaccgg

SEQ ID NO: 586614 - DNA, 75 bp, synthetic construct
  source 1..75: mol_type = other DNA
ccgacaccaaaaagttaaaccggcgggtgctggaaaaactgatcatgtccggggcgtttgaccgtcttgggccac

SEQ ID NO: 586615 - DNA, 75 bp, synthetic construct
  source 1..75: mol_type = other DNA
ggtgggcttaaaatgaccgctcgcgaagtgatggatattgacgaagcccgggaaaaatatgctcgcgggcttgct

SEQ ID NO: 586616 - DNA, 75 bp, synthetic construct
  source 1..75: mol_type = other DNA
aggcgcttaatctccaggatcgcggggtgattggcgagggcaaacgcgccgacctggtgctggcgcatcgcaagg

SEQ ID NO: 586617 - DNA, 75 bp, synthetic construct
  source 1..75: mol_type = other DNA
cttcccgatgcaggttgtccgttatagcctgttgattcacgcggctgcgggtatcatcctgatccacgccatcct

SEQ ID NO: 586618 - DNA, 75 bp, synthetic construct
  source 1..75: mol_type = other DNA
gatcaggagtgtggttcaacctgcgcggcggatttccgcgatcgcttaggcgtaggccgaaagctggcaattcag

SEQ ID NO: 586619 - DNA, 75 bp, synthetic construct
  source 1..75: mol_type = other DNA
taccgtctccgaagtggaatcgacaagataaccgcgcaggttaactacctgcaggaatacatcaccacgcaatgc

SEQ ID NO: 586620 - DNA, 75 bp, synthetic construct
  source 1..75: mol_type = other DNA
cctgtatatgttcgcgtctggtcaatggaaggtagggaaggcgtaacttataatatttcatcagatggcggtatt

SEQ ID NO: 586621 - DNA, 75 bp, synthetic construct
  source 1..75: mol_type = other DNA
caacgaaaacctgatgatcctgctcgccaccgcaggctgtaactacatcatggggatgccgctgggcgatgacat

SEQ ID NO: 586622 - DNA, 75 bp, synthetic construct
  source 1..75: mol_type = other DNA
aagatattccgtggctgttgaacattgtcgaagtattgaaaggcaatgagcataaagtggcggatgtcggtaagt

SEQ ID NO: 586623 - DNA, 75 bp, synthetic construct
  source 1..75: mol_type = other DNA
aatcattttgtgctggcaaatcagtggctggaacaacgtggcgaaaagccaattgactggatgcctgtactaccg

SEQ ID NO: 586624 - DNA, 75 bp, synthetic construct
  source 1..75: mol_type = other DNA
gggcgttctgctgctcaatactgtgttgacggttcgcgcaggtcaggcgcattcccacgccagcctcggttggga

SEQ ID NO: 586625 - DNA, 75 bp, synthetic construct
  source 1..75: mol_type = other DNA
gtatttcaatattgcccgcattctctatttgcaggttgataacgttttcggtttgttcttgctgtttccgtcgat

SEQ ID NO: 586626 - DNA, 75 bp, synthetic construct
  source 1..75: mol_type = other DNA
ggggccatttgtgatacccgcagcccaggcactgggcgcagatctgggtaaatccgtaatggcgatcgcctacgg

SEQ ID NO: 586627 - DNA, 75 bp, synthetic construct
  source 1..75: mol_type = other DNA
gcactgattaacttcgccgttccgtctggcggcggtcactgggttattcagggacctttcgtgatacccgcagcc

SEQ ID NO: 586628 - DNA, 75 bp, synthetic construct
  source 1..75: mol_type = other DNA
gaaaaatatgctcgcgggcttgctatctcgctgacggacaggcaaattgatgaccagcttttaaaccgactccgt

SEQ ID NO: 586629 - DNA, 75 bp, synthetic construct
  source 1..75: mol_type = other DNA
tcacctgatccccggcgttaaatcggtagaggaacagacgttgccgcagctcaaaacagcggcgcaggctgcgct

SEQ ID NO: 586630 - DNA, 75 bp, synthetic construct
  source 1..75: mol_type = other DNA
tggcgaaaccattaattgacaccgggcaatatcgcagagcgattacccatgttgtgagggataaagatgccgact

SEQ ID NO: 586631 - DNA, 75 bp, synthetic construct
  source 1..75: mol_type = other DNA
tcaagccaaaccgccttgaagcggaaaccctgagtgggattgctttgtcagggcgtgaagatgtggcaaaagttg

SEQ ID NO: 586632 - DNA, 75 bp, synthetic construct
  source 1..75: mol_type = other DNA
tgttcaggcttatattggcactctgaatgttaaatatcccggacaggtaaatataacctcgacaactcttgatgt

SEQ ID NO: 586633 - DNA, 75 bp, synthetic construct
  source 1..75: mol_type = other DNA
tattgagatttatgatcctgtatcaaggcagttacaacgatacgaggtaattacagcgagtgtagatccttccgc

SEQ ID NO: 586634 - DNA, 75 bp, synthetic construct
  source 1..75: mol_type = other DNA
tcaaaacagcggcgcaggctgcgcttgatggaaatgcggcgggtgcggaaagatcgctcaaccgtgccggaacgc

SEQ ID NO: 586635 - DNA, 75 bp, synthetic construct
  source 1..75: mol_type = other DNA
tggatcaacaatagcaaagtctacgccgtgaagatgaatggtcaaaccgtaggccgtgaaggtgcgcgtaatctc

SEQ ID NO: 586636 - DNA, 75 bp, synthetic construct
  source 1..75: mol_type = other DNA
aaacttatgaaaagtggcatgcggatataaagaagtcgataagaacaagaaatgatgagaatatagaaaaattat

SEQ ID NO: 586637 - DNA, 75 bp, synthetic construct
  source 1..75: mol_type = other DNA
tgcatatgtcaatgattttaacttaagcaatcaagaaaaatcacgcttaatactaaggttatttgatgatgttaa

SEQ ID NO: 586638 - DNA, 75 bp, synthetic construct
  source 1..75: mol_type = other DNA
cctggttccatcaacatggcctgaaccgactggtattgagcatgggcggcgacggcgtttattacagcgatatca

SEQ ID NO: 586639 - DNA, 75 bp, synthetic construct
  source 1..75: mol_type = other DNA
gaaccgattggttctgagcatgggtggcgatggtgtttattacagtgatatcagcggcgaaaacggctggtctgc

SEQ ID NO: 586640 - DNA, 75 bp, synthetic construct
  source 1..75: mol_type = other DNA
attatcttcgacaacgatgaggataaaacagattcggcagcactgttgccctgtatcgaacaggccagggagggt

SEQ ID NO: 586641 - DNA, 75 bp, synthetic construct
  source 1..75: mol_type = other DNA
tggaagcaaaatcatactggcactatgaacttggaggaattacccgtaatcagcacttattacacctgattaatc

SEQ ID NO: 586642 - DNA, 75 bp, synthetic construct
  source 1..75: mol_type = other DNA
agcagcaaatgaatataataaattaaagaatgaagttagaatatttagggaaatattgacttctaattttgattt

SEQ ID NO: 586643 - DNA, 75 bp, synthetic construct
  source 1..75: mol_type = other DNA
acgagcagttggccaccgtcacccgccaggccaaggacaacgagctgcccgatgccatcctcaccgagtcagggc

SEQ ID NO: 586644 - DNA, 75 bp, synthetic construct
  source 1..75: mol_type = other DNA
taccgcgataacgccatcacttacaaagagctgcgcgataaaaaagtcagtgagctgaagctggcgaacgccacc

SEQ ID NO: 586645 - DNA, 75 bp, synthetic construct
  source 1..75: mol_type = other DNA
tcctgccaccagatataaactccggtctttaccatttccacgtcaacgacgacggcgaaatcgtgtatggtattg

SEQ ID NO: 586646 - DNA, 75 bp, synthetic construct
  source 1..75: mol_type = other DNA
gtgatcagtgaaaacggcgctaccaccattaatccggataccaacggcgatctctccacgctcgcccagcttctt

SEQ ID NO: 586647 - DNA, 75 bp, synthetic construct
  source 1..75: mol_type = other DNA
cgatgggcttacaaaaaaacgcaacatgacgttaatcaaggctttactaattataatattgacaaggagaaatca

SEQ ID NO: 586648 - DNA, 75 bp, synthetic construct
  source 1..75: mol_type = other DNA
ggtctgtttggtgcacgctactcccactatccctgcgtgggcggcctctatgctgtgctccgtctgatcaaggat

SEQ ID NO: 586649 - DNA, 75 bp, synthetic construct
  source 1..75: mol_type = other DNA
ctgatgacattctggattacgtggttgttgatacagataaaacaggacaaattcgtgtcagagtggtggaaggaa

SEQ ID NO: 586650 - DNA, 75 bp, synthetic construct
  source 1..75: mol_type = other DNA
ggactgcgggccgatattctttctcctgtcaaagaaaccggcacattgctgggcgtggtaagttcacaagcggcg

SEQ ID NO: 586651 - DNA, 75 bp, synthetic construct
  source 1..75: mol_type = other DNA
ctgatcaaggatgacagccagcaaatcccgaccttcagtatgctgggctaccaccctgagcaggagcgcaccctg

SEQ ID NO: 586652 - DNA, 75 bp, synthetic construct
  source 1..75: mol_type = other DNA
ggcgctgcacaacgccggcatagccccggagtatatcgctgccgtttcggcatgttcgatgcgtgaaggcattgt

SEQ ID NO: 586653 - DNA, 75 bp, synthetic construct
  source 1..75: mol_type = other DNA
actgccgtcgcccctggcatgaggtggctaccgagcgcacggatgatgaacggcgcctggtggaaagcgtctgca

SEQ ID NO: 586654 - DNA, 75 bp, synthetic construct
  source 1..75: mol_type = other DNA
ctgcccgaaatgccagaacaacagcattgccgattccaactcgatgattgccaccgacctgcgtcagaaagtgta

SEQ ID NO: 586655 - DNA, 75 bp, synthetic construct
  source 1..75: mol_type = other DNA
aacgatactcgccgtgtggtgattgagcgcagtattgcgcaggcaatgcagcatttgtcgccgcaacaaagtaaa

SEQ ID NO: 586656 - DNA, 75 bp, synthetic construct
  source 1..75: mol_type = other DNA
cctgccaacgatactcgccgtgcggtgattgagcgcagtatcgcgcaggcgatgcagcatttgtcgccgcaggag

SEQ ID NO: 586657 - DNA, 75 bp, synthetic construct
  source 1..75: mol_type = other DNA
ttgtggctggcgtcagctactaccagactggaaattatcagcaggtgaaaatctggcagcaggccacggcacagg

SEQ ID NO: 586658 - DNA, 75 bp, synthetic construct
  source 1..75: mol_type = other DNA
ttacgatccgccgttaacgccgctgaccgtgctgctgtgggtgcttccggtagtggctattggcattggcggttg

SEQ ID NO: 586659 - DNA, 75 bp, synthetic construct
  source 1..75: mol_type = other DNA
aaaaaggcacgtactgaagcagaacggtttacgaaagcagtttttgaccgcattgaatacatccggggagagtct

SEQ ID NO: 586660 - DNA, 75 bp, synthetic construct
  source 1..75: mol_type = other DNA
tgcgtgtacatcaggacctgctgcggcatgatcttcgcatccttgtaatagacctcgacccacaggcctccagta

SEQ ID NO: 586661 - DNA, 75 bp, synthetic construct
  source 1..75: mol_type = other DNA
gggtacggcgcatcaactgatgcgcgtgctttcagatgttctgctgaagtatgagccacgtattaagcgcgtcga

SEQ ID NO: 586662 - DNA, 75 bp, synthetic construct
  source 1..75: mol_type = other DNA
atgtatcttattattacctctgatatcatgaaaaaaataccacctaaaataatgagtaacattattgctgtagta

SEQ ID NO: 586663 - DNA, 75 bp, synthetic construct
  source 1..75: mol_type = other DNA
tcactatttttgtatgtaaccttaaaggtggtggttccaagacggtttctaccgcttcattatcccatgcttttc

SEQ ID NO: 586664 - DNA, 75 bp, synthetic construct
  source 1..75: mol_type = other DNA
ttgaaaaaagctcgtaccgaagcggaacgatttactaaagccgtttttgaccgcattgaatacattcggggagca

SEQ ID NO: 586665 - DNA, 75 bp, synthetic construct
  source 1..75: mol_type = other DNA
cgcctcggtggtgaactgctacgccagttggtgagaactgaccacagcaatatccgtgtgttaagcatgtatgcg

SEQ ID NO: 586666 - DNA, 75 bp, synthetic construct
  source 1..75: mol_type = other DNA
agaactgcggctggccagcgaggcagatcttcaccccggaacacttgaatttgagcgccatcgcctgactcgtgc

SEQ ID NO: 586667 - DNA, 75 bp, synthetic construct
  source 1..75: mol_type = other DNA
cgctgggcaatgccagtattgcgaccgatgcatacgctaatgcgtatcgactcgatcccaaaaatagtgatgccg

SEQ ID NO: 586668 - DNA, 75 bp, synthetic construct
  source 1..75: mol_type = other DNA
ctgccgggaattatcatcgcgctgatcgttgctggcgttggctattatcagaccgggaattatcagcaggtgaaa

SEQ ID NO: 586669 - DNA, 75 bp, synthetic construct
  source 1..75: mol_type = other DNA
gccgcctgaagaaaatcatcccgcaactgaaaacgccaaatgtggacggtttcagagcgtatgtcagggcgtttg

SEQ ID NO: 586670 - DNA, 75 bp, synthetic construct
  source 1..75: mol_type = other DNA
ttgaacaggtccagatattggaacaggccgccgccgataaaatgccgggtgctgaaaaagcggcgctacataaac

SEQ ID NO: 586671 - DNA, 75 bp, synthetic construct
  source 1..75: mol_type = other DNA
tgaagccggccaggatgagaccgtcactgaatggatggcaatggagatggctgatgaatacctcatcggtattga

SEQ ID NO: 586672 - DNA, 75 bp, synthetic construct
  source 1..75: mol_type = other DNA
ttgccgaagctgaggccagattacagcgcctgaaggcgaagagccgaagcctggacacggcgcaaaaagtcattg

SEQ ID NO: 586673 - DNA, 75 bp, synthetic construct
  source 1..75: mol_type = other DNA
gaggtgacacgacaggctgatgtgacgcgcatactgccgctgattaacgagctggaagcgctgccaggacagtga

SEQ ID NO: 586674 - DNA, 75 bp, synthetic construct
  source 1..75: mol_type = other DNA
aatactctctatctgacccaatcttgcgtggaaaaatttgggtcgcagttagaggctcaagatcttttcaataag

SEQ ID NO: 586675 - DNA, 75 bp, synthetic construct
  source 1..75: mol_type = other DNA
atcacagcgcgacaccctcagaacggtgacagcacagctggcggtggccggcaaaccggatgaacagatcgccgt

SEQ ID NO: 586676 - DNA, 75 bp, synthetic construct
  source 1..75: mol_type = other DNA
caactggacgtgctccgtcaggggctgacgacgctaaaacaggatgtggcatcacagcgcgacaccctcagaacg

SEQ ID NO: 586677 - DNA, 75 bp, synthetic construct
  source 1..75: mol_type = other DNA
gcgggaagatctgcgagagagtcagtgactaccgtacagccgccttttttgaaataggccgcctgcttacactgt

SEQ ID NO: 586678 - DNA, 75 bp, synthetic construct
  source 1..75: mol_type = other DNA
atggctcgttacgatctcgttgaccgactcaatactacctttcgtcagatggagcaagaactggccgcgtttgcc

SEQ ID NO: 586679 - DNA, 75 bp, synthetic construct
  source 1..75: mol_type = other DNA
atgtgcaacaccgttataaaccacaggcgcagccgcttcgtttgatcattccccggctgcacctgtatgtagcag

SEQ ID NO: 586680 - DNA, 75 bp, synthetic construct
  source 1..75: mol_type = other DNA
gactcaacaccacctttcgccagattgaacaagaactggcggcgtttgctgctgaacttgagcagcacaagttgc

SEQ ID NO: 586681 - DNA, 75 bp, synthetic construct
  source 1..75: mol_type = other DNA
tctaaccgcggtgctagtagcgcaatggcgaaatacctgtctgaacgcgaaaaccgcgccgatgaagttgccggt

SEQ ID NO: 586682 - DNA, 75 bp, synthetic construct
  source 1..75: mol_type = other DNA
ccctagttcaacgtggttacgtcgagccctatgatgatgagcgtgtcgttcactacttcattccgggtatctatt

SEQ ID NO: 586683 - DNA, 75 bp, synthetic construct
  source 1..75: mol_type = other DNA
gcaccatagctcttcgtgcaagcgcattacttaaggccatgagtcaggatattgaagagcagcgcaaagagttca

SEQ ID NO: 586684 - DNA, 75 bp, synthetic construct
  source 1..75: mol_type = other DNA
gtgaagaattactttccgattttatagtaccgtctattatccctggtgttgatgtaatccccgcttccattgacg

SEQ ID NO: 586685 - DNA, 75 bp, synthetic construct
  source 1..75: mol_type = other DNA
ggaaaacgcacgacgtgctgaccggaagtgatgacggtcgccacagcaacacgtctctgacgtggggagctggcg

SEQ ID NO: 586686 - DNA, 75 bp, synthetic construct
  source 1..75: mol_type = other DNA
tgccgggaacggcgcatcaactgatgcgtgttctttcagatgttctgctgaagtatgagccacgtattaagcgtg

SEQ ID NO: 586687 - DNA, 75 bp, synthetic construct
  source 1..75: mol_type = other DNA
aggttgctcaaagagcaaatagaatgctcaatgttctgactgaacaagtacagttgcaaaaggatgagctacacg

SEQ ID NO: 586688 - DNA, 75 bp, synthetic construct
  source 1..75: mol_type = other DNA
tcgttctcgatccgggtcacggaggaattgataccggggcgattggccgcaacggttcaaaagaaaaacacgtag

SEQ ID NO: 586689 - DNA, 75 bp, synthetic construct
  source 1..75: mol_type = other DNA
ggtgcaaaccgatactattaaaaacagcctgacgctcggctcgcatattctgaagaagattaagccggtgcataa

SEQ ID NO: 586690 - DNA, 75 bp, synthetic construct
  source 1..75: mol_type = other DNA
ttgttctcgatccaggccacggcggaattgataccggagcgattggtcgcaatggatcgaaagaaaaacatgtgg

SEQ ID NO: 586691 - DNA, 75 bp, synthetic construct
  source 1..75: mol_type = other DNA
atgaacaatattgagcagttacggaaagttgctacacgtgcaggtaagcttctgacatctttgagcgagagtatc

SEQ ID NO: 586692 - DNA, 75 bp, synthetic construct
  source 1..75: mol_type = other DNA
atgttggtggtggcgtagcgcgcggactgcttgttggcatgctggtgacagcaatttcactgttttttgtgccgt

SEQ ID NO: 586693 - DNA, 75 bp, synthetic construct
  source 1..75: mol_type = other DNA
tatgaaccggctacaaccgctgattaacgagctggagaagctacccaaaccacctgcgaaaccgcagaaccacta

SEQ ID NO: 586694 - DNA, 75 bp, synthetic construct
  source 1..75: mol_type = other DNA
cctgacaatcatgataaaatcgtttcttccgtagcctgccatttcacgctggcgcgcgatatctggctgcaacca

SEQ ID NO: 586695 - DNA, 75 bp, synthetic construct
  source 1..75: mol_type = other DNA
cccgttacctgccgacatcaagctgcgtcaggactcactgcgtctgcactgtacgccagccattaacctgtttac

SEQ ID NO: 586696 - DNA, 75 bp, synthetic construct
  source 1..75: mol_type = other DNA
tgatcagaagccgctcagaaaagtccgccctggctgctcagaaggtgctgtctgacaatcatgataaaatcgttt

SEQ ID NO: 586697 - DNA, 75 bp, synthetic construct
  source 1..75: mol_type = other DNA
ccccggtttgctgctgtatggatgttggcaccattatggacaactccgattgcaccgcgtcttatagccgcgtgt

SEQ ID NO: 586698 - DNA, 75 bp, synthetic construct
  source 1..75: mol_type = other DNA
ggtgtgcgcctggatatcgatttcacttttgcctgcgaagctgaaatgctgattttccagttgggtctgcgttaa

SEQ ID NO: 586699 - DNA, 75 bp, synthetic construct
  source 1..75: mol_type = other DNA
aaactggatgccatagaaaaactcgaaaccaaacctgttgacaggttgtttaaaggcgtgccggttcgcgggctg

SEQ ID NO: 586700 - DNA, 75 bp, synthetic construct
  source 1..75: mol_type = other DNA
acggcctcgctggtatgcaccaaccggatgttgcccgcgtcactgcatgtgggtgatatctgtgaagccgtgaat

SEQ ID NO: 586701 - DNA, 75 bp, synthetic construct
  source 1..75: mol_type = other DNA
cgacggcgattctggcaacgctggcggcgctgcgcggtaaagtcggtggtacggcgcgtattattgccgtgctgg

SEQ ID NO: 586702 - DNA, 75 bp, synthetic construct
  source 1..75: mol_type = other DNA
gtctgggcgaaagcgacttctttgttatcgaagcggatgagtacgactgcgccttcttcgacaaacgctctaaat

SEQ ID NO: 586703 - DNA, 75 bp, synthetic construct
  source 1..75: mol_type = other DNA
ccgtacgtttcatcgcgtttctcggcgtgtcgatgcccaacttctggctggcgtttttactggtgatggcgtttt

SEQ ID NO: 586704 - DNA, 75 bp, synthetic construct
  source 1..75: mol_type = other DNA
accgctcggtatctgggcggcgcgccatcgcgatcgtctgccggatttcgccgtacgtttcatcgcgtttctcgg

SEQ ID NO: 586705 - DNA, 75 bp, synthetic construct
  source 1..75: mol_type = other DNA
cgccgcctcggtgatcatttttctgatgctgcgcctcggcaccggcgacccggcgctcgattatctgcgtctgtc

SEQ ID NO: 586706 - DNA, 75 bp, synthetic construct
  source 1..75: mol_type = other DNA
ttggcgcttccggtaccgggattcaggagctgtgctcgcagattgcgctggcaggggagggaattactcacgcga

SEQ ID NO: 586707 - DNA, 75 bp, synthetic construct
  source 1..75: mol_type = other DNA
cgctatcaacctggataagtgaactgattgctgccggttatctctggctttatcaggcggttcctgcatttgcag

SEQ ID NO: 586708 - DNA, 75 bp, synthetic construct
  source 1..75: mol_type = other DNA
cttacagaaataaaaattactgtcgaacgtgatggtcagttgcatgatgtatttattgctgtgggaggcggggag

SEQ ID NO: 586709 - DNA, 75 bp, synthetic construct
  source 1..75: mol_type = other DNA
tcatttactttgcgtattaacggtaaagaccgtgatttgctggcggttgataaaattcatgtcgacttaaactgg

SEQ ID NO: 586710 - DNA, 75 bp, synthetic construct
  source 1..75: mol_type = other DNA
gatgattttacggacgtattaccccacggcacggcgcagataagcgctggtgagccgctgttatccatcattcgc

SEQ ID NO: 586711 - DNA, 75 bp, synthetic construct
  source 1..75: mol_type = other DNA
agcagggcggtatctgttcaccgatgacgggagagattgtgccgctcattcacgtcgctgataccacgtttgcca

SEQ ID NO: 586712 - DNA, 75 bp, synthetic construct
  source 1..75: mol_type = other DNA
cgtcttcctctgcgaacgcgatgcgcagaaaaaagtggtggcgggatcagcggcgttgacaggtctgtttggtat

SEQ ID NO: 586713 - DNA, 75 bp, synthetic construct
  source 1..75: mol_type = other DNA
cgattggtcttggcgggcgcgacctcagccgtgaagtgggcggcatcagtgcgctgacggcgctggaaatgctca

SEQ ID NO: 586714 - DNA, 75 bp, synthetic construct
  source 1..75: mol_type = other DNA
tgacccgcaatgccgctcgcagcaaatcgccacgctggaagatgcggggatcgcggtagtgagttcgctgccgga

SEQ ID NO: 586715 - DNA, 75 bp, synthetic construct
  source 1..75: mol_type = other DNA
gctgtttttaggttataccccggcggtggcccgcgacgagaatgtctggtttgcctcctcgctggatgaggccgc

SEQ ID NO: 586716 - DNA, 75 bp, synthetic construct
  source 1..75: mol_type = other DNA
ggcggtaatttaacgcatcagataaacttttttatctaccgtttgctttcattattatcgtgttgctggtggtat

SEQ ID NO: 586717 - DNA, 75 bp, synthetic construct
  source 1..75: mol_type = other DNA
taaaagccgatgaacaaggcgcatcatggtatcgcattattaccatgtatgaagaccagcagcctgataactggc

SEQ ID NO: 586718 - DNA, 75 bp, synthetic construct
  source 1..75: mol_type = other DNA
attcgaaatctatttttattatcctggcggtaatttattgaacgcatcagataaacttttttatctgccgtttgg

SEQ ID NO: 586719 - DNA, 75 bp, synthetic construct
  source 1..75: mol_type = other DNA
ccggtacccatggcaaaacaaccacggcggggatggcgacctggattctggagcagtgcggctataagccgggtt

SEQ ID NO: 586720 - DNA, 75 bp, synthetic construct
  source 1..75: mol_type = other DNA
cggtgaatgtctggccggagaatgctgaagaccggagctggactgtgacggtcagcgatgaaagcgtggtgtcgg

SEQ ID NO: 586721 - DNA, 75 bp, synthetic construct
  source 1..75: mol_type = other DNA
gcgcgtcaaaaaccaaccaggcattaatggcgttaagaacattatcgccgtcagctcaggcaagggcggcgtagg

SEQ ID NO: 586722 - DNA, 75 bp, synthetic construct
  source 1..75: mol_type = other DNA
atgctgggcgcggaaaaccaacgtccaacctcaccggacggtactcacatggcacctatcatgtctcatggcctg

SEQ ID NO: 586723 - DNA, 75 bp, synthetic construct
  source 1..75: mol_type = other DNA
ctcaagggaatgggataggatttattgcccaagcgagtggggggtggccaatagtgctgaggttgacttcgctga

SEQ ID NO: 586724 - DNA, 75 bp, synthetic construct
  source 1..75: mol_type = other DNA
catacgctggtgacgtttgagtggcagtcatcgtacagcgccgctctgagcattgcatgggacaacatcacacac

SEQ ID NO: 586725 - DNA, 75 bp, synthetic construct
  source 1..75: mol_type = other DNA
gctgtaccgggctgagagcggtgggtgagagcgtgtttgccgggtgcaccggtgccacgacgtttgaggatacct

SEQ ID NO: 586726 - DNA, 75 bp, synthetic construct
  source 1..75: mol_type = other DNA
tgtttgctacacccgggagatgctggtgcaatacggcattgcagcagaaaaactgaatcgccggctcagcggaca

SEQ ID NO: 586727 - DNA, 75 bp, synthetic construct
  source 1..75: mol_type = other DNA
cacgatgtggcgctgaacggcagttaccgtaccccgtggacgacgctgaacggcagctatagccagggcgaaggc

SEQ ID NO: 586728 - DNA, 75 bp, synthetic construct
  source 1..75: mol_type = other DNA
catcggcgcgctctccttcgacgtgactcactcgcggctgaagagcgatacccttgacgagcacggtcaaagcta

SEQ ID NO: 586729 - DNA, 75 bp, synthetic construct
  source 1..75: mol_type = other DNA
ggaaagcgcattagcctgttgggggatagatcagtgagcagagtcgccgcgattatttatgctctggttatctgc

SEQ ID NO: 586730 - DNA, 75 bp, synthetic construct
  source 1..75: mol_type = other DNA
ttatgtcgtaacgctgacctcccgtggtcaggatgtggcagaaggtcgtgcccgcgttgccggtgtcaagcgtcc

SEQ ID NO: 586731 - DNA, 75 bp, synthetic construct
  source 1..75: mol_type = other DNA
ttactacaacctgaacgacgcactgtacgccgtcgatcagacgcgcaacaaacgtaataactacgtcctgtggag

SEQ ID NO: 586732 - DNA, 75 bp, synthetic construct
  source 1..75: mol_type = other DNA
tttaatgcagtgtattagttcattacataaaaggctgttcgatatttctatgatacccggatgggatattgatca

SEQ ID NO: 586733 - DNA, 75 bp, synthetic construct
  source 1..75: mol_type = other DNA
ataatatttattttgcgaagacatattattcacctaatgtttatattgaaaaaatatcaaaaatcattaatgagg

SEQ ID NO: 586734 - DNA, 75 bp, synthetic construct
  source 1..75: mol_type = other DNA
tgactgtatttctgcagaatttcttgcccagcatcaggagtttattcgcggtgcaaaggttattgtcgcggattg

SEQ ID NO: 586735 - DNA, 75 bp, synthetic construct
  source 1..75: mol_type = other DNA
gaatataccaacaaccctgaattatcaattgccaatgttacatcgttagtggagaacacagaatgtctgaattaa

SEQ ID NO: 586736 - DNA, 75 bp, synthetic construct
  source 1..75: mol_type = other DNA
cgagcaggagctggtgggcgagcaaggtcactggcaggcgaaaaagctgaccactgacgcttccgaatgggaagt

SEQ ID NO: 586737 - DNA, 75 bp, synthetic construct
  source 1..75: mol_type = other DNA
agcaacggcggttttggtggaattcatcagaaactgctggatgggttagcgaagaaagcggaagccgcgcagtaa

SEQ ID NO: 586738 - DNA, 75 bp, synthetic construct
  source 1..75: mol_type = other DNA
gaagcttttttttgcaaagattgttaaccatttacacggttcagattttgtctattttagagaaaatcaaaaaaa

SEQ ID NO: 586739 - DNA, 75 bp, synthetic construct
  source 1..75: mol_type = other DNA
aaatacctcaagttatttatcacttctcgataaaaccggtgaaatgttggtggcaataaatgacatgacgattag

SEQ ID NO: 586740 - DNA, 75 bp, synthetic construct
  source 1..75: mol_type = other DNA
ggacgaaatcgccgagctactgcggctggaggatggcacccattgcgaggaagccagcggcctggccgagcacaa

SEQ ID NO: 586741 - DNA, 75 bp, synthetic construct
  source 1..75: mol_type = other DNA
caacgtgacgtagcagaactcgatgccagatatacaaaggaacttgctgatgctaacgcgactatcgaaagtctc

SEQ ID NO: 586742 - DNA, 75 bp, synthetic construct
  source 1..75: mol_type = other DNA
aaatacctccagctacttatcgttgctcgataataccggagaaatgcttgtcgcgataaatgatatgaatattag

SEQ ID NO: 586743 - DNA, 75 bp, synthetic construct
  source 1..75: mol_type = other DNA
gccgatcaaaaccaatgttattaatgttaccggagcgggcgatgccatgatggcggggcttgcttcgtgttgggt

SEQ ID NO: 586744 - DNA, 75 bp, synthetic construct
  source 1..75: mol_type = other DNA
caatggcgctggccagtgagtataccaataatcctgaattatctgttgctaacgttaaaagcttagtggagaaac

SEQ ID NO: 586745 - DNA, 75 bp, synthetic construct
  source 1..75: mol_type = other DNA
gttactattcagatctgtcctcatatgaagttctttatattggacaagccgtaggtaaaaatggtagcaggaatg

SEQ ID NO: 586746 - DNA, 75 bp, synthetic construct
  source 1..75: mol_type = other DNA
agacgatgcaactgatataatatgtaactatccattcagagaagttattagtataaataatgaaggggaggaggt

SEQ ID NO: 586747 - DNA, 75 bp, synthetic construct
  source 1..75: mol_type = other DNA
aagatagatttagtttctcatcagcaaagattatccttttttcgaccaactggatttaatgttctaccagacatt

SEQ ID NO: 586748 - DNA, 75 bp, synthetic construct
  source 1..75: mol_type = other DNA
ggctgatagcctggtggggcctgccgatgggcttaaacagtgcctttgggccgtctggtctggtggcgctgccgc

SEQ ID NO: 586749 - DNA, 75 bp, synthetic construct
  source 1..75: mol_type = other DNA
cctgtcaaagaaaccggcacattgctgggcgtggtaagttcacaagcggcggaactctgcggtctgaaggcgggc

SEQ ID NO: 586750 - DNA, 75 bp, synthetic construct
  source 1..75: mol_type = other DNA
tgacagccggtacgctgaccagccagtggctgaagcagaccgacaaatcgattctgaatagtgaagacgatgcgg

SEQ ID NO: 586751 - DNA, 75 bp, synthetic construct
  source 1..75: mol_type = other DNA
gaaggaaccgcgttgctgcgcggcggcaatgattcgccgggctatcatcgttgctgccgtctgcctttccgtcgc

SEQ ID NO: 586752 - DNA, 75 bp, synthetic construct
  source 1..75: mol_type = other DNA
atgtctgtacagcaaatcgactgggatctggccctgatccagaaatacaactattccgggccacgatacacctcg

SEQ ID NO: 586753 - DNA, 75 bp, synthetic construct
  source 1..75: mol_type = other DNA
ggatttgcacttcgctgattactttgcggaagatctcaagctgctcgccccgttagcaaaagatgggctggtgga

SEQ ID NO: 586754 - DNA, 75 bp, synthetic construct
  source 1..75: mol_type = other DNA
tattacactccagccatgagtgcgggtgtcaaggcctggcatggcggggttgataattgctacgttaccagtact

SEQ ID NO: 586755 - DNA, 75 bp, synthetic construct
  source 1..75: mol_type = other DNA
ggcagcaagtaaaaattaaaattatgccgaataaactatccactaataaagagagtatttttttatctgaatgtt

SEQ ID NO: 586756 - DNA, 75 bp, synthetic construct
  source 1..75: mol_type = other DNA
gatcgcagcctgtttccctatgcgcgacctaatcatttttatctgacggaaggtgagcaactattgtttgctgcg

SEQ ID NO: 586757 - DNA, 75 bp, synthetic construct
  source 1..75: mol_type = other DNA
tgggccaggtaaagcgcatcgcgccgcaaaagcgatgagcgagctgctgggagaagcaccggtacaggatgccgc

SEQ ID NO: 586758 - DNA, 75 bp, synthetic construct
  source 1..75: mol_type = other DNA
tgttacaggttaacgacaccgctcagggcgcagcaacggtgtggatggcctcacctgaactcgaaaactatgagc

SEQ ID NO: 586759 - DNA, 75 bp, synthetic construct
  source 1..75: mol_type = other DNA
cgcctggagcagattgaaaaccgcagtacgacccgtaatggtgttatcaacatcaccttttcggtcgcaccggga

SEQ ID NO: 586760 - DNA, 75 bp, synthetic construct
  source 1..75: mol_type = other DNA
ccgacccgttgatcgcctgtttacgggtattcccgttcgggggctggcctccacgctgtatctgcacccggagcc

SEQ ID NO: 586761 - DNA, 75 bp, synthetic construct
  source 1..75: mol_type = other DNA
tctattgatattgcacgtaaaataagttctaaattatctattccactaccacgaattaaaactaatgaacctgca

SEQ ID NO: 586762 - DNA, 75 bp, synthetic construct
  source 1..75: mol_type = other DNA
gtcatgaggtgaatattgataagtgtaatgtctgctgtggttattttgattctattgatattgcacgtaaaataa

SEQ ID NO: 586763 - DNA, 75 bp, synthetic construct
  source 1..75: mol_type = other DNA
acatgaaagagaaggatgttgccagtatgtcggggcgtttgcttaaccgctggggaagagtgaaaaagccacagc

SEQ ID NO: 586764 - DNA, 75 bp, synthetic construct
  source 1..75: mol_type = other DNA
tgatgacttcagcacaaggcattcttccggcgatggcagtctacgctggcgggattctggtggcatgggtttgcg

SEQ ID NO: 586765 - DNA, 75 bp, synthetic construct
  source 1..75: mol_type = other DNA
tccggcaatggcggtttatgctggcggaattctggtggcatgggtttgcggatttattttcaccacgctctttgg

SEQ ID NO: 586766 - DNA, 75 bp, synthetic construct
  source 1..75: mol_type = other DNA
aaggtatgtcgtggctgtttatgcacctgaacagtaatccgctcggttgtgcggttttagccgggctgttcctga

SEQ ID NO: 586767 - DNA, 75 bp, synthetic construct
  source 1..75: mol_type = other DNA
agttcacaaccaatgccggggaaagccgggttgacaaggttctgccctctgttgatacacagaaagaaccacctc

SEQ ID NO: 586768 - DNA, 75 bp, synthetic construct
  source 1..75: mol_type = other DNA
tcgccaactttgatcgccacgcaatccatcatccgcagacggcgcggctgtcacaacaaaagctggatgccattg

SEQ ID NO: 586769 - DNA, 75 bp, synthetic construct
  source 1..75: mol_type = other DNA
tgctggggattgcgacgttaatcgccacggtgatgcacgttccggcagatgcccagggaacgctgcccgatgcgc

SEQ ID NO: 586770 - DNA, 75 bp, synthetic construct
  source 1..75: mol_type = other DNA
ttcctgacgcaatcgggctatcagtttatcggtatggatcactttgcccgtccggatgacgagctggcggtggcc

SEQ ID NO: 586771 - DNA, 75 bp, synthetic construct
  source 1..75: mol_type = other DNA
ggttccttgccaaccgggtgtgtggagagaagctgccgcaggtgtaccgtgcactggggatggataaaccggaac

SEQ ID NO: 586772 - DNA, 75 bp, synthetic construct
  source 1..75: mol_type = other DNA
cggccggatggtataccgccgggccattgcggggctgaatgtatcagggctgaagaaaaacgcgcgggatatcag

SEQ ID NO: 586773 - DNA, 75 bp, synthetic construct
  source 1..75: mol_type = other DNA
cagccgctaaaaaaggtgaaaaagggtaacattacgtgggcctcttttaacctcagcgaacaggaccttgacgaa

SEQ ID NO: 586774 - DNA, 75 bp, synthetic construct
  source 1..75: mol_type = other DNA
tgagctgaagcaggcgaccgccaccatcgctgacatgcagcagcgtcagcgtgatgttgctgcgctcgatgcaaa

SEQ ID NO: 586775 - DNA, 75 bp, synthetic construct
  source 1..75: mol_type = other DNA
tatgcgatcagctttatacccacctcgcccaggcgttaaatcgcagtttgtttgccatcggtattgataacaccc

SEQ ID NO: 586776 - DNA, 75 bp, synthetic construct
  source 1..75: mol_type = other DNA
aatggtgaaaaaccggattatgcaccagtgaacatctgctggttcatcatccgatgctggaaggcattctcctgt

SEQ ID NO: 586777 - DNA, 75 bp, synthetic construct
  source 1..75: mol_type = other DNA
ggccatgctgtccctgaactgcctgattgtaaacaccatggaaaaactggagttttctgtagagatgggaggaaa

SEQ ID NO: 586778 - DNA, 75 bp, synthetic construct
  source 1..75: mol_type = other DNA
ccgcaggcggactgtggtttggctggagtggtgaaacagggaatgaggatcagccgctaaaaaaggtgaaaaagg

SEQ ID NO: 586779 - DNA, 75 bp, synthetic construct
  source 1..75: mol_type = other DNA
aaaaattggcacaggtgcaactcaggcatcatggcgactggcgggtgtgccggatgtctggagctggcttgaaat

SEQ ID NO: 586780 - DNA, 75 bp, synthetic construct
  source 1..75: mol_type = other DNA
agctggacgaattaatggtaaatacgggcaattaggctggacgccgctttattatttgaatcagcattttgaccg

SEQ ID NO: 586781 - DNA, 75 bp, synthetic construct
  source 1..75: mol_type = other DNA
cttgcggaaaaataccatacgcaactgctggggcaaatgccgttacatatcagtctgcgtgaagatctcgacaaa

SEQ ID NO: 586782 - DNA, 75 bp, synthetic construct
  source 1..75: mol_type = other DNA
cgcatcaccggggcgaaagctatcgactggaaactgtcgcataacatagccactctgaaacgcgtgaagaatcag

SEQ ID NO: 586783 - DNA, 75 bp, synthetic construct
  source 1..75: mol_type = other DNA
ccgggaattaacggcgtgaagaacattatcgcggtcagttccggcaaaggtggcgtgggtaaatcctccacggcg

SEQ ID NO: 586784 - DNA, 75 bp, synthetic construct
  source 1..75: mol_type = other DNA
gacgagctggcggtggcccagcgtgaaggcgtgctgcatcgtaacttccagggctacaccactcagggcgatacc

SEQ ID NO: 586785 - DNA, 75 bp, synthetic construct
  source 1..75: mol_type = other DNA
aatcaagacaacgtattgcactgatttttgatgtgggcgtttctaccatttatagaaaatttccggcgaataaga

SEQ ID NO: 586786 - DNA, 75 bp, synthetic construct
  source 1..75: mol_type = other DNA
aaaagagcagttgcgggaattgcgaaaacgctgggaggtgaagcacaacgaacatatgagaaagcatggctttga

SEQ ID NO: 586787 - DNA, 75 bp, synthetic construct
  source 1..75: mol_type = other DNA
ttgtgcggttgcagcgggcgttctggcgctgcctttcatgcttttctggaaagaccgcgcccgcttttatagcta

SEQ ID NO: 586788 - DNA, 75 bp, synthetic construct
  source 1..75: mol_type = other DNA
catggcttatctttttacgccgtacttgtgcggttgcagcgggcgttctggcgctgcctttcatgcttttctgga

SEQ ID NO: 586789 - DNA, 75 bp, synthetic construct
  source 1..75: mol_type = other DNA
ccctacagcctatcctgcataaccaaatccctgtcattactaccgagttactagcacagctttacggcactgagc

SEQ ID NO: 586790 - DNA, 75 bp, synthetic construct
  source 1..75: mol_type = other DNA
ctgtgtggagtcgcattatagggagagttcaaaatgagtcaacgcattttctaaagaaattgttcgttcgtcgta

SEQ ID NO: 586791 - DNA, 75 bp, synthetic construct
  source 1..75: mol_type = other DNA
tgaatttcaggaccgcagaacggttcgggctgattcaggtggtggacaaaccagtcgtgttctggtttgagcaat

SEQ ID NO: 586792 - DNA, 75 bp, synthetic construct
  source 1..75: mol_type = other DNA
atgcgcttttcgccgggaatgatagtagcaatctcaaaacgtttgttcttgaggttgattgctaccgtactgaag

SEQ ID NO: 586793 - DNA, 75 bp, synthetic construct
  source 1..75: mol_type = other DNA
tcatgcatccaatagatttccatctgcatattatctcatgctaaaaatagatgaaagtctcagaagtgacaacat

SEQ ID NO: 586794 - DNA, 75 bp, synthetic construct
  source 1..75: mol_type = other DNA
aggataaaacggattcggcagcactgttgccctgtatcgaacaggcccgggaggatgtccgtactcttcgtcacc

SEQ ID NO: 586795 - DNA, 75 bp, synthetic construct
  source 1..75: mol_type = other DNA
tatttttctgggcaacacttggattcttagggtcttttctggcttttgtattaagttttattccgcccgagcaaa

SEQ ID NO: 586796 - DNA, 75 bp, synthetic construct
  source 1..75: mol_type = other DNA
cgcgaagcgcgggcggaagcctttgtcaccatgcgcagtgagacactggcgatgatcattgatggtcgccatcac

SEQ ID NO: 586797 - DNA, 75 bp, synthetic construct
  source 1..75: mol_type = other DNA
atttatgacatgtgcaaagcggtgcaaaaagatatggtaattggtccggtacgtttgctggcgaagagcggcggc

SEQ ID NO: 586798 - DNA, 75 bp, synthetic construct
  source 1..75: mol_type = other DNA
ttacttgatacaactccgtttgcaattatgtttattttttgtggggtgctcatcattacatttatatgggttggg

SEQ ID NO: 586799 - DNA, 75 bp, synthetic construct
  source 1..75: mol_type = other DNA
tacgactggttaggtcgtatgccgtacaaaggcgacaacatcaacggcgcatacaaagctcagggcgttcaactg

SEQ ID NO: 586800 - DNA, 75 bp, synthetic construct
  source 1..75: mol_type = other DNA
gccgctgatttatattcaccggttgcccctgattctacagacagttacccatccctctggtttgcctgtattgct

SEQ ID NO: 586801 - DNA, 75 bp, synthetic construct
  source 1..75: mol_type = other DNA
ctgccctgtattgaacaggccagggaggatatccgtaccctgcaccaactgcaacttatgcaccagaaccggtga

SEQ ID NO: 586802 - DNA, 75 bp, synthetic construct
  source 1..75: mol_type = other DNA
gccaatggtatgactacgatttggcaggcgcatacaccacaggcctgttagatgttttgcaacccgattatgaca

SEQ ID NO: 586803 - DNA, 75 bp, synthetic construct
  source 1..75: mol_type = other DNA
aacccccatgcatggatgtcgccagataatgctctgatttacgtcgataatattcgtgatgcgttgataaaatac

SEQ ID NO: 586804 - DNA, 75 bp, synthetic construct
  source 1..75: mol_type = other DNA
tgatctgcccaccatggagcccccgtcctccggcggtggtggcggtttttttggacagattaaaggctattccca

SEQ ID NO: 586805 - DNA, 75 bp, synthetic construct
  source 1..75: mol_type = other DNA
aattgaccgctgactgggaacatccgttgtgctggtggcgtcttgccaaagaagccggggcgaatgaagagaagc

SEQ ID NO: 586806 - DNA, 75 bp, synthetic construct
  source 1..75: mol_type = other DNA
acggcctggaaaaacgctttccgggcatggacaagcccgccgtcgcaccgctcgactgcaccattcacgccggtt

SEQ ID NO: 586807 - DNA, 75 bp, synthetic construct
  source 1..75: mol_type = other DNA
atctctcctggccggagcggctggtgctggcgaaaagctgcagttttgattttgtcgaaatgtcggtggatgaaa

SEQ ID NO: 586808 - DNA, 75 bp, synthetic construct
  source 1..75: mol_type = other DNA
ggtggccaaaatggcgatgaaactggcccagcagcacatgccaaaattacgctcgttagtgggtgtcgatcgcga

SEQ ID NO: 586809 - DNA, 75 bp, synthetic construct
  source 1..75: mol_type = other DNA
tgcccgcaatccatttgcgttacccaggatttatcagcctgctacgaaaatatcgatggcccaggctgggcgaat

SEQ ID NO: 586810 - DNA, 75 bp, synthetic construct
  source 1..75: mol_type = other DNA
ttgatccattactttatactcgcgccgatattctgattgaacttcagcgttatgatgaagcacgcaaattgattg

SEQ ID NO: 586811 - DNA, 75 bp, synthetic construct
  source 1..75: mol_type = other DNA
ggcaccatctcctatgtcgcgtttgccaaaccgtttgccgaaggttttaacctcggacgcgaagcgcatttcaat

SEQ ID NO: 586812 - DNA, 75 bp, synthetic construct
  source 1..75: mol_type = other DNA
ggcagatgcgccgcgcggcattgagtttggcaaattccagcttggcaacatggtggttggcgacattatcgagtg

SEQ ID NO: 586813 - DNA, 75 bp, synthetic construct
  source 1..75: mol_type = other DNA
tattggtattcgcgacgatatgtatctgggcgcaggcaacgcctatatgcgtgaagttggcgctgcacttgatga

SEQ ID NO: 586814 - DNA, 75 bp, synthetic construct
  source 1..75: mol_type = other DNA
cggtaggaattgcaatggcggtggcgctggtggtgtattcgatttgccgctggggggaaggtattaaaaaacgcc

SEQ ID NO: 586815 - DNA, 75 bp, synthetic construct
  source 1..75: mol_type = other DNA
cgcgatgccaacgtgcgcgtaggggattttgtcgtggtggtagggcttggcgcgatcggtcaaattgccatccaa

SEQ ID NO: 586816 - DNA, 75 bp, synthetic construct
  source 1..75: mol_type = other DNA
cgcaaaatgccgcaaggcagttcgtggaaaaacgccgtctgctacgacccggcgcagtttgccatgagcggcgtg

SEQ ID NO: 586817 - DNA, 75 bp, synthetic construct
  source 1..75: mol_type = other DNA
tgaaaaagcctttcgtctcggtataacggcgccattcatgacgaatttccgctatgaagccggacagcgcgtgat

SEQ ID NO: 586818 - DNA, 75 bp, synthetic construct
  source 1..75: mol_type = other DNA
tgaccatttcccgtgtctgctgggacaccggggggatcgatggcgaaatcgtttatcagaggtcaaaaaaacacg

SEQ ID NO: 586819 - DNA, 75 bp, synthetic construct
  source 1..75: mol_type = other DNA
tcgttcgaaccggatgttgaaaaagagggttcgccaaccctgctgggggataaacgtattgagggctctgtatgg

SEQ ID NO: 586820 - DNA, 75 bp, synthetic construct
  source 1..75: mol_type = other DNA
tggcaaaatcccgggaagaagagacgacccggccaacccttaaagaactggcagcgaagctgtccggaggagtga

SEQ ID NO: 586821 - DNA, 75 bp, synthetic construct
  source 1..75: mol_type = other DNA
caagccggtgatcaccatgccaaaaacccgcaatcagcggggcgtttatctgtgtgaagtggggacggacaccgc

SEQ ID NO: 586822 - DNA, 75 bp, synthetic construct
  source 1..75: mol_type = other DNA
cgctttttatggtgtctgggcagcgttgagccttgaaggtaaaataaaaccggctaaacttattattttccgtcg

SEQ ID NO: 586823 - DNA, 75 bp, synthetic construct
  source 1..75: mol_type = other DNA
ctgtatgttgatgcaatggtggtacgcgaaaccaccaccgtttcagccgcttatcctttcaccgggcaatggtcg

SEQ ID NO: 586824 - DNA, 75 bp, synthetic construct
  source 1..75: mol_type = other DNA
ggaaaagcatcttccggcgctacaacgggtagcaaaacagatcgaagaaggggttgaatcgcaggctattctggt

SEQ ID NO: 586825 - DNA, 75 bp, synthetic construct
  source 1..75: mol_type = other DNA
aaattctctatgcccgtatgaaagccgatcccacgcctgtggatgaagccacgtcgtatgccatccgttttcctg

SEQ ID NO: 586826 - DNA, 75 bp, synthetic construct
  source 1..75: mol_type = other DNA
ggactgcctggtgtatgcctacgcggcattacgtgtgtccgtgcaacgctggcagcttgatctggctgtactggc

SEQ ID NO: 586827 - DNA, 75 bp, synthetic construct
  source 1..75: mol_type = other DNA
gctgtgggataacaaaaagcggcgtaacgaagcgctggactgcctggtgtatgcctacgcggcattacgtgtgtc

SEQ ID NO: 586828 - DNA, 75 bp, synthetic construct
  source 1..75: mol_type = other DNA
gacagacaccgcaaaagaaattctctatgcccgtatgaaagccgagcccacgcctggaatccacgtcgtatgcca

SEQ ID NO: 586829 - DNA, 75 bp, synthetic construct
  source 1..75: mol_type = other DNA
aaagatgcgtctgctgtgggataacaaaaagcggcgtaacgaagcgctggactgcctggtgtatgcctacgcggc

SEQ ID NO: 586830 - DNA, 75 bp, synthetic construct
  source 1..75: mol_type = other DNA
tggctgtcggcggcagtattggcggtatccctgcaattagcgcagtttgcgtcattttcgtcggtattctgggcg

SEQ ID NO: 586831 - DNA, 75 bp, synthetic construct
  source 1..75: mol_type = other DNA
tgctggtagcaatggtggtgatcattccttttttaatgctgaccggcatctcttacgacagctactttaaaggta

SEQ ID NO: 586832 - DNA, 75 bp, synthetic construct
  source 1..75: mol_type = other DNA
gatgaaattccgccgccgcgctccatcacgttccatatctggacggcgtacagtccgttcaccacctgggtacag

SEQ ID NO: 586833 - DNA, 75 bp, synthetic construct
  source 1..75: mol_type = other DNA
agctttatctgtggccgattaatgccgatcaacaaggaacaccgcagcaggtacgtaaggttgttgatatagtta

SEQ ID NO: 586834 - DNA, 75 bp, synthetic construct
  source 1..75: mol_type = other DNA
tgattccctgactgcccgaatgaatcgcctgatggaccttataaagctggtatatcccggcttcgcattgccctc

SEQ ID NO: 586835 - DNA, 75 bp, synthetic construct
  source 1..75: mol_type = other DNA
ggccaaaaacgtggcgggagatgctgcagaagtctcatccataaccaagcctggtgcagaaattcatgagtatca

SEQ ID NO: 586836 - DNA, 75 bp, synthetic construct
  source 1..75: mol_type = other DNA
cgatcaacaaggcacgccgcagcaggtacgtaaggttgttgatatggtgaagaaaaatcatatcccggcagtctt

SEQ ID NO: 586837 - DNA, 75 bp, synthetic construct
  source 1..75: mol_type = other DNA
ggaagaggccgtgggcgaaaaactcgatcaccaggtactgatggataaggtggtgcgttacacggcggcggtgcc

SEQ ID NO: 586838 - DNA, 75 bp, synthetic construct
  source 1..75: mol_type = other DNA
gtgccatgcctgaaagatctttccccctggctgggtcgtaaacatcgtgacaatactctcacgctgaaacgcttt

SEQ ID NO: 586839 - DNA, 75 bp, synthetic construct
  source 1..75: mol_type = other DNA
ataagcgtattgaggggtcggtgtggccaaaatccattcgcggctcgacgcctaaaatcaaaggcacctgccaga

SEQ ID NO: 586840 - DNA, 75 bp, synthetic construct
  source 1..75: mol_type = other DNA
acgtggtctgctatgacgaactttcctcgttcgagccggatgtcgaaaaagagggctcgccaaccctgctggggg

SEQ ID NO: 586841 - DNA, 75 bp, synthetic construct
  source 1..75: mol_type = other DNA
gcagttacgatcgtttccgcgagcgggtgatgttccccattcgtgataaacgcggtcgggtgattggttttggcg

SEQ ID NO: 586842 - DNA, 75 bp, synthetic construct
  source 1..75: mol_type = other DNA
tggcgaagaccctgacacgctggtacgaaaagaaggtaaagaagcgtttgaagcgcggatggagcaggcgatgcc

SEQ ID NO: 586843 - DNA, 75 bp, synthetic construct
  source 1..75: mol_type = other DNA
accgcgagtcactgcaccatgcacagttgactgagtcggtaaacccgttcaacccgaatgctcaggcgatgtaca

SEQ ID NO: 586844 - DNA, 75 bp, synthetic construct
  source 1..75: mol_type = other DNA
gccgggacgaagcggtgcgcgaacgagcgcgggagatcatgagtaaagcaattcgcctggcgcgcgatctcggca

SEQ ID NO: 586845 - DNA, 75 bp, synthetic construct
  source 1..75: mol_type = other DNA
gcaaatcgacgctatctggggaggcgcgcgtgcgtaatcatccgttagggatttatgaaaaagcgctggcgaaag

SEQ ID NO: 586846 - DNA, 75 bp, synthetic construct
  source 1..75: mol_type = other DNA
tttgcctttgcaaaaggggccgggctgatgggggaggccggacctgaagccattatgcctctgacgcgggcggcg

SEQ ID NO: 586847 - DNA, 75 bp, synthetic construct
  source 1..75: mol_type = other DNA
ccagtcgaacaattatgttgccggctctgttggctggaaactggataagtccgggacgtttgagaactacggttc

SEQ ID NO: 586848 - DNA, 75 bp, synthetic construct
  source 1..75: mol_type = other DNA
cgctgtggacagcaatgaaaaaattgctggcatggctgacgaaattaaaaaccatgccgacgaactcgagcagca

SEQ ID NO: 586849 - DNA, 75 bp, synthetic construct
  source 1..75: mol_type = other DNA
agcggcaacgaatcagggtacacagaatgggtgcgaggacaggccagcatcgatgtttccgacatcacagatgtg

SEQ ID NO: 586850 - DNA, 75 bp, synthetic construct
  source 1..75: mol_type = other DNA
ccagtcgaataactatgtggctggttctgctggctggaagcttgataaagggggaacgttcgaaatcaacggcgt

SEQ ID NO: 586851 - DNA, 75 bp, synthetic construct
  source 1..75: mol_type = other DNA
ggcggcacctggcagacggtacttaataccagcgtaaccggcaagacaacttccggctacgaacgcagccatcgc

SEQ ID NO: 586852 - DNA, 75 bp, synthetic construct
  source 1..75: mol_type = other DNA
tgcagagctacacagaggttattgacgccaaactgcgttatccaaataccgcgctgctgtacatcgaattcgact

SEQ ID NO: 586853 - DNA, 75 bp, synthetic construct
  source 1..75: mol_type = other DNA
gtatactttgtctgttatgatgaagaaaacgcccacctctacgaaagactccttacccaacaaggagatgaatga

SEQ ID NO: 586854 - DNA, 75 bp, synthetic construct
  source 1..75: mol_type = other DNA
gatgtgcaggcgttttttgacggcatgggtacgcagtttgccaacgtggtaacgctggtggtcgcgggtgaaata

SEQ ID NO: 586855 - DNA, 75 bp, synthetic construct
  source 1..75: mol_type = other DNA
tatggatatttgccgacaggacattgaagatatcatttacggtatgcgtcgtcttagggaagacgaggcccgcgt

SEQ ID NO: 586856 - DNA, 75 bp, synthetic construct
  source 1..75: mol_type = other DNA
acataaaatcagatacctccgggtctgtgaccgtgggagaaatgctggcagaagaattcttaaaaccgcttaaca

SEQ ID NO: 586857 - DNA, 75 bp, synthetic construct
  source 1..75: mol_type = other DNA
tgcgaacaacgcacaactgatcgtggagcttccgtaccagaccgttcgcgaagccattaacgaagctgaaaaagc

SEQ ID NO: 586858 - DNA, 75 bp, synthetic construct
  source 1..75: mol_type = other DNA
gcgccaggctaatggcgatgaaccctatatcgaaattatttgtatggattcagaagctgaaattaagaaagcaga

SEQ ID NO: 586859 - DNA, 75 bp, synthetic construct
  source 1..75: mol_type = other DNA
aggcacgtcaggttaatggcgatgaaccctatatcgaaattatttgtatggattcagaagctgaaattcagaaag

SEQ ID NO: 586860 - DNA, 75 bp, synthetic construct
  source 1..75: mol_type = other DNA
agacagtaaaccgcggcgcagttcagccggggatgcttgtaaaacacaaagactcaacctggaccgcatctgcta

SEQ ID NO: 586861 - DNA, 75 bp, synthetic construct
  source 1..75: mol_type = other DNA
ttgaaagttcgccagcaacagggcgattgccccacgggacatgcagttattactcttgcgggcgatctccccgcc

SEQ ID NO: 586862 - DNA, 75 bp, synthetic construct
  source 1..75: mol_type = other DNA
aaagccgtagtgcacaccgtcgggccagtctggcgtggtggtgaacaaaacgaagaccagctttttgcaggatgc

SEQ ID NO: 586863 - DNA, 75 bp, synthetic construct
  source 1..75: mol_type = other DNA
accctgccgaaaattgctcctgctagcatggaaatcaatgcattaccttccattgccgacattcccctgtatgac

SEQ ID NO: 586864 - DNA, 75 bp, synthetic construct
  source 1..75: mol_type = other DNA
ttgaccgcatttggtgagtttattcagcgagtaaagatcaaaaaaaaaaccccgccagcaatcatgcatggcggg

SEQ ID NO: 586865 - DNA, 75 bp, synthetic construct
  source 1..75: mol_type = other DNA
cattactggggagcctgcgcaaaggttcatttaatggcatggttgcacgtacgctgccgaaaattgctccggcaa

SEQ ID NO: 586866 - DNA, 75 bp, synthetic construct
  source 1..75: mol_type = other DNA
tttagcagtgaaaggaaagacagcgtcgagcgtaacaataagcgttgaggaggagtatacgaacgtctatgggag

SEQ ID NO: 586867 - DNA, 75 bp, synthetic construct
  source 1..75: mol_type = other DNA
gtatgcgagcatctgcacatccccgtaccggaaaaattatgcgtgattggcatagataacgaagaattgacccgc

SEQ ID NO: 586868 - DNA, 75 bp, synthetic construct
  source 1..75: mol_type = other DNA
gactggctacaaacgctgccaccgcaaaccgggattattgccgttactgacgcccgggcgcggcatattctgcaa

SEQ ID NO: 586869 - DNA, 75 bp, synthetic construct
  source 1..75: mol_type = other DNA
gctgcgttagcagcatttattatcagctgtgttatttttgtttaccaaggcggcgcttatctggtaccatacatc

SEQ ID NO: 586870 - DNA, 75 bp, synthetic construct
  source 1..75: mol_type = other DNA
tgtgcggttatccatcgctgcaatatttctactctgtttttaaacacaacgccaaaagagtatcgcgatgtaaat

SEQ ID NO: 586871 - DNA, 75 bp, synthetic construct
  source 1..75: mol_type = other DNA
ccaccttgtcgatcaatgagatatcgcaaatgtgcggttatccatcgctgcaatatttctactctgtttttaaaa

SEQ ID NO: 586872 - DNA, 75 bp, synthetic construct
  source 1..75: mol_type = other DNA
gcagcacgcgcaaaaccgactggccgactggctacaaacgctaccaccgcaaacagggattattgccgtcactga

SEQ ID NO: 586873 - DNA, 75 bp, synthetic construct
  source 1..75: mol_type = other DNA
tgggctggattatcgttctatatctggttaataaagtccgcgaaaagtacagcaaaccgaaaacagttaatatcc

SEQ ID NO: 586874 - DNA, 75 bp, synthetic construct
  source 1..75: mol_type = other DNA
agccaagctcttcaggtgatgaggctaaagttattcctttcaacgcagtggaagcggatgatcaagaagattaca

SEQ ID NO: 586875 - DNA, 75 bp, synthetic construct
  source 1..75: mol_type = other DNA
gtttatcgcatgtgctcctgggcagcacaaaaacaggaagcctgggatcgacaactggattatttacagcaattg

SEQ ID NO: 586876 - DNA, 75 bp, synthetic construct
  source 1..75: mol_type = other DNA
gccggagaatcccaaatcatccacgtcaccgcctggacagaacgcgaagcgcgtaaccgttgcccgtccggttgt

SEQ ID NO: 586877 - DNA, 75 bp, synthetic construct
  source 1..75: mol_type = other DNA
atactcagaacgcctttatctggcgctttatcatcgttaatccgagtgattaccgcgtcgttcacgtcgtggcgt

SEQ ID NO: 586878 - DNA, 75 bp, synthetic construct
  source 1..75: mol_type = other DNA
cgaagccataatagcgatgtgggtacaggtaagaccggcaatgaagccgccccacaatggttgaataaagaggat

SEQ ID NO: 586879 - DNA, 75 bp, synthetic construct
  source 1..75: mol_type = other DNA
tttctactctgtttttaaaaaagcatatgacacgacgccaaaagagtatcgcgatgtaggtgatgctgccaactt

SEQ ID NO: 586880 - DNA, 75 bp, synthetic construct
  source 1..75: mol_type = other DNA
ttcgaacagctccgggaggttatcgctactgagacggaggcacgcgtaacggatgttatccgtcttgaggcaaaa

SEQ ID NO: 586881 - DNA, 75 bp, synthetic construct
  source 1..75: mol_type = other DNA
gctttccggaaaggttatgggcggccgcatcagcgccgttaacggtcgcgttatcaaacttgaccgcgtggcaga

SEQ ID NO: 586882 - DNA, 75 bp, synthetic construct
  source 1..75: mol_type = other DNA
agaacagccaggtatcagccgacatcaataataacctgaatgcgatgtacagcatcaaggtagctgttgattcca

SEQ ID NO: 586883 - DNA, 75 bp, synthetic construct
  source 1..75: mol_type = other DNA
gccgcaacataaccctcgatcgcgctgctgatgtgaaagccggtaacaggctgtttttgaatcttccgtcaggca

SEQ ID NO: 586884 - DNA, 75 bp, synthetic construct
  source 1..75: mol_type = other DNA
cctgagcctgtttacgatagcgatctggccatgcgcttcgattatcgtcagctcgaaatgactgcgatcggctgc

SEQ ID NO: 586885 - DNA, 75 bp, synthetic construct
  source 1..75: mol_type = other DNA
ctggggcaaagaatcgatgcgactcagatagacaagtgggaactttatcgcatcgcccagtattgcgatcagctg

SEQ ID NO: 586886 - DNA, 75 bp, synthetic construct
  source 1..75: mol_type = other DNA
atctacctggacggaacggcgctggagaacgccgacggctcccaaaacttcagcggcgttacgtgggaatttcgt

SEQ ID NO: 586887 - DNA, 75 bp, synthetic construct
  source 1..75: mol_type = other DNA
taacaggtccaaacgtaacagtacgtattaaagtgtccgctcaaaataacaggggcgcgtccatttattcgccta

SEQ ID NO: 586888 - DNA, 75 bp, synthetic construct
  source 1..75: mol_type = other DNA
atggctgacgacatcaaacaggccaacgatgaacttgaactccaggcgcaggaaatcgcaaaaaacgcgcaggac

SEQ ID NO: 586889 - DNA, 75 bp, synthetic construct
  source 1..75: mol_type = other DNA
cgttatccagaatggccaaaccattatcagggatacggtcatcggtgacgggaccatcagcaatgccaaaatcgg

SEQ ID NO: 586890 - DNA, 75 bp, synthetic construct
  source 1..75: mol_type = other DNA
aaacttcagcggcgtgacgtgggagtttcgcgcggggacgcaggctcaaaaatatattcagggtattcccggtac

SEQ ID NO: 586891 - DNA, 75 bp, synthetic construct
  source 1..75: mol_type = other DNA
tattaaagtgtccgctcaaaatggcaggggtgcgttcatttcttctcctactatcatagtatcacacggatctgg

SEQ ID NO: 586892 - DNA, 75 bp, synthetic construct
  source 1..75: mol_type = other DNA
cagggcacgctggagccgaccaacgagccttatgccattgccaaaatcgccgggatcaaactgtgcgaatcatac

SEQ ID NO: 586893 - DNA, 75 bp, synthetic construct
  source 1..75: mol_type = other DNA
atgaaccttatgctatagcaaaaatcgccggtattaaactgtgcgagtcttataatcggcaatataatcgcgatt

SEQ ID NO: 586894 - DNA, 75 bp, synthetic construct
  source 1..75: mol_type = other DNA
aggtttaggctggaagtatcagattaaccttgaagcaggcttggcacggacttatgactggtttttaaaaaatca

SEQ ID NO: 586895 - DNA, 75 bp, synthetic construct
  source 1..75: mol_type = other DNA
tacgttaacaaaagcaggaaaaaggttgctcccggaggcgcgggaattaataaagaaattcgatgaaacgctttt

SEQ ID NO: 586896 - DNA, 75 bp, synthetic construct
  source 1..75: mol_type = other DNA
gaaaaccggttgttcatgccagggctggcgtcaaacctcctgccgatattccacgcagtgactataacgactata

SEQ ID NO: 586897 - DNA, 75 bp, synthetic construct
  source 1..75: mol_type = other DNA
agaacacccagccgatgctgtcgcacattaacgtcggcacgggcgttgactgcactatccgcgagctggcgcaaa

SEQ ID NO: 586898 - DNA, 75 bp, synthetic construct
  source 1..75: mol_type = other DNA
cgaaggcggacggctcccaggctaccgatttgcagcgcgacgcgctgattgccgccggggtcgatccagtacatc

SEQ ID NO: 586899 - DNA, 75 bp, synthetic construct
  source 1..75: mol_type = other DNA
gcaatttcgctgttctttgtgccgtttcaggtgcattcgtgggtattcgttgccttaaccctggtgctcactgcg

SEQ ID NO: 586900 - DNA, 75 bp, synthetic construct
  source 1..75: mol_type = other DNA
gtgccaagttccagcgtaatattgaagagctgctggtagcgccggttccgactcacgtcattattgccggatatg

SEQ ID NO: 586901 - DNA, 75 bp, synthetic construct
  source 1..75: mol_type = other DNA
tcacgcggcccactgctctgacgttaaaaaactgctttttctcggctcttcatgcatttatccaaaatttgcgca

SEQ ID NO: 586902 - DNA, 75 bp, synthetic construct
  source 1..75: mol_type = other DNA
tggttcgaatgataacttccatcctgaaaactcccatgttattccggcgcttatgcgtagattccatgaggcaaa

SEQ ID NO: 586903 - DNA, 75 bp, synthetic construct
  source 1..75: mol_type = other DNA
agccatacgcaattgctaaaattgcgggcataaaattatgtgaatcttataaccgtcaatatggccgtgattatc

SEQ ID NO: 586904 - DNA, 75 bp, synthetic construct
  source 1..75: mol_type = other DNA
atgtgtcagagtcgtaatggtccattccgcatcatctattggctgtttaaagccactgaccttcacaggcatttc

SEQ ID NO: 586905 - DNA, 75 bp, synthetic construct
  source 1..75: mol_type = other DNA
agcgggatcgtatttttgcccattgttatgggctgtatgatgcacacctgaaagcgtgcaatgttctcgacttcg

SEQ ID NO: 586906 - DNA, 75 bp, synthetic construct
  source 1..75: mol_type = other DNA
gtctttgaaaagcgtctgttctccgaactgggttatggcgcggagctaaaagtattaagcgcgaataacgaagaa

SEQ ID NO: 586907 - DNA, 75 bp, synthetic construct
  source 1..75: mol_type = other DNA
tgtctggagattcagggggccagtctagtgggcagccgcgcgcgctttaccgtggtgggtgacgatgaccagtcg

SEQ ID NO: 586908 - DNA, 75 bp, synthetic construct
  source 1..75: mol_type = other DNA
ttactctgcgcgacatgatggaacgtggcgagagtgacgaagagcttgatcaggtgcaactgatgactctgcacg

SEQ ID NO: 586909 - DNA, 75 bp, synthetic construct
  source 1..75: mol_type = other DNA
acgataccgatcagctggcgttgctcaaagagctgactgaggggctgattgaagatgacaaagttctcctgcaac

SEQ ID NO: 586910 - DNA, 75 bp, synthetic construct
  source 1..75: mol_type = other DNA
tgaaagcggccaacatccttatcgccaataacccgcacgtctttgaaaagcgcctgttctccgaactgagctacg

SEQ ID NO: 586911 - DNA, 75 bp, synthetic construct
  source 1..75: mol_type = other DNA
accatctcctatgtcgcgtttgccaaaccattggctgaaggttttaacctcggacgcgaagcgcatttcaataac

SEQ ID NO: 586912 - DNA, 75 bp, synthetic construct
  source 1..75: mol_type = other DNA
cgcagaatataaaccagcccaccatcagccgggcagaccttgaatgcctcgaacatcttcgcaatgtcggccagc

SEQ ID NO: 586913 - DNA, 75 bp, synthetic construct
  source 1..75: mol_type = other DNA
ttgacgtatgtcttgtcaggtatttttgaatttaccatcggcgatgaagtgcgtacagtaaaaactggtgatact

SEQ ID NO: 586914 - DNA, 75 bp, synthetic construct
  source 1..75: mol_type = other DNA
gcgcgcgctttaccgtggtgggtgacgatgaccagtcgatctactcctggcgcggcgcacgtccgcaaaacctgg

SEQ ID NO: 586915 - DNA, 75 bp, synthetic construct
  source 1..75: mol_type = other DNA
tgctgctgagtcaggattttccggcgctgaaggtgattaagcttgagcagaactaccgctcttccggacgtattt

SEQ ID NO: 586916 - DNA, 75 bp, synthetic construct
  source 1..75: mol_type = other DNA
aagccgtcgaattcgtcaccggaccttgcctggtgctggcgggggcgggttccggtaagacgcgagtgatcacca

SEQ ID NO: 586917 - DNA, 75 bp, synthetic construct
  source 1..75: mol_type = other DNA
aggttttagcggaaagaatatgatctctgatgtttatgatgatgggcgttttacttatatccgtatcgcaaaacc

SEQ ID NO: 586918 - DNA, 75 bp, synthetic construct
  source 1..75: mol_type = other DNA
gcacaaaagaagaagctggggcatttgtgttgatgtcgttggagtccgggccgctcatgacgatgattattctgg

SEQ ID NO: 586919 - DNA, 75 bp, synthetic construct
  source 1..75: mol_type = other DNA
cactatggcatccgtcttggagatggtctgcggatctatgtggataatcaggccgggcgactggtactgtggcgt

SEQ ID NO: 586920 - DNA, 75 bp, synthetic construct
  source 1..75: mol_type = other DNA
tgaaaccttccggttaccggtttcgtaatctttttcagagcggtgtgttagcagggagatggaagcctggttctg

SEQ ID NO: 586921 - DNA, 75 bp, synthetic construct
  source 1..75: mol_type = other DNA
cactgtggaacaggccatcaatgacctgtggctaccggatttgcagttgtataaaaagagtcctcagtcagagtt

SEQ ID NO: 586922 - DNA, 75 bp, synthetic construct
  source 1..75: mol_type = other DNA
ataaagaaagcagtattgagttaccggaagagagcggatgtgtaacagaaaatcagggaaaccgtatcccggaaa

SEQ ID NO: 586923 - DNA, 75 bp, synthetic construct
  source 1..75: mol_type = other DNA
ttaccatttctcattggctttttactcggtaacttagatgaagaattgaaagaattcttcacgaaagccaaccaa

SEQ ID NO: 586924 - DNA, 75 bp, synthetic construct
  source 1..75: mol_type = other DNA
tcagccgtaatcggggctttgaatatggacgcccccggctgtttggctgcttcgggtcggcggcctgcgcgacta

SEQ ID NO: 586925 - DNA, 75 bp, synthetic construct
  source 1..75: mol_type = other DNA
ctgaaacgggatatcatcaaagccatgaacaaagcagccgcgctggatgaactgatacctgaccacacagcgcaa

SEQ ID NO: 586926 - DNA, 75 bp, synthetic construct
  source 1..75: mol_type = other DNA
gaagagcaggttattctttcggtgctcgataatatgcagcgtattctgaatacccgggccgggagtcttaaacat

SEQ ID NO: 586927 - DNA, 75 bp, synthetic construct
  source 1..75: mol_type = other DNA
cgatgccgctgtgatgttttttattccgctattgattaataaatatattggtagcaagaatgcattattaattac

SEQ ID NO: 586928 - DNA, 75 bp, synthetic construct
  source 1..75: mol_type = other DNA
cgattgaagtgctcttcttacggatgctgcataattttgaagtgcctttcctgctgattggtattttcaaatata

SEQ ID NO: 586929 - DNA, 75 bp, synthetic construct
  source 1..75: mol_type = other DNA
ataaacaatcagcgtatatatgaaaccctgggtcagttccctcagctctgcgttgaggatgcccgtcagcatgtg

SEQ ID NO: 586930 - DNA, 75 bp, synthetic construct
  source 1..75: mol_type = other DNA
gcccgatctgcgcggtgtttttatccgtggctgggataacgggaagggacttgatggtgatcagaacagacagct

SEQ ID NO: 586931 - DNA, 75 bp, synthetic construct
  source 1..75: mol_type = other DNA
catactggcattgatatgaataataacagcatcaccaatatcaatgaagccagtggtaaaaacgccagattttca

SEQ ID NO: 586932 - DNA, 75 bp, synthetic construct
  source 1..75: mol_type = other DNA
tcaggctgacaccactggcaccgcaggcgtttctggcggtactgaactgactgcgtctggctcggctaaccagat

SEQ ID NO: 586933 - DNA, 75 bp, synthetic construct
  source 1..75: mol_type = other DNA
gctggctaatcaccagaaacaataagggatggatgaatatcacacatggtggtggattcaccatgacagacagcc

SEQ ID NO: 586934 - DNA, 75 bp, synthetic construct
  source 1..75: mol_type = other DNA
gtacttcctgctcaccggacggacttgtaggccgcgacagtaaaggggcaatactttcgtgccaatccggtgtgt

SEQ ID NO: 586935 - DNA, 75 bp, synthetic construct
  source 1..75: mol_type = other DNA
cccctttggacacagctatattaccggtatcagaaaaaataatttatccggtcgtctggaagcacttacctgcac

SEQ ID NO: 586936 - DNA, 75 bp, synthetic construct
  source 1..75: mol_type = other DNA
atatatctggaaccagcattttaccttctcattggcactgttgttttgtttgtatggtatattgcatggcagaca

SEQ ID NO: 586937 - DNA, 75 bp, synthetic construct
  source 1..75: mol_type = other DNA
ctttttgagttaagagcgggtaaaaaagatattacacgtaccttttttgcttttgctaaagggaaaaagatatat

SEQ ID NO: 586938 - DNA, 75 bp, synthetic construct
  source 1..75: mol_type = other DNA
aagcggaaagcgaaatttatgacctcgaacctattatgcaagcaaaggtacttaagggactagaaaagctggaag

SEQ ID NO: 586939 - DNA, 75 bp, synthetic construct
  source 1..75: mol_type = other DNA
aacacgctggtgactgacctttctgctatcagcaactccttcagtgcggatcaggcagacaccacaggcaccgca

SEQ ID NO: 586940 - DNA, 75 bp, synthetic construct
  source 1..75: mol_type = other DNA
caaaccgccgacagcatgttcgacgaaatgtctgacgtgctgggtcgtatgaaagacctgtcaactcaggcagcg

SEQ ID NO: 586941 - DNA, 75 bp, synthetic construct
  source 1..75: mol_type = other DNA
agctgggtgcgtctattaaccgtctgaacgacactgccaacaacctgaccagcatgcaggacaacaccgaagtcg

SEQ ID NO: 586942 - DNA, 75 bp, synthetic construct
  source 1..75: mol_type = other DNA
ctggtgcagggcgtgatccgcggtaacaacggtaatacgctggatctcggcacttacggcaccaccactctcgac

SEQ ID NO: 586943 - DNA, 75 bp, synthetic construct
  source 1..75: mol_type = other DNA
cctgcggccgccagaacggtgcaatccctgacacaggcaccggtcattctgttaactcatccacgtatgggagaa

SEQ ID NO: 586944 - DNA, 75 bp, synthetic construct
  source 1..75: mol_type = other DNA
gtacgaagtccgttatgaacttactggccagactgtctatgtattgcgcttgtggcatacgcgggaaagcagata

SEQ ID NO: 586945 - DNA, 75 bp, synthetic construct
  source 1..75: mol_type = other DNA
gttgaactgcaacaggcggcagacaaagtcaccgccacgatcactgataaaaatggcgcggttgtacgctcgatt

SEQ ID NO: 586946 - DNA, 75 bp, synthetic construct
  source 1..75: mol_type = other DNA
atccgacaaataccggcgtcagcaccaccagcagtagttcgctcacgggcagcaacgccgcagatttacaaagca

SEQ ID NO: 586947 - DNA, 75 bp, synthetic construct
  source 1..75: mol_type = other DNA
aaacggcgcggtcgtccgtaccattgatatcggtgaactgactgccggagtccacagtttcacctgggacggtac

SEQ ID NO: 586948 - DNA, 75 bp, synthetic construct
  source 1..75: mol_type = other DNA
acgagaaaagcgacagtgccgtgcatcagggcattatcgcccgcgtgaagccaggacgtcagtatcaggaaaacg

SEQ ID NO: 586949 - DNA, 75 bp, synthetic construct
  source 1..75: mol_type = other DNA
ttacacggcggcggtgcctgcccgggtggtttatctgacggcgggcattgactcgcagcgaaaccgttttgagat

SEQ ID NO: 586950 - DNA, 75 bp, synthetic construct
  source 1..75: mol_type = other DNA
ctggatttgtgacaataccgggatgtggacgcgtgacggcctgacattttacagcgtcggtgatgaggagatacc

SEQ ID NO: 586951 - DNA, 75 bp, synthetic construct
  source 1..75: mol_type = other DNA
cagtaaacctgctgccgccagaacggtacagtccctgacacaggcaccggtcattctgttaactcatccacgtat

SEQ ID NO: 586952 - DNA, 75 bp, synthetic construct
  source 1..75: mol_type = other DNA
ttgcggcgcagcagaaagcgttccgctgattcgggtgactaacctggcgcgcaccatgcgtatgctacaggaaga

SEQ ID NO: 586953 - DNA, 75 bp, synthetic construct
  source 1..75: mol_type = other DNA
acgagaaaagcgacggtggcgtacatcaggggattatcgcccgcgttaagccgggacgtcagtatcaggaaaatg

SEQ ID NO: 586954 - DNA, 75 bp, synthetic construct
  source 1..75: mol_type = other DNA
cgttgcaaatgcgtttgcagacctcggaattaacgtcattgatgccgatattattgcgcgtcaggtggttgaacc

SEQ ID NO: 586955 - DNA, 75 bp, synthetic construct
  source 1..75: mol_type = other DNA
actatggcgcgcaggttcccctgcgggtggtttacctgactgccgggatcgactcccagaaagatcgctatgaaa

SEQ ID NO: 586956 - DNA, 75 bp, synthetic construct
  source 1..75: mol_type = other DNA
ctgcagctgaagatttcatgaaagcgcatgtggaggctacgctgcgggatgtcccctgccttaaagcgttatcgc

SEQ ID NO: 586957 - DNA, 75 bp, synthetic construct
  source 1..75: mol_type = other DNA
tcacgtggaggcgacgattcgggacgtgccatgcctgaaagacctttccccatggctgggtcgtaaacatcgtga

SEQ ID NO: 586958 - DNA, 75 bp, synthetic construct
  source 1..75: mol_type = other DNA
accttgaggcactggcccgggcacgaagagacgagcaggacgaggatgatatgagtctggaagaaatcgcggctg

SEQ ID NO: 586959 - DNA, 75 bp, synthetic construct
  source 1..75: mol_type = other DNA
tgtatgtctggggatgggctccgggagaggaagcctttctggtggataaaatcatcattatggggcgtcccgatg

SEQ ID NO: 586960 - DNA, 75 bp, synthetic construct
  source 1..75: mol_type = other DNA
cgaaagtgttttctacctctgtgaacatcatggctgcgtgatccatcagtctgaactggaccagagcaacgggcg

SEQ ID NO: 586961 - DNA, 75 bp, synthetic construct
  source 1..75: mol_type = other DNA
aaaggaaagatgcgtctgctgtgggataacaaaaagcggcgtaacgaagcgctggactgcctggtgtatgcctac

SEQ ID NO: 586962 - DNA, 75 bp, synthetic construct
  source 1..75: mol_type = other DNA
gtgctgccggtaaaaggtgcatctgtttatggcaagccggtgatcaccatgccaaaaacccgcaatcagcggggc

SEQ ID NO: 586963 - DNA, 75 bp, synthetic construct
  source 1..75: mol_type = other DNA
gaccatttcccgtgtctgctgggacaccggggggatcgatggtgaaatcgtctaccagaggtcaaaaaaacacgg

SEQ ID NO: 586964 - DNA, 75 bp, synthetic construct
  source 1..75: mol_type = other DNA
atggcggagaccgtatcactgacgccggcaaaactgtatgaagagagcacggtattcttccgctcacccgagagc

SEQ ID NO: 586965 - DNA, 75 bp, synthetic construct
  source 1..75: mol_type = other DNA
ccacgctgggagagacctacgaagaggctgtgggtgaaaaactcgattaccaggcactgatggataaggttgtgc

SEQ ID NO: 586966 - DNA, 75 bp, synthetic construct
  source 1..75: mol_type = other DNA
ggtgaaattgtttatcagagatcaaaaaacacggtgtttccgggtgctgccggtaaaaggcgcgtctgtctatgg

SEQ ID NO: 586967 - DNA, 75 bp, synthetic construct
  source 1..75: mol_type = other DNA
agagtaagtaaaccagaaaagggatatcagccacatgttcttcaatatatgattggcaactgtacaatatatttc

SEQ ID NO: 586968 - DNA, 75 bp, synthetic construct
  source 1..75: mol_type = other DNA
tttttattcagagtctgaatgtactggataatcgtcggcgtgatcgaattatgcttaagtatttcgtttcaaaag

SEQ ID NO: 586969 - DNA, 75 bp, synthetic construct
  source 1..75: mol_type = other DNA
aggctcttgaattacatttattccgttctctggaaatgcttattacagcaataacatctgatgatattgatgcca

SEQ ID NO: 586970 - DNA, 75 bp, synthetic construct
  source 1..75: mol_type = other DNA
attcacgaacatatggcacgaaaaaccaaacaagaagcgcaagaaacgcgcaacacatcctcgatgtggctctac

SEQ ID NO: 586971 - DNA, 75 bp, synthetic construct
  source 1..75: mol_type = other DNA
tgacacgccgcgcggcgattattatgcgaggctatatttcgggcctgatagaaaactggctgtttgctccgcaat

SEQ ID NO: 586972 - DNA, 75 bp, synthetic construct
  source 1..75: mol_type = other DNA
ggttcccggaatcagttccctatcccagcctgccggttcggaccgatcaatatgggttattctttccattaagtg

SEQ ID NO: 586973 - DNA, 75 bp, synthetic construct
  source 1..75: mol_type = other DNA
ctgattcgctatgcgatgggggattactctttggataatcttgccaatggcgaatggcgagacgcgacagattaa

SEQ ID NO: 586974 - DNA, 75 bp, synthetic construct
  source 1..75: mol_type = other DNA
gcgactgattcgctatgcgatgggtaattacacgctggataatcttgccaatggcgaatggcgagaagcgacaga

SEQ ID NO: 586975 - DNA, 75 bp, synthetic construct
  source 1..75: mol_type = other DNA
aatccgtggacgtggtctgctatgacgaactttcctcgttcgagccggatgtcgaaaaagagggctcgccaaccc

SEQ ID NO: 586976 - DNA, 75 bp, synthetic construct
  source 1..75: mol_type = other DNA
atgaaccgaaaatccccatcattatatgaaattctctatggtaatttcactggtggactggagttaaatcaggtc

SEQ ID NO: 586977 - DNA, 75 bp, synthetic construct
  source 1..75: mol_type = other DNA
cgatggcagtttcacggttcaccaaaacacttaaagaaaacaatatgtctcctgaagtctgccttgggacacaca

SEQ ID NO: 586978 - DNA, 75 bp, synthetic construct
  source 1..75: mol_type = other DNA
aagccgatcccacgcctgcggatgaagccacgtcgtatgccatccgttttcctgatgatccggagattttttcgc

SEQ ID NO: 586979 - DNA, 75 bp, synthetic construct
  source 1..75: mol_type = other DNA
acaccgcaaaagaaattctctatgcccgtatgaaagccgatcccacgcctgtggatgaagccacgtcgtatgcca

SEQ ID NO: 586980 - DNA, 75 bp, synthetic construct
  source 1..75: mol_type = other DNA
cttactgatcatccgtacgggtgatcacgcggttgttgacttagcggagatattttaccccaactatgggcagga

SEQ ID NO: 586981 - DNA, 75 bp, synthetic construct
  source 1..75: mol_type = other DNA
ccgatcaaaattattatttgcccccggagtcctcttatcttgccgggcggtggaagacgttgccctttcaggtgg

SEQ ID NO: 586982 - DNA, 75 bp, synthetic construct
  source 1..75: mol_type = other DNA
ttaatcgctttgaacagcggttggggcgctttaaccgctattccggaaatctacgcggcgttaagccagtgaaaa

SEQ ID NO: 586983 - DNA, 75 bp, synthetic construct
  source 1..75: mol_type = other DNA
gtcgccataaataacatcggtagagaatctaatggttatattttagttggtgtttccgataccaaagctacggca

SEQ ID NO: 586984 - DNA, 75 bp, synthetic construct
  source 1..75: mol_type = other DNA
aacggcgtcaagacatttattaacaccacgctgggagagacctacgaagaggctgtgggtgaaaaactcgattac

SEQ ID NO: 586985 - DNA, 75 bp, synthetic construct
  source 1..75: mol_type = other DNA
caccacgattacccgtccaccacagctccacgaagaactggcacgtattcgccgtcagggctggagctatgacaa

SEQ ID NO: 586986 - DNA, 75 bp, synthetic construct
  source 1..75: mol_type = other DNA
cctggctggggcgtaagcaccgggataacacactgacattaaaaagattcacgtcccgtgtggggttctggtgcc

SEQ ID NO: 586987 - DNA, 75 bp, synthetic construct
  source 1..75: mol_type = other DNA
tgcggcgatcaacaaaaaataccgccatgcagacggaaccgaaatgaccatttcccgtgtctgctgggacaccgg

SEQ ID NO: 586988 - DNA, 75 bp, synthetic construct
  source 1..75: mol_type = other DNA
aatggccgtgatgttgatgaaaaaattattgctttactggaaagacagtacgataaaaaagggaatgcactttat

SEQ ID NO: 586989 - DNA, 75 bp, synthetic construct
  source 1..75: mol_type = other DNA
aaatggatgaatgtgtgagagatgtctatacacttccattattgtttctcctcaggagattaaaacctgacggaa

SEQ ID NO: 586990 - DNA, 75 bp, synthetic construct
  source 1..75: mol_type = other DNA
ggctgtggcagaaaaactgagttttgagttgttactggaaaaggtctgtcactatggcgcgcaggttcccctgcg

SEQ ID NO: 586991 - DNA, 75 bp, synthetic construct
  source 1..75: mol_type = other DNA
ctggtaatcctaaaacagtggagcagtaccagctaacaaagcaatttaacattaagtggctttattcagatgatg

SEQ ID NO: 586992 - DNA, 75 bp, synthetic construct
  source 1..75: mol_type = other DNA
gtgttttcttattactttcaaggtcttgcgcttggcgcagctatgatcctaccgctcggtccacaaaatgctttt

SEQ ID NO: 586993 - DNA, 75 bp, synthetic construct
  source 1..75: mol_type = other DNA
ggaaaattattgccaccatgctggcagtgacctggctgaatccccatgtttatctggatacctttgtggtattgg

SEQ ID NO: 586994 - DNA, 75 bp, synthetic construct
  source 1..75: mol_type = other DNA
actgccaatgcacagcgtattatcaatattattgtgggtggtgtgatgtggtttatcgctctgcaactggcgaaa

SEQ ID NO: 586995 - DNA, 75 bp, synthetic construct
  source 1..75: mol_type = other DNA
tcacgcgctgttcagttttgacgatgcgctggccggtcgcttgctggcgagtgcctcacaagagaacgaaccgtt

SEQ ID NO: 586996 - DNA, 75 bp, synthetic construct
  source 1..75: mol_type = other DNA
ggatcaggtaaaagcagcgattgatgcaggagctgcgggcgcgatttctggttcggccattgttaaaatcatcga

SEQ ID NO: 586997 - DNA, 75 bp, synthetic construct
  source 1..75: mol_type = other DNA
cacactgcgtgcttttgcggcgggagtaaccccggcgcagtgctttgagatgctggcactcattcgccagaagca

SEQ ID NO: 586998 - DNA, 75 bp, synthetic construct
  source 1..75: mol_type = other DNA
gcactggaaaacgccctggatatgtacaagctcgacaatcatcgctatccaaccacaaatcaggggcttgaatcc

SEQ ID NO: 586999 - DNA, 75 bp, synthetic construct
  source 1..75: mol_type = other DNA
ccgcgggaggtctcgcaggacatcagctggctgctggctcaggggcgacggcatggcatcaaggccagactgccc

SEQ ID NO: 587000 - DNA, 75 bp, synthetic construct
  source 1..75: mol_type = other DNA
tcgcgcgatgtggcacaggatatcgggtggttactgaatcaggggcgtttgctgggtgtgagagctaagctggcc

SEQ ID NO: 587001 - DNA, 75 bp, synthetic construct
  source 1..75: mol_type = other DNA
gcgcgttattgatgcagtcgccgtggttgctggcgctggtcacctggggcggcgtagccttcttgctctggtatg

SEQ ID NO: 587002 - DNA, 75 bp, synthetic construct
  source 1..75: mol_type = other DNA
atctggtagtgggatgtgtcatgtggtttatagccttgcagctggcgagagacggtattgctcatgcacaagcct

SEQ ID NO: 587003 - DNA, 75 bp, synthetic construct
  source 1..75: mol_type = other DNA
gcatacgatctgctttcagcagggcccgatggtgaaatgggaaccgaggacgacatcaccaactggggtttgagc

SEQ ID NO: 587004 - DNA, 75 bp, synthetic construct
  source 1..75: mol_type = other DNA
ctgatcagcggcaacgcgttcaagctgggcgatatcatcacctatcgcaacggtaaaaaagtcgaagtaatgaac

SEQ ID NO: 587005 - DNA, 75 bp, synthetic construct
  source 1..75: mol_type = other DNA
ttttctattcgacagcagttcagattaaagactacatccacttctacggttatcgcccggttaaatctttcgcta

SEQ ID NO: 587006 - DNA, 75 bp, synthetic construct
  source 1..75: mol_type = other DNA
attatcggcaaaagaattacgcaatcgggtcagtcagtggctaaaaatggtcgaaaaaagcacgggaaaaaagcc

SEQ ID NO: 587007 - DNA, 75 bp, synthetic construct
  source 1..75: mol_type = other DNA
ttgcaaaaatgcgcgacaacggtatccgcttacagtttgcttttattaaggctacggaaggcgaaaagctggttg

SEQ ID NO: 587008 - DNA, 75 bp, synthetic construct
  source 1..75: mol_type = other DNA
atggaaaaaacagaaaacaaaccgattttagttggtgtcgcgtctattccgtttaagtttgaactgtcacaactg

SEQ ID NO: 587009 - DNA, 75 bp, synthetic construct
  source 1..75: mol_type = other DNA
ggaatcgttgatggtaagccggaatactctcgtattgaggtaaataacggccgcatccgtttgatccctgcgtaa

SEQ ID NO: 587010 - DNA, 75 bp, synthetic construct
  source 1..75: mol_type = other DNA
gaagaatgctcgtctgatggcgaacttgtcattactggaatcgttgatggtaagccggaatactctcgtattgag

SEQ ID NO: 587011 - DNA, 75 bp, synthetic construct
  source 1..75: mol_type = other DNA
ggtcgaactttcgtcagcggaattaaccatgctggataaagcgtatccggcaccaaaaggaaaaactgcgctgga

SEQ ID NO: 587012 - DNA, 75 bp, synthetic construct
  source 1..75: mol_type = other DNA
ctggggagaaaaagcaacttacagcattaataatgatggcattaccctgcatttgaacggggcagacgatctggg

SEQ ID NO: 587013 - DNA, 75 bp, synthetic construct
  source 1..75: mol_type = other DNA
agatggcattaatggtccggtggattttaatgtgtttaatggcacggtggaggagttgcaggcattcgttgatgg

SEQ ID NO: 587014 - DNA, 75 bp, synthetic construct
  source 1..75: mol_type = other DNA
gattatttatgcaggcgcgacgttttatcacacgaatctggcggggtatttcaatgagtatccgtggtgggttgc

SEQ ID NO: 587015 - DNA, 75 bp, synthetic construct
  source 1..75: mol_type = other DNA
ctgtatatgttggtacctgggctaaatacaacaatggcagcatagaaggatgctggtttaatgatttaaccgttt

SEQ ID NO: 587016 - DNA, 75 bp, synthetic construct
  source 1..75: mol_type = other DNA
actttagtgtatagtccaaatatatatgtcagcagcgtttttcctgatgtgattccgtttcgatttcaggatact

SEQ ID NO: 587017 - DNA, 75 bp, synthetic construct
  source 1..75: mol_type = other DNA
cgggctatcacgaaagccgtgagggacttaaagcactgggtgcagaacgtcaccactacatcaatctggcacgca

SEQ ID NO: 587018 - DNA, 75 bp, synthetic construct
  source 1..75: mol_type = other DNA
caccgaccgaagcggtgcgggaggttgcctgccgcatggagacgttcgccagcctgatgacgtcagcgccgtctc

SEQ ID NO: 587019 - DNA, 75 bp, synthetic construct
  source 1..75: mol_type = other DNA
gccagctccggctggccgcaggcgcagtggtggaaacaactcaatgacccgcagctggatgcgctgatccaacgg

SEQ ID NO: 587020 - DNA, 75 bp, synthetic construct
  source 1..75: mol_type = other DNA
tttattcaacaaagccttctgtcggtgacaacaacacctaaagcatggcatggtacttctttattggctaaagaa

SEQ ID NO: 587021 - DNA, 75 bp, synthetic construct
  source 1..75: mol_type = other DNA
cagatcaacacgccgcgaaacgtcgctggcttaatgcccacgaagaggggtatcacaaagcgatgggcaatcgcc

SEQ ID NO: 587022 - DNA, 75 bp, synthetic construct
  source 1..75: mol_type = other DNA
ggaaaagagataataggattaataccaaaagatagattattaacagagacagatgcacctttcgcaaaattcagc

SEQ ID NO: 587023 - DNA, 75 bp, synthetic construct
  source 1..75: mol_type = other DNA
acctggttcgacgcaccacggcgctgcaaggaatgcgcagcaacctgaatatggaatcttcccgctgggcacgcg

SEQ ID NO: 587024 - DNA, 75 bp, synthetic construct
  source 1..75: mol_type = other DNA
agcggcgattgttgccgcaggtccggcctttgcagccggtggagaaccgtactcgggcgctattcgctatcgcgg

SEQ ID NO: 587025 - DNA, 75 bp, synthetic construct
  source 1..75: mol_type = other DNA
caaaaatcaacgccaccgaagaagagatcctgcaaggcgaaccggaagtaaaagtagagtcagccgaacgtcatc

SEQ ID NO: 587026 - DNA, 75 bp, synthetic construct
  source 1..75: mol_type = other DNA
ataaccctctcgaacgcaacggtgaaactgcccactgtgcaacttgtgccaaagatttcaccattcaggcgcttt

SEQ ID NO: 587027 - DNA, 75 bp, synthetic construct
  source 1..75: mol_type = other DNA
agtgttaaaagcttgtggtgctgtggattatttctgccaacatgggcacggtttaatatctaaaaaacgcgttga

SEQ ID NO: 587028 - DNA, 75 bp, synthetic construct
  source 1..75: mol_type = other DNA
caccgaagcgcgggtctacgcggcagaccagttgtttgccaccctcgacccgacgttgcggcgtattgacgtcgc

SEQ ID NO: 587029 - DNA, 75 bp, synthetic construct
  source 1..75: mol_type = other DNA
ttttcgtcgttatccggcgccgcagcaatttgtggtttgttgtgaatattgtctgagtcaacaggaacaaaaagc

SEQ ID NO: 587030 - DNA, 75 bp, synthetic construct
  source 1..75: mol_type = other DNA
cgttattctggctgcactggataatatttctttaaccagcctgcaggaagacacaaattatcagttgtctgccat

SEQ ID NO: 587031 - DNA, 75 bp, synthetic construct
  source 1..75: mol_type = other DNA
atggcaatgacttaccacctggacgtcgtcagcgcagagcaacaaatgttctctggtctggtcgagaaaatccag

SEQ ID NO: 587032 - DNA, 75 bp, synthetic construct
  source 1..75: mol_type = other DNA
ctcacggcgacgtagattacgctcaggcgtctgcggaactggccaaagcgatcgcgcagctgcgcgttatcgagt

SEQ ID NO: 587033 - DNA, 75 bp, synthetic construct
  source 1..75: mol_type = other DNA
acgttacgtggcctgcaggaactgtccttggtaaagccaaacttatcgtgaacgatgattactggatgcaaaaca

SEQ ID NO: 587034 - DNA, 75 bp, synthetic construct
  source 1..75: mol_type = other DNA
ccagcaaataatgatccattgctaataatgcaagtaaccataccagatggaatgacttgtgagcctgattatata

SEQ ID NO: 587035 - DNA, 75 bp, synthetic construct
  source 1..75: mol_type = other DNA
tgatgttaatagcaacatatataaagaaattatgctttcttattcttgcaaaaataaagcattgattaatggatt

SEQ ID NO: 587036 - DNA, 75 bp, synthetic construct
  source 1..75: mol_type = other DNA
agctggaaaggtattgatagcggattcttctggtcggcaatgcaaaatgccgtcgactggcgtatggatctggtc

SEQ ID NO: 587037 - DNA, 75 bp, synthetic construct
  source 1..75: mol_type = other DNA
cagggcacacagtatcagatctgggaagacgactggatgattgatgagtgtttatgcgcgatgtatgacgcatca

SEQ ID NO: 587038 - DNA, 75 bp, synthetic construct
  source 1..75: mol_type = other DNA
ataaaccttgccagtaaagaaaactggcgtgaggatgaacgggaaatattgcagcaatttgcttgccagtatatg

SEQ ID NO: 587039 - DNA, 75 bp, synthetic construct
  source 1..75: mol_type = other DNA
gccgcagtgggtctttgcgctcgctgcgctgaccatcgttggcaccatgaatatgattggtgtgaaatggtttgc

SEQ ID NO: 587040 - DNA, 75 bp, synthetic construct
  source 1..75: mol_type = other DNA
tcctggctgacattactgtttttgctgagcgtcctggtgctgatggcgttcgattacccgaacgggacttatacc

SEQ ID NO: 587041 - DNA, 75 bp, synthetic construct
  source 1..75: mol_type = other DNA
atgtacccccggctggcaaaggcttatccgaccaataaattaccggatttacggggcgaatttatccgtggctgg

SEQ ID NO: 587042 - DNA, 75 bp, synthetic construct
  source 1..75: mol_type = other DNA
gcaacatattaatgagccagagaaaatgctggcggtactgaaagcttttgtacaaccgatgaaagcagcgacgcg

SEQ ID NO: 587043 - DNA, 75 bp, synthetic construct
  source 1..75: mol_type = other DNA
ggcattcctttctccgatccgctggctgatgggccaactattcaaaacgcaaccctgcgggcttttgccgcaggc

SEQ ID NO: 587044 - DNA, 75 bp, synthetic construct
  source 1..75: mol_type = other DNA
aaacgctggcgattgatgttgattatctcgatcccggtaacgggcctgacggcgatatcgaacatcacaccgaaa

SEQ ID NO: 587045 - DNA, 75 bp, synthetic construct
  source 1..75: mol_type = other DNA
gtcaatttacacggcattcacgttccttatggtgaccattttgtattgaaagatgcacaaaatatggacagcgtt

SEQ ID NO: 587046 - DNA, 75 bp, synthetic construct
  source 1..75: mol_type = other DNA
atggaacgctacgaatctctatttatccgtttgaaggagcgccatgaaggcgcattcgttcctttcgtcacgctc

SEQ ID NO: 587047 - DNA, 75 bp, synthetic construct
  source 1..75: mol_type = other DNA
cccgaccattcccattggcctgctgatgtatgccaacctggtgtttaacaaaggcattgatgagttttatgccca

SEQ ID NO: 587048 - DNA, 75 bp, synthetic construct
  source 1..75: mol_type = other DNA
gcagaatcagactatacgcaacggcttaaaagctctccaagatttgggctatctcgaatacagcgagattaagcg

SEQ ID NO: 587049 - DNA, 75 bp, synthetic construct
  source 1..75: mol_type = other DNA
caaaatacagcaagcgtaacaagccaaatgagatcgatgcttcaaaggagcttgtccagctcgaagtagcccgtt

SEQ ID NO: 587050 - DNA, 75 bp, synthetic construct
  source 1..75: mol_type = other DNA
aaaataacaaagaagtagaagataacatcgacaactttgaagaaggttcccttgaattgtacacaggggaacttg

SEQ ID NO: 587051 - DNA, 75 bp, synthetic construct
  source 1..75: mol_type = other DNA
tgcgttttctgggcacttttcttactgacatgaatcataggcactgttgcaaagttagcgatgaggcagcctttt

SEQ ID NO: 587052 - DNA, 75 bp, synthetic construct
  source 1..75: mol_type = other DNA
ggtgccgcctttcagccgcgaacctatcccaaagtcgatattttaaatgtgattctggatggagaagcagagtat

SEQ ID NO: 587053 - DNA, 75 bp, synthetic construct
  source 1..75: mol_type = other DNA
gatatcgcttctgatggtacacctcatcaatagtgtggactacaacgagcagaaagacactgtggtgttctatgc

SEQ ID NO: 587054 - DNA, 75 bp, synthetic construct
  source 1..75: mol_type = other DNA
tggcctggttaacgacgcctccaaaaatggaaccacggtcatcattacggatgacaacggcgagatgattaatct

SEQ ID NO: 587055 - DNA, 75 bp, synthetic construct
  source 1..75: mol_type = other DNA
caggagaatacttgttggaaatgagcggtatcaacaagtcttttccaggcgttaaggcacttgataacgttaatt

SEQ ID NO: 587056 - DNA, 75 bp, synthetic construct
  source 1..75: mol_type = other DNA
tgattcgatgcgggtaaaaacaccggggcatcggacgcaaattggttcgctctccggtggtaatcagcaaaaggt

SEQ ID NO: 587057 - DNA, 75 bp, synthetic construct
  source 1..75: mol_type = other DNA
cagtggatcgccaccgaaccgctggcagggctgacgatggacaagatcatcgccatgatggttgggcgttctctt

SEQ ID NO: 587058 - DNA, 75 bp, synthetic construct
  source 1..75: mol_type = other DNA
agggggcgtcgcgtccacgttatacgctgggagcctgaaacacagcgggttatttacctgcgtgatggttatccg

SEQ ID NO: 587059 - DNA, 75 bp, synthetic construct
  source 1..75: mol_type = other DNA
ctcgtctgaatgatgaagacttacataaactcagttattgcaccgccagatattccggcaggcttcgtggctgtt

SEQ ID NO: 587060 - DNA, 75 bp, synthetic construct
  source 1..75: mol_type = other DNA
taacgccagcgttctctattcctacatttcatcaattcatcaggtctggctgcagcagctttatcctatgttggc

SEQ ID NO: 587061 - DNA, 75 bp, synthetic construct
  source 1..75: mol_type = other DNA
ggaaaatcaacattattaaaatgtttgtttggtatttaccaaaaagattccggcaccattttatttcagggtaaa

SEQ ID NO: 587062 - DNA, 75 bp, synthetic construct
  source 1..75: mol_type = other DNA
attacaccgattgcacaggccgcaaactcccttgttaccaaatcacccgcgacggttttgcgtttcttgccatgg

SEQ ID NO: 587063 - DNA, 75 bp, synthetic construct
  source 1..75: mol_type = other DNA
gttgatggtgtgttcttggaaaaattccgaccgcaaataggaggatatctcgtcactgctgaaaatggctatctg

SEQ ID NO: 587064 - DNA, 75 bp, synthetic construct
  source 1..75: mol_type = other DNA
aagccataaaccacggatttgcactggtaactgaggagcgccgctcaacgggaatttatgcctatctggatattg

SEQ ID NO: 587065 - DNA, 75 bp, synthetic construct
  source 1..75: mol_type = other DNA
aaacgtaccgatattgttgagacgttatttggtattcgcgagaaatcggctggcaccattacgttgcacggcaaa

SEQ ID NO: 587066 - DNA, 75 bp, synthetic construct
  source 1..75: mol_type = other DNA
cgcgtggcattgatgttggcgcgaagtttgaaatttatcaattaattgccgagctggcgaaaaaaggcaagggga

SEQ ID NO: 587067 - DNA, 75 bp, synthetic construct
  source 1..75: mol_type = other DNA
attaccgtttaattcatggacaagttataacaaaatggttaaaaagaagtgatgctaataaaataattgtcattg

SEQ ID NO: 587068 - DNA, 75 bp, synthetic construct
  source 1..75: mol_type = other DNA
tgctatttttctcattattgcattcagatataaagcgtccgttcacttttagccgttttctctccgaaatgaaaa

SEQ ID NO: 587069 - DNA, 75 bp, synthetic construct
  source 1..75: mol_type = other DNA
atgaagacacactggatgacctgcgggccgttcaggtggtgaacggtgtcccccgcgtgccggagcaacgctcaa

SEQ ID NO: 587070 - DNA, 75 bp, synthetic construct
  source 1..75: mol_type = other DNA
ttattctgctgttcgccgaaacgtacgcgtggattgtgctggtgctcggctatttccaggtcgtatggcctctga

SEQ ID NO: 587071 - DNA, 75 bp, synthetic construct
  source 1..75: mol_type = other DNA
aggtgatagaaaagagccgtcgtaccggtattacatgggctgaggcatccgataacgtactgaccgccgcctctt

SEQ ID NO: 587072 - DNA, 75 bp, synthetic construct
  source 1..75: mol_type = other DNA
aggaaacttttatctcaacgctgcccagaacgcgttgcgtagtgcttatgacaacgacaccacatacggtttcaa

SEQ ID NO: 587073 - DNA, 75 bp, synthetic construct
  source 1..75: mol_type = other DNA
agtccgataataataagaaaagggaaattatacgtgagtatgtgaacgacgtaacgaaagaatatgcgttatgta

SEQ ID NO: 587074 - DNA, 75 bp, synthetic construct
  source 1..75: mol_type = other DNA
aatatattatctattccgtcagttcagctttatatctataatctttctggctgtttattccaccaatgttaaaaa

SEQ ID NO: 587075 - DNA, 75 bp, synthetic construct
  source 1..75: mol_type = other DNA
agttgaactgcagccgggtgaggtgttcgtaatgacagacatcattgatggtaaaccgcagtattcgcgtattga

SEQ ID NO: 587076 - DNA, 75 bp, synthetic construct
  source 1..75: mol_type = other DNA
aggcgcagtagttgaactgcagccgggtgagatgttcgtgatgacagacatcattgatggtaaaccgcagtattc

SEQ ID NO: 587077 - DNA, 75 bp, synthetic construct
  source 1..75: mol_type = other DNA
ttattcaaaaatatggttttgcataatcctaatcagtacaacatcagtactcaataacctgattttattatattt

SEQ ID NO: 587078 - DNA, 75 bp, synthetic construct
  source 1..75: mol_type = other DNA
gcatacctggtcatctggtaccaatggtgttgtggcagctacattctcactgcgccttaaaggcaagcctgtcca

SEQ ID NO: 587079 - DNA, 75 bp, synthetic construct
  source 1..75: mol_type = other DNA
cgtatacctgcgagatttctgattcagcaagcccggttagcaaggtgacctccacttcctgcactgttaccgtca

SEQ ID NO: 587080 - DNA, 75 bp, synthetic construct
  source 1..75: mol_type = other DNA
caactatgctgccagtgaaatcgaagagggtttctgggaagaggacgaagacgacaagcatatcaagacctacac

SEQ ID NO: 587081 - DNA, 75 bp, synthetic construct
  source 1..75: mol_type = other DNA
cttatgacatccgtggtgaactgggtgaggaactgaacgaggacatcgcctaccgtatcgggcgcgcctacggcg

SEQ ID NO: 587082 - DNA, 75 bp, synthetic construct
  source 1..75: mol_type = other DNA
tcgcgggaccctgcgtcagatttcggtgctgaaggagtacgttgaccacctgatgggctacgtggacctggcgaa

SEQ ID NO: 587083 - DNA, 75 bp, synthetic construct
  source 1..75: mol_type = other DNA
acgttgagtccagagcggatacggcgttaatgaatgagaagaccgccgagctgctcaacctgttaaaagaggaat

SEQ ID NO: 587084 - DNA, 75 bp, synthetic construct
  source 1..75: mol_type = other DNA
aagataagaatatcaaagtttatttccaaactattcctgaagaagatcctgccagcctacaaaaaatcaaaaata

SEQ ID NO: 587085 - DNA, 75 bp, synthetic construct
  source 1..75: mol_type = other DNA
gatgccgacaaacttcaaatcatcgaagataagaatatcaaagtttatttccaaactattcctgaagaagatcct

SEQ ID NO: 587086 - DNA, 75 bp, synthetic construct
  source 1..75: mol_type = other DNA
attaccgtttaattcatggacaagtcataacaaaatggctaaaaaggagtgatgcaaataaaataattgttattg

SEQ ID NO: 587087 - DNA, 75 bp, synthetic construct
  source 1..75: mol_type = other DNA
gaagagatctatttcgccacgttccatctcggcgtggatggcggcattgaagttaccgccagccataatccgatg

SEQ ID NO: 587088 - DNA, 75 bp, synthetic construct
  source 1..75: mol_type = other DNA
tcaaaccgaaaaccattgtgttaggcggtgatgtccgcctcaccagcgaaaccttaaaactggcgctggcgaaag

SEQ ID NO: 587089 - DNA, 75 bp, synthetic construct
  source 1..75: mol_type = other DNA
acgacaagcacatcaaaacctacaccatcagattcccggattccggcttccgcgtggtggctctctccagtcgtc

SEQ ID NO: 587090 - DNA, 75 bp, synthetic construct
  source 1..75: mol_type = other DNA
gcgttcccggcgtcgggggagatcaaccgcaagctgggaaatgcggcggaggcgatagcgcgcatccgggcgcag

SEQ ID NO: 587091 - DNA, 75 bp, synthetic construct
  source 1..75: mol_type = other DNA
cccttctgttggtatcgatctcaatccaattgcgtgcctgatatctcgggtcaaaaccagtcctttatcggatgg

SEQ ID NO: 587092 - DNA, 75 bp, synthetic construct
  source 1..75: mol_type = other DNA
agaaaacgctgggcgaactggtacgcgaccggatggcggcgtttccggcaagcggtgagatcaacagcaaactgg

SEQ ID NO: 587093 - DNA, 75 bp, synthetic construct
  source 1..75: mol_type = other DNA
gagctgggactgattacctaccagacggaatatgatccgcttattggctgttatattccgactgacatcacgttc

SEQ ID NO: 587094 - DNA, 75 bp, synthetic construct
  source 1..75: mol_type = other DNA
ctgcaggggctgtgttttcactatgacccgctggccaaccgtgtccagtgctccatcaccacactggccattgag

SEQ ID NO: 587095 - DNA, 75 bp, synthetic construct
  source 1..75: mol_type = other DNA
ctttttcagcgatttcttgcatccggtatcgcatggccattgcccgattcagtttcattcgctcaacttgacgcc

SEQ ID NO: 587096 - DNA, 75 bp, synthetic construct
  source 1..75: mol_type = other DNA
agaaggcacatggcgaaaagaacggcgagccagctacagccgtgaatttaaggtccgtctggctaagcaggcatt

SEQ ID NO: 587097 - DNA, 75 bp, synthetic construct
  source 1..75: mol_type = other DNA
gtggtaaaactgtttgcccccctcactccggaacttcttagggtgctcattcgcgaaatgaaaggagggatccga

SEQ ID NO: 587098 - DNA, 75 bp, synthetic construct
  source 1..75: mol_type = other DNA
gtggtaaaactgtttgcccctctcactccggaacttcttagggtgctcattcgcgaaatgaaaggggggagccga

SEQ ID NO: 587099 - DNA, 75 bp, synthetic construct
  source 1..75: mol_type = other DNA
aaagtaaaattttatgaatgtgatgtttgtgatgatgaatcaattaataaaatatttaataataatgatttttat

SEQ ID NO: 587100 - DNA, 75 bp, synthetic construct
  source 1..75: mol_type = other DNA
ggtaaggaagacccggtctatgctgatgttattcctacaaagaacagaaggaagtcactatttaacgtttccaat

SEQ ID NO: 587101 - DNA, 75 bp, synthetic construct
  source 1..75: mol_type = other DNA
gcaaataaatgtaatagaggaaaagataatttacctctaacttatgatggattctatgtttgcataaggatagat

SEQ ID NO: 587102 - DNA, 75 bp, synthetic construct
  source 1..75: mol_type = other DNA
ctcaaatcagcgaaggcacatggcgaaaagaacggcgagccagctacagccgtgaatttaaggtccgtctggcta

SEQ ID NO: 587103 - DNA, 75 bp, synthetic construct
  source 1..75: mol_type = other DNA
ctcagcgtctaggtctcagtcattccacaatacatacgctttttcagcgatttattgcatccggtatcgcatggc

SEQ ID NO: 587104 - DNA, 75 bp, synthetic construct
  source 1..75: mol_type = other DNA
gttaggtattacacagaaaacgctatgtgagtggaatattaagcatcgtcatcgggctatcctggcaccaattcg

SEQ ID NO: 587105 - DNA, 75 bp, synthetic construct
  source 1..75: mol_type = other DNA
gtggcgttaacgcctgcgctgcaacctattgatggcgtggcggtgagttatattgatgctgccgtagcgttgggt

SEQ ID NO: 587106 - DNA, 75 bp, synthetic construct
  source 1..75: mol_type = other DNA
cggtatttatgataacaccaataccctggttgacctgaatactggtaaatctgctactgtctctgaaagaaggtc

SEQ ID NO: 587107 - DNA, 75 bp, synthetic construct
  source 1..75: mol_type = other DNA
gaccgttctgtatttcaccgctaactatgtctctactaaagatgctgtaaccatcggttacggtaacgccgaagt

SEQ ID NO: 587108 - DNA, 75 bp, synthetic construct
  source 1..75: mol_type = other DNA
tggtgtgagcttttttatgcgtccgctcggtgggattatcgttggtgcctgggccgatcgcttcgggcgtaaacc

SEQ ID NO: 587109 - DNA, 75 bp, synthetic construct
  source 1..75: mol_type = other DNA
tgtagcgcgcctggcattagctgccgcagagctgcctattggcgtggtcaccgcaacgttgggtgcgccggtgtt

SEQ ID NO: 587110 - DNA, 75 bp, synthetic construct
  source 1..75: mol_type = other DNA
cgtctctaacggcgcaggcgttggacttattgccgccgtattgctgggacaaggacaattacctaactgggcact

SEQ ID NO: 587111 - DNA, 75 bp, synthetic construct
  source 1..75: mol_type = other DNA
gttttgcccgccgtcatctttcgaccagccgattattgctggcgggagttgcattagggattatctgtagcgcat

SEQ ID NO: 587112 - DNA, 75 bp, synthetic construct
  source 1..75: mol_type = other DNA
gaagattgaaacagcgcgttttccgggcaacatatccgtagccataaacgagatcgggataaataccagcaaata

SEQ ID NO: 587113 - DNA, 75 bp, synthetic construct
  source 1..75: mol_type = other DNA
ctcagctggcgaatgttgaaaaactcagcttgcaggaaatggttattggtttccgtaagaacatggagaatctgg

SEQ ID NO: 587114 - DNA, 75 bp, synthetic construct
  source 1..75: mol_type = other DNA
gaaatggctggagatatccagaaacagcacgactgctcaccatggggattgataagctcagtgccagtccatccc

SEQ ID NO: 587115 - DNA, 75 bp, synthetic construct
  source 1..75: mol_type = other DNA
tttggcaatgcgctcgaattttttgattttggcgtttacaacttttttgtggtctatatcagtacgcttttcttc

SEQ ID NO: 587116 - DNA, 75 bp, synthetic construct
  source 1..75: mol_type = other DNA
cgcgatggtgttcaccattgcgctgatgagtcttggtacactgatgatcggcatcgcaccgacgtatgaaacggc

SEQ ID NO: 587117 - DNA, 75 bp, synthetic construct
  source 1..75: mol_type = other DNA
taaaacagatcgtttcccgggcaatattgacgtagttatcaacgaaatggggatagaaaccagtaaataccggaa

SEQ ID NO: 587118 - DNA, 75 bp, synthetic construct
  source 1..75: mol_type = other DNA
gggaacgtcaggatattgtcaccctggtgaaacggcagctgacgcgcgaaatcgcggaagggcgcttcactgcca

SEQ ID NO: 587119 - DNA, 75 bp, synthetic construct
  source 1..75: mol_type = other DNA
gcgtttctgactgctacacccgcgtaatgcttaaagtggaagagctgcgccagagtttgcgcattcttgagcagt

SEQ ID NO: 587120 - DNA, 75 bp, synthetic construct
  source 1..75: mol_type = other DNA
tgggatcgcctgctgcgtgagttcctcgactggatgccgaaacgtctggcgtcttacgagaaagcggcgctgcaa

SEQ ID NO: 587121 - DNA, 75 bp, synthetic construct
  source 1..75: mol_type = other DNA
gtgtttctgactgctacacccgcgtaatgctgaaagtagaagagttgcgccagagtctgcgcattcttgagcagt

SEQ ID NO: 587122 - DNA, 75 bp, synthetic construct
  source 1..75: mol_type = other DNA
catctgatttccatcgatcgtaaccgcgacatcatgctgaaggtggcgctggctgaaaacgacctgcacgtaccg

SEQ ID NO: 587123 - DNA, 75 bp, synthetic construct
  source 1..75: mol_type = other DNA
cgactttgaaatcccggttggtggtggtgtttctgactgctacacccgcgtaatgctgaaagtggaagagctgcg

SEQ ID NO: 587124 - DNA, 75 bp, synthetic construct
  source 1..75: mol_type = other DNA
tgggcgaacgccagtcctggcacagctacattccgtatactgaccgtatcgaatacctcggcggctgcgttaacg

SEQ ID NO: 587125 - DNA, 75 bp, synthetic construct
  source 1..75: mol_type = other DNA
ctacattccgtataccgaccgtatcgaatacctcggcggctgcgttaacgaaatgccttacgtgctggcggtaga

SEQ ID NO: 587126 - DNA, 75 bp, synthetic construct
  source 1..75: mol_type = other DNA
ctaactggtatgagcgtgaaacctgggatctgtttggcattacattcgacggtcacccgaacctgcgccgcatca

SEQ ID NO: 587127 - DNA, 75 bp, synthetic construct
  source 1..75: mol_type = other DNA
aaaacgtgcccgtgcgcatcgtgatgcgaacagggaacgtcaggatatcgtcaccctggtgaaacggcagctgac

SEQ ID NO: 587128 - DNA, 75 bp, synthetic construct
  source 1..75: mol_type = other DNA
gatcgtcagaaaatttacgatctggtggaagcaatcactggttttcgtatgcacccggcgtggttccgtattggc

SEQ ID NO: 587129 - DNA, 75 bp, synthetic construct
  source 1..75: mol_type = other DNA
tgtcgactgcgtaccagacatcggttaccaccaccgtggtgcggagaaaatgggcgaacgccagtcctggcacag

SEQ ID NO: 587130 - DNA, 75 bp, synthetic construct
  source 1..75: mol_type = other DNA
tgtcgactgcgtaccagacatcggctaccaccaccgtggtgcggagaaaatgggcgaacgccagtcctggcatag

SEQ ID NO: 587131 - DNA, 75 bp, synthetic construct
  source 1..75: mol_type = other DNA
catctgatttcgatcgatcgcaaccgcgacatcatgctaaaggtggcgctggcagaaaacgatctacatgtgccg

SEQ ID NO: 587132 - DNA, 75 bp, synthetic construct
  source 1..75: mol_type = other DNA
gtaaagaacccgaatccggtgtttacaccccgtgaaggtgccggaacgctgaagttctgcgaaaaactgatggaa

SEQ ID NO: 587133 - DNA, 75 bp, synthetic construct
  source 1..75: mol_type = other DNA
gcgaagtggagcgtcgtgtgaaagagcgcatgattctgtcacgtaaccgtaattacagccggctggccacagctt

SEQ ID NO: 587134 - DNA, 75 bp, synthetic construct
  source 1..75: mol_type = other DNA
gaaacgtgcccgtgcgcgccgcgatgcaggcaggacccgtcaggacattgtcaccctggtgaaacggcagctgac

SEQ ID NO: 587135 - DNA, 75 bp, synthetic construct
  source 1..75: mol_type = other DNA
atgtgtctgaggatgcagttgcgtattttcatgaaaggagatcactcaataacttccatcgagatcgggtaataa

SEQ ID NO: 587136 - DNA, 75 bp, synthetic construct
  source 1..75: mol_type = other DNA
gtgggcttcacctcccgttttgatttcgctattcatgtggcgcatgcccgttcgcgtggtctgcgtcggcgcatg

SEQ ID NO: 587137 - DNA, 75 bp, synthetic construct
  source 1..75: mol_type = other DNA
cgcatgccaccggtgctgcgtcgacgggctattgatgcgctcctgcaggggctgtgtttccactatgacccgctg

SEQ ID NO: 587138 - DNA, 75 bp, synthetic construct
  source 1..75: mol_type = other DNA
ctgttcaaaatttgtctttgatatttataaagaggcgctatgtattccggtgggtgaaatagagacgtttggaca

SEQ ID NO: 587139 - DNA, 75 bp, synthetic construct
  source 1..75: mol_type = other DNA
tatgctataaagcgattagacgccgggctaacagaacaacaaaaacaacgaattgttgaacaggttccctcccgg

SEQ ID NO: 587140 - DNA, 75 bp, synthetic construct
  source 1..75: mol_type = other DNA
gcgggcagggaacgtcaggatatcgtcaccctggtgaaacggcagctgacgcgtgaaatctcggaagggcgcttc

SEQ ID NO: 587141 - DNA, 75 bp, synthetic construct
  source 1..75: mol_type = other DNA
acccgctggccaaccgcgtccagtgttccattaccacactggccattgagtgcggactggcgacagagtccggtg

SEQ ID NO: 587142 - DNA, 75 bp, synthetic construct
  source 1..75: mol_type = other DNA
tggcatcatccgggtctggtgttgattcatgcggagggagtagaaacacctcagccagaattgactgaggtggta

SEQ ID NO: 587143 - DNA, 75 bp, synthetic construct
  source 1..75: mol_type = other DNA
atgtataggtgctgccttatttggtcaaatatcagccgcatcaaattgctggagtaatcacgtcgggatcattat

SEQ ID NO: 587144 - DNA, 75 bp, synthetic construct
  source 1..75: mol_type = other DNA
ttaccaaacgttaatacgtctgaaggttgttttgaaattggtgtcactatcagtaatcctgtatttactgaagat

SEQ ID NO: 587145 - DNA, 75 bp, synthetic construct
  source 1..75: mol_type = other DNA
gaaaacacgaacaggagttattaaataaaatatgcattctttcaatgctggcccgtttacgtccgacgcaaaaag

SEQ ID NO: 587146 - DNA, 75 bp, synthetic construct
  source 1..75: mol_type = other DNA
gcgctgcgcaccacgcgctggaaatatgaaattgtcgcgcccggcagcgatccgtggaatgagtctgctgcgatg

SEQ ID NO: 587147 - DNA, 75 bp, synthetic construct
  source 1..75: mol_type = other DNA
cggaacgccgctgatggcgattgaagcggcgctggaaagtgcggggcaaatgctgccctgcgagccaccgtatta

SEQ ID NO: 587148 - DNA, 75 bp, synthetic construct
  source 1..75: mol_type = other DNA
caactgatcgactggggcggggcgttacgctggctgaaatcgacagccgaggacaatcaaatccatcgcatcgcc

SEQ ID NO: 587149 - DNA, 75 bp, synthetic construct
  source 1..75: mol_type = other DNA
tacggttcaatgaaagaatgcatggctgccgcagcagaacaaaaaattcccggtaactgttatccggtagataaa

SEQ ID NO: 587150 - DNA, 75 bp, synthetic construct
  source 1..75: mol_type = other DNA
ggccgtcgagcaatttgcgatgtataccggcgtgcggcccgatacgcagttgattgctgaagctgcacaatttgc

SEQ ID NO: 587151 - DNA, 75 bp, synthetic construct
  source 1..75: mol_type = other DNA
ttgtggacattgccagaaaaacaatcgagaaaggcatgacactggataaggatgtgcgtatttcagttgaaaatg

SEQ ID NO: 587152 - DNA, 75 bp, synthetic construct
  source 1..75: mol_type = other DNA
taatagcagctggtttgctggctggttgcggcgagaaaacgccaaaatgtagtagtgacgatgcaaaaaatcttg

SEQ ID NO: 587153 - DNA, 75 bp, synthetic construct
  source 1..75: mol_type = other DNA
actgccctgtggcttaagaccaaaaaactggagcaacgaagtgtgcctggtatcgacggtggcgttgtcatgctt

SEQ ID NO: 587154 - DNA, 75 bp, synthetic construct
  source 1..75: mol_type = other DNA
acgaagcaatcagaaataacgccatagacgcaatactctcacttcccatcgacgacaagtcacctcacgaagtcc

SEQ ID NO: 587155 - DNA, 75 bp, synthetic construct
  source 1..75: mol_type = other DNA
cagagccgccattgaacgtttaggcccgctaccggaagcgatactgagcggcaagctgcgctcatcgttttcatc

SEQ ID NO: 587156 - DNA, 75 bp, synthetic construct
  source 1..75: mol_type = other DNA
ctgtatttactgaagatgccattaacaagagaaaacaagaacgggagctattaaataaaatatgcattgtttcaa

SEQ ID NO: 587157 - DNA, 75 bp, synthetic construct
  source 1..75: mol_type = other DNA
agggctgctctactttttggtgattatccctaatacccaacagagtatgttgctgctgtgtattagcctggcagt

SEQ ID NO: 587158 - DNA, 75 bp, synthetic construct
  source 1..75: mol_type = other DNA
gtacagaaacggcgactgggctcgatgggggcgctggccagcaccataaatattatcgtgctggataacccgatg

SEQ ID NO: 587159 - DNA, 75 bp, synthetic construct
  source 1..75: mol_type = other DNA
ttaatgccttcagcaaagcctgcggcaaaccggttaattatcattttgcaccgcgtcgcgagggcgaccttccgg

SEQ ID NO: 587160 - DNA, 75 bp, synthetic construct
  source 1..75: mol_type = other DNA
agaagtgaaggttgagtctgctgaacgccatcatgcgatggtcaatttctggcgcaccacgctttcctgtgttct

SEQ ID NO: 587161 - DNA, 75 bp, synthetic construct
  source 1..75: mol_type = other DNA
cgcgaaacgcccatcactatttatagctgggtagcggcggcaactcgttatcagttacttaagcgtggtgtcgtc

SEQ ID NO: 587162 - DNA, 75 bp, synthetic construct
  source 1..75: mol_type = other DNA
tgcttaatcagtttgtttctgccgctgtttccgcgatgactaccaatgtggcacgtcgtaaagagaaccacctcc

SEQ ID NO: 587163 - DNA, 75 bp, synthetic construct
  source 1..75: mol_type = other DNA
ttccgtttgtgctgacgctcgggctaatcttccttggtttcagcggcctgggcatcagtatctggccgcacatta

SEQ ID NO: 587164 - DNA, 75 bp, synthetic construct
  source 1..75: mol_type = other DNA
agcgagaaataaaactaaagcaaggcgacgcgaaaacatatcgggttttcactacctgggatggtacaatggata

SEQ ID NO: 587165 - DNA, 75 bp, synthetic construct
  source 1..75: mol_type = other DNA
atgaaaacgttattaccaaacgttaatacgtctgaaggttgttttgaaattggtgtcactatcagtaacccagta

SEQ ID NO: 587166 - DNA, 75 bp, synthetic construct
  source 1..75: mol_type = other DNA
cagcgtactggatgtggttaacgccttcagcaaagcgtgcggcaaaccggttaactatcattttgcaccgcgtcg

SEQ ID NO: 587167 - DNA, 75 bp, synthetic construct
  source 1..75: mol_type = other DNA
tcgcgttactcctgaacacattgccagcataatcgccagcgaacattactttacggccgctgatggtgctcgctt

SEQ ID NO: 587168 - DNA, 75 bp, synthetic construct
  source 1..75: mol_type = other DNA
tttgatctgggaatcggtattttgttcccgtttcataagcacgatgtcgatcgcgatacaatgatgaataccgtt

SEQ ID NO: 587169 - DNA, 75 bp, synthetic construct
  source 1..75: mol_type = other DNA
ctggacgagaaaatcactgtcgaaggcatgtttactatagttcttcgcacccttacccgcgatgaccagttcttt

SEQ ID NO: 587170 - DNA, 75 bp, synthetic construct
  source 1..75: mol_type = other DNA
aaagagctgtggtcaatttggtgagtgggatccggcaacttacagcgtcgaagattcgctgtttggcaccattga

SEQ ID NO: 587171 - DNA, 75 bp, synthetic construct
  source 1..75: mol_type = other DNA
gtgaaaagtgcaatgacaagctctccactgcgggtcgcgataataggcgcaggccaggtggcggataaggttcat

SEQ ID NO: 587172 - DNA, 75 bp, synthetic construct
  source 1..75: mol_type = other DNA
ttcattacgagcataccctgatggcgctggaggcaggctgccatgtgatgtgcgagaaaccgcccgccatgacac

SEQ ID NO: 587173 - DNA, 75 bp, synthetic construct
  source 1..75: mol_type = other DNA
ggagtggtcattgggtaccatgccctggcgcttactgcgtttaatggcggtcgtgctggcggggattgccgcgta

SEQ ID NO: 587174 - DNA, 75 bp, synthetic construct
  source 1..75: mol_type = other DNA
gcaccattttgctgccgtcgctgtcgaaaagttttgccagtggcaatcatgatgaatacaaccgtttgatggact

SEQ ID NO: 587175 - DNA, 75 bp, synthetic construct
  source 1..75: mol_type = other DNA
tttgcactcaacatccgcgaacagtcgattatgaacgtcagcttttgtggtgataaagccggtgcgacgctgttt

SEQ ID NO: 587176 - DNA, 75 bp, synthetic construct
  source 1..75: mol_type = other DNA
gccgtgacggacggctatatacgccggggatatatcaccagccgggcctttctgacagagcaggacctttcaggg

SEQ ID NO: 587177 - DNA, 75 bp, synthetic construct
  source 1..75: mol_type = other DNA
ggagcgtttgtgcgagtgtcgtgtcatcgaccgcaccggccttattttagatattttcgcccaacgtgcgcgtac

SEQ ID NO: 587178 - DNA, 75 bp, synthetic construct
  source 1..75: mol_type = other DNA
cttatcatcactttaatactcttacgtttcgcccgtcgtcatctttcgaccagtcggttattgctggctggtgtt

SEQ ID NO: 587179 - DNA, 75 bp, synthetic construct
  source 1..75: mol_type = other DNA
tgagcaagtgactaacggcatcctgggcgaaatttacgtcaccaccgcccgcgccctgcgtcgctgcggcgttcc

SEQ ID NO: 587180 - DNA, 75 bp, synthetic construct
  source 1..75: mol_type = other DNA
cggcaactgttatccggttgataaagttattcacatggacaataacgaaatcccggcaggacttaaaacagcacc

SEQ ID NO: 587181 - DNA, 75 bp, synthetic construct
  source 1..75: mol_type = other DNA
cgctatcaccagcaatttaaaaagcagctcgacccttgcggcgtgtttaaccccggtcgcatgtacgcggaacta

SEQ ID NO: 587182 - DNA, 75 bp, synthetic construct
  source 1..75: mol_type = other DNA
ccgtctggcgtgctgggcgtggcgctggggaccattttgctgccatcgctgtcgaaaagttttgccagcggtaat

SEQ ID NO: 587183 - DNA, 75 bp, synthetic construct
  source 1..75: mol_type = other DNA
ctactgctctgtatgccaacaacatcaaagtgactaacgacggtattctggatgtaggtaacactgcggcgaatg

SEQ ID NO: 587184 - DNA, 75 bp, synthetic construct
  source 1..75: mol_type = other DNA
caacgcgaccttctctgctgctaacaaagctgacctgggtgcatacacctatcaggctgaacagcgcggtaacac

SEQ ID NO: 587185 - DNA, 75 bp, synthetic construct
  source 1..75: mol_type = other DNA
tggtgggcgcggcgtggatccatgtgctgccctgggaggggatgtttgtcttgtttgccgcattggcagcgatct

SEQ ID NO: 587186 - DNA, 75 bp, synthetic construct
  source 1..75: mol_type = other DNA
ctggacctgaaaatagaaaatctgcattttcacgaccttcgccatgaagccatcagccgtttttttgaactcggc

SEQ ID NO: 587187 - DNA, 75 bp, synthetic construct
  source 1..75: mol_type = other DNA
gaaaatgaaaactatcggcaaaatgctggacgagaaaatcactgtcgaaggcatgtttactatagttcttcgcac

SEQ ID NO: 587188 - DNA, 75 bp, synthetic construct
  source 1..75: mol_type = other DNA
ctgcagcaaccgaacagaaaattcccggtatagactggccccatgaatctccagacaaccaatatcacttaaata

SEQ ID NO: 587189 - DNA, 75 bp, synthetic construct
  source 1..75: mol_type = other DNA
tggtgcgattaaccctgtttgccagcgatatgagtagaaggtacggtttctgcggcgatgggaatgctgcaaatg

SEQ ID NO: 587190 - DNA, 75 bp, synthetic construct
  source 1..75: mol_type = other DNA
ttaccgtcggtattgaaatcagcaaacatgcctggctgaacgggggcaacggactgtttaatctcttcaaccttg

SEQ ID NO: 587191 - DNA, 75 bp, synthetic construct
  source 1..75: mol_type = other DNA
atggcggtcgtgctggcggggattgccgcgtacttcgctgcactggcggtactgggcttcaaagttaaagaattt

SEQ ID NO: 587192 - DNA, 75 bp, synthetic construct
  source 1..75: mol_type = other DNA
ttgaagaggcggtttgtatcaagatcaccgcgctgatggcgaatgtggcgctgattgctccgttactcgggccat

SEQ ID NO: 587193 - DNA, 75 bp, synthetic construct
  source 1..75: mol_type = other DNA
atatgattcaacccggtatgctcgctgtagtggaagagtatcaggcgggtattgactgggttcctacttcgatga

SEQ ID NO: 587194 - DNA, 75 bp, synthetic construct
  source 1..75: mol_type = other DNA
atatgattcaacccggtatgttggccgtggtggaacaatatcaggcgggcattgattgggttcctacttcgatga

SEQ ID NO: 587195 - DNA, 75 bp, synthetic construct
  source 1..75: mol_type = other DNA
tcaggctgttacttcatccctggctgttgccaacttcttctccaagcgtcatgacgatgtactgaaaaagatccg

SEQ ID NO: 587196 - DNA, 75 bp, synthetic construct
  source 1..75: mol_type = other DNA
agtgctcgctgccattcccacattgtccccggcgcggcaaccttttgcggtactgcttattcctgaacgctcgga

SEQ ID NO: 587197 - DNA, 75 bp, synthetic construct
  source 1..75: mol_type = other DNA
aagaatgtaatacccgtatttgatttaccggtacttcccatcccttccgtcactgacatcacacctggaattaca

SEQ ID NO: 587198 - DNA, 75 bp, synthetic construct
  source 1..75: mol_type = other DNA
atgagacactttatctatcaggacgaaaaatcacataaattctgggcagtagagcagcaggaaaatgaactgcat

SEQ ID NO: 587199 - DNA, 75 bp, synthetic construct
  source 1..75: mol_type = other DNA
cagaaatggtgaaaggctggtttgaacgtttcggtgctgatgccttagtgctggcgctggatgtccgtattgacg

SEQ ID NO: 587200 - DNA, 75 bp, synthetic construct
  source 1..75: mol_type = other DNA
gcgccgcatcaatggcagaaaatgccattctggcagaaagtacgtccgtgggcggcacagcttacccaaatgggc

SEQ ID NO: 587201 - DNA, 75 bp, synthetic construct
  source 1..75: mol_type = other DNA
acattgattacgaactgcttccccctttccaacagcttgatcgtggttgttaccaccttgcggataacgagcgtg

SEQ ID NO: 587202 - DNA, 75 bp, synthetic construct
  source 1..75: mol_type = other DNA
cagagcagttccgcctgtttctggtggagcatccgctggtacgtcacttaacccgacggctgttatggggggtat

SEQ ID NO: 587203 - DNA, 75 bp, synthetic construct
  source 1..75: mol_type = other DNA
aggaacatgcccgcgagaaaatcaacatagttgctgaaaaccgtgggctgactatggctgaactggaagaccgcc

SEQ ID NO: 587204 - DNA, 75 bp, synthetic construct
  source 1..75: mol_type = other DNA
gcagtcattccggtaactgacgatattaatcgatttgcttttcctcatcgctctcgccccagagagatcaattat

SEQ ID NO: 587205 - DNA, 75 bp, synthetic construct
  source 1..75: mol_type = other DNA
gcggagctgaagctaattgcggagaaaacgaaaaaggggtatgtggaaggcaattcggcaaacgtgcatatcccg

SEQ ID NO: 587206 - DNA, 75 bp, synthetic construct
  source 1..75: mol_type = other DNA
gtgcaatctgatgcagcattgctctggagtttctggaactcttactctgcagatgaactggtcgatgacttagtc

SEQ ID NO: 587207 - DNA, 75 bp, synthetic construct
  source 1..75: mol_type = other DNA
ctggacgacagagcagttccgcctgttcctggtggagcatccgctggtacgtcacttaacccgacggctgttatg

SEQ ID NO: 587208 - DNA, 75 bp, synthetic construct
  source 1..75: mol_type = other DNA
tcaggccgcgaacaaagctgcggtcaccatgccttcgtccaagctgaaagtggcaatcgccaacgtgctgaagga

SEQ ID NO: 587209 - DNA, 75 bp, synthetic construct
  source 1..75: mol_type = other DNA
ttttcaaagcgagcgcgtatttaacgcgttaggcggtgaagattcgcttgttcattgggtaagttccaatatcca

SEQ ID NO: 587210 - DNA, 75 bp, synthetic construct
  source 1..75: mol_type = other DNA
tgcgcgccgacgtggcggaggtggccaataccatgtgtgaccttcgggccaggctgaacgatatggagcatcgct

SEQ ID NO: 587211 - DNA, 75 bp, synthetic construct
  source 1..75: mol_type = other DNA
ttcgcgccgaagtggcggaggtggccaatgccatgtgcgacctgcgtacaaccattaatgagatggagcggcggt

SEQ ID NO: 587212 - DNA, 75 bp, synthetic construct
  source 1..75: mol_type = other DNA
gatggctaaccaaagatgaagtattcaaaataggtaatgagtacaaaaaaaatggttacggtcaatatcttctct

SEQ ID NO: 587213 - DNA, 75 bp, synthetic construct
  source 1..75: mol_type = other DNA
tggggggaaatttataggcaatgatgcggtctgtttggcacttggagataatattttttatggacaaaactttag

SEQ ID NO: 587214 - DNA, 75 bp, synthetic construct
  source 1..75: mol_type = other DNA
ttcttatatccccattgccgcgcgaacaggttgaaaacacccctgatggcgtcgtggacctgaattattccctgg

SEQ ID NO: 587215 - DNA, 75 bp, synthetic construct
  source 1..75: mol_type = other DNA
tgaacgcctgacacgccagacgctgtatcgcgccaatcgcctgttcatggaagcgtataccgaaattctggaact

SEQ ID NO: 587216 - DNA, 75 bp, synthetic construct
  source 1..75: mol_type = other DNA
aggagacgagaatgtacggaacatgcgaaacgctatgccgggagctggcagaaaagtatccgggagacgcgccgc

SEQ ID NO: 587217 - DNA, 75 bp, synthetic construct
  source 1..75: mol_type = other DNA
cagcgtgtcagccgcccaggtctgcgcatctataagcgtaaagatgagctgccgaaagttatggcgggtctgggt

SEQ ID NO: 587218 - DNA, 75 bp, synthetic construct
  source 1..75: mol_type = other DNA
ttcgcgccgaagtggcggaggtggccaatgccatgtgcgaccttcgggccaggctgaacgatatggagcatcgct

SEQ ID NO: 587219 - DNA, 75 bp, synthetic construct
  source 1..75: mol_type = other DNA
ggcattaaggttatctattcgacttacgagtcgaacgaaaccatgtacgccaaattgaaaacgtacaaagatggt

SEQ ID NO: 587220 - DNA, 75 bp, synthetic construct
  source 1..75: mol_type = other DNA
gtaacaccaccgatccgaaagagattgaagctgcatataacgagctgaaaaaactgatgccaaacgtcgcagcgt

SEQ ID NO: 587221 - DNA, 75 bp, synthetic construct
  source 1..75: mol_type = other DNA
ctatgcgatgcgcaaatctaccccttatggtgctctcgaacttgaaacagaacctttttcattaatttatggcga

SEQ ID NO: 587222 - DNA, 75 bp, synthetic construct
  source 1..75: mol_type = other DNA
atttattcagcattaataccgcgacgctgggctataaaatgccgctacccgccattattgatgcctgcgccgcac

SEQ ID NO: 587223 - DNA, 75 bp, synthetic construct
  source 1..75: mol_type = other DNA
ctttgaggatattcctgttgaggaagcggctgccgaggcgcgaaagcatcagagcgcacaaccgaccgtcgccaa

SEQ ID NO: 587224 - DNA, 75 bp, synthetic construct
  source 1..75: mol_type = other DNA
cggatcgatggtcaaactgctggcgatgatcctcgagatgagcggcgtgctgacaaaaggatcgccgaccttaac

SEQ ID NO: 587225 - DNA, 75 bp, synthetic construct
  source 1..75: mol_type = other DNA
tgccaacgtcacactggcccgtggttttctgtcgtgatcccgccatgcttcctcatgcgtctcttacatccccca

SEQ ID NO: 587226 - DNA, 75 bp, synthetic construct
  source 1..75: mol_type = other DNA
gaaacgtcccactgtgatttctgttgttggtgctggggggaaaaccagcttgcttttttggctggcagaactgct

SEQ ID NO: 587227 - DNA, 75 bp, synthetic construct
  source 1..75: mol_type = other DNA
ttaacggcaccgtggtacgcctgcatcagggtgactacggacagcagcgcgactacggcaccgatccgcttcccc

SEQ ID NO: 587228 - DNA, 75 bp, synthetic construct
  source 1..75: mol_type = other DNA
tgccgaaacgtcgtcgatggggaaaatcatctaccacacgatgttcgataacatgcaaaaagcgatcgacctgaa

SEQ ID NO: 587229 - DNA, 75 bp, synthetic construct
  source 1..75: mol_type = other DNA
gttcccgcttcccactgcttggcgagctgcaaagcatactcaaacaagccgtggaagaggcaaccgtcaaagcgc

SEQ ID NO: 587230 - DNA, 75 bp, synthetic construct
  source 1..75: mol_type = other DNA
tctctgcggcgtagcgggatttctggtttcggtaggcttaccgtggatggtagatctcttcggtcagggtaatgc

SEQ ID NO: 587231 - DNA, 75 bp, synthetic construct
  source 1..75: mol_type = other DNA
cgggatgtccttactgcgtgcgagcgaaagatctggcagagcagttgagcaacgaacgtgatgattttcagtatc

SEQ ID NO: 587232 - DNA, 75 bp, synthetic construct
  source 1..75: mol_type = other DNA
atgcaaaccgttatttttggtcgtccgggttgcccttactgttactgtgtgcgtgcaaaagatctggctgagaaa

SEQ ID NO: 587233 - DNA, 75 bp, synthetic construct
  source 1..75: mol_type = other DNA
gcctgtcaggacaccggggagattatgttcttcgttaaagtcggttcccgcttcccactgcttggcgagctgcaa

SEQ ID NO: 587234 - DNA, 75 bp, synthetic construct
  source 1..75: mol_type = other DNA
tatcgtcaaaagaattatctgtttattctattaatgcccctgattttattcccggtattgatttctccgaccacc

SEQ ID NO: 587235 - DNA, 75 bp, synthetic construct
  source 1..75: mol_type = other DNA
gaaacacccatgaattgacgcgttggaacgcaaagcaatgccaggccgggcgcattgtcgggctggaacacagag

SEQ ID NO: 587236 - DNA, 75 bp, synthetic construct
  source 1..75: mol_type = other DNA
caacagctcgatcgtggtagttatcgtcttgctgataatgaacgtagcgcccacgaactgacgcgctggcaagga

SEQ ID NO: 587237 - DNA, 75 bp, synthetic construct
  source 1..75: mol_type = other DNA
taacccgcgccatgccaccgccgggctactgcctttggcgctgggcaaaccgtgccaaaatcgggaatatgcccg

SEQ ID NO: 587238 - DNA, 75 bp, synthetic construct
  source 1..75: mol_type = other DNA
tgccagcgcagacgctggacggcagagcagttccgcctgtttctggtggagcatccgctggtacgtcacttaacc

SEQ ID NO: 587239 - DNA, 75 bp, synthetic construct
  source 1..75: mol_type = other DNA
gatcttgtcaaatggctatggaaaacgaatcacccggatgcgattcaaattctgatcctcggtgtaattggcaag

SEQ ID NO: 587240 - DNA, 75 bp, synthetic construct
  source 1..75: mol_type = other DNA
tggcaattaggttttaatgaatggcggcattgcgaggatgacttgcatgaaaaaaaaatatataccgcaaagcgc

SEQ ID NO: 587241 - DNA, 75 bp, synthetic construct
  source 1..75: mol_type = other DNA
ggttacggtgccagtcgtttactggcagatattgactggcaggcactggtggctcgccaacaacatgacccgttg

SEQ ID NO: 587242 - DNA, 75 bp, synthetic construct
  source 1..75: mol_type = other DNA
cccttgccagactgacttcgcccaacaccatcgtgctggcagtacgcggcggttacggtgccagtcgcttactgg

SEQ ID NO: 587243 - DNA, 75 bp, synthetic construct
  source 1..75: mol_type = other DNA
cgagaggcattaaacgagttaagtgttggcaacgatgatactcatgcggaaatcatccaaaaaatggaactgcta

SEQ ID NO: 587244 - DNA, 75 bp, synthetic construct
  source 1..75: mol_type = other DNA
cgccgccattccgacgctatccccagcacggcaaccttttgcggcgttactgctccccgaatgcccggatattgc

SEQ ID NO: 587245 - DNA, 75 bp, synthetic construct
  source 1..75: mol_type = other DNA
tgctgatgttgcagcagcggaaaaagcgaaactgaagcttatcgcggagaaaacgaaaaaaggctatgtggaaaa

SEQ ID NO: 587246 - DNA, 75 bp, synthetic construct
  source 1..75: mol_type = other DNA
aaacgaaaaaaggctatgtggaaaatgcttcagcaaacgtgcatatcccccccatcaccaaagccactcctgaag

SEQ ID NO: 587247 - DNA, 75 bp, synthetic construct
  source 1..75: mol_type = other DNA
actcaatgacggcaagaaatcagaagcgtgcgcacagcttaaacgctgggtatacgctggcggtaagaagtggca

SEQ ID NO: 587248 - DNA, 75 bp, synthetic construct
  source 1..75: mol_type = other DNA
gatactcgcgatgtcggtgtgataatgacgttgccgctgtttttcccttttctttggttcacgcagtggcgaaaa

SEQ ID NO: 587249 - DNA, 75 bp, synthetic construct
  source 1..75: mol_type = other DNA
tgaattcttcagcattacacgccagtttttccagcaagaagctgaacaggtattacagagccacgccccagcatt

SEQ ID NO: 587250 - DNA, 75 bp, synthetic construct
  source 1..75: mol_type = other DNA
tccctgtggatgatggttatcacctgttatgcccgctgttttccagctcactggcgcaggcaatgtatgaaaagc

SEQ ID NO: 587251 - DNA, 75 bp, synthetic construct
  source 1..75: mol_type = other DNA
aaatggcaagggttaattaaccgccgtgatgttgaatatgccgtttgtgaatggggggaaacgtggacaagataa

SEQ ID NO: 587252 - DNA, 75 bp, synthetic construct
  source 1..75: mol_type = other DNA
agacttacaccccggcagaatgtgaggcattgcttaataaagatcttcacaaggtggcgaaagctattgaccctt

SEQ ID NO: 587253 - DNA, 75 bp, synthetic construct
  source 1..75: mol_type = other DNA
cagatccccgttctggaattccgcatgatgaagtaatggctgaaatggaaaaccttattgctcaattagctacaa

SEQ ID NO: 587254 - DNA, 75 bp, synthetic construct
  source 1..75: mol_type = other DNA
aaatccagtgctgataatgcagcgattaaagaaggtgagtttactgcggttactaacttcaatcttggattggcc

SEQ ID NO: 587255 - DNA, 75 bp, synthetic construct
  source 1..75: mol_type = other DNA
atattattgatcaggctttacgcttgcgtttaaaagatgaaaccagtgtgattctttctgatctctatctgcaaa

SEQ ID NO: 587256 - DNA, 75 bp, synthetic construct
  source 1..75: mol_type = other DNA
tcatcgctctatctggtgaagagctattttatgagatgggcattactgtcgacattatggaaagcctgaaacagg

SEQ ID NO: 587257 - DNA, 75 bp, synthetic construct
  source 1..75: mol_type = other DNA
gcgcaggaagtcattctcagccgtgtctatcaggggtttgagccactggtccagaacgctctggcgttgttcagt

SEQ ID NO: 587258 - DNA, 75 bp, synthetic construct
  source 1..75: mol_type = other DNA
aaagatattaacagcacgggtaatgactccaacttactgatagtgttttatgttcagataatgcccgatgacctt

SEQ ID NO: 587259 - DNA, 75 bp, synthetic construct
  source 1..75: mol_type = other DNA
actggcaaaacaaatctatttccctgtcgatgatggctatcacctgttatgcccgctgttttccagttcgctggc

SEQ ID NO: 587260 - DNA, 75 bp, synthetic construct
  source 1..75: mol_type = other DNA
gacaatattgataatctgaataggtccgcagagtatataaaagaggtctttgtcagtagcggtgccagagttacc

SEQ ID NO: 587261 - DNA, 75 bp, synthetic construct
  source 1..75: mol_type = other DNA
atgacatctctttgttttataccattactactatcgcttacttttattattttttaccaaccctgggtcagggca

SEQ ID NO: 587262 - DNA, 75 bp, synthetic construct
  source 1..75: mol_type = other DNA
aagctcgcgtgattggttgcttgctggaaaaacaggtgaccacgccggagcaatacccgctctccgtaaatggtg

SEQ ID NO: 587263 - DNA, 75 bp, synthetic construct
  source 1..75: mol_type = other DNA
actgatcgtggatgcgcgcatgctggcagagttctgtcgtcagaagcgccctgcagcctgggaagcgcctcaccc

SEQ ID NO: 587264 - DNA, 75 bp, synthetic construct
  source 1..75: mol_type = other DNA
aactggtgatagcccgtcgtggcggttactgttttgagcagaatggcgtgtttgagcgtgtgttacgcgagctgg

SEQ ID NO: 587265 - DNA, 75 bp, synthetic construct
  source 1..75: mol_type = other DNA
gatgataacgccagcggcgtggcaggattactcgaactggcacgtttgttacatcagcaagtaccgaaaacaggc

SEQ ID NO: 587266 - DNA, 75 bp, synthetic construct
  source 1..75: mol_type = other DNA
gaaagactatctgttgattgatggacaatggcgcgatcacgtactgacggcattaactacccagactggacgccc

SEQ ID NO: 587267 - DNA, 75 bp, synthetic construct
  source 1..75: mol_type = other DNA
ctggatcgtgcaccacaaaacatgcgcagtatttttgccttacgcggcgatttcaatagggcggcttcgggcatt

SEQ ID NO: 587268 - DNA, 75 bp, synthetic construct
  source 1..75: mol_type = other DNA
attcgtcagtgagggatatttaaatacagcatcactggcaattattaaagaggatgctgaaggcaacgcagccgt

SEQ ID NO: 587269 - DNA, 75 bp, synthetic construct
  source 1..75: mol_type = other DNA
ccggtcatgaatctgagtgaatctgaagtgcaggaacagctggataatctggtcaaacgtcattatctacgcacg

SEQ ID NO: 587270 - DNA, 75 bp, synthetic construct
  source 1..75: mol_type = other DNA
ggtgaggttgaagatcagccggcggtgacggatatgtcgaacgcggttgacggtgatttacaggcccgcgtctaa

SEQ ID NO: 587271 - DNA, 75 bp, synthetic construct
  source 1..75: mol_type = other DNA
gcgttgataaccactttgttgttacgcggtgcccagacgccaggcgaattgcgcagccgcgcggcgcggatgtat

SEQ ID NO: 587272 - DNA, 75 bp, synthetic construct
  source 1..75: mol_type = other DNA
gcgcagggagttgcagggtgaagatctccagcaaatcgcccgccagcttgccgccagtaacatgagcgtttccgg

SEQ ID NO: 587273 - DNA, 75 bp, synthetic construct
  source 1..75: mol_type = other DNA
attgcagtacattgaaatgcataagactacactaacggatatcattattaatgacagggaatccgtgctctctta

SEQ ID NO: 587274 - DNA, 75 bp, synthetic construct
  source 1..75: mol_type = other DNA
taccagtccttattcagtgcgtgatacacagtatgccaatcaggcaaccgaaaaactgacggtggcaacccagga

SEQ ID NO: 587275 - DNA, 75 bp, synthetic construct
  source 1..75: mol_type = other DNA
gacgtggcctgccaccgggggggttgtggcgctcagtgatcctgtaagactgaaaaggctgatgagcctggtgtc

SEQ ID NO: 587276 - DNA, 75 bp, synthetic construct
  source 1..75: mol_type = other DNA
ggaagatttttatcagcaggccgccgccagcaacgcagacgtgatttatctcggtgaagcggtctgtagcaaacg

SEQ ID NO: 587277 - DNA, 75 bp, synthetic construct
  source 1..75: mol_type = other DNA
ctgctacaacgcggtgacgctgaaaatattgctcaaacagggcatgatgcgctggtgtatgccggtggagctttc

SEQ ID NO: 587278 - DNA, 75 bp, synthetic construct
  source 1..75: mol_type = other DNA
ttattgctcaggctttacgcttgcgtttaaaagatgagaccagtgttattctttctgatctctatctgcaaatct

SEQ ID NO: 587279 - DNA, 75 bp, synthetic construct
  source 1..75: mol_type = other DNA
tacgataacaatgttattgatattgcaaaaaaaataaaaccgtcgcatcgtggtgaattagaaatcacatctgtt

SEQ ID NO: 587280 - DNA, 75 bp, synthetic construct
  source 1..75: mol_type = other DNA
tacgataatgatgttatcgaccatgcaaaaaatactaaaccctcatctcgtggtgaattagagatcacatcggtg

SEQ ID NO: 587281 - DNA, 75 bp, synthetic construct
  source 1..75: mol_type = other DNA
gttccggaactaggctttatcccatcacaatgggtatttccaagcaattgctccctgtctatgataaaccgatga

SEQ ID NO: 587282 - DNA, 75 bp, synthetic construct
  source 1..75: mol_type = other DNA
tggcgaggcctgctttgccctggaggaaggaaccggcgcgaaacagcagcttgttgtatcccgttcgtttggatc

SEQ ID NO: 587283 - DNA, 75 bp, synthetic construct
  source 1..75: mol_type = other DNA
gttctggtactaggctttacccgattacaatgggagtctcgaaacaattattacctatttatgataagccgatga

SEQ ID NO: 587284 - DNA, 75 bp, synthetic construct
  source 1..75: mol_type = other DNA
gttggttatctaatgaagatttatataaattaggcacgaaaattaaaaagaatctatacggaaaatatcttatcg

SEQ ID NO: 587285 - DNA, 75 bp, synthetic construct
  source 1..75: mol_type = other DNA
ccactgccgttgacggcaaacagcgactgtaacggctactggcggcggctggctgggctggagctgcaagcctaa

SEQ ID NO: 587286 - DNA, 75 bp, synthetic construct
  source 1..75: mol_type = other DNA
tgggttcagaaaggtactaaaaatgttgaggaaggcgaattctctgctgttgctcaatttaatctgtcctatcag

SEQ ID NO: 587287 - DNA, 75 bp, synthetic construct
  source 1..75: mol_type = other DNA
tctacttgggttaaaaaatccagcgcagcaaatgcagtcaaagaaggtgatttcactgcagttgctcacttcaat

SEQ ID NO: 587288 - DNA, 75 bp, synthetic construct
  source 1..75: mol_type = other DNA
ttcggtcagatttccaaagcgcatttagcggctgctggtatttcggttaagaaggatctggatattaaacttgtt

SEQ ID NO: 587289 - DNA, 75 bp, synthetic construct
  source 1..75: mol_type = other DNA
taaaaatcagctggaaaaagggggaacctcagtccggaaggatcttgatattaagctgatgaattgtgattttac

SEQ ID NO: 587290 - DNA, 75 bp, synthetic construct
  source 1..75: mol_type = other DNA
tgccagggcgaagtctattcccaaccggcaagcctgccgctgtatcccaaatcaccctattcacgccgcctgttc

SEQ ID NO: 587291 - DNA, 75 bp, synthetic construct
  source 1..75: mol_type = other DNA
gcctaataaaactgtagaggttatgtttacgggaactacagcagcgggtggtgcaggtactgatttaggtctttc

SEQ ID NO: 587292 - DNA, 75 bp, synthetic construct
  source 1..75: mol_type = other DNA
gccatgttgcaatcacttgatgaaccagtaaaaaaagccgcacaggttgaaaatactgatgatattgacgatctg

SEQ ID NO: 587293 - DNA, 75 bp, synthetic construct
  source 1..75: mol_type = other DNA
ccgaacgggcgcaacgtgctgtcgcaggagaatcagcaggtgtttgtactcaatggcattcagaccatgagcggc

SEQ ID NO: 587294 - DNA, 75 bp, synthetic construct
  source 1..75: mol_type = other DNA
ccgggcaaccaaagttggcgactggctggagatggcaaaatcgctcgccggaagtggtaagcagattgtgctctc

SEQ ID NO: 587295 - DNA, 75 bp, synthetic construct
  source 1..75: mol_type = other DNA
cgtgctgaaagaaaccaacggcgtggttgccgggcctaaaggcgctgcgcaacgtctggggctgaaacgcacgac

SEQ ID NO: 587296 - DNA, 75 bp, synthetic construct
  source 1..75: mol_type = other DNA
taagattgctttaatgagcaatccagaaaaaccgtatccgcttaacactgcgtcaactcaggctgggcaaatgat

SEQ ID NO: 587297 - DNA, 75 bp, synthetic construct
  source 1..75: mol_type = other DNA
gctgctcggcctcgatgctggcgtagccatgagttctgatgatgttgccgaagaactgttcaatgaagaaaaagc

SEQ ID NO: 587298 - DNA, 75 bp, synthetic construct
  source 1..75: mol_type = other DNA
tgtgcgcaaacgcgttgctgaaattcacagcactgcgccagtcgtggaggaagatgaagagcaacaggaaattgt

SEQ ID NO: 587299 - DNA, 75 bp, synthetic construct
  source 1..75: mol_type = other DNA
accatggtgccaaaagcgataaacagcgtgatttggcgcattggcctgttttatgtcggttctgtggttctgctg

SEQ ID NO: 587300 - DNA, 75 bp, synthetic construct
  source 1..75: mol_type = other DNA
ggagatggaattctggtttgcgctgatcaaagtgctcgccattgtaaccttcctggtcgtgggaacagtgtttct

SEQ ID NO: 587301 - DNA, 75 bp, synthetic construct
  source 1..75: mol_type = other DNA
ttcagtctggtcgccacggcggatgacgtcgcagattgcgatacgctgatttactactggccgaagaacaaaccg

SEQ ID NO: 587302 - DNA, 75 bp, synthetic construct
  source 1..75: mol_type = other DNA
cgcttatcgatcgcgtgttctcaatcatggcccgcaagaacatgttgccagaacctcctgacgttcttcagggta

SEQ ID NO: 587303 - DNA, 75 bp, synthetic construct
  source 1..75: mol_type = other DNA
cgccgcgctgggaagttaacggcgaagacgtttacgcatcttcctgccctggcatgctggcactcggtcaggtga

SEQ ID NO: 587304 - DNA, 75 bp, synthetic construct
  source 1..75: mol_type = other DNA
ccgccttacggctaatcaggcatatcaccagatggtgaagctggggatcgtcgaacagcgcgaacgatacagccg

SEQ ID NO: 587305 - DNA, 75 bp, synthetic construct
  source 1..75: mol_type = other DNA
gattgagcgggataaacgcgccacaaaagccggttttgttgttggcggtatgggtctgctgattgcggtactggc

SEQ ID NO: 587306 - DNA, 75 bp, synthetic construct
  source 1..75: mol_type = other DNA
attccatctgaaggtgatccgtactttcgacatggtaaccagtgcaccggaaaaattatccggacaggctgctga

SEQ ID NO: 587307 - DNA, 75 bp, synthetic construct
  source 1..75: mol_type = other DNA
cacagcactgcgccagtcgtcgaggaagatgaagaaaaacaggaaattgtgtttaagcctgaaacggcgagctaa

SEQ ID NO: 587308 - DNA, 75 bp, synthetic construct
  source 1..75: mol_type = other DNA
cgccggagaatgtaaagatccgcagactatggtgccaaaagcaattaacagcgtgatttggcgtattggcctgtt

SEQ ID NO: 587309 - DNA, 75 bp, synthetic construct
  source 1..75: mol_type = other DNA
gctacttcaggccagggttaacctgacggaagaacaggctattgctcagcggttaaaaaaccaggttgcagagca

SEQ ID NO: 587310 - DNA, 75 bp, synthetic construct
  source 1..75: mol_type = other DNA
aactccgcacacgaaaggtaaagtgctggatgtcggctgtggcgcgggtgtgctttcagttgcctttgcgcgcca

SEQ ID NO: 587311 - DNA, 75 bp, synthetic construct
  source 1..75: mol_type = other DNA
ctggacgcggttatcactgataacctttgcatgttttctcctgagggttatctgtatctgtttatgcaacaacgt

SEQ ID NO: 587312 - DNA, 75 bp, synthetic construct
  source 1..75: mol_type = other DNA
attaacagagcactggaacgagtttaaccttgcctgtgacactgatgctcccatcactccagttattgatatggt

SEQ ID NO: 587313 - DNA, 75 bp, synthetic construct
  source 1..75: mol_type = other DNA
caattagaaaaatcacatctcatctgatatcagtgggtatcagtgacgcacaaaactatcctgtaataacacggg

SEQ ID NO: 587314 - DNA, 75 bp, synthetic construct
  source 1..75: mol_type = other DNA
ccgttttccgggggcgctatattgatgagctcagcgccgcacggaacagaatgctccatatgcaccacatactgc

SEQ ID NO: 587315 - DNA, 75 bp, synthetic construct
  source 1..75: mol_type = other DNA
ctggatatcgagcttgattatagtgacccgactcaatttaaacgggcctgtgaactcattaagaattgggggaaa

SEQ ID NO: 587316 - DNA, 75 bp, synthetic construct
  source 1..75: mol_type = other DNA
aaaggcgtcaccatcgggccgctgatcgatgaaaaagcggtagcaaaagtggaagagcatattgccgatgccctg

SEQ ID NO: 587317 - DNA, 75 bp, synthetic construct
  source 1..75: mol_type = other DNA
atggccagagtatctattagtgaggctgcccgactgacgggtaagagtagaacaacactgcacaggttaattaaa

SEQ ID NO: 587318 - DNA, 75 bp, synthetic construct
  source 1..75: mol_type = other DNA
ggccctctggagcatcgtccgtctgaacagttcgctgcacaggtctctgaacactctgacacaggtgtttccgcg

SEQ ID NO: 587319 - DNA, 75 bp, synthetic construct
  source 1..75: mol_type = other DNA
cgctgattcgcggcgcggtgcgtcatcttaacagcggcggcgagttacgaattgtggcgaacgccttcctgcctt

SEQ ID NO: 587320 - DNA, 75 bp, synthetic construct
  source 1..75: mol_type = other DNA
ggggctgagcctttgctatctatgcgtcctgccaccgatgacagaaatgacggcccagcaaagattgatctcctt

SEQ ID NO: 587321 - DNA, 75 bp, synthetic construct
  source 1..75: mol_type = other DNA
agtggcgcgtattttcaggagtcacggcgtacttacattcatggtcagggagtatgaaaatgcgcttcttcatca

SEQ ID NO: 587322 - DNA, 75 bp, synthetic construct
  source 1..75: mol_type = other DNA
aagaaaattggtctaagtaaaattgcgttcgcgctggaagataagattgaagtggcgcgtgttttcaggagtcac

SEQ ID NO: 587323 - DNA, 75 bp, synthetic construct
  source 1..75: mol_type = other DNA
tgtataccgtggataaccacacaggacgggtggaacacgttacccggacatcaaaaaccagcctgaccgcagaag

SEQ ID NO: 587324 - DNA, 75 bp, synthetic construct
  source 1..75: mol_type = other DNA
acaggctgctgacaagatgcaggctggtgtgattctgctggactttatgcgacgggaattaaacctgtctaactc

SEQ ID NO: 587325 - DNA, 75 bp, synthetic construct
  source 1..75: mol_type = other DNA
atgagcgtaaacgacaataaaaacattgcgataagcgaagcattttccgaaacagacaaaaagaccggcgaagtt

SEQ ID NO: 587326 - DNA, 75 bp, synthetic construct
  source 1..75: mol_type = other DNA
ggctttgcgtttcttgctatgggtttcacgggtaaacgtgctgcccagttcaaagaggcatacatcaatgccttt

SEQ ID NO: 587327 - DNA, 75 bp, synthetic construct
  source 1..75: mol_type = other DNA
cgacatattcagcttattgccattggcggtgccaattggacaggggtgtttattgggtccggcaaaacgattagc

SEQ ID NO: 587328 - DNA, 75 bp, synthetic construct
  source 1..75: mol_type = other DNA
atggtcattgatggtattgaagttcgtcgtgatgcttatggtcgttacagcctgaacgatttgcacagggctgcc

SEQ ID NO: 587329 - DNA, 75 bp, synthetic construct
  source 1..75: mol_type = other DNA
ggcgtgattctgctggactttatgcgccgggagttaaacctgtctaactcatctgtgcttggggcctgtcagaaa

SEQ ID NO: 587330 - DNA, 75 bp, synthetic construct
  source 1..75: mol_type = other DNA
tgttatcggcgatatatgacgcgccagcgtcttttttatcgtctgcgtctgcgcacacccaaattatggtgggct

SEQ ID NO: 587331 - DNA, 75 bp, synthetic construct
  source 1..75: mol_type = other DNA
accagcaacttttcgcgggttaaattcgaacatcgcggcaattcctataatgcctaccagatcaccaaaaacggc

SEQ ID NO: 587332 - DNA, 75 bp, synthetic construct
  source 1..75: mol_type = other DNA
atgatccgcaaccaacatattgattctgcaatttcgggacgttacactgttccagcaccttataaagcgggtgcc

SEQ ID NO: 587333 - DNA, 75 bp, synthetic construct
  source 1..75: mol_type = other DNA
aatctgggcaggccgtaaactgcctgaaatgaaagatgtcattgaagctgcacatgcgctacgtgaacaaggtat

SEQ ID NO: 587334 - DNA, 75 bp, synthetic construct
  source 1..75: mol_type = other DNA
ggtgaagtcaccgatctcaacttctctggtttcgaagttactccagccgactgggaacgctttgtgacggattct

SEQ ID NO: 587335 - DNA, 75 bp, synthetic construct
  source 1..75: mol_type = other DNA
gatctcggcattgatgtcaccgttggcggtttcctcggcaaagacaatcaggacggatttcagcaactgttcagt

SEQ ID NO: 587336 - DNA, 75 bp, synthetic construct
  source 1..75: mol_type = other DNA
tggacgttacagcctgaacgatctgcatcgcgcagcagtagcatctggtgcaaatgccagaaccaaggagccagg

SEQ ID NO: 587337 - DNA, 75 bp, synthetic construct
  source 1..75: mol_type = other DNA
aatatgattcaggccggggctgcgagtcgtattgcggaaatggaagcaatgaagcgaaatattgcgcaagccgaa

SEQ ID NO: 587338 - DNA, 75 bp, synthetic construct
  source 1..75: mol_type = other DNA
gcactggatggtcatatggccactttctgtaaccgattaccgtctggatgcgcctttaatgttccggggatcatt

SEQ ID NO: 587339 - DNA, 75 bp, synthetic construct
  source 1..75: mol_type = other DNA
tccttcggcttcaacccgccggaaattcatgtaaggagcttcctgcaaggtttgccgcacgctctgccatatctg

SEQ ID NO: 587340 - DNA, 75 bp, synthetic construct
  source 1..75: mol_type = other DNA
ccattctgaccctgacaaggaaatgagcgatgcggaacgcgagatcaactacttcggctttaccgtcaccagttg

SEQ ID NO: 587341 - DNA, 75 bp, synthetic construct
  source 1..75: mol_type = other DNA
gattgagcgggataaacgcgccacgaaagccggctttgttgttggcggcgtgggtctgctgattgcggtactggc

SEQ ID NO: 587342 - DNA, 75 bp, synthetic construct
  source 1..75: mol_type = other DNA
cagcccccgataaagtcgccactgttcgctacaagaagattatccgccacctggctgataacagcacccgcaacg

SEQ ID NO: 587343 - DNA, 75 bp, synthetic construct
  source 1..75: mol_type = other DNA
gaggctgttggcttaccgaatctggcaccgcgctatgccattgatgctcctgctgacgcgcctgatggctcaagc

SEQ ID NO: 587344 - DNA, 75 bp, synthetic construct
  source 1..75: mol_type = other DNA
ttgaccaacacccagaatttgggtgttgacccggtgagtgtgattcatgggggaaatgaacggggaacgtatgtc

SEQ ID NO: 587345 - DNA, 75 bp, synthetic construct
  source 1..75: mol_type = other DNA
atcagtgcttggagcctgtcagaaactccaggaggctgttggcttaccgaatctggcaccgcgctatgccattga

SEQ ID NO: 587346 - DNA, 75 bp, synthetic construct
  source 1..75: mol_type = other DNA
tgatggcgaacggctttgcctccatgctcggttgcatgctgggtaatccgttcccggtaaccgtatatgttgggc

SEQ ID NO: 587347 - DNA, 75 bp, synthetic construct
  source 1..75: mol_type = other DNA
cggtcatcagccaggccagacctggtctgtggtctggtccgcgtctgtggactaccccatcgacgcggcattcac

SEQ ID NO: 587348 - DNA, 75 bp, synthetic construct
  source 1..75: mol_type = other DNA
aagatttcgtcgtagcgcgaattctctgacgctgattaacccaacaccctattacctaacggtaacagagttgaa

SEQ ID NO: 587349 - DNA, 75 bp, synthetic construct
  source 1..75: mol_type = other DNA
gtatcggcggcttaaacgtggcgatgatttgctttagcgttgagataatcggcctgctactggttggcgtggcga

SEQ ID NO: 587350 - DNA, 75 bp, synthetic construct
  source 1..75: mol_type = other DNA
atgacgctaaaggttgggacggtgcggctttcgcgctgacgctgtttagctgtgcgtttgtcggtacgcgtttgt

SEQ ID NO: 587351 - DNA, 75 bp, synthetic construct
  source 1..75: mol_type = other DNA
gggcgtaccggtgatttatctggcggcggcgggactggtcgcaatcgcgttattactgacgtggcgattaaaaaa

SEQ ID NO: 587352 - DNA, 75 bp, synthetic construct
  source 1..75: mol_type = other DNA
atgaaacactgttgtaaaaatgtggtgatctccatgcccgaacccgcgctaaacggattgcgccttaatctgcgc

SEQ ID NO: 587353 - DNA, 75 bp, synthetic construct
  source 1..75: mol_type = other DNA
tcgggcgggtgatttcgtggaacggcattgtcacttacggggcgatggcgatgggtgcgccgttaggtgtcgtgt

SEQ ID NO: 587354 - DNA, 75 bp, synthetic construct
  source 1..75: mol_type = other DNA
cggcactgggcgtggtggcggtaaaagcggtgccgcagcagaatcagggggcggcgctggcaacctataccgttt

SEQ ID NO: 587355 - DNA, 75 bp, synthetic construct
  source 1..75: mol_type = other DNA
acaaatcatttttttcgcctggtccggtaattgccggtggagcgacactggcagcgaatggtgacattcatggca

SEQ ID NO: 587356 - DNA, 75 bp, synthetic construct
  source 1..75: mol_type = other DNA
agtggcgcatttgcagaccagttgaataatgccaccgcgccttttgttcagacacagtttgcctggaatcctgtt

SEQ ID NO: 587357 - DNA, 75 bp, synthetic construct
  source 1..75: mol_type = other DNA
tcatatgcgtggcgatggcggtaatgatgctttatggcagtttaacccgaacgataaatcttttatttcaccggg

SEQ ID NO: 587358 - DNA, 75 bp, synthetic construct
  source 1..75: mol_type = other DNA
ggtgatttatctggcggcggcgggactggtcgcaatcgcgttattactgacgtggcgattaaaaaaacggcctcc

SEQ ID NO: 587359 - DNA, 75 bp, synthetic construct
  source 1..75: mol_type = other DNA
tttatcattggggcggtttgcaggcgctggcgttaatcattatgggcgtggcactggtggcaattctgttggcga

SEQ ID NO: 587360 - DNA, 75 bp, synthetic construct
  source 1..75: mol_type = other DNA
gatgttcggcttggctcacagcaatattatggtgtgaacaactggcaaacatggaattttcagtgcccttcaggt

SEQ ID NO: 587361 - DNA, 75 bp, synthetic construct
  source 1..75: mol_type = other DNA
gtagcaggctatgttgctgttagcacaaataaatggttctatgaaaaagaagtaaagggtattgatacctggagc

SEQ ID NO: 587362 - DNA, 75 bp, synthetic construct
  source 1..75: mol_type = other DNA
ggggatgataagtttatcaccaccgactatttgcaacagtgccttgcgccggatcgtgcaaacgctgacacaacg

SEQ ID NO: 587363 - DNA, 75 bp, synthetic construct
  source 1..75: mol_type = other DNA
aaccaccgatctggtcaatgatcggggaatgccgggagatggcatcatcaatattccgtcaatccgtcgcctggt

SEQ ID NO: 587364 - DNA, 75 bp, synthetic construct
  source 1..75: mol_type = other DNA
tttgaccagatgagaggtattcgtaatcaggctgtttccagaaacatgctaattaaaggcaggcatattttaaaa

SEQ ID NO: 587365 - DNA, 75 bp, synthetic construct
  source 1..75: mol_type = other DNA
ctgatatcgctaaaggtaaaattgacgatgcgttatctgtacgggaaaaaataggctacggcctgggtgacgctg

SEQ ID NO: 587366 - DNA, 75 bp, synthetic construct
  source 1..75: mol_type = other DNA
cgctggttggcacgctgtttattgcactgcgcgtgtttgatgccatctccgacccggtgatgggcgtcattgccg

SEQ ID NO: 587367 - DNA, 75 bp, synthetic construct
  source 1..75: mol_type = other DNA
cgagcgcgccctgatccgcgagcgtcagggcactgttgcaaagttagcgatgaggcagccttttgtcttattcaa

SEQ ID NO: 587368 - DNA, 75 bp, synthetic construct
  source 1..75: mol_type = other DNA
caaatcatttttctcgccaggtccggtaattgccggtggagcgactttggcatcgaatggtgacattaatggtac

SEQ ID NO: 587369 - DNA, 75 bp, synthetic construct
  source 1..75: mol_type = other DNA
cagcagcgaggtctgcttccgctgcgaagacatccgaaacgaacgcgaaagcgtcggaaacccgtgcagaatcct

SEQ ID NO: 587370 - DNA, 75 bp, synthetic construct
  source 1..75: mol_type = other DNA
ctcggtttacaggaaacggtaaacaagactggtaacgccgttcagcgttccggcgataaaatgaccggagaactg

SEQ ID NO: 587371 - DNA, 75 bp, synthetic construct
  source 1..75: mol_type = other DNA
cttagttatggtgagttcagaagtttacgacatgttagtttgtcattagtatatgctttaaatgataaacatgat

SEQ ID NO: 587372 - DNA, 75 bp, synthetic construct
  source 1..75: mol_type = other DNA
tcatcaactgaaaagatggaaaaaaaacaagtgtcatgaggtttacgcaggcaaaaccagcgttattcacatggc

SEQ ID NO: 587373 - DNA, 75 bp, synthetic construct
  source 1..75: mol_type = other DNA
gccgaacaactggaatctcagggactatggagaagagcagcggcacgatggcttgaagtgctgaaagacgcatta

SEQ ID NO: 587374 - DNA, 75 bp, synthetic construct
  source 1..75: mol_type = other DNA
agaactgaaaattggcacggtgaatgcgctgcgaattttcaatgatgccttcggtcttattttccgtcgttcaga

SEQ ID NO: 587375 - DNA, 75 bp, synthetic construct
  source 1..75: mol_type = other DNA
tcgagagaggaattgcttaagagaaattcttttccgtcagtaaatcaaaacaaatatctgaatgcgatgtggcgg

SEQ ID NO: 587376 - DNA, 75 bp, synthetic construct
  source 1..75: mol_type = other DNA
catgatggattatggtccggttaaggtgtggcttgaagtcgtgcagcgccgtatgaacgaagtgttcaacaagtc

SEQ ID NO: 587377 - DNA, 75 bp, synthetic construct
  source 1..75: mol_type = other DNA
tcgagagaggaatcacttaagcgaaactcgtttccatcagtgaatcagaacaaatatctgaatgcgatgtggcgt

SEQ ID NO: 587378 - DNA, 75 bp, synthetic construct
  source 1..75: mol_type = other DNA
gatattaacgagcaccctttccgcgtcgaacgtatgctgttgcagctctatcatgctggaattttgccacgtcag

SEQ ID NO: 587379 - DNA, 75 bp, synthetic construct
  source 1..75: mol_type = other DNA
gcgcggatgagctgaacacctttaccgaacaccatttctggctggcgctgcgcaatgaaacgttcactattgaat

SEQ ID NO: 587380 - DNA, 75 bp, synthetic construct
  source 1..75: mol_type = other DNA
aggacaaagagatacgccgccttttgaatctgtttgttttttccgttcgacgcacacgcgttcaggtcaatcgca

SEQ ID NO: 587381 - DNA, 75 bp, synthetic construct
  source 1..75: mol_type = other DNA
gtttcaatttaattttgccgttcgacgcacacgcgttcaggtcaatcgcatgatgcaggagcaggaagagttaac

SEQ ID NO: 587382 - DNA, 75 bp, synthetic construct
  source 1..75: mol_type = other DNA
aaatgtaccagacccgcacttcaatttgatctgtcattgattcaacaagctacggaggcagaactgtaccgcctg

SEQ ID NO: 587383 - DNA, 75 bp, synthetic construct
  source 1..75: mol_type = other DNA
acaaatgatggcgatggggatggcggcggcacagggtgccaagacgctaagcgaagctaaaacttcggatccgag

SEQ ID NO: 587384 - DNA, 75 bp, synthetic construct
  source 1..75: mol_type = other DNA
gcactggtgcaatggcagtgctggaggatgacgaggacatcattcgcacaatgccattcccgataggcagttact

SEQ ID NO: 587385 - DNA, 75 bp, synthetic construct
  source 1..75: mol_type = other DNA
ggcattcagcgtaataattatgattatattggtggacgctacaaaattccttcctcgttaatgaaaacatttcct

SEQ ID NO: 587386 - DNA, 75 bp, synthetic construct
  source 1..75: mol_type = other DNA
tcgagagaggaattgcttaagagaaatagtttcggttctgttaatgacaacaaatatctgaatgcgatgtggcgt

SEQ ID NO: 587387 - DNA, 75 bp, synthetic construct
  source 1..75: mol_type = other DNA
ggcgaacgctggattattgatcgttacaacatcacgcagtcattgcgcagtgactgcgacggggagagccagcga

SEQ ID NO: 587388 - DNA, 75 bp, synthetic construct
  source 1..75: mol_type = other DNA
gttgagcatccgctggtccgccacttaacccgccgtctgatttggggcgtttatagcgccgaaaaccagctactg

SEQ ID NO: 587389 - DNA, 75 bp, synthetic construct
  source 1..75: mol_type = other DNA
cccacgccagttcaccgtcagctttgatgaaaccttaaaaccgtttgtgcgcgatgtttccggcagccgcctgaa

SEQ ID NO: 587390 - DNA, 75 bp, synthetic construct
  source 1..75: mol_type = other DNA
atttccaattccatgtgttcatatgcgtggcgatggcggtaatgatgttttatggcagtttaacccaaacgacaa

SEQ ID NO: 587391 - DNA, 75 bp, synthetic construct
  source 1..75: mol_type = other DNA
gggcctgtctattcgcaatggacaggggtatccgggtgctgtcagctttggctatttactgacagaacaaatggg

SEQ ID NO: 587392 - DNA, 75 bp, synthetic construct
  source 1..75: mol_type = other DNA
tcgtggtctcccggttcgcggtcagcgtaccaagaccaacgcacgtacccgtaagtccgcgcaaaccgatcaaga

SEQ ID NO: 587393 - DNA, 75 bp, synthetic construct
  source 1..75: mol_type = other DNA
ccctgccgaaacccgaggttgtcctgcgctggcgtgaacagaccacagatgacttccgcttctgttttaagtttc

SEQ ID NO: 587394 - DNA, 75 bp, synthetic construct
  source 1..75: mol_type = other DNA
gatatgcaggacgcaaaaaacgtattcctttttgtgaaagcagaacaattcagcggaagtcttgatgctttcccg

SEQ ID NO: 587395 - DNA, 75 bp, synthetic construct
  source 1..75: mol_type = other DNA
tcgccaacgcgtaaagccaatgccatcgagagatgaattgcttaagagaaattcttttccatcagtgaatcaaaa

SEQ ID NO: 587396 - DNA, 75 bp, synthetic construct
  source 1..75: mol_type = other DNA
tcatctaatgacttccatgcttgcacgtgaactgattaccgaattaattgagcttcatgaaaaactgaaggcata

SEQ ID NO: 587397 - DNA, 75 bp, synthetic construct
  source 1..75: mol_type = other DNA
atgatggatctcgataacattcccgatacgcaaacggaagctgaagagctggaagaagtggtgatggggcttatc

SEQ ID NO: 587398 - DNA, 75 bp, synthetic construct
  source 1..75: mol_type = other DNA
cgccggaaatcactgtaaaaaaccgatcgaagagatgagcgtcgctgattttgaatcggttcttgatgtccatgt

SEQ ID NO: 587399 - DNA, 75 bp, synthetic construct
  source 1..75: mol_type = other DNA
gccggaacagcagccagccagagagaagcctcaaaccgatatcgtggctaaggttgctgcgctggctgccaaggc

SEQ ID NO: 587400 - DNA, 75 bp, synthetic construct
  source 1..75: mol_type = other DNA
ggcagttaagcacaacaacggggtggcattttggcgcgtacatcatgccggacggttcagtcattggtgagtctg

SEQ ID NO: 587401 - DNA, 75 bp, synthetic construct
  source 1..75: mol_type = other DNA
attttctacaccttcccggcaacatttgagcaggagatcgcacggggttttaatgtcaggcagtttgccgaagtt

SEQ ID NO: 587402 - DNA, 75 bp, synthetic construct
  source 1..75: mol_type = other DNA
taccaccggctggcatcacggcgcatacatcatgccagatggtgaagttatcggtgatccggaaatgcctattct

SEQ ID NO: 587403 - DNA, 75 bp, synthetic construct
  source 1..75: mol_type = other DNA
gtcgccttactggatattaatgatgttgaggggctgaccgattttgtggtggagtggatacaaaagcaggacgga

SEQ ID NO: 587404 - DNA, 75 bp, synthetic construct
  source 1..75: mol_type = other DNA
taaatccccacgaattgatggacgccagataaacgtttatgtgctccagctacgacccgacgagatagagggcga

SEQ ID NO: 587405 - DNA, 75 bp, synthetic construct
  source 1..75: mol_type = other DNA
tcacgggcgcagtaccgcaattcatgttatcacgtcgataatattatgcagatgtttacaggagtcgtttcgacc

SEQ ID NO: 587406 - DNA, 75 bp, synthetic construct
  source 1..75: mol_type = other DNA
tggataccatctgaagtatttttattcacgggcgcaatatcgcaattcgtgttatcacgttgataatatcatgca

SEQ ID NO: 587407 - DNA, 75 bp, synthetic construct
  source 1..75: mol_type = other DNA
ctcagggctaatgtgctaataaagctcaacaatagtcatacaatgcttcattgcttgaacgggcttgtggattac

SEQ ID NO: 587408 - DNA, 75 bp, synthetic construct
  source 1..75: mol_type = other DNA
tcgctgcaccctgtttgtctccgggtgtgttcatgaatgccccggttgctataacaaaagcacatggcgggtaaa

SEQ ID NO: 587409 - DNA, 75 bp, synthetic construct
  source 1..75: mol_type = other DNA
tccctatagttaataatgaaaaaaaaatgggaagaaatgagccttgctattgtggctcaggaaaaaaattcaaaa

SEQ ID NO: 587410 - DNA, 75 bp, synthetic construct
  source 1..75: mol_type = other DNA
agggagttaatcaaactgaaaaaagattaatagaactggctaatagtgcgtttattggtttatggtcatatccta

SEQ ID NO: 587411 - DNA, 75 bp, synthetic construct
  source 1..75: mol_type = other DNA
gcgttcgaaaaagagatagcgcaggggttcaatgcgaagcagttcgccagagttctgtctgaatctggaatgttg

SEQ ID NO: 587412 - DNA, 75 bp, synthetic construct
  source 1..75: mol_type = other DNA
ctggtgtggcttaccgtccgggtaatgaagcgcctgcaactgcttgaaaaacagcaaaaacagcagcgcgaagag

SEQ ID NO: 587413 - DNA, 75 bp, synthetic construct
  source 1..75: mol_type = other DNA
tttaataacctctctttcaccgaaacaccgccaaaaagcattattgaagccgctgcgacaggggcaatgaccggg

SEQ ID NO: 587414 - DNA, 75 bp, synthetic construct
  source 1..75: mol_type = other DNA
gactaaaccagacgcaaatccatccgcgtgccggactcacctttcagggcgttttgcgtgcgttattgcgccagg

SEQ ID NO: 587415 - DNA, 75 bp, synthetic construct
  source 1..75: mol_type = other DNA
ttacgtggtactcacccggcttgatttattgcagggttttgccgccctgttccagtcactgaacagacaggatcg

SEQ ID NO: 587416 - DNA, 75 bp, synthetic construct
  source 1..75: mol_type = other DNA
cacactctgcgctcccgctgatgcggatatcctgcatcgccgtctgtgggaacatgccctcggctggctgaagga

SEQ ID NO: 587417 - DNA, 75 bp, synthetic construct
  source 1..75: mol_type = other DNA
tatatggcgaaacgctggagcgaaaagttccacggccagcgcgatatccaggcgcaactgatgtcccaccttgat

SEQ ID NO: 587418 - DNA, 75 bp, synthetic construct
  source 1..75: mol_type = other DNA
gtgtccggctgagccgggcacagtaccgctggctgatgaacctcgaggacaatccgcagccggccgcccgtatca

SEQ ID NO: 587419 - DNA, 75 bp, synthetic construct
  source 1..75: mol_type = other DNA
ccgttttgcaccatttccatacagcccggcagatttgcccatcaaagatttggccggataccgtcagcgtggaga

SEQ ID NO: 587420 - DNA, 75 bp, synthetic construct
  source 1..75: mol_type = other DNA
aagcagtacgctttcacgattaccagaacggaaaacagcacgcagacgcactgaaagacgcttaccagcatcacc

SEQ ID NO: 587421 - DNA, 75 bp, synthetic construct
  source 1..75: mol_type = other DNA
ttacgaattgatactaattggagatggtccattaaaaaaacagtttgacgataaaacctatagcaatatcagatt

SEQ ID NO: 587422 - DNA, 75 bp, synthetic construct
  source 1..75: mol_type = other DNA
agccggataccgtcagcgtggagaacattgtcaacgacggatgaaaagtgatccacttatatctccaccaacggc

SEQ ID NO: 587423 - DNA, 75 bp, synthetic construct
  source 1..75: mol_type = other DNA
tgcggtcagaccggcggcggcaactgccctgactgtggtgcggtgatgggcgacgcaacgtatcaggaaaccttt

SEQ ID NO: 587424 - DNA, 75 bp, synthetic construct
  source 1..75: mol_type = other DNA
taccggggcctactcgatcaaggagaagatcctgagagtattcaactggcttcccccgtttcaatctgtggacac

SEQ ID NO: 587425 - DNA, 75 bp, synthetic construct
  source 1..75: mol_type = other DNA
gattgcattactaccagaaattggtcgtctgcagcgcagaattactcaagttccgcaggaaactcctgtttcggc

SEQ ID NO: 587426 - DNA, 75 bp, synthetic construct
  source 1..75: mol_type = other DNA
aactgatggcgacactgaatcagacgaaactctcgttgctgactcgcctacgcggcgatcgtggtcagcggggaa

SEQ ID NO: 587427 - DNA, 75 bp, synthetic construct
  source 1..75: mol_type = other DNA
ggctgggtgatgtaaaactgacgattccgctgacgctgggaatggtggcagcggcgctaaccgatctcgacgacc

SEQ ID NO: 587428 - DNA, 75 bp, synthetic construct
  source 1..75: mol_type = other DNA
gcggtgaagttacatcgacggagccggtgcggaaaacatcaatctcgccgggtacgactcagacgtacccggcat

SEQ ID NO: 587429 - DNA, 75 bp, synthetic construct
  source 1..75: mol_type = other DNA
cctgagagtatacatggtttcagtcaactgcatggtgccgggtgcctcccggtgaattcagtaccagcacctgaa

SEQ ID NO: 587430 - DNA, 75 bp, synthetic construct
  source 1..75: mol_type = other DNA
cgcgccattgatgcccaactggcaacaattgaatcagaacaggcccaggcactgccccataataatgacgaaaat

SEQ ID NO: 587431 - DNA, 75 bp, synthetic construct
  source 1..75: mol_type = other DNA
tacattcaccagctacatttctgccctcggcgctcaccgtgagcagttaactaatcctcaaatcctcgcgtttct

SEQ ID NO: 587432 - DNA, 75 bp, synthetic construct
  source 1..75: mol_type = other DNA
tgggatttctgctgacaaacttacgcgccattgatgctcaactggcgacgattgaatcagagcaagcccaggcaa

SEQ ID NO: 587433 - DNA, 75 bp, synthetic construct
  source 1..75: mol_type = other DNA
gatactaaaagaaaaataggtaaggtaatgtcttcattatctcagcaaactgcaaagattgagcaatttgatgca

SEQ ID NO: 587434 - DNA, 75 bp, synthetic construct
  source 1..75: mol_type = other DNA
gctcctggtcattaccggcgtgctctttttcgccttccgtaacgtgcaatacgctcatgcaacgatgttcattac

SEQ ID NO: 587435 - DNA, 75 bp, synthetic construct
  source 1..75: mol_type = other DNA
tggcgcgttgttgatagccatttacaccatgctgggaacatctctgtatgagcactggtatcaacagcctatgta

SEQ ID NO: 587436 - DNA, 75 bp, synthetic construct
  source 1..75: mol_type = other DNA
cgtttcggttgctgtgccttaaccatacgtttaccagctatatctcagccctcggtgctcaccgggagcagttaa

SEQ ID NO: 587437 - DNA, 75 bp, synthetic construct
  source 1..75: mol_type = other DNA
atgaaatttattgggaagctgcttctctacattttcatcacgctgttagtggcgatagttggcctctatttcctt

SEQ ID NO: 587438 - DNA, 75 bp, synthetic construct
  source 1..75: mol_type = other DNA
gcgctggcggaggtgtgccggctgtataccatcactgcggtcagtgaagagcagcatgttttgcgacacggtagg

SEQ ID NO: 587439 - DNA, 75 bp, synthetic construct
  source 1..75: mol_type = other DNA
gattgcagtttccgctggcggagcagatggagcaaaccgcgcatatcctcaccgtgccgggcggcggaacgctgc

SEQ ID NO: 587440 - DNA, 75 bp, synthetic construct
  source 1..75: mol_type = other DNA
atcgttctgttactgatgttcctcgcactgtggctggttaactggtctatgagcatcattggcgttacggttctg

SEQ ID NO: 587441 - DNA, 75 bp, synthetic construct
  source 1..75: mol_type = other DNA
catttgttcgctggcggagatatttcacactgtttattggcggactgcagggcccccgggaagacggggcagata

SEQ ID NO: 587442 - DNA, 75 bp, synthetic construct
  source 1..75: mol_type = other DNA
cagggtgctgtgtgaggctgttgctacgctggcggaggtgtgtcggctgtataccattactgcggtcagtgaaga

SEQ ID NO: 587443 - DNA, 75 bp, synthetic construct
  source 1..75: mol_type = other DNA
tcgttttcattcattcgctggcggggaagtttcactctgtttattggtggcctgcagggacccaagaaagacgga

SEQ ID NO: 587444 - DNA, 75 bp, synthetic construct
  source 1..75: mol_type = other DNA
ataaagcagaactcacctttgtaactaatgaggatggtatcgtcacagtaccttctcttcatattggacagtggc

SEQ ID NO: 587445 - DNA, 75 bp, synthetic construct
  source 1..75: mol_type = other DNA
atgatgaaaaatacaggctatatcttagctctttgtctgacagcatcggggcatgtcctggcccatgatgtctgg

SEQ ID NO: 587446 - DNA, 75 bp, synthetic construct
  source 1..75: mol_type = other DNA
atatcgcgctaagtagtcggcaactgagcgagccacggcatgtcgatactatcctgctggaaaacgggacgctga

SEQ ID NO: 587447 - DNA, 75 bp, synthetic construct
  source 1..75: mol_type = other DNA
gcaacgccggggagtggcacgggtttctgggactgctgcgtaaacaccgccccggcgcaccgctcaacggcgtga

SEQ ID NO: 587448 - DNA, 75 bp, synthetic construct
  source 1..75: mol_type = other DNA
gctggctccgtgccatgcgttcttccagttttatgtggcagacggcaagctttcttgccagctttatcaacgctc

SEQ ID NO: 587449 - DNA, 75 bp, synthetic construct
  source 1..75: mol_type = other DNA
ctggccaacgccggatggtcgtcatattgaccagatcactacggtactgaaccagctgaaaaacgacccggattc

SEQ ID NO: 587450 - DNA, 75 bp, synthetic construct
  source 1..75: mol_type = other DNA
tccgaaatggattaaggggatccagacccgcgattctgtgtaccagaaccagcaagaaacggaacagaacgacca

SEQ ID NO: 587451 - DNA, 75 bp, synthetic construct
  source 1..75: mol_type = other DNA
tgccctggacgcccccatcactgctgagcgtcaggccaaaattaacgcgttgatgaatcgtaaatcgccatggga

SEQ ID NO: 587452 - DNA, 75 bp, synthetic construct
  source 1..75: mol_type = other DNA
gaaacgaggtgcagaagctggacgtggcagggctgataggtgagcgcatcagccatgattttcagcggctggaag

SEQ ID NO: 587453 - DNA, 75 bp, synthetic construct
  source 1..75: mol_type = other DNA
ttgtgcgctgtctggcgatgctgccatttgtcgacccgatggcacggttttgcaaaaccattattcgcgatgaac

SEQ ID NO: 587454 - DNA, 75 bp, synthetic construct
  source 1..75: mol_type = other DNA
gggcattttcgcttgatggcttgaaggaactggatgcgctctatgagcaattgctcagtaatttaaagctggcaa

SEQ ID NO: 587455 - DNA, 75 bp, synthetic construct
  source 1..75: mol_type = other DNA
tgtcggttttcttctctggcgatgttaccagcgcccgtcgtttgcgccgcagcaagcatcgttttcgcattctta

SEQ ID NO: 587456 - DNA, 75 bp, synthetic construct
  source 1..75: mol_type = other DNA
cgtgtggaactggcacagcaggcaaccgcgcatctggggaacgtggaagtggtcgggtttagtgatttgatggcg

SEQ ID NO: 587457 - DNA, 75 bp, synthetic construct
  source 1..75: mol_type = other DNA
caacgtgttcacttaacggttgtccagcttacaccttattattcgcagcctaaaaaatatatgttagataaattt

SEQ ID NO: 587458 - DNA, 75 bp, synthetic construct
  source 1..75: mol_type = other DNA
tatctggttctgggatacgagcgtaaagaggtttgtatgcggtacgatgtgtcgtcaagctatttttctatagca

SEQ ID NO: 587459 - DNA, 75 bp, synthetic construct
  source 1..75: mol_type = other DNA
tttgtatctgaagttgcttttgatttattaattgaactctcttctgtgcacagtattaaaattattaatgctctt

SEQ ID NO: 587460 - DNA, 75 bp, synthetic construct
  source 1..75: mol_type = other DNA
aggtggcgcgccatcagggcgatgtcacccatttcctgccagagaatgtccatcaggcattgatggcaaaattag

SEQ ID NO: 587461 - DNA, 75 bp, synthetic construct
  source 1..75: mol_type = other DNA
ggtcgggtttagtgatttgatggccaacttcgcgcgtaatcaacacgctacggtgctgattcgtggcctgcgcgc

SEQ ID NO: 587462 - DNA, 75 bp, synthetic construct
  source 1..75: mol_type = other DNA
atctggcgcgaatgccaaaagaagagctggcggaggaagagtcgcgccgctgggcggagatcatcgaaatgtcgc

SEQ ID NO: 587463 - DNA, 75 bp, synthetic construct
  source 1..75: mol_type = other DNA
cgcaggataaagagcggcctgccggaagtcagagcttgtttcgggggttgatgttgattgagatcctgagcaact

SEQ ID NO: 587464 - DNA, 75 bp, synthetic construct
  source 1..75: mol_type = other DNA
ttctggatcttcgtcaacaaagatgctggctatcactgggtggccgtcgtggaagcctcgcaggaactcctggaa

SEQ ID NO: 587465 - DNA, 75 bp, synthetic construct
  source 1..75: mol_type = other DNA
cagttttctctatcacgaaaaaacatcagccctatgaatttaagaatttcatttcagcctggctggataccgaac

SEQ ID NO: 587466 - DNA, 75 bp, synthetic construct
  source 1..75: mol_type = other DNA
tttagtaagactatcgatctggaaactgctggcggagtcattgatcgggacaccattaaatggtggcttaagcaa

SEQ ID NO: 587467 - DNA, 75 bp, synthetic construct
  source 1..75: mol_type = other DNA
aaagcaggttggagaaaaaaatctcctgaaaccactgcgtgaaactgcgcaggctatctctaatgagttgggttt

SEQ ID NO: 587468 - DNA, 75 bp, synthetic construct
  source 1..75: mol_type = other DNA
tattgctgttccggtgtttgatattcatgggcgagtgccgtatgccgtgtctatttctctttctacgtcgcgttt

SEQ ID NO: 587469 - DNA, 75 bp, synthetic construct
  source 1..75: mol_type = other DNA
gctactcaaccacccggatcgcaaatctgaaatcagctatttcgggtttgatgaagaaaccgggctggaaatcag

SEQ ID NO: 587470 - DNA, 75 bp, synthetic construct
  source 1..75: mol_type = other DNA
gaaacgaaacagcctgagccagtagtgcaacaactggaaacggagaaagtttgcaccgcctgcggtcaggctggc

SEQ ID NO: 587471 - DNA, 75 bp, synthetic construct
  source 1..75: mol_type = other DNA
aagaatggcagaaaggaaattgtgttacaggcatcacccgtacgccttccggtgctaacgctggcggcggaaatc

SEQ ID NO: 587472 - DNA, 75 bp, synthetic construct
  source 1..75: mol_type = other DNA
gcctgctcgacccgctggagattagcgatcttcacagactggttcgtgatactgacaaagttttccctaatccag

SEQ ID NO: 587473 - DNA, 75 bp, synthetic construct
  source 1..75: mol_type = other DNA
agtcagcctcggttatgtgtggcaggaacgacttaaagatcgcctgcaccgtgaaattattgagcatgattatca

SEQ ID NO: 587474 - DNA, 75 bp, synthetic construct
  source 1..75: mol_type = other DNA
agtcacaggtaaaccctgttgaagcggaataccagaaaaagcgggcagaactccatgaagccagggaaaacattc

SEQ ID NO: 587475 - DNA, 75 bp, synthetic construct
  source 1..75: mol_type = other DNA
ggatattctaaacgagaggcttgtgagcgtaatggcgtttctcaagggtatttatccagtgccttggggcgtatt

SEQ ID NO: 587476 - DNA, 75 bp, synthetic construct
  source 1..75: mol_type = other DNA
tgaacccggtacgcgatgccactctggcctacggtgactggggcgaccgcagccgccttgcggagatgggattat

SEQ ID NO: 587477 - DNA, 75 bp, synthetic construct
  source 1..75: mol_type = other DNA
gccgggatggacaatctgaatatccgcaattttgagtccattgggcaactgaccgggactctggagcgggttatc

SEQ ID NO: 587478 - DNA, 75 bp, synthetic construct
  source 1..75: mol_type = other DNA
aaacagcgtgatgaactggttgaactgacagcgatggattcctgggtactgaacctcacccgtagcgtgaaatac

SEQ ID NO: 587479 - DNA, 75 bp, synthetic construct
  source 1..75: mol_type = other DNA
ggtgcccgcggcggcgcaccgcgcagtatcagcttcagcgggccgtgggctcagttccgcctgttcggggccgga

SEQ ID NO: 587480 - DNA, 75 bp, synthetic construct
  source 1..75: mol_type = other DNA
tgaagcgcctgcaacagcttgaaaaacagcaaaaacaacagcgcgaggaagccattgatccgctcagtgtggaac

SEQ ID NO: 587481 - DNA, 75 bp, synthetic construct
  source 1..75: mol_type = other DNA
gtggaactgaacgcccagcagcgttatcttgaccgctggctgctgcgcctgcaacgccatctcgacaaccgccgt

SEQ ID NO: 587482 - DNA, 75 bp, synthetic construct
  source 1..75: mol_type = other DNA
cagacattatttatgccccggagggcgcgcgcggcgcagaacaacgcctgtacctcacgccccatgtcggtaaac

SEQ ID NO: 587483 - DNA, 75 bp, synthetic construct
  source 1..75: mol_type = other DNA
ggtgaagcagtatatggcaaaacgctggagcgaaaagttccacggccagcgcgatatccaggcacaactgatgtc

SEQ ID NO: 587484 - DNA, 75 bp, synthetic construct
  source 1..75: mol_type = other DNA
gatttattacaaggttttgccgccttgttccagtcattaaacaggcaggatcgtgatgcgattctgggtgtcaca

SEQ ID NO: 587485 - DNA, 75 bp, synthetic construct
  source 1..75: mol_type = other DNA
actggctggatggtcactgcctttctgcacagacggcgctgcgtctgggttacaaacaggtggcagacgccatcc

SEQ ID NO: 587486 - DNA, 75 bp, synthetic construct
  source 1..75: mol_type = other DNA
agtagtgggtccgctcgtcgtccgtccgtatcacacccgtcgggatgcggtccgtcttctccgtcagtctgccgt

SEQ ID NO: 587487 - DNA, 75 bp, synthetic construct
  source 1..75: mol_type = other DNA
gccagcatcttcactgccagttaccggtttacgtggtacttacccggcttgatttattgcagggttttgccgccc

SEQ ID NO: 587488 - DNA, 75 bp, synthetic construct
  source 1..75: mol_type = other DNA
tgcaacgcggccagatggatgacatctttacccagtccgccgcccgccagtaccggctgggcagcagtccgctga

SEQ ID NO: 587489 - DNA, 75 bp, synthetic construct
  source 1..75: mol_type = other DNA
agaaacatggagatgagcgaggggcgctagtttcccttgaaagagaaaaaaatatcccttttgatattcgtagag

SEQ ID NO: 587490 - DNA, 75 bp, synthetic construct
  source 1..75: mol_type = other DNA
cataaaaaaattaggcaagtagcgataccgctaaatggttcatgtcgttttcatttagataatggtcgtgagaaa

SEQ ID NO: 587491 - DNA, 75 bp, synthetic construct
  source 1..75: mol_type = other DNA
caaaaaatactcctctcaggaagatgcaaaaaaagcagttgaagatgaggagctcattgtcataagcggttttct

SEQ ID NO: 587492 - DNA, 75 bp, synthetic construct
  source 1..75: mol_type = other DNA
cggcgaaagcgtttgttgaatcagtacgggcagaacaccccgatgctcgccaccattgcgtggcgtgggtggcgg

SEQ ID NO: 587493 - DNA, 75 bp, synthetic construct
  source 1..75: mol_type = other DNA
gcgcttccggcggcgaaagtggctgaattttccgcaaagctggcggattttagccgtggttcattgcaattgtta

SEQ ID NO: 587494 - DNA, 75 bp, synthetic construct
  source 1..75: mol_type = other DNA
aggtataactcgaggattccatgcccatcgtaaactaaagcaagttgtaattgctgtaaagggtagttgtcgctt

SEQ ID NO: 587495 - DNA, 75 bp, synthetic construct
  source 1..75: mol_type = other DNA
attgatcaggctggatccctgcgtggtctgtcgctgtctgatgtgctgaatctgaaagcggataccatgttgaag

SEQ ID NO: 587496 - DNA, 75 bp, synthetic construct
  source 1..75: mol_type = other DNA
attgaacaggctggatccctgcgtggtctgtcgctgtctgatgtgctgaatctgaaagcggataccatgttgatg

SEQ ID NO: 587497 - DNA, 75 bp, synthetic construct
  source 1..75: mol_type = other DNA
tctatcggtgttgtcgttggcgcattttcggctatttcgccaaaacgtgctccagaaatcgcccagcttggttta

SEQ ID NO: 587498 - DNA, 75 bp, synthetic construct
  source 1..75: mol_type = other DNA
ctattttggtgagttttggaagattcagcggttttcaggtcacagcaatgtttggttgaagatcaagcaaggagc

SEQ ID NO: 587499 - DNA, 75 bp, synthetic construct
  source 1..75: mol_type = other DNA
ggaagttgctctgttacccgctaagtatgatgagtttctaattaaagattatatgctatcgcataaaattgaata

SEQ ID NO: 587500 - DNA, 75 bp, synthetic construct
  source 1..75: mol_type = other DNA
attgaccaggctggatccctgcgtggtctgtcgctgtctgatgtgctgaatctgaaagcggataccatgtttagg

SEQ ID NO: 587501 - DNA, 75 bp, synthetic construct
  source 1..75: mol_type = other DNA
aaagaccatattgccatcacgcttctgtccgggttgacgaaaaagagcgccaggtccgctgtaaaatctgcggtg

SEQ ID NO: 587502 - DNA, 75 bp, synthetic construct
  source 1..75: mol_type = other DNA
ttttggaataataagccttgtgctattgacattgttttgaaatctgaaagttcatgtaatgtttattatgatgtc

SEQ ID NO: 587503 - DNA, 75 bp, synthetic construct
  source 1..75: mol_type = other DNA
tgcgccaggaggaacaggaaaggcgaaaaaatatagaaaagctaattcagattgagcgtaatgcgaaagcacgga

SEQ ID NO: 587504 - DNA, 75 bp, synthetic construct
  source 1..75: mol_type = other DNA
gcaggttatgtctttgagtcgtatcaacttgaaaaagatattgttagctttaactatttttggtgctctaccctt

SEQ ID NO: 587505 - DNA, 75 bp, synthetic construct
  source 1..75: mol_type = other DNA
cagttgtggagccgtttgactggatgctctctgtggcgaaaagagaaaccagactggcagatgatgtaaggctat

SEQ ID NO: 587506 - DNA, 75 bp, synthetic construct
  source 1..75: mol_type = other DNA
gaaaaacatagaaaagctgatacagattgagcgtaacgcgaaagcgcggatacgcagggcgacaaaatccggaac

SEQ ID NO: 587507 - DNA, 75 bp, synthetic construct
  source 1..75: mol_type = other DNA
agagggagctttgtctttatgagcaggaatatgaatttctcttgtcggatacacaagatagaaacaggtaggccc

SEQ ID NO: 587508 - DNA, 75 bp, synthetic construct
  source 1..75: mol_type = other DNA
tgactgcattttttcagcaaaacgtgccgccgcgcgccatgcagtcatttgacagtgtgctggatgaaatgaagt

SEQ ID NO: 587509 - DNA, 75 bp, synthetic construct
  source 1..75: mol_type = other DNA
atggcacatgtttgttcggtgatcctcacctgtcgctcatttgacatataccatgagcagcagaaactatctttg

SEQ ID NO: 587510 - DNA, 75 bp, synthetic construct
  source 1..75: mol_type = other DNA
tcacgctcagtatatttgctccggcacaatagccgcgtaaggaataccgtgctggagcaaaatcttaccgttgaa

SEQ ID NO: 587511 - DNA, 75 bp, synthetic construct
  source 1..75: mol_type = other DNA
atgtggcgtggtaatagtcatggcagaagccagatgatacttaccgaatatacgttagaccacaaaaccaataaa

SEQ ID NO: 587512 - DNA, 75 bp, synthetic construct
  source 1..75: mol_type = other DNA
acaatagccgcgtaaggaataccgtgctggagcaaaatctgactgttgaaatggataattacgggggcttcaagc

SEQ ID NO: 587513 - DNA, 75 bp, synthetic construct
  source 1..75: mol_type = other DNA
atggaaataaaaccagaagatgagttaagcaatatcgttttatttccggcaaaagaggatgaccctcgtaatcag

SEQ ID NO: 587514 - DNA, 75 bp, synthetic construct
  source 1..75: mol_type = other DNA
cggacgtactaacgtgctcaacggcgcggcgcacctggcactgtttatcgcctatttaatgacgatatttgcctg

SEQ ID NO: 587515 - DNA, 75 bp, synthetic construct
  source 1..75: mol_type = other DNA
agcatgaatgccccggtggcctttaccggtttcctggtggcactgttgattctttcgccggaaggtttaggggcg

SEQ ID NO: 587516 - DNA, 75 bp, synthetic construct
  source 1..75: mol_type = other DNA
ggtaatggcttctctgctatctcctcggctacagtacaccgcgccattctgaagcgtctccctgacctccatcaa

SEQ ID NO: 587517 - DNA, 75 bp, synthetic construct
  source 1..75: mol_type = other DNA
cgtaaccacggtctttcaccgagagatccggtaatgaattacccggcgatggcccaggatcttgttgataccctg

SEQ ID NO: 587518 - DNA, 75 bp, synthetic construct
  source 1..75: mol_type = other DNA
gatgcacaacagatcgaaaaagcgacgtttatcggtcactctatgggcggtaaagccgttatggcgctaactgca

SEQ ID NO: 587519 - DNA, 75 bp, synthetic construct
  source 1..75: mol_type = other DNA
tggctctgcctgcggcgaatttctcaaccggtcaggcgttactggtggcattaatttccgcggcaatgtacggcg

SEQ ID NO: 587520 - DNA, 75 bp, synthetic construct
  source 1..75: mol_type = other DNA
tgctgaaccgcgtcatgctgtcgatggatattacgcgccgctcccatttaaaagccaacggtggttatggctatg

SEQ ID NO: 587521 - DNA, 75 bp, synthetic construct
  source 1..75: mol_type = other DNA
accaggacgcgtttttcccggaacatgtggcgacccgcagcgtagagcaactggcgcaggagatggtcgatgaaa

SEQ ID NO: 587522 - DNA, 75 bp, synthetic construct
  source 1..75: mol_type = other DNA
gaggaacaggaaaggcggaaaaatatagaaaagttaattcagattgaacgtaacgcgaaagcgcggatacgcagg

SEQ ID NO: 587523 - DNA, 75 bp, synthetic construct
  source 1..75: mol_type = other DNA
taattcccctaacctgaaacactttggtctgggaaaaagagagataaccgttaaggcactttcggaaaaaatggt

SEQ ID NO: 587524 - DNA, 75 bp, synthetic construct
  source 1..75: mol_type = other DNA
ctccggtgttatctgcaccggaggtgccgggaacattaagcggtatagcgacaacaaagaattcgaaatcaaaag

SEQ ID NO: 587525 - DNA, 75 bp, synthetic construct
  source 1..75: mol_type = other DNA
gcgttataaacttacccttgcggagctggaagcctttaactctgccgttgacaaccggctggcagaactgacaat

SEQ ID NO: 587526 - DNA, 75 bp, synthetic construct
  source 1..75: mol_type = other DNA
atggcgatggcggcgctgggtctgaccactcacgtcagcgcgctgaaaaaagccggggcgaaacctctgctgatg

SEQ ID NO: 587527 - DNA, 75 bp, synthetic construct
  source 1..75: mol_type = other DNA
atcattgaagcgtgtgctatgggccgaagttgcattgtcggaaatgtacccggctgtaaagccataattaaagat

SEQ ID NO: 587528 - DNA, 75 bp, synthetic construct
  source 1..75: mol_type = other DNA
gatgacagtgatgatgacgacccgcaccacggtaaaccgtctgcccatagcagcctgtggcatgctatctggttg

SEQ ID NO: 587529 - DNA, 75 bp, synthetic construct
  source 1..75: mol_type = other DNA
tttgctttagcggatgctctgaagtgctcacctacatggctaatgtttggtgacgaagacaaggcaccagtgccg

SEQ ID NO: 587530 - DNA, 75 bp, synthetic construct
  source 1..75: mol_type = other DNA
cgttgactggcgacggcaatattcagcttaccgccagtggcgatattcaggccaatgtcccgctgaaacctacgg

SEQ ID NO: 587531 - DNA, 75 bp, synthetic construct
  source 1..75: mol_type = other DNA
ccaagcgctctgggtgcgaggtcgtgaccatccgctactacgagaaggaagggctactgccaaagccagcgcgaa

SEQ ID NO: 587532 - DNA, 75 bp, synthetic construct
  source 1..75: mol_type = other DNA
catcatacactaaatcagtaagttggcagcattaccattttgctgatgacgccatcaaaaataacctggaaaaaa

SEQ ID NO: 587533 - DNA, 75 bp, synthetic construct
  source 1..75: mol_type = other DNA
gataagaaaaagctagctcttggctatacacgagttgtagcgccgatggacggtattgttatcgccgtcgtcact

SEQ ID NO: 587534 - DNA, 75 bp, synthetic construct
  source 1..75: mol_type = other DNA
aaatgtatacttatgatggcttacattttaatagtaatgggtatacggtattagaaaacgaaatagcggagattg

SEQ ID NO: 587535 - DNA, 75 bp, synthetic construct
  source 1..75: mol_type = other DNA
aagtgtcgttaccactcgcagggcttctaaccaccaacgataacgagagtatcgaggtagctatgttaaatcata

SEQ ID NO: 587536 - DNA, 75 bp, synthetic construct
  source 1..75: mol_type = other DNA
gcctcttacacaggcgtaaaaaattaaaactgtcccaggccgcattaggtaagctggtcaaagtggctcacgtaa

SEQ ID NO: 587537 - DNA, 75 bp, synthetic construct
  source 1..75: mol_type = other DNA
ttgacattgttttgaaatctgaaagttcatgtaatgtttattatgatgtcccaaatggtgcgatactgaatgatg

SEQ ID NO: 587538 - DNA, 75 bp, synthetic construct
  source 1..75: mol_type = other DNA
acctgttaaaagatgcagaagaggctttgaagcaggatgaactgcgtttcaatatcagcaaacagttagacgcgg

SEQ ID NO: 587539 - DNA, 75 bp, synthetic construct
  source 1..75: mol_type = other DNA
atggttacggtgccaatctgacgctggttaccgatcataaatggggcgtctggagtggttcggcgaatctgaatg

SEQ ID NO: 587540 - DNA, 75 bp, synthetic construct
  source 1..75: mol_type = other DNA
gctggaaaatctacgttaaaaagggtctggtgacctgggaaaaccagcagactgactagccgcgcactcgcccgg

SEQ ID NO: 587541 - DNA, 75 bp, synthetic construct
  source 1..75: mol_type = other DNA
gctggaaaatctacgttaaaaacggtctggtgacctgggaaaaccaacagactgactaaccgcgcactcgcccgg

SEQ ID NO: 587542 - DNA, 75 bp, synthetic construct
  source 1..75: mol_type = other DNA
gctggaaaatctacgttaaaaaaggtctggtgacctgggaaaaccaccagactgactaaccgcgcactcgcccgg

SEQ ID NO: 587543 - DNA, 75 bp, synthetic construct
  source 1..75: mol_type = other DNA
tggaatgttagaacatataaaaggaaagatcttctttgctaaaacaatatctcaggactacggattaaaatgtat

SEQ ID NO: 587544 - DNA, 75 bp, synthetic construct
  source 1..75: mol_type = other DNA
attatttgggtggagttaaagccagaagaactcccgctgttctaagtgcaattatggcgaaatccgctcaatttc

SEQ ID NO: 587545 - DNA, 75 bp, synthetic construct
  source 1..75: mol_type = other DNA
acggtcgttcgatgattattgtcggtgcggggctgaaccactggtatcacctcgatatgaactatcgtggtctga

SEQ ID NO: 587546 - DNA, 75 bp, synthetic construct
  source 1..75: mol_type = other DNA
cgcatctggcgctgaataaagaagacgagaagatccgcttccgagatattcaggcacagccgcgcaaaattatct

SEQ ID NO: 587547 - DNA, 75 bp, synthetic construct
  source 1..75: mol_type = other DNA
gccggctcaaaaacagtaaagattgagagcaggttgtatggtgaagagggaaagagaaaacccggggagctatct

SEQ ID NO: 587548 - DNA, 75 bp, synthetic construct
  source 1..75: mol_type = other DNA
cgccgaaaaacatcaagtgacccagaccatgaatgcaggcgtcgtttccagtggcgaagttacgtcgacggagcc

SEQ ID NO: 587549 - DNA, 75 bp, synthetic construct
  source 1..75: mol_type = other DNA
gctggaaaatctacgttaaaaaaggtctggtgacctgggaaaaccaacagactgactacccgcgcactcgcccgg

SEQ ID NO: 587550 - DNA, 75 bp, synthetic construct
  source 1..75: mol_type = other DNA
ctacgactggtactgcgacctgcctcctgcgtctccgcaaacctggggcgagcaaactgacgtaccggaatctgc

SEQ ID NO: 587551 - DNA, 75 bp, synthetic construct
  source 1..75: mol_type = other DNA
gctacttcaaacagagtggtgaaacctttgccgatgggcatggccagcttctcaataccaaccgtgactgggagg

SEQ ID NO: 587552 - DNA, 75 bp, synthetic construct
  source 1..75: mol_type = other DNA
gtcattccgggaatggtccagaccgaatccatcagcttttttaccggcctgacgatgcgctggttccgtgatgct

SEQ ID NO: 587553 - DNA, 75 bp, synthetic construct
  source 1..75: mol_type = other DNA
atgaacgtacgcgttaatccgcatgtcatttcgggaatggtccagaccgaatccatcagcttttttaccggcctg

SEQ ID NO: 587554 - DNA, 75 bp, synthetic construct
  source 1..75: mol_type = other DNA
tgattatggaactaaatctacgaataacactggtgcgcatacccatagcgttagcggaacagcagcttcagcagg

SEQ ID NO: 587555 - DNA, 75 bp, synthetic construct
  source 1..75: mol_type = other DNA
cgtcggtggtactggcgctgctggatgaaattaagcgcctggaggacacaaatattgatgctatgtgccgaattg

SEQ ID NO: 587556 - DNA, 75 bp, synthetic construct
  source 1..75: mol_type = other DNA
aagttctgtgaggcctgtggtacggggatttattgcagagcggtatgtacaaagtctgtttacaggtaccagcta

SEQ ID NO: 587557 - DNA, 75 bp, synthetic construct
  source 1..75: mol_type = other DNA
cagagcggtatgtacaaagtatgtttacagctaccagccagacttgttccaggactgtggaggtgcgagcactta

SEQ ID NO: 587558 - DNA, 75 bp, synthetic construct
  source 1..75: mol_type = other DNA
gatttacagaggctgggaaaagagattcagcgccagcatgatcagcatgttaagcgggctgttaaatctgagaca

SEQ ID NO: 587559 - DNA, 75 bp, synthetic construct
  source 1..75: mol_type = other DNA
cagcaggcgctgcgtgatgtcgttgcttatgcagtgcagaacggtatcccggttcctacctttgctgctgcggtt

SEQ ID NO: 587560 - DNA, 75 bp, synthetic construct
  source 1..75: mol_type = other DNA
ctcgcctggcgggataaattacgcgccatgccgccggggcgatatgtggtcgcggtcggtgcactacacctgtat

SEQ ID NO: 587561 - DNA, 75 bp, synthetic construct
  source 1..75: mol_type = other DNA
ttgcaacgggtaaaaatgccaatgttatgccgcaggaggaatgggaagcgttgcctgcgcttttatccggattta

SEQ ID NO: 587562 - DNA, 75 bp, synthetic construct
  source 1..75: mol_type = other DNA
attgggggagggcaaacggtgtatcaagtgcaagcgcggacaagaccactgataatatcaaagacttaaacgaac

SEQ ID NO: 587563 - DNA, 75 bp, synthetic construct
  source 1..75: mol_type = other DNA
agctacggatcaacccttgttgcacgtaaagcagaagcctatcagccgactgtaagcctacaacgtcaatacgca

SEQ ID NO: 587564 - DNA, 75 bp, synthetic construct
  source 1..75: mol_type = other DNA
agtttgttgaatctctggaaacgcctcgtcgcatcctgttaatggtgaaagcaggtgcaggcacggatgctgcta

SEQ ID NO: 587565 - DNA, 75 bp, synthetic construct
  source 1..75: mol_type = other DNA
ttttttcatgggaagaagttctgtgaggcctgtggtacggggatttattgcagtgaaccgccccgggtttcctgg

SEQ ID NO: 587566 - DNA, 75 bp, synthetic construct
  source 1..75: mol_type = other DNA
tgtacgccgtgggtttggcgcaaaccgggatggctccatcatgaccaacggtctgcgaaccgtacttcctcgcag

SEQ ID NO: 587567 - DNA, 75 bp, synthetic construct
  source 1..75: mol_type = other DNA
atggctaagttcacaccttcattctcaggaatcaaaggtcgggcgctcttttcactgctctttgcagcaccgatg

SEQ ID NO: 587568 - DNA, 75 bp, synthetic construct
  source 1..75: mol_type = other DNA
ggcctgtggtacggggatttattgcagagcggtatgtacgaagtctgtttacagctaccagccagacttgtttca

SEQ ID NO: 587569 - DNA, 75 bp, synthetic construct
  source 1..75: mol_type = other DNA
gctgaatccggaaaagtcccacccttacattgaggatatggcgatgtttttatcgccattaccaaccgtgctgga

SEQ ID NO: 587570 - DNA, 75 bp, synthetic construct
  source 1..75: mol_type = other DNA
gtggcattgtgtgatgtgcggtcagttttttcatgggaagaagttctgtgaaacctgtggtacggggatctattc

SEQ ID NO: 587571 - DNA, 75 bp, synthetic construct
  source 1..75: mol_type = other DNA
tcgcgaacctgcttctggcaccttactttaagaagattgctgacgaataccagcaggcgctgcgtgatgtggttg

SEQ ID NO: 587572 - DNA, 75 bp, synthetic construct
  source 1..75: mol_type = other DNA
tatcgagaaagttcgtcgtgcgctgtatctgggcaaaatcgtttcttacgctcagggcttctctcagctacgagc

SEQ ID NO: 587573 - DNA, 75 bp, synthetic construct
  source 1..75: mol_type = other DNA
agccagcaggcgacaaagcagagttcattgaaaaagttcgccgtgcgctttatctgggtaagattgtttcttacg

SEQ ID NO: 587574 - DNA, 75 bp, synthetic construct
  source 1..75: mol_type = other DNA
ggacagtgatcagacgatcaaacaggagagctactcagcttatgcacaggacgcgctctatctgaccgataactg

SEQ ID NO: 587575 - DNA, 75 bp, synthetic construct
  source 1..75: mol_type = other DNA
cgtattacacctcttccatcgccacaaataatctggggaatcagattggcgatccgcgtgaagtgcaattcacgg

SEQ ID NO: 587576 - DNA, 75 bp, synthetic construct
  source 1..75: mol_type = other DNA
cattaggcggaactcaggacgcctttgtacgtcgtgggtttggtgctaaccgggatggctccatcatgaccaacg

SEQ ID NO: 587577 - DNA, 75 bp, synthetic construct
  source 1..75: mol_type = other DNA
aaataacgctgcctaatacgttcagtcaatcgctgtacgatgtgctgatgcatcagcgaaatctcgcctggcggg

SEQ ID NO: 587578 - DNA, 75 bp, synthetic construct
  source 1..75: mol_type = other DNA
agtttgtttagccagtcgcgcgagttggaagcagagattaagaagcagatggcggggctgaagtatgatagttaa

SEQ ID NO: 587579 - DNA, 75 bp, synthetic construct
  source 1..75: mol_type = other DNA
tggcaaggcggcggtcgtggtgccgaccggctttatcacagcgcagtcgggcattgataaaggcattcgcgagca

SEQ ID NO: 587580 - DNA, 75 bp, synthetic construct
  source 1..75: mol_type = other DNA
ctgcatgcaatcgccccgcacagcgaaggagcttccagagtaaacgtgggcgttatgcaggcaggaagcggtcgt

SEQ ID NO: 587581 - DNA, 75 bp, synthetic construct
  source 1..75: mol_type = other DNA
atgactcatgtctgctcggtgatcctcgttcgtcgttcattcgatatttatcatgaacagcaaaaaatatcgttg

SEQ ID NO: 587582 - DNA, 75 bp, synthetic construct
  source 1..75: mol_type = other DNA
ggcgatttttgatagcttcaatgaatccggggtaaattcaccgatactgagcaatatgctctacctttcctgttt

SEQ ID NO: 587583 - DNA, 75 bp, synthetic construct
  source 1..75: mol_type = other DNA
tctgcatccgttccacaaggacggcagcgcgctgaaacgctttgactacatcgtatccaacccgccgttcaagat

SEQ ID NO: 587584 - DNA, 75 bp, synthetic construct
  source 1..75: mol_type = other DNA
gcaatatgtgtcgtggttatctcctgaggaggcagaaaacacagacctgtatacatgtctttctctttgccattc

SEQ ID NO: 587585 - DNA, 75 bp, synthetic construct
  source 1..75: mol_type = other DNA
atgaaattgaatatccgcgcgcaaactgcacaaaaccagcacaataattctcccatcgttcttgtccacggtctg

SEQ ID NO: 587586 - DNA, 75 bp, synthetic construct
  source 1..75: mol_type = other DNA
tgacggggagtggcgctttaacgtgccagtattgtgggatcagtatccgcatattgtgggttgggagaaaatccc

SEQ ID NO: 587587 - DNA, 75 bp, synthetic construct
  source 1..75: mol_type = other DNA
gcgtttattcctgagcccatttctgagagtcagttacgtctgtacccgaacatcatggtggaagacactgcaaac

SEQ ID NO: 587588 - DNA, 75 bp, synthetic construct
  source 1..75: mol_type = other DNA
atgaaccgacatacacaaatccgccaggccgtactggcacgccttcgggaacagtgtggagacagcgccacgttt

SEQ ID NO: 587589 - DNA, 75 bp, synthetic construct
  source 1..75: mol_type = other DNA
tcgagctggcaatcgaaaacatgcgtaggtccggtgctattaaagcagcgaaaaaagcaggcaacgttgctgctg

SEQ ID NO: 587590 - DNA, 75 bp, synthetic construct
  source 1..75: mol_type = other DNA
ctttataaatacatttagacaatattatggtgtaacgccacatcagttttcgcaacattcgccgggtaccttttc

SEQ ID NO: 587591 - DNA, 75 bp, synthetic construct
  source 1..75: mol_type = other DNA
atggtatttatgttgccgcatctggcaaaccgggtcgattttatctcggtaggcaccaatgatctgacccagtac

SEQ ID NO: 587592 - DNA, 75 bp, synthetic construct
  source 1..75: mol_type = other DNA
atcctggccgttgatcgcaacaacaccagagtagcgaacatttatgacagtcttcatcctggaatgttacgtgct

SEQ ID NO: 587593 - DNA, 75 bp, synthetic construct
  source 1..75: mol_type = other DNA
gttgcgcgccaatgctgcaacgggcaacctgcacattctgttgccaatggtcacaagcctggatgaagttgacga

SEQ ID NO: 587594 - DNA, 75 bp, synthetic construct
  source 1..75: mol_type = other DNA
acaaattatgcgccatgccgccggggcgctatgtggtcgcagtcggtgcactacacctgtatggagaagggaatt

SEQ ID NO: 587595 - DNA, 75 bp, synthetic construct
  source 1..75: mol_type = other DNA
gaacataaacctgtaatagagctggaaggagcagaaagccagattgcgctattgctccagttacccgatcaaggg

SEQ ID NO: 587596 - DNA, 75 bp, synthetic construct
  source 1..75: mol_type = other DNA
tgcggtgaaatggcgggcgatcccatgtgcgtggcaatcctcattgggcttgggtatcgccatctgtctatgaac

SEQ ID NO: 587597 - DNA, 75 bp, synthetic construct
  source 1..75: mol_type = other DNA
cagcaggcgctgcgcgatgtcgttgcttatgcagtacagaacggtatcccggttccgaccttcgccgctgcggtt

SEQ ID NO: 587598 - DNA, 75 bp, synthetic construct
  source 1..75: mol_type = other DNA
tgtttgcacgttatatctcttctctgaaagatcagcgtgttgccgcgtctaaagttctctctggcccgcaagcgc

SEQ ID NO: 587599 - DNA, 75 bp, synthetic construct
  source 1..75: mol_type = other DNA
agcgacctcgcttcttgttgctgcgactaatcaccctgatatcttagatccggctgtttggcgtcgatttgagca

SEQ ID NO: 587600 - DNA, 75 bp, synthetic construct
  source 1..75: mol_type = other DNA
atgtcaaagcaacagatcggcgtagtcggtatggcagtgatggggcgcaaccttgcgctcaacatcgaaagccgt

SEQ ID NO: 587601 - DNA, 75 bp, synthetic construct
  source 1..75: mol_type = other DNA
aatcgcgcgagaaatggcaggcggtataccaggaacagttaggtctggtcgatcacgggttgacgacctctttgt

SEQ ID NO: 587602 - DNA, 75 bp, synthetic construct
  source 1..75: mol_type = other DNA
agccagcaggcgacaaggctgagttcatcgaaaaagttcgccgtgcgctgtatcttggcaaaatcgtttcttacg

SEQ ID NO: 587603 - DNA, 75 bp, synthetic construct
  source 1..75: mol_type = other DNA
atgagcacaaaaccactcttccttttacggaaagcgaaaaaatcatccggtgaacctgacgtcatcctgtgggca

SEQ ID NO: 587604 - DNA, 75 bp, synthetic construct
  source 1..75: mol_type = other DNA
aagctttcagctttgagccagttattaaaaccccttttgatttattaaaacaccttgcggtctggcaactgcaag

SEQ ID NO: 587605 - DNA, 75 bp, synthetic construct
  source 1..75: mol_type = other DNA
aggcattaagtctgtatgcagtttctattctggtggttttcctctgccttgcagcactgtacgaaagctggtcag

SEQ ID NO: 587606 - DNA, 75 bp, synthetic construct
  source 1..75: mol_type = other DNA
gaacgcctgaagcaacttgagaaagagcggttagctgctcaggaacagaaaaagcaggctgaagaagccgcaaaa

SEQ ID NO: 587607 - DNA, 75 bp, synthetic construct
  source 1..75: mol_type = other DNA
gggaggcgacactgcatattgaagtttttctcagggcaaaagagccggactcggcactggatatgtggatggaag

SEQ ID NO: 587608 - DNA, 75 bp, synthetic construct
  source 1..75: mol_type = other DNA
gcaatttgcgcccggatcaggccgcagggggaaactctgcggcctttttgtgcacagaaaacccccagctaggct

SEQ ID NO: 587609 - DNA, 75 bp, synthetic construct
  source 1..75: mol_type = other DNA
atgacggagacgggcgggcaaccgcccgtttctttgtgcacagaaaacccccagctaggctgggggttccggaaa

SEQ ID NO: 587610 - DNA, 75 bp, synthetic construct
  source 1..75: mol_type = other DNA
cacccaaaggagagggcttgtctccgacattccaaatccgaataagtcctgaattgcgccagcagatgaatgaag

SEQ ID NO: 587611 - DNA, 75 bp, synthetic construct
  source 1..75: mol_type = other DNA
gcggcactcacctggcacccggaagcctttgccggtatgttcaatacccgcacgctggcaaacattcaggcatca

SEQ ID NO: 587612 - DNA, 75 bp, synthetic construct
  source 1..75: mol_type = other DNA
ccgcgacgcccggtgaaaatggtcacggttgcggacacaatttgctgggaaccgccgcctttgccgctgcaatag

SEQ ID NO: 587613 - DNA, 75 bp, synthetic construct
  source 1..75: mol_type = other DNA
agctaaacttgcgaagatcccgaaaccaccaagccaggcagtatatgaagtgttcaaaaacgcgccattggactt

SEQ ID NO: 587614 - DNA, 75 bp, synthetic construct
  source 1..75: mol_type = other DNA
accggatttagacgaaattgaccacaaattcaagggagatcgtctatcaacagagcttattcgtgtaaatttttc

SEQ ID NO: 587615 - DNA, 75 bp, synthetic construct
  source 1..75: mol_type = other DNA
agcattaggcataagccaggaggtatcacgcaaaatcatgaaccacagtcttgaggggatagatcgggtctacga

SEQ ID NO: 587616 - DNA, 75 bp, synthetic construct
  source 1..75: mol_type = other DNA
agcttagcggttttaccactcgctcgcagcgggtatggctggcggtgctgtgcgggttattgctggcgctgatgc

SEQ ID NO: 587617 - DNA, 75 bp, synthetic construct
  source 1..75: mol_type = other DNA
aagttggatccagatgctggcaggtctggcgctgttaagtaccattggcggcagtttgtatcaggcgctgcataa

SEQ ID NO: 587618 - DNA, 75 bp, synthetic construct
  source 1..75: mol_type = other DNA
tatcccagaattgctgcccctaatcgaactgatgaatgcaaatggctatgactatcagcgagatgaggaagtgat

SEQ ID NO: 587619 - DNA, 75 bp, synthetic construct
  source 1..75: mol_type = other DNA
actgtccggcatagacgtacacgatcttgaatcagctaaacgagctgcagaagctatccacaataaaggggtaaa

SEQ ID NO: 587620 - DNA, 75 bp, synthetic construct
  source 1..75: mol_type = other DNA
tgcggcaatcaccgcagctatttgtcaaagcccggaagcgcatccggataaagatcaacgttggctggcagctgc

SEQ ID NO: 587621 - DNA, 75 bp, synthetic construct
  source 1..75: mol_type = other DNA
ggcatcgcaaaacgcaccgggtattgcggcaatgaaagcggccgggtattcggctccggtttcgccactgattgt

SEQ ID NO: 587622 - DNA, 75 bp, synthetic construct
  source 1..75: mol_type = other DNA
ggcgctgggactggcaatgggagtcagtacgctggcgctgacattatggtatcgcgtgcctgttctcaccgcatg

SEQ ID NO: 587623 - DNA, 75 bp, synthetic construct
  source 1..75: mol_type = other DNA
tcgggctggtttatgtcgtcatcgtgctgtttatcgcgatctttgccaactggattgcaccctataacccggcgg

SEQ ID NO: 587624 - DNA, 75 bp, synthetic construct
  source 1..75: mol_type = other DNA
gggggcacagccgccaacgcctgagtggggcaccatgctctccgacgtgttgcagttcgcgcaaagcgcctggtg

SEQ ID NO: 587625 - DNA, 75 bp, synthetic construct
  source 1..75: mol_type = other DNA
atgacgtcggtcgcgatgtgatgtcgcgcctgatgtatggtgcccggctgtcactgctggtcggttgtctggtgg

SEQ ID NO: 587626 - DNA, 75 bp, synthetic construct
  source 1..75: mol_type = other DNA
ggtcgtgaccttcccgggtctggcgatcctgctgacggtgctggcatttaacctaatgggtgacggtctgcgtga

SEQ ID NO: 587627 - DNA, 75 bp, synthetic construct
  source 1..75: mol_type = other DNA
gcctggtgggtcgtgaccttccctggtctggcgatcctgttgacggtgctggcatttaacctgatgggtgacggt

SEQ ID NO: 587628 - DNA, 75 bp, synthetic construct
  source 1..75: mol_type = other DNA
cgttaccgcgtctcgcgtggcaggtgccggggcgatgcgtcagatgtttattaacatcttcccgaactgccttgc

SEQ ID NO: 587629 - DNA, 75 bp, synthetic construct
  source 1..75: mol_type = other DNA
gaccactggcaccaacttcctcaacgaacatattattgaaaaagcgcgcgtacactatgccatcacaaatagcgg

SEQ ID NO: 587630 - DNA, 75 bp, synthetic construct
  source 1..75: mol_type = other DNA
agcgtcaccacgggcaggtggaatatgtggctgacccggcggcgctgcagtatctgcagagcctggagtacgcgg

SEQ ID NO: 587631 - DNA, 75 bp, synthetic construct
  source 1..75: mol_type = other DNA
gtttctggacaaagtggcattgctggaaaaagcgcaggaagagaaggaatatcaggcagagcttaagcgtcagat

SEQ ID NO: 587632 - DNA, 75 bp, synthetic construct
  source 1..75: mol_type = other DNA
tcaatcatcctgatcagacgccgatgacttatgaagagtttttccgcgagcggcaggacgcgcgctacggtggca

SEQ ID NO: 587633 - DNA, 75 bp, synthetic construct
  source 1..75: mol_type = other DNA
tttagaacccaatctccatggatattcactgagttattaatgagttcaatgcttgaaaagagcgaacataaagat

SEQ ID NO: 587634 - DNA, 75 bp, synthetic construct
  source 1..75: mol_type = other DNA
actgcaataaacttgcaagcaatttaaatatgatactttcatctgcattaataaaaatgatacatgaatctgaat

SEQ ID NO: 587635 - DNA, 75 bp, synthetic construct
  source 1..75: mol_type = other DNA
aaaatcagatggttgcaatgattctattgataattctattaattatgaagaattcaaaagaatctggttccctga

SEQ ID NO: 587636 - DNA, 75 bp, synthetic construct
  source 1..75: mol_type = other DNA
tctgggcggaaaacttgtcgaaaaacccatactgatggcgatgtgtaaaccgcggcagtataacgtggagacaga

SEQ ID NO: 587637 - DNA, 75 bp, synthetic construct
  source 1..75: mol_type = other DNA
acaacatcattgctgatattgccgccgggagtgacgttccggccattattatcaaggaagaagcattcagtaacg

SEQ ID NO: 587638 - DNA, 75 bp, synthetic construct
  source 1..75: mol_type = other DNA
ccaaaggttgctgcaactggttatctcgtgaatggcgagaaaaaagaaggcgatgttcttatttccattgatact

SEQ ID NO: 587639 - DNA, 75 bp, synthetic construct
  source 1..75: mol_type = other DNA
ccggggattttggcctcaccgatgaagttccccctgccgcaaaatccgccgacgccgaaacgctggtcacccgcc

SEQ ID NO: 587640 - DNA, 75 bp, synthetic construct
  source 1..75: mol_type = other DNA
ccggggattttggcctcaccgatgaagttgcgcctgtcgcgaaatccgccgacgctgaaacgctggtcacccgcc

SEQ ID NO: 587641 - DNA, 75 bp, synthetic construct
  source 1..75: mol_type = other DNA
gatgtgtatatcaacgcgtgggatccgttgaacgcttccggttcgatggtgactgaccagaacccaaacagcccg

SEQ ID NO: 587642 - DNA, 75 bp, synthetic construct
  source 1..75: mol_type = other DNA
gaatgaatcatttgaccaggttgtgttttcatatccattatatttacgacacatgcataatgtaaccaatgataa

SEQ ID NO: 587643 - DNA, 75 bp, synthetic construct
  source 1..75: mol_type = other DNA
ggcggcgaatcgcacgatgctgatggcaggctggggaatccaacgccagcaatacggtgaacagaaacactggat

SEQ ID NO: 587644 - DNA, 75 bp, synthetic construct
  source 1..75: mol_type = other DNA
atgacattaacaagacgtgagtttattaaacatagtggtattgctgccggggcgctggtggtgacatcggctacg

SEQ ID NO: 587645 - DNA, 75 bp, synthetic construct
  source 1..75: mol_type = other DNA
aggggggcaaaattctcactgcgggccgttggggagcgatgaacgtagaagtgaaggacggcaagattgtttctt

SEQ ID NO: 587646 - DNA, 75 bp, synthetic construct
  source 1..75: mol_type = other DNA
cgcctttgccgctgcaatagccgtcaagaaatggctggaacaatatgggcaaggcggcacagtgcgcttttatgg

SEQ ID NO: 587647 - DNA, 75 bp, synthetic construct
  source 1..75: mol_type = other DNA
ttcctcactgattaatttcattattagtaatagcagcaggacagagaaagtctatgcccatgagagaaaaaaata

SEQ ID NO: 587648 - DNA, 75 bp, synthetic construct
  source 1..75: mol_type = other DNA
cttgaaatgcgccgcagcgagaagaatgagcagttcgttcgctatggcgatttccgcgcagatccggtgaaaaat

SEQ ID NO: 587649 - DNA, 75 bp, synthetic construct
  source 1..75: mol_type = other DNA
ttcttcattgattaactttatagtcagtaatggtagccgaacagagaaagtctatgctaatgagaaaaggaaata

SEQ ID NO: 587650 - DNA, 75 bp, synthetic construct
  source 1..75: mol_type = other DNA
tctatgctaatgagaaaaagaaatatgaggcttcgaccctaaaaagaggattatccatcaaagagaagaaaagaa

SEQ ID NO: 587651 - DNA, 75 bp, synthetic construct
  source 1..75: mol_type = other DNA
aggattttatatcaaataccagagtggtatagaaaaaatgaccttctccaacagggaggttgttttaacctttct

SEQ ID NO: 587652 - DNA, 75 bp, synthetic construct
  source 1..75: mol_type = other DNA
cctcgctggtgtatatcgaaaaatatacgggcagtgtgccgaagttaacggcatttgatcagcctgccatccagg

SEQ ID NO: 587653 - DNA, 75 bp, synthetic construct
  source 1..75: mol_type = other DNA
gtggcgaagatacctatgtacaggtgagctgggaacaagcattaaaactgattcatgagcaacacgatcgcattc

SEQ ID NO: 587654 - DNA, 75 bp, synthetic construct
  source 1..75: mol_type = other DNA
ccgatcactattcacaccgaagatgctgctcgatttggtattgcgaatggcgatctggtgcgtgtctggaacaaa

SEQ ID NO: 587655 - DNA, 75 bp, synthetic construct
  source 1..75: mol_type = other DNA
acaccggctctgtttgctgcccttgatgtgtctgaggatgcagtggcagctgcgcgccgcagtcgtgttgaatgg

SEQ ID NO: 587656 - DNA, 75 bp, synthetic construct
  source 1..75: mol_type = other DNA
gccgcagatgatgcgcttaatggccgagtctccgattaccgccatgggtaatgcgatggatctggtagggctatg

SEQ ID NO: 587657 - DNA, 75 bp, synthetic construct
  source 1..75: mol_type = other DNA
aactctatgccgccgtggcggaagtgctggcctgggtctggcaactgaaacgctggcgtctggcgggtggacaac

SEQ ID NO: 587658 - DNA, 75 bp, synthetic construct
  source 1..75: mol_type = other DNA
atgtttggcccggagattatcgaagttgcgaccttccgtggacaccacgaaggtaacgtcagcgaccgcacgacc

SEQ ID NO: 587659 - DNA, 75 bp, synthetic construct
  source 1..75: mol_type = other DNA
gtatgcgcatcagcccggaaaccgcagaaccgatccctcgcctcgctaccctgctgaacgatattccaccggcac

SEQ ID NO: 587660 - DNA, 75 bp, synthetic construct
  source 1..75: mol_type = other DNA
cgtgcatggaaactgctggagcatccgaagttccgcgccgcttacgacctgctggcactgcgtgcagaagtggaa

SEQ ID NO: 587661 - DNA, 75 bp, synthetic construct
  source 1..75: mol_type = other DNA
atgagtgaaagccgcgcccatgaattaggtcttaagccgcgcgctcgtgtgcgttcgatggcggtcgttggttgt

SEQ ID NO: 587662 - DNA, 75 bp, synthetic construct
  source 1..75: mol_type = other DNA
tgattcgcccggaaaccaccgtggaagccctcgccacgctgcgtccggcgtttgatcccgtcagcggtacggtaa

SEQ ID NO: 587663 - DNA, 75 bp, synthetic construct
  source 1..75: mol_type = other DNA
gcagcacgaatgatcatgaccggcgatgcgcaggcatgtctggttggcggcgtggagcatatgggccatgtgccg

SEQ ID NO: 587664 - DNA, 75 bp, synthetic construct
  source 1..75: mol_type = other DNA
tcccgacccttgaagcaccgccgctggcgcgtgcgctgtatcgacatggcgaaataggccaacaaattccaggcc

SEQ ID NO: 587665 - DNA, 75 bp, synthetic construct
  source 1..75: mol_type = other DNA
cgatggcgcagctgccatgctggtgatgagtgaaagccgcgcccgtgaattaggtcttaagccgcgcgcccgcgt

SEQ ID NO: 587666 - DNA, 75 bp, synthetic construct
  source 1..75: mol_type = other DNA
gcgtgggccgccacgcagtcaggcgcatttaaaaatgaaatcatcccgaccggtggtcacgatgccgacggcgta

SEQ ID NO: 587667 - DNA, 75 bp, synthetic construct
  source 1..75: mol_type = other DNA
gcgacctgttacttggcaaaaagccgaaagattttgacgtgaccaccaacgccacgcctgagcaggtgcgcaaac

SEQ ID NO: 587668 - DNA, 75 bp, synthetic construct
  source 1..75: mol_type = other DNA
tgcgtcggcgcatgccgccggtactgcgtcgccgggccattgatgcgctgctgcaggggctgtgtttccactatg

SEQ ID NO: 587669 - DNA, 75 bp, synthetic construct
  source 1..75: mol_type = other DNA
gtgactgatcttcaacaaacgtattaccgccaggtaaagaacccgaatccggtatttacaccccgtgaaggtgcc

SEQ ID NO: 587670 - DNA, 75 bp, synthetic construct
  source 1..75: mol_type = other DNA
actggcccaggctgctcagcggggtgaacgcgttcccacgccaggcgagctacccgcaaacattgatgaacgggt

SEQ ID NO: 587671 - DNA, 75 bp, synthetic construct
  source 1..75: mol_type = other DNA
catcagccgatttttcgaacttggtacattgaatgtcattgaagttgccgctatttcaggccaccgctccctgaa

SEQ ID NO: 587672 - DNA, 75 bp, synthetic construct
  source 1..75: mol_type = other DNA
taatggccgcgaccgccgactgacttctggtgaagaacgccgcctttcccgctatttcagggacaaaaatccgca

SEQ ID NO: 587673 - DNA, 75 bp, synthetic construct
  source 1..75: mol_type = other DNA
gaaaacaggctgcgcaaaaagcaggggctggatgcgctgggtatggatgaactgatagcgagagcctggcgtttt

SEQ ID NO: 587674 - DNA, 75 bp, synthetic construct
  source 1..75: mol_type = other DNA
aacgcgaagtggagcgtcgtgtgaaggagcgcatgattctgtcacgtaaccgtaattacagccggctggccacag

SEQ ID NO: 587675 - DNA, 75 bp, synthetic construct
  source 1..75: mol_type = other DNA
tgcgcgccgcagccgtgtggaatgggaaaacaaacagcgcaaaaagcaggggctggataccctgggtatggatga

SEQ ID NO: 587676 - DNA, 75 bp, synthetic construct
  source 1..75: mol_type = other DNA
cgtaacgctgaactgcagcgtctggtgaaatggtggggtgagttccaggtttccgcgccaccagaccaaaaaggg

SEQ ID NO: 587677 - DNA, 75 bp, synthetic construct
  source 1..75: mol_type = other DNA
cggaatatgacccgcttatcgggtgctatatcccgaccgatatcacgttcacaccggcactgtttgctgctctcg

SEQ ID NO: 587678 - DNA, 75 bp, synthetic construct
  source 1..75: mol_type = other DNA
aaagcgtgcccgtgcgcgtcgtgatgcgggcagggaacgtcaggatatcgtcaccctggtgaaacggcagctgac

SEQ ID NO: 587679 - DNA, 75 bp, synthetic construct
  source 1..75: mol_type = other DNA
aaaacgtgcccgtgcgcgtcgtgatgcgaacagagaacgtcaggatatcgtcaccctggtgaaacggcagctgac

SEQ ID NO: 587680 - DNA, 75 bp, synthetic construct
  source 1..75: mol_type = other DNA
taatggagcgcaaagatgcccagtttggtctggcgacgatgtgcattggtctgggtcagggtattgcaacggtgt

SEQ ID NO: 587681 - DNA, 75 bp, synthetic construct
  source 1..75: mol_type = other DNA
cgtaaaaatatactacgtcattcggtaagaaatcaaatggctgaaataaaaggaaaaataaccaacccagcactg

SEQ ID NO: 587682 - DNA, 75 bp, synthetic construct
  source 1..75: mol_type = other DNA
ttcaggaggcagtaaaaaacgatgattatcaactacctgtatataccgcaagcctctttcgtcacaacgttggtc

SEQ ID NO: 587683 - DNA, 75 bp, synthetic construct
  source 1..75: mol_type = other DNA
tttgtgatttatcaccagtttcactcaagctcttaaaatacttaacgatcgcgtacattaatgagaactcggcaa

SEQ ID NO: 587684 - DNA, 75 bp, synthetic construct
  source 1..75: mol_type = other DNA
ctccatcacccgtgccacccgtgccctgaagttcctggcagagctggggctgatgacctatcagacggaatacga

SEQ ID NO: 587685 - DNA, 75 bp, synthetic construct
  source 1..75: mol_type = other DNA
cagcgtcatgacatcgagacacgcgtgcgtcagcaactgacccgggagtacgccaccggccgcttcaggggcgat

SEQ ID NO: 587686 - DNA, 75 bp, synthetic construct
  source 1..75: mol_type = other DNA
ggcaagacctggcagggctttattggcggactcgcgaccgcagcggtaatctcatggggttacggcatgtgggcg

SEQ ID NO: 587687 - DNA, 75 bp, synthetic construct
  source 1..75: mol_type = other DNA
gcatcctatgttcgtgcggatgcaagcaaagcagctactgccggttatgtaaaaaccaactcagcatataccatt

SEQ ID NO: 587688 - DNA, 75 bp, synthetic construct
  source 1..75: mol_type = other DNA
gctgtttattttctgcgtcggggtcgaagccggaccgaactttttttccatttttttcgcgatgggaaaaattac

SEQ ID NO: 587689 - DNA, 75 bp, synthetic construct
  source 1..75: mol_type = other DNA
gtgaagcaatcactgggattacttgaagtcagtggtctggctctcgccatcagttgcgcagacgctatggcaaaa

SEQ ID NO: 587690 - DNA, 75 bp, synthetic construct
  source 1..75: mol_type = other DNA
tggaagtgccacgccctaggaacaataactgggctcgctaccaaaacctagacctcgttataccagaagaagtat

SEQ ID NO: 587691 - DNA, 75 bp, synthetic construct
  source 1..75: mol_type = other DNA
gaggttatcactcgcgaaagccttatcgcgaatatgcaaatgctggttgcgaagactgagcaaaatcactcagac

SEQ ID NO: 587692 - DNA, 75 bp, synthetic construct
  source 1..75: mol_type = other DNA
gcaatagcaaagggactctgaacaacgatatgtctattaataccccggctgatggtgtaaatattgccctgcaca

SEQ ID NO: 587693 - DNA, 75 bp, synthetic construct
  source 1..75: mol_type = other DNA
gtttccgcagttaccaggcagagcgcagggcccacggcatgaaacgtgcccgcgcgcgccgcgatgcgggccgga

SEQ ID NO: 587694 - DNA, 75 bp, synthetic construct
  source 1..75: mol_type = other DNA
caaatcaccggaaacaccgtccgtcttgaacttgctcttttatcatcattattcaatatcgcccgtgtggaatgg

SEQ ID NO: 587695 - DNA, 75 bp, synthetic construct
  source 1..75: mol_type = other DNA
gtcagaaacagaaacggagtgttcattgtgacactgcacgatttcgaccttgaaagccgtgctgaaacccgggaa

SEQ ID NO: 587696 - DNA, 75 bp, synthetic construct
  source 1..75: mol_type = other DNA
cgaaagagctgttcgaaggtcgtgaccgtgaaaccggcgaagtgaaatacacggccagtcgtgcggatctggtct

SEQ ID NO: 587697 - DNA, 75 bp, synthetic construct
  source 1..75: mol_type = other DNA
catcggtgttacgaaagtggattatgcgcagtggtgtggcgcatattcctcaggaaaatgcgccacaccgcatgt

SEQ ID NO: 587698 - DNA, 75 bp, synthetic construct
  source 1..75: mol_type = other DNA
cgacgctgaaagagaaaatgagcgcctttcagttccagtttggtaaggcggtgaaaagcgaaaaatgcacggtgc

SEQ ID NO: 587699 - DNA, 75 bp, synthetic construct
  source 1..75: mol_type = other DNA
tttaagaaagtggattatgcgcagtggagtggcgcatattccacagttgaaagattatccaacgcgcttcacatc

SEQ ID NO: 587700 - DNA, 75 bp, synthetic construct
  source 1..75: mol_type = other DNA
ttcgtgcgctgccagttctggagaaaattcagaaagagtctggtaaagccgccgctggcggatatcatcgtgctg

SEQ ID NO: 587701 - DNA, 75 bp, synthetic construct
  source 1..75: mol_type = other DNA
cagtccggctggcgcaatccagttcgaagcggtagacgcaccggaaattatcccggatccgttcgatccgtcgaa

SEQ ID NO: 587702 - DNA, 75 bp, synthetic construct
  source 1..75: mol_type = other DNA
agcagctatccgcgcgaccttcggcaacatgggcatgaacgacgaagaaaccgtggcgctgattgcgggtggtca

SEQ ID NO: 587703 - DNA, 75 bp, synthetic construct
  source 1..75: mol_type = other DNA
ttccggatccgttcgatccgtcgaagaaacgtaaaccgacaatgctggtcaccgacctgacgctgcgttttgatc

SEQ ID NO: 587704 - DNA, 75 bp, synthetic construct
  source 1..75: mol_type = other DNA
tcaagtatgagtgggtacagacccgcagcccggctggcgcaatccagttcgaagcggtagacgcaccggaaatta

SEQ ID NO: 587705 - DNA, 75 bp, synthetic construct
  source 1..75: mol_type = other DNA
aatatgggaatgaacgacgaagaaaccgttgcgctgatcgcaggtggtcatacgttaggtaaaactcacggcgca

SEQ ID NO: 587706 - DNA, 75 bp, synthetic construct
  source 1..75: mol_type = other DNA
gcgctaatgctggcggcgggaacctcaccgatcgcggcgaaggtttcgttcacgatctgacgtcactggcgcgcg

SEQ ID NO: 587707 - DNA, 75 bp, synthetic construct
  source 1..75: mol_type = other DNA
ccagaaccagcccgaatcggaacaaaacgaccagaaagcggaacaaaacagccaaaatgcgttacaaaacgagcc

SEQ ID NO: 587708 - DNA, 75 bp, synthetic construct
  source 1..75: mol_type = other DNA
gtgcaacaggaaccggaaatagtctgcaatgcctgcggtcagactggcggggataactgccctgactgtggtgcg

SEQ ID NO: 587709 - DNA, 75 bp, synthetic construct
  source 1..75: mol_type = other DNA
aattaacaccagaagagcgaaaatcccgaaaagacgctcttgcgaatgccttcccggctattaactttgacaatg

SEQ ID NO: 587710 - DNA, 75 bp, synthetic construct
  source 1..75: mol_type = other DNA
atacagacacaggcggagatgcttcttatgaaaaaaaatcacaagtcaaactagcgttgacaaaattgccggcaa

SEQ ID NO: 587711 - DNA, 75 bp, synthetic construct
  source 1..75: mol_type = other DNA
agaacttcctaatgaatggaacatgagtaatttctacaacggtgaatatggcttaaaatccgctaataatttacg

SEQ ID NO: 587712 - DNA, 75 bp, synthetic construct
  source 1..75: mol_type = other DNA
caggaattgaaagtctgctcaacaccttcctgtatcgctcacccgcgctgaaaacagcccgctcgcgtctgctgg

SEQ ID NO: 587713 - DNA, 75 bp, synthetic construct
  source 1..75: mol_type = other DNA
gagaatattcgaattcataatttgcatatgaaaaaaaatccacttgggttactaaatgcagtgctcaggctcgtg

SEQ ID NO: 587714 - DNA, 75 bp, synthetic construct
  source 1..75: mol_type = other DNA
tttatgtgtggatgaagctgtggttcgtcatctcctgctaccccgcaaaacagaagatataatgtgtcagggtag

SEQ ID NO: 587715 - DNA, 75 bp, synthetic construct
  source 1..75: mol_type = other DNA
ctggctgcttcgcgtggtgagttcgttgaagggattagcgacccgaacgatccgaaatgggtaaaggggatccag

SEQ ID NO: 587716 - DNA, 75 bp, synthetic construct
  source 1..75: mol_type = other DNA
atgagcacaaaaccactcttccttttacggaaagcgaaaaaatcatccggtgagcctgacgtcgtcctgtgggca

SEQ ID NO: 587717 - DNA, 75 bp, synthetic construct
  source 1..75: mol_type = other DNA
tggtttgcggaagagacggctgccgttgagcgtgctgtagatgccctggccaaacggctggaaaaactggaggca

SEQ ID NO: 587718 - DNA, 75 bp, synthetic construct
  source 1..75: mol_type = other DNA
aaactaaggctgggagaattacaactaaaggcagagaatctcagatctaatgttggtaataatcctgctaagttt

SEQ ID NO: 587719 - DNA, 75 bp, synthetic construct
  source 1..75: mol_type = other DNA
tttcatacatcaggaaatcgaaaaacgaatgctacagaattaattctaaaggaatagaagttatcgaaatgatat

SEQ ID NO: 587720 - DNA, 75 bp, synthetic construct
  source 1..75: mol_type = other DNA
gcggttgaaacgatgcgcgctaatcagcggcttgtaatcgacgtcagtacgcttaaagaggtacaggatacgctg

SEQ ID NO: 587721 - DNA, 75 bp, synthetic construct
  source 1..75: mol_type = other DNA
tttcccctgtcgatggacgctacggcgataaaatcagcgcgctgcgcgggattttcagcgaatatggtttgctga

SEQ ID NO: 587722 - DNA, 75 bp, synthetic construct
  source 1..75: mol_type = other DNA
ctcttaattataaagtttttgagctttcattccttacccctgaagggacaacacataaggaaaggaaaactgact

SEQ ID NO: 587723 - DNA, 75 bp, synthetic construct
  source 1..75: mol_type = other DNA
ttcaccatcggcccggccccctccggcgcgaactttttgcgctggcggaaccagcagaataacaaatccggcacc

SEQ ID NO: 587724 - DNA, 75 bp, synthetic construct
  source 1..75: mol_type = other DNA
gagatgatggagccattgatgcagagtctaatccagagcgccagacgctaccccgtgcgccagcttccgctgata

SEQ ID NO: 587725 - DNA, 75 bp, synthetic construct
  source 1..75: mol_type = other DNA
ccattgagcgtaccactaaccacgacgttaaagcggttgagtatttcctgaaagaaaaagtggctgagatcccag

SEQ ID NO: 587726 - DNA, 75 bp, synthetic construct
  source 1..75: mol_type = other DNA
atctcgcacccacgggcagcctgcgacaccgtcaaccatcggtaaagagatggcgaacgtcgcttaccgtatgga

SEQ ID NO: 587727 - DNA, 75 bp, synthetic construct
  source 1..75: mol_type = other DNA
tgctgaaaaccgcgcgtgatgaagtgatcctgccgtactggcgtcaactgattgatggcattaaagatctcgccg

SEQ ID NO: 587728 - DNA, 75 bp, synthetic construct
  source 1..75: mol_type = other DNA
ctggcgttgccagaagaagagaaagcccgcctgaaagcgatgacgccggctaactatattggtcgcgccatcacc

SEQ ID NO: 587729 - DNA, 75 bp, synthetic construct
  source 1..75: mol_type = other DNA
agcaaactgccggtttcccgttggcagcgtgacctgaccgactctaccgtgctacgtaacctcggagtgggcatc

SEQ ID NO: 587730 - DNA, 75 bp, synthetic construct
  source 1..75: mol_type = other DNA
acgccgtcaaccatcggtaaagagatggctaatgtcgcctaccgtatggagcgccagtaccgccagcttaatcag

SEQ ID NO: 587731 - DNA, 75 bp, synthetic construct
  source 1..75: mol_type = other DNA
atgcctttccggcaattaattttaagaggggggccgactttcctgacttttgtgaattgtggccaatacatcgcg

SEQ ID NO: 587732 - DNA, 75 bp, synthetic construct
  source 1..75: mol_type = other DNA
cttgcgcaatggcagatgaacaggcaacggctgaaacagtggaaccggatgcaactgaacatcatcaggacacgc

SEQ ID NO: 587733 - DNA, 75 bp, synthetic construct
  source 1..75: mol_type = other DNA
accgattaccgaaagttataccgacgaattaaacgactttgatcttcgtcgtcttgaagcactgcatctggctta

SEQ ID NO: 587734 - DNA, 75 bp, synthetic construct
  source 1..75: mol_type = other DNA
acacgggagcagctcctggagcaaattgaaactgtagatccagaactggcaaaaaaagaacgtgctaaatctttg

SEQ ID NO: 587735 - DNA, 75 bp, synthetic construct
  source 1..75: mol_type = other DNA
accgttacgaaaaaggcggggaagatggcatcacaatggtatttatcgcgccctcatcctctgcgcaggacaaac

SEQ ID NO: 587736 - DNA, 75 bp, synthetic construct
  source 1..75: mol_type = other DNA
aaagacaaaaacgctcgatttaggaaccgctttccactgccgggtacttgaaccggaagaattcagtaaccgctt

SEQ ID NO: 587737 - DNA, 75 bp, synthetic construct
  source 1..75: mol_type = other DNA
attgcgggaatttatcgacgaaaactccggcgaattttttgttcaggtctggggaaatggagccaacttcgacaa

SEQ ID NO: 587738 - DNA, 75 bp, synthetic construct
  source 1..75: mol_type = other DNA
ccaacttcgacaacgtaattttacgccgttcatatgaacggcaggggatcccctgcccgtggctttactacaacg

SEQ ID NO: 587739 - DNA, 75 bp, synthetic construct
  source 1..75: mol_type = other DNA
gatgaccaggcgcaaatgaagaatgaatacattcaggaaaatgctgttgatacaactcaggaacacgattcggtt

SEQ ID NO: 587740 - DNA, 75 bp, synthetic construct
  source 1..75: mol_type = other DNA
caatccaaagtggaacaaaatgagccagaagcggaacaaaacagcccggatacgcaacaaaacggaccagaagag

SEQ ID NO: 587741 - DNA, 75 bp, synthetic construct
  source 1..75: mol_type = other DNA
aaatgcgttacaaaacgagccagaaacgaaacaatccgaaccagtagcgcaacaggaaccggaaaaagtcttcac

SEQ ID NO: 587742 - DNA, 75 bp, synthetic construct
  source 1..75: mol_type = other DNA
cagccagcactgacaacaccaatgttaatggcgaagacatgacggagattgaggagaatatgctacttccgattt

SEQ ID NO: 587743 - DNA, 75 bp, synthetic construct
  source 1..75: mol_type = other DNA
tcttctccctctgttcaggacaaaccagccagcactgacaataccaacgtcaacggcgaagacatgacagaaatt

SEQ ID NO: 587744 - DNA, 75 bp, synthetic construct
  source 1..75: mol_type = other DNA
cgaacgatccgaaatgggttaaggggattgaaaccctcgactctgtgaaccagaaccagcaagaaacggaacaga

SEQ ID NO: 587745 - DNA, 75 bp, synthetic construct
  source 1..75: mol_type = other DNA
agaagagcgaaaatcccgaaaagacgctcttgcgaatgccttcccggctattaactttgacaatggacgttccga

SEQ ID NO: 587746 - DNA, 75 bp, synthetic construct
  source 1..75: mol_type = other DNA
cgcgtacaaaaagttgcccgctttcttcagacagagataagtgtcaacgacggatgaaaagtgatccacttatat

SEQ ID NO: 587747 - DNA, 75 bp, synthetic construct
  source 1..75: mol_type = other DNA
ttcatggtcagacccgtcgcgcgcacagtatttctctgtgctgttttctgagggtatccgtcgggcatatcgcga

SEQ ID NO: 587748 - DNA, 75 bp, synthetic construct
  source 1..75: mol_type = other DNA
gtgtcggtcattccattcctgccataaactgtcagcaaccggatgaaaaaaagccagaaaatgtaaccgaaaagc

SEQ ID NO: 587749 - DNA, 75 bp, synthetic construct
  source 1..75: mol_type = other DNA
agattggtgaatgtaagtgaaaagcaactaattttacagaaaattaatgcctgtatccataatacaggagctgaa

SEQ ID NO: 587750 - DNA, 75 bp, synthetic construct
  source 1..75: mol_type = other DNA
aataatgttaatgtcattaatgtaaatatgtcaaaaaacatttctggagttataaaaggttgtgtcagaattaga

SEQ ID NO: 587751 - DNA, 75 bp, synthetic construct
  source 1..75: mol_type = other DNA
cgttgttgatgaccttccaccagaaggcgtatttgatacggaattttgcaaccgttacgaaaaaggcggggaaga

SEQ ID NO: 587752 - DNA, 75 bp, synthetic construct
  source 1..75: mol_type = other DNA
ggcggcaactgtcctgactgcggcgcggtgatgggcgacgcaacgtatcagaaaaccttgaatgaagaaaatcag

SEQ ID NO: 587753 - DNA, 75 bp, synthetic construct
  source 1..75: mol_type = other DNA
tcgtgtttcacgcatcacgcgcacagcttccggcgctaatgctggcggcgggaatctcaccgatcgcggcgaagg

SEQ ID NO: 587754 - DNA, 75 bp, synthetic construct
  source 1..75: mol_type = other DNA
catttccgccacacgtgataccaatgggaaacaaagcattattcaggcacaggataatcctgatgttggtattat

SEQ ID NO: 587755 - DNA, 75 bp, synthetic construct
  source 1..75: mol_type = other DNA
gtgggcggatcattcacagctacgttctggaaacggataaattcgctgatgaatatgccattccggtaccggttc

SEQ ID NO: 587756 - DNA, 75 bp, synthetic construct
  source 1..75: mol_type = other DNA
ctttaatgaagaaaatctggatgaatctcaggaaaaagatccggaggaaatggaaggcgctgaacatctgcacaa

SEQ ID NO: 587757 - DNA, 75 bp, synthetic construct
  source 1..75: mol_type = other DNA
tcgccgcagtggctgaagacggtgagccatgcgttacctatatcggtgccgatggcgcaggccattatgtgaaga

SEQ ID NO: 587758 - DNA, 75 bp, synthetic construct
  source 1..75: mol_type = other DNA
acaaaggtaccggtaagtggaccagtcagagctcactagatcttggggaacctctgtctctgatcactgagtctg

SEQ ID NO: 587759 - DNA, 75 bp, synthetic construct
  source 1..75: mol_type = other DNA
tgacatgcagctgattgccgaagcctatgcgctgctgaaaggcgggctggcgctttcaaatgaagaccttgcgca

SEQ ID NO: 587760 - DNA, 75 bp, synthetic construct
  source 1..75: mol_type = other DNA
cagcaggcgctgcgtgatgttgtagcttatgctgtacagaatggtattccggtaccgacattctctgccgcaatt

SEQ ID NO: 587761 - DNA, 75 bp, synthetic construct
  source 1..75: mol_type = other DNA
tcggtatggctgtgatggggcgtaaccttgcgcttaacatcgaaagccgtggttataccgtctccgttttcaacc

SEQ ID NO: 587762 - DNA, 75 bp, synthetic construct
  source 1..75: mol_type = other DNA
tggttcataacggcattgagtatggcgacatgcagctaattgctgaagcttatgcgcttttgaaaggcggtctgg

SEQ ID NO: 587763 - DNA, 75 bp, synthetic construct
  source 1..75: mol_type = other DNA
ccgctgtcgttgattaccgagtctgtgtttgctcgttatatctcttctctgaaagagcagcgtgttgctgcgtct

SEQ ID NO: 587764 - DNA, 75 bp, synthetic construct
  source 1..75: mol_type = other DNA
tttttgctcgttatatctcttctctgaaagaccagcgtgtagcagcttcgaaagtgctgagtggtccacaggctc

SEQ ID NO: 587765 - DNA, 75 bp, synthetic construct
  source 1..75: mol_type = other DNA
ttaccaaagatatattcaccaagaaggatgaagagggtaaatacctcgtcgatgtcattcttgatgaagcagcaa

SEQ ID NO: 587766 - DNA, 75 bp, synthetic construct
  source 1..75: mol_type = other DNA
taagggcgacatcattattgatggcggcaatacctttttccaggacactatccgtcgcaaccgtgaactgtctgc

SEQ ID NO: 587767 - DNA, 75 bp, synthetic construct
  source 1..75: mol_type = other DNA
ggtaacaccttcttccaggacaccattcgtcgtaaccgtgagctttctgcagaaggctttaacttcattggtacc

SEQ ID NO: 587768 - DNA, 75 bp, synthetic construct
  source 1..75: mol_type = other DNA
tcggtatggcggtaatggggcgtaatcttgcactaaatatcgaaagtcacggctatactgtttcaatttttaacc

SEQ ID NO: 587769 - DNA, 75 bp, synthetic construct
  source 1..75: mol_type = other DNA
gctcccgtgaaaagaccgaagaagtgattgctgaaaatcctggcaagaaactggtcccttactacacagtacaag

SEQ ID NO: 587770 - DNA, 75 bp, synthetic construct
  source 1..75: mol_type = other DNA
acggtatggctgtgatggggagcaaccttgcgctcaacattgaaagtcgtggttacactgtctctatttttaatc

SEQ ID NO: 587771 - DNA, 75 bp, synthetic construct
  source 1..75: mol_type = other DNA
gcgggcgcaggtaccgatgcagccatcgattccctgaaaccttatctggacaaaggcgacatcatcattgatggt

SEQ ID NO: 587772 - DNA, 75 bp, synthetic construct
  source 1..75: mol_type = other DNA
taaaggcgacatcatcattgatggtggcaacaccttcttcctggacactatccgtcgtaaccgtgagctgtctgc

SEQ ID NO: 587773 - DNA, 75 bp, synthetic construct
  source 1..75: mol_type = other DNA
ttgtgaatggtgagaagaaagaaggtgatgttcttatttccattgatactggttcggggaatatttcggcagggc

SEQ ID NO: 587774 - DNA, 75 bp, synthetic construct
  source 1..75: mol_type = other DNA
cgcgtctgaagagtacaactgggatctgaactatggtgaaatcgcgaagattttccgtgctggctgtatcatccg

SEQ ID NO: 587775 - DNA, 75 bp, synthetic construct
  source 1..75: mol_type = other DNA
taaaggcgacatcatcatcgatggtggtaacaccttcttccaggacaccattcgtcgtaaccgtgagctttctgc

SEQ ID NO: 587776 - DNA, 75 bp, synthetic construct
  source 1..75: mol_type = other DNA
agaaggctttaacttcatcggtaccggtgtttccggcggtgaagaaggtgcgctgaaaggtccttccattatgcc

SEQ ID NO: 587777 - DNA, 75 bp, synthetic construct
  source 1..75: mol_type = other DNA
cttcaagcaaattgccgatgactaccagcaggcgctgcgcgatgtcgtcgcttatgcagtacagaacggtatccc

SEQ ID NO: 587778 - DNA, 75 bp, synthetic construct
  source 1..75: mol_type = other DNA
taaaggtgacatcattattgatggtggtaataccttcttccaggacactattcgtcgtaatcgtgagctttctgc

SEQ ID NO: 587779 - DNA, 75 bp, synthetic construct
  source 1..75: mol_type = other DNA
ttttccgcgctggctgtatcattcgtgcgcagttcctgcagaagatcaccgatgcttatgcgcaaaacgctggca

SEQ ID NO: 587780 - DNA, 75 bp, synthetic construct
  source 1..75: mol_type = other DNA
tggttcataacggcatcgagtatggagacatgcagctgattgctgaagcttatgcgctgttgaaaggcggtctgg

SEQ ID NO: 587781 - DNA, 75 bp, synthetic construct
  source 1..75: mol_type = other DNA
ggtaacaccttcttccaggacaccattcgccgtaaccgtgagctttctgcagaaggctttaacttcatcggtacc

SEQ ID NO: 587782 - DNA, 75 bp, synthetic construct
  source 1..75: mol_type = other DNA
aggtggtcaaaaagaagcctatgagctggttgcgccaattctgaagcagattgctgcggtcgctgaagacggtga

SEQ ID NO: 587783 - DNA, 75 bp, synthetic construct
  source 1..75: mol_type = other DNA
cagtcgtaccccggcgatgcctgaaggtggcgatactgctgatgacgtcatgaatgtgaccgacccggtatctgg

SEQ ID NO: 587784 - DNA, 75 bp, synthetic construct
  source 1..75: mol_type = other DNA
gagctatgaagaattcttccgcgaacgccagaacgcacgctacggcggcgatggtaaaggcggtatgcgctgttg

SEQ ID NO: 587785 - DNA, 75 bp, synthetic construct
  source 1..75: mol_type = other DNA
ggtgtttccggtggtgaagagggggctctgaaaggaccttccatcatgcctggtgggcagaaagaagcctatgag

SEQ ID NO: 587786 - DNA, 75 bp, synthetic construct
  source 1..75: mol_type = other DNA
tcggtatggccgtgatggggcgcaaccttgcgctcaacattgagagccgtggttacactgtctccgttttcaacc

SEQ ID NO: 587787 - DNA, 75 bp, synthetic construct
  source 1..75: mol_type = other DNA
cagctgctgcgtgaaggtgttatcggtcgcatcatgggcttcaacctccacgaatccttcagcatcaagcgtacc

SEQ ID NO: 587788 - DNA, 75 bp, synthetic construct
  source 1..75: mol_type = other DNA
tctgtacagaaggtatctgagctggttggttttagttccgcaacatctttacgggaaaagtttatcgcaaaattt

SEQ ID NO: 587789 - DNA, 75 bp, synthetic construct
  source 1..75: mol_type = other DNA
aggggaaaggcagttacatgcgaaaaggaaaacatggcaatcgggggaactgggaggccagtggcaagaaagtaa

SEQ ID NO: 587790 - DNA, 75 bp, synthetic construct
  source 1..75: mol_type = other DNA
aattaagctataaagtctttgatttgtcatttttgacgaatgaggggactacgcataaagaaaagaaaaatgtgg

SEQ ID NO: 587791 - DNA, 75 bp, synthetic construct
  source 1..75: mol_type = other DNA
aaggcgacccccatgttaaagggcggatccgtcagatgcagcgagcggccgcacggcgtcggatgatggccgatg

SEQ ID NO: 587792 - DNA, 75 bp, synthetic construct
  source 1..75: mol_type = other DNA
aatgatatacgtgttaacgatatatccggtctggactttaataatgaaagtctgatgattctatccgacgaatca

SEQ ID NO: 587793 - DNA, 75 bp, synthetic construct
  source 1..75: mol_type = other DNA
aaaagacttctgaactattcttttttacagttacaaaagatatgcatatctccttgcgaaataaaattcagttag

SEQ ID NO: 587794 - DNA, 75 bp, synthetic construct
  source 1..75: mol_type = other DNA
agaaggctttaacttcattggtaccggtgtttctggtggtgaagaaggcgcactgaaaggtccttccattatgcc

SEQ ID NO: 587795 - DNA, 75 bp, synthetic construct
  source 1..75: mol_type = other DNA
aacctgattcaggctcagcgtgattactttggcgcacatacttataaacgtactgataaagaaggtgtattccat

SEQ ID NO: 587796 - DNA, 75 bp, synthetic construct
  source 1..75: mol_type = other DNA
tcgaaagccgtggctataccgtttccgttttcaaccgctcccgcgataagaccgaagaagtgattgccgagaacc

SEQ ID NO: 587797 - DNA, 75 bp, synthetic construct
  source 1..75: mol_type = other DNA
tggtggtcagaaagaagcctatgagttagttgctccgattctgaagcagattgctgcggttgctgaagacggtga

SEQ ID NO: 587798 - DNA, 75 bp, synthetic construct
  source 1..75: mol_type = other DNA
tggttcacaacggtattgaatacggtgatatgcaactgattgctgaagcctattctctgcttaaaggtggtctga

SEQ ID NO: 587799 - DNA, 75 bp, synthetic construct
  source 1..75: mol_type = other DNA
tcgctaacctgctgctggctccgtacttcaaacaaattgccgacgaataccagcaggcattgcgtgatgtcgtag

SEQ ID NO: 587800 - DNA, 75 bp, synthetic construct
  source 1..75: mol_type = other DNA
taaagaccagcgtgtagctgcttcgaaagtgctgagtggtccgcaggctcaaccggccggcgataaagcggaatt

SEQ ID NO: 587801 - DNA, 75 bp, synthetic construct
  source 1..75: mol_type = other DNA
tgtttgcacgatacatctcttctctgaaagatcagcgcgttgctgcgtctaaagttctctctggcccacaagcgc

SEQ ID NO: 587802 - DNA, 75 bp, synthetic construct
  source 1..75: mol_type = other DNA
ggcgtatccggcggcgaagagggcgcgctgaagggcccatctatcatgcctggcggccagaaagaagcgtatgag

SEQ ID NO: 587803 - DNA, 75 bp, synthetic construct
  source 1..75: mol_type = other DNA
catcgaaaaagttcgccgtgcgctgtatctgggcaaaatcgtttcttacgcccagggcttctctcagctgcgtgc

SEQ ID NO: 587804 - DNA, 75 bp, synthetic construct
  source 1..75: mol_type = other DNA
agatgaagacggtaactacctggttgatgtgattctggatgaagcggctaacaaaggtaccggtaaatggaccag

SEQ ID NO: 587805 - DNA, 75 bp, synthetic construct
  source 1..75: mol_type = other DNA
tcgccaacctgctgctggcaccgtacttcaaaaatatcgctgatgaataccagcaggcgctgcgtgacgtggtgg

SEQ ID NO: 587806 - DNA, 75 bp, synthetic construct
  source 1..75: mol_type = other DNA
gcggcacagggaatggcacaggcaacggatctggcctcagccggtaaagcagacgtggaagcgacctttggtcag

SEQ ID NO: 587807 - DNA, 75 bp, synthetic construct
  source 1..75: mol_type = other DNA
aatttaccggcaatgtgatcggcgacattgtagatgcacagtacaaagcgaaaacactgactcgcctggcgcagg

SEQ ID NO: 587808 - DNA, 75 bp, synthetic construct
  source 1..75: mol_type = other DNA
aatttcccctttcatcagaaacatttatcctaaatcagattacttcttttatcgatatgggaattgaagttgaaa

SEQ ID NO: 587809 - DNA, 75 bp, synthetic construct
  source 1..75: mol_type = other DNA
aaacgcgcggcgctacgggcaggaggcgcgcaatctgatcctctcttctatctgtagccgcactcccgcgccgat

SEQ ID NO: 587810 - DNA, 75 bp, synthetic construct
  source 1..75: mol_type = other DNA
cccttcccgcagaacaacggcaaccgtcagcatgtccgctggacggcactgactaaccgccacggcaacggtctg

SEQ ID NO: 587811 - DNA, 75 bp, synthetic construct
  source 1..75: mol_type = other DNA
ccgtgatatcaaagtgcgcgacggtctgttctggatcaataaccgttatgtgatgctgcacggcgtcaaccgcca

SEQ ID NO: 587812 - DNA, 75 bp, synthetic construct
  source 1..75: mol_type = other DNA
ggatgttgccggtcttctcgcatacttttttttgggagaaggttctccagctattggcgttccgttcttctggcc

SEQ ID NO: 587813 - DNA, 75 bp, synthetic construct
  source 1..75: mol_type = other DNA
tcggtattggcccctgggagaggcggctgcgggtgatgattgcgcaataccagcttgaagatgtgattgaaatgc

SEQ ID NO: 587814 - DNA, 75 bp, synthetic construct
  source 1..75: mol_type = other DNA
cgaaactgcgcgaactgggcgtgatccgcggcaaaatcgcgaccgtctttcacggcattgatatctccagccgcg

SEQ ID NO: 587815 - DNA, 75 bp, synthetic construct
  source 1..75: mol_type = other DNA
tcatggccacgtcagtcagtggcaaaaacgtggtgctgaccaatgctgaattcacaggtgccggtgatgctaacg

SEQ ID NO: 587816 - DNA, 75 bp, synthetic construct
  source 1..75: mol_type = other DNA
cacggtattgatatctccagccgtgatgttctgagccactacacgccggaatatcagcaactgtttcgacggggc

SEQ ID NO: 587817 - DNA, 75 bp, synthetic construct
  source 1..75: mol_type = other DNA
cgaactgcacccgagcgattacccgttgctgcgttctgaatttcagaaagacagccgtgcgcgcgtcgaaaaagc

SEQ ID NO: 587818 - DNA, 75 bp, synthetic construct
  source 1..75: mol_type = other DNA
gccttgcggacagtgaaaggcgttcatcatcgtgcgacctggcaggcgttaaatgttgcgcgctacggcactgag

SEQ ID NO: 587819 - DNA, 75 bp, synthetic construct
  source 1..75: mol_type = other DNA
aaccggcgacaacctgttgtgtgtgcgcgtgatgcagtgggcggattccacctacgtggaagaccaggatatgtg

SEQ ID NO: 587820 - DNA, 75 bp, synthetic construct
  source 1..75: mol_type = other DNA
tttaaccctgcagaatcggcaaaaaaaccgcaggtgcggatatcaagacagcgactgacttttgatgagtggatg

SEQ ID NO: 587821 - DNA, 75 bp, synthetic construct
  source 1..75: mol_type = other DNA
tcagagaacaacagcatatgggataaatgaaacccgtccacggaatattgcatttaactatatcgtgagggctgc

SEQ ID NO: 587822 - DNA, 75 bp, synthetic construct
  source 1..75: mol_type = other DNA
aggttcattgcgcaatcatcacagcataccatctatcgcccatttatttaattataagaaaaaaacatgcgatct

SEQ ID NO: 587823 - DNA, 75 bp, synthetic construct
  source 1..75: mol_type = other DNA
ctgggccataaaacccagcagcaaacagatcgctaccatgatgaccgagggaaagattggagtaaaatagctata

SEQ ID NO: 587824 - DNA, 75 bp, synthetic construct
  source 1..75: mol_type = other DNA
ctttatctgaacgtctgtacaaagaacaggggatcgatactagaaagctactgggccataaaacccagcagcaaa

SEQ ID NO: 587825 - DNA, 75 bp, synthetic construct
  source 1..75: mol_type = other DNA
ctgggacataaatcacctaaccaaacagctcgataccatgatgatcgtgggaaagattgggttaaagtagccctc

SEQ ID NO: 587826 - DNA, 75 bp, synthetic construct
  source 1..75: mol_type = other DNA
tgtcatgccattgccgctcacagtttcagcgcgcaaatcgcccccttaacaacggaagctaaaatcgtccaggat

SEQ ID NO: 587827 - DNA, 75 bp, synthetic construct
  source 1..75: mol_type = other DNA
gaccatgcaggcattgctgaacgaataatcgaacctaaagcgccatcaactgactacacgccagataagcacgat

SEQ ID NO: 587828 - DNA, 75 bp, synthetic construct
  source 1..75: mol_type = other DNA
tgcaccgttcgcggctacaacttcgcaatcaccttctcaaaaatgagtggcaaaccgacgtcatggcaggtgaat

SEQ ID NO: 587829 - DNA, 75 bp, synthetic construct
  source 1..75: mol_type = other DNA
tcggcattggcccgtgggaacgacgcctgcgcaccctcatcgaacaatatcaactggaagatgtggtggagatgc

SEQ ID NO: 587830 - DNA, 75 bp, synthetic construct
  source 1..75: mol_type = other DNA
ttattttcacgatatcgtgagcctggcgaaaaatcatccgcaacggcagcgttcttcaatcctggcggcagaaga

SEQ ID NO: 587831 - DNA, 75 bp, synthetic construct
  source 1..75: mol_type = other DNA
ctggcagcagaagagacgcgtcgcctgctgcgtgaagaattcgcgcaatttccagcggaaaaaatcgaggctgtt

SEQ ID NO: 587832 - DNA, 75 bp, synthetic construct
  source 1..75: mol_type = other DNA
cggataagaacttcccgggtgacgccatgaagcgtggctacatgaccgttaatctcggttctgattttgatgcca

SEQ ID NO: 587833 - DNA, 75 bp, synthetic construct
  source 1..75: mol_type = other DNA
atgcaaatcaaagcgaccaggtgatcgggcagattgacacgaccacacgggggcaggtatcgcaggcagataaat

SEQ ID NO: 587834 - DNA, 75 bp, synthetic construct
  source 1..75: mol_type = other DNA
gacccgtggctgaaacaacggctggaacataacggctgggtactgtgggcaccgattcgctttggtgctaccagt

SEQ ID NO: 587835 - DNA, 75 bp, synthetic construct
  source 1..75: mol_type = other DNA
ccgctacgaccgaaagcctgtgaaagccctgacctgcctcatcaccacccgcaccatgccgggccagaacaaaaa

SEQ ID NO: 587836 - DNA, 75 bp, synthetic construct
  source 1..75: mol_type = other DNA
ggaaaaaaggactggctgcgctgtgtttactggcagcggcagggcttagcggctgtgatcaaaaagagaataccg

SEQ ID NO: 587837 - DNA, 75 bp, synthetic construct
  source 1..75: mol_type = other DNA
cgggcgaaaacatgacgatggataataaagaaacgactcatgtcacaggcagcaaactggatatttcggtcaact

SEQ ID NO: 587838 - DNA, 75 bp, synthetic construct
  source 1..75: mol_type = other DNA
gaaagcactggcgcaccatccgggacggaaaaatccatgctattgatttagctccaaaggatgttattgctatgg

SEQ ID NO: 587839 - DNA, 75 bp, synthetic construct
  source 1..75: mol_type = other DNA
tgcgtcggtgggcagtatccagaactttgccagcttcatctgcgcctcttttgcgccgatcattactggttttat

SEQ ID NO: 587840 - DNA, 75 bp, synthetic construct
  source 1..75: mol_type = other DNA
cgttcggtgtatctgaatatgctcgtggcgcacattgcagccctgaattcaggtgtgggtggtcagaagccatcc

SEQ ID NO: 587841 - DNA, 75 bp, synthetic construct
  source 1..75: mol_type = other DNA
cggaattaccggtatgcgccggattgccgatttttactggctcacacggtccttccgatttgtcaccagtctgca

SEQ ID NO: 587842 - DNA, 75 bp, synthetic construct
  source 1..75: mol_type = other DNA
tatattccttacaacagcaaacgcgtaagtaggaataaagaaagtaactctcagctaaaaccagcagctggagaa

SEQ ID NO: 587843 - DNA, 75 bp, synthetic construct
  source 1..75: mol_type = other DNA
atggcggctatccctttcctgtttggggctgccgggatgctggtcaacggttacgttactgactggctggtcaaa

SEQ ID NO: 587844 - DNA, 75 bp, synthetic construct
  source 1..75: mol_type = other DNA
atggctccgattaaaagccgtaagatctgcattattgccgggatgttctgttctgccgcctttacgctggtcgta

SEQ ID NO: 587845 - DNA, 75 bp, synthetic construct
  source 1..75: mol_type = other DNA
ttggcggtaatttagcagcggcagaagagaagaaaactggctgcctggtgtgtctcgatagctgtccggtcggta

SEQ ID NO: 587846 - DNA, 75 bp, synthetic construct
  source 1..75: mol_type = other DNA
ttgtttccgatgccatcactgtaaaagggttttccggtggagctgatattgagagtgcagcggagctgctgtcac

SEQ ID NO: 587847 - DNA, 75 bp, synthetic construct
  source 1..75: mol_type = other DNA
gaacatctggcctggattgcacgtcagatcatcccgacagaagccgatgaagccgagttgctgaagcactgcgct

SEQ ID NO: 587848 - DNA, 75 bp, synthetic construct
  source 1..75: mol_type = other DNA
gcgaccggaacggtcgctgcaagccaggggtttcgcgtcagggatggaagcccgtcagggcggagacagcttcgc

SEQ ID NO: 587849 - DNA, 75 bp, synthetic construct
  source 1..75: mol_type = other DNA
gtggtgctgaccaacgctgaattcacaggtgccggtgatgctgacggcaatgcagaaatttcctggaagatttaa

SEQ ID NO: 587850 - DNA, 75 bp, synthetic construct
  source 1..75: mol_type = other DNA
ttgcgctgcatggcccggtctatatgcgagtggccacaccaaccgcctcaagccctctcggggcgttccttgccg

SEQ ID NO: 587851 - DNA, 75 bp, synthetic construct
  source 1..75: mol_type = other DNA
tttgccaatctttccgtctggtatctggacgacgagcaactggcaaaagtgagcgcctttgccgatcgtaccatg

SEQ ID NO: 587852 - DNA, 75 bp, synthetic construct
  source 1..75: mol_type = other DNA
gggcatcactgccacggccggaaacgactgtccgggggcagaccacaaaagtttttgcctgcttttgggcaaaaa

SEQ ID NO: 587853 - DNA, 75 bp, synthetic construct
  source 1..75: mol_type = other DNA
ggcagcccgaaaccgcgccagcggggttcggcggagactggcaggtgcgccagcagctgcctgtcggagtcgggc

SEQ ID NO: 587854 - DNA, 75 bp, synthetic construct
  source 1..75: mol_type = other DNA
agtgggtaatccgtcagaccagatggaaagcgatatctatgcggttttcaacgatgtaccagaaatacccagtgc

SEQ ID NO: 587855 - DNA, 75 bp, synthetic construct
  source 1..75: mol_type = other DNA
ggacggcgaaccttacgcggttgaagcaagtgaatttgtgaagccgggtaaaggccaggcatttgctcgcgttaa

SEQ ID NO: 587856 - DNA, 75 bp, synthetic construct
  source 1..75: mol_type = other DNA
ggcgacaacgctaaatggctgctggatcaggcagagtgtatcgtaactctgtggaatggtcagccgatctccgtt

SEQ ID NO: 587857 - DNA, 75 bp, synthetic construct
  source 1..75: mol_type = other DNA
ttaaacgcaaggccttaacagacttcacattagcgctaagtgccaaagtcaaggctgttcgcggcccacaaatta

SEQ ID NO: 587858 - DNA, 75 bp, synthetic construct
  source 1..75: mol_type = other DNA
gtgaactggcgaaaagcgaggccgctgccgccatcgctcatttgacggtaaaacgttacgttccgctcgtgggta

SEQ ID NO: 587859 - DNA, 75 bp, synthetic construct
  source 1..75: mol_type = other DNA
tgcataaggaaaacgccaccagcaacgtagagttggtcatggagaacggtcaaacctatcccctgaaaggtacgc

SEQ ID NO: 587860 - DNA, 75 bp, synthetic construct
  source 1..75: mol_type = other DNA
ggtggaggccgacaaatccggctggctggtgcctgagaacgatgctcgtgcactggcgcaacgactggtggcgtt

SEQ ID NO: 587861 - DNA, 75 bp, synthetic construct
  source 1..75: mol_type = other DNA
cgtagagctggtcatggaaaacggtcaaacttatcccctgaaaggcacactgcaattctccgatgtgaccgtgga

SEQ ID NO: 587862 - DNA, 75 bp, synthetic construct
  source 1..75: mol_type = other DNA
atgacgaaatatgccaggtttttcctcctgcccccctttatcatgatctccgcagcgttaatcgcgggttgcaac

SEQ ID NO: 587863 - DNA, 75 bp, synthetic construct
  source 1..75: mol_type = other DNA
caggccgatgccgccgtaattgccgccaaagccactgttgaaagtgcccggattaatctggcttataccaaagta

SEQ ID NO: 587864 - DNA, 75 bp, synthetic construct
  source 1..75: mol_type = other DNA
gtcttcctgttgccatcggttacaggtgcggacggcgatatggaaggcattccggtggcgctgatggaagcgatg

SEQ ID NO: 587865 - DNA, 75 bp, synthetic construct
  source 1..75: mol_type = other DNA
gctcctgtcgtcaaacgtgctcgcgaaaaagtcgaacacgattttaaccagcaggtgattaatcgagaactcgcc

SEQ ID NO: 587866 - DNA, 75 bp, synthetic construct
  source 1..75: mol_type = other DNA
tccggtggcgctaatggaagcaatggcggtcggcattccggttgtttcaactctgcatagcggaataccagaact

SEQ ID NO: 587867 - DNA, 75 bp, synthetic construct
  source 1..75: mol_type = other DNA
gctccggttgtcaaacgcgctcgcgaaaaagtcgaacatgattttaaccagcaggtgatcaatcgagagttagcc

SEQ ID NO: 587868 - DNA, 75 bp, synthetic construct
  source 1..75: mol_type = other DNA
ctcataccagccagtggtgcatcatccgcgaccgcaagctctacaccctcgacggcaagccgctggggcatgtgg

SEQ ID NO: 587869 - DNA, 75 bp, synthetic construct
  source 1..75: mol_type = other DNA
ggcgtcgcccggcgcatggtgtcgttgctgaacaggctggatgctgaccttgctgcaaaactgctggtgctgctg

SEQ ID NO: 587870 - DNA, 75 bp, synthetic construct
  source 1..75: mol_type = other DNA
gcgcgcccggattgatgaaggtgtacaacctgatgccattcttattccgcaacaaggcgtcagccgcacaccgcg

SEQ ID NO: 587871 - DNA, 75 bp, synthetic construct
  source 1..75: mol_type = other DNA
cagggggcatttgaccacaccttctggatgatgaaggtggcactgcctgcggcgatgaataaggttattacagat

SEQ ID NO: 587872 - DNA, 75 bp, synthetic construct
  source 1..75: mol_type = other DNA
cacacacccaccaagggcagctcttcagagttagtgattatcgtacaaaagaaataccagcatcagaagttatgg

SEQ ID NO: 587873 - DNA, 75 bp, synthetic construct
  source 1..75: mol_type = other DNA
gccacgccgaaggccgtgaaggcggcaatggatgtggcaaatgaagcgaaaacaaaggcagaagaggctgcagca

SEQ ID NO: 587874 - DNA, 75 bp, synthetic construct
  source 1..75: mol_type = other DNA
ccgggtattcgcactcctgcttatcggcaaatcatcagcgcaatagacaacatgactcacagtgagcaagaaaaa

SEQ ID NO: 587875 - DNA, 75 bp, synthetic construct
  source 1..75: mol_type = other DNA
aaggagccaccggcgcaaccgggccacagggagcaaaaggggataaaggtgatcccggccctcagggaccaaagg

SEQ ID NO: 587876 - DNA, 75 bp, synthetic construct
  source 1..75: mol_type = other DNA
acagggcccagaggtgaacggggtgaaaagggagagaaaggagatccgggtggccctccagggccaaagggagat

SEQ ID NO: 587877 - DNA, 75 bp, synthetic construct
  source 1..75: mol_type = other DNA
tccgaaaggagagaaaggcgaccccggagcacagggtccgaaaggtgaaacgggagcaacaggtcccgctggtcc

SEQ ID NO: 587878 - DNA, 75 bp, synthetic construct
  source 1..75: mol_type = other DNA
cattgaggtgatggggaagtatgaggcagccatagtccgggtcaccattggcgcgttcagccagcgggatgccag

SEQ ID NO: 587879 - DNA, 75 bp, synthetic construct
  source 1..75: mol_type = other DNA
gcgcgcacggattgatgaaggcgtacaacctgatgccatttttatcccgcaacaaggcgttagccgcacaccacg

SEQ ID NO: 587880 - DNA, 75 bp, synthetic construct
  source 1..75: mol_type = other DNA
agatgaattttacaccgataaaggcgaatggctgacgctgaagcaactccgtgagcgtgatgcacaggtattcag

SEQ ID NO: 587881 - DNA, 75 bp, synthetic construct
  source 1..75: mol_type = other DNA
tgcgtcagggttttttgctgggggataccaatgagcagatcgcaagaaaaattcggggacatgtcagtaagggat

SEQ ID NO: 587882 - DNA, 75 bp, synthetic construct
  source 1..75: mol_type = other DNA
gcctggctgaaagaaaaaggggcatttgaccagccttactggatgatgaaggcatcactgcatgcgggattcaat

SEQ ID NO: 587883 - DNA, 75 bp, synthetic construct
  source 1..75: mol_type = other DNA
caaagtggcgaaactgcgccaccgagccagtcagaccttgcgcggcattcatcgtaaaaatacctggcaggcgct

SEQ ID NO: 587884 - DNA, 75 bp, synthetic construct
  source 1..75: mol_type = other DNA
tgcaaaaaatgggctgcccgagggaaaaaatcgccgtatcgcgcatgggcgtggacatgacgcgctttagcccgc

SEQ ID NO: 587885 - DNA, 75 bp, synthetic construct
  source 1..75: mol_type = other DNA
tccggtggcactaatggaagcaatggcggtcggcattccggttgtttcaactctgcatagcggaataccggaact

SEQ ID NO: 587886 - DNA, 75 bp, synthetic construct
  source 1..75: mol_type = other DNA
gggctgcccgagggaaaaaatcgtcgtatcgcgcatgggcgtggacatgacgcgttttagcccgcgtccggtgaa

SEQ ID NO: 587887 - DNA, 75 bp, synthetic construct
  source 1..75: mol_type = other DNA
tcgcggcaaaattgccaccattttccacggcattgatatttccagtcgggaagtgctcaaccactacactcccga

SEQ ID NO: 587888 - DNA, 75 bp, synthetic construct
  source 1..75: mol_type = other DNA
caactggaagatgtggtagagatgccgggctttaaaccgagccacgaagtgaaagcgatgctcgacgacgcggat

SEQ ID NO: 587889 - DNA, 75 bp, synthetic construct
  source 1..75: mol_type = other DNA
tttgtggtcaggtcgcaacatcgttacatgccgatgtctttatcgcacattttggccctgcgggggtaaccgcag

SEQ ID NO: 587890 - DNA, 75 bp, synthetic construct
  source 1..75: mol_type = other DNA
acttagtgcattttttccgttcaacttcgcaggcagaacgtggagcacaggtaaaatccaatacattgacgatga

SEQ ID NO: 587891 - DNA, 75 bp, synthetic construct
  source 1..75: mol_type = other DNA
attaaatccaatacattgacgatgaattttagtaaagcaagggatttagcagggattgactggggggatggctca

SEQ ID NO: 587892 - DNA, 75 bp, synthetic construct
  source 1..75: mol_type = other DNA
aagttgatctcagccgttgatgtaagagatatagcacaattgcttgacgagtatatcgctgccgggcagccgaga

SEQ ID NO: 587893 - DNA, 75 bp, synthetic construct
  source 1..75: mol_type = other DNA
aaactattgggccacaaaacaatgaaaatgactgacatatacaatgatgaccgcggcaaagagtggatcgttgtt

SEQ ID NO: 587894 - DNA, 75 bp, synthetic construct
  source 1..75: mol_type = other DNA
cgttatctgaacgcctgtataaagaacaggggttagatacacaaaaactacttggtcacaaaacacaacaacaaa

SEQ ID NO: 587895 - DNA, 75 bp, synthetic construct
  source 1..75: mol_type = other DNA
acttagtacattttttcagatcaacttcacaggcagaacgtggggcacaagtaaaagctaatactctgactatga

SEQ ID NO: 587896 - DNA, 75 bp, synthetic construct
  source 1..75: mol_type = other DNA
ctgggtcataaaacccagcatcaaacagataaatatcatgatgacagaggtaaagaatggcaaaaaataccctct

SEQ ID NO: 587897 - DNA, 75 bp, synthetic construct
  source 1..75: mol_type = other DNA
tgttaccggtcatggttgcccacaagggctcgatgcaaaaaatcctattccgcctcatcaacttcttaaagcttt

SEQ ID NO: 587898 - DNA, 75 bp, synthetic construct
  source 1..75: mol_type = other DNA
aatgggttatgtttttgccttgttctaaagaagaagttgaatcgcgccacgttttggatattgtttttggcgtgc

SEQ ID NO: 587899 - DNA, 75 bp, synthetic construct
  source 1..75: mol_type = other DNA
gggactatccagattagcgggatggccgacagtgacgacgatcgacaacaaccaagttcgtgccgagggcgcagc

SEQ ID NO: 587900 - DNA, 75 bp, synthetic construct
  source 1..75: mol_type = other DNA
gtttcacgggtaaacgtgctgcccggttcaaagaggcatacatcaatgcctttaaccagatggagaaacagcttt

SEQ ID NO: 587901 - DNA, 75 bp, synthetic construct
  source 1..75: mol_type = other DNA
gttcaaagaggcatacatcaacgcctttaaccagatggagaagaatttatctggtggtgacgcggttgatatgtc

SEQ ID NO: 587902 - DNA, 75 bp, synthetic construct
  source 1..75: mol_type = other DNA
gttttggatattgtttttggcgtgctatgtcttgagaaggccggtataaatccacgagacatatcaatatatatt

SEQ ID NO: 587903 - DNA, 75 bp, synthetic construct
  source 1..75: mol_type = other DNA
tcactaccaaaatgctggcagccattacagacgaatataaagccagaggcaaagcacgaatggcgcaaacgctcc

SEQ ID NO: 587904 - DNA, 75 bp, synthetic construct
  source 1..75: mol_type = other DNA
aagattttcgatatcgcggataagaaacatcagtatatggggaatgctatgctgttagcactggtgactggccag

SEQ ID NO: 587905 - DNA, 75 bp, synthetic construct
  source 1..75: mol_type = other DNA
gaaaattcaggaggaaagattcgcttcaggtgatatcaaggagaatacgtataaacaaaaagccaagccagttgc

SEQ ID NO: 587906 - DNA, 75 bp, synthetic construct
  source 1..75: mol_type = other DNA
tccggctgcgggcgtcggtgccccgcatatccgagatagagcgtattgggtggccgacgccagcggcgagcgatc

SEQ ID NO: 587907 - DNA, 75 bp, synthetic construct
  source 1..75: mol_type = other DNA
atgaatacacaatcttgtcctctcaatatggcgatctatcaagccagattgagaaatacaacaacctcctggaca

SEQ ID NO: 587908 - DNA, 75 bp, synthetic construct
  source 1..75: mol_type = other DNA
gcccaatcgcaacagcaaatccgtgatgaatacacaatcttgtcctctcaatatggcgatctatcaagccagatt

SEQ ID NO: 587909 - DNA, 75 bp, synthetic construct
  source 1..75: mol_type = other DNA
ccgattttgcttcgctgtatcaggtacgtactggctcacacggtccttccgatttgtcaccagtctgcatggctg

SEQ ID NO: 587910 - DNA, 75 bp, synthetic construct
  source 1..75: mol_type = other DNA
caattgcggtgggtgaagtattcaatagcatttgggactgcaaacagctcattgaagagcaacttatcgactata

SEQ ID NO: 587911 - DNA, 75 bp, synthetic construct
  source 1..75: mol_type = other DNA
cagtggccagaagagcagttgtggtcaacggaaaaatatctcggcttcatgccaaaactgttcgacgcggtacgt

SEQ ID NO: 587912 - DNA, 75 bp, synthetic construct
  source 1..75: mol_type = other DNA
acgtggccgttatcaatgcagattcatcgatgcttgccgagattataaaaaaagcagtcagccctataccaactc

SEQ ID NO: 587913 - DNA, 75 bp, synthetic construct
  source 1..75: mol_type = other DNA
acgtggccgttatcaacgcagattcatccatgcttgctgacattataaaaatagcagtcagccctatcccgacac

SEQ ID NO: 587914 - DNA, 75 bp, synthetic construct
  source 1..75: mol_type = other DNA
aaactcacaaacgcatttttaacggcatttatccgtgggccggtgaattccgggaaaataccgggatgatggtca

SEQ ID NO: 587915 - DNA, 75 bp, synthetic construct
  source 1..75: mol_type = other DNA
ttttcactcatgctggttgccattttcttttccaccgcctggcgagtcctgacgttatcgggactggtggggtga

SEQ ID NO: 587916 - DNA, 75 bp, synthetic construct
  source 1..75: mol_type = other DNA
tgatttcgatctcgacaaaatggtgaatgtttatccgttgaccccgcgcctgattgaccaattacgcccacgccc

SEQ ID NO: 587917 - DNA, 75 bp, synthetic construct
  source 1..75: mol_type = other DNA
tatttcattttcactaatgctggttgctctttttctgtccctcgcctgggtgatgttgtcttcgtcgtggctgct

SEQ ID NO: 587918 - DNA, 75 bp, synthetic construct
  source 1..75: mol_type = other DNA
ctgtgtccgcaacttataggccgcgatgcccaccgtatcgaagatatctggcagtttttctataaaggtgcttac

SEQ ID NO: 587919 - DNA, 75 bp, synthetic construct
  source 1..75: mol_type = other DNA
gcggattttgcttcgctttatcaggtgcgcacaggctcacacggcccttccgatttgtcaccagtctgcatggct

SEQ ID NO: 587920 - DNA, 75 bp, synthetic construct
  source 1..75: mol_type = other DNA
atgaaaaccatcagtcgtgaaaaaatcatcacagggttttgtgatggcattgtgatttatcgttatcttgagatt

SEQ ID NO: 587921 - DNA, 75 bp, synthetic construct
  source 1..75: mol_type = other DNA
attcagcaccaccattaacaatgcgctgtcaggtaagcagccactggatgagacgctgactcatttgagcggaaa

SEQ ID NO: 587922 - DNA, 75 bp, synthetic construct
  source 1..75: mol_type = other DNA
tccgcaccacgctgacccatgcaggcggaattaccggtatgcgccggattgccgattttgcttcgctgtatcagg

SEQ ID NO: 587923 - DNA, 75 bp, synthetic construct
  source 1..75: mol_type = other DNA
ataacgcgctaaaagcggagcaaatattaacggagcgggaggaagcccaaagaaagaaacgggctgttttgatat

SEQ ID NO: 587924 - DNA, 75 bp, synthetic construct
  source 1..75: mol_type = other DNA
gacttgcagcggaaaccatagagcaaagaggtaaacaaaacggctacgacaaaaaagaggaaaaatcagcgccaa

SEQ ID NO: 587925 - DNA, 75 bp, synthetic construct
  source 1..75: mol_type = other DNA
agcattcgatgtcttaccatcccgcgtccgtattgatgctgcaatccgtaaatatcaccccaagaaatcctcctc

SEQ ID NO: 587926 - DNA, 75 bp, synthetic construct
  source 1..75: mol_type = other DNA
ggttcggcattgataccgttaaaggccggagttcaccctgttcatgttactcactggatctggggtaattcaggg

SEQ ID NO: 587927 - DNA, 75 bp, synthetic construct
  source 1..75: mol_type = other DNA
gatgtatgggatctattgatttgtctcaaggaggcgcgattagaagccattttgagcaataacagcgatccgaca

SEQ ID NO: 587928 - DNA, 75 bp, synthetic construct
  source 1..75: mol_type = other DNA
ttgcggcagcgaaggaagcaatgcgcctgacgttcttccactggggcctgcacgcatgggcaatctatgccattg

SEQ ID NO: 587929 - DNA, 75 bp, synthetic construct
  source 1..75: mol_type = other DNA
gaaccaggaacagattatcaatgatatacttgaccaatatgaaaagcatctgcacttccttcacttagtccgata

SEQ ID NO: 587930 - DNA, 75 bp, synthetic construct
  source 1..75: mol_type = other DNA
gtaacgtctgctgattcgggggcaatggttgtggatactctggcatcaggtggagtggcaaacacacccgtctgg

SEQ ID NO: 587931 - DNA, 75 bp, synthetic construct
  source 1..75: mol_type = other DNA
attaaacgatcatgaggaagagcaaaagaaaaaacagttcactgctcttaatcctcaatgtggttgtatttcaac

SEQ ID NO: 587932 - DNA, 75 bp, synthetic construct
  source 1..75: mol_type = other DNA
atttgggcaacgtgaaccgccccgggtttcctggagagtgttttatctgtgaactcaggctgccagatcatcgtt

SEQ ID NO: 587933 - DNA, 75 bp, synthetic construct
  source 1..75: mol_type = other DNA
ttgcggcagcgaaggaagcaatgcggctgaccttcttccactggggtctgcatgcctgggcaatatatgccattg

SEQ ID NO: 587934 - DNA, 75 bp, synthetic construct
  source 1..75: mol_type = other DNA
caaaggtcctgtgtgtgattgttggtatttcattttcactaatgctggttgctctttttctgtccctcgcctggg

SEQ ID NO: 587935 - DNA, 75 bp, synthetic construct
  source 1..75: mol_type = other DNA
aaatttaatatatctgaaacagttgagatagttatcatttttttattatggctgctaataattctgtctttttat

SEQ ID NO: 587936 - DNA, 75 bp, synthetic construct
  source 1..75: mol_type = other DNA
aatatatctgaaacagttgagatggttatcatcgctttattagggatactaatgactctgtctttttatctttgt

SEQ ID NO: 587937 - DNA, 75 bp, synthetic construct
  source 1..75: mol_type = other DNA
cttaccccaacccaaccgatggcatacctgttgactatcaggctaacacacaacccgcgctgggagttgattcat

SEQ ID NO: 587938 - DNA, 75 bp, synthetic construct
  source 1..75: mol_type = other DNA
tgtcctgctgcttggcggcatggtgttcctgttcctgcgtttgccgacgtcgttcttaccgctggaagaccgtgg

SEQ ID NO: 587939 - DNA, 75 bp, synthetic construct
  source 1..75: mol_type = other DNA
tctggcagatgtccccgcacataccagctttactaacgcgcaactgctggaaatcatgatggcgcaggattttca

SEQ ID NO: 587940 - DNA, 75 bp, synthetic construct
  source 1..75: mol_type = other DNA
aatatatctgaaacagttgagatggttatcatcgctttattaatgatactaatgactctttctttttatctttgt

SEQ ID NO: 587941 - DNA, 75 bp, synthetic construct
  source 1..75: mol_type = other DNA
ttggcggcaaaattcgccagctctggcgcgcgtttcaactggaatggcacttgtctaaacgtgacattctgacct

SEQ ID NO: 587942 - DNA, 75 bp, synthetic construct
  source 1..75: mol_type = other DNA
atgaaacgccgcactcaactgacgctgggccttgggctgctggcgcttgcgccgctggcgttagcccagggtggc

SEQ ID NO: 587943 - DNA, 75 bp, synthetic construct
  source 1..75: mol_type = other DNA
caaagggcaatgccgccgatcaggatctctcgattgtggtgcccgcctatgtgttgagcgagctgaaaaccgcct

SEQ ID NO: 587944 - DNA, 75 bp, synthetic construct
  source 1..75: mol_type = other DNA
cgactggtcaggcaatgacaaccgatgcggaagccgcagtcagcgaagccctgcgcgacctggccttctggctgt

SEQ ID NO: 587945 - DNA, 75 bp, synthetic construct
  source 1..75: mol_type = other DNA
cgactggctgacctcagacgccgctgtggatgaggcccttctcatcaacgaatacaccttcactgaagccggtct

SEQ ID NO: 587946 - DNA, 75 bp, synthetic construct
  source 1..75: mol_type = other DNA
atgttccgtcacccggaaaacgagtacgaccagatggactcagacgccgctgtggatgaggtcctgctcatcaac

SEQ ID NO: 587947 - DNA, 75 bp, synthetic construct
  source 1..75: mol_type = other DNA
ggtgccgttctcggtaatgctggtcgtgccgctgggggttatcggcgcgctgctggcaacctggatgcgcgggct

SEQ ID NO: 587948 - DNA, 75 bp, synthetic construct
  source 1..75: mol_type = other DNA
gtattctcgggcaggtttatgcaccagacggaatgaatgttaatcagtttatggtccgggccggggctgcctggg

SEQ ID NO: 587949 - DNA, 75 bp, synthetic construct
  source 1..75: mol_type = other DNA
gatgcacctgaaaagaaacaggactatggccggtggtctgaaaaaataatgaaatctctggttgcgggaaaaacg

SEQ ID NO: 587950 - DNA, 75 bp, synthetic construct
  source 1..75: mol_type = other DNA
atggccggtggtctgaaaaaataatgaaatctctggttgcgggaaaaacggttactgtcacatattttcagcgag

SEQ ID NO: 587951 - DNA, 75 bp, synthetic construct
  source 1..75: mol_type = other DNA
ctgtgtacttgtcggcatttcatttttagtcattctggttgccattttcttttccaccgcttggcgagtcctgac

SEQ ID NO: 587952 - DNA, 75 bp, synthetic construct
  source 1..75: mol_type = other DNA
cggcatttcattttcactaatgctggttgctctttttctttccctgggctggatgatgttgtcttcgtcggggat

SEQ ID NO: 587953 - DNA, 75 bp, synthetic construct
  source 1..75: mol_type = other DNA
cgaagggcctttgtgtaatcgtcggtatttcattttcactaatgctggttgttctttttctttccataacctgga

SEQ ID NO: 587954 - DNA, 75 bp, synthetic construct
  source 1..75: mol_type = other DNA
cgagcgtggatagcaatggtgctggcccaggaaacggcaattatgctgctcgacgaacccacgacctggctggat

SEQ ID NO: 587955 - DNA, 75 bp, synthetic construct
  source 1..75: mol_type = other DNA
ctcatctggcgaatcaaagcgtggataccctctccggcgggcaacgacagcgagcgtggatcgcgatggtgctgg

SEQ ID NO: 587956 - DNA, 75 bp, synthetic construct
  source 1..75: mol_type = other DNA
gccagacaacaaaaacgtgggctctggtcagatgctgatccggttcccccctgcatatggagacaccgtaaataa

SEQ ID NO: 587957 - DNA, 75 bp, synthetic construct
  source 1..75: mol_type = other DNA
agcctcgaagatggcatagatggtttcctgggattgacctggaatcaggagttagccgcgacaatcgaccgactg

SEQ ID NO: 587958 - DNA, 75 bp, synthetic construct
  source 1..75: mol_type = other DNA
gatgcacctgaaaagaaacaggaatatggacggtggtctgaaaaaataatgaaatctctggttgcgggaaaaacg

SEQ ID NO: 587959 - DNA, 75 bp, synthetic construct
  source 1..75: mol_type = other DNA
ctgaactgatcgagcgtatttacggcttgcgctgcatgattattgatgatccggtagcaggaacaccgttagtgg

SEQ ID NO: 587960 - DNA, 75 bp, synthetic construct
  source 1..75: mol_type = other DNA
aaacaagggattcgccagttgctgccacattcgaaagaggtcggcgtgccaattgcactggagccactgcacccg

SEQ ID NO: 587961 - DNA, 75 bp, synthetic construct
  source 1..75: mol_type = other DNA
tttgatccgctgcgtggtccggttaaggatttcactcagacattaataaatgagcaaggggaagtaacgaagcgc

SEQ ID NO: 587962 - DNA, 75 bp, synthetic construct
  source 1..75: mol_type = other DNA
ctggaaccggagggacagcattacctggaaattccctaccgtaccttgtcgcatccggctgtcaccctctgggaa

SEQ ID NO: 587963 - DNA, 75 bp, synthetic construct
  source 1..75: mol_type = other DNA
caccaacttgatcctcgcctgcctgtattgctgacagccattttgagcaaggagttttcagcagatcaggttgta

SEQ ID NO: 587964 - DNA, 75 bp, synthetic construct
  source 1..75: mol_type = other DNA
aagagttacaggaagaactcgacaggatgattgggcatatccttagaaagagcctcgataaaaagccgaagcctt

SEQ ID NO: 587965 - DNA, 75 bp, synthetic construct
  source 1..75: mol_type = other DNA
tcgtttagtgactataaaattctgttagaggttaatgaaaaactcagtgaaaagggcttaacatctgaagggctc

SEQ ID NO: 587966 - DNA, 75 bp, synthetic construct
  source 1..75: mol_type = other DNA
cgatattaggcaatgaggatggttgcagtgtggactggaacgacaacctttgtcgtggcgatgagaagaacgcag

SEQ ID NO: 587967 - DNA, 75 bp, synthetic construct
  source 1..75: mol_type = other DNA
cggcgacgtacacgattacgccacctgaagctgtttatcgcgttggctttggtgatatctggcgcggtatttacg

SEQ ID NO: 587968 - DNA, 75 bp, synthetic construct
  source 1..75: mol_type = other DNA
gcagaaggcgcatctccggcgatgtacaaaattacgccgccggaagctgtttatcgcgttggttttggtgatatc

SEQ ID NO: 587969 - DNA, 75 bp, synthetic construct
  source 1..75: mol_type = other DNA
agtttcctggtattagggaggctgttcttgaatcagatatgccgaagacaatgcgcttttcgatgcctgatggta

SEQ ID NO: 587970 - DNA, 75 bp, synthetic construct
  source 1..75: mol_type = other DNA
gatatctggcgcagtatttacgggcaggataactggctatctaacccgtgggtatgggtaatcgagtttaagcgc

SEQ ID NO: 587971 - DNA, 75 bp, synthetic construct
  source 1..75: mol_type = other DNA
gcaaaaacctggtgattacggcttatggtcgatagcgtggatgcaatggctgtgtggcacgttgattgccagtac

SEQ ID NO: 587972 - DNA, 75 bp, synthetic construct
  source 1..75: mol_type = other DNA
tgcctgaagatgtctctttatggcctggtctgcctctttcattaagtggtgatgaagtgatgccactggattacc

SEQ ID NO: 587973 - DNA, 75 bp, synthetic construct
  source 1..75: mol_type = other DNA
tatcaataatcaataagcattctaagttatattatcccgcctatagtaaaacagcgaaaatgacctactacgcga

SEQ ID NO: 587974 - DNA, 75 bp, synthetic construct
  source 1..75: mol_type = other DNA
cgtattacctcaataacgagataaaagaactacagcgacagaaaaacattctggagagtggtgcagggcttgggg

SEQ ID NO: 587975 - DNA, 75 bp, synthetic construct
  source 1..75: mol_type = other DNA
gttgctatgaacggtggcgatgaagaagtggtaactaaagagtttacctttgctgttgatggtgctccgctgaaa

SEQ ID NO: 587976 - DNA, 75 bp, synthetic construct
  source 1..75: mol_type = other DNA
gttcctattgttattaactgcgcggggagtgtctcgaaatttgaaattacattaataggaggaactgcttcgaaa

SEQ ID NO: 587977 - DNA, 75 bp, synthetic construct
  source 1..75: mol_type = other DNA
tcctctctggagtaataatgcacttgctgcacaaacggcaagtgcaaacctaccgattacgatggcagtaacaaa

SEQ ID NO: 587978 - DNA, 75 bp, synthetic construct
  source 1..75: mol_type = other DNA
ttcttgtgagtccaaaacagtttgacggaagtttactggtcaaagtatcaccgcgtacagggacaattcctgccg

SEQ ID NO: 587979 - DNA, 75 bp, synthetic construct
  source 1..75: mol_type = other DNA
gacataaatcgctgtttatgggttatgcgaccccgaaagcattttatgaagccctgaaagaggcaggtggtacgc

SEQ ID NO: 587980 - DNA, 75 bp, synthetic construct
  source 1..75: mol_type = other DNA
ggcgaggttgtcactatgaagcatgagagttacccctatgttttatataacgattctgtccccatacctggaacg

SEQ ID NO: 587981 - DNA, 75 bp, synthetic construct
  source 1..75: mol_type = other DNA
cggcgtaattcttaagctgagtggcatttcacctgcggtttatcagtgcattcatagtaccttcatcagcgagat

SEQ ID NO: 587982 - DNA, 75 bp, synthetic construct
  source 1..75: mol_type = other DNA
caaaacagactggtattcgcaccgctttcaacggctttatttctaaagttgctatgaacggtggcgatgaagaag

SEQ ID NO: 587983 - DNA, 75 bp, synthetic construct
  source 1..75: mol_type = other DNA
accatgacgggcggtgaagatgctgtagtaggtcgttctttcacctttgtagtagatggtgctccggttaaacaa

SEQ ID NO: 587984 - DNA, 75 bp, synthetic construct
  source 1..75: mol_type = other DNA
ggatatggttgttcaggaagaagcgttgcagtgtgccattgctgacatcatcgccagcgaaaacgagatgcgcgc

SEQ ID NO: 587985 - DNA, 75 bp, synthetic construct
  source 1..75: mol_type = other DNA
ggccatcctcgaaggaaggaagacgcagactcgccgacctgtaaaaaatgtcagggctgataactgcctggttat

SEQ ID NO: 587986 - DNA, 75 bp, synthetic construct
  source 1..75: mol_type = other DNA
aaccggaaaaggctgttttgtcaggagaagccggagggtattctcagcgggagacatcgtcttcatccacttctg

SEQ ID NO: 587987 - DNA, 75 bp, synthetic construct
  source 1..75: mol_type = other DNA
gtatctggttgcaggaaatccgtatggatgaagaggggcgaatgcagggactggatgagcagggaagatggctgg

SEQ ID NO: 587988 - DNA, 75 bp, synthetic construct
  source 1..75: mol_type = other DNA
gtgatgctgcgtgatgcagagggccgggaccatctgctctccgcttttgaaagcagcctgcgggatattgcggta

SEQ ID NO: 587989 - DNA, 75 bp, synthetic construct
  source 1..75: mol_type = other DNA
aaatgcgctggccacgctggaagatgccggtgtggtgcggcttcaggggggaacggacaggggcgtcagggtgtc

SEQ ID NO: 587990 - DNA, 75 bp, synthetic construct
  source 1..75: mol_type = other DNA
tcagtcagggatacgtgaccacgcccggaaaaacagtgagtgaacagggcgttgttctggctgctgtctctgccc

SEQ ID NO: 587991 - DNA, 75 bp, synthetic construct
  source 1..75: mol_type = other DNA
gatgagctgattgccggacgtctgcccaatggcgtcagtctggagagaatggaaggcggcattaatgtgcatcgc

SEQ ID NO: 587992 - DNA, 75 bp, synthetic construct
  source 1..75: mol_type = other DNA
catgaacttccggtaacggtgctggtcagggagaaaacgcagacggaagccctgaaatccgttgcaggactggca

SEQ ID NO: 587993 - DNA, 75 bp, synthetic construct
  source 1..75: mol_type = other DNA
gcgcagggagttgcaaggtgaagatctccagcaaatcgcccaccagcttgccgccagtaacatgagcgtttccgg

SEQ ID NO: 587994 - DNA, 75 bp, synthetic construct
  source 1..75: mol_type = other DNA
ccgcctgattatcacaaagggatatccgaagcgcgacgacttcagtcgcagaattgatgtcccgtatgacggata

SEQ ID NO: 587995 - DNA, 75 bp, synthetic construct
  source 1..75: mol_type = other DNA
aaaatgacacctgaagccatgaaaactgtgcaggctgcacagaatactgatgcagaaccactcagtctgcagacg

SEQ ID NO: 587996 - DNA, 75 bp, synthetic construct
  source 1..75: mol_type = other DNA
gaaagaacacgcaacgcccgctgatggaaactgtggacccgtctctcctgactggtctgacatcaggccagcagg

SEQ ID NO: 587997 - DNA, 75 bp, synthetic construct
  source 1..75: mol_type = other DNA
tcacctcctccattcatctgctcgatgagctgagtgtgcagcaactggcgcagcaggcgatgcgcgaaaaccggg

SEQ ID NO: 587998 - DNA, 75 bp, synthetic construct
  source 1..75: mol_type = other DNA
aatggcgcatatgtaccggcatcatcggtgactgaaattcgccagacccgcgaacagagagaaacgcagggagac

SEQ ID NO: 587999 - DNA, 75 bp, synthetic construct
  source 1..75: mol_type = other DNA
cttcaactcgatattggttgggatgtttactgtcgtgctaatgagcgagaagtttcagaactgccgatctctatt

SEQ ID NO: 588000 - DNA, 75 bp, synthetic construct
  source 1..75: mol_type = other DNA
gaattgatgttccgtatggcggatatgaaatcaagacaatcacacatccgcacttcggcgataaaccggtaaagg

SEQ ID NO: 588001 - DNA, 75 bp, synthetic construct
  source 1..75: mol_type = other DNA
atcacacatccgcactttggcgataaaccggtaagggtgttcgctcttagggtaaataccagcactgaatgtcaa

SEQ ID NO: 588002 - DNA, 75 bp, synthetic construct
  source 1..75: mol_type = other DNA
tgtggcacgagccggtatcgatgcgtcactggtgcggggtggcattcattattggcggcattgtgatcctgggga

SEQ ID NO: 588003 - DNA, 75 bp, synthetic construct
  source 1..75: mol_type = other DNA
tgaaatcaagacaatcacacatccccacttcggcgataaaccggtaaaggtgttcgcgataaaggtgaatattga

SEQ ID NO: 588004 - DNA, 75 bp, synthetic construct
  source 1..75: mol_type = other DNA
tgaaatcaagacaatcacacatccgcacttcggtgataaaccggtaaaggtgttcgcgataaaagtgaagattaa

SEQ ID NO: 588005 - DNA, 75 bp, synthetic construct
  source 1..75: mol_type = other DNA
atcacacatccgcactttggcgataaaccggtaaaggtgttcgctcttatggtaaatatcagcactgaatgtcaa

SEQ ID NO: 588006 - DNA, 75 bp, synthetic construct
  source 1..75: mol_type = other DNA
cagcagtctgcccgttctgtgtctgaaccagaaaaggctgttttgtcaggagaagccggagggtattctcagcgg

SEQ ID NO: 588007 - DNA, 75 bp, synthetic construct
  source 1..75: mol_type = other DNA
gggaccatctgctttccgcttttgaaagcagtctgcgggatattgcggctgtagcttatacacatctgacgctgc

SEQ ID NO: 588008 - DNA, 75 bp, synthetic construct
  source 1..75: mol_type = other DNA
atcacacatccgcactttggcgataaaccggtaagggtgttcgctcttacggtaaatagcagcactgaatgtcaa

SEQ ID NO: 588009 - DNA, 75 bp, synthetic construct
  source 1..75: mol_type = other DNA
atcacacatccgcactttggcgataaaccggtaacggtgttcgctcttagggtaaatagcagcactgaatgtcaa

SEQ ID NO: 588010 - DNA, 75 bp, synthetic construct
  source 1..75: mol_type = other DNA
atcacacatccgcactttggcgataaaccggtaatggtgttcgctcttatggtaaataacagcactgaatgtcaa

SEQ ID NO: 588011 - DNA, 75 bp, synthetic construct
  source 1..75: mol_type = other DNA
tttattcagaacacacctgcgttccataatacgccaatgcttcttgaagccgaagaacctcttgctgaatacgcg

SEQ ID NO: 588012 - DNA, 75 bp, synthetic construct
  source 1..75: mol_type = other DNA
acagataaccgccgggcagaatctcacggccagcgccaccacgctgacgcaggacggaatattgctggcgaaaag

SEQ ID NO: 588013 - DNA, 75 bp, synthetic construct
  source 1..75: mol_type = other DNA
tactggtagtgatatccagcgtggcattcaggcggcaacggccgcgcttcagggcctggcggggggtaatttagc

SEQ ID NO: 588014 - DNA, 75 bp, synthetic construct
  source 1..75: mol_type = other DNA
gttgcgtcatccgttaccgcaaccggcaatatcagcgtgaatgccggtcgtgatgttgccctgaccacggcgaca

SEQ ID NO: 588015 - DNA, 75 bp, synthetic construct
  source 1..75: mol_type = other DNA
ttttgattaaaccgagcggctacgatgtgttacaggcactggcaaaagccggaaaactcacctcttctatcggcg

SEQ ID NO: 588016 - DNA, 75 bp, synthetic construct
  source 1..75: mol_type = other DNA
tgctgataagcagccagcaggacaccagtaagtacgacagtaaacagaccagcgtggctgccggcggcagtttta

SEQ ID NO: 588017 - DNA, 75 bp, synthetic construct
  source 1..75: mol_type = other DNA
agtgaggacagtgccacccgtgaagcaggctccctgctgtcggggaaccgcgtgaccgttaacgccggtgataac

SEQ ID NO: 588018 - DNA, 75 bp, synthetic construct
  source 1..75: mol_type = other DNA
ctgccgggaacagtctgatgctttccgccggtcgtgatgtgaacagccaggctgccggtattacggctgaaaaca

SEQ ID NO: 588019 - DNA, 75 bp, synthetic construct
  source 1..75: mol_type = other DNA
tgaccgttaacgccggcgataacctgacggtagagggttcggatgtggtggctgagccgggatgtgtcactggcg

SEQ ID NO: 588020 - DNA, 75 bp, synthetic construct
  source 1..75: mol_type = other DNA
ccgaaacaacgcagggcttggagatcattgcggcttcggtaacgcctcttatagggcaagctgcatcaaataaat

SEQ ID NO: 588021 - DNA, 75 bp, synthetic construct
  source 1..75: mol_type = other DNA
aaacaactctccgtcagcagcctgggtgatattactaatggcgccacattgcagggcaacggtatcacgctgaat

SEQ ID NO: 588022 - DNA, 75 bp, synthetic construct
  source 1..75: mol_type = other DNA
ctgaacaacgccggcgggaaggttttcagcggcggtgatatgcttgctgatatggtctcgctcagcggcgcgggc

SEQ ID NO: 588023 - DNA, 75 bp, synthetic construct
  source 1..75: mol_type = other DNA
gcaatgatctcagtctgaatgccattgacagggtaagcagcagtcgccatgcaaacagtgaatctcaccagcgca

SEQ ID NO: 588024 - DNA, 75 bp, synthetic construct
  source 1..75: mol_type = other DNA
gctgtggcctgttggcgcaaagttatcagttctggcgggaggggactgaaatcgatcttggtgctgatccgcata

SEQ ID NO: 588025 - DNA, 75 bp, synthetic construct
  source 1..75: mol_type = other DNA
gcggccaggtggcggatattgcccggacgcagggagagctgaatgcgctgaaagtcgcgcaggataaatacggac

SEQ ID NO: 588026 - DNA, 75 bp, synthetic construct
  source 1..75: mol_type = other DNA
ccaggaaagagcatcctggcatgagcgatgcacagttgcgggagaccccggaatacagagaggtcatgaaaggct

SEQ ID NO: 588027 - DNA, 75 bp, synthetic construct
  source 1..75: mol_type = other DNA
ggtataccgctacgacccgaaaacgttttacggtagctatgccacaggctctctggataaactgcccctgctgtc

SEQ ID NO: 588028 - DNA, 75 bp, synthetic construct
  source 1..75: mol_type = other DNA
aatcagtgcggagtcacttgaaaagctgatgctagactcaggtggtaaagggaactggagcaaagagctaaataa

SEQ ID NO: 588029 - DNA, 75 bp, synthetic construct
  source 1..75: mol_type = other DNA
ttttcagcgcacagcgtcttttccttaacgcaccgggttcacttcaggccggtggcgatgtgagtctgaacagcc

SEQ ID NO: 588030 - DNA, 75 bp, synthetic construct
  source 1..75: mol_type = other DNA
tctggcgggggcttcggctccggaactggcaaacttcatagggcacaatgctggaattaatgataacgatgcagc

SEQ ID NO: 588031 - DNA, 75 bp, synthetic construct
  source 1..75: mol_type = other DNA
tcgcgtataggtttgtcatcacctgcaaaattatttaaccaaaattcatcattatttgatgagattcgtgcggaa

SEQ ID NO: 588032 - DNA, 75 bp, synthetic construct
  source 1..75: mol_type = other DNA
tgagcaggtggttattggtggtaatgaacgctacgtttctgtatgccgtaaacactataaagaggcgttacaagt

SEQ ID NO: 588033 - DNA, 75 bp, synthetic construct
  source 1..75: mol_type = other DNA
ccgttttggggcaggaaaagtcagctcgcgtataggattgtcatcacctgcaaaactatttaaccaaaattcatc

SEQ ID NO: 588034 - DNA, 75 bp, synthetic construct
  source 1..75: mol_type = other DNA
tgcggcttttgatacccggtatgtcagtaacgtcatactgaaccagacgggctcacgttatatcaacggcacagg

SEQ ID NO: 588035 - DNA, 75 bp, synthetic construct
  source 1..75: mol_type = other DNA
taaagaaatggtaccgagtaagatccctagtgctgtgggtaatgcgggtggtagtttatcatctgagtttggaag

SEQ ID NO: 588036 - DNA, 75 bp, synthetic construct
  source 1..75: mol_type = other DNA
atgtacgccaggcgtattcatctgacctccactgaaagtggtgtcggggttaatcttggtaacctttatgcccgg

SEQ ID NO: 588037 - DNA, 75 bp, synthetic construct
  source 1..75: mol_type = other DNA
aactgtgtcagcagggctggccggcggtctaaccggaaacagcaccgcatcagcagcagtgggagcacagagcgg

SEQ ID NO: 588038 - DNA, 75 bp, synthetic construct
  source 1..75: mol_type = other DNA
tgaaggcagacagtgtcaaaaacgacgggcaattacagggaaatgccaccaccatcacggcaggacaactcacaa

SEQ ID NO: 588039 - DNA, 75 bp, synthetic construct
  source 1..75: mol_type = other DNA
caaatcagcatgctggccactattgcctcaggtattgcgggcgggcttgcaggcaacagtacggcgtctgccggt

SEQ ID NO: 588040 - DNA, 75 bp, synthetic construct
  source 1..75: mol_type = other DNA
aactgggtggaaacaatgcggcttccggtgctgcaggggcattcagcggtgaacttgctgcccggtatatcattg

SEQ ID NO: 588041 - DNA, 75 bp, synthetic construct
  source 1..75: mol_type = other DNA
ggttcatgattcggtccggcagcagggaacagacatgaccagcggcggtgacatcacggttactgccggacggga

SEQ ID NO: 588042 - DNA, 75 bp, synthetic construct
  source 1..75: mol_type = other DNA
tggtgctcggtgccggagaggcattcaccaacaatggaatgctgactgccggtaaaggcaacagtgttttcagcg

SEQ ID NO: 588043 - DNA, 75 bp, synthetic construct
  source 1..75: mol_type = other DNA
gcggacgcgtacttgccaccggcagtgccgacgttaaaggaaccacgctgaataataccggtacgcttcaggggg

SEQ ID NO: 588044 - DNA, 75 bp, synthetic construct
  source 1..75: mol_type = other DNA
tttaaagcgctcgaagcccaaaaggccggacaaaacctgctgaaggcttcacaggatattttttatctcacaaat

SEQ ID NO: 588045 - DNA, 75 bp, synthetic construct
  source 1..75: mol_type = other DNA
cggacagtccgtatctgattacggtgaacccgaaactggatggtctcggacaggtggacagccatttgtttgccg

SEQ ID NO: 588046 - DNA, 75 bp, synthetic construct
  source 1..75: mol_type = other DNA
gtgtggatactctcacgctcacggtgaatcagacgctgaacaatcacgcgagcggaaaactgctcagtgcaggtg

SEQ ID NO: 588047 - DNA, 75 bp, synthetic construct
  source 1..75: mol_type = other DNA
aaagagattaacgagacagtccgtcagcagggaacggaaatcgccagcggtggtgacaccaccgtcaacgcagga

SEQ ID NO: 588048 - DNA, 75 bp, synthetic construct
  source 1..75: mol_type = other DNA
gcacactgatgacaacagtgcatcatccaccacctcacagggcagcagcatcagcgccggcggtaacctggcgat

SEQ ID NO: 588049 - DNA, 75 bp, synthetic construct
  source 1..75: mol_type = other DNA
tggaagctgagttaatagataaagagtcaggtaaaatatttaaagatacaaatcaaggaaatcggtctgactatt

SEQ ID NO: 588050 - DNA, 75 bp, synthetic construct
  source 1..75: mol_type = other DNA
gaatacagagaggtcatgaaaggctacggtacgggcagtacgccgcagatggtggtacaggccatcacgggtgtg

SEQ ID NO: 588051 - DNA, 75 bp, synthetic construct
  source 1..75: mol_type = other DNA
gcatggccgggcttgccggggcggcagtcaaggatatggccgacaggatgacctccgatgaactggagcatctga

SEQ ID NO: 588052 - DNA, 75 bp, synthetic construct
  source 1..75: mol_type = other DNA
acaactggaaagcgtgagtggcaacatcagcaatatcacccggcgtcagcaatggaatgcgggcagtgacagcca

SEQ ID NO: 588053 - DNA, 75 bp, synthetic construct
  source 1..75: mol_type = other DNA
gcttcgatatcacggtcggcaaccacacccagctcgatggtgcggttatcgcttccacggcgacggcagataaaa

SEQ ID NO: 588054 - DNA, 75 bp, synthetic construct
  source 1..75: mol_type = other DNA
ataagcgcgggcggtagcctggatctgagcgccatcggggatatcagcaatatcagctcagtcatcagcggtaaa

SEQ ID NO: 588055 - DNA, 75 bp, synthetic construct
  source 1..75: mol_type = other DNA
tgtgggccacgacctgctgataagcagccagcaggacaccagtaagtacgacagtaaacagaccagcgtggctgc

SEQ ID NO: 588056 - DNA, 75 bp, synthetic construct
  source 1..75: mol_type = other DNA
atgttgatgttcttgctgccaccagtacagatacgtcctggcgctttaaggaaacgaagaaatccggtctgatgg

SEQ ID NO: 588057 - DNA, 75 bp, synthetic construct
  source 1..75: mol_type = other DNA
acccacagcgggaaaagcagcgccccgtcgctcagcctcagtgcgccggaactgaccagcagcggtgtgcttgtc

SEQ ID NO: 588058 - DNA, 75 bp, synthetic construct
  source 1..75: mol_type = other DNA
ggatgggcagactatcaggcagagttcggtaagtaaccgttatggtacgacgaaagtatttgaaagccagacttt

SEQ ID NO: 588059 - DNA, 75 bp, synthetic construct
  source 1..75: mol_type = other DNA
ttaatagataaagagtcaggtaaaatatttaaagatacaaatcaaggaaatcggtctgactattttcttggtgat

SEQ ID NO: 588060 - DNA, 75 bp, synthetic construct
  source 1..75: mol_type = other DNA
cgcagagtcagagtgccagtaccatcggctccactgccggtaatgtcagtattaccgcgggcaaacaggctcata

SEQ ID NO: 588061 - DNA, 75 bp, synthetic construct
  source 1..75: mol_type = other DNA
tctctgctgtcggggaaccgcgtgaccgttaacgccggtgataacctgacggtagagggttcggatgtggtggct

SEQ ID NO: 588062 - DNA, 75 bp, synthetic construct
  source 1..75: mol_type = other DNA
tacttgccaccggcagtgccgacgttaaaggaaccacgctgaataataccggtacgcttcagggtgcggacctgc

SEQ ID NO: 588063 - DNA, 75 bp, synthetic construct
  source 1..75: mol_type = other DNA
acatgccgcaatcgtatagatatgtggctgagaatagctgagtttattctatatccactgatgcgagatgcattt

SEQ ID NO: 588064 - DNA, 75 bp, synthetic construct
  source 1..75: mol_type = other DNA
acctctaaaaagctgacaaaaacggcaattaacgaggcgctccggaggatgaaaaaagcaggtctggacaaacct

SEQ ID NO: 588065 - DNA, 75 bp, synthetic construct
  source 1..75: mol_type = other DNA
aaaaattgacgaaaacagcagttaatgaattcctgcgtagaatgcaaaaagctggaatagagaaaactgagctgg

SEQ ID NO: 588066 - DNA, 75 bp, synthetic construct
  source 1..75: mol_type = other DNA
tgatcaacggcaagcaaaagagctggctggcgcattgtactgatgcagaggcgttatgtattgatcgggtcataa

SEQ ID NO: 588067 - DNA, 75 bp, synthetic construct
  source 1..75: mol_type = other DNA
ggaaaactacgtatgtgggggcgctggtcgtatattggggggggtaagacggggaatatgtttaacctgatgttg

SEQ ID NO: 588068 - DNA, 75 bp, synthetic construct
  source 1..75: mol_type = other DNA
atgatttacccaacgaatacaggaaaaagcggggaacaccttcgtctcaccacgctggaaagtgtctggctccag

SEQ ID NO: 588069 - DNA, 75 bp, synthetic construct
  source 1..75: mol_type = other DNA
atgaagaaacacactttgacccgtatttcagaagaagcctttcacgagcttacccgaattaaacagacaactaac

SEQ ID NO: 588070 - DNA, 75 bp, synthetic construct
  source 1..75: mol_type = other DNA
gaaggcacttaacagctttaaaattgatattgcccgactattgagcatcaagattcacaagctatcgatgggggt

SEQ ID NO: 588071 - DNA, 75 bp, synthetic construct
  source 1..75: mol_type = other DNA
aattacgctggcaagtttatatcagcaatatgcttgcgttcaggcattaattgacgccggagcggatattaataa

SEQ ID NO: 588072 - DNA, 75 bp, synthetic construct
  source 1..75: mol_type = other DNA
agatcatcctgagtggacgttagttacgtgcagacgccgaattgatcaatggttggggatatctgaatttatgtt

SEQ ID NO: 588073 - DNA, 75 bp, synthetic construct
  source 1..75: mol_type = other DNA
gatcgttttactggtgccgtagtactgactggcgatgtttcagctatcgaatatgcacttaatcaggttacccgc

SEQ ID NO: 588074 - DNA, 75 bp, synthetic construct
  source 1..75: mol_type = other DNA
atgaataaacacactttgacccgtatttcagaagaagcttttcacgagcttacccgaattaaacgagcaactaac

SEQ ID NO: 588075 - DNA, 75 bp, synthetic construct
  source 1..75: mol_type = other DNA
ggctaaaggtgcagaatttatttgtacaacaatgttatggcttttggtatagagaaaaaagttattgctttttga

SEQ ID NO: 588076 - DNA, 75 bp, synthetic construct
  source 1..75: mol_type = other DNA
ccgatggtgatgggctggtcaaagaggtctggtttccaaatcgtttgctaccaatgaaagcagatattttagtcg

SEQ ID NO: 588077 - DNA, 75 bp, synthetic construct
  source 1..75: mol_type = other DNA
tgctttgctttcagattatgaagatgccagtgcaccggctatcgcggcttatcagcaagcaggctttagcgggag

SEQ ID NO: 588078 - DNA, 75 bp, synthetic construct
  source 1..75: mol_type = other DNA
gtggcctgctgtatgggcccccgtcggcagttggtcgatacgccagcggataaacaagtaaaatttggcgatgag

SEQ ID NO: 588079 - DNA, 75 bp, synthetic construct
  source 1..75: mol_type = other DNA
tatgtggggcgagggatgagtaagagaaggatggccgagttattaaacgaacagtacccagagtgggcgttgatt

SEQ ID NO: 588080 - DNA, 75 bp, synthetic construct
  source 1..75: mol_type = other DNA
tggattccattccgcgagtattaatcgccaataatccctcattaaaagagtttgcccagcaaattattaccgtac

SEQ ID NO: 588081 - DNA, 75 bp, synthetic construct
  source 1..75: mol_type = other DNA
caagtaaaatttggcgatgagatggtcgatcgagaatattttgccacgtggcaacaagtgcgagaagttgcgcgt

SEQ ID NO: 588082 - DNA, 75 bp, synthetic construct
  source 1..75: mol_type = other DNA
atgatatatccggaaattacaggcaaaagcggcgagcatttacgcctaaaaacgctggaagcagtctggatccaa

SEQ ID NO: 588083 - DNA, 75 bp, synthetic construct
  source 1..75: mol_type = other DNA
cagattttcttccccccggagagacaaacggtgtaagtctgtggggaaatatcgccagtggtgaccacagcacag

SEQ ID NO: 588084 - DNA, 75 bp, synthetic construct
  source 1..75: mol_type = other DNA
gctgctcaatgttctgagtcagcgttatgtggggcgggggatgactaagcgcaaaatggctgaactgaaccgccc

SEQ ID NO: 588085 - DNA, 75 bp, synthetic construct
  source 1..75: mol_type = other DNA
atttcctaaaaagctatgactggaccgctattatggctatgccttatatggaaggcgtcacagaaaaatcggctg

SEQ ID NO: 588086 - DNA, 75 bp, synthetic construct
  source 1..75: mol_type = other DNA
ccaaattagggaagctcaccgtggaggaaatccgctaccgaataaggcggtgctcctctcttttgatgatggcta

SEQ ID NO: 588087 - DNA, 75 bp, synthetic construct
  source 1..75: mol_type = other DNA
gcgatctcctggcataatgttgaagacgatgctgctgaccagcgctttatgtcagtacgaacttctgcgttgcgt

SEQ ID NO: 588088 - DNA, 75 bp, synthetic construct
  source 1..75: mol_type = other DNA
tttttaattagctgcctgaccggcgatttaaccctgttacggattattttatcggctaaacccgatcttaattgc

SEQ ID NO: 588089 - DNA, 75 bp, synthetic construct
  source 1..75: mol_type = other DNA
tggattccgaagctggttaccgccaccatgaggcacagcggaaaaaaagtaatatcggaacccaaatgggcaact

SEQ ID NO: 588090 - DNA, 75 bp, synthetic construct
  source 1..75: mol_type = other DNA
ggcactgtaaaaccaatggttgatggtctggagctgatttcatgggttatggattctgcaaatgaagttgatgct

SEQ ID NO: 588091 - DNA, 75 bp, synthetic construct
  source 1..75: mol_type = other DNA
cacgtgatatggcctggatcgacgtaacaccgccgagtatgagcattctggaaaacgacggtgaacccattattc

SEQ ID NO: 588092 - DNA, 75 bp, synthetic construct
  source 1..75: mol_type = other DNA
tgtccgtttatgggcgtttccaaaaagctggaaaccgcgatggggatggggctggcaacaacatttgtcatgacg

SEQ ID NO: 588093 - DNA, 75 bp, synthetic construct
  source 1..75: mol_type = other DNA
ttcgccgccatccgcgaacgccttgctgtggctgatgtcccggcaccttttcgcggtaatgccattgcgttaatt

SEQ ID NO: 588094 - DNA, 75 bp, synthetic construct
  source 1..75: mol_type = other DNA
gtctggttgactggatacctatgggtgtattccttaatggagctgatggatttattcatcatggtggcgcaggta

SEQ ID NO: 588095 - DNA, 75 bp, synthetic construct
  source 1..75: mol_type = other DNA
gcctcgtggaatcagtatgctcaggacaataatctgacaccggagcaggttcaagaagggatgaatcgtatagct

SEQ ID NO: 588096 - DNA, 75 bp, synthetic construct
  source 1..75: mol_type = other DNA
ctcgataccgggacgctcggcttcagcgatattcacaacgaagcggattataaagtcagtcacagtggaatcagt

SEQ ID NO: 588097 - DNA, 75 bp, synthetic construct
  source 1..75: mol_type = other DNA
aaacagacgcttaaaaacagtaaagatccggcagagcgtgaaaaggcacagcagaaatatgatgcattgcttgaa

SEQ ID NO: 588098 - DNA, 75 bp, synthetic construct
  source 1..75: mol_type = other DNA
ggcacagcggaaaaaaagtaatatcggaacccaaatgggcaacttctcattcttcagcgaagaaatggccgacca

SEQ ID NO: 588099 - DNA, 75 bp, synthetic construct
  source 1..75: mol_type = other DNA
gttaacggtcatgaagtgctgatcgccagtggaggacaattcgcacaaaaagcggcagaggccgggttggtggtg

SEQ ID NO: 588100 - DNA, 75 bp, synthetic construct
  source 1..75: mol_type = other DNA
gagccagcttcccaaagatctccttaccattccgtttctccacgatgttctgagcgaagatttcgttttctatta

SEQ ID NO: 588101 - DNA, 75 bp, synthetic construct
  source 1..75: mol_type = other DNA
caatctgatttacctgcgtacgctggcatttattctggtgattgccgtagtcgtgcagttcaccgagatggttgt

SEQ ID NO: 588102 - DNA, 75 bp, synthetic construct
  source 1..75: mol_type = other DNA
cttgatgaagccatccccgcagctgtgttagtgctgtggggatttttcgccaagaaatatgtatttggtctgatt

SEQ ID NO: 588103 - DNA, 75 bp, synthetic construct
  source 1..75: mol_type = other DNA
gttcttcaatgtgcgatggaaaccggcatttcaattgattggctcgtctcgggtaaaggtgagttaattaagaat

SEQ ID NO: 588104 - DNA, 75 bp, synthetic construct
  source 1..75: mol_type = other DNA
atggtcaatggttggtggatatagaaggaaaactgagtattaaaaaaatcaatttgataccagtcaaaagagcaa

SEQ ID NO: 588105 - DNA, 75 bp, synthetic construct
  source 1..75: mol_type = other DNA
aaaagagtatatcgtaccgccccactgtttgctgatgaactcatcgaaagagaactggaggctcggcctgattat

SEQ ID NO: 588106 - DNA, 75 bp, synthetic construct
  source 1..75: mol_type = other DNA
ctttgtttgccgacgagttaatcgagcgtgaactggctgcgcgtccggagtatttcaatggcaagtccgcccgat

SEQ ID NO: 588107 - DNA, 75 bp, synthetic construct
  source 1..75: mol_type = other DNA
tactggcatctgcctgttgaattattccgggttgtctaccgcgttattcccgactccagttacaggaaatggata

SEQ ID NO: 588108 - DNA, 75 bp, synthetic construct
  source 1..75: mol_type = other DNA
aaaaccgatggatattcactcttatcactgtgagggattagtctgggaacaatactggatggagtttactcctac

SEQ ID NO: 588109 - DNA, 75 bp, synthetic construct
  source 1..75: mol_type = other DNA
ctgtggccgatgttccggccccttttcgtggtaatgccattgcgctgattactgcgggtcttatgtctctggcct

SEQ ID NO: 588110 - DNA, 75 bp, synthetic construct
  source 1..75: mol_type = other DNA
tcgtgcagttcaccgagatggtggtacgtaaaaccagcccggtgctttaccgactgctggggatttttctaccgc

SEQ ID NO: 588111 - DNA, 75 bp, synthetic construct
  source 1..75: mol_type = other DNA
ctgatcatcgcttatagcccatgtgaagagcatggttacgatctggcactcagccacgaccagatgcgccaactc

SEQ ID NO: 588112 - DNA, 75 bp, synthetic construct
  source 1..75: mol_type = other DNA
acggtcgatcaacaccgtgtccgcgtgctgcgtctgctggatcaatttgccgataaaatcccggcggaattactg

SEQ ID NO: 588113 - DNA, 75 bp, synthetic construct
  source 1..75: mol_type = other DNA
tcgtcggcacccgctatgaccggtacaggagccataatccccgagccggagagctgaaggccggacgctggtctc

SEQ ID NO: 588114 - DNA, 75 bp, synthetic construct
  source 1..75: mol_type = other DNA
cgcttcagactgatatgaccagtgcaaagcaggatatcagcaccagatacacaaaaactgaagttgataataagc

SEQ ID NO: 588115 - DNA, 75 bp, synthetic construct
  source 1..75: mol_type = other DNA
ggcgattgttgccgcaggcgggccggaaaacttactggttactgtggcaaatccggatatcgaaaccgcgcaacg

SEQ ID NO: 588116 - DNA, 75 bp, synthetic construct
  source 1..75: mol_type = other DNA
gccgcaggcaacagcgtcatttttgcgccgcatccggcagcgaaaaaagtctctcagcgggcgatcgcgttgctc

SEQ ID NO: 588117 - DNA, 75 bp, synthetic construct
  source 1..75: mol_type = other DNA
aggcgtgactggggattctacggattgattgccgaggaagtaggagaaattgcccctcagtttgtacactggcga

SEQ ID NO: 588118 - DNA, 75 bp, synthetic construct
  source 1..75: mol_type = other DNA
gttacttgccgtactgtgtattctgtttctgctcgatgatatttgcgttgatctatgcttctacaggtttccgtt

SEQ ID NO: 588119 - DNA, 75 bp, synthetic construct
  source 1..75: mol_type = other DNA
ggtttcccgctggcagaaggtattaaagccaccatgagtggtttccgactgacaatgatcactgattcaacgacg

SEQ ID NO: 588120 - DNA, 75 bp, synthetic construct
  source 1..75: mol_type = other DNA
gtacaggtcgcaatgcgaaaatgacaggcgtgactggggtttctagggattgattgccgaggaagtgggagaaat

SEQ ID NO: 588121 - DNA, 75 bp, synthetic construct
  source 1..75: mol_type = other DNA
gtacaggtcgcaatgcgaaaatgacaggcgtgactggggattctagggattgattgccgaggaagttggagaaat

SEQ ID NO: 588122 - DNA, 75 bp, synthetic construct
  source 1..75: mol_type = other DNA
tttttctgaaagtaacagcaccaaaaaaacgtctattgcatggtctgtcggcgcgcaatttaacttcaatgaaag

SEQ ID NO: 588123 - DNA, 75 bp, synthetic construct
  source 1..75: mol_type = other DNA
tgccgaaggtgtaatgtacgaacgtctggttgttccactgattcaccatatccagaagctgactgaaagagttga

SEQ ID NO: 588124 - DNA, 75 bp, synthetic construct
  source 1..75: mol_type = other DNA
gatacacaaaaacagaagtggataataagctgaaaaacaaagtggaagtgaacgatctggaaagtggtcgttatg

SEQ ID NO: 588125 - DNA, 75 bp, synthetic construct
  source 1..75: mol_type = other DNA
gtacaggtcgcaatgcgaaaatgacaggcgtgactggggcttctatggattgattgccgaggaagtaggagaaat

SEQ ID NO: 588126 - DNA, 75 bp, synthetic construct
  source 1..75: mol_type = other DNA
ctctatccagctgagctacggatgcatcgggaaacttactttactgcagattttttgataccgccactaaagtcg

SEQ ID NO: 588127 - DNA, 75 bp, synthetic construct
  source 1..75: mol_type = other DNA
gtcaccaagccagttgttggttacattgccggtgtgactgcgccgaaaggcaaacgtatgggtcatgctggcgct

SEQ ID NO: 588128 - DNA, 75 bp, synthetic construct
  source 1..75: mol_type = other DNA
ggcattatcaccacctacagtaaagtgaaatcccctacccgcgtggtccaaatcctttccatcatcggtttgctg

SEQ ID NO: 588129 - DNA, 75 bp, synthetic construct
  source 1..75: mol_type = other DNA
gaacgacagcctgcaggcgcagattactgccgcccggactggcggtaatggggctaaagatgccaaagaatcaaa

SEQ ID NO: 588130 - DNA, 75 bp, synthetic construct
  source 1..75: mol_type = other DNA
acgcatgatcggcccgaactgcccaggcgttatcactccgggtgaatgtaaaatcggcatccagccgggtcacat

SEQ ID NO: 588131 - DNA, 75 bp, synthetic construct
  source 1..75: mol_type = other DNA
cggatgagaaattcgctgctctggaagccgcaggcgtgaaaaccgttcgcagcctggctgatatcggtgaagcac

SEQ ID NO: 588132 - DNA, 75 bp, synthetic construct
  source 1..75: mol_type = other DNA
atcattgccggtgggaaagggactgcggatgagaaattcgctgctctggaagccgcaggcgtgaaaaccgttcgc

SEQ ID NO: 588133 - DNA, 75 bp, synthetic construct
  source 1..75: mol_type = other DNA
ggtgtttataaccgggatacgttcaggaatgttgtaaacgtaaaccattttaattcatcaggtgaatacgaaaat

SEQ ID NO: 588134 - DNA, 75 bp, synthetic construct
  source 1..75: mol_type = other DNA
gggaaatttattttactgctgatattgataccgctactaaagctgtatcaagtaagagatggtgcatccgggagg

SEQ ID NO: 588135 - DNA, 75 bp, synthetic construct
  source 1..75: mol_type = other DNA
aaacttactttactgcagattttttgataccgccactaaagccgtatcaagtaagagatggtgcatccgggagga

SEQ ID NO: 588136 - DNA, 75 bp, synthetic construct
  source 1..75: mol_type = other DNA
aaatcgaccttgaagcagccgacttttctgatgcgctaatgtggctgaaagaaggaaaaaatgtagctcgacgcg

SEQ ID NO: 588137 - DNA, 75 bp, synthetic construct
  source 1..75: mol_type = other DNA
tggcaggcgcaggtacaacaacaacagtcattgctgagtcgcctgcagaaccgactggaaacagtcaaagagatt

SEQ ID NO: 588138 - DNA, 75 bp, synthetic construct
  source 1..75: mol_type = other DNA
tctcattaatacagtgcacgacctgaccgcgagggggaccggtctgaaagtgctgaccggtcacggggcgactat

SEQ ID NO: 588139 - DNA, 75 bp, synthetic construct
  source 1..75: mol_type = other DNA
tgatcccttttatgaacgagttctgaatgactttttaacttgcagggttaaaacattaaaagtttttcgttctat

SEQ ID NO: 588140 - DNA, 75 bp, synthetic construct
  source 1..75: mol_type = other DNA
tcaggtctacattccaagcggtcaggttctggactcgctgattcgggatttgcgtatctggaatgattttaacgg

SEQ ID NO: 588141 - DNA, 75 bp, synthetic construct
  source 1..75: mol_type = other DNA
gcgcactctctggagattgttgtggctatctgtaaacatcttggcggtggtcaggtctatattcctcgtgggcag

SEQ ID NO: 588142 - DNA, 75 bp, synthetic construct
  source 1..75: mol_type = other DNA
tgctgaaaaacgtcctgcaaattagcgcgctggaagatgagaaatttaaatctaacctcgaccgcgtcgcccatc

SEQ ID NO: 588143 - DNA, 75 bp, synthetic construct
  source 1..75: mol_type = other DNA
atttctcgccgcccgtgcggtgagcggtgtggaaacggtcgcggacgattattatgcccgtagtctggcggtggg

SEQ ID NO: 588144 - DNA, 75 bp, synthetic construct
  source 1..75: mol_type = other DNA
tgaaacgggcagaggcactgattcatctggcaaatgcggcgctggagggcaccttaccaatgacaataccgggcg

SEQ ID NO: 588145 - DNA, 75 bp, synthetic construct
  source 1..75: mol_type = other DNA
cgaacgctggagaccctggcgttcttatgcgctattgcatatctggtatgcggagggctggcaaccagacgaagc

SEQ ID NO: 588146 - DNA, 75 bp, synthetic construct
  source 1..75: mol_type = other DNA
ctgccgtggctgcacagcaagctggttccggcaggcaccgggcacgccactgtaagctggatcgtgccggagtaa

SEQ ID NO: 588147 - DNA, 75 bp, synthetic construct
  source 1..75: mol_type = other DNA
gcaacaggcccacagggaccagctggctcaccggcaggtggtttgcatgctgttggggcatttgtctttgctcag

SEQ ID NO: 588148 - DNA, 75 bp, synthetic construct
  source 1..75: mol_type = other DNA
gaacagacttacagagcagaagagagctctggttttctgtcaataagcctgagtataggaggtgtgattactggt

SEQ ID NO: 588149 - DNA, 75 bp, synthetic construct
  source 1..75: mol_type = other DNA
cagcagatgaataacgtgctgccgtggttgcacagcaaactggttccggcaggcaccgggcatgcaaccgtaagc

SEQ ID NO: 588150 - DNA, 75 bp, synthetic construct
  source 1..75: mol_type = other DNA
gtggtcagcgggatagcagaaggttacaaacgtttcgccactggcacttacgcactgtggtatccggtggtgctg

SEQ ID NO: 588151 - DNA, 75 bp, synthetic construct
  source 1..75: mol_type = other DNA
tggtaaaacacttcaaccgtagtgggcagctacgttattaccctggttcgccgttgattgcccgtcagttactgc

SEQ ID NO: 588152 - DNA, 75 bp, synthetic construct
  source 1..75: mol_type = other DNA
ttctttgtgccgctttactgacggtgacgcctgcagcgtcagcggatgtgaacagcgacatgaatcagttcttta

SEQ ID NO: 588153 - DNA, 75 bp, synthetic construct
  source 1..75: mol_type = other DNA
gtgttgcattaatgggcatcggttccggcttacatgccgatcttccaattctggcggcagccattgttaccgggg

SEQ ID NO: 588154 - DNA, 75 bp, synthetic construct
  source 1..75: mol_type = other DNA
atgtaggtaacgggcaaaaccaaattccggatatggcggcgtttgccagttcactttcatcaacgggttttcaaa

SEQ ID NO: 588155 - DNA, 75 bp, synthetic construct
  source 1..75: mol_type = other DNA
taccgcacttcgcgcgctgctgttaagccgcaagaatccgtttggcgatatcaaatcggatggcacggtgaaaac

SEQ ID NO: 588156 - DNA, 75 bp, synthetic construct
  source 1..75: mol_type = other DNA
cggagttcactggtgatagtgatttaatcaataaaatttctggtagagcttttaatggtggggttccaagagttt

SEQ ID NO: 588157 - DNA, 75 bp, synthetic construct
  source 1..75: mol_type = other DNA
gatttttacccgctgactggccgtgaagcgttttatttatggggattgggcacaactacagcggcggcaaatctt

SEQ ID NO: 588158 - DNA, 75 bp, synthetic construct
  source 1..75: mol_type = other DNA
tacggaaatctgcaacgttttcagcagtattacctcgcgaatgcgcaggttctgcagacggcaaacgcgattttt

SEQ ID NO: 588159 - DNA, 75 bp, synthetic construct
  source 1..75: mol_type = other DNA
gagtcaccagaagacaattacgagctggaactcaaagcggaaatcaccggtaaaggcctggcaatctgccatgat

SEQ ID NO: 588160 - DNA, 75 bp, synthetic construct
  source 1..75: mol_type = other DNA
cagtcaggaaaaaggttttattgaaagcaccagtgtgcccattctgcgttatctggttgacccgcagatgctgaa

SEQ ID NO: 588161 - DNA, 75 bp, synthetic construct
  source 1..75: mol_type = other DNA
tgctttgtgggatgttgctaggagtgtcattgacggcggctgcagatgttaacggtgacatgaataacttcttca

SEQ ID NO: 588162 - DNA, 75 bp, synthetic construct
  source 1..75: mol_type = other DNA
gataaccttaatcaggcgcagcaacagattgccattttccagagccaggtgcaggtccagcaggatgcattgctg

SEQ ID NO: 588163 - DNA, 75 bp, synthetic construct
  source 1..75: mol_type = other DNA
cggttacgacatcctgctgcagtacattcaggagctgatacagcaggcccgggcgatggtggccacgggaaatta

SEQ ID NO: 588164 - DNA, 75 bp, synthetic construct
  source 1..75: mol_type = other DNA
gttttgtgaagcagctgatggggaacgctgtggggtacttttttgacctggcgctgcagactgccgtaccgggga

SEQ ID NO: 588165 - DNA, 75 bp, synthetic construct
  source 1..75: mol_type = other DNA
tcacgctgacggcgcaggtgctggcgaacaccggcagcggactggtacaggctgccaccctgctgctggatgtgg

SEQ ID NO: 588166 - DNA, 75 bp, synthetic construct
  source 1..75: mol_type = other DNA
ccgatatttgacaaggagaaagagcagaggcgtctgcagacagtggggcttatcagtgacataggcagtcaggtg

SEQ ID NO: 588167 - DNA, 75 bp, synthetic construct
  source 1..75: mol_type = other DNA
atcacaacaacattctgaaagtgacacagtatccggcagtacgctgaatgccgggaataatctgtctgttgtcgc

SEQ ID NO: 588168 - DNA, 75 bp, synthetic construct
  source 1..75: mol_type = other DNA
gttaccgtcagcggtacactcgaaaaccgcggcagactcgtcagcgatgacgtgctgacgctcagtgccacgcag

SEQ ID NO: 588169 - DNA, 75 bp, synthetic construct
  source 1..75: mol_type = other DNA
gctaaagccaatcctggcacggttacctatccgcgcccaccggactttaccggcacggcgtttcttgaacagttg

SEQ ID NO: 588170 - DNA, 75 bp, synthetic construct
  source 1..75: mol_type = other DNA
ataacctgacggtagagggttcggatgtggtggctgaccgggatgtgtcactggcggcgggtaaccatgttgatg

SEQ ID NO: 588171 - DNA, 75 bp, synthetic construct
  source 1..75: mol_type = other DNA
accatcggctccactgccggtaatgtcagtattacagcgggcaaacaggctcatatcagcggttcggatgtgatt

SEQ ID NO: 588172 - DNA, 75 bp, synthetic construct
  source 1..75: mol_type = other DNA
aacagtggtacggtcacgggtctgagcggtctgaccctgcacagcgcggacgggcttaccaacagtggcgcgctg

SEQ ID NO: 588173 - DNA, 75 bp, synthetic construct
  source 1..75: mol_type = other DNA
atgcagattactgtgacacttttattcttaaaaccaaccattgatcatgccgtcatttcaaaaataatacaggat

SEQ ID NO: 588174 - DNA, 75 bp, synthetic construct
  source 1..75: mol_type = other DNA
ggcgaactcactgaccagtgcgggcgacatcaccggagtggatgctctcacgctcacggtgaatcagacgctgca

SEQ ID NO: 588175 - DNA, 75 bp, synthetic construct
  source 1..75: mol_type = other DNA
caggccgtagcctcgtggaatcagtatgctcaggacaataatctgacaccggagcaggttcaagaagggatgaat

SEQ ID NO: 588176 - DNA, 75 bp, synthetic construct
  source 1..75: mol_type = other DNA
cattgataacaaaatcctgatcagtgctgcggagaagatctcaacagcgaagcccggtttgcagtcagcagcacc

SEQ ID NO: 588177 - DNA, 75 bp, synthetic construct
  source 1..75: mol_type = other DNA
gcagtgccatcaataatgcggtcaccagtgcacaggagacgaaggagagcagtgacagccgtctgaaagccctgc

SEQ ID NO: 588178 - DNA, 75 bp, synthetic construct
  source 1..75: mol_type = other DNA
gccatgcaaacagtgaatctcaccagcgcagtgcagaacttacgaccattactgccggcgacagtgtgatgctga

SEQ ID NO: 588179 - DNA, 75 bp, synthetic construct
  source 1..75: mol_type = other DNA
aacagcaccgcatcagcagcagtgggagcacagagcgggaagaatgctgtcgagaataacctgctgggtggcagt

SEQ ID NO: 588180 - DNA, 75 bp, synthetic construct
  source 1..75: mol_type = other DNA
agtaagtacgacagtaaacagaccagcgtggctgccggcggcagttttacctttggctccatgaccggctcaggt

SEQ ID NO: 588181 - DNA, 75 bp, synthetic construct
  source 1..75: mol_type = other DNA
cggattataaagtcagtcacagtggaatcagtctgagcggtggtggcagcttcggggataaatttcagggtaaca

SEQ ID NO: 588182 - DNA, 75 bp, synthetic construct
  source 1..75: mol_type = other DNA
gacgatcggcagtggtacggacctggcttccggcatcgtggtggggaactatcccataagcgctaacttaagggt

SEQ ID NO: 588183 - DNA, 75 bp, synthetic construct
  source 1..75: mol_type = other DNA
gctgacagcagggaatggcttggcaccggtaaccctgacacactcatcagtgacataagtctgcctgttggtcat

SEQ ID NO: 588184 - DNA, 75 bp, synthetic construct
  source 1..75: mol_type = other DNA
caattcaaagtacctcaatgtattaaatgacttcttgtcttataatataaatatcatcaaggtttttcgttctat

SEQ ID NO: 588185 - DNA, 75 bp, synthetic construct
  source 1..75: mol_type = other DNA
cgttccggtaatattgaaaccacacgtggcgatatcaccatgaatacggcgcatctgctgaattcctgggatgcc

SEQ ID NO: 588186 - DNA, 75 bp, synthetic construct
  source 1..75: mol_type = other DNA
caatttcctgctctcacccgatgcgcaactgcgtaaagcagatcctgctgtctggggcgatccttctgttctcga

SEQ ID NO: 588187 - DNA, 75 bp, synthetic construct
  source 1..75: mol_type = other DNA
actgaagcgatgaaagcagccaggaaagagcatcctggcatgagcgatgcacagttgcgggagactccggaatac

SEQ ID NO: 588188 - DNA, 75 bp, synthetic construct
  source 1..75: mol_type = other DNA
tctacgccggaaaagacgggtttgatgtcactgtggggaatcacactcagctcaatggtgcggtaattgcgtcca

SEQ ID NO: 588189 - DNA, 75 bp, synthetic construct
  source 1..75: mol_type = other DNA
cgaaaaatttgagcagaagaaaagcgggctgacggttgccctttccggcacggtgggcagtgccatcaataatgc

SEQ ID NO: 588190 - DNA, 75 bp, synthetic construct
  source 1..75: mol_type = other DNA
cacgtagcgatcggccgctcatcaacatgattcatgtttcctgtggcatctcaattctcgtgctgatggtggttc

SEQ ID NO: 588191 - DNA, 75 bp, synthetic construct
  source 1..75: mol_type = other DNA
cgaaaaactcttaacctggacgtttctgtgctcttcgacatgccaagcccaactatgcgcatcctcaacgagcta

SEQ ID NO: 588192 - DNA, 75 bp, synthetic construct
  source 1..75: mol_type = other DNA
tacgccaatggcagccgcagcgcagagcttttcagtatggctgtttcccaatggtgccgtgggcagggcgactgg

SEQ ID NO: 588193 - DNA, 75 bp, synthetic construct
  source 1..75: mol_type = other DNA
ccctgctccattacgtcccggatctgcaccgcaagatgctgctggccacactgtggaacaccggagcacgcatta

SEQ ID NO: 588194 - DNA, 75 bp, synthetic construct
  source 1..75: mol_type = other DNA
ggcggaaacattacctaactggcgttatgtcgacacacaactacctgtacgggaagatttttctgtcgctaccga

SEQ ID NO: 588195 - DNA, 75 bp, synthetic construct
  source 1..75: mol_type = other DNA
tagccaactcgtatggattgcttggtatctcgacacaagttagccttgtgtcatttatagacaccaggctaactt

SEQ ID NO: 588196 - DNA, 75 bp, synthetic construct
  source 1..75: mol_type = other DNA
gcgatgccctgaaaaatttgcgggttactttaagtaactcacaaaatttgcaaccatctttaagaggtttgcaaa

SEQ ID NO: 588197 - DNA, 75 bp, synthetic construct
  source 1..75: mol_type = other DNA
taaaggcggtactacccacctcggcctgccggtgttcaacaccgtgcgtgaagctgttgctgccactggcgctac

SEQ ID NO: 588198 - DNA, 75 bp, synthetic construct
  source 1..75: mol_type = other DNA
atgagggacaaaaccgcgcaccataaacgcggtaaaaacccggtgtgcatcgtttttgattattcccgcacactc

SEQ ID NO: 588199 - DNA, 75 bp, synthetic construct
  source 1..75: mol_type = other DNA
cgtttttgattattcccgcacactctcgcagaaggagttccccgtcgggctacggtctctgttaatacgggaata

SEQ ID NO: 588200 - DNA, 75 bp, synthetic construct
  source 1..75: mol_type = other DNA
aagcggatgacctggctggaatgctggtctctcgtctggctccgcagccgactgttgaccatatctatctgctaa

SEQ ID NO: 588201 - DNA, 75 bp, synthetic construct
  source 1..75: mol_type = other DNA
tgaaagcattcgagcaactgtgctacgagctgaatttccgttcgttccttgaagaccttgaagtgtttgttcttc

SEQ ID NO: 588202 - DNA, 75 bp, synthetic construct
  source 1..75: mol_type = other DNA
ccgccttcaacaaactagcgaagaatgccttcaacgagaaaacaggctgtcgaatgctcgaagcgttcaagagaa

SEQ ID NO: 588203 - DNA, 75 bp, synthetic construct
  source 1..75: mol_type = other DNA
ctgccagtggccacacggcgattatcatcacagcgaaacagtcattcaccgttacggtaccggcgcgatggtgtt

SEQ ID NO: 588204 - DNA, 75 bp, synthetic construct
  source 1..75: mol_type = other DNA
cggaagggatctcgactcgcctgatcccacaaggaagatttgtgactaatgatccgatgacgctggtgcgctggc

SEQ ID NO: 588205 - DNA, 75 bp, synthetic construct
  source 1..75: mol_type = other DNA
tgagtagtcattcatggcttgaatacagcgtgcggcccgacaatgaatttgaactgatcgcaccggaagggatct

SEQ ID NO: 588206 - DNA, 75 bp, synthetic construct
  source 1..75: mol_type = other DNA
gtgcaggatgttcatgagcaactgtatgccttcaataacacccccatcgggacgctgcgcattggctgttcttca

SEQ ID NO: 588207 - DNA, 75 bp, synthetic construct
  source 1..75: mol_type = other DNA
atggaaaataaatactcaaggttacaaatcagcattcactggctggtctttttgctggttatcgcagcgtattgc

SEQ ID NO: 588208 - DNA, 75 bp, synthetic construct
  source 1..75: mol_type = other DNA
agaagtgctaatcccaggattgcgcgtggaattttgccgtgtaaatggcctgcgtggcccaactgcggcaaatgt

SEQ ID NO: 588209 - DNA, 75 bp, synthetic construct
  source 1..75: mol_type = other DNA
cagcgtgcggcccgacaatgaatttgaactgatcgcaccggaagggatctcgactcgcctgatcccgcaagggag

SEQ ID NO: 588210 - DNA, 75 bp, synthetic construct
  source 1..75: mol_type = other DNA
taaggattctctgcattatggcgtcgttgattatctaatcaaaccgttccaggcatcacgttttgaagaggcgct

SEQ ID NO: 588211 - DNA, 75 bp, synthetic construct
  source 1..75: mol_type = other DNA
caacccagggaatttatccatcaccaagctggcggtagcgctggattacgatgcggttgatgtcctgggggttcg

SEQ ID NO: 588212 - DNA, 75 bp, synthetic construct
  source 1..75: mol_type = other DNA
cggatggatgctctgctgaaagctggcacattgcgcctgtcgctgacctttaatcctgcacatgcccagcaaaaa

SEQ ID NO: 588213 - DNA, 75 bp, synthetic construct
  source 1..75: mol_type = other DNA
tgagttgcaggtaaagctgttaaaccgtagcacacgcagcattggcctgaccgaagccggtagaatttactacca

SEQ ID NO: 588214 - DNA, 75 bp, synthetic construct
  source 1..75: mol_type = other DNA
cacgtagcgatcggccactcatcaacatgattcatgtttcctgtggcatatcaattctcgtgctgatggtcgttc

SEQ ID NO: 588215 - DNA, 75 bp, synthetic construct
  source 1..75: mol_type = other DNA
gctgtttatcgcactgccgataattggcatggtgatgatgtataaccgtggcaatccgtggtttgcgtttggtgt

SEQ ID NO: 588216 - DNA, 75 bp, synthetic construct
  source 1..75: mol_type = other DNA
cgcgcctgcgctgttcgcctatcatcccacgtttagctccgggaacgctcatgcaagaaagtatacaactggtta

SEQ ID NO: 588217 - DNA, 75 bp, synthetic construct
  source 1..75: mol_type = other DNA
attcagtctaaccacgtgcgccagactgccgccgtcgccgcaaaacttgggctgcattgtgtggcgctgctggaa

SEQ ID NO: 588218 - DNA, 75 bp, synthetic construct
  source 1..75: mol_type = other DNA
atgccactgcataatttaacccgttttccacggttggagtttatcggcgcgccaacgccgctcgaatatctgccg

SEQ ID NO: 588219 - DNA, 75 bp, synthetic construct
  source 1..75: mol_type = other DNA
gcggcttatccgtcaggcgtgatccctgatatgcgtggctggacgattaagggcaaacccgccagtggccgggcc

SEQ ID NO: 588220 - DNA, 75 bp, synthetic construct
  source 1..75: mol_type = other DNA
agtgccggaaaccatactcatagtgtcacaggcgcatcagcagtcagccagtggtcacaaaatgggtcagtacat

SEQ ID NO: 588221 - DNA, 75 bp, synthetic construct
  source 1..75: mol_type = other DNA
tgatgccagaaagcgaactgattggcgtgaccgtgtcacgttccgttgctgaccagttgccaaaagtggttaacc

SEQ ID NO: 588222 - DNA, 75 bp, synthetic construct
  source 1..75: mol_type = other DNA
tctattcttcctgccaaagttgccgtagacaactcacaaaataaacggaacgcacaagccttcggcgcacttatt

SEQ ID NO: 588223 - DNA, 75 bp, synthetic construct
  source 1..75: mol_type = other DNA
gccacaacgtcgggtctggcagcaattccggaacgacggcaggtgcagttggcggcggagctgtaggcgcggcag

SEQ ID NO: 588224 - DNA, 75 bp, synthetic construct
  source 1..75: mol_type = other DNA
cggttggtctgggcattggcacgatggcgaatacgaactctgctggcgcgcatacccactcactgtccggcactg

SEQ ID NO: 588225 - DNA, 75 bp, synthetic construct
  source 1..75: mol_type = other DNA
tgccccatatgcagaatttcgacggtgtctttgatgccaaaatcgatctgatcgataacacgatcctgttttctg

SEQ ID NO: 588226 - DNA, 75 bp, synthetic construct
  source 1..75: mol_type = other DNA
aaatatcattcacctgaaagggatgacagccgttggcgaaggtgagttactcatcggctggagtggtacaagcgg

SEQ ID NO: 588227 - DNA, 75 bp, synthetic construct
  source 1..75: mol_type = other DNA
cttagtggaaggtgtttctttaacgtataaggaaggcaccaaagtgtatacctctacccaggtgggtaaagagtg

SEQ ID NO: 588228 - DNA, 75 bp, synthetic construct
  source 1..75: mol_type = other DNA
tttttatctattccctctccgtggttttcgacagcgcctcgtacctgaaaaccttcggtttaaccgatgccgatc

SEQ ID NO: 588229 - DNA, 75 bp, synthetic construct
  source 1..75: mol_type = other DNA
cgcacaactggaaaaacttcgcgggttaaaagtctggctgattctgctgtacggcattttgctgtgcttgtcgcc

SEQ ID NO: 588230 - DNA, 75 bp, synthetic construct
  source 1..75: mol_type = other DNA
accttcggtttgaccgatgccgatctttcacaatccctactttataaagtggctattttcgccgtactggtagct

SEQ ID NO: 588231 - DNA, 75 bp, synthetic construct
  source 1..75: mol_type = other DNA
tagccacaggcctttcagtggctctcatctacggattactggttccgtcgctgatttctgcaaagagtgatttgg

SEQ ID NO: 588232 - DNA, 75 bp, synthetic construct
  source 1..75: mol_type = other DNA
agtaataaggcgaaaaatgcctggggtggtgaggtaaccatcaaagccagtacagataaatactcttattcgatt

SEQ ID NO: 588233 - DNA, 75 bp, synthetic construct
  source 1..75: mol_type = other DNA
gaacgatgataaaggcatgaccctgctggaagtcctcggtgttctggtcgtcgctgccattgttattggtgccgt

SEQ ID NO: 588234 - DNA, 75 bp, synthetic construct
  source 1..75: mol_type = other DNA
gcaagatgtatgtttcatttgatttaggaatgtccagcgatgaagaaattataacagccttacaaacgatgctac

SEQ ID NO: 588235 - DNA, 75 bp, synthetic construct
  source 1..75: mol_type = other DNA
aggttagctttggtgatataaaaaaattagagaacaagttaataatgtttagcatggatttttttgaagaaaatg

SEQ ID NO: 588236 - DNA, 75 bp, synthetic construct
  source 1..75: mol_type = other DNA
ggacctactaatttggtcaaaattcaaaaaagcaaaaatatcaaatatggtcttgtctcgtgtgttgtatcctga

SEQ ID NO: 588237 - DNA, 75 bp, synthetic construct
  source 1..75: mol_type = other DNA
aaaggcgagtttgagtatttacagattgatgcaccgacgccgcaggcgctgctgtccgaaatcgaaaaatgctag

SEQ ID NO: 588238 - DNA, 75 bp, synthetic construct
  source 1..75: mol_type = other DNA
ttgggacataagagtattgcgctgttgagcgagaacacttcacattcttatgttattgcaagacgtcagggatgg

SEQ ID NO: 588239 - DNA, 75 bp, synthetic construct
  source 1..75: mol_type = other DNA
tattgacttactactgatagctgatgatgagcatgccgattgccacagctatatgcggcttgttgaaagtcgcag

SEQ ID NO: 588240 - DNA, 75 bp, synthetic construct
  source 1..75: mol_type = other DNA
caggtaagcatgatgctggctgttctggaatacggaatcgaagacgatgaaatggctgaattgactaagcggctt

SEQ ID NO: 588241 - DNA, 75 bp, synthetic construct
  source 1..75: mol_type = other DNA
aactcgataagctgaaacaggcggcgcaggcccagcgcaaaaaaactatcgaagaaaagaatacacaaaagcagc

SEQ ID NO: 588242 - DNA, 75 bp, synthetic construct
  source 1..75: mol_type = other DNA
aatggcttacgaacaatattgccaccgagtggactgattcgggtacaagtagcaatcaagttaatccactgataa

SEQ ID NO: 588243 - DNA, 75 bp, synthetic construct
  source 1..75: mol_type = other DNA
gagcgctgtaatctgacgctggtgggcttttgtaaaccgggtcgggcaacggtttatacccatccgcagcgtttg

SEQ ID NO: 588244 - DNA, 75 bp, synthetic construct
  source 1..75: mol_type = other DNA
cgatgaacaaaagaaacgcattccggaagatgccagtactttgcaccgattgctgggtgcgcagccgggtagcca

SEQ ID NO: 588245 - DNA, 75 bp, synthetic construct
  source 1..75: mol_type = other DNA
agaaggcggctcgtatcgaatcgaccttgcttaacaagctggctctgatgggtcagaagacattcgctaaagcca

SEQ ID NO: 588246 - DNA, 75 bp, synthetic construct
  source 1..75: mol_type = other DNA
tgaggttgagtggaaaactttgggagaagtggctcaatactcgaaaacaagaattagtttcgaactacttgatga

SEQ ID NO: 588247 - DNA, 75 bp, synthetic construct
  source 1..75: mol_type = other DNA
cctcacggacagagaacggcaggtataccgtcaccgtttcaaatggcagtgccacctgcgggagtgtgagtctca

SEQ ID NO: 588248 - DNA, 75 bp, synthetic construct
  source 1..75: mol_type = other DNA
tactcaaaatcctcaatcagccctgttagagttcatagggccagggttaactcgattttcaaataaagtagcaac

SEQ ID NO: 588249 - DNA, 75 bp, synthetic construct
  source 1..75: mol_type = other DNA
cctgtcagtagaaggaaacggaacaacagatcaatcgacgattggaaaattctttaatcccttcagtaaaaacga

SEQ ID NO: 588250 - DNA, 75 bp, synthetic construct
  source 1..75: mol_type = other DNA
cgaaggcttaccccgtgaaatagaactacgccagaagcagtacgagtactatcgtgatttactgttcagcttccc

SEQ ID NO: 588251 - DNA, 75 bp, synthetic construct
  source 1..75: mol_type = other DNA
tatattgctaaaattctggacaaattcgacacattgacaagctccatcaccgaaggcttaccccgtgaaatagaa

SEQ ID NO: 588252 - DNA, 75 bp, synthetic construct
  source 1..75: mol_type = other DNA
acagacgtataaagttacggtgactgatgccaataacaacctgctgaaagatagcgaagtgacgctgactgccag

SEQ ID NO: 588253 - DNA, 75 bp, synthetic construct
  source 1..75: mol_type = other DNA
cacgtatagtaaaaaaattttcagactacacatcaacaataagcactattttttcacttttattgatttttgttg

SEQ ID NO: 588254 - DNA, 75 bp, synthetic construct
  source 1..75: mol_type = other DNA
ggatgtgggttcaggggaaatatcccgtattacaggcttatcacgtgtgacagtcagtctctgggtgtgttcagg

SEQ ID NO: 588255 - DNA, 75 bp, synthetic construct
  source 1..75: mol_type = other DNA
caaggacacttgggtttatggtaattatgattcggaagtgccaaatatagctaaaaaaacatgcgaagaaaatgc

SEQ ID NO: 588256 - DNA, 75 bp, synthetic construct
  source 1..75: mol_type = other DNA
gtctcaggaacaggacggcattaaatcgcacacccacagcgccagcgtatccagtacggatttgggtacgaaaac

SEQ ID NO: 588257 - DNA, 75 bp, synthetic construct
  source 1..75: mol_type = other DNA
agcctgccagtggtcgtgccgtattgtctcaggaacaggacggcattaaatcgcacacccacagcgccagcgtat

SEQ ID NO: 588258 - DNA, 75 bp, synthetic construct
  source 1..75: mol_type = other DNA
tggaataacacgaataaaagaacataagaatataagcgatgaagatttgcttaaaataatgttgtggacatttag

SEQ ID NO: 588259 - DNA, 75 bp, synthetic construct
  source 1..75: mol_type = other DNA
gcgctggatcgcgggcaggggacgcgcgtctggtttgcgatgccggatggcaatattaagtctgtgcaaccgagc

SEQ ID NO: 588260 - DNA, 75 bp, synthetic construct
  source 1..75: mol_type = other DNA
ggtacagttacggcaatctggacagcaaaagatgtctatgacaaccctgtgaccagcctcacgccggaagcgccg

SEQ ID NO: 588261 - DNA, 75 bp, synthetic construct
  source 1..75: mol_type = other DNA
tggggtaacgacagcaacactgacggtaaccctgttctcggcaaacaacccggtaggaggaaccatgtgggtcga

SEQ ID NO: 588262 - DNA, 75 bp, synthetic construct
  source 1..75: mol_type = other DNA
gaaaacgccgcgaagcgtgaagcacagcgcgagaaaaccatcacgaggttactcaatgaaaacgaagattttcgc

SEQ ID NO: 588263 - DNA, 75 bp, synthetic construct
  source 1..75: mol_type = other DNA
acttaatgaaaacgaagattttcgccgctggtatggcgctgacctgcctgatgctgtgcgccggttgcaccagcg

SEQ ID NO: 588264 - DNA, 75 bp, synthetic construct
  source 1..75: mol_type = other DNA
cccggcctgcactgacgccagtgattgtccacaacgcctgcccgaaagtgagtctttgcccgatgccgggcagtg

SEQ ID NO: 588265 - DNA, 75 bp, synthetic construct
  source 1..75: mol_type = other DNA
gttgcgtgcctaaacaagttaggcgcaaaagtcagtcttgatgacgtgttcccgccggaacacaaagccgcttaa

SEQ ID NO: 588266 - DNA, 75 bp, synthetic construct
  source 1..75: mol_type = other DNA
tcgacggtaacgatcgtcttaccggtgccagaacggcacagaccgccccttacgaccgctatacctgccacctct

SEQ ID NO: 588267 - DNA, 75 bp, synthetic construct
  source 1..75: mol_type = other DNA
atggatgttgagtatggtcagtacagcgtcaccctgctggttgaaggttttccgccttcacatgccgggaccatt

SEQ ID NO: 588268 - DNA, 75 bp, synthetic construct
  source 1..75: mol_type = other DNA
cctgcccaggccaggaaaaccgcttgtggtgggtatagatggtggttatgttcgcgatcgggatgacaaaaagcg

SEQ ID NO: 588269 - DNA, 75 bp, synthetic construct
  source 1..75: mol_type = other DNA
ccatctgggtgatctaccagcactctatgtcaactcagaaggaaatgcagaaaacccggttctgagtccaaaaat

SEQ ID NO: 588270 - DNA, 75 bp, synthetic construct
  source 1..75: mol_type = other DNA
agagttttaccagcttgatgcgttaatagaaaaacatactcagtccattgacggttatatcgggatggagactta

SEQ ID NO: 588271 - DNA, 75 bp, synthetic construct
  source 1..75: mol_type = other DNA
ggctcaaaaacagcggctgcatcatctgccagtgccgcgtcaacaagtgccgggcaggcctcagccagtgccacc

SEQ ID NO: 588272 - DNA, 75 bp, synthetic construct
  source 1..75: mol_type = other DNA
tgccgcagaatccgcggcaacgcgcgccgagacagcagcaaaacgggcagaggatattgcatccgccgtggcgct

SEQ ID NO: 588273 - DNA, 75 bp, synthetic construct
  source 1..75: mol_type = other DNA
ttggtatcagtggctcattaaccagtggcacctcccaatgggtaggtaaatcatcttcagaaggaaaccatacac

SEQ ID NO: 588274 - DNA, 75 bp, synthetic construct
  source 1..75: mol_type = other DNA
ccagaacgaatagcgggagtcaacctactggaatgtttccggcagggagtactcaagttagcgggactaatcagg

SEQ ID NO: 588275 - DNA, 75 bp, synthetic construct
  source 1..75: mol_type = other DNA
cctcaacaagtgccgggcaggcctcagccagtgccaccgctgccggaaagtcggcagaaagtgccgcctcgtctg

SEQ ID NO: 588276 - DNA, 75 bp, synthetic construct
  source 1..75: mol_type = other DNA
atgaaactgacatttcagatagttataaccgatgaatcaggctccagtcgaacggaagaactgatgaacctgcag

SEQ ID NO: 588277 - DNA, 75 bp, synthetic construct
  source 1..75: mol_type = other DNA
ttggggagcgttcttgctgttgagaataactatcttagcgtgtctgaaaagacagagcttgagatagcaaaacag

SEQ ID NO: 588278 - DNA, 75 bp, synthetic construct
  source 1..75: mol_type = other DNA
agcttgagatagcaaaacagacgcttaaaaacagtaaaaatccggcagagcgtgaaaaggcacagcagaaatatg

SEQ ID NO: 588279 - DNA, 75 bp, synthetic construct
  source 1..75: mol_type = other DNA
gcgcctgaggaaaggacagctctcagacgacgaaaatccctgacacggacggccaagacgatgatagactacacc

SEQ ID NO: 588280 - DNA, 75 bp, synthetic construct
  source 1..75: mol_type = other DNA
ggcattcttgagcgtctggaacgtgaagatgggtatatcgtccaccagcggcgtgaatggcgtatgtacgatcca

SEQ ID NO: 588281 - DNA, 75 bp, synthetic construct
  source 1..75: mol_type = other DNA
tattgttgctaattattcaaaagccaatcagttatcgacaggaaccgttttcgactcaatcaaggcaacacagcc

SEQ ID NO: 588282 - DNA, 75 bp, synthetic construct
  source 1..75: mol_type = other DNA
ccgatcaggtatccctgacattacgtgatgttcagttcacttatccggaacaatcacaacaagcgcttaaaggga

SEQ ID NO: 588283 - DNA, 75 bp, synthetic construct
  source 1..75: mol_type = other DNA
gtgactatcgggttaagttttcttgatttcaccctcgcctttacgctgggtggcattatgttactgacgcttttc

SEQ ID NO: 588284 - DNA, 75 bp, synthetic construct
  source 1..75: mol_type = other DNA
tccgcgatcgggatgacaagaaatgtaattttgaaattattgccggtaaatcattttcaatcggagcaccggccg

SEQ ID NO: 588285 - DNA, 75 bp, synthetic construct
  source 1..75: mol_type = other DNA
aagaatctttcgacttcctgtccacgcagtttaaaaacggtcaggcctggtactggatagcagaatatatgcgtc

SEQ ID NO: 588286 - DNA, 75 bp, synthetic construct
  source 1..75: mol_type = other DNA
ttggctcacagtcctcggcaaacttctatgagccctgctgtggctccggcatcaacgccattcactggatggaaa

SEQ ID NO: 588287 - DNA, 75 bp, synthetic construct
  source 1..75: mol_type = other DNA
atttcaccctcgcctttacgctgggcggcattatgttgctgacgttgttcctgatgcctccgctattttatcgtg

SEQ ID NO: 588288 - DNA, 75 bp, synthetic construct
  source 1..75: mol_type = other DNA
tccagccgaatccgcggcaacgcgcgccgagacagcagcaaaacgggcagaggatattgcatccgccgtggcgct

SEQ ID NO: 588289 - DNA, 75 bp, synthetic construct
  source 1..75: mol_type = other DNA
agaaagggatcgttcagctcagcagcgcgaccaacagcacatctgaaatgctggcggcaacgccaaagtcggtaa

SEQ ID NO: 588290 - DNA, 75 bp, synthetic construct
  source 1..75: mol_type = other DNA
ggtgggtcagtaagcacaacaacaggaaactggacgactgcacagtttatcgagtggctggattctcagggagca

SEQ ID NO: 588291 - DNA, 75 bp, synthetic construct
  source 1..75: mol_type = other DNA
tcatgctccggcatttattcgttcacgacgggatacgatcgacgcaaactggtcgccgtgggcgcagctttacac

SEQ ID NO: 588292 - DNA, 75 bp, synthetic construct
  source 1..75: mol_type = other DNA
ggccatcagatacaccacctgcaggttatgcaatcatgcaggggcagacgtttgataaggcagcatatccgaaac

SEQ ID NO: 588293 - DNA, 75 bp, synthetic construct
  source 1..75: mol_type = other DNA
cgaagccgctgaacaggccagcgcagcagcgaggtctgcatccgcagcgaagacatccgaaacgaatgcgaaagc

SEQ ID NO: 588294 - DNA, 75 bp, synthetic construct
  source 1..75: mol_type = other DNA
gcggctgcgtcgtctgccagtgcagcgtcaacaagtgccgggcaggcctcagccagtgccactgccgccggaaaa

SEQ ID NO: 588295 - DNA, 75 bp, synthetic construct
  source 1..75: mol_type = other DNA
cggcctggaagtgcaaatcgagctttccagccgccgctttatgggactgaaggagcgccgtcgggcacttgccgg

SEQ ID NO: 588296 - DNA, 75 bp, synthetic construct
  source 1..75: mol_type = other DNA
ttcggctaccgatacgcttgcaaaagaaacggggcttgcggcaagcaccgtcgattctttcctgttcaggcgaat

SEQ ID NO: 588297 - DNA, 75 bp, synthetic construct
  source 1..75: mol_type = other DNA
aatctatggaaaaagcggcgctgttcagccgtgatgctaaaactgaaattccccttgatgaactgaaagagatct

SEQ ID NO: 588298 - DNA, 75 bp, synthetic construct
  source 1..75: mol_type = other DNA
ggccacttaacagtcaatctgtaaataaatacatccttaatgttcagaatatctacagaaattctcccgttccgg

SEQ ID NO: 588299 - DNA, 75 bp, synthetic construct
  source 1..75: mol_type = other DNA
tgtggcgctggataaactgttaggtcggcgggcgcaagaaggtgaacgttggcagcaaggtgcggtgttggtttc

SEQ ID NO: 588300 - DNA, 75 bp, synthetic construct
  source 1..75: mol_type = other DNA
cggtttttcgctttcagaaggaattatcgaaaacccgcgtgatatcttcggtatggacgttgttccttcctgtaa

SEQ ID NO: 588301 - DNA, 75 bp, synthetic construct
  source 1..75: mol_type = other DNA
cgaaaaaggggatagtacagctcagcagtgcgaccaacagcacttccgagtcactggcggcaacgccaaaggcag

SEQ ID NO: 588302 - DNA, 75 bp, synthetic construct
  source 1..75: mol_type = other DNA
gtctgcttcaaaagatgaggcgaccagacaagcgtcagcagcgaatggcagagccacgaccgcatcgacgaaggc

SEQ ID NO: 588303 - DNA, 75 bp, synthetic construct
  source 1..75: mol_type = other DNA
gtctgcttcaaaagatgaggcgaccagacaagcgtcagcagcgaatggcagagccacgactgcaccgacgaaggc

SEQ ID NO: 588304 - DNA, 75 bp, synthetic construct
  source 1..75: mol_type = other DNA
cgaaacttgcaaccgcttatccgtcaggcgtgatccctgatatgcgtggctggacgattaagggcaaacctgcca

SEQ ID NO: 588305 - DNA, 75 bp, synthetic construct
  source 1..75: mol_type = other DNA
taccgcggaatccgcggcaacgcgcgccgagacagcagcaaaacgggcagaggatattgcatccgccgtggcgct

SEQ ID NO: 588306 - DNA, 75 bp, synthetic construct
  source 1..75: mol_type = other DNA
gtctgcttcaaaagatgaggcgaccagacaagcgtcagcagcgaatggcagcgccacgactgcaacgacgaaggc

SEQ ID NO: 588307 - DNA, 75 bp, synthetic construct
  source 1..75: mol_type = other DNA
gtctgcttcaaaagatgaggcgaccagacaagcgtcagcagcgaatggcagcgccacgacagcatcgacgaaggc

SEQ ID NO: 588308 - DNA, 75 bp, synthetic construct
  source 1..75: mol_type = other DNA
tacaaaacaccggggctgtaccatcagccattgaatgccaatacaagcgcagcgctgaaatacccggagaatttt

SEQ ID NO: 588309 - DNA, 75 bp, synthetic construct
  source 1..75: mol_type = other DNA
ccggcgcatcagcccgtgaggcggcaacccatgcgactgatgctgcggactcagcacgcgccgccagcacgtccg

SEQ ID NO: 588310 - DNA, 75 bp, synthetic construct
  source 1..75: mol_type = other DNA
ttcgttcacgacgggatacgaccgacgcaaactggtcgccgtgggcgcagctttacacctcggctcatcctcctg

SEQ ID NO: 588311 - DNA, 75 bp, synthetic construct
  source 1..75: mol_type = other DNA
ccgcgcgcttaaccgaatcgcttggcaaagctttgcgccagttaccgctgaccgatgaacaaaagaaacgcatac

SEQ ID NO: 588312 - DNA, 75 bp, synthetic construct
  source 1..75: mol_type = other DNA
caggctacaccgttatgcaggggcagacttttgataaaacagtctaccccctgcttgcagtcgcttatccgtctg

SEQ ID NO: 588313 - DNA, 75 bp, synthetic construct
  source 1..75: mol_type = other DNA
tgtgtatgacacatccagaagctatacccgcagccagtactcaacgggtgactggacaccatggacgccacaaga

SEQ ID NO: 588314 - DNA, 75 bp, synthetic construct
  source 1..75: mol_type = other DNA
cagcacgcaaaaatccttatctgagctggccgcccgtctgtctgagctggaaacctcgctgcaggcgcaggtcga

SEQ ID NO: 588315 - DNA, 75 bp, synthetic construct
  source 1..75: mol_type = other DNA
ctgagccgtgaagacagccgcaaggattaccgccagcgcacgccgggcggtgacgcaccggcaggcaccctgacc

SEQ ID NO: 588316 - DNA, 75 bp, synthetic construct
  source 1..75: mol_type = other DNA
gtgcataaggccgtggaactggtcgccactgagcagcaaaacctgagtgcgcgcaccgaaaaatccctgtctgaa

SEQ ID NO: 588317 - DNA, 75 bp, synthetic construct
  source 1..75: mol_type = other DNA
gtggaagcgatgcagaaagcccggaacagagccagttatctcgtgaaatatgagacgaagcagcatgacggttcc

SEQ ID NO: 588318 - DNA, 75 bp, synthetic construct
  source 1..75: mol_type = other DNA
actggttatcccgttttgacagccttctcgacagtgccctagtgcagcaccgtgccgtctcgttaattcgggtgg

SEQ ID NO: 588319 - DNA, 75 bp, synthetic construct
  source 1..75: mol_type = other DNA
aggtctttacctgggcatggcgtttcaaagagtgcttgttcgataccgaactgaaagcagcacaggattacgaca

SEQ ID NO: 588320 - DNA, 75 bp, synthetic construct
  source 1..75: mol_type = other DNA
agacagccctgcagtcacagctgaccgcctttaacgaactggtggacaagctgagccatgaagacagccgccagg

SEQ ID NO: 588321 - DNA, 75 bp, synthetic construct
  source 1..75: mol_type = other DNA
tggctggaacagatggcagccagctacaacccggcggtgtacaccgcgctgattaaccttgaacacatcaagtct

SEQ ID NO: 588322 - DNA, 75 bp, synthetic construct
  source 1..75: mol_type = other DNA
atgacagtgaaagcaaagcgttttcgcatcggggtggaaggtgccactaccgacggacgcgaaatccagcgtgaa

SEQ ID NO: 588323 - DNA, 75 bp, synthetic construct
  source 1..75: mol_type = other DNA
cgaactggaagaaatccaggacgacaaaccgtccctgtttgcccgcgtcacggcgctatttaccaaaaaagagca

SEQ ID NO: 588324 - DNA, 75 bp, synthetic construct
  source 1..75: mol_type = other DNA
cggtcaggcgttccgcctgattgatgaaatccgccgtcatgacatgaaagtggggctgatccttaacccggagac

SEQ ID NO: 588325 - DNA, 75 bp, synthetic construct
  source 1..75: mol_type = other DNA
gacgctctcaccgttcttcgtaagccaggtaaaaaaactggcgagtaaaccgctcgactgccatctgatggtaac

SEQ ID NO: 588326 - DNA, 75 bp, synthetic construct
  source 1..75: mol_type = other DNA
gctgcacaaattccccatttgcgggtcattcatctggcgcaaaaccaggggaaagccattgcgcttaaaaccgga

SEQ ID NO: 588327 - DNA, 75 bp, synthetic construct
  source 1..75: mol_type = other DNA
cagattactctcggctctacggcgggtgaattagaagttatgccgaagctaaatggacaggatgcggcagcaaat

SEQ ID NO: 588328 - DNA, 75 bp, synthetic construct
  source 1..75: mol_type = other DNA
ggcgaccttaacgctgggatctgccgcgggtcagttgtctgtgatgccgcgagtgaacggccaaaatgccgttgc

SEQ ID NO: 588329 - DNA, 75 bp, synthetic construct
  source 1..75: mol_type = other DNA
acggtcaggtatcaacgaaaactgccgaatctaaattcgttgcggatgataaaaacgcggtactcaccgcatcat

SEQ ID NO: 588330 - DNA, 75 bp, synthetic construct
  source 1..75: mol_type = other DNA
caaaccgcttgcagacggtaatatcatggtgaacgccgacaaggagggtaaagcggaactgaaagtggtttccgt

SEQ ID NO: 588331 - DNA, 75 bp, synthetic construct
  source 1..75: mol_type = other DNA
tgacggttaccctgttctcggcaaataaccctgttggggggaatgtgtgggtcgacattgaggctccggaaggag

SEQ ID NO: 588332 - DNA, 75 bp, synthetic construct
  source 1..75: mol_type = other DNA
gtacgggaacccggtcaccgggctgaagccagatgcaccagtgtttagcggtgccgccagcacgggatcagcgcg

SEQ ID NO: 588333 - DNA, 75 bp, synthetic construct
  source 1..75: mol_type = other DNA
atttacgtttccctgagtatatgcctgtcaccatcatggatcccgatccggattcagcggtgatttctcgttttt

SEQ ID NO: 588334 - DNA, 75 bp, synthetic construct
  source 1..75: mol_type = other DNA
cgcctttaacgaactggtggacaagctgagtcatgaagacagccgcaaggactaccgccagcgtgcaacaggcgg

SEQ ID NO: 588335 - DNA, 75 bp, synthetic construct
  source 1..75: mol_type = other DNA
gctacggcaaggtgacggcgctgtttgctgaagaaattacggaaggtccgctggcaggcaagatggcattgtatg

SEQ ID NO: 588336 - DNA, 75 bp, synthetic construct
  source 1..75: mol_type = other DNA
ccgctggtgctgtctctgcgcgacgccgaggggcagccagtcacgggcatgaaagatcagatcaagactgaacta

SEQ ID NO: 588337 - DNA, 75 bp, synthetic construct
  source 1..75: mol_type = other DNA
aaaaacgcggtgctcgccgcatctccagaacgtgtagattctctggtggcggacgggaagactactgcaacaatg

SEQ ID NO: 588338 - DNA, 75 bp, synthetic construct
  source 1..75: mol_type = other DNA
ttccgatgatacgcctttgcctggtggatgctctgataccaggaaggcttctgacaaaaaatctggtggatccgc

SEQ ID NO: 588339 - DNA, 75 bp, synthetic construct
  source 1..75: mol_type = other DNA
cgcctttaacgaactggtggacaagctgagccatgaagacagccgccaggattaccgccagcgtgcaacaggcgg

SEQ ID NO: 588340 - DNA, 75 bp, synthetic construct
  source 1..75: mol_type = other DNA
tctgtacgaagcacgggaacaggtgaaacaagggattcgccagttgctgccacattcgaaagaggtcggcgtgcc

SEQ ID NO: 588341 - DNA, 75 bp, synthetic construct
  source 1..75: mol_type = other DNA
tggcgtgcgcggcgtaatagttggtcgtgcattactggaaggtaaattcaccgtgaaggaggccatcgcatgctg

SEQ ID NO: 588342 - DNA, 75 bp, synthetic construct
  source 1..75: mol_type = other DNA
atgattattcctgcattagatttaatcgacggcactgtggtgcgtctccatcagggcgattacggcaaacaacgc

SEQ ID NO: 588343 - DNA, 75 bp, synthetic construct
  source 1..75: mol_type = other DNA
ggatgaactctcccgccacaacgaagaagatcccatttttgtacgctctggcgtcattaaccttggcccggctga

SEQ ID NO: 588344 - DNA, 75 bp, synthetic construct
  source 1..75: mol_type = other DNA
tggatgagactatggcggtggtggcggcagaccggctgatccatcacggatatatgttcgaactgaaaggtgaaa

SEQ ID NO: 588345 - DNA, 75 bp, synthetic construct
  source 1..75: mol_type = other DNA
ttgcaggaactacgtaaagccagagctcagttgaaactgaatgagctgctactgaaactggatcgctaccgggtg

SEQ ID NO: 588346 - DNA, 75 bp, synthetic construct
  source 1..75: mol_type = other DNA
tcgacggcaccgtggtgcgtctccatcagggcgattacggcaaacagcgcgattacggtaacgacccgctgccgc

SEQ ID NO: 588347 - DNA, 75 bp, synthetic construct
  source 1..75: mol_type = other DNA
tgcgcgtaaacctgaccatgatgacggtttcgcctgtactaccgcttcaatgagtgaacaaaacaaagtgctgat

SEQ ID NO: 588348 - DNA, 75 bp, synthetic construct
  source 1..75: mol_type = other DNA
ggccgcaccgctggcactttatcttgtggcgcaaggggtggctcaggctgaggatttggctgctgctggtaagca

SEQ ID NO: 588349 - DNA, 75 bp, synthetic construct
  source 1..75: mol_type = other DNA
tcagggcaattacgctaagcaacgtgattacggcaacgatcctctcccccgtttgcaggattatgcagcccaggg

SEQ ID NO: 588350 - DNA, 75 bp, synthetic construct
  source 1..75: mol_type = other DNA
gtaatagttggtcgtgcattactggaaggtaaattcaccgtgaaggaggccatctcatgctggcaaaacgcataa

SEQ ID NO: 588351 - DNA, 75 bp, synthetic construct
  source 1..75: mol_type = other DNA
tcgacggcactgtggtgcgtctccatcagggtgattacggcaaacagcgcgattacggtaacgacccgctgccgc

SEQ ID NO: 588352 - DNA, 75 bp, synthetic construct
  source 1..75: mol_type = other DNA
gattatggcccgctggccggaaatacgcgtcccggacaactacatcggcttatttgaaactgattccggtttttt

SEQ ID NO: 588353 - DNA, 75 bp, synthetic construct
  source 1..75: mol_type = other DNA
aaaccgatatccggcgtggaaggcattgtgttttcctgatgcatgttcacctgctctttgtcaccagataccgac

SEQ ID NO: 588354 - DNA, 75 bp, synthetic construct
  source 1..75: mol_type = other DNA
atgagagatctgttacaacgcccggatttattcagtatcaatactgcgacactgggctataaaacgccgctacct

SEQ ID NO: 588355 - DNA, 75 bp, synthetic construct
  source 1..75: mol_type = other DNA
ctgacgtatggcggggacgaaatgacgcctgtgaaggtgacaattaacgccgttgctgcagagactgaaaatggc

SEQ ID NO: 588356 - DNA, 75 bp, synthetic construct
  source 1..75: mol_type = other DNA
ctgagccatgaagacagccgccaggattaccgccagcgtgcaacaggcggtaatgcccccgctgacactctgaca

SEQ ID NO: 588357 - DNA, 75 bp, synthetic construct
  source 1..75: mol_type = other DNA
ttaacgaactggtgaataagctgagtcatgaagacagccgccaggactaccgccagtgtgcaacaggcggtaacg

SEQ ID NO: 588358 - DNA, 75 bp, synthetic construct
  source 1..75: mol_type = other DNA
atgattaatcgcatcgtatcgttttttatattatgtctggtgttatgcatccccctatgcgtagcgtactttcac

SEQ ID NO: 588359 - DNA, 75 bp, synthetic construct
  source 1..75: mol_type = other DNA
ctatgtgggttgagattcaggcacctgacaatgtgaaagaagaggattatgaattcctgccttctaaatccgacc

SEQ ID NO: 588360 - DNA, 75 bp, synthetic construct
  source 1..75: mol_type = other DNA
gcgcaatgtgttgccgggtatcggctgctgcctgtacggcgctgcctgcacctatgataattcgcctgacgaaga

SEQ ID NO: 588361 - DNA, 75 bp, synthetic construct
  source 1..75: mol_type = other DNA
ttaggggaaatagctgccgattttgcgcaagacaaaaaaagcgattttgatttgacgccattcaggctttcccgc

SEQ ID NO: 588362 - DNA, 75 bp, synthetic construct
  source 1..75: mol_type = other DNA
agtatgtgggtcgacattgaggctccggaaggagtgacggagaaggattatcaattcctgccgtcgaaggctgac

SEQ ID NO: 588363 - DNA, 75 bp, synthetic construct
  source 1..75: mol_type = other DNA
tgacggacaggacagtatccagatgcttgctaatggtagctcgcaaaaaacgctggcgctgtctctccgcgatgc

SEQ ID NO: 588364 - DNA, 75 bp, synthetic construct
  source 1..75: mol_type = other DNA
taaactatggaggatacgaaatggaaccggtaacaataaccattaatgctgtagaggcgaatgataaggaagcgg

SEQ ID NO: 588365 - DNA, 75 bp, synthetic construct
  source 1..75: mol_type = other DNA
gatgaccggcattggtaactggatagttagcgtactgattggatgtgcagccggtcccctgtgggcggccactca

SEQ ID NO: 588366 - DNA, 75 bp, synthetic construct
  source 1..75: mol_type = other DNA
cgttggtctgtttggtacggtctggggcatcatgaacagctttatcggtattgcgcaaacgcagaccacgaattt

SEQ ID NO: 588367 - DNA, 75 bp, synthetic construct
  source 1..75: mol_type = other DNA
ggcagttgttgcaccgggcatcgcagaagcgctgctggcaacggcaatcggtctggtggcagcaattccggcggt

SEQ ID NO: 588368 - DNA, 75 bp, synthetic construct
  source 1..75: mol_type = other DNA
gcagtgaaatatctgattgatgaaaaaatgaaaaagcgccgcgctgaagccgtcgccgaacgcgacttgccgaac

SEQ ID NO: 588369 - DNA, 75 bp, synthetic construct
  source 1..75: mol_type = other DNA
attttccacaccgactcccctttcctgctggcgatgctgccaccaggtgcatttattggcctgggactgatgctg

SEQ ID NO: 588370 - DNA, 75 bp, synthetic construct
  source 1..75: mol_type = other DNA
cttcctgctgtttttgctgttctgtgccggcttttcgttatccatttacctgccgtttatcccgtttatcttctg

SEQ ID NO: 588371 - DNA, 75 bp, synthetic construct
  source 1..75: mol_type = other DNA
tattaaccgttgctcttcaggcgctacgggaaggaaatattcatcactgcgaaactatgggattcacttatgatg

SEQ ID NO: 588372 - DNA, 75 bp, synthetic construct
  source 1..75: mol_type = other DNA
gcaacttggcgtcactggccacagcgcgctgaatatgtggtcgggaattgtcttcagtattacctttttattttc

SEQ ID NO: 588373 - DNA, 75 bp, synthetic construct
  source 1..75: mol_type = other DNA
atagctacggcttacgtccggtattctttattaccgccagtgtgctcatactctgctttttcgtcaccctgtttt

SEQ ID NO: 588374 - DNA, 75 bp, synthetic construct
  source 1..75: mol_type = other DNA
gtgggtaataatttaatgcagacggacctttccgtctgggggatgtatcagcacgccgatattgtcgttaagtgc

SEQ ID NO: 588375 - DNA, 75 bp, synthetic construct
  source 1..75: mol_type = other DNA
gttgctgcaaagtcgtgacctggatctggaagccagcgccgctgcgcatccggttcgtgtcgcacaaaaattacg

SEQ ID NO: 588376 - DNA, 75 bp, synthetic construct
  source 1..75: mol_type = other DNA
ggcatcatgaacagctttattggtatcgcgcaaacgcagaccactaacctggcagtcgttgcgccgggtatcgca

SEQ ID NO: 588377 - DNA, 75 bp, synthetic construct
  source 1..75: mol_type = other DNA
gcaggaaaatacctgattgatgaaaaaatgaaaaagcgccgcactgaagcagccgctgaacgcgagttgcaaaac

SEQ ID NO: 588378 - DNA, 75 bp, synthetic construct
  source 1..75: mol_type = other DNA
cgatgcaaaatctcttctttatagagtcttaaagccctcatttggtgtagatagagtcaatgacatagttgaaca

SEQ ID NO: 588379 - DNA, 75 bp, synthetic construct
  source 1..75: mol_type = other DNA
ctctcgcagctcattttcctctggggcgtctcagtgatgggcgttgggggagcaaacctgatagtcacacaagcc

SEQ ID NO: 588380 - DNA, 75 bp, synthetic construct
  source 1..75: mol_type = other DNA
gaatgatccgcccggcattaatggtactgggttttatgttcgcttccgttgcagttgttgccgtcggaacaattt

SEQ ID NO: 588381 - DNA, 75 bp, synthetic construct
  source 1..75: mol_type = other DNA
ttccgcgtgaaatcgagttgcgccagaaacaatacgaatactaccgtgatttactgttcagtttcccgaagcctg

SEQ ID NO: 588382 - DNA, 75 bp, synthetic construct
  source 1..75: mol_type = other DNA
tctatatttggtaaattcatagatttgacgacaagtgctatttcaacactaaatgccttacttgaggccttagcg

SEQ ID NO: 588383 - DNA, 75 bp, synthetic construct
  source 1..75: mol_type = other DNA
actacactctagcttcagttgaaacaacttacggtgcatatattgccgcacaagccataactaaaggggcagaga

SEQ ID NO: 588384 - DNA, 75 bp, synthetic construct
  source 1..75: mol_type = other DNA
aagtcgcaatatccggcatgctcccggaatgaaaaatgaacgcattaaagatttgacaaaagggaaagacgaaaa

SEQ ID NO: 588385 - DNA, 75 bp, synthetic construct
  source 1..75: mol_type = other DNA
gctcggcgagacaggtccaacagatttgtaccagggagtaatggctgcctacaggactaacctgcagaacaccac

SEQ ID NO: 588386 - DNA, 75 bp, synthetic construct
  source 1..75: mol_type = other DNA
cgacccagccaaccagcgccagcacaaggacagcagcgcgcggcatctttgagatggagttgtgcaaatatgcca

SEQ ID NO: 588387 - DNA, 75 bp, synthetic construct
  source 1..75: mol_type = other DNA
gggtaactgggttatcagtgtactgattggctgtgcagccggtccgctctgggctgcaacacatcttggcgtgga

SEQ ID NO: 588388 - DNA, 75 bp, synthetic construct
  source 1..75: mol_type = other DNA
ttctggcaacggaacactgccggatatcgagacacgaattcagaaagcagccgacgaatacgaacgtgctgtgca

SEQ ID NO: 588389 - DNA, 75 bp, synthetic construct
  source 1..75: mol_type = other DNA
cagcagacgaacaactactttcaaaaacaagcacgccacaagatgctttaatcaagcccacagagaagtttgggc

SEQ ID NO: 588390 - DNA, 75 bp, synthetic construct
  source 1..75: mol_type = other DNA
agtggcgatataaagctcaacacctataaacagaaagccaaaccagtatccttgctcagggaacgagcaggactg

SEQ ID NO: 588391 - DNA, 75 bp, synthetic construct
  source 1..75: mol_type = other DNA
cgttggtggagatataagtggatcacttttcatccgtcgttgacacagcaccgtgccgtctcgttaatccgggtg

SEQ ID NO: 588392 - DNA, 75 bp, synthetic construct
  source 1..75: mol_type = other DNA
cagcatcgtctgatgctcgcccttcttccgatgacacgcctttgtcgggtggatgttctgataccaggaaggctt

SEQ ID NO: 588393 - DNA, 75 bp, synthetic construct
  source 1..75: mol_type = other DNA
gtgaatcatgccattgaggttgatgaagccttgttggcgcaaacgctggataaactctttccgactggtgatgaa

SEQ ID NO: 588394 - DNA, 75 bp, synthetic construct
  source 1..75: mol_type = other DNA
tggatgttctgataccaggaaggcttcagacaaaaagccgggtgcagccgctgtgctctgggtcaagcgtggtga

SEQ ID NO: 588395 - DNA, 75 bp, synthetic construct
  source 1..75: mol_type = other DNA
tggatgttctgataccaggaaggcttcagacaaaaagccgggtgtagccgctgttctctggctcaagcgtggtga

SEQ ID NO: 588396 - DNA, 75 bp, synthetic construct
  source 1..75: mol_type = other DNA
actggttatcccgttttgacagccttctcgacagtgccctagcgcagcaccgtgccgtctcgttaatccgggtgg

SEQ ID NO: 588397 - DNA, 75 bp, synthetic construct
  source 1..75: mol_type = other DNA
accccgtaggaggaaccatgtgggtcgacattgaggctccggaaggggtgacagaggcggattatcagttcctgc

SEQ ID NO: 588398 - DNA, 75 bp, synthetic construct
  source 1..75: mol_type = other DNA
aatatctctgttcaggttctttttccactcgctgtcacctttaccccagtaatggcggcacgcgcgcagcatgcg

SEQ ID NO: 588399 - DNA, 75 bp, synthetic construct
  source 1..75: mol_type = other DNA
aagggcaggctattttcaccgccacgaccactgtcgcagcgaaatatacactcacggcgcaagtgagtcagacca

SEQ ID NO: 588400 - DNA, 75 bp, synthetic construct
  source 1..75: mol_type = other DNA
cgggagtttggcaaggaaaaaggcaggaaacattatcacgtgatattactgctcaacaaagatacctggtgctcg

SEQ ID NO: 588401 - DNA, 75 bp, synthetic construct
  source 1..75: mol_type = other DNA
cattatcacgtgatattactgctcaacaaagatacctggtgctcgctaggggatttcaccgttccttcttcgctg

SEQ ID NO: 588402 - DNA, 75 bp, synthetic construct
  source 1..75: mol_type = other DNA
cagcaccggtcaggcaaacctgcaggttgacaccgccgttcaaaaagtggcaaacggcaaagatgcctttacgct

SEQ ID NO: 588403 - DNA, 75 bp, synthetic construct
  source 1..75: mol_type = other DNA
tggatgttctgataccaggaaggcttcagacaaaaagccgggtggagccgctgtactctggatcaagcgtggtga

SEQ ID NO: 588404 - DNA, 75 bp, synthetic construct
  source 1..75: mol_type = other DNA
atatgctgtgatgcaagaacagtttggtctgggcgtagatgatgcgaaacatggctttactgtggatgagttagc

SEQ ID NO: 588405 - DNA, 75 bp, synthetic construct
  source 1..75: mol_type = other DNA
gaccaattttcattttcccattatgaaaatgggcacgcggtggagcagcgaaatctaccggatgtggcgtcgtta

SEQ ID NO: 588406 - DNA, 75 bp, synthetic construct
  source 1..75: mol_type = other DNA
ggagggtgatgattgggtgttgcagtttaatcatcatcagcactggcagtcgatgtaccgttttgatctctgcga

SEQ ID NO: 588407 - DNA, 75 bp, synthetic construct
  source 1..75: mol_type = other DNA
acgaaacaggtaaagatatgaacgccaagtaccgcgaaacctctcgcggcggcctggcaatgaaaatcgttgcct

SEQ ID NO: 588408 - DNA, 75 bp, synthetic construct
  source 1..75: mol_type = other DNA
aactggtgactgcgcgacgtggcggttactgttttgagcagaatggtgtgttcgagcgggtgttacgcgaactgg

SEQ ID NO: 588409 - DNA, 75 bp, synthetic construct
  source 1..75: mol_type = other DNA
cttgatgatcaatcgctggaagagaaactggtgactgcgcgacgtggcggttactgttttgagcagaatggtgtg

SEQ ID NO: 588410 - DNA, 75 bp, synthetic construct
  source 1..75: mol_type = other DNA
gtttgcagctgctgaacgaagcgcaaaacgagctggaactttctgccggtagtgatgataacgatggcataaaag

SEQ ID NO: 588411 - DNA, 75 bp, synthetic construct
  source 1..75: mol_type = other DNA
tgccactattatggataccgatttagattcagcagtgatttctcgttttttcgaatccctgaaagcaaaaattca

SEQ ID NO: 588412 - DNA, 75 bp, synthetic construct
  source 1..75: mol_type = other DNA
ttccgatgatacgcctttgtcgggtggatgttctgaaaccaggaaggcttcagacaaaaagccgggtgaagccgc

SEQ ID NO: 588413 - DNA, 75 bp, synthetic construct
  source 1..75: mol_type = other DNA
gcgcgtagtgttatctaatccgccagcattaccgccgcgtacccatcgtttgttgttggtggagctggaaggcga

SEQ ID NO: 588414 - DNA, 75 bp, synthetic construct
  source 1..75: mol_type = other DNA
gaccaattttcattttacccattatgaaaatgggcacgcggtggagcagcgaaatctaccagatgtggcgtcgtt

SEQ ID NO: 588415 - DNA, 75 bp, synthetic construct
  source 1..75: mol_type = other DNA
gcagcgccctgcatcttgagccctggctgggtaatggactggttcattttgccaggtggactccttcccgtaaac

SEQ ID NO: 588416 - DNA, 75 bp, synthetic construct
  source 1..75: mol_type = other DNA
tggtcaatgctatgaaatcggtcaccgcgacgccctgtatgttggtaaaggtgcaaaagaagttgtctttgccag

SEQ ID NO: 588417 - DNA, 75 bp, synthetic construct
  source 1..75: mol_type = other DNA
gatgttgatattccgttacagttaaaggggattcctgtagaacagttagactttgtacgtatccacgacattcaa

SEQ ID NO: 588418 - DNA, 75 bp, synthetic construct
  source 1..75: mol_type = other DNA
catttccagattcgttaccgtgctacggcaattgatccgctgcgttacttgccgcctcagggcagcaagccaaaa

SEQ ID NO: 588419 - DNA, 75 bp, synthetic construct
  source 1..75: mol_type = other DNA
ctgggggaaattccctggcttgaggaaaatccagaaagtgcgttaaccggaagatatatcactctcacttcactg

SEQ ID NO: 588420 - DNA, 75 bp, synthetic construct
  source 1..75: mol_type = other DNA
caacggcatttctccaccctataccatcgaagttggtcaaaagttgaagcttggtggggcaaaaagtaaccgcag

SEQ ID NO: 588421 - DNA, 75 bp, synthetic construct
  source 1..75: mol_type = other DNA
tacgcatatctttggtgaatatttctccagatacaaatggcacaatgctgacgttgcgtattcagggcgaatcca

SEQ ID NO: 588422 - DNA, 75 bp, synthetic construct
  source 1..75: mol_type = other DNA
gtacgccagatgaaacaaagcgtcagcacgctgaataaagagatgacgcagctcaataaagaaaccgtcaaaatc

SEQ ID NO: 588423 - DNA, 75 bp, synthetic construct
  source 1..75: mol_type = other DNA
cacccgaatgatccccgcgccgctgctgggggaaattccctggcttcaggaaaatccagaaagtgcgctaaccgg

SEQ ID NO: 588424 - DNA, 75 bp, synthetic construct
  source 1..75: mol_type = other DNA
cacccgcatgattcccgcgccgctggtgggcgaaattccctggcttgcagaaaatccagaaaatgcggcaaccgg

SEQ ID NO: 588425 - DNA, 75 bp, synthetic construct
  source 1..75: mol_type = other DNA
gcctgactgattccgcaatgaagcgcgtggtgacagccgggcaggtggcgcacgctccggtgattatcggtgttg

SEQ ID NO: 588426 - DNA, 75 bp, synthetic construct
  source 1..75: mol_type = other DNA
gccgcaaaggcagcaggctaccggacggcaggttacaaaccggtggcctctggcagcgaaaagaccccgaaaggc

SEQ ID NO: 588427 - DNA, 75 bp, synthetic construct
  source 1..75: mol_type = other DNA
gaacggataccgaagtggggaaaactgtcgccagttgcgcactattacaggctgcgcgggccgttggttaccggg

SEQ ID NO: 588428 - DNA, 75 bp, synthetic construct
  source 1..75: mol_type = other DNA
ctgggcgaaattccctggcttgcagaaaatccagaaaatgcggcaaccggaaagtacataaaccttgccttgttg

SEQ ID NO: 588429 - DNA, 75 bp, synthetic construct
  source 1..75: mol_type = other DNA
ggcgcggttcgatgaattgcggctgcgcttcgatttgccggtgcttctgaaggctcaaataaggaaaacttatgg

SEQ ID NO: 588430 - DNA, 75 bp, synthetic construct
  source 1..75: mol_type = other DNA
tactggccggttttatgcgcattctcagcccggcatttgtttcccactatgccggacgtttgctgaatatccacc

SEQ ID NO: 588431 - DNA, 75 bp, synthetic construct
  source 1..75: mol_type = other DNA
ggaatgaaaaatgttcatcccgcaatctcgtgcttcattctgataatggagagccaatgcgcagctgtacgttac

SEQ ID NO: 588432 - DNA, 75 bp, synthetic construct
  source 1..75: mol_type = other DNA
ccgtggattctggataacgggctgcactgcggcaacagtctggtgcaggcggaaaactggatcaatatcggcaac

SEQ ID NO: 588433 - DNA, 75 bp, synthetic construct
  source 1..75: mol_type = other DNA
cttccctgctgccaaaatatcccggtttgcacacccatcgtcaggcgctggaaaatggcgacgaggaacacggta

SEQ ID NO: 588434 - DNA, 75 bp, synthetic construct
  source 1..75: mol_type = other DNA
cccggcgtttgtctcccactatgccgggcgtttgctgaacattcacccttctctgctgccgaaatatcccggatt

SEQ ID NO: 588435 - DNA, 75 bp, synthetic construct
  source 1..75: mol_type = other DNA
atgaatattgtggtgcttatttccggcaacggaagtaacttgcaggcaattatagacgcctgcaaaaccaacaaa

SEQ ID NO: 588436 - DNA, 75 bp, synthetic construct
  source 1..75: mol_type = other DNA
tttctggctcattccggaaaccaagaatgtcacactggaacatatcgaacgcaaactgatggctggtgagaagtt

SEQ ID NO: 588437 - DNA, 75 bp, synthetic construct
  source 1..75: mol_type = other DNA
tatatttcctgcctgacaatgcagtggatttaatgaaatggtattttcgcgcacctgcatatattgttagctttt

SEQ ID NO: 588438 - DNA, 75 bp, synthetic construct
  source 1..75: mol_type = other DNA
aaaccggcaattgcttccgtcttcgttaacttcggggctattacaacagcactattaatgagtgcagtaataatg

SEQ ID NO: 588439 - DNA, 75 bp, synthetic construct
  source 1..75: mol_type = other DNA
atgcctacttcatcttgccctgaagcaaaatccttatcgctgtctgtctcatctgaagcctgggaaaaggtagtc

SEQ ID NO: 588440 - DNA, 75 bp, synthetic construct
  source 1..75: mol_type = other DNA
cggatcatcgtggtattcgatgaggcgtcaaacattgctgataaagtttgggaggtggccgagggtgcgctgacg

SEQ ID NO: 588441 - DNA, 75 bp, synthetic construct
  source 1..75: mol_type = other DNA
atttatatttaaaacgtatagttaacaacataaaaactaaagaaaatgactatataagttatttgccgcaattgg

SEQ ID NO: 588442 - DNA, 75 bp, synthetic construct
  source 1..75: mol_type = other DNA
tagtttattctaaacaccctttagataaaacagacagcgaatattttgttgaacagaatgaaagaataatcaatc

SEQ ID NO: 588443 - DNA, 75 bp, synthetic construct
  source 1..75: mol_type = other DNA
agctaacggtaacatttcagcaaagctaaaggaacatcttgtagaatttttcagaaaaaaaataggcaatctaaa

SEQ ID NO: 588444 - DNA, 75 bp, synthetic construct
  source 1..75: mol_type = other DNA
atggaaagggtgacaattgacaggttattagcctgcgtttatgtcgccgttttcgtgatcatcaatcttattgtt

SEQ ID NO: 588445 - DNA, 75 bp, synthetic construct
  source 1..75: mol_type = other DNA
attcatctcaaaaatggcagcggtaacggtgatcactatcatcatgcgccgctatttcacgtttgagggtagaaa

SEQ ID NO: 588446 - DNA, 75 bp, synthetic construct
  source 1..75: mol_type = other DNA
gtatttaaaatagatgtttcaaataacgatgtggctaaaaaattagcatctgagttaaagcttaacttatcggca

SEQ ID NO: 588447 - DNA, 75 bp, synthetic construct
  source 1..75: mol_type = other DNA
aaggcatatacttctatatatccagaacagctacattatcagcatataaaaataaagcattaagaggtacgcttc

SEQ ID NO: 588448 - DNA, 75 bp, synthetic construct
  source 1..75: mol_type = other DNA
catttcatgtgagtataataaagtaaaacataatggttccttattcaaactcatattatggaaagaaggttttga

SEQ ID NO: 588449 - DNA, 75 bp, synthetic construct
  source 1..75: mol_type = other DNA
tattaataataacatttcaacaaagctgaaagaacatctgactgaattttttaggagtaagctaggaaacttaaa

SEQ ID NO: 588450 - DNA, 75 bp, synthetic construct
  source 1..75: mol_type = other DNA
tatgtagtaatactacagatactttactattaagtcagtttgtcggtgatgatcccttatttaatgataagcatt

SEQ ID NO: 588451 - DNA, 75 bp, synthetic construct
  source 1..75: mol_type = other DNA
tatctgacattctgggtattaatatacctttatatatgtttagagaaacgaaacataaatgtacaaatgatataa

SEQ ID NO: 588452 - DNA, 75 bp, synthetic construct
  source 1..75: mol_type = other DNA
tgcttcatgtagtaatgaagtaaataaaaaaaataagtatttgattgaatatattactagcattaccgaaaataa

SEQ ID NO: 588453 - DNA, 75 bp, synthetic construct
  source 1..75: mol_type = other DNA
caccgggcgtttccgcgaatgcttccgcaagtacaagcaccgctggaagtgcgcgcagattgacagccgcaccgt

SEQ ID NO: 588454 - DNA, 75 bp, synthetic construct
  source 1..75: mol_type = other DNA
ctcgaaacgcataaatataccaggacagcaaagccagcagggaagggccataacggattatgacccatttgaatg

SEQ ID NO: 588455 - DNA, 75 bp, synthetic construct
  source 1..75: mol_type = other DNA
tatgccctctatgcgttcccgtggggggaagaggggactgaactggcacatgctaccggcccacgtcagtggcag

SEQ ID NO: 588456 - DNA, 75 bp, synthetic construct
  source 1..75: mol_type = other DNA
ggaagatatcaaagagcgacttgggcgttcgccggggaaaggcgatgcgctattgctgacgtttgctttcccggt

SEQ ID NO: 588457 - DNA, 75 bp, synthetic construct
  source 1..75: mol_type = other DNA
cgttcggtggcgcgtctactgacccgcagatgctcaacaagcgcggggagatgttcaactcatgcaagacatggc

SEQ ID NO: 588458 - DNA, 75 bp, synthetic construct
  source 1..75: mol_type = other DNA
tactgctgacgtttgctttcccggtgtcaaagcgcctgcgacttcccgggcagcagaaccagcaaggcaaggcca

SEQ ID NO: 588459 - DNA, 75 bp, synthetic construct
  source 1..75: mol_type = other DNA
tgggggcgtacatggcaacttgttccgttcggcggtgcgtccactgacccgcagatgcttaacaagcgtggggag

SEQ ID NO: 588460 - DNA, 75 bp, synthetic construct
  source 1..75: mol_type = other DNA
gcatccaaaataatcggcgttgaccctgcttacacaggtagtgatgaggcatcaatttaccttcgccagggtctt

SEQ ID NO: 588461 - DNA, 75 bp, synthetic construct
  source 1..75: mol_type = other DNA
caaaagtgggtggacgactacggcgaagacagcgacttcgtgaaggttcgcgtgcgcgggatcttccctgatgcg

SEQ ID NO: 588462 - DNA, 75 bp, synthetic construct
  source 1..75: mol_type = other DNA
aggatagcgacttcgtgaaagtccgtgtacgcgggatcttccctgatgcgtctgaaaaccagttcatcccatccg

SEQ ID NO: 588463 - DNA, 75 bp, synthetic construct
  source 1..75: mol_type = other DNA
attgcaggatatagtcactggtgggctaagtattgacgcgattctcgatgtgctggataccaccggcgaagaaga

SEQ ID NO: 588464 - DNA, 75 bp, synthetic construct
  source 1..75: mol_type = other DNA
tacaaaaaatacaggcgcacggggttaccgatagcacaatttacgcgactgcaggaacacagattatcttcaccg

SEQ ID NO: 588465 - DNA, 75 bp, synthetic construct
  source 1..75: mol_type = other DNA
ctgcgcagattgacagccggacggtggaaggcactaacaaacagcagttgcagaaatgggttgatgactacgggg

SEQ ID NO: 588466 - DNA, 75 bp, synthetic construct
  source 1..75: mol_type = other DNA
ttttgccgaagctgaaggtctactgggttcaaatgagaatgttgatgccacgttgctggaaaagatgccgaaact

SEQ ID NO: 588467 - DNA, 75 bp, synthetic construct
  source 1..75: mol_type = other DNA
ggctggatgtcttcgaacaagagccactgtccgtagattcgccgttgctctcaatggccaacgtcgtcgcagtac

SEQ ID NO: 588468 - DNA, 75 bp, synthetic construct
  source 1..75: mol_type = other DNA
ggttcaaacgagaatgttgatgccgcattgctggaaaaaatgccgaaactgcgtgccacatcaacgatctccgtc

SEQ ID NO: 588469 - DNA, 75 bp, synthetic construct
  source 1..75: mol_type = other DNA
agctgcgcgaaggggtgcataagttcagccacggcaccaccggttccccggacaccattcgcgggatgtcggtcg

SEQ ID NO: 588470 - DNA, 75 bp, synthetic construct
  source 1..75: mol_type = other DNA
ctggggcaataagcatatcaatgattatattggtaaataccgcgataccatcaagtacattcacgaccagaccct

SEQ ID NO: 588471 - DNA, 75 bp, synthetic construct
  source 1..75: mol_type = other DNA
atgccgaaactgcgtgccacatcaacgatctccgtcggctatgacaattttgatgtcgatgcgcttaccgcccga

SEQ ID NO: 588472 - DNA, 75 bp, synthetic construct
  source 1..75: mol_type = other DNA
tggtggggaatgaacagtgtgatccgcaatttgccttattacagccttggcgcatggtttggcgcaacattaatg

SEQ ID NO: 588473 - DNA, 75 bp, synthetic construct
  source 1..75: mol_type = other DNA
tttgctgaccgttctggcggtcggtgcctggttgtttactatctcgctgctgttgtcgctggtatcgattgtggt

SEQ ID NO: 588474 - DNA, 75 bp, synthetic construct
  source 1..75: mol_type = other DNA
tatgccgattccaccggtgagttcctgcacgggatgatcaccgccagcaccagcttgtggtatctgtatgcgtta

SEQ ID NO: 588475 - DNA, 75 bp, synthetic construct
  source 1..75: mol_type = other DNA
ttatggcaccacgctcatccctgccctcactgaagttaaccgtgctgcagtcagaaagaattatcaatctgcttc

SEQ ID NO: 588476 - DNA, 75 bp, synthetic construct
  source 1..75: mol_type = other DNA
aacaccattgctatctacaccacccatcgcattctggtagagatattcagcttaactctgcttgcgccaatgaac

SEQ ID NO: 588477 - DNA, 75 bp, synthetic construct
  source 1..75: mol_type = other DNA
ctttgtcagtttgttcatctgtactgttgcgggcttgctggtaagaaaactttcacagcgcgcattcagcgatct

SEQ ID NO: 588478 - DNA, 75 bp, synthetic construct
  source 1..75: mol_type = other DNA
gtcgcggcggagtttcgttgccgaggtgacgatctgctgggtatttatgccgatgctattcgtgaacaggttcag

SEQ ID NO: 588479 - DNA, 75 bp, synthetic construct
  source 1..75: mol_type = other DNA
atgagcgtcaccctgaactgatgttccgtcacccggaaaacgagtacgactggctgagctcagacgccgctgtgg

SEQ ID NO: 588480 - DNA, 75 bp, synthetic construct
  source 1..75: mol_type = other DNA
aggcagcttagccctaacaggatgtgacgacaaacaggcccaacaaggtggccagcagatgcccgccgttggcgt

SEQ ID NO: 588481 - DNA, 75 bp, synthetic construct
  source 1..75: mol_type = other DNA
cttaataccctctctggtcaggtcataactgaaaccagggcccgaacagaaggtgatgcagcagcgctggctgca

SEQ ID NO: 588482 - DNA, 75 bp, synthetic construct
  source 1..75: mol_type = other DNA
aacgagtacgactggctgagctcagacgccgctgtggatgaggccctgctcataaacgaatacacctttaccgaa

SEQ ID NO: 588483 - DNA, 75 bp, synthetic construct
  source 1..75: mol_type = other DNA
tggaaaacgagtacgactggctgacctcagacgccgctgtagatgaggccattcacatcaatgcatataccttca

SEQ ID NO: 588484 - DNA, 75 bp, synthetic construct
  source 1..75: mol_type = other DNA
tgtccggctgatgagcgtcaccctgaactgatgttccgtcacccggaaaacgagtacgaccagatggactcagac

SEQ ID NO: 588485 - DNA, 75 bp, synthetic construct
  source 1..75: mol_type = other DNA
tcgttaccaggggctacgtcatgattctggcgatccgctggaatggggcgaaaaagctatcgctcattatgagaa

SEQ ID NO: 588486 - DNA, 75 bp, synthetic construct
  source 1..75: mol_type = other DNA
atgatgtttattgtactaaacgctcctgtacgaggacgctactgcgcacctatgacacaattcgcttctcctgtt

SEQ ID NO: 588487 - DNA, 75 bp, synthetic construct
  source 1..75: mol_type = other DNA
ctggttttctctgacaatctggatttacgcaaagcggttgagctataccgccacttctcttcccgcgtgcaatta

SEQ ID NO: 588488 - DNA, 75 bp, synthetic construct
  source 1..75: mol_type = other DNA
agtgctggggttctggcgcatggccggtgaatatgattatctgatgcgtgttcaggttgccgatatgaaacgcta

SEQ ID NO: 588489 - DNA, 75 bp, synthetic construct
  source 1..75: mol_type = other DNA
tgtgttgattaaaacgcaacatcacagcagcgaatggtattgccgctttgtcacggtggtaacggaaatgccaga

SEQ ID NO: 588490 - DNA, 75 bp, synthetic construct
  source 1..75: mol_type = other DNA
aatagtgttccgggactgtcggatgtcacttccagtttcgcgatggaacagattaaatacaccacctcgttaccc

SEQ ID NO: 588491 - DNA, 75 bp, synthetic construct
  source 1..75: mol_type = other DNA
tccatatttcccctgacgaatcagcaacacttgtcctttatttttcagacaataaccttgaatccttcgtctttg

SEQ ID NO: 588492 - DNA, 75 bp, synthetic construct
  source 1..75: mol_type = other DNA
gctaaggaaaaagatccggaggaaatggaaggcgctgaacatccgcacaatgagaatgctggcagcgatccgcat

SEQ ID NO: 588493 - DNA, 75 bp, synthetic construct
  source 1..75: mol_type = other DNA
ctctgaaagcaggccagacctttactttcaccactgacaaatctgttatcggcaacagcgaaatggttgcggtaa

SEQ ID NO: 588494 - DNA, 75 bp, synthetic construct
  source 1..75: mol_type = other DNA
gaaatcccggtagaagaagttatcttcgcccagaagatgatgatcgaaaaatgtatccgtgcacgtaaagtcgtt

SEQ ID NO: 588495 - DNA, 75 bp, synthetic construct
  source 1..75: mol_type = other DNA
agttttccctaatcctggtaattcaaacctgggactgataactgcttttttcgaagcatacctgaacgctgacta

SEQ ID NO: 588496 - DNA, 75 bp, synthetic construct
  source 1..75: mol_type = other DNA
ggatctgctggcgcagtacgagcagcacggcttgcagttaaacagccgcgaattgcccgaccatctgccgctgta

SEQ ID NO: 588497 - DNA, 75 bp, synthetic construct
  source 1..75: mol_type = other DNA
ggctgaagaactaccagctgttactgccctagctgtttcccacaaaaccagcctgctcgacccgctggaaattcg

SEQ ID NO: 588498 - DNA, 75 bp, synthetic construct
  source 1..75: mol_type = other DNA
cgctgaagagcaatctgctgattaatatcggctatggcgatagcagcaaactttttgcgcgcctgccacgtctgt

SEQ ID NO: 588499 - DNA, 75 bp, synthetic construct
  source 1..75: mol_type = other DNA
gtgtactgaaatcagccaaccagttgaagaaacgatcccgtgaatgtcagtataaacggcctgatgtactcaggg

SEQ ID NO: 588500 - DNA, 75 bp, synthetic construct
  source 1..75: mol_type = other DNA
gatggggttgcacataacgcactggctgatgcccgccaccaggcgaaatatgtttcagcgatttggcagaaacta

SEQ ID NO: 588501 - DNA, 75 bp, synthetic construct
  source 1..75: mol_type = other DNA
gcccgactcgcgcagaagccggtgacgttgcaaacgccatcctcgacggtactgacgcagtgatgctgtctggtg

SEQ ID NO: 588502 - DNA, 75 bp, synthetic construct
  source 1..75: mol_type = other DNA
gtaccgaccgcgtgatgaacagccgtctcgagttcaacaatgacaaccgtaaactgcgtcaggatcagtttgcct

SEQ ID NO: 588503 - DNA, 75 bp, synthetic construct
  source 1..75: mol_type = other DNA
tggtactgagcaaaggcgttgtgccgcagctggttaaagagatcacttctactgatgatttctaccgtctgggta

SEQ ID NO: 588504 - DNA, 75 bp, synthetic construct
  source 1..75: mol_type = other DNA
tgaacctgacgtcgtcctgtgggcaagtgacgattttgaatcgacctgtgtcactctggactacctgatcgttaa

SEQ ID NO: 588505 - DNA, 75 bp, synthetic construct
  source 1..75: mol_type = other DNA
cgctatcgacagcgacaaagtggcggaaaaaattgccgatgaagcgcgcgatgatacgccgcaggcgctggatgc

SEQ ID NO: 588506 - DNA, 75 bp, synthetic construct
  source 1..75: mol_type = other DNA
aaaagcgaagcggtaggaggcttgcaggacattgcgccgattctggcgttgctgagtgctcgtctgcaacagcgt

SEQ ID NO: 588507 - DNA, 75 bp, synthetic construct
  source 1..75: mol_type = other DNA
agcttgccggattatgtactggaagaccttctacgtacggcctcagagcataaagctcgtgtagttttcaatggt

SEQ ID NO: 588508 - DNA, 75 bp, synthetic construct
  source 1..75: mol_type = other DNA
aaacagacttattcaacctgataaaaattaaaatttttgaagccaggcataattatgtcgctcaattgatgagcg

SEQ ID NO: 588509 - DNA, 75 bp, synthetic construct
  source 1..75: mol_type = other DNA
tttgaatataacgttgacacctctgacagaataaccgtttctgcttataatgaaaaaaacctggctgctatggcc

SEQ ID NO: 588510 - DNA, 75 bp, synthetic construct
  source 1..75: mol_type = other DNA
gctgggcattttcctgcgcgatttaacagcgctggatccgctggatgctcaggcccagtacagcgaactgttcga

SEQ ID NO: 588511 - DNA, 75 bp, synthetic construct
  source 1..75: mol_type = other DNA
catttaaccagtaccagatcacgcaggtcccgacaataatctcccgtgagcaatcccggtttgcaaaaatggtcg

SEQ ID NO: 588512 - DNA, 75 bp, synthetic construct
  source 1..75: mol_type = other DNA
gatatcatctcgatgtttaccagcacgttaacaacgctcgctaccttgagtttctcgaagaagcccgctgggatg

SEQ ID NO: 588513 - DNA, 75 bp, synthetic construct
  source 1..75: mol_type = other DNA
aacattcgatgacgagaatcaggttgaagttcgggaaaatgagccggagaaaatggaaggcgctgaacatccaca

SEQ ID NO: 588514 - DNA, 75 bp, synthetic construct
  source 1..75: mol_type = other DNA
ctaaaaatatcgaaaaattgtttggttcctcgggcatcacagctgctgacttcgaaagaaaaatggatagcacac

SEQ ID NO: 588515 - DNA, 75 bp, synthetic construct
  source 1..75: mol_type = other DNA
tcgctcgacgatatcgacagtatgcctttccgccccagctggatttacccgtcagtcgctgaaatcgacgttatc

SEQ ID NO: 588516 - DNA, 75 bp, synthetic construct
  source 1..75: mol_type = other DNA
cagcattaaacaaaatgcaggcgcattcggaagaaacggtgattgtcggcgataacctgcgtaccgatattctgg

SEQ ID NO: 588517 - DNA, 75 bp, synthetic construct
  source 1..75: mol_type = other DNA
acaaatctgcatacccgaaacttgcagccgcttatccgtcaggcgtgatccctgatatgcgtggctggacgatta

SEQ ID NO: 588518 - DNA, 75 bp, synthetic construct
  source 1..75: mol_type = other DNA
cgccctgcgggaagggccgtttggcgtagccgggctgaatgagcgaattgagcagtttatgcaacagaagcgaaa

SEQ ID NO: 588519 - DNA, 75 bp, synthetic construct
  source 1..75: mol_type = other DNA
gccaggcagctaagccgcctgacggggactcacgttccggcaggaaccggcacagaagcggcatctttgcgcgac

SEQ ID NO: 588520 - DNA, 75 bp, synthetic construct
  source 1..75: mol_type = other DNA
aggaaattccgcgaaggcggcaaaaacgtccgagacgaacgccaggtcttctgaaacggcagcggaacagagtgc

SEQ ID NO: 588521 - DNA, 75 bp, synthetic construct
  source 1..75: mol_type = other DNA
ggtgttccgcgaagtgataaaggtgctacgactactagttcatcaggcaatcatgcacatacagtcgacattgga

SEQ ID NO: 588522 - DNA, 75 bp, synthetic construct
  source 1..75: mol_type = other DNA
gccaaaagcagcgggacattcggcagttacgaacaccttggcgtcggtttgctggttctgattgtcgttatcggc

SEQ ID NO: 588523 - DNA, 75 bp, synthetic construct
  source 1..75: mol_type = other DNA
ggcgggaaggccaggatgccgctcgtgacctacaaggtgtgggcggcgagcctcctgccgtgaccgcgccgctgg

SEQ ID NO: 588524 - DNA, 75 bp, synthetic construct
  source 1..75: mol_type = other DNA
atgtggggcttgcgcgtgggtttgcccgagcaatattcccctggtgcaatatttccgtcaggaaaaagctgaaat

SEQ ID NO: 588525 - DNA, 75 bp, synthetic construct
  source 1..75: mol_type = other DNA
gggcggccttacagctttccgctgaaacaactgcctatcttgtttctatggcgatgatcgcctctggtattggta

SEQ ID NO: 588526 - DNA, 75 bp, synthetic construct
  source 1..75: mol_type = other DNA
gatatcaccgccacggcaatggtttcccgccgccccatccagggagaagagtatcagtcgcgtctgaaaggcggc

SEQ ID NO: 588527 - DNA, 75 bp, synthetic construct
  source 1..75: mol_type = other DNA
gcgtctcctacgatcccgaaatttttaaaatattgccagcctctatttatgtactagggaaggtgcgaataagcg

SEQ ID NO: 588528 - DNA, 75 bp, synthetic construct
  source 1..75: mol_type = other DNA
ctggctgcaccaacgggtaaagctgccgcgcgcttaaccgaatctctcggcaaggctttgcgacagttaccgctg

SEQ ID NO: 588529 - DNA, 75 bp, synthetic construct
  source 1..75: mol_type = other DNA
cataaagacattcttccatatatttttactgacaatacccctcccaagagaaatgattatgctggattattaaga

SEQ ID NO: 588530 - DNA, 75 bp, synthetic construct
  source 1..75: mol_type = other DNA
gaaaaagttattagcgacgaggtatacttttctataaacaatctttctgacattttagataaaaagcttgagaaa

SEQ ID NO: 588531 - DNA, 75 bp, synthetic construct
  source 1..75: mol_type = other DNA
ggacagatcgggtcgcctatcctgacccaagactaagaggaaaaaaaatcaacctgacttattcaatcaaaggta

SEQ ID NO: 588532 - DNA, 75 bp, synthetic construct
  source 1..75: mol_type = other DNA
tcttaagtgcggtaattagtcttaatgaaagtagactgcgttcaactgagccggcagttccagcaatacaagcta

SEQ ID NO: 588533 - DNA, 75 bp, synthetic construct
  source 1..75: mol_type = other DNA
aaaaatgaatgttaacggttggagtgctattgatatggatatttatcaatcaaaattcaaatttaatccacttga

SEQ ID NO: 588534 - DNA, 75 bp, synthetic construct
  source 1..75: mol_type = other DNA
cataaagatattcttccatatgtttttacttacaacactcctcccaagaaagatgattatgctggattagcaagg

SEQ ID NO: 588535 - DNA, 75 bp, synthetic construct
  source 1..75: mol_type = other DNA
aaaattcacggcgagattcacggaggatgaggctgaaatcgtcagagaaaaagcggagtcaagtggacagacggt

SEQ ID NO: 588536 - DNA, 75 bp, synthetic construct
  source 1..75: mol_type = other DNA
ttgaaaaagtattagaaaaactatctcccccagacttgggggttttgaaaccgggtgaaccagttagaattcctg

SEQ ID NO: 588537 - DNA, 75 bp, synthetic construct
  source 1..75: mol_type = other DNA
gatatttaagtgagtctgtatcaaaaaaatccactgattttgcttatgcagctggtgttattattaatccgtggg

SEQ ID NO: 588538 - DNA, 75 bp, synthetic construct
  source 1..75: mol_type = other DNA
catcgaaaaacggcttttgcagaacggcgaagactatattgcgatgcttgaggaagctcttgcgggttacggacg

SEQ ID NO: 588539 - DNA, 75 bp, synthetic construct
  source 1..75: mol_type = other DNA
gcagggttttgcccgtggcgaaagcaatatccttctggaacggctgtatatcgaacgttcgctgagtgtgaatac

SEQ ID NO: 588540 - DNA, 75 bp, synthetic construct
  source 1..75: mol_type = other DNA
agggtgaaaccgtaggcgcacaactgacaggtgatgaacgtgtacgcgcggtgatgtttaccggttcaaccgaag

SEQ ID NO: 588541 - DNA, 75 bp, synthetic construct
  source 1..75: mol_type = other DNA
ccgcgactgaaatcattaaccttgctggcgcgtcagtacgatattggcattaacatcgacgccgaagaggccgat

SEQ ID NO: 588542 - DNA, 75 bp, synthetic construct
  source 1..75: mol_type = other DNA
tatggtttcctatcagcaggcgattcacgccattggtaaagcgtctaacggtcgtggcatctatgaaggtccggg

SEQ ID NO: 588543 - DNA, 75 bp, synthetic construct
  source 1..75: mol_type = other DNA
ggcgttagccaatgcccgtaagctggaagagaaaggtttccgttactcatacgatatgctgggcgaagccgcgct

SEQ ID NO: 588544 - DNA, 75 bp, synthetic construct
  source 1..75: mol_type = other DNA
tggtcgcgcaggcatggttcagggactattgcaggagttttcgctgtcatcacaggaaggtgtagcgctgatgtg

SEQ ID NO: 588545 - DNA, 75 bp, synthetic construct
  source 1..75: mol_type = other DNA
catcgtaagttggcagagttgggagccacgaaggggattggtagtttgtgggttgttgagcgtccgtcaggaagt

SEQ ID NO: 588546 - DNA, 75 bp, synthetic construct
  source 1..75: mol_type = other DNA
tgctgacctggtaataacgatcaacaaaaccgaagaagaagaagcgaaaggagaggctcgtctctactttgctgg

SEQ ID NO: 588547 - DNA, 75 bp, synthetic construct
  source 1..75: mol_type = other DNA
aactggcgcgcaatgttgggggttcttgctttaccagcagttctgctgattattctggtggtcttcctgccaaat

SEQ ID NO: 588548 - DNA, 75 bp, synthetic construct
  source 1..75: mol_type = other DNA
cgaaagcaatatccttctggaacggctgtatatcgaacgttcgctgagtgtgaataccgctgccgctggcggtaa

SEQ ID NO: 588549 - DNA, 75 bp, synthetic construct
  source 1..75: mol_type = other DNA
taactggcagtcacacattggtcgtagcccgtcactgtttgttaatgccgccacctgggggctgctgtttactgg

SEQ ID NO: 588550 - DNA, 75 bp, synthetic construct
  source 1..75: mol_type = other DNA
tgctgctggaacaagcccgcctgccgcagccagttgctgaacaggcgcacaaactggcgtatcaactggccgata

SEQ ID NO: 588551 - DNA, 75 bp, synthetic construct
  source 1..75: mol_type = other DNA
tattaagtctgccgcgacacgtatcgatcgcacaccgcactggttaattaagcaggcgattttttcttatcttga

SEQ ID NO: 588552 - DNA, 75 bp, synthetic construct
  source 1..75: mol_type = other DNA
ttggtgaaggcggtcataccatgcgcaaattacctgtctggatgaatcagagccttgaggccagtggtgaatggc

SEQ ID NO: 588553 - DNA, 75 bp, synthetic construct
  source 1..75: mol_type = other DNA
tggcaaagggagggattcagctccccgtactggatcctgagagcgcgattttgatagcacttgaaagagctgtgt

SEQ ID NO: 588554 - DNA, 75 bp, synthetic construct
  source 1..75: mol_type = other DNA
actttttagctctccgggactggaaggacacaggaatgggctggatgcatctcctgttttttatacagttgacgt

SEQ ID NO: 588555 - DNA, 75 bp, synthetic construct
  source 1..75: mol_type = other DNA
aaccggagctgatgtgggctgggttttcgatttagaaggcgaagaaggcttccgcgatcgcgaagaaaaggtcat

SEQ ID NO: 588556 - DNA, 75 bp, synthetic construct
  source 1..75: mol_type = other DNA
ctcaaaaaacgttaaatggagtgaggaagttagttgaagaaagaagaagtgagggggcttcagcagcagaagcaa

SEQ ID NO: 588557 - DNA, 75 bp, synthetic construct
  source 1..75: mol_type = other DNA
cacagacccgtcagttctaccgattacttgatctccttcgtgaacgttttccacatgttgagtttgaatcctgtg

SEQ ID NO: 588558 - DNA, 75 bp, synthetic construct
  source 1..75: mol_type = other DNA
atgacgactgataaagagacaaatgaagctttcgctaatgctgatacattttataaatctgataaaatatttgat

SEQ ID NO: 588559 - DNA, 75 bp, synthetic construct
  source 1..75: mol_type = other DNA
agagcgatcttgaatcgttagcgactcgattatcttcaagtgctttttcggtttctcctgaggatatatcctgta

SEQ ID NO: 588560 - DNA, 75 bp, synthetic construct
  source 1..75: mol_type = other DNA
tatgtacgcaatatggcgagctggcacaggcaggaacacagcgattactgccaggaccgacgggtgaacgtaata

SEQ ID NO: 588561 - DNA, 75 bp, synthetic construct
  source 1..75: mol_type = other DNA
gactggatattgtcaatgccaggatattctcagccaaccggaagatatcagtatgttcttaacctgaatattccg

SEQ ID NO: 588562 - DNA, 75 bp, synthetic construct
  source 1..75: mol_type = other DNA
aaccatcagatataatgaaagatgaaatcgctttgttaaagaaatgtattgaagaggaagttagtacgcttaaac

SEQ ID NO: 588563 - DNA, 75 bp, synthetic construct
  source 1..75: mol_type = other DNA
atgccacactttgcgtcttatttctccgacgtaaagttgtttacgcagcaaacgcggagtatgtcatctgggtta

SEQ ID NO: 588564 - DNA, 75 bp, synthetic construct
  source 1..75: mol_type = other DNA
gatcgtactggtgaggttactcagattagtgataagacagatccgggttgggtggacgattcgagaattcaatgg

SEQ ID NO: 588565 - DNA, 75 bp, synthetic construct
  source 1..75: mol_type = other DNA
ggtcatggtaatggcggggggaatggtaattccggtggtggttcgggaacaggcggtaatctgtcagcagtagct

SEQ ID NO: 588566 - DNA, 75 bp, synthetic construct
  source 1..75: mol_type = other DNA
agatttatgaatgggactcccagcacggtgaacttgaagggtatcgtgccagtgatggcgaacacctcggggcat

SEQ ID NO: 588567 - DNA, 75 bp, synthetic construct
  source 1..75: mol_type = other DNA
gccggataacggggaagcccgcatcaccctgaagacggcactgatggttgacggaaagagagtggcactcagtgc
